United States Patent Application Publication US 2005/0228172 A9 - sequence listing, part 137

SEQ ID NO: 646303 - DNA, 572 bp, Homo sapiens
aaattgtaatccccagtgttggaagaggggcctagtgggaggtgattggatcatgggggcagatttcccccttgccgtttctcgtgatrgtgagttctcatgagatctgattgtttaaaagcatgcagcacctcccccttctctcttttccttctactctgaccacggaagatgtgcctgcttcctccttgccttccgccatgattgtaagtttcctgaggacttcccagccatgcctcctgtaaggcctgcagaaccacgagccaatgacacctcttttctttataaattacccagtcttgggtagttctttatagcaatgcaagaacagactaatacaatatttttgctgggtagagaaatctaggttaacagtttttttctttcgttacattaaagatgttgcctactgttgatcttatccactgaattttacatcgcagatattgagttctagaattcaagttaggacctttatgcacttcgtgtctttatgttttgaacaactgggatacagttcaatagctagcttcatgtccttgtcttctcattagaatattggcatcagtttt

SEQ ID NO: 646304 - DNA, 572 bp, Homo sapiens
aaattgtaatccccagtgttggaagaggggcctagtgggaggtgattggatcatgggggcagatttcccccttgccgtttctcgtgatagtgagttctcatgagatctgattgtttaaaagcatgcagcacctcccccttctctcttttccttctactctgaccacggaagatgtgcctgcttcctccttgccttccrccatgattgtaagtttcctgaggacttcccagccatgcctcctgtaaggcctgcagaaccacgagccaatgacacctcttttctttataaattacccagtcttgggtagttctttatagcaatgcaagaacagactaatacaatatttttgctgggtagagaaatctaggttaacagtttttttctttcgttacattaaagatgttgcctactgttgatcttatccactgaattttacatcgcagatattgagttctagaattcaagttaggacctttatgcacttcgtgtctttatgttttgaacaactgggatacagttcaatagctagcttcatgtccttgtcttctcattagaatattggcatcagtttt

SEQ ID NO: 646305 - DNA, 619 bp, Homo sapiens
gggaactgcttaaataaaatatcctatgcacatataatgaaatattatacagctataaaaaagaatgagaaagcattttatatatttaaatgaaaagatttcttgagtccatatttaaatttamacacacacacaagtaaggtgcataactgggtgcagagaatgctatatcctatgaaataataataggaaaaaaatatataggcacatatatattattttaactgcttatataataattaataaagaaagcccctgtggaagtctaaataagaaattaataatgtctactcatagagcaatgaggatgattgattgatatggggaaaggggtagttaggagtgttttcactgtctttgtggattatagttttttactcatatgcatgtattacctatttaaaaagtaagtaagtaacaacatctaaattaaaataaaaacaaagtactgcagtccagtcaatacttttttgtaacataactgcgtgctttattgagatacacagtaaagcagtactataatacaatagtaaggcatatatttggtgaagtctgatatgttgtgaaaatgcagtaaaactgaagtttaaaaaaataattcgtaaatgttacagtgttg

SEQ ID NO: 646306 - DNA, 619 bp, Homo sapiens
gggaactgcttaaataaaatatcctatgcacatataatgaaatattatacagctataaaaaagaatgagaaagcattttatatatttaaatgaaaagatttcttgagtccatatttaaatttacacacacacacaagtaaggtgcataactgggtgcagagaatgctatatcctatgaaataataataggaaaaaaatatataggmacatatatattattttaactgcttatataataattaataaagaaagcccctgtggaagtctaaataagaaattaataatgtctactcatagagcaatgaggatgattgattgatatggggaaaggggtagttaggagtgttttcactgtctttgtggattatagttttttactcatatgcatgtattacctatttaaaaagtaagtaagtaacaacatctaaattaaaataaaaacaaagtactgcagtccagtcaatacttttttgtaacataactgcgtgctttattgagatacacagtaaagcagtactataatacaatagtaaggcatatatttggtgaagtctgatatgttgtgaaaatgcagtaaaactgaagtttaaaaaaataattcgtaaatgttacagtgttg

SEQ ID NO: 646307 - DNA, 619 bp, Homo sapiens
gggaactgcttaaataaaatatcctatgcacatataatgaaatattatacagctataaaaaagaatgagaaagcattttatatatttaaatgaaaagatttcttgagtccatatttaaatttacacacacacacaagtaaggtgcataactgggtgcagagaatgctatatcctatgaaataataataggaaaaaaatatataggcacatatatattattttaactgcttatataataattaataaagaaagcccctgtggaagtctaaataagaaattaataatgtctactcatagagcaatgaggatgattgattgatatggggraaggggtagttaggagtgttttcactgtctttgtggattatagttttttactcatatgcatgtattacctatttaaaaagtaagtaagtaacaacatctaaattaaaataaaaacaaagtactgcagtccagtcaatacttttttgtaacataactgcgtgctttattgagatacacagtaaagcagtactataatacaatagtaaggcatatatttggtgaagtctgatatgttgtgaaaatgcagtaaaactgaagtttaaaaaaataattcgtaaatgttacagtgttg

SEQ ID NO: 646308 - DNA, 619 bp, Homo sapiens
gggaactgcttaaataaaatatcctatgcacatataatgaaatattatacagctataaaaaagaatgagaaagcattttatatatttaaatgaaaagatttcttgagtccatatttaaatttacacacacacacaagtaaggtgcataactgggtgcagagaatgctatatcctatgaaataataataggaaaaaaatatataggcacatatatattattttaactgcttatataataattaataaagaaagcccctgtggaagtctaaataagaaattaataatgtctactcatagagcaatgaggatgattgattgatatggggaaaggggtagttaggagtgttttcactgtctttstggattatagttttttactcatatgcatgtattacctatttaaaaagtaagtaagtaacaacatctaaattaaaataaaaacaaagtactgcagtccagtcaatacttttttgtaacataactgcgtgctttattgagatacacagtaaagcagtactataatacaatagtaaggcatatatttggtgaagtctgatatgttgtgaaaatgcagtaaaactgaagtttaaaaaaataattcgtaaatgttacagtgttg

SEQ ID NO: 646309 - DNA, 569 bp, Homo sapiens
cagtcaccaatggagattctgaaatctgaaaaagctatcaaaatattatgaaataccaaatgtggtcacagtagcctgaggtaaacacactaagaatatrtcaccaatgtttgagtgtccataccccatctaagttgcactgaaaaaagggactaattggagaaaactaaatacagggcacctcctaccagtctcagaatggccctataggtggtacacagaggccacaggcagccgagacccaggccacatttccataccttcacatgaaggaggctgtacccaaggaagtgttgccctcaactcctccctgcttggtaagaacatttccactaaacgtttctgtaccacagctgaaactgctgaaagagctttgttctatgagtctacttaactgacggtaggatcacaatttatgactccagactaaaaatgacaaaatgtgatcatggaatattgactataagccccctgagagcactgggtggacaagcagagaacttgagcctttctgggcttagaaactcttgacaagaaggtgctctcttcttttgagatggctgggctat

SEQ ID NO: 646310 - DNA, 603 bp, Homo sapiens
tcttttttggttccatatgaattttaagattcttccaaaagaatatgatatcatgtcatttgcagcaacgtggatgctgcatggaactgaaggtcattatcttaagkgaaataagccaggtacaaaaagacaaatactacatgttctcacttatatgtgggagctaacacatttgatcatatgaaggtaagagagtggaaagataggtaacagagactgggaagggtgggagtgggaaaatgaagggaactgggttaaaggccacaaacatacagtatgacagaaggaataaattcaatgtttgatagcagagtagggtgactatacttaacaaaatatgttgtatttgagtgatggacacatcaaatacactgacttgatcactacacatttatatacatgtaacaaaatgtctcatttatcctgtaaatttataagaacaaaaaagaaaaaggaaaagccttataaaaagcatacatatcttatttcttaattttattgtttcttaattttcatgtttactaaggacagaataaaaaattatagctaaagcaattctagctcttagacaactttttaattctaagtgttttgaaatgagaa

SEQ ID NO: 646311 - DNA, 603 bp, Homo sapiens
tcttttttggttccatatgaattttaagattcttccaaaagaatatgatatcatgtcatttgcagcaacgtggatgctgcatggaactgaaggtcattatcttaagggaaataagccaggtacaaaaagacaaatactacrtgttctcacttatatgtgggagctaacacatttgatcatatgaaggtaagagagtggaaagataggtaacagagactgggaagggtgggagtgggaaaatgaagggaactgggttaaaggccacaaacatacagtatgacagaaggaataaattcaatgtttgatagcagagtagggtgactatacttaacaaaatatgttgtatttgagtgatggacacatcaaatacactgacttgatcactacacatttatatacatgtaacaaaatgtctcatttatcctgtaaatttataagaacaaaaaagaaaaaggaaaagccttataaaaagcatacatatcttatttcttaattttattgtttcttaattttcatgtttactaaggacagaataaaaaattatagctaaagcaattctagctcttagacaactttttaattctaagtgttttgaaatgagaa

SEQ ID NO: 646312 - DNA, 603 bp, Homo sapiens
tcttttttggttccatatgaattttaagattcttccaaaagaatatgatatcatgtcatttgcagcaacgtggatgctgcatggaactgaaggtcattatcttaagggaaataagccaggtacaaaaagacaaatactacatgttctcacttatatgtgggagctaacacatttgatcatatgaaggtaagagagtggaaagataggtaacagagactgggaagggtgggagtgggaaaatgaagggaactgggttaaaggccacaaacatacagtatgacagaaggaataaattcaatgtttgatagcagagtagggtgactatacttaacaaaatatgttgtatttgagtgatggacacatcaaatacactgacttgatcactacacatttatatacatgtaacaaaatgtctcatttatcctgtaaatttataagaacaaaaaagaaaaaggaaaagccttataaaaagcatacatatcttatttcttaattttmttgtttcttaattttcatgtttactaaggacagaataaaaaattatagctaaagcaattctagctcttagacaactttttaattctaagtgttttgaaatgagaa

SEQ ID NO: 646313 - DNA, 296 bp, Homo sapiens
cccccgccgggcttgcgttccagcgaccagaacacagaccaacaagtaaacaaataagacaaaggcagaaaaagatgagtgtgaaggagctaaccagccaggaagacgagaatagasagggcagaggggaggtgggaaagggacttcggggacaggaccccggacgccggcacacagccgagacccgatccgcgagggcagggctggcaccgcggtccccggcctggaaacgcgcccccgccgggagctccgcggaccccgctgcgcatccctgcggatcctgctcccatcctgct

SEQ ID NO: 646314 - DNA, 598 bp, Homo sapiens
ttgtttgctgttactgacagaacctgtgggttcaagagtgtaatgcagcagatattaagtatcagtcacttatgtttttgtaatgctttcaatatttaaaaagaatcttgtcattattwagttttatcttgagatttatactttgtatgttctgaaattatccctattcttattagtaaagcaataggaagttgttgatatatgttttttaatatcctttccaattagaaaataattttcaggtctctgtttaattgaggaacaacagggagagacttaatacttccttgtagaagatgagtttctatctgggaaaaaaaatatatttgttcttttcagaaaacctttcactgacttccattgacttctgcaatgatttaatttttctatatgtatgttattataccaaaagaatgctataaattttatactgcattaaggtatagttttattattggaccttcaagaagtaaggcaaaaaaattattttatttgcaaataatctgaggacagattatgttcttgaaaacaaaaactatatctgggagagaaagcctagaagccatactcacagaaaatccctaatatttactcctga

SEQ ID NO: 646315 - DNA, 537 bp, Homo sapiens
gagagaagcgacttgacttcagagggatagtttgatggcttgacttcagagaagagtcccgccggagaccaccagacttgaggggaagataacctgcccttccatgccctttccattttccctactcgctaagagccactttcattgtccagtaaaatcctccacattcaccatccttcaattcgttcatgcaacataatttttcctgggcactagacaagagcttgggagccatgagtgtggataccccaaaaaaggctatcatactggccctttgccctcgatggcagagggcagctgcaccacatgacaaggcaaagggcccactgaactgttaacacttaagccatccacggayggccgagctaaaagagcactgtaacatgccctttgaggtttgggggtctcaggcaccccaagctggatgctgccatgggccggcatggagtttgctcctgccgctgcctaaaagtagccagctggatcctgtgctagttcatctacttgctccctcccacaaggggttgagtgtggcaa

SEQ ID NO: 646316 - DNA, 510 bp, Homo sapiens
agcattttgcccctgccctagagatctgtagaactttgaatttgagagagatgatctgaaattgaaacttatgtttaaaacgggagccgagtgaaaawgtttgaaaaatttgcaacctgaccatgcaatagaaaagaaaatcccattttctggggagaaattcaagccagctgtggaaatttgcataagaaatgagaagctgaatgttaatagccaagacatggggaaaatttctccagggcatgttagagatcttcaagggagagattcccatcatagggcaggaggcctgaaagggaaaaatggtttcatgggtcaggcccaaggcacccctgctctgtgcagcctcaggacatggtgccctttgtcccagcctttccagctccagccatggctaaaaggggccaattgcttctgaggtgaaagccccaagcattggtggcttccatgtggtgttgggattgcaggtgcacagaagagaagagttgagcttttggaacctctgcctag

SEQ ID NO: 646317 - DNA, 446 bp, Homo sapiens
tttggtgcttgtattgagtggaactcattagctcaccatctcctttatcccaaaccaactgctttactgaattccatatttcagataatgataataataactagtcacccattaacctagatttggaaaacttgtattcatttacttcatttcacttttctttttaatctcttcttgacaactttttgtgtatcagccagaaagataggctgattttttctgacatcttctttggagtcctatgtatacatacacctgcagttctctaaytctgtaggcagctacattttccattgcagctgccaccagtttatttttatctccctcctaaatatttacagttgatattcttcccttttgttcctcctccctccagattaatctttctggagggtattgtaatgcctctcaggccaaaaaccttcagggactttttatggtcttca

SEQ ID NO: 646318 - DNA, 599 bp, Homo sapiens
gctatagtaacttcagggagtttaacagcctgtgacagccattaaaaacaaataagaggtctggagcagtggctcatgcctgtaatcccaggctgaggcaggtagattgcttgagttcaggagttcgagaccagcctggacaacatggtaaaaccccgtctctaccaaaaaatacaaaaaattagccaggcatggtggtgcgcatctgtggtcccagctacttaggaggctgaggtgggatgatcacttgagtctggaaggcggaggttgcagtgagccaagattgcgccattgcactccagcctgggcgacacagtgagactctatctcaaacaaacaaacaaacaagcaaaaaccaagaaatgttgctaacttaattccaacttgaccaagccaccatgcatttaatggstcattctttcaccaaatcctttattcattcattcactcagtaatctcctaatgtgctctgacggtgtttataatctgatcctccttcccaaaaacacagagtggacaaatatgccatttcaaaggtgtgtgcccgagaccccccctaccctatacatatatattgtgtataattaacaaaatctatg

SEQ ID NO: 646319 - DNA, 599 bp, Homo sapiens
gctatagtaacttcagggagtttaacagcctgtgacagccattaaaaacaaataagaggtctggagcagtggctcatgcctgtaatcccaggctgaggcaggtagattgcttgagttcaggagttcgagaccagcctggacaacatggtaaaaccccgtctctaccaaaaaatacaaaaaattagccaggcatggtggtgcgcatctgtggtcccagctacttaggaggctgaggtgggatgatcacttgagtctggaaggcggaggttgcagtgagccaagattgcgccattgcactccagcctgggcgacacagtgagactctatctcaaacaaacaaacaaacaagcaaaaaccaagaaatgttgctaacttaattccaacttgaccaagccaccatgcatttaatgggtcattctttcaccaaatcctttattcattcattcactcagtaatctcctaatgtgctctgacggtgtttataatctgatcctccttcccaaaaacasagagtggacaaatatgccatttcaaaggtgtgtgcccgagaccccccctaccctatacatatatattgtgtataattaacaaaatctatg

SEQ ID NO: 646320 - DNA, 595 bp, Homo sapiens
tgtaatggtaattttataccagaagaattataaaagaaaggaaaacctataaaaataggatatcattaaatcagttaaatgctagttgataatagagtgattattatgactgcataaaacatctatgggttatacatatgtgtatatagacatatatatgtatatatttattcaaatatgtctatatatagatatatgtatacatatttgtatatatatgtgtgtgtatatatatgctggttctcatgttttcttcatttgtaggaatcagttaacaagttcttgttacatagtatgaaggttctgttttcagtagtgaaacagggagataaaagtggttgaaccatgtgattttttttctgacttttcaaagacattttctcctgaaggaagctcaagtgctaaggctattccacataatctcaagaacgactactactttatagtaatgaccaaactgtagtaatagaatcttaggagcatataatcatcctctagggaacacattttacaaattgaacctatcttgcaggtggaaataccataaagaaaatkatcattggagagattactggcacactgcattcattcacat

SEQ ID NO: 646321 - DNA, 525 bp, Homo sapiens
atttatgagaagaaaaaataattaaagtcataatctttaaagcttaaattttaaaaagacaaagtttaacagcaaccattgagggtgaatyatttattgttttgctctcttaacatacctttggggaatacaaattaaaataacaagaactatttaatttattgcttatctgactggcaaggataaaaatgaatgttaacatttatcagcaagcatgtgagaaagtagactttctcatgcactacttatgtgaattaaaattggtaaaagttttccagaaaacaaattcacaataaaaaagtgaaagcctcaaccccataaaaaagtgggcaaaggatatgaacagacacttctataaagaaaacatatatgtgaccaataaacatatgaaaagaagctcaacattcactgatcattagagcaatgcgaatcaaaaccacaatgagatattatctcacaccagtcagaatggtgattactaaaaagctgggaaacagcagatgctggcaaggctgtgaagaaata

SEQ ID NO: 646322 - DNA, 525 bp, Homo sapiens
atttatgagaagaaaaaataattaaagtcataatctttaaagcttaaattttaaaaagacaaagtttaacagcaaccattgagggtgaattatttattgttttgctctcttaacatacctttggggaatacaaattaaaataacaagaactatttaatttattgcttatctgactggcaaggataaaaatgaatgttaacatttatcagcaagcatgtgagaaagtagactttctcatrcactacttatgtgaattaaaattggtaaaagttttccagaaaacaaattcacaataaaaaagtgaaagcctcaaccccataaaaaagtgggcaaaggatatgaacagacacttctataaagaaaacatatatgtgaccaataaacatatgaaaagaagctcaacattcactgatcattagagcaatgcgaatcaaaaccacaatgagatattatctcacaccagtcagaatggtgattactaaaaagctgggaaacagcagatgctggcaaggctgtgaagaaata

SEQ ID NO: 646323 - DNA, 558 bp, Homo sapiens
gaatcacagttttagcataaagattaaagtgaaaatatttgaaatctgatctgactttcccttacctaactaaagctgacactacccccaatacagctgctattaactctcctccaagagctttctgctaatyccaggaaggagatcaactacacattgatgccctagccacacttcccttcccttttttaagttgctataccaatctttacctctgggtattcaggaaacgactcattattgagtgacttcacatgcatgtgtagattaaccttttcttttctcctgttaatctgtctattatcagttaattcacaggcccctaaacataggaacctaagtgggtagaggaaatgttttcctcccaatggtattaagtcattttccagagcaaagagtctcttccctaaaagatgtggagagaacaaggtacataattattttgctacccctactctataccctttgtagacactaccctcactatttcagccactggcctggctgatctaaggttttaagaataaggtgacaggttttctatttctagtgagatga

SEQ ID NO: 646324 - DNA, 398 bp, Homo sapiens
ggctgccctgccaacaaaaccataacgcaggaacaaacatcacaactatgccaaataatcaatcctacaatgtccaaaattttactttaaaactggaattaccagacttcctttctgcattaaccagtttaactagacagtaacgaaatattcctactttatgctgtgatagtttgtttgtttgtttgtttatttatttatttatttatttaagacagagtttcrctcttgttgcccaggctggagtgcagtggcacgatctcagctcaccacaacctccgcctcccaggttcaagcgattctcctgcctcagcctcccgagtagctgggattacaggcatgtaccaccacgcccgggtaattttgtatttttagtagagacggggggtttctccatg

SEQ ID NO: 646325 - DNA, 611 bp, Homo sapiens
gagaggggtaataagttcatgaatatcacctgtgtcktgcaaaacaatatttgatttttttgaaagtttaaattgattggaaagaacatatgaattaagtgctatctcgtgagtgaaaagttttgctgcagggtgacagagtgcgccatcaaggtgatgcatttcaaacattaccttcctgtgacacaagggagtcatggaccaaatggaacagaggaaattatgacccgctggccaggatggatctgtaacataggaatgccacaccaatatcctgcattcctatttcagagaataagaccttgagcaaataaaacaaacactgaagtagagtttttctctgtgtatgaatatgctccacaaaattaggccatgctggaaattcatcatatatttaggaaactattctcaagggaaaaaacagtgttatagactagtaacctaataactgaacatatgtacacacacacacacacacacacacacacacacacggtctttttctctgcctttccaaaaatgtctcacttttctattttcaaattctcataaatttctctctttctttctgttctatttgattcaagagcttcttatttgactgttaacaa

SEQ ID NO: 646326 - DNA, 611 bp, Homo sapiens
gagaggggtaataagttcatgaatatcacctgtgtcgtgcaaaacaatatttgatttttttgaaagtttaaattgattggaaagaacatatgaattaagtgctatctcgtgagtgaaaagttttgctgcagggtgacagagtgcgccatcaaggtgatgcatttcaaacattaccttcctgtgacacaagrgagtcatggaccaaatggaacagaggaaattatgacccgctggccaggatggatctgtaacataggaatgccacaccaatatcctgcattcctatttcagagaataagaccttgagcaaataaaacaaacactgaagtagagtttttctctgtgtatgaatatgctccacaaaattaggccatgctggaaattcatcatatatttaggaaactattctcaagggaaaaaacagtgttatagactagtaacctaataactgaacatatgtacacacacacacacacacacacacacacacacacggtctttttctctgcctttccaaaaatgtctcacttttctattttcaaattctcataaatttctctctttctttctgttctatttgattcaagagcttcttatttgactgttaacaa

SEQ ID NO: 646327 - DNA, 548 bp, Homo sapiens
attttttaaactttcatgaaatttttcctatttgatttcaactmtcctatgacatggattcttattcttaaatcattttgtcgatgcttccagggcaaagggatctttgtcttgcacattctttaatgaaggttatttggaaggggctacgtgcatgccactgccttcaaatgaagttctgcagatggaaggagggttcacagggggaagagagaaatgagaagctggatcacactgtgtatttcattagtattttgtagaaagattatggttcagtgggttgagaatatcacatacatctatttttctaactggtgaataaattcaaagcctgtgcttaaactaacttcaattttgaagatataatttgaaagccttcagtgtacacatggctgcatgtacttgcactgccctggattgaatatgtaaagtcataactcattgtgagaggcagtgcagggtaaagaatataacactggccttacagaaaggaaaccagaaccctaaacgatgtctgccaccagctggttttgtgacttttagcaagt

SEQ ID NO: 646328 - DNA, 612 bp, Homo sapiens
tttcattcattcatccaaacgtattcattgagcactaatttttagtgtgctaggcagatatgccaaggaacgaaacagataaaatttctgcttttgtgagtttacattttagtgagagagacaggctacaaaatatgcgtaagacacacacatacacccacacacacacacacacacacacasagagaaagagatacatttcacatgctgatcagtgctaggaagagaactatagtgggataaaatactgttggataaaatactgttgatggtacagattagactgaaagggacaagagtgaaacgaggaagatgacttagaatgctcctgcctcaagaggttatcatccaaggagaaggatcagactagggcattggagtcagggctcatattatacatgtattttgaggataaagtcaacaggatttgatatggattgagtgtagaatgtgagaataaaagagaagtgagggttgactctagaatttttggtctgagaaagtacaagaatgaaattccatttactgacatggtagaacctaaagaaggagctgtttgaaggaatgcaaattaaaaattgtggatatattcactccaataactagttgcac

SEQ ID NO: 646329 - DNA, 553 bp, Homo sapiens
aaatcatggagagttctgttagagaaagcccttaaacatttttcttaaaagaaataatcagaaacaaatatggtattagcgggtgatgaaaaaaagagaagatgaagagcataggagggagagagaaaagaaggaagacaagaaggaaagaaaaatatttaaagagtctaaaactctagatcaaatcattggtattttaactttctatacagtcatttaatttaaaaatatatcaatawtaacaatctattcagtcattataatttatgtgtaagtaaaatgaatgacagaaatgttataaaggattaaagggaagaactgggaatactctgttacaggatacttgaactacctgtgaagcagtatagcatcaaagaatttgaaagtggacttgaaagaattgtaaatgtatattgcaaactctagggcaaccactaaaaaagttaaacgaagtgtaatttatatgcaaagacaggagagaaaaaagaacaatattaaatactcatttaaaactagagaggggagaagaagagaagaaaatgaagtaaagaac

SEQ ID NO: 646330 - DNA, 627 bp, Homo sapiens
atgcctttgcttttcaaataccaggcctctacctgaaaaaggaatgcttagatcagagcagagagatgaaaagttctcagttaaacatgcactgctctccttaagctattgtctgctctattccccaacttcgaaaagttggaagaaaaatatctacagataaagactgctgtaaatcactagtgaaaggttaaatatgatttagcaaatgttcattttatcttgcaaagcagggttgtgatggaactgcctttgtatctaaagccaataatattcttgaagaaattttatgtattttaacaaaatcattctgctaagtaacatagctcaaattatttagtgtagttctaaagtctttgtacctaacagtcaaaataagttacacctggtaattgtgagtgtgcaagatgtttttctcctttggatagaggaactgtttcttgagtacctkctaagtgccatgcattttacttatattctactatagtatttaatacagcaaacctgcattattttccagaccaggaaactgaggctcagagaagttaaaaacaaaaaaaactacttgccttaagtcatagtgctaacaaacagaggaagcagggttcagatgcaagtatgagtggt

SEQ ID NO: 646331 - DNA, 627 bp, Homo sapiens
atgcctttgcttttcaaataccaggcctctacctgaaaaaggaatgcttagatcagagcagagagatgaaaagttctcagttaaacatgcactgctctccttaagctattgtctgctctattccccaacttcgaaaagttggaagaaaaatatctacagataaagactgctgtaaatcactagtgaaaggttaaatatgatttagcaaatgttcattttatcttgcaaagcagggttgtgatggaactgcctttgtatctaaagccaataatattcttgaagaaattttatgtattttaacaaaatcattctgctaagtaacatagctcaaattatttagtgtagttctaaagtctttgtacctaacagtcaaaataagttacacctggtaattgtgagtgtgcaagatgtttttctcctttggatagaggaactgtttcttgagtacctgctaagtgycatgcattttacttatattctactatagtatttaatacagcaaacctgcattattttccagaccaggaaactgaggctcagagaagttaaaaacaaaaaaaactacttgccttaagtcatagtgctaacaaacagaggaagcagggttcagatgcaagtatgagtggt

SEQ ID NO: 646332 - DNA, 627 bp, Homo sapiens
atgcctttgcttttcaaataccaggcctctacctgaaaaaggaatgcttagatcagagcagagagatgaaaagttctcagttaaacatgcactgctctccttaagctattgtctgctctattccccaacttcgaaaagttggaagaaaaatatctacagataaagactgctgtaaatcactagtgaaaggttaaatatgatttagcaaatgttcattttatcttgcaaagcagggttgtgatggaactgcctttgtatctaaagccaataatattcttgaagaaattttatgtattttaacaaaatcattctgctaagtaacatagctcaaattatttagtgtagttctaaagtctttgtacctaacagtcaaaataagttacacctggtaattgtgagtgtgcaagatgtttttctcctttggatagaggaactgtttcttgagtacctgctaagtgccatgcattttacttatattctactatagtatttaatacagcaaacctgcattattttccagaccaggaaactgagrctcagagaagttaaaaacaaaaaaaactacttgccttaagtcatagtgctaacaaacagaggaagcagggttcagatgcaagtatgagtggt

SEQ ID NO: 646333 - DNA, 617 bp, Homo sapiens
taaacatattcatcccctacaatcaagcaattgcactccttggaatttaaccaaatgaatgaaaaacacaaaaacctgcagcattattcttaatcgccaaaagttggaagcaatcaagatgtttttcagttagtgaatggataaatacactgtggtagattcaagaaatggaatattattcagcaataaaaagaaatgagctatcaagccataaaaaggcatgaargaatctcaaacgcatattgctaaatgaaagaaagcaatctgaaaagactacatactgtatgattccaaccatatgacatcctgtaagagacaaaactatggagatagcaaaaagattagtggtttccaggggctggggtcgggagagggatgaataggcagagcacagaggattttgaaggcagtgaaactattctgcatgatactgtaatggcaagtacatgtcatcacacaatttgtcaaaacccagaggatgtacaatccaaagagcgaaccctaatgtaaattatggacattaataaaatgtgtcaatattggcttattaattgtaacaaatgtaccatagtaaagcaaatgttcctagtaccaggaaacctaaaatggctcaaaaa

SEQ ID NO: 646334 - DNA, 516 bp, Homo sapiens
acactgctggtaaaaaggtaagtatgttcagccactgtggaaagcagtgtggaaatttctcaaagaaagtaaaacagaactaccattcaacccagcaatcccactgagtatatacccaaaggaaaataaatcattctaccaaaaagacacatgcactcctaagttcattacagccctattcacaatagcaaagatgtgaaatcaaccaagatgtccaccaatggtgcaccagataaagaaaatgtggtgcagatacaccttggaatactatatagtcaataaaaagaacraaatcatgtcctttgcagcaacatggatgaagctggagtggattatcctaagcaaactaaggcagcacagaaaactaaataccgcatgttctcacatataagtgggagctaaacactgaatacacatggacacaaagatgagaagaatagacacttgggactgcttgagggaggaggatgggaaggggccgtgggatgaaaggctacctatcaatagggtactatg

SEQ ID NO: 646335 - DNA, 370 bp, Homo sapiens
ttgaaaagaatgtcctctccccattaagtagtcttggcagccttgtcaaaaatcatttgaccatatatgtgagagtttacttctgcgtttgtattatgtaaygtacaactttttgttttcttttgagttaataattgccttatcctttcaattgctccatttccatgtacctatcattaattcacacccaactggcccagatatataaaattcctctcattatagtttttaaaatctggcagtagatcggtttgatacattttcttgattgttttggggacattgctctcagatccctctgcctccctgctcctctttgaggacttctgcacagctattatgtttcttttcactgtcatcctgggaattc

SEQ ID NO: 646336 - DNA, 561 bp, Homo sapiens
tgtcttcagtggttaatttttttctctccctggtagagaagggggtcaggataccttttatctttgtaaatctgcttcctgctttttggcaaatagaggtagggcagagagctgtactgcatctgcttgttcttaattcaacttaacaatccttcatattttggggtggcatattcttgtctcccacaatgtattaatgtttttctcttctgtgtttaaaatgcagatgtgttctgaagtcaagagtctctgcttatgagtaagggcttctgtgaaatctctgytgctggttaagttgccctggacgtgacttctttttctttcctacagctttgtagctttctgcgtctttagtcagagtacgctgtttacctggttggctgcctctcttatttggtcccttggtggcagggtaagagggaattaaactttgctcattttggtagaactttttaaactttcagatacaagctgaaaactggtctcctattttatagaaacatagatattacattttgctttcaaggagaataagtctgtagacagatcttatatagttgg

SEQ ID NO: 646337 - DNA, 619 bp, Homo sapiens
ttctcccttctctttgcttgtttccttcctcctcccttaaataaattaatttattttgtaaattacctctctcctttattcttgccgtctctttcttttttctcctctcttcttccttccttattttccacctctacctctttcccttttctcctcccattttgtatgttaagttcccccttctgctccctccctcttcactcccctttcttctgytcatcctttctcttccttgcttcacatcctcctctctcctcccctctcccctgctttggttttcccagcacgtctattcccgggtatccaggataacttctatattcacagcgtctcctcaggctccagtttgacccagaggttcaacaaaagggacaggattttttatatttaatttggcaaataagatgcaaccagatgatctaaatgcttatgtttgataattcaggcgaagacatggagaatgtgaggggaggggaggtaactcagcagggctccggccttcctctcacagagctctggccagcctcctttagcataggctcagttctattggcccctgaccctccaaggctccagcgtttcagatgagcagttcttctaggcttaaggattgtttgtc

SEQ ID NO: 646338 - DNA, 519 bp, Homo sapiens
tttcttgcttgaaattgtccagtgccttcccaagatacttctgataaaatccacactccctatcacagtttctaaggccctgcatgatatgatcttcacctgcctctagcacctccacttacacaagcctgcattactgtcctgagtggatcaaactctgtcctccttcagggcctgtgtaytgttctttctttgttctggaacacgcctatattcagttgtcttcccttaggcctccttttaaatatcatcctcttaaagagattatttctaaccacctaacgtatattagttccactctctgactctctctcacctattttcttgtttccctagtgatacttgttataagttacagatacacacacagacacacacattctgtttgttagtttctctgtattacggcctaggtcaacccagggcaattttgaccctattctcaccctggggaacatttggcaaagcctggaggcatttttagttgacacacccgggaaacgggggttgctaccagca

SEQ ID NO: 646339 - DNA, 420 bp, Homo sapiens
gaattccaatctgataacttcaatatccctgccatatctgagtctggtttagatgttttaactgtttcttcaaagtatgtttttgtcttttagtatgccttcwaattttttcttgattgcagggcatgatgtattgggtaaaagaaattgctcttagtaggcctttagtaatgtggtgatatggtggggaggtgaagcattgtgtaggcttctgagtaggtctcggtcttttgatgagcctgtgtctctagactgaatttcatatatgtttctcaagtccctcccactgtctgcccattaggtaggacaggatggctggtgtgggctggagtttggtgattctcttctgccacatcacttaggctctgaaaaaacctccacagattaggctttggttgaatagtttctgctgaaggcaga

SEQ ID NO: 646340 - DNA, 570 bp, Homo sapiens
taagttcactttcgtgcacgctaaacaaataaatagataggctaaacaaacaaaacatttcatcttaagaaaaaaattaatttttttctcagtatatttggagcaaattttaaaaaacatattttgataaatactctggtcaatatattaagatagatattagagtggattactactttggaagcatgtgatgcttcatttatttgttttgttgaacttttcctactttttagaaatatgatttatcctcttgaaatgggaaattctgctctcagccatcaacaagcactcataattacattttacttctatttaagtgcacagtgattatttaaaaagttgaaatttcagtttagtccaagcttagatgattatttaaagtgttcaggtgttgcttttatcacamagatgtgtcagatatctgttatgaactgtcaggaaaatgagtgttcagtgatgctactcgactgtctggattagttatattctctaccctgagtaagctgagaaactactccatggttcgttgttatatatgtaaaatatcagcattggttatgttctcctaaa

SEQ ID NO: 646341 - DNA, 576 bp, Homo sapiens
gaggggaacaattaacttcccatactgtttattacatttgtaacatttacaatattttrctattatttaagacaaatagaaaagtgctatggtgaattgttctgcaaaagtacaaatcctggtctatttttagaccttttgctccaggctctgaatgatattctcagagtttcttagtttagtattttgggggcatgattttgaagcattctgagacattatgctgcatattagtttctttaacaataatatttgcatatcaaatattaaattcttgaactttttgttaatgcttcaaatatttcaggattgtgttatacttccccttttcaaaggaaaccactctttgcatctgctgcagttagagcaagaaagatccttctctccaaattgccgtttttattttttactgttgtgttacagcacaaccttctgtgtacagcatacaaatgataggtggtaaagatattgtgggtttgcatgcataataaatatggttccatttgagtagttggtgagtatttcataatgcaacagtggaaaatgaggcaatttgaatattttgggaggcttcaa

SEQ ID NO: 646342 - DNA, 576 bp, Homo sapiens
gaggggaacaattaacttcccatactgtttattacatttgtaacatttacaatattttactattatttaagacaaatagaaaagtgctatggtgaattgttctgcaaaagtacaaatcctggtctatttttagaccttttgctccaggctctgaatgatattctcagagtttcttagtttagtattttgggggcatgattttgaagcattctgagacattatgctgcatattagtttctttaacaataatatttscatatcaaatattaaattcttgaactttttgttaatgcttcaaatatttcaggattgtgttatacttccccttttcaaaggaaaccactctttgcatctgctgcagttagagcaagaaagatccttctctccaaattgccgtttttattttttactgttgtgttacagcacaaccttctgtgtacagcatacaaatgataggtggtaaagatattgtgggtttgcatgcataataaatatggttccatttgagtagttggtgagtatttcataatgcaacagtggaaaatgaggcaatttgaatattttgggaggcttcaa

SEQ ID NO: 646343 - DNA, 576 bp, Homo sapiens
gaggggaacaattaacttcccatactgtttattacatttgtaacatttacaatattttactattatttaagacaaatagaaaagtgctatggtgaattgttctgcaaaagtacaaatcctggtctatttttagaccttttgctccaggctctgaatgatattctcagagtttcttagtttagtattttgggggcatgattttgaagcattctgagacattatgctgcatattagtttctttaacaataatatttgcatatcaaatattaaattcttgaactttttgttaatgcttcaaatatttmaggattgtgttatacttccccttttcaaaggaaaccactctttgcatctgctgcagttagagcaagaaagatccttctctccaaattgccgtttttattttttactgttgtgttacagcacaaccttctgtgtacagcatacaaatgataggtggtaaagatattgtgggtttgcatgcataataaatatggttccatttgagtagttggtgagtatttcataatgcaacagtggaaaatgaggcaatttgaatattttgggaggcttcaa

SEQ ID NO: 646344 - DNA, 553 bp, Homo sapiens
cactctgttttttgaaattttcagcttttctgctctggtttctccccatctttgtggttttatctacctttggtcattgatattggtgacctacagatggggttttggtgtggatgtcctttttgttgatgttgatgctattcttttcagtttgttaatttttcttctaacagtcagacccatcagctacaggtctgttgtagtcaccagcagaggctgcagaacagcaaatattgctgcctgaacattgccctggaagcttcattccagaggagcacccgcctgtttgaggtgtctgtcagcccctactgggaggtgtttcctagtcaggctacatgggggtgagggaccagcttgaggaggtagtctgtccgttctcagagctcgaacaccatgctgagagaatcactgctctcttcagagctgtcagaccgggatgtttaagtctgcagaagttgtctgctgccttttgttctactatgccctgcccccagaggtggaatctatagaggcagcaggacttgctgagytgtggtgggctccacccatttca

SEQ ID NO: 646345 - DNA, 429 bp, Homo sapiens
agaattcacatctatttctagaaagtggaagaaaatatgagtgccattcagacccaaycctataaccagatgttcaaatgttaggtgacctgagatgccaaaaaataataataataataataatcaactccagaatggatcccccactgacttattctgatgcctaaatttccagtattgttatttccctttcattgggttagatccatgtgtctcaaaccagggcttgcacagcccagtaggtacgtggcagtatgcctgggatactacaggagaatcatggtacgttgtttgagaacagtggcttcactccaaaatttgagagaagttatatcaaaacaaatgcaaatgttttataagatgcaaattgacctaagtttaaaagctaaaatgcgagaaatttcagatttacctttcactacaatctca

SEQ ID NO: 646346 - DNA, 397 bp, Homo sapiens
gaaagtggaagaaaatatgagtgccattcagacccaaccctataaccagatrttcaaatgttaggtgacctgagatgccaaaaaataataataataataataatcaactccagaatggatcccccactgacttattctgatgcctaaatttccagtattgttatttccctttcattgggttagatccatgtgtctcaaaccagggcttgcacagcccagtaggtacgtggcagtatgcctgggatactacaggagaatcatggtacgttgtttgagaacagtggcttcactccaaaatttgagagaagttatatcaaaacaaatgcaaatgttttataagatgcaaattgacctaagtttaaaagctaaaatgcgagaaatttcagatttacctttc

SEQ ID NO: 646347 - DNA, 534 bp, Homo sapiens
tgtcttactccctccatctgtcacccttcatctatgttggagaatttctacttcattataggcaattgaaggtcttaatcagttgcctgataaaagtagtttatgtcccaaaggtaatctcatttctgcaaccaaggatgtacctggaactcactgaacatattgatggagataaatgtgtgcttcaaatggatcagggggtattgcaatcacccactcaatctagagataggtacttggcccagccagggacaaggtcctcactgccacctggactccctgaatccctggtttccaacagagccaacaggytaagccccagcaaaccaataacaagaagtcaacaggtgcacccaggaccggcctgtacttgcctggggcgggtttttttagttgatgagaccactcccccaaaaaaaaaaaaaaaaaaaaaaaaaaaaaaaaaaaaaaaaaaaaaaaggactcaaaatccaggaatagttctctgtgcaaagtaataaaatactagctactaccgctaagatccaggcactg

SEQ ID NO: 646348 - DNA, 534 bp, Homo sapiens
tgtcttactccctccatctgtcacccttcatctatgttggagaatttctacttcattataggcaattgaaggtcttaatcagttgcctgataaaagtagtttatgtcccaaaggtaatctcatttctgcaaccaaggatgtacctggaactcactgaacatattgatggagataaatgtgtgcttcaaatggatcagggggtattgcaatcacccactcaatctagagataggtacttggcccagccagggacaaggtcctcactgccacctggactccctgaatccctggtttccaacagagccaacaggctaagccycagcaaaccaataacaagaagtcaacaggtgcacccaggaccggcctgtacttgcctggggcgggtttttttagttgatgagaccactcccccaaaaaaaaaaaaaaaaaaaaaaaaaaaaaaaaaaaaaaaaaaaaaaaggactcaaaatccaggaatagttctctgtgcaaagtaataaaatactagctactaccgctaagatccaggcactg

SEQ ID NO: 646349 - DNA, 534 bp, Homo sapiens
tgtcttactccctccatctgtcacccttcatctatgttggagaatttctacttcattataggcaattgaaggtcttaatcagttgcctgataaaagtagtttatgtcccaaaggtaatctcatttctgcaaccaaggatgtacctggaactcactgaacatattgatggagataaatgtgtgcttcaaatggatcagggggtattgcaatcacccactcaatctagagataggtacttggcccagccagggacaaggtcctcactgccacctggactccctgaatccctggtttccaacagagccaacaggctaagccccagcaaaccaataacaagaagtcaacaggtgcacccaggaccggcctgtacttgcctggggcgggtttttttagttgatgagaccactcccccaaaaaaaaaaaaaaaaaaaaaaaaaaaaaaaaaaaaaaaaaaaaaaagkactcaaaatccaggaatagttctctgtgcaaagtaataaaatactagctactaccgctaagatccaggcactg

SEQ ID NO: 646350 - DNA, 517 bp, Homo sapiens
gtgatgaaaacacattcatttatagatctggtgtagagcccatgttctcacacaccatagattcagccccagaaaygagctatttccctgggcacagtgggtgagtaacagagcatcttatctaggagtaaggatgccacatgaccaaaccagacaggctggcttggccggccaactcagtggtctaccaccaggccacggctcaatgtcttgcttagcaatctgcctgcatgtggcctgatggctgtagcctgggatgccaccaatatcttttataatgcctatgggcgctgtctattggaatggagcccctcccaacacatcctagtggttggggcagcatctgccaggagtctgatggttcaagtctccctaaccgaccagtagccggtgcatggtggctctgggggcacatttctcttctgctgttctacccaagtgttaaaaattaatttaactctgatcgcacagacaggggaaaagttaatagaagttttatttttaatatatgaggaac

SEQ ID NO: 646351 - DNA, 589 bp, Homo sapiens
tcatgctccatgtaattattcctcaatgatagtgtaaaaaatgcttattattgctaactgatgtctaattcatagttcaggatgcttcaatcatgaggccaatgattagagtggtacattttaatgtttagtccactgatactgtgatattattttaatgcaaggtttaatttagttttttattacagatttattgaggtataattgacatacaacaaactgcacatacttaaagtgcacaatttgatacacagtcttttaaacagcatgaaaagtgcctgataacttaaaaatgaaaaaaatttcaatttacacatrttattttaaaatagtacattctaatttttatgagacatagatatgtatttataaaaaggtagatggaaagagaagaaattaacttaattctaagagccacatttactcagaaggtttagaaacaccaaaattaacagccagttttcttgattttcttcttgaagaagagattggtgttgacttatggtgagatatactatggccttgagaggcagtttcaacttgaaaagaagatgcaggttgagcaatcggagaggacttcaaagaagct

SEQ ID NO: 646352 - DNA, 558 bp, Homo sapiens
gctgagttacatctgggtgagggaataccaagaggcaccacagtggatccctgagtttacrcatattccactctgtctccttatgtaagagaagccctatctcatcctactaatcaaggtcaattacccctgtctagaggtggattccttttctcacctgacagtctcaggaccacaaagagttcaaagtgccagggagcagtcattggtcagtaggttccttgcattgtcccctggctagagtatgacttttttgaggttgaaaatctctagacctgcaaagcccaggatttatgggacagaaagcacaacattccccaagaggtatgaggagtcgtggtaaatggagccactcctgctgcctcccattgtttcctgaatccacgtgtttcttcctcttggagatatagcaccttataggagtctctggaggagaccacttcatacttgaagaagagactggcctctgagccggtactggagctgcacattcagcaggatgtgacagtgctctatcacattggctgcttccagattttgtggcatgggatgcaacca

SEQ ID NO: 646353 - DNA, 558 bp, Homo sapiens
gctgagttacatctgggtgagggaataccaagaggcaccacagtggatccctgagtttacacatattccactctgtctccttatgtaagagaagccctatctcatcctactaatcaaggtcaattacccctgtctagaggtggattccttttctcacctgacagtctcaggaccacaaagagttcaaagtgccagggagcagtcattggtcagtaggttccttgcattgtcccctggctagagtatgacttttttgaggttgaaaatctctagacctgcaaagcccaggatttrtgggacagaaagcacaacattccccaagaggtatgaggagtcgtggtaaatggagccactcctgctgcctcccattgtttcctgaatccacgtgtttcttcctcttggagatatagcaccttataggagtctctggaggagaccacttcatacttgaagaagagactggcctctgagccggtactggagctgcacattcagcaggatgtgacagtgctctatcacattggctgcttccagattttgtggcatgggatgcaacca

SEQ ID NO: 646354 - DNA, 558 bp, Homo sapiens
gctgagttacatctgggtgagggaataccaagaggcaccacagtggatccctgagtttacacatattccactctgtctccttatgtaagagaagccctatctcatcctactaatcaaggtcaattacccctgtctagaggtggattccttttctcacctgacagtctcaggaccacaaagagttcaaagtgccagggagcagtcattggtcagtaggttccttgcattgtcccctggctagagtatgacttttttgaggttgaaaatctctagacctgcaaagcccaggatttatgggacagaaagcacaacattccccaagrggtatgaggagtcgtggtaaatggagccactcctgctgcctcccattgtttcctgaatccacgtgtttcttcctcttggagatatagcaccttataggagtctctggaggagaccacttcatacttgaagaagagactggcctctgagccggtactggagctgcacattcagcaggatgtgacagtgctctatcacattggctgcttccagattttgtggcatgggatgcaacca

SEQ ID NO: 646355 - DNA, 558 bp, Homo sapiens
gctgagttacatctgggtgagggaataccaagaggcaccacagtggatccctgagtttacacatattccactctgtctccttatgtaagagaagccctatctcatcctactaatcaaggtcaattacccctgtctagaggtggattccttttctcacctgacagtctcaggaccacaaagagttcaaagtgccagggagcagtcattggtcagtaggttccttgcattgtcccctggctagagtatgacttttttgaggttgaaaatctctagacctgcaaagcccaggatttatgggacagaaagcacaacattccccaagaggtatgaggagtcgtggtaaatggagccactcctgctgcctcccattgtttcctgaatccacgtgtttcttcctcttggagatatagcaccttayaggagtctctggaggagaccacttcatacttgaagaagagactggcctctgagccggtactggagctgcacattcagcaggatgtgacagtgctctatcacattggctgcttccagattttgtggcatgggatgcaacca

SEQ ID NO: 646356 - DNA, 329 bp, Homo sapiens
caaggggcccgaaagagttaggagactttcmaatgtagaaacttatttagtgtgcagcactctcagctaattattgatagactatagctagtattttaaaatgagaacctttgaagaagacagggacgtttaggagccaaaaccaaaggccttacccagttctttgcatattgactgagcagaagcagttcaaacacctgcaaagcccagaaatgaataatcagacccaagtgactgccttgcataagaataatttgctcgtcatatcccggattgcccaaagagttgaaataaataaaaatgaaagaagtgttttagaagccagttca

SEQ ID NO: 646357 - DNA, 578 bp, Homo sapiens
aatggatggactcatcatcgaatggattcgaatggaatcatcgaataaaattgattgaaatcatcatccaatggaatcgaatggtatcattgaatggaatcgaatggaatcatcatcagatggaaatgaatggaatcgtcatagaatggaatcgaatggattcattgaatggaatcagatggaatcatcgaatggactggaatggaatcattgaatggactcgaaagggatcatgattgaatggaattgaatggaatcatcgaatggtctcgattggaatcattatcaaatggaatcgaatggaatcaccgaatagaatcgaatggaacaatcatcgaatggactcaaatggaattatcctcaaatggaatcgaatggaattatcgaatgcaatcgaatggaattatcgaatgcaatcgaatagaatcatcgaatggactcgaatggaatcatcgaatggaatggaatggaacagtcaatgaactcgaatggaatcatcattgaatggaatcgaatggaatcatcgartggaatcgaatggaattatgatcaaatggaatcgaatgtaatcatcatca

SEQ ID NO: 646358 - DNA, 536 bp, Homo sapiens
acacatcacatgacagtaatttttctttttgtatctgctgagataaaacaaagacaaaatgctgtataagtttcgtagcactattaaattatattttattaattacatccacttctacatatatttgaaaaatatattaataataacatgtgcaattaattgtacagagtaggctactatggctgtagcccattcaaaactctcttcataattctctggtgattttcaccatctatcttccatatcaaagaactgatattcaagtcactgtttgagttttgatcggctttatttcaaagactgtaagcagatacacttaaaataggccaagcagaaaggtaacttgggatactgtttttaaccacaaaatatgaaatcttaatgcaccagtaggtgatttaagwgttaataggctaaaaaatgaagaagaaacaagagaattagaatatcctcacttttcagcccttaatgaattaaggaatctaggcaatgttcatcaactaccactaatggcacaaatagtcagatatgtgtgt

SEQ ID NO: 646359 - DNA, 603 bp, Homo sapiens
tggctctaattatatacaaactacaattaaagaaaaccctcttaaagctaaggatggcttaaatatttattgaactatggctgcaggaattacataacgcaataagattattaatttaatatgcactttaatgagttttctgtttgggaaggtccagaaggcttaattcccaaaagtgatacctgctaataacattttaatgttaaagttayccaattcagattaatatatctaaagtccagcaatatgatatgttcagctcataaatgaaattaactatactacatttgagattcattcaaatctaagagaaatcttccttttattttaaaaatttatatcttgttaggaaaatgtaatgctcaagcttcagattcattatttttattttactccaattgttttaaaagaatagtataatgttaatggttcaattgaagattcttaacaagcctttgaacattcttttcttaaccccagggtcttgctttgatttgcctctcatttagcatgctgatgggggtggttttttaagaacgcttaaaaagtttaggtttgtgtcataattaagatgaaaataagcacacgagaaaccttgatgaa

SEQ ID NO: 646360 - DNA, 603 bp, Homo sapiens
tggctctaattatatacaaactacaattaaagaaaaccctcttaaagctaaggatggcttaaatatttattgaactatggctgcaggaattacataacgcaataagattattaatttaatatgcactttaatgagttttctgtttgggaaggtccagaaggcttaattcccaaaagtgatacctgctaataacattttaatgttaaagttatccaattcagattaatatatctaaagtccagcaatatgatatgttcagctcataaatgaaattaactatactacatttgagattcattcaaayctaagagaaatcttccttttattttaaaaatttatatcttgttaggaaaatgtaatgctcaagcttcagattcattatttttattttactccaattgttttaaaagaatagtataatgttaatggttcaattgaagattcttaacaagcctttgaacattcttttcttaaccccagggtcttgctttgatttgcctctcatttagcatgctgatgggggtggttttttaagaacgcttaaaaagtttaggtttgtgtcataattaagatgaaaataagcacacgagaaaccttgatgaa

SEQ ID NO: 646361 - DNA, 603 bp, Homo sapiens
tggctctaattatatacaaactacaattaaagaaaaccctcttaaagctaaggatggcttaaatatttattgaactatggctgcaggaattacataacgcaataagattattaatttaatatgcactttaatgagttttctgtttgggaaggtccagaaggcttaattcccaaaagtgatacctgctaataacattttaatgttaaagttatccaattcagattaatatatctaaagtccagcaatatgatatgttcagctcataaatgaaattaactatactacatttgagattcattcaaatctaagagaaatcttccttttattttaaaaatttatatcttgttaggaaaatgtaatgctcaagyttcagattcattatttttattttactccaattgttttaaaagaatagtataatgttaatggttcaattgaagattcttaacaagcctttgaacattcttttcttaaccccagggtcttgctttgatttgcctctcatttagcatgctgatgggggtggttttttaagaacgcttaaaaagtttaggtttgtgtcataattaagatgaaaataagcacacgagaaaccttgatgaa

SEQ ID NO: 646362 - DNA, 603 bp, Homo sapiens
tggctctaattatatacaaactacaattaaagaaaaccctcttaaagctaaggatggcttaaatatttattgaactatggctgcaggaattacataacgcaataagattattaatttaatatgcactttaatgagttttctgtttgggaaggtccagaaggcttaattcccaaaagtgatacctgctaataacattttaatgttaaagttatccaattcagattaatatatctaaagtccagcaatatgatatgttcagctcataaatgaaattaactatactacatttgagattcattcaaatctaagagaaatcttccttttattttaaaaatttatatcttgttaggaaaatgtaatgctcaagcttcagattcattatttttattttactccaattgttttaaaagaatagtataatgttaatggttcaattgaagattcttaacaagcctttgaacattcttttcttaaccccagggtcttgctttgatttgcctctcatttagyatgctgatgggggtggttttttaagaacgcttaaaaagtttaggtttgtgtcataattaagatgaaaataagcacacgagaaaccttgatgaa

SEQ ID NO: 646363 - DNA, 521 bp, Homo sapiens
taacaagtaaaatgagcttgcaagaaggaccctgagcctcaaatgttcatagggcagctgatacctgcactgcatctttgaraccctgaaaaaaggcccctattaagccattcacagacttgtgacccaacaaaactgtgagataataaatgtgtgttcttttaagccattacttctgtgggcactttttataccaatgacaaactaacacagatgccaatgcagatgctttgtaattaaatgagctcacatatgtaaagctccttagcacagaaacgggtacggagtggctagtttttaaataattgctcttttatccatattatgtgtcacagttctcaggcggtactgataaaacaaatatttttcagtattggcatggaaaaatatatgacaaattctggagggctgtccagtaatatggcatcacacagcctttgtaatgtagactgtggtgctgttatacattataaaaattaaaaaacctcatttttctagttcaactccaatgaacaagggac

SEQ ID NO: 646364 - DNA, 521 bp, Homo sapiens
taacaagtaaaatgagcttgcaagaaggaccctgagcctcaaatgttcatagggcagctgatacctgcactgcatctttgaaaccctgaraaaaggcccctattaagccattcacagacttgtgacccaacaaaactgtgagataataaatgtgtgttcttttaagccattacttctgtgggcactttttataccaatgacaaactaacacagatgccaatgcagatgctttgtaattaaatgagctcacatatgtaaagctccttagcacagaaacgggtacggagtggctagtttttaaataattgctcttttatccatattatgtgtcacagttctcaggcggtactgataaaacaaatatttttcagtattggcatggaaaaatatatgacaaattctggagggctgtccagtaatatggcatcacacagcctttgtaatgtagactgtggtgctgttatacattataaaaattaaaaaacctcatttttctagttcaactccaatgaacaagggac

SEQ ID NO: 646365 - DNA, 521 bp, Homo sapiens
taacaagtaaaatgagcttgcaagaaggaccctgagcctcaaatgttcatagggcagctgatacctgcactgcatctttgaaaccctgaaaaraggcccctattaagccattcacagacttgtgacccaacaaaactgtgagataataaatgtgtgttcttttaagccattacttctgtgggcactttttataccaatgacaaactaacacagatgccaatgcagatgctttgtaattaaatgagctcacatatgtaaagctccttagcacagaaacgggtacggagtggctagtttttaaataattgctcttttatccatattatgtgtcacagttctcaggcggtactgataaaacaaatatttttcagtattggcatggaaaaatatatgacaaattctggagggctgtccagtaatatggcatcacacagcctttgtaatgtagactgtggtgctgttatacattataaaaattaaaaaacctcatttttctagttcaactccaatgaacaagggac

SEQ ID NO: 646366 - DNA, 521 bp, Homo sapiens
taacaagtaaaatgagcttgcaagaaggaccctgagcctcaaatgttcatagggcagctgatacctgcactgcatctttgaaaccctgaaaaaaggcccctattaagccattcacagacttgtgacccaacaaaactgtgagataataaatgtgtgttcttttaagccattacttctgtggkcactttttataccaatgacaaactaacacagatgccaatgcagatgctttgtaattaaatgagctcacatatgtaaagctccttagcacagaaacgggtacggagtggctagtttttaaataattgctcttttatccatattatgtgtcacagttctcaggcggtactgataaaacaaatatttttcagtattggcatggaaaaatatatgacaaattctggagggctgtccagtaatatggcatcacacagcctttgtaatgtagactgtggtgctgttatacattataaaaattaaaaaacctcatttttctagttcaactccaatgaacaagggac

SEQ ID NO: 646367 - DNA, 454 bp, Homo sapiens
atggtggggccagtgaggagggcttcccagaggagagggagtgctatgcagacgattccacacaactcactttaaatagtaccattggcttctatctgattttttgtggttgttgttgctttctctactscttatgagatttactttggaacttcatgataagaccttgtaaaacgaagcattaaaattgcaatcacttttatcctaatctaaatatatttgttttaccattgccaaagtctaatataccataatctttcccacacgtcattgtatacagttgtaataagcttaataaatttctcccactaccttcatctctcacttctcacaccctttctctatttttccctgtgtctctctctcacacacacacacacacacatgtgcatgcacaaccaaattgcccatttatctctcttttttttttttttttttgagatgagagattgct

SEQ ID NO: 646368 - DNA, 454 bp, Homo sapiens
atggtggggccagtgaggagggcttcccagaggagagggagtgctatgcagacgattccacacaactcactttaaatagtaccattggcttctatctgattttttgtggttgttgttgctttctctactccttatgagatttactttggaacttcatgataagaccttgtaaaacgaagcattaaaattgcaatcacttttatcctaatctaaatatatttgttttaccattgccaaagtctaatataccataatctttcycacacgtcattgtatacagttgtaataagcttaataaatttctcccactaccttcatctctcacttctcacaccctttctctatttttccctgtgtctctctctcacacacacacacacacacatgtgcatgcacaaccaaattgcccatttatctctcttttttttttttttttttgagatgagagattgct

SEQ ID NO: 646369 - DNA, 435 bp, Homo sapiens
tccactcataatgtaagtatgcagtttatgttacccccagtgcataacttatggkgcttctcttattattttacttgtatttttcttggtgttctaactagatggtaagctcatagatgcattcttgtgaccatttgacaagccgatattgaccaagtgcccaccagtggtgttgttttgttttattttattttagagatggctttcactctgttgcctaggctggagtacagtggtgcagtcatagctcactgtagcctcaaaatcctgggctcaactgagatcctcccatctcagctcccaagtagcttggacaacaggtgcatgccaccattgtgggctaattttcctttatttttaattttgtagagacaggaccctgttacgttgctcaggctggtcttgaactcctggcttaaaaactcttctctcctc

SEQ ID NO: 646370 - DNA, 435 bp, Homo sapiens
tccactcataatgtaagtatgcagtttatgttacccccagtgcataacttatgggkcttctcttattattttacttgtatttttcttggtgttctaactagatggtaagctcatagatgcattcttgtgaccatttgacaagccgatattgaccaagtgcccaccagtggtgttgttttgttttattttattttagagatggctttcactctgttgcctaggctggagtacagtggtgcagtcatagctcactgtagcctcaaaatcctgggctcaactgagatcctcccatctcagctcccaagtagcttggacaacaggtgcatgccaccattgtgggctaattttcctttatttttaattttgtagagacaggaccctgttacgttgctcaggctggtcttgaactcctggcttaaaaactcttctctcctc

SEQ ID NO: 646371 - DNA, 435 bp, Homo sapiens
tccactcataatgtaagtatgcagtttatgttacccccagtgcataacttatggggcttctcttattattttacttgtatttttcttggtgttctaactagatggtaagctcatagatgcattcttgtgaccatttgacaagccgatattgaccaagtgcccaccagtggtgttgttttgttttattttattttagagatggctttcactctgttgcctaggctggagtacagtggtgcagtcatagctcactgtagcctcaaaatcctgggctcaactgagatcctcccatctcagctcccaagtagcttggacaacaggtgcatgccaccattgtgggctaattttcctttatttttaattttgtagagacaggaccctgttaygttgctcaggctggtcttgaactcctggcttaaaaactcttctctcctc

SEQ ID NO: 646372 - DNA, 645 bp, Homo sapiens
atttaagatatatttttaacatgtacactttcattaatttgtcaataatttattagatatctaatatgtatatagcattgtgttaggagctatgagcaaagataaaaaaaaacatggatcctacccaaacaaccttacagtctcaaagacaggtagaataagtacataccctaacagtgaaaatataggaagttattatatatacatctcttataaaactacaagtcttgcaaatttggaagactactcgtttttttttgagacagtctcgttctgtcacccaggctggagtgcagtggcatgatatcggctcacagcaacctctgcctcctgggttsaagtgattctcatgccccagcctctctagtagctgggattacaggtgtgtaccaccatgcccagctaatttttatattttttagtagagacaaggttttgccatgttggccaggctggtcttgaactcctgacctcaggtgatccacccaccttgaccttccaaagtgctgggattacaggtgtgagccaccgtgcccggccactaaattacttttaatcagagacagactagtatcaatttaatgaaggtaattgtttgagcagggccttgagaatctgtagaacgtgggcattagaagatgaggc

SEQ ID NO: 646373 - DNA, 645 bp, Homo sapiens
atttaagatatatttttaacatgtacactttcattaatttgtcaataatttattagatatctaatatgtatatagcattgtgttaggagctatgagcaaagataaaaaaaaacatggatcctacccaaacaaccttacagtctcaaagacaggtagaataagtacataccctaacagtgaaaatataggaagttattatatatacatctcttataaaactacaagtcttgcaaatttggaagactactcgtttttttttgagacagtctcgttctgtcacccaggctggagtgcagtggcatgatatcggctcacagcaacctctgcctcctgggttcaagtgattctcatgccccagcctctctagtagctgggattacaggtgtgtaccaccatgcccrgctaatttttatattttttagtagagacaaggttttgccatgttggccaggctggtcttgaactcctgacctcaggtgatccacccaccttgaccttccaaagtgctgggattacaggtgtgagccaccgtgcccggccactaaattacttttaatcagagacagactagtatcaatttaatgaaggtaattgtttgagcagggccttgagaatctgtagaacgtgggcattagaagatgaggc

SEQ ID NO: 646374 - DNA, 475 bp, Homo sapiens
cgctgcggtgagccttgaagcatagggcgcgggcccgggtggagccgccgcaggtgcagatcttggtggtagtagcaaatattcaaacgagaactttgaaggccgaagtggagaagggttccatgtgaacagcagttgaacatgggtcagtcggtcctgagagatgggcgagcgccgttccgaagggacgggcgatggcctccgttgccctcggccgatcgaaagggagtcgggttcagatccccgaatccggagtggcggagatgggcgccgcgaggcgtccagtgcggtaacgcgaccgatcccggagaagccggcgggagccccggggagagttctcttttctttgtgaagggcagggygccctggaatgggttcgccccgagagaggggcccgtgccttggaaagcgtcgcggttccggcggcgtccggtgagctctcgctggcccttgaaaatccgggggagagggtgta

SEQ ID NO: 646375 - DNA, 499 bp, Homo sapiens
tattttcttgatttttaaaagtcaatgtactctcaaagaaacaaaactattattcgtggattctgttatttgaaaacatttactgatcatttaccttacaccaaatgatctccagctcgtggaaaaatatgtaaagktgcccagctgcattaagcttaaactcttctgaaggagaaaagaagcaatggagtagggacattaaagcaggagtgtggtgatatggctgagacttctacttgcacactgtggtagctgtgtggagaatggattgaaaaaagggcaatgacagaagcttaaattagtatcaaatatggcaatcctgtaaatttaggtgtccttgaaataagaatgtataatagttctcattatttccccaagaaatctctgcatttggccttgtgagggaagcgctatagttaccaagtggtgggggtgggaaggtgaatttgaaacaacatttggaattactacactttaaaggtaaagctggcaggaattc

SEQ ID NO: 646376 - DNA, 442 bp, Homo sapiens
gtccaaaatttagagggcagtcaaatcttaaagctccaaaatgatctcctttgaatccatgtctcacatccaggtcattctgatgcaagaggtgcgttcctattgtcttgggtagctctgcccctgtggctttgcagggtacagactcccacccgaatgctttaatgggctgctgttgagtgtccatggctttttcaggcacatagtgcaagctgtcgtggatctaccattctgaggtctagagaatggtggccctcttcttacagctccacaaggcagttccccaktggggactctgtgggagctccagtcccacattttccctctgcatatccctagcaggggttctccatgagggccttgcccctgaagcaaactttttcttggacatccatgcatttccacacaacctctaaaatctgggtggaggttcccaaaccac

SEQ ID NO: 646377 - DNA, 562 bp, Homo sapiens
aggacattagaaaattatttagacaaatctcccattccctttgcaggagacagtttaaactataaatgtgcagcctcatgaaaggtatgtgataattttgtgcactctgttgtatccaccagaattgaagttcaataatgagaaggacttttctattctatttgtcactgtatttactcctttaacctagaatgatatctagaacacagtagatgcacaacaattattttttgaatgagaargtgaagaaataaatgcaattgtccttaggagactaatgaaatgaaatgggggcaaatggctttttaagtcaggaagtacactatattttcaggggttttctctgagtagagtgaagctacaaattgaactcttggggctactttacccctaagagaaggggtaaagatgatagtgctttttaaagtttgtgtgcgtatgtgtgtgtgtgtgtgtgtgtgtgtgtgtgtgtgcatctctctcttcttcaaaggtgttattactagcagagatggatatctttataattgaaaggaattttaaaaaatgattggcagccaat

SEQ ID NO: 646378 - DNA, 603 bp, Homo sapiens
aagtgcttagcacgtattaagcaataaaaatggcattatttcaattactattatttttctagttcaggcctttagaaatgttatctcagtgtattcacaattctatgacatttctatgctttgccacattttacaaggataaagtacattattttctaccatgtagctttaagaaatataacaattatagctaggaaagaatgccttcttagataaaaatgtgtggacaactacaggggaagaatgatgtttaatgattcccaataactacratcgcctccttataagcaacattcttctgcttccccccttactgtagaaaatgtaaatggtagacattttccagtggacacagagtaattttaatggcattatgtttttgtgtttcaggtgccataacctgtgctgctgacatgttcagctgccagggctctcgtgcctgcgtgccccgacattggctttgtgatggtgaaagggactgtccagatggaagcgatgagctttccacagcaggctgcggtatgaacactggccagggctgcatgtcaaagaaaactgttgcagcatccttggttatttgtttttgtagtatttgccatagca

SEQ ID NO: 646379 - DNA, 620 bp, Homo sapiens
cttgtagttgggagattgcagtatataattccaataaatggggcaaattcaataataacataatacaaatgagtttgaaagcaggacatgtcttcaaagcatacacaacatgggcctacatatgtacaacaataataatttataagttacagtttggatggaaagtaaaagtacagaaaatttgttaaaataaattaaaatggagatcacttatcaataatctctgagcagacaaaatttgttaggtctcataagtgatctccaccttgcttgatttgcaaatacaagcaaaacttaaattatttcttgtagctgcctatttaaaaaagagaaatgaagctcaaccaatcaggagtagacaacaaccttatataaatagaaactgtccaacaaggtaaacagacaaacaaaaaacaataaaaaaagttgtgctaycaccaatgaaatgatttccttgtttctacatttttccaataaatacttgcttcttacactgtcagtgaagcactaaatatattttggtctgatattttataatttatcaattgctcttactcaaataaacactttacaatttcattgtgtctcaaattactttttagcagaataaaataaagtag

SEQ ID NO: 646380 - DNA, 620 bp, Homo sapiens
cttgtagttgggagattgcagtatataattccaataaatggggcaaattcaataataacataatacaaatgagtttgaaagcaggacatgtcttcaaagcatacacaacatgggcctacatatgtacaacaataataatttataagttacagtttggatggaaagtaaaagtacagaaaatttgttaaaataaattaaaatggagatcacttatcaataatctctgagcagacaaaatttgttaggtctcataagtgatctccaccttgcttgatttgcaaatacaagcaaaacttaaattatttcttgtagctgcctatttaaaaaagagaaatgaagctcaaccaatcaggagtagacaacaaccttatataaatagaaactgtccaacaaggtaaacagacaaacaaaaaacaataaaaaaagttgtgctatcaccaatgaaatgatttcyttgtttctacatttttccaataaatacttgcttcttacactgtcagtgaagcactaaatatattttggtctgatattttataatttatcaattgctcttactcaaataaacactttacaatttcattgtgtctcaaattactttttagcagaataaaataaagtag

SEQ ID NO: 646381 - DNA, 620 bp, Homo sapiens
cttgtagttgggagattgcagtatataattccaataaatggggcaaattcaataataacataatacaaatgagtttgaaagcaggacatgtcttcaaagcatacacaacatgggcctacatatgtacaacaataataatttataagttacagtttggatggaaagtaaaagtacagaaaatttgttaaaataaattaaaatggagatcacttatcaataatctctgagcagacaaaatttgttaggtctcataagtgatctccaccttgcttgatttgcaaatacaagcaaaacttaaattatttcttgtagctgcctatttaaaaaagagaaatgaagctcaaccaatcaggagtagacaacaaccttatataaatagaaactgtccaacaaggtaaacagacaaacaaaaaacaataaaaaaagttgtgctatcaccaatgaaatgatttccttgtttctacatttttccaataaatacttgyttcttacactgtcagtgaagcactaaatatattttggtctgatattttataatttatcaattgctcttactcaaataaacactttacaatttcattgtgtctcaaattactttttagcagaataaaataaagtag

SEQ ID NO: 646382 - DNA, 413 bp, Homo sapiens
agtggtacactccttactgtctcccccttctttttgtttaactaattgagttttgagtgttctattagttctttaaactatggcctgtccttgggaattataaggaattcctgttgtatgtgaaattttccattgacttgagaatttttggaaagctttactacaatatcctggtccattgtcagttttgattttttctggaactcccattacagtacaacaagamaataaatgttttttaacacgggaagtactttctcctgtttggcaacttgcccatatgaaatgtgaataagttttaactgttacatgaacatatgataatcttccaaatgaaggtacatgtgtgacatccatttgccataatgcattaggacactgaccgctgggattaactcctgcctcttgagtgg

SEQ ID NO: 646383 - DNA, 413 bp, Homo sapiens
agtggtacactccttactgtctcccccttctttttgtttaactaattgagttttgagtgttctattagttctttaaactatggcctgtccttgggaattataaggaattcctgttgtatgtgaaattttccattgacttgagaatttttggaaagctttactacaatatcctggtccattgtcagttttgattttttctggaactcccattacagtacaacaagaaaataaatgttttttaacacgggaagtactttctcctgtttggcaasttgcccatatgaaatgtgaataagttttaactgttacatgaacatatgataatcttccaaatgaaggtacatgtgtgacatccatttgccataatgcattaggacactgaccgctgggattaactcctgcctcttgagtgg

SEQ ID NO: 646384 - DNA, 413 bp, Homo sapiens
agtggtacactccttactgtctcccccttctttttgtttaactaattgagttttgagtgttctattagttctttaaactatggcctgtccttgggaattataaggaattcctgttgtatgtgaaattttccattgacttgagaatttttggaaagctttactacaatatcctggtccattgtcagttttgattttttctggaactcccattacagtacaacaagaaaataaatgttttttaacacgggaagtactttctcctgtttggcaacttgcccatatgaaatgtgaataagtttyaactgttacatgaacatatgataatcttccaaatgaaggtacatgtgtgacatccatttgccataatgcattaggacactgaccgctgggattaactcctgcctcttgagtgg

SEQ ID NO: 646385 - DNA, 439 bp, Homo sapiens
agaattccagatcactgagacgaatttctgaatgtatgtccgtaacttaggattccagaacactcactctgttgttgraatgtttgtccctcacatacgattccagaacactgctgttgtagtctgaatgtttctccctcacataggattcgagaacacagctacgattgtctcaatgtttgtccctcacataggattccagaaaaatgctacaagggtctgaatatttgtcacttacataggattccagaacactgctacaagtgtctgtatgtttgcccctcacataggattccagaacactgctacgattgtctgaatgattgtccctcccataggattccagaacactcctgctggggtctgaatgattttccctcacataggattccagaatactgctgctgggttctcactgtttctacctcacatagaattc

SEQ ID NO: 646386 - DNA, 400 bp, Homo sapiens
gcaaagaattcccgtacactgctaagattgtatgaatgtttgtctcccacataggattccagaacactgctacgagtgtctgaaagtttttccctcacataggattccaaaacactyctgctatgttctgagtgtccctcacataggactccagcataatcctgctgtggcctgaatgattgaccctcacatagggttccaaaacactgctgttgggttctgagtgtttgtctctcacataggattccagaacactactaccagggtctgaatgtttgttcctcacacagtattccagaaaactgcttctggggacttaatgtttgtccgtcacataggattccagaacactgatatgaggctctgaatgtttgttcctcaccggggattccagaacact

SEQ ID NO: 646387 - DNA, 611 bp, Homo sapiens
gtgcattttgattttatctgtcttcaagctgaacctttgctcattttaacaagtaaaaacacattcctgggtgaaatgtcattgcatgctaataagacatgaaacatatgcaaaaatatgtacagctactgcacatgtgcacccagaagaccactcaaagcatgccttctataacacttctttccaccttcttatgaataatcatgtaaaactcccagaargagggtttctccagcaacaattaatgctgtctcactcttatgagcaggctgccctggaatctctttctcagactgtaccgtctattctgcacttgattttcaacgtattcttttcttttttgtgtgcaataaattactctatgctgtacttcttttgctgcatgtttcctgtttaaattcttttaagctaagaagataagaaccaaggtattacatcagccatcaacatttcttttgccatggcccggagagaggtttgtctgcttcattaatttcagtttcccttttcttgcagtgaatactatggcacttccagactacctggttaactatcgctggttgttccagcgctgtttcactaaagttctgggggaaacgtgtttaaatcac

SEQ ID NO: 646388 - DNA, 388 bp, Homo sapiens
tggtgtctaatcttggactttcttttgctttaaagaactttactggggccaggcacagtggcccacacctgtacacccagcactttgggaggctgaggtggaaggatcacttgaggccaggagcttgaggctgctgygagctatgattgtgccactgcactccagcctggacaacagagcaagaccttgtctctgaaaagaaaaaaaaaaaaactttattgggaaaaatttgtgaaatcggaataagatctgtggattagataaaatagttggtaccaaagttaatttcctaattttgatgattatctatacttatctaagagaatgtccttggttttacaaagcatatacaccaaaggagtagaggggagtaatgtctgtaaagtaa

SEQ ID NO: 646389 - DNA, 388 bp, Homo sapiens
tggtgtctaatcttggactttcttttgctttaaagaactttactggggccaggcacagtggcccacacctgtacacccagcactttgggaggctgaggtggaaggatcacttgaggccaggagcttgaggctgctgcgagctatgattgtgccactgcactccagcctggacaacagagcaagaccttgtctctgaaaagaaaaaaaaaaaaactttattgggamaaatttgtgaaatcggaataagatctgtggattagataaaatagttggtaccaaagttaatttcctaattttgatgattatctatacttatctaagagaatgtccttggttttacaaagcatatacaccaaaggagtagaggggagtaatgtctgtaaagtaa

SEQ ID NO: 646390 - DNA, 563 bp, Homo sapiens
ataaatataatctcacatcaaatattacactggaaaagcttgatatgaaaaaaattcaaattcctagagaaaaatcagaattaaatttcaaaaacatagtagtaaaaagscaagatatatgcctctataagaaatagctcatttattttaaatattttctaaattaactgtccttgaattctattgcctctcctcattcacttgtatgccatgtgaaaataagaataaatttggagaaataagactcaggattagatcttgattctttctttgaagaactgagtgacttttctatagactgagtgattatatttaatatgctacttttaaaatgtaaagtgtagagctgttctagccaactacaatttttaaaaactaacatggtcaaaatctgataatctctctttagcagaaaatatatacttagcattatagctataatttcatatttaattaaatattggtaaccttggtcaggcgcactggctcacacctgtaatcccagcactttgggaggctgaggtgggtggatcattagaggtcaggcgttcaagaccagactg

SEQ ID NO: 646391 - DNA, 563 bp, Homo sapiens
ataaatataatctcacatcaaatattacactggaaaagcttgatatgaaaaaaattcaaattcctagagaaaaatcagaattaaatttcaaaaacatagtagtaaaaagccaagatatatgcctctataagaaatagctcatttattttaaatattttctaaattaactgtccttgaattctattgcctctcctcattcacttgtatgycatgtgaaaataagaataaatttggagaaataagactcaggattagatcttgattctttctttgaagaactgagtgacttttctatagactgagtgattatatttaatatgctacttttaaaatgtaaagtgtagagctgttctagccaactacaatttttaaaaactaacatggtcaaaatctgataatctctctttagcagaaaatatatacttagcattatagctataatttcatatttaattaaatattggtaaccttggtcaggcgcactggctcacacctgtaatcccagcactttgggaggctgaggtgggtggatcattagaggtcaggcgttcaagaccagactg

SEQ ID NO: 646392 - DNA, 536 bp, Homo sapiens
cggtacagtaagcctccatttttattgaaaatttatatgtgcatatgtacatatttgcttatctaagcatagcatgtatctgaaggacaaagagattggggaggggaagtggatggctgtgggacaggagggtgaaggcttttttttttttctactatgcccttttgtgccttttgaattttatrccacgtgctttaccagtgaatgacaaataaatataatttaatgttttaaatgcatatgttctcgcagtagtgtttttagattacaaagtatagatataaaaattaattggagctctggacagcagactatctatttccaaagtcctctcccatgcccagaagccatgtggaatccgtcaaagaacatcatagtgggaatcgggagacctggctccaagcccaggctgttacccactctctgcgctgcctggggccagccacctcatctctctgaacatctccttcctcctctgtaaaatggaggcagtagtacttgagagctgtgttatatgaaataatattactgttatt

SEQ ID NO: 646393 - DNA, 536 bp, Homo sapiens
cggtacagtaagcctccatttttattgaaaatttatatgtgcatatgtacatatttgcttatctaagcatagcatgtatctgaaggacaaagagattggggaggggaagtggatggctgtgggacaggagggtgaaggcttttttttttttctactatgcccttttgtgccttttgaattttatgccacgtgctttaccartgaatgacaaataaatataatttaatgttttaaatgcatatgttctcgcagtagtgtttttagattacaaagtatagatataaaaattaattggagctctggacagcagactatctatttccaaagtcctctcccatgcccagaagccatgtggaatccgtcaaagaacatcatagtgggaatcgggagacctggctccaagcccaggctgttacccactctctgcgctgcctggggccagccacctcatctctctgaacatctccttcctcctctgtaaaatggaggcagtagtacttgagagctgtgttatatgaaataatattactgttatt

SEQ ID NO: 646394 - DNA, 568 bp, Homo sapiens
ttttaaaacaagacccaacaatatgctgcctacaaaaaactcaattcacctataaaaacacacatatactgaaaatgaagggatggaaaaagatattctatgcaaatgtgaatgaataaagagcaggagtaactatacttttatcagttaaacagatttcaagataaaaatggtggaaagagacaaagaaggtgattatataaggataaaggagtcaattcagcaagagaatayagcaattgtctatgtatatgcactcaatgcagcatccagttatattaagcaaatattattagagctaaagagagagagagacccactacaataatagctggtgacttcaacaccctactttcagcagtgaacacatcatccagacagaaatccaacaacagaaatatcaatctgcactatagaccaaatgggcctaatagacatctacagaacatttcattcaacagccgcagaacataccttcttctcctcagcaatgggacattttgaggagtagaccatgtggtaggccacaaacaaatctcaaacactttaaaaaaatgagatcatatga

SEQ ID NO: 646395 - DNA, 621 bp, Homo sapiens
gactggcatcactcattcaaagacataaaacttttaaccttgactattgcacatagccttttacacacaaaatagacacagaattgggcatgatacattatcttctgtccctctgttccctttttaaccctggatgcyagccacccacctacttgctctgatgtccagctgtccccagcctagctaagtgggctcttccctgtcagccacagactttcctctcctctgaaatgtccttgagtctaggatggtgtgatacttttgctcctgttccgatgttacagttagaagttagccacttgccaggaggtaagaagagctttttagcacagacatctctaagtccagagccttacattcaggaaaaaaatttgaaacggcagaaaaatgcttcagaaatataacttccagacacagaggaaaaacttgtttcctcggttaataaattttgtggcaatgcaatttgacatttacttcattgaattctgggaacatgatgttctggctagttgccacgcaagaattattcttgcagttggcatcctctctacttttcgaagtttatcaccaaagagagacagcttcatcacagacaaacatataggtcaagtttatatgtca

SEQ ID NO: 646396 - DNA, 621 bp, Homo sapiens
gactggcatcactcattcaaagacataaaacttttaaccttgactattgcacatagccttttacacacaaaatagacacagaattgggcatgatacattatcttctgtccctctgttccctttttaaccctggatgccagccacccacctacttgctctgatgtccagctgtccccagcctagctaagtgggctcttccctgtcagccacrgactttcctctcctctgaaatgtccttgagtctaggatggtgtgatacttttgctcctgttccgatgttacagttagaagttagccacttgccaggaggtaagaagagctttttagcacagacatctctaagtccagagccttacattcaggaaaaaaatttgaaacggcagaaaaatgcttcagaaatataacttccagacacagaggaaaaacttgtttcctcggttaataaattttgtggcaatgcaatttgacatttacttcattgaattctgggaacatgatgttctggctagttgccacgcaagaattattcttgcagttggcatcctctctacttttcgaagtttatcaccaaagagagacagcttcatcacagacaaacatataggtcaagtttatatgtca

SEQ ID NO: 646397 - DNA, 621 bp, Homo sapiens
gactggcatcactcattcaaagacataaaacttttaaccttgactattgcacatagccttttacacacaaaatagacacagaattgggcatgatacattatcttctgtccctctgttccctttttaaccctggatgccagccacccacctacttgctctgatgtccagctgtccccagcctagctaagtgggctcttccctgtcagccacagactttcctctcctctgaaatgtccttgagtctaggatggtgtgatacttttgctcctgttcygatgttacagttagaagttagccacttgccaggaggtaagaagagctttttagcacagacatctctaagtccagagccttacattcaggaaaaaaatttgaaacggcagaaaaatgcttcagaaatataacttccagacacagaggaaaaacttgtttcctcggttaataaattttgtggcaatgcaatttgacatttacttcattgaattctgggaacatgatgttctggctagttgccacgcaagaattattcttgcagttggcatcctctctacttttcgaagtttatcaccaaagagagacagcttcatcacagacaaacatataggtcaagtttatatgtca

SEQ ID NO: 646398 - DNA, 592 bp, Homo sapiens
aaacattgcagtacataacaggttgctgtgctgggccatttaagtagtttaggatcactggaccataaagcatgagagagagtgtagcaagagatgagcccagggaagcagccagggcttcagataccgtgctaagatgctgctacttacgtgtaagcagaaaagtaaaacaattatgcagtatttatcctcttagaaagaacattctagctgaggtgtgaagaatggatctgagtttggtgacaagagaggcaaggggaccaattaagaggccactgcagakgaccaggcagcgctgattaccaagacatttcatggctctctctaatcagtaacaatagttaaaacgtactattgttgatattccatgctgatctaggccaaactgcaactgctaaccctagagaaatgtagaaatggactcgttccaaaaaaggggaataaaactttttttttctctgatagaagccgttttcttcttagagatagtatttgaaattacctttaagatgtcatcctatagtattaattttctgctgtttaaggtaagcttgataccccctccatctctaacacctcatacttacagcat

SEQ ID NO: 646399 - DNA, 553 bp, Homo sapiens
tatatggaaccaaataagattgtttcagttaaagtctttgaatcaaaaagatcagaaacttgctcaatcactggagacaattcaacaaggactgacataaaaaggtaaactcagttaggttaggaataaattaccttgtgctatgtgagaaaaagaaccatattttggaaaaacagttgcttgtacataacatttgttagttaggatgatggtaaatgaatatacactgtatattatttatcagaattctcatatcttcactcttttaaaattcaactgagaatgtacatgtgttatataaaatttttcataatttggatttaayttgtttcaaaaattttgattacttgtattggagttgcagcctaaaagtcaactaccctaattttcaattaatcaaaaattattacaaattacaggtcacatattatgtaacatggtgaccatacacagttcattaaccatgtattgtattctggaaaaatgcttaaaaagaaacggtagctttacagagttctcaccacaaaaatgacagctatgtgaggtaagacat

SEQ ID NO: 646400 - DNA, 603 bp, Homo sapiens
cttttaagccctatctgagtgttgggtcggaggttaggcttgacaatytagaggccgttctgctctggtggtacaatattgacttttacggctttgtaaatatcaacatttttgtacctaagctcaagctgaagcagcacagcacactgcagcctgccaacaaacatgcaatgccactctaaagggattttggcaggatttaattaaaaagttaaataagcaaggagaaaatattggtggaaaaggaaaacacaagacataggtgtaggatggcatagcaagtaaaattaaagacattaacaaaataaaaagctaagatttggatacttttaggtagaaagaaaatggagaacttagaaaaaaaagctctaaatggaggaatctaggaagttatcagaagataggattaaatttttttttagaccatattaactaaacttgtttatcctaatagactttccttatcatgttgagcttatgtaaataagcatggcataaaaacgatataaaatcttacatagaaaaagcactttgataggaattgcactacagtcttttccccagagccaatgcaatgtacagaaaacctgatattacaatgaa

SEQ ID NO: 646401 - DNA, 589 bp, Homo sapiens
ggaagctttgaaggtggagatggagagtgggcgtttgcaaggctgtgaagagtcttacgttttgttaaagagccaggagttacaccgaagacaaagggaagttagctttgtatggattcctctggtacaatgtggaaggcgtattttccaaaactgtggacaggtagaacaattataataagtatatgaaattattgatatattatattagtatgttagaataaatataacacaaggtgaagacagtatttgagattccaaggcttaaatttcaagtttatacacaatatctaatgatctttgtcaacagtctgcttttawaatgactatattagtgtcaaagcacgccccagaccaacagacaaaatggactcccccatggctaactaaagggctcaaggttaaagcaaaaccaggcagccatagctgggtgaggcagggttaacacactctgtgttctcagaaagatattataaaagtgtcacaggacctcccttgctacggtcgagccaaatcagtttctgttattgatgccaaagtgaattgtggctggatcttccctatccccactaccagccatttgaaagaa

SEQ ID NO: 646402 - DNA, 589 bp, Homo sapiens
ggaagctttgaaggtggagatggagagtgggcgtttgcaaggctgtgaagagtcttacgttttgttaaagagccaggagttacaccgaagacaaagggaagttagctttgtatggattcctctggtacaatgtggaaggcgtattttccaaaactgtggacaggtagaacaattataataagtatatgaaattattgatatattatattagtatgttagaataaatataacacaaggtgaagacagtatttgagattccaaggcttaaatttcaagtttatacacaatatctaatgatctttgtcaacagtctgcttttaaaatgactatattagtgtcaaagcacgccccagaccaacagacaaaatggactcccccatggctaactaaagggctcaaggttaaagcaaaaccaggcagccatagctgggtgaggcagggttaacacactctgtgttctcagaaagatattataaaagtgtcacaggacctcccttgctacggtcgagccaaatcagtttctgttattgrtgccaaagtgaattgtggctggatcttccctatccccactaccagccatttgaaagaa

SEQ ID NO: 646403 - DNA, 599 bp, Homo sapiens
tgagctctttgtaaaagtgataaaattgtgagttcttaaaaatgcaaattcccctctctcttttatcttttttctctttcacttccctcccagtttctaatgatgctgaagtactatttgacctcccatggtagaggggcaattacttataaaacaggaactgttgattaagagcttttctttctgctagtcctattgtcccaacctatctttctctctccaccccccttcaataagccacacttctgttgaccttgttttcaatgaggctagaaaatccgggataagggtggaatttgggagagggwacctacgaatgccctaaaacttcaaatgactctgaaggtaatgatggcaatgagaacagcagtgagagtgatttgtttttaatcagttgctaagtgcaaggcattccaaaaagtactttgttcagattttatttgtagttacaagtgtgaggtaagtataatttatttgcctcactttatagacaaggaagttgaggctcagaaagatgacttactctaggctacttttctggtgggaggcaggattcaaccgtggctggtttaaccctggggcccacgctcagaatcaac

SEQ ID NO: 646404 - DNA, 599 bp, Homo sapiens
tgagctctttgtaaaagtgataaaattgtgagttcttaaaaatgcaaattcccctctctcttttatcttttttctctttcacttccctcccagtttctaatgatgctgaagtactatttgacctcccatggtagaggggcaattacttataaaacaggaactgttgattaagagcttttctttctgctagtcctattgtcccaacctatctttctctctccaccccccttcaataagccacacttctgttgaccttgttttcaatgaggctagaaaatccgggataagggtggaatttgggagagggaacctacgaatgccctaaaacttcaaatgaytctgaaggtaatgatggcaatgagaacagcagtgagagtgatttgtttttaatcagttgctaagtgcaaggcattccaaaaagtactttgttcagattttatttgtagttacaagtgtgaggtaagtataatttatttgcctcactttatagacaaggaagttgaggctcagaaagatgacttactctaggctacttttctggtgggaggcaggattcaaccgtggctggtttaaccctggggcccacgctcagaatcaac

SEQ ID NO: 646405 - DNA, 597 bp, Homo sapiens
tagccaggcgtagtggtgcgcgcctgtagtcccagctactcaggaggctgaagcaggagaatagcttgaacccgggaggcggagattgagccgagatcgcaccgccgcactccagcctggcagcagagcgagactcagtctcaaaaaaaaaaaaaaaaaaaaaaaaaagacaggttttgcctggagtgcaccctataatggtcgagagggaagcacattcactctttaaraaggaaggccctaaggagaaggcacttcactgggaaagctggaagatgggggtgcttacagcaaaggagcaggaggaaggaagaaagaaagagcaaataacccgggccacaaaaagccaaaagttttggctgttgcagtccacagtattatcttgttcctagtattagcttgctcctagttccacaacatcaacaatggagcatgaaaatgtaaacacctaaccaaatatttgcaccttttggatgatttcccacttctaaaaaatgaaaaatatttggttgtttacagtccccatccatttatctgttcccttccttccagttttttgctaaaacagtgggacaccctggctggagagcaatattc

SEQ ID NO: 646406 - DNA, 597 bp, Homo sapiens
tagccaggcgtagtggtgcgcgcctgtagtcccagctactcaggaggctgaagcaggagaatagcttgaacccgggaggcggagattgagccgagatcgcaccgccgcactccagcctggcagcagagcgagactcagtctcaaaaaaaaaaaaaaaaaaaaaaaaaagacaggttttgcctggagtgcaccctataatggtcgagagggaagcacattcactctttaaaaaggaaggccctaaggagaaggcacttcactgggaaagctggaagatgggggtgcttacagcaaaggagcaggaggaaggaagaaagaaagagcaaataacccgggccacaraaagccaaaagttttggctgttgcagtccacagtattatcttgttcctagtattagcttgctcctagttccacaacatcaacaatggagcatgaaaatgtaaacacctaaccaaatatttgcaccttttggatgatttcccacttctaaaaaatgaaaaatatttggttgtttacagtccccatccatttatctgttcccttccttccagttttttgctaaaacagtgggacaccctggctggagagcaatattc

SEQ ID NO: 646407 - DNA, 597 bp, Homo sapiens
tagccaggcgtagtggtgcgcgcctgtagtcccagctactcaggaggctgaagcaggagaatagcttgaacccgggaggcggagattgagccgagatcgcaccgccgcactccagcctggcagcagagcgagactcagtctcaaaaaaaaaaaaaaaaaaaaaaaaaagacaggttttgcctggagtgcaccctataatggtcgagagggaagcacattcactctttaaaaaggaaggccctaaggagaaggcacttcactgggaaagctggaagatgggggtgcttacagcaaaggagcaggaggaaggaagaaagaaagagcaaataacccgggccacaaaaagccaaragttttggctgttgcagtccacagtattatcttgttcctagtattagcttgctcctagttccacaacatcaacaatggagcatgaaaatgtaaacacctaaccaaatatttgcaccttttggatgatttcccacttctaaaaaatgaaaaatatttggttgtttacagtccccatccatttatctgttcccttccttccagttttttgctaaaacagtgggacaccctggctggagagcaatattc

SEQ ID NO: 646408 - DNA, 615 bp, Homo sapiens
gagccaccctggtgatcttgcaaagacacgagtaaatatgatgaccctatcctttaatcttctgcctgtgggtgcaactctatgagaattcacaagctcaaatgtgtaaatttcttaagtgatgtaaaccagatagatagatcagcctcctakgataaagagtatggtgggaagagcacagagcacacctggtggagaagcaggaaatgtgtgatatattaattcaaccaataaatgctaagtatgtattatacacaggacattatgttaggtgcaggaaaaacaaacagcacagagttcaaactttcaaagaagaaaaatttaatacagagaccataaaactgattaaatattgaagaaaagtgggaagatctaaaaataacatatattattccctacacattcacatataatactagtgaatttttagaggttcaattttctagaaaccttaatctggggatcattaaagcttatattttcttacttctaataatcatccatgaaaatgtttcatatttatgaccatgtcaatattctgtgtgttttcaagatggtattcagtttcggcctaattataacatattttaacaacaggaacaggcgggtttccat

SEQ ID NO: 646409 - DNA, 615 bp, Homo sapiens
gagccaccctggtgatcttgcaaagacacgagtaaatatgatgaccctatcctttaatcttctgcctgtgggtgcaactctatgagaattcacaagctcaaatgtgtaaatttcttaagtgatgtaaaccagatagatagatcagcctcctatgataaagagtatggtgggaagagcacagagcasacctggtggagaagcaggaaatgtgtgatatattaattcaaccaataaatgctaagtatgtattatacacaggacattatgttaggtgcaggaaaaacaaacagcacagagttcaaactttcaaagaagaaaaatttaatacagagaccataaaactgattaaatattgaagaaaagtgggaagatctaaaaataacatatattattccctacacattcacatataatactagtgaatttttagaggttcaattttctagaaaccttaatctggggatcattaaagcttatattttcttacttctaataatcatccatgaaaatgtttcatatttatgaccatgtcaatattctgtgtgttttcaagatggtattcagtttcggcctaattataacatattttaacaacaggaacaggcgggtttccat

SEQ ID NO: 646410 - DNA, 615 bp, Homo sapiens
gagccaccctggtgatcttgcaaagacacgagtaaatatgatgaccctatcctttaatcttctgcctgtgggtgcaactctatgagaattcacaagctcaaatgtgtaaatttcttaagtgatgtaaaccagatagatagatcagcctcctatgataaagagtatggtgggaagagcacagagcacacctggtggagaagcaggaaatgtrtgatatattaattcaaccaataaatgctaagtatgtattatacacaggacattatgttaggtgcaggaaaaacaaacagcacagagttcaaactttcaaagaagaaaaatttaatacagagaccataaaactgattaaatattgaagaaaagtgggaagatctaaaaataacatatattattccctacacattcacatataatactagtgaatttttagaggttcaattttctagaaaccttaatctggggatcattaaagcttatattttcttacttctaataatcatccatgaaaatgtttcatatttatgaccatgtcaatattctgtgtgttttcaagatggtattcagtttcggcctaattataacatattttaacaacaggaacaggcgggtttccat

SEQ ID NO: 646411 - DNA, 615 bp, Homo sapiens
gagccaccctggtgatcttgcaaagacacgagtaaatatgatgaccctatcctttaatcttctgcctgtgggtgcaactctatgagaattcacaagctcaaatgtgtaaatttcttaagtgatgtaaaccagatagatagatcagcctcctatgataaagagtatggtgggaagagcacagagcacacctggtggagaagcaggaaatgtgtgatatattaattcaaccaataaatgctaagtatgtattatacasaggacattatgttaggtgcaggaaaaacaaacagcacagagttcaaactttcaaagaagaaaaatttaatacagagaccataaaactgattaaatattgaagaaaagtgggaagatctaaaaataacatatattattccctacacattcacatataatactagtgaatttttagaggttcaattttctagaaaccttaatctggggatcattaaagcttatattttcttacttctaataatcatccatgaaaatgtttcatatttatgaccatgtcaatattctgtgtgttttcaagatggtattcagtttcggcctaattataacatattttaacaacaggaacaggcgggtttccat

SEQ ID NO: 646412 - DNA, 569 bp, Homo sapiens
ggccatgagccaaggaatgtattcagcccccagaaattagaaaagtcagggaatagaatctgccctcgagcctctggatggaccgctcttctgaggcctccattttagcccattgcaacccatttcagatttctgacttgagaccagtaagataatacatttgtgttgttttaagcagctgaatttgaggtaattagttacagctgcaataggtaaattgacattaaataatatacttgacgttaggcttctttactgtaactcacttctggatggcatgttgttgtctgtttttacctttctccttccccgccccccaattgatctattaggaaatagagaactatcttcatttctgctccttcttccaggcttgaatctacacaacaggccactccccaaaattcctctgcttaatttagagagcaggtttcagggattcacctgggaacaacagcagcaggcacctgactcatattcctggcggagaggaagggaggccatgtagctgctcttscgtggacgcggatgcttcctgcctcatagccgggtcgcctccgcgctaaccc

SEQ ID NO: 646413 - DNA, 434 bp, Homo sapiens
gctctgcacctcttcttttagtgaaataaagaaaaccacacccagaagggtaatcttcttgaccactcctccgcataccgttgcactcagctctgcctgagtaaggggttgtacttaggtcagtttcataccacatgcactgtcaagcctcgatgtcacgtgtcacttttaagtttgaattaaaaagaaaaattttgtatagaaaatactctgcatcacaaatgaatcatcttgatgtaacttaggcaaaaattatattggcttctgaatctactggcatattaattctttatcctaacagcaaaattaatacctctaacaaagatcttagagaacataaaatgtaasagaagaagcacacaaggccgggtgtggtggctcacgcctgtaatcctagcattttgggaggtcgaggtaggcagatcacctgaggt

SEQ ID NO: 646414 - DNA, 554 bp, Homo sapiens
atttttatccctttttaaattaaaacattataaaaataatctgaaaaagtagtatctggtcattggtcccagttgtatctcttcttttctatgttgccagtttgtattttttgcacattcactaaaagagagaagaaatccacagatctgtaaggctaaggtgtaaaaaggaatacattcrtaacagaagcaaataaactcttgaatgcctggtctttaagactggggagtggaggaaaatatattcaacaatttatctgacaagagaacagaaacggaggattaaaattaaggttaaaaagagaatttgaaagcaattatatgagacaggcagaaaaacttcatgcaaaaatcctttctttaaaatgtttactgttatttaaggttggccttgtaatgaggaaaatagcttcattcttagaaataagaacatacttcaggtttttcaggccaaccaatgtagaaaaacatgaagtgagttctgtgatgagataggttgaagtaacccccagtacattcacttctctaaaaatagccatttctttcatgacaaa

SEQ ID NO: 646415 - DNA, 535 bp, Homo sapiens
tagatcttatagtaaaagccaaggggcagagatgtgaatggaatggctctcagaaatcatgtaagaggactttaagtatattccrtcctgtaatctggagcaatgaagtcagagagctgataggacaaaagtagatccaataagtagctgagaatgtgaatagctctaacgagcctccactgaggcttgaagaggagaggcaaaggataataaatgtgctgtcttcaatactcggtactaattcaaagagtttgtacagtttcctgtatagatagcctttggaagaatatagatgaaatgatgaaaaacatattatcaaggtactatcattactaagaatgctaccttacatttgcataatgcttaatagctttcaaagtactataatataagtgagcttatggttcatatgattttcacaatccctgtgaaatatatacaacaggtaacattttataagcctgtaggcaaggaaatttgaatgagagttacaaatacttaattatcttatctgccatcgccataatctgtaaac

SEQ ID NO: 646416 - DNA, 598 bp, Homo sapiens
acatcggttctatctaatctattgttcagcattcgtctgagtattttctgagcagcaattaacccctctgtacctctgagtgcccacatttccttgatccatttcaccttgctgatcaatccttctttactcatagtctaaattttttttttagaacttctgagagtgccycaaaccttggtcttgggtcttccttcaatcttatttgtctttccacctgatcttaattatttacatcacattataccctatctttatggtgacaaatctcaaaattatctctctgacctaaacttatcattaaagatttggttgcaacttattaagaagtcaggttcaatgtaatacatgcattgttgatttaatatgctcatcaaaatacttaaaattttatttgaatgcaaaaaaataaagcttttaattttatctcctatttaataattttgacaaaaacattataccaatcattactaattattgctggcttttaaaatattatctgattaaatatttttgacttggaaaaatggtaacaaatgcttctctctttcttgtccccttgaaccatacttgatatattgctttttccaaatccggg

SEQ ID NO: 646417 - DNA, 598 bp, Homo sapiens
acatcggttctatctaatctattgttcagcattcgtctgagtattttctgagcagcaattaacccctctgtacctctgagtgcccacatttccttgatccatttcaccttgctgatcaatccttctttactcatagtctaaattttttttttagaacttctgagagtgcctcaaaccttggtcttgggtcttccttcaatcttatttgtctttccacctgatcttaattatttacatcacattataccctatctttatggtgacaaatctcaaaattatctctctgacctaaacttatcattaaagatttggttgcaacttattaagaagtcaggttcaatgtaatacatgcattgttgatttaatawgctcatcaaaatacttaaaattttatttgaatgcaaaaaaataaagcttttaattttatctcctatttaataattttgacaaaaacattataccaatcattactaattattgctggcttttaaaatattatctgattaaatatttttgacttggaaaaatggtaacaaatgcttctctctttcttgtccccttgaaccatacttgatatattgctttttccaaatccggg

SEQ ID NO: 646418 - DNA, 557 bp, Homo sapiens
tatttaactaaatgctgtaaggactcaggaaatccattctttcaacaaaagttactgaagactttccccattagtatcctaaacaatgtctgcaaaattggttttcatacctggataccttgtcttctaagagacacggcagggaaagatcataggaaaaaagtcactatcaggcacagctaacaactagcaaacccatagtctttaaaagactgatcctttgattcctatctctcaagtaaagaggtttaggtcatcttcatattacaggaaagtatccctaccaaaaacttctaactaaygactcttaggattcttccaaaagcaaatagtctttgggagaagacagcttccatcaaatgcctttggatcaagtgaatcactatatgagatatcggtatctgcaaaccaagatccacaaaaaaagatccattgtttgtcatatttaatctgtatatcttgagttttcattttcctagttaactttatctttttatgcttaaggttacatttaattactttacctataaagctactattcctaattcctctatgcc

SEQ ID NO: 646419 - DNA, 368 bp, Homo sapiens
atgcttgcctttcaagcaaacaaaattagctgctagaactgagaaagagtgtaaacaccaactaaatgcctcaaagaatcatggtagtaaattacttctccatgttgctccatataaacctgctgtgccacctgttgaargcagcactgatgctgcatgttcagtctggtccaaggccccaacaggaatccgttgtgccaagaaaaggccctactggaaggattggagagcagctggttctcagcaatgcaagcatcaggccaggctggggctgcttaatgctgcttaagagatgacagtggtggaccccaacacctctccaagggatgtagaatctgcttttcccatttctgaatgctactgaaaca

SEQ ID NO: 646420 - DNA, 601 bp, Homo sapiens
tatgatggttaatactgaatgtcaacttgattggattgaaggatacaaagtattgatcttgggtgtgtctgtgagggtgttgcaaaagagattaacatttgagccagtgggccagggaaggcagatccacccttaatctggtgggcacaatttaatcagctgccagcgaatataaagcaggcagaaaaggagagacaggcctagcttcccagcctacatttttctcccatgctgggtgcttcctgccctcaaacatcggactccaagttctttagttttgtaacttggattgcctctccttgctcctyagcttgcagacagcctattttgggaccttgtaatcacgtaagttaatacttaataagctcccctttacatatatatctcctattttttccctcgaagagaaccctaatgcaggtaggtaaattatttttcattgcattatttttcttttgtaaattatccgtgttaatctttttcttacaaagttgttaaaactttttatatgttgagcatattgtatgtatgtgtgtatatatatatgtgtgtgtgtgtgtgtatatatatgtatgtatatgtatatttaaatatgttaccc

SEQ ID NO: 646421 - DNA, 611 bp, Homo sapiens
atagatttagctataatctagcaaactgtatttatagaaaagaattgctggcaaacataaatactggatagtggaacaggcttgtcgagaaataaacatgaaataaaaatgaagaggagattaatttttaggttaatggcatatattgatagaccaaagaaaaatggttgcataagggcaagcattcatgtgtgtatgtgtgattgtatttaaaagtattgactgaccaaatttttaacacattcatacacaatagataagtgtataagactgttataaaaattcagttgaatgaaacagaagttttagttccctgaaattttttaaatttatgatgcatatctagttaaaaaagtaagaataatctctactatttgaaaatcttcggtctgaaaaaatctttttaaaaggccaaatcagccccyaaagtacatggcaaggtatcctccaaaaggaacaacctcagttcatacttgatgattgaggaaagtcctatacctctagtcatgatctgagctcatggtggcagagactgacagtggcctttccatacctgtttctttcatcccagtttcaaaacccctgtcgttaagggccatatggctggccag

SEQ ID NO: 646422 - DNA, 499 bp, Homo sapiens
tcacatggccagaggaggaaggagaggggcggaggargcgccatacacttttaaacaaccagattgcatgataactcactcattcaacatcaggagaacagcactgggggattggtgatccatgatccaatcatctcccaccaggccccacctccagcactggggattacaattcgacatgggatttggggagggacaagatccaaaacatactacttagttaacacacttgtatcaccaccaggctgagagctattctaacagctctttgtatctttgtatcctcaacacaaagcacagtctttagcatatagtgtttataattatgttacaaatgaataacatagctcatttagtatgaagaaaaataaactatcagtgataataaagaatctatagttgaaaataggtatgattttcaagaaaaatctttttcaaagaagagatttttatagaaaataaacattaacattttcttactttctttgttttgcccatt

SEQ ID NO: 646423 - DNA, 514 bp, Homo sapiens
aggacaaccggttcatctgacacaagaacagaaacaagatttctgtgttttagtggctgctccaagaattctttctctgtagtggggaccaagataactattccatatgtgtgggattcacttctgggaggtcttccagcctgcagcaagcgtgacctagagcagaatctctaatccattgaggtaactggtcacctctggacagaaaatctcagagccctgagaggtcagtgggcaggcaggggttatccctcatcctacctctgttccccttggctgccctgtggggcaggaggggaggtatacacagagccgctggatacactgacatcgctggacacagaggtgaccactgtcagcttcacctccctgttytgggagaatgagggcagggaggtggcaggcataaactgctcagccctgcgaccagggaggaagagggaacaaaaaatctgccccaaatggcactgctgaaagagtgaagactgggaaaaaaaaaaaaaaaaaaaaaaaa

SEQ ID NO: 646424 - DNA, 614 bp, Homo sapiens
ccttgtacggcacgctttatatactgtagtacctgctcctgtctacgtgcctgccctgaccgccctgcagaggctccatgggcgaggctgacagctgacacccacagggccatgtactctaagccccttcagtcacacagggaaaagcaatgaggttccacgcatgcccaccagcagaccctcataaacataccggaaatcccatgtgcactccctgaacaagaatgtgtatgaacacacatgaactagtagcacgtggctgctcattgaacaggtgtgtaaggagaattactggtctgcatttcttcacaattttayaccttcttccatctcaccagataaaatatttccatgagtgatgtatataatatacttatgtgtaatatacccaggaatattgaacacccaaacagaataccccaaaaaggtgcggtgaggtagatggtggggagattctatagtagtgagttagccctggtaccaagggaaaaaaaaagtccagagatctcatctgaaaatgtataaatgcatattattttgaaattttgtgacttctcacaatcagtttatagtattattcttgtactgatgtctagatcaggttatattattaa

SEQ ID NO: 646425 - DNA, 532 bp, Homo sapiens
gttgtcatagtattatgtttctttttttttattttcttgagatggactatagctctgttgcccaggctggagtgcaatggcacgatctctgctcactgcaacctctgcttcccgggttcaagcaattctcctgcctcagcctcccgagtagctaggattataggtgcatgttaccataccccggctaatttttgtatttttagtagagaggggatttcactatgttagccaggctgatctcaaactcctgacctcaggwgatctgcccaccttggcctcccaaagtgctgggattacaggtgtgagccaccaagcccagcctaatgtttttgtctgtatagtggaaatacggtaaatttaggacttgtcttagatttaaaaaataaaatttatacaattggttactcaatttagtatcagtttaacttttaaaacactatagaattctcaaggtttcttaaataattttaaggcaggcaattaaaaaattcagaatttcagagatgcaagagcctgaagttttcactggcaa

SEQ ID NO: 646426 - DNA, 532 bp, Homo sapiens
gttgtcatagtattatgtttctttttttttattttcttgagatggactatagctctgttgcccaggctggagtgcaatggcacgatctctgctcactgcaacctctgcttcccgggttcaagcaattctcctgcctcagcctcccgagtagctaggattataggtgcatgttaccataccccggctaatttttgtatttttagtagagaggggatttcactatgttagccaggctgatctcaaactcctgacctcaggtgatctgcccaccttggcctcccaaagtgctgggattacaggtgtgagccaccaagcccagcctaatgtttttgtctgtatagtggaaatacggtaaatttaggacttgtcttagatttaaaaaataaaatttatacaattggttactcaatttagtatcagtttaacttttaaaacactatagaattctcaaggtttcytaaataattttaaggcaggcaattaaaaaattcagaatttcagagatgcaagagcctgaagttttcactggcaa

SEQ ID NO: 646427 - DNA, 437 bp, Homo sapiens
ttgcaactacacggagccaggttagtggtgcggtcagcatggtgataattgggctcatgaacccatgacctcagcttcatcaggagacccactgcaagtactggcccaacaggagggaaaggagctgagtcagatgataccactgaggggcatgagcaaatgaaaaaacaggaacccagccrtgaagctgggcctgagtgttggagatgccactatagagaccctggtcttagcaatccagacttttccctagtagaagggagaggcaaagattatcctggccgggactgtgtaaggcctttgaaggttgaccgtccatctcaccctgctgtttccctccttccctgcagaacagctgttcacctgaatgttccaggcttttggttaacaacccctggtcttttatacccattcacactcaaaatcagggggaattc

SEQ ID NO: 646428 - DNA, 542 bp, Homo sapiens
aatttttaaaagctgcaatgaatgagcagcaatagcagaagcagaaaagtgagtgagggctctccaagaagccatctggcaggctcaagggttgtgagagaagctttggtttcagaagcaactcacgaattacttctgtcatattaggatgggatggtagtagattgggaactctatggactagaagtcatttaatttcctgtctacaatccttagaagaggttttgagacttgcaacctaggaccttaactaatcatcttccctcagcattgatagaattctttattatacatgttaatatcagattagtcaggatgggctagattatgctgtgttaacagccattctctaaatctctgtggctcaacakggagctctgcctgtcatggtcacttgggacccaggctttgggtataaggctacagcacatggaaaacgtatgactgtctctcagattcttaaagtttctgctggaagtgacatgtcattctgctcacagttcattggctaaatgagtcacgtggctgtctctaacttcaag

SEQ ID NO: 646429 - DNA, 592 bp, Homo sapiens
actttcctggtacctacaggcattgggtttacatactttaaggggagcattattattgtctctagcacctgaaaaaatagttgttcaccaggggtgaaccacttgcataaaacctcatatcacagaaatggcagaagtgggatttgaactcaggtctgtcttcctaccgcactcctaagttgggatcagaaaagacaaatttgtccccaaattctatcgctttgaagtctgaatgcctttgtctgcacatcctcctctgcaacttcacacctctgcttagcccaggggcagtgcaggggctgttgcagccagcctcaccctgactccaggccagcctctgatgctyaccaaaacacctctgaactcccatctgatcctgccagtcccaaacacattcctcgtttcttgcttctgtatctttgctcacactgttttttcccgcctggcatgcccaaccctacttagtcatccttcaacgctcaactgaaaatgctactttctacttgttgctcccacatgccctggccaaacacttctttttcttctcaggacacaaagactcagtttttgaaatctgtacgtcaattaccaa

SEQ ID NO: 646430 - DNA, 605 bp, Homo sapiens
taccagggtttctaccaaattaatgctatcaggggaattacacttaaatgsaattctttctatctaaacaattccatctagtttcatcactgctttttctctccccatcccttcctatataaaataattccgaggagtagacatctggaataatatataaagaatcaagttatcaaacaagccaagatttaccaccaggcccagtgaccccgctctaagtcatccagaaaacgaaagtctcaaacagccagtaattctttttgacaggtttcaaataatctttgacattctgcttcttggtacacaatcttcattcaaatgaccaaaacaaaattttaaagaggcacttccatctgggaatcattttcctcatatatttttcatttaaacatcatattggtatgtctaagagaaggcttcttaaatcagctataaaataaatgtaggaatataaatctaaatataatcagtacacttagtgttcctcactgaaaatcaagatgctcttctttatggcatattttttccaaaactaactattcacttgtagaatatttgtgtgacaaagtatcatattgtcatgagtgtgccagtccaataaaagg

SEQ ID NO: 646431 - DNA, 592 bp, Homo sapiens
tctgtttacattttttttctttttttttttggagacagagtcttgctctattgcccaggctggagtgcagtggcaccatcttggctcactgcaacctctggctcctggattcaagcaattcttgtgcctcagtctccaaagtagctgggactacaggcgcttgctaccacacccagctaatttttctatttgtactagagacagggttttaccgtgttggacaggatggtctcgatctcctgacctcgtgatctgcctgccttggcctcccaaagttctgggattacaggcctgagccactgcgcccggcctcaaatctttttctattacaaaatatgctgccaatgaatacacatatctataaatataaatgtttgcacatacatgtgaactgtttaaatatgtctgaagtcttacaatagtaagactgttacagtcttgtgttacagaaacatgagtgggtgagaatgagataaatcataaatataagggaatataaatttctgatttatggtgtgtgtgctttatatatacatacatatatytaatgtatatgtatacaaggagagggagaaagactttaagtattgta

SEQ ID NO: 646432 - DNA, 568 bp, Homo sapiens
ctatgtgttagtccctttcaggttgcaggaaatagatccatacttcatttactttatcagatgggaacttattataaggatacacaatttatagtaataataatagctaaaacttattaatctttccccatgtataagcattactgcaagaacttttcaagcaatatggcattgaatcctcacagcaattaacatgagggagtacttgtattgttcccatttttccaggaaaactgactcataaagaaattaagtaacatgcctgaattatttgggcagctgggattgtaatccaygtccgcttgttctcaaggtcaatgctccaacccactgttctgctatattatctgcatcccagaaggattaggctatcaggcctcttggagaactaaaagttgtcataactcaatgccagctcctgtgatcttgtaaccaggttctactgtggcatctccaaccatttcccctgcttctaccagctgcttcttcttctcttcttccctctacctcatgatccctccttaattatggcctctgctactcaagccttctgcctactgccacttcg

SEQ ID NO: 646433 - DNA, 470 bp, Homo sapiens
ttgctgcaaaattctgaaggaagattaaaaaatttaatcaagtcatactgatttcctgatgtaaatgcagatgccatatggtacccagtatttcagtggttaatagcatagactatggagttaaagtgagaagaaattctgactgtttcactttcaaagtttgggctataatgatcatgtataaatctcttgacctgaattttctcattagcacatgtacagtaatgatggtgataacaataacagcaacaatatctgatttgagcaagtgagaaaaattcatasataaaaaattcatagcaagagtctagctctttgtcaagaatagagcaagtactcattaagtcatcactgtttttaatattataaataattatgaagtctttaaaatttttttatcccaaatgggatttaaaggaatattaaatagattgaaaatgtagttattaaaaacaaccctgattttccaa

SEQ ID NO: 646434 - DNA, 570 bp, Homo sapiens
tcatgcaatgcctttcaagctccaatagctgttttgcttcataaatctcaaaactattttattaattcatatatgtgtagaactattacatcatcttgggaggtaatatatttaatttactatacaaattatttaataaattatatattatgtattatataacatattccttataatatagaacatatttaaattatgaactaataatataaatataattgaaaattttaatattaaataatgcccctctgtgttaataatttttgtcttaaatattatattgtctaatattaatatattgccacaacttttaaaaataagtgtcagtatatctatttttttatatttttactttcaatatctttgcatatttatatatttctattttaaagcttaacaataccttagataattaaaatggatgttktggtctatttacactcattgtgaggtatgtgagtttcctcatactatgctaatatttatatgctacaaaatcttaggggagacatttttattatcatcattataacatttgttgtaatccagagacactgcagaggcagcaaa

SEQ ID NO: 646435 - DNA, 570 bp, Homo sapiens
atgtaacgacagggcccctttgatgtttcccagccaatacaatatgtatctgaatgaggatgaaagtcatcctattaaggccaggctgcagaggcgttgcgatggagcagagattgrggagggggtacggtgcgagtctctgcaagatgcacagcaaggcagggagtgggctgaggctctacggagaggccccttcctatcccagacccagagagaggcctcagttcctgcaccaagggctgggaatggagtttagttgcagggtcagctcacagtatctcagaaggaagatgatctagaaggaaaataaattccttccttgcagggttatttgtttgtgtgcattaaatgggactgtggacctacgtgtgcttcatgatgggataaacatctggtgggacagaattgtttttgtcatcaaaagcagctgcctgtcctgaacacctatgatgccagtgctgtgtgaggcactcaaggagaccaactggtgggaccttctccatctttgtccccacagagctgacagcctaggtggggagaagagcccatcaagagatgtgaatatttaat

SEQ ID NO: 646436 - DNA, 591 bp, Homo sapiens
aattcactgggttgataggaaggctggagcaatgacttagaaaatggggtccagggtgctgaaattgaatagtcctgtcggcactgcccttgaattgttttccactcaagattctatgtcctgagacagagagaggccagttgaccaacattgtgctaccttcttgcttcttagtaggggaatacaaaaggccttaatttacagactcacccaaaagaggagagagaatattccaaaagaaataatgcagatgccaggaaaaggcgaaaatggatgttaggagatcaaaaccagaacatatctggagtagcagccttcaagatcttctgccatggcagccagtagaagcctccttaagcttaattaagggtcagcttaggctgctgattgttttgttttctgatggtaaaagctgaatgtctggccayacctcctgttagtttcctgtggctgctgtaataactcaccaccaactgggtggcttaaaacaacagatacttatcctctcacagtcctggaggccagaagtccgaaattcagtgttagcagggccacattccctttggaggctcttgggggtagtccattctt

SEQ ID NO: 646437 - DNA, 591 bp, Homo sapiens
aattcactgggttgataggaaggctggagcaatgacttagaaaatggggtccagggtgctgaaattgaatagtcctgtcggcactgcccttgaattgttttccactcaagattctatgtcctgagacagagagaggccagttgaccaacattgtgctaccttcttgcttcttagtaggggaatacaaaaggccttaatttacagactcacccaaaagaggagagagaatattccaaaagaaataatgcagatgccaggaaaaggcgaaaatggatgttaggagatcaaaaccagaacatatctggagtagcagccttcaagatcttctgccatggcagccagtagaagcctccttaagcttaattaagggtcagcttaggctgctgattgttttgttttctgatggtaaaagctgaatgtctggccacacctcctgttagtttcctgtggctgctgtaataactcaccaccaactgggtggcttaaaacaacagatacttatcctctcacagtcctggaggccagaagtccraaattcagtgttagcagggccacattccctttggaggctcttgggggtagtccattctt

SEQ ID NO: 646438 - DNA, 310 bp, Homo sapiens
tggttccattaaatttgttccaggaccaaaaaaaaaaaaaaaaamagaaaaaagcatagaattaactgcatttgtaaacactttatttcataatgaataactacaatttaaaaagacagccctttagccaattttcctacttttgaatcattgccattagtaatcaattacccaaattgtaatcaaaacaagacatttttactgaacttctataatgatgtgggcatgctactggatgtattctttaagtttgaagtttttaatagtcaaaaattttaaaaatattttttaattaaaaaatttaattgtg

SEQ ID NO: 646439 - DNA, 310 bp, Homo sapiens
tggttccattaaatttgttccaggaccaaaaaaaaaaaaaaaaacaraaaaaagcatagaattaactgcatttgtaaacactttatttcataatgaataactacaatttaaaaagacagccctttagccaattttcctacttttgaatcattgccattagtaatcaattacccaaattgtaatcaaaacaagacatttttactgaacttctataatgatgtgggcatgctactggatgtattctttaagtttgaagtttttaatagtcaaaaattttaaaaatattttttaattaaaaaatttaattgtg

SEQ ID NO: 646440 - DNA, 606 bp, Homo sapiens
aaaaagatttattatgaggaattggctcatatgataatggaggctgggaatcccaacatctgccttctgcaagctggaggctcaggaaagatggtattaatggcaaagagtgtaattacttttgcaccaacctaaatagttctagtccaagcctacaggcctcagaaccagaggatctaatgtccaagtgcaggagaagatggatgtttaagtgcaagcacaggaaggcagagagaatttgcccttctttcacgtttttgctctattcctgtcctcaccatattggatgatgcccctcacattggtgaggatcatcttctttacttaatttaaaaagtaaaatgctaatctcttttgaaaacaccccaaaaaacatacccagaaagaatgttttatcatgtatctgggcattctagtcaaattgacacataaaactaaccattaaaggctttgcatacctgagactttggctgatgccagacagtgtttactaaataatgggatttacarccaatatctgtttttgtccacctgaggccctggtccacactgtatcagtttgacctctgcagagtggagaactgaagactgaatagtcatttgact

SEQ ID NO: 646441 - DNA, 630 bp, Homo sapiens
tcttccactgcttatagttccaatggaacaagctatggaatgaagcttgttataaaagtggacttcagggtgcattaaaaatgattgtgtrtagacaatagaacattaaaacatgttttcttaggaacagatgccagctggcagggaatagagcacttaatttaattttttaaccaagacagcttatgtgtactcctcaaatacactattacatataggacaatttattgccaccattgcaatggaaacaactcaaaactgtttgggtagacatattattttgtatttctattttgtttatagtaaagataaactgtttcatgcagtttatagtaaaacagcaattattagtagaatctggaggttgaaagcaggtgaactatccttctggatactggagtagccatttctgttctcctattcaatccggcctcccctcgttccttagcatgatcatgaaggacatcttaggaaagtgttttactcgatattttccccctcagctgtaaataggaaagcctcttgtttaattcatgccttattaatcatacataaaagtccaaatcctctgctagacaggaattctctagttcatatgggttccatggttcctggacaaaccctctgcct

SEQ ID NO: 646442 - DNA, 594 bp, Homo sapiens
tctgttttcaatccttcacatttcctccaattaaaattgccccaatttcttccattttatttccccaattaaaaaaaaaaaagattcttcaactaaacactcaataaatgactaaagccaaccatagtaagattacatacatcattatatatttggtataatttagtataattcaaatacatatataaatatttatatagttttatatatcaatttcacgtgtattatatataagtatgcattttatataaatgtatgtacacaaatagtacatatttatacagagttcacactatataggtgtgtgtgttttatatatatatatatacactataaaaagaaacaatgaaaatcataaactttggaaataaatttttgtaagttcaacatgaatacaagtatttttattgtttatttaatgatttaaatctacacagctttgttgttttgattacttttggggcatgaagatattaattgattcactcaatcttgattttatgctgtaatttgataaatttctattgacttcaatttgttgagcattaaatttmatataggtagcttattttgtgtgtgtttttctaagtttat

SEQ ID NO: 646443 - DNA, 586 bp, Homo sapiens
  misc_feature 437, 438, 439, 440, 441, 442, 443, 444, 445, 446, 447, 448,449, 450, 451, 452, 453, 454, 455, 456, 457, 458, 459, 460,461, 462, 463, 464, 465, 466, 467, 468, 469, 470, 471, 472,473, 474, 475, 476, 477, 478, 479, 480, 481, 482, 483: n = A,T,C or G
  misc_feature 484, 485, 486, 487, 488, 489, 490, 491, 492, 493, 494, 495,496, 497, 498, 499, 500, 501, 502, 503, 504, 505, 506, 507,508, 509, 510, 511, 512, 513, 514, 515, 516, 517, 518, 519,520, 521, 522, 523, 524, 525, 526, 527, 528, 529, 530: n = A,T,C or G
  misc_feature 531, 532, 533, 534, 535, 536: n = A,T,C or G
tccctaatgataatcaactcaaagtctgtcttaattctgtgagttaaaagtttattcagccagctctgacttgctgaagattttgaacagaaaaaaaaaatgatctgaactgtgtttgcaaagattaatcttgtagttctatataggatgttttagaaaaagaaaggtagcagggagataacttacaaagaatcatgtacaagcactcttatcatcccctctcttccaccaacaaagatgccattcaaattcctcctcttgccttcccaaggaacagcaggctttcatcacagaactgggatgaaggatacrcttgagttcatttacctggacttcagaggaatcccatctggaacttaccatgcagtctgctagtgaagaggtgagtattaatataggatttgtggctgatataacttttcactgtcacaaattannnnnnnnnnnnnnnnnnnnnnnnnnnnnnnnnnnnnnnnnnnnnnnnnnnnnnnnnnnnnnnnnnnnnnnnnnnnnnnnnnnnnnnnnnnnnnnnnnnnaatcatctatgtaaatatggaaaatgtgtagggaagtgagaagaacatta

SEQ ID NO: 646444 - DNA, 395 bp, Homo sapiens
aattattcattgttctatataacagtgaaatagaagtatgatctttgggaggccaagaagggagggtttctcatggccaggagttcgaggctacagtgagctgtgatcacatcactgtactccatcctgggcaatggagcaagaccttgcctccgaaaataaataaataaataaaatttaaaactgagagaaagaaactaacttcccatagtgttctgggtctctggaaagagtagagagsgacagagaaagaaagagaacaaacagacaaaagcagagaaattgagaatggagtggagtggatggatgaatgagtagatgtgggtgaacatatgaatgaatacatacgggtaggtgaaagtttattattatgttaagtgttgagtgtggaattc

SEQ ID NO: 646445 - DNA, 427 bp, Homo sapiens
gatttgtcaaatagatttcttaaattgttcattccaactaacattgtatcagggctccaatttatctacatcctctcaaacacttgttatttcctgcttttgaaaatctattgccattcatctgtgtgtgtgaaatatgatatctcattttggatttgaaatgcattttctgcacccattaactcatcatgcacatgtatgctagaacttaaagtataataaaacaaaaagaaatgcattttctgaatcactgaatatgagtatctgtcacttgtcctttttgggcatttgcctattttatttggagaaatacctatttagatgtttggccttttaatttaaagttgtaagttagtcatgtattcgatactagaagatgaaaatttaaaayttgttgcttaaacttatgcacacacaaatcatccaa

SEQ ID NO: 646446 - DNA, 619 bp, Homo sapiens
gtgaatgatcccagctttacactctagttgtgccctaaagctccattaggcagtcaattgttggaagttaagtactttaatgaaggactttctttttctaggtaatatagtatagaaggtagaccttagagccagactgcctgggttcaaatcctggctgatacttgccctgtgmagttttgggcaagtcattcagcatctctgtgccgttttcctcatgtattaacataaatggtgttcataacagcacttacttcatggagtggtagtgaggatgaaattagttaatatgcatgaagagcttagaataatgcctggctcctcataaacactgtctatgcgctatgatctgggttaggacagcaggcatcacatgccatccttatgcacgacattcccatgggcatgcttaggattctgggcatttcttggcttgtagctatggctctgttcctttctcttccactcagggaagcatttcagaatgctaaaaaagaaagtgacattactctaggggtaagtctgaacgaggactgattttttaaaattaaatgatctataaatttcagttctcctaagtagtaataataatgacagctgaatttgagcatttactgta

SEQ ID NO: 646447 - DNA, 612 bp, Homo sapiens
tcctcagaacctagctttcttgtccttatattttattcaaatttacaaacaaattctgtgtctgctcccacatgttccttcagtccctactggactggacacatccacatccttggcaggttttcttttaggaggactatgagaagagtgttttcttttagggggactatgagaagagtattttcttgtttcgtatcagtgataattgcccataaattaacgctcatgtgtacagcaacaaaggtaagcacttctagcataatttttgcttggtcagactttttatgaggttctgattctgcaggttcatgatagacagaaacccaaagatatgtgagaggcaggtgytgtgtgctagaaacattgaaagtgtctctcttttcttctttcattttcatttctgcacttctaacacatgaaatttagctgttctaaaatagtcgaggaggaaactggcaaatgatgcttttatattttgggaatttgctttaaaaagggagaatatgaaaacacaaacatcaaagagcaaagtggaaatcatgatagttttcaagtaattccaagacagaaggaagtctgaagtttgaagaactgcaatgggtaatgctcctt

SEQ ID NO: 646448 - DNA, 528 bp, Homo sapiens
agagaagtctgttgtctttctcacttttstttctccaactatttttttctctcactacttaaaaaccttattatcttttatcactgatttttagaaatttgatcattttgtataccacagcatacttttatatatatatatgtttttttgcttcagatttgttgaactactgggatggttggtttcatagatttcatcaaatttatggtcattagtgctataatattttttctttctctccatcttttatgtggactgcaaatcatacatgcttggtttcctgatattgtcttatcactcactattactgctgcttttctgtgtattcgtttcgaaagtgtcttcaagtttattaattgttttcttctatgccatatcatctgctctctatcttccctaggcattttttccagatactgtatgttttaccactttaacttttattttgaatttttaatacattttatttttttctcctcatgttcatcctttcttctaccatcttgaattgttataacagttgtctta

SEQ ID NO: 646449 - DNA, 528 bp, Homo sapiens
agagaagtctgttgtctttctcacttttgtttctccaactatttttttctctcactacttaaaaaccttattatcttttatcactgatttttagaaatttgatcattttgtataccacagcatacttttatatatatatatgtttttttgcttcakatttgttgaactactgggatggttggtttcatagatttcatcaaatttatggtcattagtgctataatattttttctttctctccatcttttatgtggactgcaaatcatacatgcttggtttcctgatattgtcttatcactcactattactgctgcttttctgtgtattcgtttcgaaagtgtcttcaagtttattaattgttttcttctatgccatatcatctgctctctatcttccctaggcattttttccagatactgtatgttttaccactttaacttttattttgaatttttaatacattttatttttttctcctcatgttcatcctttcttctaccatcttgaattgttataacagttgtctta

SEQ ID NO: 646450 - DNA, 592 bp, Homo sapiens
ttttaaaaactgtgttacaaaagtttttagcctgtgtgtttcctccattaagctacaaactctttgagggtggggaatttgttatctgtacctgtgcagccccagccctagttcattgcttagratcttttatctgttcttcttcatctctaccccctgcaaaattaccctgactttccccattaacaggaggtaaaaataacagggggttagggaattccttggagcatcctcacaaatgaaaaaaaattgcttggaaaatccctgcatcagctagaggtacttacccgcagcgcaagttcctataaatctgcaggtgagtggccatgtatttttgacagccaaaacaagaaggaaatgtgaatatttacatgacctgatgtgcaaaaggaaaagataaaccagaggcattagggaagcataattatctttggtattaaaaccagagaatcatttctctggggcctcacacagaggatactttaatttaattaacaatacctccaagagcatctttacaatacatatgacccacaacaaaaagaccataaccatgaaatctagggacattcctgctggttatttgcaatgt

SEQ ID NO: 646451 - DNA, 653 bp, Homo sapiens
ttccatgtagttgagctgttttgagtgagtttcttaatcctgagttctagtttgattgcactgtggtctgagagacagtttgctataatttctgttcttttacatttgctgaggagtgctttacttccaactatgtggtcagttttggaataggtgtggtgtggtgctgaaaagaatgtatattctgttgatttggggtggagagttctatagatgtctattaggtctgcttggtgtagagctgagttcaattcctggatatccttgttaactttctgtctcattgatctgtctaatgttgacagtggggtgttaaagtctcccattattattgtgtgggagtccaagattctttgtaggtcactaaggacttgctttatgaatctgagtgctcctgtattgggtgcatatatatttaggatatttagctgctcttgttgaattgatccttttaccattatgtaatggccttctttgtctcttttgatctttgttggtttaaagtctgttttatcygagactaggatggcaacccctgcctttttttgttttccatttgcttggtagatcttcctccatccctttattttgagcctatgtgtgtctctgcacatgagatgggtttcctgaatacagcacactgatgcgtcttg

SEQ ID NO: 646452 - DNA, 566 bp, Homo sapiens
ttccactttattccacaatagagaacattgtcacatgcccacatctgactataaagaagattaagaaatattgttttgttgcatgcccccaaaaagagagaacaattctggtgaacagttagcagtttaatagcctttaattttttttcacactgctcttgtcagtttttagtattagatttatattattttcataaaatagttgtgggttattgccttgttttctattctctggaacagtttgcataaggcaagtattatttgttctytgattgttcagtagcactctgtcataaatctttctgacctcagtggacagtgtttttagtggaggaacattttaaacttctgattaaattaattcaatggttatattcaagtgttttacttgttcttggtaaattattttttcttaaaaagttgtacattgtgtctacattttttaatttcttggtgtaaaattccttatagttattttctcttttttttttctgaatctcattgtctggtattttgttactttgttactttaagattattatttttataaatatcggtcaattttc

SEQ ID NO: 646453 - DNA, 526 bp, Homo sapiens
ggaagtctttattatactgagagtcttactggatgctagaccccatgtgggacacattatatatctcagtttatttaattgttgcaaccatcactaaagtaggtattttggtggttgccattttrcacatgcagaaaccaggagctaaacaggttatgggacttgctcaaggccagtactgttgaagccagcacccaaacttacgactctgattctaaaattcataagggatatctttgctgtatcagtgttgatgaggacttcaaggttcagaatgaatagcagctagatggtaagatatcacaaatgaaagcacaatatatttacctcatcaagatacatagggttcaccttttctactctctggaagcagagtcaaagtcagacaggaactcctgggactttcagaagccccctgtatcattctttccctggtaactctggggatactgggcctcaacagcttctgatccccactcctggagacaggaagagagacacaattgccaaggcaactagtggacca

SEQ ID NO: 646454 - DNA, 534 bp, Homo sapiens
  misc_feature 139: n = A,T,C or G
atactttatagactgctcgtcaggtggcctctctgtggtttgctcagctaatcctagaaacatgtaagagtcatacagacctataatttaagaaaagtaaataaagtcaattgaccactgattgtctttcttcttatcncagtatctagtaagagcatccaagtataatgattgtgaactcaaataatttgtttcactgcaatttatctttgctagtaataaagttagtggtttcagctttagtctatctctctctctctctctctctctctctttctctctttctccttcgccccaactycatgcctatccctctagcacagggcacttccatcaaagacacatagtaattatgaggttttagtgctatggttgattttctttcattccttatcctttggtaaatgagggaagggaggaaaggaatgagaggaacagaagcagacttcttatagagcaaaatctacagttttgttctaaaaagtgccaatgtaaagatcacagcactgattttcataagcagaatcatttccc

SEQ ID NO: 646455 - DNA, 468 bp, Homo sapiens
  misc_feature 466, 467, 468: n = A,T,C or G
agacctaaaataagctctgaaaaggaccggctctgctcctgctattagtcagctagtcttctgttgctgtgtaacaaaaggcctcaaaatctcaatggcataaaataatgggcatttagttatcactaataaatattagtcagctgaagtgtccctccttctttctttttctccttcttctccccttctcctcatcctccttttatttatttagtatcctattagaaatattaaaggtttaygtcctgagttcagaacagactgtatgctataatttaattacatattaggtctctgctataagagatgagatgagtaaatatgtataaagtgctttgattagtgtgaggcacatttagccttcaaagattaagacttattatgtgagaactacaaaaataaacaaatgagaatcctgaataattttgagtaggatggaactactgactaagaattactgaattcnnn

SEQ ID NO: 646456 - DNA, 591 bp, Homo sapiens
acataaaatgtcatatttattgaatatttgtgtgtatcttaatcattaaacacatgtaaaactttgccaccatttttattatgttttctccttttttgtatgtgtcatggataaagtttctcagtttcatgccccattttttctgtaaccctagtggtttttattrtacaattttgcctagcatgattagttttaagaatgcatatattttggtctctttctctctctatctctatctctctctaaatatatatatatatatatattacatctctctataatgttatagacccatttcataatataatatattgcaattgttacatggaacaattatttatgcaattgttatatggaacaattatatacgcaattgttccttagtgtgtgtatatatatgtgtgtgtgtatatatatataatatatatatgtgtgtgtatatatataaaatatatatatgtatgtgtatatatatgtgtgtgtatatacatttggtatacatacatttggtatatataatatatatatgtgtgtgtgtgtgtgtgtgtgtgtgtgtgtgtgtgtgtgtgtgtgtgtatagttgtaatgctg

SEQ ID NO: 646457 - DNA, 190 bp, Homo sapiens
aaaccatgtgcatattcaggaaggtaaagraagacaaaggtttttaaaggaaaaatgaggattataaagttttttgagataattattcttggcttcaaggatcaagagcataggtggcaccagttcaaggtttgataggtagttgttgggcagatgttcttgctgaagtatttctttttgtgcaggttga

SEQ ID NO: 646458 - DNA, 190 bp, Homo sapiens
aaaccatgtgcatattcaggaaggtaaaggaagacaaaggtttttaaaggaaaaatgaggattataaagttttttgagataattattcttggcttcaaggatcaagagcataggtggcaccagttcaaggtttgataggwagttgttgggcagatgttcttgctgaagtatttctttttgtgcaggttga

SEQ ID NO: 646459 - DNA, 551 bp, Homo sapiens
ttatagctataaacatctacatcaaaaagcagagaacttcaaataaacagcctgatggtgctagaaaagcgagaacaaactgaaaccaacattagtagagcaaagaaataataaagatcacagcagaaataaatgaaatyaaaacaaataatacaaaaaggcaacaagacaaaaattgattttttggaaataaaaacaaaattgacagaagataagccagactaagagtaaaagagagaagatccaaataaataatatcagagatgacaaaggacacattacaactaatcctggagaaattcaaaggataactggagattaatataaacaactatatgccccaaactggaaaacatagaagaaactgatacatttctagacatatacaacctacaaaaattgaaccatgaagaaatctaaaaattgaacagaccaataataagtaataaaatcgaagctgtaataaaaagtctcccagtaaagaaaagcctgagatgcaatagctgcattgctgaaatttatcaaacacttaaagagaaataataccaatt

SEQ ID NO: 646460 - DNA, 551 bp, Homo sapiens
ttatagctataaacatctacatcaaaaagcagagaacttcaaataaacagcctgatggtgctagaaaagcgagaacaaactgaaaccaacattagtagagcaaagaaataataaagatcacagcagaaataaatgaaattaaaacaaataatacaaaaaggcaacaagacaaaaattgattttttggaaakaaaaacaaaattgacagaagataagccagactaagagtaaaagagagaagatccaaataaataatatcagagatgacaaaggacacattacaactaatcctggagaaattcaaaggataactggagattaatataaacaactatatgccccaaactggaaaacatagaagaaactgatacatttctagacatatacaacctacaaaaattgaaccatgaagaaatctaaaaattgaacagaccaataataagtaataaaatcgaagctgtaataaaaagtctcccagtaaagaaaagcctgagatgcaatagctgcattgctgaaatttatcaaacacttaaagagaaataataccaatt

SEQ ID NO: 646461 - DNA, 551 bp, Homo sapiens
ttatagctataaacatctacatcaaaaagcagagaacttcaaataaacagcctgatggtgctagaaaagcgagaacaaactgaaaccaacattagtagagcaaagaaataataaagatcacagcagaaataaatgaaattaaaacaaataatacaaaaaggcaacaagacaaaaattgattttttggaaataaaaacaaaattgacagaagataagccagactaagagtaaaagagagaagatccaaataaataatatcagagatgacaaaggacacattacaactaatcctggagaaattcaaaggataactggagattaatataaacaactatatgccccaaactggaaaacatagaagaaaytgatacatttctagacatatacaacctacaaaaattgaaccatgaagaaatctaaaaattgaacagaccaataataagtaataaaatcgaagctgtaataaaaagtctcccagtaaagaaaagcctgagatgcaatagctgcattgctgaaatttatcaaacacttaaagagaaataataccaatt

SEQ ID NO: 646462 - DNA, 589 bp, Homo sapiens
ggttgtatgcaggacagctgtagcattttaggtggaattatgaacttgttattgcttcattggggattatatatcatttaaggatgtggatatgaagttgacaaggggtaaagttgtaatggttaattttatgtgtcaacttaaatgggccatgtggagcctacataaacattattctcagtggctttgtgatcctttttctggatgagattaacacttttattggtaatctgagtaaagcagattgccttctttaaggcggctgggccacatccaatctgttggaggcctgaataggaaaaatatataaataaaagtggagtaaaggtatatttactctctctgtctgacagtcaaccagctgggacatcaatcttctcttatctttgcacttggattcagactggagtttacactataggctctcctggttcttaggtcatcgggctatgcttgaaacctacgtcatcagttttcctgcttctcaagcctttggattgagactggaagtatacatttgctctcctaggtcttcasctggctgattgcaggtcataggacttctcagcctccataaccacgcaagcca

SEQ ID NO: 646463 - DNA, 589 bp, Homo sapiens
ggttgtatgcaggacagctgtagcattttaggtggaattatgaacttgttattgcttcattggggattatatatcatttaaggatgtggatatgaagttgacaaggggtaaagttgtaatggttaattttatgtgtcaacttaaatgggccatgtggagcctacataaacattattctcagtggctttgtgatcctttttctggatgagattaacacttttattggtaatctgagtaaagcagattgccttctttaaggcggctgggccacatccaatctgttggaggcctgaataggaaaaatatataaataaaagtggagtaaaggtatatttactctctctgtctgacagtcaaccagctgggacatcaatcttctcttatctttgcacttggattcagactggagtttacactataggctctcctggttcttaggtcatcgggctatgcttgaaacctacgtcatcagttttcctgcttctcaagcctttggattgagactggaagtatacatttgctctcctaggtcttcagctkgctgattgcaggtcataggacttctcagcctccataaccacgcaagcca

SEQ ID NO: 646464 - DNA, 602 bp, Homo sapiens
actataggttgaacaaccaacattcaaaaatctgaacttcacaatatgaaagttcatattttgaacttcacccttcaaaatatgaaactttttgagtgcctacgtgcagcctaaatcagatttgggattttcagatttgggatgctcagccagtaaggttaatgcaaatattccataatttcttttaaaaattcaaactctgaaacacttctagttccatgaataagggatactcaacctgtaccaacaactatactttcttcaaaacctaagcttcaaactgtcttttcttacatttattctattggcagaactttacttctaaacacactccagctctatcggtaatatttctctccacctccactactgtcaccctggcatgactcacttcctcctgcggtacttcaggggtctctttccagtctccctgctgtagtccacttggaaaccctgcatggcataggacaagagttcaacagagagttgtggaattratgagtgatttacgcacgttgagaaaaaaggaggtttgagatcaaagcagttcacagaatatgtgctgaggtaataacagtcactcttagacactgccttcatta

SEQ ID NO: 646465 - DNA, 643 bp, Homo sapiens
aaaacattctgcgttctagtaagaaaaaaaaatgaaaaaatgtgtctagagaattctaaactgcatcaaacccaaaaccgactggagtagaaattatatggccaatgtcttggcaacatattcctaattgactctttattgctcctgtcttgttagcaaagggaaaatggtgcttttaggatcttaagaagaaaatgttgtcttggcagcrttttccgcattgactctgttttttctcttttgttggccaagggcagacggtgctttaaagatcttaaaaaggtcataagagagagattttagaacctggcagagggtgtctgttacagccatggccttatcttgtttgccagagagctggaaactgccttgagaccattggccttctccccattcccacactgctggtgctaaagcaggcacacgaatgagtgagtatctcatctactccggccccctagtgatgttgttcactcgttcatcttgcccaatcaggagaaccctgactcacaatatcctcacaaacccaaaagctgtcaatttaaagctgccctggtaaatgagtatttacatctagagtaaagacacaaaaccttacattatttgctgtttcctgtggttgctattttcttggcacgcatca

SEQ ID NO: 646466 - DNA, 588 bp, Homo sapiens
gttctgtgtaactgttagtatattcactatatgcatggtataatttataaaattaatctttgaaactgttaacccctagaaacagaaagaaagaaagaaaaaaagaaagaaacataaagaaatcttgacccactataaatcctgttttctctgccatctcccccagttacacccagggcaagtctatcttcttcaaagacattcagtcagcccacagctttttatcttttcaaacctttaatggcaccattagctacggawccttgatttccttaatttttcccccactgtcactgcaaccatcacatgtggctctcagagcttctagttccctggaaacaggagttctatctgccatcaccaggtataaggtgccaccacttgaagggatctgccctatcaaaaatgaggaaatatattgatcaaaatggctggagaaagtgaccagccaaaacacagcttcacagtcttgcctgttttaagtagattctatttccattttgccggtgacagcactaagcaaataagcaatgttgccaatccgagaacagcctgcattcaaggtattcaatcaatcaaagagagaca

SEQ ID NO: 646467 - DNA, 588 bp, Homo sapiens
gttctgtgtaactgttagtatattcactatatgcatggtataatttataaaattaatctttgaaactgttaacccctagaaacagaaagaaagaaagaaaaaaagaaagaaacataaagaaatcttgacccactataaatcctgttttctctgccatctcccccagttacacccagggcaagtctatcttcttcaaagacattcagtcagcccacagctttttatcttttcaaacctttaatggcaccattagctacggaaccttgatttccttaatttttcccccactgtcactgcaaccatcacatgtggctctcagagcttctagttccctggaaacaggakttctatctgccatcaccaggtataaggtgccaccacttgaagggatctgccctatcaaaaatgaggaaatatattgatcaaaatggctggagaaagtgaccagccaaaacacagcttcacagtcttgcctgttttaagtagattctatttccattttgccggtgacagcactaagcaaataagcaatgttgccaatccgagaacagcctgcattcaaggtattcaatcaatcaaagagagaca

SEQ ID NO: 646468 - DNA, 589 bp, Homo sapiens
tattgacacattcatctggcctctgtctagtctccatcaacagcagaggaatctcacaatctcaccacctaataaggcttcctgccccattcctatgttttaattgttataaaggtctccaatatggtgatctaaagtctgtctttcaaattccactgtgcttcctagaatataaaacaacaaaacaaaacaagaaaaacaaggatgatcttcacatatgtgaacacatttgtcatttctctgcttattttatccaagttaaacttccacagaagattcaactataacttatatgggacaatcttcagatcctcagtaacctagtcatcttttgtaatttggatactaagtgtcaggatctcccttaaaataggccatccaatattgaagctagttttaagatacagtctaagcagaaaagagcagagactataactttccrtggcagaagcactccaagactcaagatgctaaagcaatgttgtgactgatttctttttctttgttgtctttaaaaaatatattcagttatgcaagtcagaaatctctacaccctgtcacgacagcatctgggcataattatgccata

SEQ ID NO: 646469 - DNA, 630 bp, Homo sapiens
gtttcattggctcaaggctctgcaggctttacaggaagcatagtggcatctgtttctgaggaggcctcaggaagcttccattcatggcagaaggcaaaggggtagcaggtacatcatatggtgagaactggagcaagtaagagagagagttcacggggagatgctacacacttttaaatcaccaaattccacgtgaatttagagcgagagctcacttatcaccaaggggatggyccaggctagtcatgagggatctgccccattttccaaacacctttgaccaggccccaccttccactttagggattacatttcaacatgaaatttgggcaattgtccaaatgatatcagaaggtgatccaggcgggacatttcacaaccaccgacatagcaacacaaggtggttgagataggcctgtttcttaccctactgaatacaagttctgccaactacaccaggtgaatctagaagaactggcaaggagactgaatgggaagctccactgacaataagcagccattgggaagcacacttcttcctcttggacctgacacctcttccccaaaccagaggaactctgtagccaggggcatcaacaatgggaattatgccacaacaaatgtccctag

SEQ ID NO: 646470 - DNA, 630 bp, Homo sapiens
gtttcattggctcaaggctctgcaggctttacaggaagcatagtggcatctgtttctgaggaggcctcaggaagcttccattcatggcagaaggcaaaggggtagcaggtacatcatatggtgagaactggagcaagtaagagagagagttcacggggagatgctacacacttttaaatcaccaaattccacgtgaatttagagcgagagctcacttatcaccaaggggatggcccaggctagtcatgagggatctgccccattttccaaacacctttgaccaggccccaccttccactttagggattacatttcaacatgaaatttgggcaattgtccaaatgatatcagaaggtgatccaggcgggacatttcacaaccaccgacrtagcaacacaaggtggttgagataggcctgtttcttaccctactgaatacaagttctgccaactacaccaggtgaatctagaagaactggcaaggagactgaatgggaagctccactgacaataagcagccattgggaagcacacttcttcctcttggacctgacacctcttccccaaaccagaggaactctgtagccaggggcatcaacaatgggaattatgccacaacaaatgtccctag

SEQ ID NO: 646471 - DNA, 597 bp, Homo sapiens
aatactgaaattaaggattcaaaataggtttaacaatagattgtatctaacataagaagaatcagcaaatttgaaaatagtttaacagaatgatcgaaaatgaaccacagaaagaaaagagaatgggaaaaaaataatggcctttctacataatagcaataatcaattagaaaatgttgtctttcttaaaaaaytcattcacattgaaacatgaataataaagtacctaggattaagccaggaaagaaatgtatgagaaatttatgaagacagatgtaaaaatttactaaagaaaataaaagaatacatgaataaatggtgagctatatcatgtccatagttaggaatacaataataaaatatgtaagttcgatctaaattaatctacatatataaaaatttcagtcataatgccagtaagacttgaaaatatactttatgaaaagaaaatatactttatgaaaagatggaggatttaataaatggcaaggaacttcacttgggaaaaatggtcttctatttcaacatttgctacagtctcactcctctatatttatatttctatatttatatttctatatataaatttcctcaccc

SEQ ID NO: 646472 - DNA, 597 bp, Homo sapiens
aatactgaaattaaggattcaaaataggtttaacaatagattgtatctaacataagaagaatcagcaaatttgaaaatagtttaacagaatgatcgaaaatgaaccacagaaagaaaagagaatgggaaaaaaataatggcctttctacataatagcaataatcaattagaaaatgttgtctttcttaaaaaattcattcacattgaaacatgaataataaagtacctaggattaagccaggaaagaaatgtatgagaaatttatgaagacagatgtaaaaatttactaaagaaaataaaagaatacatgaataaatggtgagctatatcatgtccatagytaggaatacaataataaaatatgtaagttcgatctaaattaatctacatatataaaaatttcagtcataatgccagtaagacttgaaaatatactttatgaaaagaaaatatactttatgaaaagatggaggatttaataaatggcaaggaacttcacttgggaaaaatggtcttctatttcaacatttgctacagtctcactcctctatatttatatttctatatttatatttctatatataaatttcctcaccc

SEQ ID NO: 646473 - DNA, 576 bp, Homo sapiens
attaactgcatggactaaactaatagaagtctgaaataatctttttaaattttgcttaaaatgttgctgatcctttgttttgtttttcagagtcaataacacttttaagttatttacagcttttaacagttgagtaaagtatactcctatgaaaaaaatttggagcatattcatttctaactgatttctccagaasttggaaattatttgtgggtatttttaacttatgacaatatgttatttgcataagtgcaataataatctgttttctgtaacaggacacagttggagaaactggtattttaccaaggctttgacagggatggcatgctttcctttaaggaatcaaacttgacttatggagtcactaaaagccccttggaaaaactgacctcatacctttgtctacaccgtccctgtatagggttcctgacctgtggcaagtaaagaatgtcaccttctgacaggcccaggagccccaggtttatcttgggacctcaagagaagaggaatttactcaactcacaggcatttgatggtacaaatccatggctggacttggcttttaaaaagtct

SEQ ID NO: 646474 - DNA, 575 bp, Homo sapiens
cagtccagtctctgacctctgtgctattctgccctatttgtgctgaaatgttaccagtcactgaaactgcrtagatgagcaagacctaattcttgcccccgtgtagtccattgtctaaagcaagagggaagccagagcctgtctacagcttagctctggagtcaggctatctgggctcagattctggctctaccacttagtagctgaataactgttgacaagttactaaacctttctgtgcttcagttatcttgcttatgaaatggggataaaaattttcagggttactgcaaggattaagtgagataatacatgtgaagcacttggaattgtacgtggcagtgcacacagcaagtgctcaataatgctagcagctatcattactatccttggtcattattactgaggtcggccgagaccaactgggctgtcatacccactgaaggaacaagactagtttgaggatctcgaagggactcctcccattcacaaaatgtgggtagatgaagggcctgtttgggacaattacttggaaatttcctggtgcttagctaccacagctctgaagaagttgc

SEQ ID NO: 646475 - DNA, 605 bp, Homo sapiens
gatgtgggttaagtgattcgttctcataagaagttagggttgttatatggaaaagggaattatttccagcgaatataatcaggagatttataaaatagtggaatttaagtttaaaataattcaaggatgtaattttcatagtttgaaaatagagaggayatagagatagcagaaattttatttaatggaacagtggaataagaagtgcaaaaacaatgttgaaagcatattatagagatcacttgaattttaacttctggataattaattttattatactaattacacaaagcaacattataaaaataatgtagaatttaaaatgaaatataatttttataaaacttgtcctcaaattctcctcccaagaaaaccacctatttctgtttttccatcttccttctcactaaagatttctgaacagtgaaatgatatgatggaaaacgtgttgtagaacttttaggaagattaatctatcaatagtaagcaagatggagagtaaagagaagtatctgagacgaatgataattcaattgaagtaattcagatgagaagtgacaagagcctgaacagaaatggaaagaaatgggaagttgtaagaggca

SEQ ID NO: 646476 - DNA, 605 bp, Homo sapiens
gatgtgggttaagtgattcgttctcataagaagttagggttgttatatggaaaagggaattatttccagcgaatataatcaggagatttataaaatagtggaatttaagtttaaaataattcaaggatgtaattttcatagtttgaaaatagagaggatatagagatagcagaaattttatttaatggaacagtggaataagaagtgcaaaaacaatgttgaaagcatattatagagatcacttgaattttaacttctggataattaattttattatactaattacacaaagcaacattataaaaataatgtagaatttaaaatgaaatataatttttataaaacttgtcctcaaattctcctcccaagaaaaccacctatttctgtttttccatcttccttctcactaaagatttctgaacagtgaaatgatatgatggaaaacgtgttgtagaacttttaggaagattaatctatcaatagtaagcaagatggagagtaaagagaagtatctgagaygaatgataattcaattgaagtaattcagatgagaagtgacaagagcctgaacagaaatggaaagaaatgggaagttgtaagaggca

SEQ ID NO: 646477 - DNA, 603 bp, Homo sapiens
atggtagatatcatcctgttactgtcaaatgcaggatgtttttaagcatttcttgtagggctggactagtggtgatgaattccctcmgttttttttgttttgttttgttttaaaaatattatttcatttttgagggttagctagtatagtattattgactggctgggtttttttctttcagcactttgaatatatcatcccattttctcctgtcctgtaatgtttctgctgaaaaatttgctgttagagtgatggagtttctcttatgtttgacttgacacttttctcttgctgtttttagcattctctttgtcattgacttttgaatttgactacagcgtgctttgaataagatcttttgggtcatatctgtttaggaatctttgaacttcctgtgtttgaatagctgtctcttgtgagactggggaagttttcagctattattccattaaataggttttctatgacattttccttctctacattttatggaacaccaaaaatttgaatatttgctcactttctcgtgtcccatatgtcacatagcctgactttattcttttttattcttttctttcttatttttgtctgactgagttactt

SEQ ID NO: 646478 - DNA, 607 bp, Homo sapiens
ttatacttttaaacttttaaaaaaattattgctttatagaccaatatactcaataatttagacagttagttttgttttgttttcttccttccagcactaatcaaattaacatttcttcaactgagcaacaaaagaagttgttgaatgatgttcactagacatgctggagtaaaaaawtgacggtcaggtttccatgagccaccctgcaactctactcggtaattttatttaatctatttctattcatttgtctgttttaaaatatttcatattgttggtaaggctaagaagcctgtatcattccatttaggtatcaattccttgatgaactaatgaaaggcataactcagcatgctgcagttccacagtttggataaaaagtgtaaccatttcagatacactcagaataaagtaaaatagatcaaaaagtgtgaagaagtaagtcacgcatgaaattggagtgtattgtcaaaataagtttaaaagcaataaaaaactattataaatattcaattccctatcaaacaaaggcagtagatgaatgctgaagaagccacaaacaggagatcagaatagtttcagaagaaaaaaaaaaatagaaaaccaa

SEQ ID NO: 646479 - DNA, 612 bp, Homo sapiens
atgcatggattaacttctgggatctctctgtattctgttccttggagtaaatatctttttttcttttaaaaaatgccagtactatgctgtttcagttactctagctgtgtaacataatttgaaatcaggtagtatgatgacttttagctttgttctgtgttgctcaagactgctttagctatttggagtctttagtagtttcatataaattttaggattttaaaaaatatttctgagaaaaatctcattagaaatctgataaggattgcattgaatctctaggtcatttgggtataatagacattttaacaatattgatttttcagatccgtaagccagagatatttatttgtgtcttcttcagtttttttaatcaatgttttttagttttcattatacaatggatcatgggagtttaaaacaattacatactttcgattttttttgttaaaactcccattttgtgcatcatagaatgtacttccctaaaaatgaaatgaatttataaggaacaggaacatatttcctcattccttttaattccctcttcagtatttttgtcgtcaygttagggtcagcgaatatctgtgttactggcagtgaatccatatc

SEQ ID NO: 646480 - DNA, 612 bp, Homo sapiens
atgcatggattaacttctgggatctctctgtattctgttccttggagtaaatatctttttttcttttaaaaaatgccagtactatgctgtttcagttactctagctgtgtaacataatttgaaatcaggtagtatgatgacttttagctttgttctgtgttgctcaagactgctttagctatttggagtctttagtagtttcatataaattttaggattttaaaaaatatttctgagaaaaatctcattagaaatctgataaggattgcattgaatctctaggtcatttgggtataatagacattttaacaatattgatttttcagatccgtaagccagagatatttatttgtgtcttcttcagtttttttaatcaatgttttttagttttcattatacaatggatcatgggagtttaaaacaattacatactttcgattttttttgttaaaactcccattttgtgcatcatagaatgtacttccctaaaaatgaaatgaatttataaggaacaggaacatatttcctcattccttttaattccctcttcagtatttttgtcgtcacgttagggtcagcraatatctgtgttactggcagtgaatccatatc

SEQ ID NO: 646481 - DNA, 370 bp, Homo sapiens
acatggagaaaccctgtctctactaaaaatacaaaagtagctgggcgtggtggcgcatccctgtaatctcagctactcgggaggctgaggcaggagaatygcttgaacctgggaggaggagaatgtggtgagctgagatcatgccattgcactccagcttgggcaacaagagtgaaactctgtctcaaaaaaaaaaaaaaaaaaaaaaaaggaatactatgaaaaattacaggaggaccatctgaaagggaagtaaagctaagctgagatttagagcaggagttggacggccagtaggtagtggcaggggaaggtagtaaagcggtcatattttattataggacatgtatataagtaatttactcatata

SEQ ID NO: 646482 - DNA, 370 bp, Homo sapiens
acatggagaaaccctgtctctactaaaaatacaaaagtagctgggcgtggtggcgcatccctgtaatctcagctactcgggaggctgaggcaggagaatcgcttgaacctgggaggaggagaatgyggtgagctgagatcatgccattgcactccagcttgggcaacaagagtgaaactctgtctcaaaaaaaaaaaaaaaaaaaaaaaaggaatactatgaaaaattacaggaggaccatctgaaagggaagtaaagctaagctgagatttagagcaggagttggacggccagtaggtagtggcaggggaaggtagtaaagcggtcatattttattataggacatgtatataagtaatttactcatata

SEQ ID NO: 646483 - DNA, 370 bp, Homo sapiens
acatggagaaaccctgtctctactaaaaatacaaaagtagctgggcgtggtggcgcatccctgtaatctcagctactcgggaggctgaggcaggagaatcgcttgaacctgggaggaggagaatgtggtgagctgagatcatgccattgcactccagcttgggcaacaagagtgaaactctgtctcaaaaaaaaaaaaaaaaaaaaaaaaggaatactatgaraaattacaggaggaccatctgaaagggaagtaaagctaagctgagatttagagcaggagttggacggccagtaggtagtggcaggggaaggtagtaaagcggtcatattttattataggacatgtatataagtaatttactcatata

SEQ ID NO: 646484 - DNA, 370 bp, Homo sapiens
acatggagaaaccctgtctctactaaaaatacaaaagtagctgggcgtggtggcgcatccctgtaatctcagctactcgggaggctgaggcaggagaatcgcttgaacctgggaggaggagaatgtggtgagctgagatcatgccattgcactccagcttgggcaacaagagtgaaactctgtctcaaaaaaaaaaaaaaaaaaaaaaaaggaatactatgaaaaattacaggaggaccatctgaaagggaagtaaagctaagctgagatttagagcaggagttggacggccagtaggtagtggcaggggaaggtagtaragcggtcatattttattataggacatgtatataagtaatttactcatata

SEQ ID NO: 646485 - DNA, 522 bp, Homo sapiens
ccctggggcccaatgagacgcagaaataccacgacctggccttccaggtgaaggtggcccacttgcaacaaggaccgaaagaagtccagctcagaggccaagcccacaagccaggggctagcaggagtgtaacaagggctcgtgggagcggagcatatcagagacrggcactgccactgcccctggggtgtcctctgaactcctgtcagttgcagcccaaacactccagagctcggataccaaggagcagcttctgtggggcagaacggctgcacacagtcaggaaacctggctcagcctggcccaagccttctcccacagcggggtacacagcctggacggcagggaaatagaccgtcaggcactacgggaactgacacaggtggtgtctggcactgcatcatactctggcccaaagccttctactcagcatggagctccaggccactttgcagcccctggtgagggaggtgacccgtgggcagccctgctgctgcccacctgagctgctcattcccagca

SEQ ID NO: 646486 - DNA, 522 bp, Homo sapiens
ccctggggcccaatgagacgcagaaataccacgacctggccttccaggtgaaggtggcccacttgcaacaaggaccgaaagaagtccagctcagaggccaagcccacaagccaggggctagcaggagtgtaacaagggctcgtgggagcggagcatatcagagacaggcactgccactgcccctggggtgtcctctgaactcctgtcagttgcagcccaaacactccagagctcggataccaaggagcagcttctgtggggcagaacggctgcacacagtcaggraacctggctcagcctggcccaagccttctcccacagcggggtacacagcctggacggcagggaaatagaccgtcaggcactacgggaactgacacaggtggtgtctggcactgcatcatactctggcccaaagccttctactcagcatggagctccaggccactttgcagcccctggtgagggaggtgacccgtgggcagccctgctgctgcccacctgagctgctcattcccagca

SEQ ID NO: 646487 - DNA, 564 bp, Homo sapiens
ggattacaggtgtgagccattgcacccaactggtgtagccacgttagaaaacagtctggcagtttctcaaaaggctaaatgtacagtcatcctataatgcaacaatttcactcctaggcatatatcccagaaaaataaaaatatatgtccacacaaaaacttgtataacaatcttcatagcagcattattcataatgaccaatacatggaatacayggaaacaacccaaatatccaccaactgatgaacagataaacaaaatgcagtgtgtctctaccatggaatactgccatagaaggaatgaaatattgatacacactatgacataaaggaactttgaaaacactgtgctaagagggaaaaaaagccacaaaagatcacatattgtacaattctatttgtccagattaggcaaatctatagtgacaaaaaaattaatcaatggttgcctaaggctgggagtgaaggtaggtggggagagtaggaggtagtggctgaggggtatggatttctctatagggtaatgaaaggttctaaaagtgactgtggtgatcgatgcacagc

SEQ ID NO: 646488 - DNA, 440 bp, Homo sapiens
gatatggcccattttctcaattgcaattatttcctgagataagattatgggtctaaagagtgaaggacatttttcacttatttaaaagtatttattatttttataatttaataaaagattaaacagatcattgaattagtaaaagacaaagtaactctataaataaatggaaaagacacagataccccaggcatggtggctcatgcttataataccagtattttgggagggggtggtggggggattgcttgaggccaggagttccagaccagcctaagaaacaaagcaagacctcgtctctagtaaaaataaaaaaataaaaataattggccaggcatagtggcatgtgcctatagtcccaactactgaggyggaaggatcacctgagcctaggaggtcaaggctgcagtgagttgagactgtgccactacactgaagcc

SEQ ID NO: 646489 - DNA, 518 bp, Homo sapiens
ctaagacccatgaattgcaacaggaaagaaaagacagggaattagtcagacaggtacatgctgtgccaaaaatgcactacagcccccacccaattctgcctaatcctagctgggctgacaccaacctgatgagacaggcctataagatctcaaactaaaacagaaactcctgaactgggttctttcaarcccaggaagcagcagtaaatcattaaagaacagataagttcttaaggtgagggagagtttcagataaatggaatgctggtagaacacagggcccaaaggagcaaaagttaacctaagcccaggtagaaccttgtttactagagtattaggcatgggtttgggcaactattctaaccagagaaactggcttcagtgagggcaagttggcaatccaaggtatagcatgcatagggctggcaaaattcagggtgactggagcaaaagcttcagaaccagaaagaccacatctgggggtagagcacaaaactctcaagagatgaatctttgta

SEQ ID NO: 646490 - DNA, 441 bp, Homo sapiens
gaattcatacctcacttcttccattcttcaggcttttgcacagctccagcgagcaccattcacactttccagtgagcaccattcacacttttacctaaaggcataagattcacggagaatacaatgtgaatgatcatccccccattcccccacccccccaatggagttgtgacatgctatggccctatycactagctattagcaatgaactaatagtattatttgagaaagagcttggccatcactatatttgtaaagtgaccattttaatgtctacatctccaacttattctaaggatcaaattagataatatatgaaaagtgctcagcacagagcctgacacattgaaagcatcagtaactagtagcaatgattatttttcaagtcacctaatctaggatcatgcccacacaagaaccattgaggtacttgctctaaga

SEQ ID NO: 646491 - DNA, 384 bp, Homo sapiens
ctgctgggtgaggaccctcctcccctcctgccctcccctacccccatcagggagcagtcatggctggtgagaggtgggccaccttgacaaacctagtggaaggggtctgctcagacaactataacaatagcagtagctgacattcattagataagctgagtgttctattaaacactttacaagcactgcctcattcaatcctgcagcactgtttgggaaatattagtatcattgtctctaytgtacaggtgaggaaacgggcttagtgatgctaaggatctgtccaagtcacagggctagtaagtggagcagctgaagttggactgtgtgaccttctgcagccaggtccctgaaacggcttcaggacaccacttacgtctgtcg

SEQ ID NO: 646492 - DNA, 435 bp, Homo sapiens
caacttttttatttttatttttttgagataggatctcactcctgttgcctaggctggagtgcagtggcacagtcacagctcactgcagcctcaaccgtggctcaagtgatcctctcacctcggcctctcaaagtgctgggattacaggcttgagccaccacacccatctggttcaacttttatgtaacaaagtcgtgagttgttgttcagctgccatggacccacatgttgaaggtcacataacctctgcatgmccacatgagctaagtgtgcaagcaggagggagtgtaagcactcccaaggagtggggactgaattaagatgtggacatgcatggcaggatcaggactcaatcatactgagtcctggcatcaccccatggcaggatccaatcggatcatgcctcctggcatcaccctattgcaagatccaatc

SEQ ID NO: 646493 - DNA, 491 bp, Homo sapiens
atttgcccaacattccacacagcaagctgggagtggatattttaacctaggcagcgtggttcaagagcctgctctgctagcgatcttacaaattgcccatggcgttgtgtggggaacatactgagatggcaaagctgtgggcaaccaggcaaatgaggatggatgggacatttggagtgaacagagttccgggcatcccagaccctacagttgtttgaaaagaataaaaattagcgtgaaggggycatcaaggatgaacactttcaaaattataaattcattttactcagtcttggtacagaaaaatacagatggctgcatagtttatgctggtctatgtacataaccagcaaaataactaaagcccttggcctttgggaagattgccattgtgattccagatgcttagatgtgctatgtggactaagccaggcagaggcccttaggtgaattagtaccattctgtgaatcatgtctcaaacatgtagact

SEQ ID NO: 646494 - DNA, 491 bp, Homo sapiens
atttgcccaacattccacacagcaagctgggagtggatattttaacctaggcagcgtggttcaagagcctgctctgctagcgatcttacaaattgcccatggcgttgtgtggggaacatactgagatggcaaagctgtgggcaaccaggcaaatgaggatggatgggacatttggagtgaacagagttccgggcatcccagaccctacagttgtttgaaaagaataaaaattagcgtgaaggggtcatcaaggatgaacactttcaaaattataaattcattttactcagtcttggtacagaaaaatacagatggctgcatagtttatgctggtctatgtacataaccagcaaaataactaaagcccttggcctttgggaagattgccaktgtgattccagatgcttagatgtgctatgtggactaagccaggcagaggcccttaggtgaattagtaccattctgtgaatcatgtctcaaacatgtagact

SEQ ID NO: 646495 - DNA, 390 bp, Homo sapiens
gtatttaagcatataagaataggttaattcatatatgatttaggggcagtaaaattatataatatcactaaatataataaatcattgcaaacgtcaagcattctgcactatatatgaatatatatgtatagagagatttcagtttgtgaattattgacatgttaccttaatagcaatttattttagtggaaattttaagaccttcattatcctttatttaggaatcaaatgaaacattttctacatttccatttgactgaatcggttatatcataaawtataatcaaattattgaaagaatcactttaaattaatagcacatgctgagtttctatcacaaaatttggttcaagtagtttatgttcctttccgtttaaggagttgagtcat

SEQ ID NO: 646496 - DNA, 603 bp, Homo sapiens
ctccttcccacatttctctgctaggcaggatgggagtcgaaaaagtatgattgcaaaagtggaaattagttgctgaatgttataacaagataatttgaagctgggggatagaatggatcatataacttctagaatcattaatagttagagaaccaaagaatttgtttgaataaaagcaccaagataacactaaataatataacagggtctatataaataaagaaatagccattatttcaatgcattaatacctgagactggcatatttatatgyatagatttctttatttttatttttatttttttctttatttttatttaaaagattgatcttctgaggaattcctccaaagccccccaatcaaaggttttcatcataattgatgtgatgtgatcatcttatgtgaaacatcataaataagcaaaaacattagaggaaaatatatgttttgaggggtggattgtttagtgctataattatttgctttggaccctagtcttagagttcttaaaggcctctaaatggagcttgcatggaacagacaaacaaaacatagcatccccagtgagcaattccccatattttctcatcaaatcttgtgc

SEQ ID NO: 646497 - DNA, 621 bp, Homo sapiens
taatatttgcaggaaattcagttttataattgtaataaaacatagtaatttttatcattgttcatcattattctagtttatgtagaaatttatatcaccaaaaatgtagtccatacctatgaaatactaactttagtacattatggatttctatttttcttctagagaaaataaatgaaaattatataaattatggacaatatatcttacaaagatatttctcctacataattatttcctaaaaagatgtgacatttaacttcaatcataccaaagtctatgatacaaattagagaaaaatgaatatgtcaaaatgaagtacactatttccaaataatagacatcttcatttagtataatatttttacatctgtatatttccattagtaccaggacttaccaacataaagaagtgggaaatcatcaagctgtgaagatgcaaagtgactgtaccattytgtattccaaccagcaatgaatgaacttgttcattgcttcatatcctttccagcatttgccattgtcagtgttcacatattggctataatgtagtttggccatagtaggtgtgtggtgttctctcactgttgtctgaatatggatttccctgatgacatacga

SEQ ID NO: 646498 - DNA, 567 bp, Homo sapiens
caataaaattatataaaattacttcacaacaggaacgcagacagtgtttccaatagctatgattgttattgcaattctaatgtagggttatttatttaaaagttcacagcattttcaaagatataacaaattatagaagggtgatcattctttacatctctcttccagtgcatacttaaatttttagtggtccatactggaaaacagatagaatgcaatggtgctttctatggttgtatctacattaggaaaaggttactattatagtcaaacaaaagtcatcacttcttttcataaggaatttgaataaacgagccctgaagaatagtttctgagtgaactttattgaagattagttttctagtgattcttccttatkaccggatctctctagtgtttgctcttctgacagctttccgtgtctgaaattttgaagaaaaaactaatatattctcatttcaaaatatcataactttctaactctctcctgtggttaaaacatattattcacttaaggtcagcattatgaatataatcaaaaatatgagatctggggaggataatgtg

SEQ ID NO: 646499 - DNA, 611 bp, Homo sapiens
caccttttccacactcagtatgatcttagctgtagatttgtcctttatgtccttctgtgttaaggcatatattttctacactaaattgttaagaggttttttgtcatgtaagaatatttaattttgccaaatgcttttattgtgtttattaatttgatcatatggttttcagtatatatccaaaggaaagaaaatcagtatatcaaagagttacctgcacctgcatgtttattacaacactattcacaatagccaagatatggaatcaacaaaagtgtccatcaacagatgaatggataaagaaatgtgacatacatatataatggaatattatttagtcgtaataaagaacaaaatcctgttatttgtggcaacaagaatgcaagtggagggcaytatgttaggtgaaataagcctggcatagaaacataaacaccacataactacgtgttctcacttatgtatggaagctaaaatttttaatctcgtagaagtagatagtagagttttggttaccatatcctggaaagagtaggagaaagaagagtataagaaaaatgtggttaatacatacaaaattacaggtggagagaaggaagaagttctagttc

SEQ ID NO: 646500 - DNA, 363 bp, Homo sapiens
aatagaaaaaccaataatactccaggcacaagttagtactaaaaaagttatgttgaatattctctaatacaacatgctttttcccttcatgaacratttgtgttttactgagaagagtcattgtttatggtagacattagactacagatgaatatgtactttaaacactcttagttgctttcgtaattttatatctgctgctttatgcttctgtttattttcattctttccaatgtccacattctagtaaatttgaatattttaatccaagtttatatactatttaatattgcttgtatagtttagtatttttaagactcaaaaaggtttacagaaagaagaaaaagatcaacatgttattaa

SEQ ID NO: 646501 - DNA, 363 bp, Homo sapiens
aatagaaaaaccaataatactccaggcacaagttagtactaaaaaagttatgttgaatattctctaatacaacatgctttttcccttcatgaacgatttgtgttttactgagaagagtcattgtttatggtagamattagactacagatgaatatgtactttaaacactcttagttgctttcgtaattttatatctgctgctttatgcttctgtttattttcattctttccaatgtccacattctagtaaatttgaatattttaatccaagtttatatactatttaatattgcttgtatagtttagtatttttaagactcaaaaaggtttacagaaagaagaaaaagatcaacatgttattaa

SEQ ID NO: 646502 - DNA, 474 bp, Homo sapiens
ccctgcctcccaggtgggtggaagatgcctgtcgccaaactagggcccagcttgccgggtgagatgggtgaactggtgatcccccgagagagtggacgtcagaactacatggtcctggacctcacctcggccagcgaaggagagagagggttaatgttaactgcacgaggcccactctagccttaaattctgaaattcaaacccttcccttggagacaaaacaaacatgacaaggaattctgacatcaggggacaagaatcacaagttccctagtgggagactgaggaggcagtgtccttcctgcccttggtctactggctaagaaccttcctcagcctgacctttccacattgcrcttccagctctgtttgcaattttcctcctttagtgctgagggaatcccagtgttcgatcctgaaatctataggttcctaatgggtggttaaaaaaaacctcagcgagagaagcagaaa

SEQ ID NO: 646503 - DNA, 358 bp, Homo sapiens
tattcatgctgcctggattctctgatacttagcaccaattctgtgaccttggggaaattattcctctatcagcttcctcatctggaacttgggaaaagtaaatatacctacttatgaaccaggaatgaggtttaaatgtgaaaatccatgtaaagcctacaggatgatacttggcacataaaaaatacttcataaaatatgattacctaattattattttcaaggaattgatggtggggaacrtcaatacaaaattaagtatggaatgataccatttatgttaaaattcatatgtgagaatctagaagatgaatgtgttaatagtggtgatgtcaggggagcagcatattagggaact

SEQ ID NO: 646504 - DNA, 579 bp, Homo sapiens
cttggtaacttgcctcttctattattttgactaagataatggctctactttgctccagataaactcttttctagtatttcgttgaactcctttctagtattttgttgtctgctctcaaactttaaggtggtaatagcctgatgataaccatttcctcatctgctttcccatctgaattatttcacaatgttaccttatgcaaaatattctgcagcagttgctctcttaggttttcagcaaacttaagttctttgtggtcttttttgatctactattgtattagtccattttcacgctgctgataaagacataccagagactgggcaatttataaaaggaagagattcaattggacttacaattccaaatggttggggaagcctcacacttatggtggaaggcaagcaggagcaagtgatgtgttacacggatggcagcaggcaaagagagagcttgtgcagggaaactcccatttttcaaaaccatcagatctcttkagacttattcactatcatgagaacagcacaggaaagacctgtcctatctttcaattacctccccaccgggtccctcccacaa

SEQ ID NO: 646505 - DNA, 594 bp, Homo sapiens
ggctcacaactctaaggggatccatgtgagagggtcgtgatagattgagcaagcagggggtatgtgactgggggctgcatgcaccggtaatcagaacagaacagaacagaataggacagggatcttcacagtgcttttcttatgcaaataaccgattaggtaaggggtcgatctttaactactaggcccagggtgtggtggcagactgtctgcttgtggatttcatttctgccttttagtttttacttcttctttctttggaggcagaaattgggcataagacaataagaggggtggtctcctcccttagaagtaggtycgtttggacttacctatgtctattttctgatgagcaaaatgtgtaatgctagaaagtatgtgaccttctgaatgagtatcggagttaatctaaagtacatcctactcacctgaaggaatatataagaattgctaagcctattgggaaattaaatagcctcatatagttttcatcttttttttgttctcttttcatgccaaatctctaatggcagtgctaaagagcaatgaaatggccaaaggcaggaagccagagagaaaagggagagaatgaag

SEQ ID NO: 646506 - DNA, 594 bp, Homo sapiens
ggctcacaactctaaggggatccatgtgagagggtcgtgatagattgagcaagcagggggtatgtgactgggggctgcatgcaccggtaatcagaacagaacagaacagaataggacagggatcttcacagtgcttttcttatgcaaataaccgattaggtaaggggtcgatctttaactactaggcccagggtgtggtggcagactgtctgcttgtggatttcatttctgccttttagtttttacttcttctttctttggaggcagaaattgggcataagacaataagaggggtggtctcctcccttagaagtaggtccgtttggacttacctatgtctattttctgatgagcaaaatgtgtaatgctagaaagtatgtgaccttctgaatgagtatcggagttaatctaaagtacatcctactcacctgaaggaatatataagaattgctaagcctattgggaaattaaatagcctcatatagttttcatsttttttttgttctcttttcatgccaaatctctaatggcagtgctaaagagcaatgaaatggccaaaggcaggaagccagagagaaaagggagagaatgaag

SEQ ID NO: 646507 - DNA, 253 bp, Homo sapiens
aaaccaaacaccgcatgttctcactcatagataggaattgaacaatgagaacacttggacacagggcagggaacatcacacctaggtcctgtcgggcatgaggctctgggggagagagagcattaggagaaatacctaatgtaaagaatgagttgatgggtgcagcaaaccaatatggcacatgtatatccatttaacaaacctgcccgttgtgcacatgtacmctagaacttaaagtatggaaaaaaaaaaa

SEQ ID NO: 646508 - DNA, 621 bp, Homo sapiens
gtaaaattttctagaaattccactctaattcaatttgttcatgatctactgttatcttcttttatcaagattcaatttatcttttacagcagttagcttacaagggtcatatggcctttatggaaaaacttcagttctcttcataaaaggtccactactgaagacatagtttgacaacagaatgaatttcccttttacctgaaaaagtgaagataattgaagggtttcttagtctgacaactcaaagacaattaaaaggttttgagctttgcaacaacctgtaacattagggctcccaagtaataaataatttttccttgtttgttcacaaatgtgatcatcaagccttggaagtccttaactcaggaacaatgacattaacctattggttattatgtcctacagatagatgcagtggccagagcatatccaatttgtctaaaagcagtggccacagcaactagattgttagaaacctaatctcacttagtattagagaatgagctttacctacaagttccacatgcagtcaaaaacttattaaattgcaattacacctaacatttttcctcaagtrgactaacaatatatgaaatccatctctttttatcttctaatctc

SEQ ID NO: 646509 - DNA, 572 bp, Homo sapiens
tgagaatatgcccagattctgcccagtgagacagagggaaagcttgcttggggatttgagaaaggctccgctttcttaaaaagatatttagaaatatgtcaagaaaggccttttctttggccttgaatccaaccctgcgagggagagatagctgaaactgctgtcacattttaaggagagcagccaacacattcaggatggcagaacagaaaggtggaaaaacccatgactaccatgcaaagccatgaattaatcaaacctgaaagtatctacctcctgacttcctgtgagagatgacaccttttccttattgtctcagtcaattttagtttggtcatctgtaaaatttgcagccaaaattagcttttataagaccagcagattcattaagcatgtgatactgtgcaaataaaaagacctctgcmtatgtgtaaaatttcagagggattcattcaacaagtagattttgagagcttactactatttaaaatttattaattgtgagaatgtgtttctgttggggttttggactctgtagcacaaacatgaaattgatagtaaaaaccagctgt

SEQ ID NO: 646510 - DNA, 652 bp, Homo sapiens
gttttctgcagcagagggtaagttccgatgaactctagtagatggatgaaagcaatgtagttagctttctaataacatccacaaatgatcaccaaaaacaacacatgtatataggatatcaaaaagatcctaaaccatcatcacaatttgactttttaaaacttacacaacaaggcaaacgatttggtggtaacttctaaaattgtactagaactagggcaacttgcacacacagaaacaaatagaataatttgttgccagaatgtttctggtgtctgtgggttttaaaataagtcccagttttcctcctgatctagaacatctcattatcatcatcaaaaggaatacttgcttctgatgtcttatatatttactatctttaacagatagccaggggattgcagtctttgatgtttacatttatctaatttattgtccacaggctttgaattgcttatttaatttaaattwatgggccatgtttaaatcaaagaaagctaaactaattaggcagaatagcctaatctggcactttaaactttaagatttattgcgggcattcaagatttgaaattgactgcatttattgaataaagccaggaagccattttattctaacggttgggctaggttaatctgtaatgaaatccag

SEQ ID NO: 646511 - DNA, 496 bp, Homo sapiens
aagtgtaataattccaaatgttgtttccaaattcacattcccacccccaccacttggtaactatagcgcttccttcacaaggccaagtgcagagatttcttgaggaaataatgagaactattatacattcttatttcaaggacccttaaaattataagattgccatatttgatactaatttaagcttctgtcattgcccttttttcaatccagtctccacacagctaccacagtgtgcaagtagaagtctcagccrtatcaccacactcctcctttaatgtccctactccattgcttcttttctccttcagaagagtttaagcttaatgaagctgggcaactttacatatttttccacgagctggagatcacttggtgtaaagtaaaaatgatcagtaaatattttcaaataacagaatccatgaataatagttttgtttctttgagagtacactgacttttaaaaatcaagaaaatagattggtcaagagaattc

SEQ ID NO: 646512 - DNA, 496 bp, Homo sapiens
aagtgtaataattccaaatgttgtttccaaattcacattcccacccccaccacttggtaactatagcgcttccttcacaaggccaagtgcagagatttcttgaggaaataatgagaactattatacattcttatttcaaggacccttaaaattataagattgccatatttgatactaatttaagcttctgtcattgcccttttttcaatccagtctccacacagctaccacagtgtgcaagtagaagtctcagccgtatcaccacactcctsctttaatgtccctactccattgcttcttttctccttcagaagagtttaagcttaatgaagctgggcaactttacatatttttccacgagctggagatcacttggtgtaaagtaaaaatgatcagtaaatattttcaaataacagaatccatgaataatagttttgtttctttgagagtacactgacttttaaaaatcaagaaaatagattggtcaagagaattc

SEQ ID NO: 646513 - DNA, 514 bp, Homo sapiens
ccctgcaggtctcacagggttgttgtgagggycacctgtggtgatgggtttggaagtgctttgtgaattacacagtgggctttcctattcctgtcattggcctttcgaccttcaatactaattgcctggggatctccaggcctcaaggtctaatcctggaaaggtatgaggtgtccctagtggaatattctacacctcctgggaggtctctcacttcaaccttcacctgacataacccctgctcctgttacctcagcctggagagcttgcccaggagcacagggtagtactggactgacctctttggaaagggtgattacatcctcatttcagctctccctcttcctagctttccacgtagaaatccagggctccatgcagcatttgctggacatgagggggaaaaattttagggcagggatctgccctgggtggggacagaggagtatcctggagtctcagtgtcaggagtgtgagacctacccagctgccagcccctgtccccatgctgctc

SEQ ID NO: 646514 - DNA, 514 bp, Homo sapiens
ccctgcaggtctcacagggttgttgtgagggtcacctgtggtgatgggtttggaagtgctttgtgaattacacagtgggctttcctattcctgtcattggcctttcgaccttcaatactaattgcctggggatctccaggcctcaaggtctaatcctggaaaggtatgaggtgtccctagtggaatattctacacctcctgggaggtctctcacttcaaccttcacctgacataacccctgctcctgttmcctcagcctggagagcttgcccaggagcacagggtagtactggactgacctctttggaaagggtgattacatcctcatttcagctctccctcttcctagctttccacgtagaaatccagggctccatgcagcatttgctggacatgagggggaaaaattttagggcagggatctgccctgggtggggacagaggagtatcctggagtctcagtgtcaggagtgtgagacctacccagctgccagcccctgtccccatgctgctc

SEQ ID NO: 646515 - DNA, 514 bp, Homo sapiens
ccctgcaggtctcacagggttgttgtgagggtcacctgtggtgatgggtttggaagtgctttgtgaattacacagtgggctttcctattcctgtcattggcctttcgaccttcaatactaattgcctggggatctccaggcctcaaggtctaatcctggaaaggtatgaggtgtccctagtggaatattctacacctcctgggaggtctctcacttcaaccttcacctgacataacccctgctcctgttacctcarcctggagagcttgcccaggagcacagggtagtactggactgacctctttggaaagggtgattacatcctcatttcagctctccctcttcctagctttccacgtagaaatccagggctccatgcagcatttgctggacatgagggggaaaaattttagggcagggatctgccctgggtggggacagaggagtatcctggagtctcagtgtcaggagtgtgagacctacccagctgccagcccctgtccccatgctgctc

SEQ ID NO: 646516 - DNA, 581 bp, Homo sapiens
tgttatcctgttgtggatatttaagttcaarcaatgcagtaataaatatgcaagagtggttttagacattaaacaatgtggctctaaattagggacctagtgcctgtaatcccagcactttgggaggtcgaggtgggtggatcacctgaggtcggaagttttgagaccagcctggccaacatggcaaaaccccgtttctacaaaaaatacaaaaattagctgggtatggtgatgtgcacgtgtagccccagctactcaggaggctgaggtaggacaattgcctgaacccacgaggcagaggttgcagtgagctgagatcctgtcactgcactccagtctggggacagagtgagactctgtcccaataataaataaataaataaataatctagaagtacaattgcttagccaaatttcttatgcattttgaatgataagagttgctgcctaatttctgttacaaaggctatggtaatttacactcaaaacacaggataggttggttgttgtcacatatggagtcttactgttgccgagactggagtgcagtggtgtaatcctagctcgttgtagcctccaac

SEQ ID NO: 646517 - DNA, 581 bp, Homo sapiens
tgttatcctgttgtggatatttaagttcaaacaatgcagtaataaatatgcaagagtggttttagacattaaacaatgtggctctaaattagggacctagtgcctgtaatcccagcactttgggaggtcgaggtgggtggatcacctgaggtcggaagttttgagaccagcctggccaacatggcaaaaccccrtttctacaaaaaatacaaaaattagctgggtatggtgatgtgcacgtgtagccccagctactcaggaggctgaggtaggacaattgcctgaacccacgaggcagaggttgcagtgagctgagatcctgtcactgcactccagtctggggacagagtgagactctgtcccaataataaataaataaataaataatctagaagtacaattgcttagccaaatttcttatgcattttgaatgataagagttgctgcctaatttctgttacaaaggctatggtaatttacactcaaaacacaggataggttggttgttgtcacatatggagtcttactgttgccgagactggagtgcagtggtgtaatcctagctcgttgtagcctccaac

SEQ ID NO: 646518 - DNA, 357 bp, Homo sapiens
agctcttattatttcttctatttggtctagtctgttgctaaggctgcgaactgttttttgaaattcctgtagtaaatttttcaatgcaagaagctctgcttggttctttctcaatatggctatgttgtcattcaaatccaggatcattgttatggggttgctgttggatttcaactttctgttggattttggtgatttttttggccacttatgtcttgaatactatacctgtcatttcagacgttccattctggttaggactcattgctagattgctggtgtaatcctttggaggwgatggaacattctggctttttgtattgccagagttcttgtgatggtttcttctcatctgag

SEQ ID NO: 646519 - DNA, 544 bp, Homo sapiens
tatcattctgggatctggagggcagcagcccccctcccacagctccactaggcagcccccctagtcaggaccccgagtggggcctccaaccccacatttccacttggcactgtcctagaagaggtcctctttgagagctccagtcgtgcatagtcttctccctgggcatccagcctttctcatacatcctctgaaatttaggcagrgaatgccaagcctccttcactcttgcactttgctcacctgcaggcttaacaccacatggcaccaaggcttatagtttgcaccctctgaagccatgacctgagctctatctgcagccctttgaaccaaggctggagctagaagggccaggatgcaaggaacacctcctgggggtggtacaggacagtgatgccctggccctggtccaagtggaacaggaattaaaagaaattaaagaatgtgtaagcagaaactcagttgtatgtgagaaaacccaattccccctgagaaagagaaagagctggagccctttaaaaattaactgcctgtttttctgtgg

SEQ ID NO: 646520 - DNA, 502 bp, Homo sapiens
ccttctaagtctggttctgttttcccatgcagacttttctctgagctctgcttgtcagtcttgctagaatctcaccctaggcagcaacctccagtctgagattgcccttgacagtggctgaggtttgcattgttggaatggattagaaaaaacaaagggaagacagaccaaaacagatttaaatacagatcccatttgttgaagttttaagtaattttaaatgtttatttgcaccagctgcccactcccattgtgctctcctcacccaaaaargtgacttgatattctagtaaaaagccaaactgtgctttagagaaacccacttgttacttctttaaatccatataattttgccaaagtgaatttttcttaatatgctctggcagaatcagtaaactaattatttacaccagagtcacttaacctttcctcttggtcatttgcatgtaaattatttttaaatgtataaaatttgcttactcaagaaagctcttgctatata

SEQ ID NO: 646521 - DNA, 502 bp, Homo sapiens
ccttctaagtctggttctgttttcccatgcagacttttctctgagctctgcttgtcagtcttgctagaatctcaccctaggcagcaacctccagtctgagattgcccttgacagtggctgaggtttgcattgttggaatggattagaaaaaacaaagggaagacagaccaaaacagatttaaatacagatcccatttgttgaagttttaagtaattttaaatgtttatttgcaccagctgcccactcccattgtgctctcctcacccaaaaaagtgacttgatattctagtaaaaagccaaactgtgctttagagaaacccacttgttacttctttaaatccatataattttgccaaagtgaatttttcttaatatgctctggcagaatcagtaaactaattatttacaccagagtcacttaacctttcctcttggtcatttgcatgtaaattatttttawatgtataaaatttgcttactcaagaaagctcttgctatata

SEQ ID NO: 646522 - DNA, 322 bp, Homo sapiens
ctcagctattccagaggctgaagtgagaggatttttttaagcctgggagrgcaaggctgcagtgagccatggtcgcaccagtgcaccccagcctagatgacagagaacctgtctcaaaaagtaaaaaggagaaaatctaaaaagaaatgtattaaatcaagacgtgtagacatagaaaataatagagacccctctctccacaaaaccttgtatatatggtcaaaatgatcttcaacaagggtgcaaaggccaaactatggagagggaataatagccccctttaacacaaaaacggtatgaagatttgctatcaacatgtaaa

SEQ ID NO: 646523 - DNA, 322 bp, Homo sapiens
ctcagctattccagaggctgaagtgagaggatttttttaagcctgggagagcaaggctgcagtgagccatggtcgcaccagtgcaccccagcctrgatgacagagaacctgtctcaaaaagtaaaaaggagaaaatctaaaaagaaatgtattaaatcaagacgtgtagacatagaaaataatagagacccctctctccacaaaaccttgtatatatggtcaaaatgatcttcaacaagggtgcaaaggccaaactatggagagggaataatagccccctttaacacaaaaacggtatgaagatttgctatcaacatgtaaa

SEQ ID NO: 646524 - DNA, 322 bp, Homo sapiens
ctcagctattccagaggctgaagtgagaggatttttttaagcctgggagagcaaggctgcagtgagccatggtcgcaccagtgcaccccagcctagatgacagagaacctgtctcaaaaagtaaaaaggagaaaatctaaaaagaaatgtattaaatcaagacgtgtagacatagaaaataatagagacccctctctccacaaaaccttgtatatatggtcaaaatgatcttcaacaagggtgcaaaggccaaactatggagagggaataatagccccctttaacacaaaaacggtatgaagwtttgctatcaacatgtaaa

SEQ ID NO: 646525 - DNA, 458 bp, Homo sapiens
tatgcaaggatcaccattaataaaagtagactattgtaaagtgaattagcaataattttacttatgaataaaaacttatactatttcaggtcattttcttattgtttcttgaaaaaataagtcctttataagtccagttaaatattacctaatttttgcatcaaatttcatggtaaacaaggcttattttcttactttactgatgtctaaaagctaaatttcactggtgatatatcatttgtttaagactaggtaactgataacctaagctgagacccaaaatttgttattttctttatttccagcacaatattttccatcatggtatattacatcttgctaaagaagctatgtttctttagcaagacaattgaaaagcataaacattggtttactrgaaagatttttaatattccatattatttacaactgtttgcttatttccatgtataaaatga

SEQ ID NO: 646526 - DNA, 610 bp, Homo sapiens
tttatccaatctgcataaaaagcctgcttaagcactggaatgccattatggttggccataattaagattctaaccaggtattttttgtatgtatagtaatttcagtatttgtaatactatattaaataacacgtgtatgatgcttgcaaaattggaattattagactcaatgtatatatgaggaaactgaggttcagaatattacaygaaagttctttctaatctcaaacagcaagtaagaaagtgaagaagctgggacacaatatcagttctctgactccatattcaatgcatgggtctatttctcaaaagatttgcactgaactacatagatgtgggaagaaagatcaaggatgtagaaggacacaagaaatgagggggaatataaactaagattgaaagacagtagatgcagaaacctctcttcaccttcccaaaccacttaatggcctcttcctagcctggaaatgtaactgctatctgtttcacctgggcctggaattgtgtgtgtttgcttggtgttttcaacatgttgactgaccctatgtaacaagagcactctgaagatgtttgcagaaaggctgcctgtatttgctataacatgtactag

SEQ ID NO: 646527 - DNA, 521 bp, Homo sapiens
gctttggacccctcacgtggctggtactacggtaggctctgctaggtgattaactatcagaaattacccaagatagctgcccacatgtctggagtacttattgcaacatttgcccaccataaactcttagtgattgcagctgattgacagaattaatagagataataaatattttaggactcccatattcttcaactaccttgaagtaagacataaaaatccagcataatttaagcctaaaatctaaaacgaaataatgcaaagtgaaaataataatttcatttaaaaaagcttgtctccaagawcattaagcactttcatatcttcaggggccactaaaatgtattgattgagaatgcaggagaaaacctctgtttttacaaaaagttttgaagtaggaaattttagtgaaaagaattgcgtgtacttctaggaaatctcatcatgatctcagtgtaatagccatttgcaaaagagccctgaactgagtccatgccagggagcattattggaaaatggcc

SEQ ID NO: 646528 - DNA, 568 bp, Homo sapiens
aagttgacattttaaaattagccctcacaaacatattgataacaaaacaaataggaaatactcaagaatattaatctttatatctgttacccatcatgtggtcataatgggtatttataaytatcttcgtccatcacaattctgtattctctctgcattcatcaaggtcctcagttggctatggttctttatctggcaggataacccaagtctgtattcctgaaggatctgggccatttgtcaacctgcctggattgggttgttgtagttttccattgagtttaatcacagggtatgataatacttacagacaccccaggaaatctcttgtatttcaactacattctcccttaactccattgtgaaatagcaggccaacttccactcagtagttaggctcaatcactcgaaccagctcagtaactccattcattatctagtgactcagagacataaggagtccaaagtggctgaacagcagtctaaacttccaggtcaatgcaatcattgttttgtcttctagcagaagcagtctcctttagaacaagacctctaagccagcataagt

SEQ ID NO: 646529 - DNA, 616 bp, Homo sapiens
ttttctttataaattacttaagccatagatttatctcaagaaagctttagtcatccccatcatgacaatctattaggattattcttcaatataatgtaattattgaaaataactactatatcttctaactttggattaggcacacctttgataagcatatcttctatgctcccaggtggtcttgaaacttcctcccatttatttatgcaacaatatacttctgatgtggtcacagaatcagctctcaactttatttttgttaggtttaaatttgcccagaaaatgtagcttttacaatttggcaattaaagtatacaaaaagagtatacaacagaattttaaaatattgtgtagtatcagataactatgatagaaaataatctaatagttccagtagacagaccactaaaatcaaagaagttcaatagtcaataacagaattaacatgctagcagattagtagattaaaatagcaatggaataacatttagcamtcttactaaaatttatatctaaattatagaagaaagttttggtaaccagatctcaggggaaggactcatagaattctaagaggaaagtcttggaatttaggaatgagtattagaacacaaca

SEQ ID NO: 646530 - DNA, 428 bp, Homo sapiens
ttaaattctgaaattccccagtcaactttgtatttacctatgcctcctcttcaaaatagtttgttcttcactttctttattatctctaactgcttaatccccccacccatcagttacaaaaacaaaaacaatctctgtttatctttcctctttgggcttcacctctcatttcttagcctgaactccatggcatgcgaaatcagcaacttcccttaggagaaactagattgtttagcttttctgtccttccaccatacctgtccagccaatctcctaccctgcagaaagcaacttccatttattttcttccatccttctctcaggggaccaagtgttcctggacaaagtcataaaatagggccaattggtttttttaataaatccacatttttcaaccttaactggraccctcatttctgttgggaatt

SEQ ID NO: 646531 - DNA, 312 bp, Homo sapiens
tcctttgttttttatcatttttaatggcccaagtaccaaattagtatattcagtaaaaaaaaaaaagtcacattatttttctttgttaaaaagttattgcttaagttattgcatgcctactgttttaagatgaagtcaaatgtgctatttacttataagatggatctattcttgataggtgacttttaactttcctggttgcattgcaaggcggccttgcagtttaatcttgtaaatcaaatgctttctatccaatttttatgtctatatgaatttttwaaaaccatttttagaggtctttgctacttatta

SEQ ID NO: 646532 - DNA, 613 bp, Homo sapiens
acttaggacttcatcacacatccttaattcccatggacagggtgagtaagaattattcctttgtttggaatggaaaaccaagtctcctggagattgtaagaactttggtgggattctggctgaagacatcatgaggtgcttagactctgctcttcgtgtcaaagaaaagtccttctctttccaggccagartaaaaaaatactgggtcatgtttacctggcttggttatctatgaagctactactgcttttcttctcagcctctcttctctgtctagttttactccatgagacaatggcgagagacttctattgtccccgagaaagacaaggagaaagctgatctgcacctcagtggcctgtgcagttgatcataatcctgggaaacccatagtatttcctgaagactggactggcgactaccaacgtttcaaaggccatctgcagaacttctgaagaggcacctgggaagttagagcagaggcttgccaggactcctcctctgtgctctagcttgaagattaacaatgtcaagttgagagtaggcaaaaaatgtcatgctcacagacagcaccagacaactagggctcagttgaagttggtgggggagacat

SEQ ID NO: 646533 - DNA, 473 bp, Homo sapiens
aaaccaaaatccttaggatgctgctaaagcagtattaagaggaaagtttatactaaactttccctccagcataaactaatgtttagtatatactaaactttcctttagtataaactgaagtttatactaaatgtcttcatcaagaagttagaaagatcttgaattagctgtctgaaagtgcacctagagcaactagagaaaaaggaacaaagcaacacccaagctagcacaagaaaagaaataaccaaaatcagaaaagaactgaacaaatgaaatttgaaagtccaaacaaaagatgaatgaaatcaagaattggttatttgaaagaataaacaagattcatagaccactactagctagattaagaaaggaaaawaaaatagaagatccaaaaaacacaagcaaaaatgacaaagatgaccttacagccaattctacagaaacaaaaaggccttcagagactaatatgaaca

SEQ ID NO: 646534 - DNA, 617 bp, Homo sapiens
acagaatccctttgctatatacatgtgtagagaatatttcttcccagtctgtgacttcctyatacatttctgtaataatgtctttcgataaacagaaaattttaattttaatgaagtcccttttataatctttttcttatatggttaattatttttacatcttgtctaagaaatccttgcttatgcccacagacatctgaactgccagggagtattgcctggaaagttggcagagagagaactccagcctgtgcaaagcccagagggtttggaataggaatagcagcagtggagcacagcctgggtcaccccttcccaaaggctcaccatactcctctaggcagcgctagcctttgttgcctgccagaccagagcagggctgtcttgcctgtgggacgggacaagtctgattttagtgccccctctctgccagcctctctcaaggtccctgcttggccatacctacttgcagtgcaacctcagtttgccagcagcccccaccatagctctttctgtgcggagccagcatttttgagcacttttgcacacacctaccagtgcacaccttgccagtgcacacctacccagagcctcccccaactaatgtgcacccatcc

SEQ ID NO: 646535 - DNA, 617 bp, Homo sapiens
acagaatccctttgctatatacatgtgtagagaatatttcttcccagtctgtgacttcctcatacatttctgtaataatgtctttcgataaacagaaaattttaattttaatgaagtcccttttataatctttttcttatatggttaattatttttacatcttgtctaagaaatccttgcttatgcccacagacatctgaactgccagggagwattgcctggaaagttggcagagagagaactccagcctgtgcaaagcccagagggtttggaataggaatagcagcagtggagcacagcctgggtcaccccttcccaaaggctcaccatactcctctaggcagcgctagcctttgttgcctgccagaccagagcagggctgtcttgcctgtgggacgggacaagtctgattttagtgccccctctctgccagcctctctcaaggtccctgcttggccatacctacttgcagtgcaacctcagtttgccagcagcccccaccatagctctttctgtgcggagccagcatttttgagcacttttgcacacacctaccagtgcacaccttgccagtgcacacctacccagagcctcccccaactaatgtgcacccatcc

SEQ ID NO: 646536 - DNA, 617 bp, Homo sapiens
acagaatccctttgctatatacatgtgtagagaatatttcttcccagtctgtgacttcctcatacatttctgtaataatgtctttcgataaacagaaaattttaattttaatgaagtcccttttataatctttttcttatatggttaattatttttacatcttgtctaagaaatccttgcttatgcccacagacatctgaactgccagggagtattgcctggaaagttggcagagagagaactccagcctgtgcaaagcccagagggtttggaataggaatagcagcagtggagcacagcctgggtcaccccttcccaaaggctcaccatactcctctaggcagcgctagcctttgttgcctgccagaccagagcagggctgtcttgcctgtgggacgggrcaagtctgattttagtgccccctctctgccagcctctctcaaggtccctgcttggccatacctacttgcagtgcaacctcagtttgccagcagcccccaccatagctctttctgtgcggagccagcatttttgagcacttttgcacacacctaccagtgcacaccttgccagtgcacacctacccagagcctcccccaactaatgtgcacccatcc

SEQ ID NO: 646537 - DNA, 495 bp, Homo sapiens
tgcctaactgtgagcatccagtcascttctaacaactctgaaacttggctgtgtcaaaccagtacccagatgccaggagttcctttcttctttcttaccacacatgctaagtcattacaggtaagaaaaaaattctgtcagttgataggagagtttggcagaatcaaactgaacatttgtacctagtaagtattgattagtctatccatattagagaaatctctagtctttagtattatgcccaaaactagtgtcttatttaaaaaagaaactgaaataaataggaagtctagttattagtaggagcacaaggaagtattaggtaaaatctgaagtgtctgtcacttggattgtctaaacaatggacaaccgccccatagcccataagaaataccatttttatgttgctcatagttattttttatttgaaagaaaataaactgattagagataaaggggatatcgtaggcaaggtaagtagttggatgaaatcac

SEQ ID NO: 646538 - DNA, 495 bp, Homo sapiens
tgcctaactgtgagcatccagtcaccttctaacaactctgaaacttggctgtgtcaaaccagtacccagatgccaggagttcctttcttctttcttaccacacatgctaagtcattacaggtaagaaaaaaattctgtcagttgataggagagtttggcagaatcaaactgaacatttgtacctagtaagtattgattagtctatccatattagagaaatctctagtctttagtattatgcccaaaactagtgtcttatttaaaaaagaaactgaaataaataggaagtctagttattagtaggagcacaaggaagtattaggtaaaatctgaagtgtctgtcacttggattgtctaaacaatggacaaccrccccatagcccataagaaataccatttttatgttgctcatagttattttttatttgaaagaaaataaactgattagagataaaggggatatcgtaggcaaggtaagtagttggatgaaatcac

SEQ ID NO: 646539 - DNA, 479 bp, Homo sapiens
gtttttctccagtacacaatcaggttcaagatcatatactgcatttaattgcctcatctcttttgtttcctttattctgcaaaaaaaacttgtagctttttttatgttttaagacattgacaaattcaccactcartaaaaccttgcacttgtccttcgagcccatatgtgatccagtttttccggtacactgggcgagaacttgagatacagaaaatggtcacactggccctctatgcttgccataggcggagggtccattgagctggttaacacaagccgtctgcagatggcaaaactgaaaaagcacactgtaacacacaccctcttgggcttcaggagtcacagacacccatccctagatgctgccatggggctagatcccaaaagtgctccccatggcctctgcacctgcccgtctgcatgttcctcctaggggtctgactactggggcaactgaaggagcgagccacatccct

SEQ ID NO: 646540 - DNA, 479 bp, Homo sapiens
gtttttctccagtacacaatcaggttcaagatcatatactgcatttaattgcctcatctcttttgtttcctttattctgcaaaaaaaacttgtagctttttttatgttttaagacattgacaaattcaccactcagtaaaaccttgcacttgtccttcgagcccwtatgtgatccagtttttccggtacactgggcgagaacttgagatacagaaaatggtcacactggccctctatgcttgccataggcggagggtccattgagctggttaacacaagccgtctgcagatggcaaaactgaaaaagcacactgtaacacacaccctcttgggcttcaggagtcacagacacccatccctagatgctgccatggggctagatcccaaaagtgctccccatggcctctgcacctgcccgtctgcatgttcctcctaggggtctgactactggggcaactgaaggagcgagccacatccct

SEQ ID NO: 646541 - DNA, 479 bp, Homo sapiens
gtttttctccagtacacaatcaggttcaagatcatatactgcatttaattgcctcatctcttttgtttcctttattctgcaaaaaaaacttgtagctttttttatgttttaagacattgacaaattcaccactcagtaaaaccttgcacttgtccttcgagcccatatgtgatccagtttttccggtacactgggcgagarcttgagatacagaaaatggtcacactggccctctatgcttgccataggcggagggtccattgagctggttaacacaagccgtctgcagatggcaaaactgaaaaagcacactgtaacacacaccctcttgggcttcaggagtcacagacacccatccctagatgctgccatggggctagatcccaaaagtgctccccatggcctctgcacctgcccgtctgcatgttcctcctaggggtctgactactggggcaactgaaggagcgagccacatccct

SEQ ID NO: 646542 - DNA, 511 bp, Homo sapiens
acaaggaaaataaaaacataaaacctaagatgtaaaataagaagaattaattttatgtcccactccaccagaactatatctttgcatttccatcacttaaactacctgacccacagtgaccttgagtataaaatgagcataaaaatttctatctccctcaaaggttttctataagaaacatatgaattaatggatacaaaagtgctctgtaaactttaaaatgctacacaaatgttattataattacatggggagcattaggtttcccaagcccactccatcctttttggccttagagtgcacctgcctctggaagagctgtgttaytttaacagaaagttaattaggttctttaccctccctctggatatctgcctgagttagaagtgcagctcagcacacaagctctatcatccatattaaaagtgggattttctgagttggcctgggcagctagttgaccaataagttccaatgtgtgttttcaataaagctgcttacccaggaagcc

SEQ ID NO: 646543 - DNA, 482 bp, Homo sapiens
ggtggctcatccctgtaatcccagcattttgggagcctgaggcgggaggatcacttgaacccaggagttcaagaccagcctggacaacgtggtgagaccccgtctctggaaaaaatacaaagattagcctccagtcccagctactggagggtgcagggccgggggtgggggctgagttgsgaggatcgcttgaacccaggaggtcaaggttgcagtgattgcgccgctgcacttcagcctggtgacagagcaagaccctgtctcaaaaaatgaaaaataaaaagaccttctgatgttttcagacactgtgacccatcaatctgtgaaaggaagataaatctcaggaccccaaaatcactaagccaagggaaaagtcaagctgggaattgcatcaggcagaactgcctcccattttattgctaaatgagatagctacaaagataaaagagctacatacctccctcacaatttgtccacaagga

SEQ ID NO: 646544 - DNA, 598 bp, Homo sapiens
ctttttaaagctgagccctgccatgggtttgtaccctcaaatgcctatgagttgggtaaattcttttcttttttcccacattctttccctttcttcttcctccactttccccatytcttttcccttccctccttctgcttttctccttcccttgcttgtcttctgtgctcattcatctccttggctgctcccctggccttcccaacctttctccctgttggtctcctgggctccctgttcctcatctctcctcttctcagcagctcctcacccaaggagctgtggcccaggctgtcaccagtggagaaaccaaaggcaacttcttcaccatgtttctggctggctctctggccgttacgatagccatctacgtgggtggtaacgtctcaggtgaggagggtggggtctggtcatcagagcacgtgggatgtgcatgccagtttgtctgtctggtgatggtggaaacgcaaatccttctgtgactcgtggacattatccccttgaacagtgccccagactgaaataagcctttggccccaccagcccctcctctttctgtatctctccatcctgcttcctcacactaatgcttggctca

SEQ ID NO: 646545 - DNA, 598 bp, Homo sapiens
ctttttaaagctgagccctgccatgggtttgtaccctcaaatgcctatgagttgggtaaattcttttcttttttcccacattctttccctttcttcttcctccactttccccatctcttttcccttccctccttctgcttttctccttcccttgcttgtcttctgtgctcattcatctccttggctgctcccctggccttcccaacctttctccctgttggtctcctgggctccctgttcctcatctctcctcttctcagcagctcctcacccaaggagctgtggcccaggctgtcaccagtggagaaaccaaaggcaacttcttcaccatgtttctggctggctctctggccgttacgatagccatctacgtgggtggtaacgtctcaggtgaggagggtggggtctggtcatcagagcacgtgggatgtgcatgccagtttgtctgtctggtgatggtggaaacgcaaatccttctgtgactcgtggacattatccccttgaacagtgycccagactgaaataagcctttggccccaccagcccctcctctttctgtatctctccatcctgcttcctcacactaatgcttggctca

SEQ ID NO: 646546 - DNA, 427 bp, Homo sapiens
ttgttttatcttaggcttaatattttcagaattccatgataaatagtgtgaaaattgtgactaccaagtatctcacaagagaaaaagagaaagcttataacgaaagtccagaagtgtgacttgagctctcttagtgatctcagataaacatctctaggcttgtcaactccaccaactgtcaaatgggggcaatagagtagaagacctttacagttctgcttttttctgaaaacctttcttttcaatgaaactggcagctttgagaaccagtcagttgactatgattttactgaatgattggagagaaaactctatattaagccatgctccactgcagaggtattttttccaggttgagaacagctatggarcaatgcaattggagcactgatgtaattactcatgtccatggaagtgtgcaggcttt

SEQ ID NO: 646547 - DNA, 648 bp, Homo sapiens
attggtctgtttttacagagtgctgattggtgcatttataaacctttagctagacacagggcgctgattgstgcatttacaatcctttagctggacagaaaagttctccaagttcccacgggaggcagaagcccagctggcttcacttctcaccagcaggtctccatctttgagccattccttctgtgcacttgacctccatgaactatctcccacacattgcccaggtccaccagccacacctccatgctgaacaaaggcctgtttgttggatgagtaaatgaatgtgtagctagagcaacatttgcctctcagtcactgaggctggcggttctggcatgggctgatagttttgtctgttgtattggtttcttgtgttcacttttgttttggtccataaggtgattttaaaaattgaatgtgttgctggcaattgtgagctttcatcaggcatcatgcaacttgttggttggagctgagtctaacttccttctaagttctttcttaactctgctgcttttgggtagccgtgtgctcggttctatgtcccttgcaccacttggttcatggtagtgctcagtcaagttgttatattgcttttgtgggatccaagctttctttgtttgtgctagacactccctgaaacaa

SEQ ID NO: 646548 - DNA, 648 bp, Homo sapiens
attggtctgtttttacagagtgctgattggtgcatttataaacctttagctagacacagggcgctgattgctgcatttacaatcctttagctggacagaaaagttctccaagttcccacgggaggcagaagcccagctggcttcacttctcaccagcaggtctccatctttgagccattccttctgtgcacttgacctccatgaactatctcccacacattgcccaggtccaccagccacacctccatgctgaacaaaggcctgtttgttggatgartaaatgaatgtgtagctagagcaacatttgcctctcagtcactgaggctggcggttctggcatgggctgatagttttgtctgttgtattggtttcttgtgttcacttttgttttggtccataaggtgattttaaaaattgaatgtgttgctggcaattgtgagctttcatcaggcatcatgcaacttgttggttggagctgagtctaacttccttctaagttctttcttaactctgctgcttttgggtagccgtgtgctcggttctatgtcccttgcaccacttggttcatggtagtgctcagtcaagttgttatattgcttttgtgggatccaagctttctttgtttgtgctagacactccctgaaacaa

SEQ ID NO: 646549 - DNA, 648 bp, Homo sapiens
attggtctgtttttacagagtgctgattggtgcatttataaacctttagctagacacagggcgctgattgctgcatttacaatcctttagctggacagaaaagttctccaagttcccacgggaggcagaagcccagctggcttcacttctcaccagcaggtctccatctttgagccattccttctgtgcacttgacctccatgaactatctcccacacattgcccaggtccaccagccacacctccatgctgaacaaaggcctgtttgttggatgagtaaatgaatgtgtagctagagcaacatttgcctctcagtcactgaggctggcggttctggcatgggctgatagttttgtctgttgtattggtttcttgtgttcacttttgttttggtccataaggtgattttaaaaattgaatgtgttgctggcaattgtgagctttcatcaggcatcatgcaacttgttggttggagctgagtctaasttccttctaagttctttcttaactctgctgcttttgggtagccgtgtgctcggttctatgtcccttgcaccacttggttcatggtagtgctcagtcaagttgttatattgcttttgtgggatccaagctttctttgtttgtgctagacactccctgaaacaa

SEQ ID NO: 646550 - DNA, 595 bp, Homo sapiens
cacatttcgctctgttctaactgaggtcatttctagaattttgagaaatttctagaaaatacatagggttatctgtcattctggtttgaaaaagtagaggaaaggaaagtctgaactctttctatctcacaatgtagttcagtggaaaatgcattatttcagaggctgggtccccttgcccttctctgggtgcctggagagagctcacaataacatacgcaatttctattgcatctcctgccaaagaggaacaactctaggcaagactgtggttgtctctatttaaatttttactaaaatatttattcaaatttaatttaaatgcaaatgagtccctttccacttggcttctggatatccatgaaggcagcatattgttagtaggacctggaatttctgtttggacaatgaataattccagacttaaacaggatctgcccagagatttctcttctcacaggcctgatccatctgaccactttctcagaacacaatgatgcggcatctaatgcaccattwtcttcgtgacagctcagtactccatgtcaaaccaccaaatctaacatgtgtctttctcatttaacccctgattgtg

SEQ ID NO: 646551 - DNA, 624 bp, Homo sapiens
gttttcaccaccaaaatgaggactatgagaggtaatgaatatgtgaattagctggattgagccattccacaatgtatatatactttagagcatcatagtgtacacagaaaatacaaaccattttatctgtcaattaaaaaataaaaatcattatattaagttcttagtgaaaatcaaagcaacaatcaaaagtaggactattgaagattcagactctttagaaatgaaggcttgagttactctaccagataaggaatcttgactaattgaytttttggctgagagcaagagaagtatggaaatatggaatggatcctaagagaataatggcacatgtatatataagcagaaatgagtgttctgtgcttttgcgtagtttctctttccttgttatgtgtgtttgtttttataaataataatttttattgtcttttcctccttccctttattactttacatacaaattatatgctattgttatacaatttagctttcaggtaacagaatagtcagtgggaccctgactaaatttgaggagtatctaatgcaaccagggatgatgcaatgacttgaggcctgtttttcctcatgttagggaagggacggggctgcatatcatgtata

SEQ ID NO: 646552 - DNA, 624 bp, Homo sapiens
gttttcaccaccaaaatgaggactatgagaggtaatgaatatgtgaattagctggattgagccattccacaatgtatatatactttagagcatcatagtgtacacagaaaatacaaaccattttatctgtcaattaaaaaataaaaatcattatattaagttcttagtgaaaatcaaagcaacaatcaaaagtaggactattgaagattcagactctttagaaatgaaggcttgagttactctaccagataaggaatcttgactaattgattttttggctgagagcaagagaagtatggaaatatggaatggatcctaagagaataatggcacatgtatatataagcagaaatgagtgttctrtgcttttgcgtagtttctctttccttgttatgtgtgtttgtttttataaataataatttttattgtcttttcctccttccctttattactttacatacaaattatatgctattgttatacaatttagctttcaggtaacagaatagtcagtgggaccctgactaaatttgaggagtatctaatgcaaccagggatgatgcaatgacttgaggcctgtttttcctcatgttagggaagggacggggctgcatatcatgtata

SEQ ID NO: 646553 - DNA, 546 bp, Homo sapiens
atttcccacattcccttcccttcacataaattctaagaataaaattaaagtcagctctaaaaagtgtgtctttcctcctctaaatgacatgcagacattagttttgccttaatcacttttcatttgagcagcttaggaaggctcagcatgaattttttacgtgtcagatatactcctccacckactcaatcccttcctgctgtttcctgcatttttcccccatcatgcttttactttggaaaatctatttcctccaagatattcagtgtttttttttttaagtaattttacccctggtttgctggaacaatgctgagtgtacaggaatattggtaaactcagcaattcaacaggcaaaaatggaaaggaagtgtcaaagtcattggggaatgtgggggacacccattaggcatatccccctgggcttgaggaagccgtgaaatgcctggaaagcattttcctttccaagatgggtgaggactttgttatttcctatctgtgttcacctagaggagctaagttcaggaattaaaatttaatgaagaa

SEQ ID NO: 646554 - DNA, 612 bp, Homo sapiens
atggcaaccacctataagctaaaataagaggtctcagaatgaaaactcccttgctaatatcttgatcttggatatagtaacctcaaaaactgtgagaaaaagatctgtatcatttataccactcaatctgtggtattttgttaggacagcctgagcaaactaatacacctggatattaagaagatttcatgggatatatctcaatatgtgtcttaactcttagtgaaaaatcttgaaatgactagtcaaaccattctatttgactgtattacttttcctccatcattctttttcaatttgtaactgtcattattcaaaaaatcaggtactctggatctgtyctccatctccgtgatttttttgttcctggcatttttcttttctttcttttgtatttttactctgtactgtgagataactgttctatttaccactttatattgctaaaaatatttgatgctgcaactcaacttgacattgctcccattatgtaaaaaaaaaaaagctatttaatctactgagtttccttaaattgtctaaaaacaatatttttatacttatgagagtcaatctgagttctttcaagattcattcacattataccactgggat

SEQ ID NO: 646555 - DNA, 574 bp, Homo sapiens
atggctaaacgttttggttgggtttctttgtttggctgattggtttttgtggctgtttgtttgtttaaggtatgcttctctaaaaaagaaacatgccaatgttgaggaatgaggctacactggttgcggctgaagcagcagctgctgatgctgggaatagcctggaagtatcactcacaagctgacagctgccacgccagatatccctacccaggatttcatttgccaaaagcagactagttagtggagaaaattgatgccatgrgaatgtcttataccaagatagtatgtgattttaaaaaattatattagaatttgtagtgtaattctttttttccatcaagtgctttgtgttaaagaaaatgagttcttcatggtgatttcaattccttcaatttaactgttgatggagcgccgatatgagctatgcactgttaaatataaaagattttccaatctttgtattttaaaaaatacaaagattagtaaacttgtccttgtcctcagagagttcacagtccagttaagggaccaagaaatgaataaggcacaatagtaaagaccacccagggat

SEQ ID NO: 646556 - DNA, 549 bp, Homo sapiens
caaatactttgttttcttcaaatatccagccacataatccttgatctttgcaaattaatcttcyagatttataagtaatattaatgttattccataatttcttttctccttctccccctcctccttcctcttctctctggtctgcaagtatacatatgtgtgtgtatatatatatgcatacacacatctctatatccatttgtcaatctgtctgtctatcaactatcatctcctgattgcgttctgtcttagctcaggcctatggtacgttgtccagatcccccttcaaggaatgacctgccacccaattgtggacagtgtgatcagctgatattgtccagctgtcatcttcttcagggtctgcctcagttgccttgccttgcatccttgcaggagtggtctacatccatgccagagaaaagtgggtctaaaggcctggttgtttcagccactgcaggattgttgacttggaatcttagcccttgagctacctgtcatcttcagctttctctgtttaatcctgtttctttgttcttcctttatgcgtgt

SEQ ID NO: 646557 - DNA, 549 bp, Homo sapiens
caaatactttgttttcttcaaatatccagccacataatccttgatctttgcaaattaatcttctagatttataagtaatattaatgttattccataatttcttttctccttctccccctcctccttcctcttctctctggtctgcaagtatacatatgtgtgtgtatatatatatgcatacacacatctctatatccatttgtcaatctgtctgtctatcarctatcatctcctgattgcgttctgtcttagctcaggcctatggtacgttgtccagatcccccttcaaggaatgacctgccacccaattgtggacagtgtgatcagctgatattgtccagctgtcatcttcttcagggtctgcctcagttgccttgccttgcatccttgcaggagtggtctacatccatgccagagaaaagtgggtctaaaggcctggttgtttcagccactgcaggattgttgacttggaatcttagcccttgagctacctgtcatcttcagctttctctgtttaatcctgtttctttgttcttcctttatgcgtgt

SEQ ID NO: 646558 - DNA, 549 bp, Homo sapiens
caaatactttgttttcttcaaatatccagccacataatccttgatctttgcaaattaatcttctagatttataagtaatattaatgttattccataatttcttttctccttctccccctcctccttcctcttctctctggtctgcaagtatacatatgtgtgtgtatatatatatgcatacacacatctctatatccatttgtcaatctgtctgtctatcaactatcatctcctgattgcrttctgtcttagctcaggcctatggtacgttgtccagatcccccttcaaggaatgacctgccacccaattgtggacagtgtgatcagctgatattgtccagctgtcatcttcttcagggtctgcctcagttgccttgccttgcatccttgcaggagtggtctacatccatgccagagaaaagtgggtctaaaggcctggttgtttcagccactgcaggattgttgacttggaatcttagcccttgagctacctgtcatcttcagctttctctgtttaatcctgtttctttgttcttcctttatgcgtgt

SEQ ID NO: 646559 - DNA, 558 bp, Homo sapiens
cataaagggacacaaaataattttctgaagagatgaaaatagtctacatcttaaatgggaagtttgttatatgtgtgtgtatatatatatgtgtgtgtgtgtgtgtgtgtgtgtgtgtgtgtctgtgtgtgtatgtatgtgtgtgtgtgtgtgtgtgtgtgtktgtgtgtgtcaaaagttcttaacttataaagactgcaacacaatcgcttttgagcaactagtgggtcaaagaagatatcaaaaggaatattagaaaacatcttgacacaccccgaacacactatataccaaactaattagatgcagcaaacgcatttctaataaatacctacattaaaaaagaaaaaatatctctaactttacacctcaacaaactagaagaagaacaaactaagcccaaagttaacagaaggagtaaataataaatattacagcagaaattaatgaaatatataatagaaaagcaacagaaaaataatcataaccaagagttggatttttttaagttgacaaacctttagctagactaagaaaaaagagacagaattcaaataa

SEQ ID NO: 646560 - DNA, 558 bp, Homo sapiens
cataaagggacacaaaataattttctgaagagatgaaaatagtctacatcttaaatgggaagtttgttatatgtgtgtgtatatatatatgtgtgtgtgtgtgtgtgtgtgtgtgtgtgtgtctgtgtgtgtatgtatgtgtgtgtgtgtgtgtgtgtgtgtgtgtgtgtgtcaaaagttcttaacttataaagactgcaacacaatcgcttttgagcaactagtgggtcaaagaagatatcaaaaggaatattagaaaacatcttgacacaccccgaacacactatataccaaactaattagatgcagcaaacgcatttctaataaatacctacattaaaaaagaaaaaatatctctaactttacacctcaacaaactagaagaagaacaaactaagcccaaagttaacagaaggagtaaataataaatattacagcagaaattaatgaaatatataatagaaaagcaacagaaaaataatcataaccaagagttrgatttttttaagttgacaaacctttagctagactaagaaaaaagagacagaattcaaataa

SEQ ID NO: 646561 - DNA, 564 bp, Homo sapiens
tctttggagctaggatgtttgtgagagttcagcttacagatgttgaaggctagagaggcatggcaaatgttagcgttattcactgagatggagaacatggaggaagaatggggtaagaaggtgaataaggagtctggaaaaagaacatgttgactatgagagtgctataggaatttmtggcaaggatggaagaaagaagaagaagtatagggttacaggttaccacagatgccagggaggaagataggggtttggaataactatgtaatatgtatcttgatagttgataaaattatgggtttgaggaatcacaggtaggtgagagaagttccaaggataaacatggtgcctgtccacatccacttggatgagcagaggagaagccagtaaagcaaactagatgacgtgttcagaaggtcagaaggcaattctgagggaagcccagaggaaattattttcttccacaactacaaaagcaaaagccccaataaagaataatctaagttggttcttataatgaatatgttttattagatattaggttttgcaaacttatatttatag

SEQ ID NO: 646562 - DNA, 617 bp, Homo sapiens
tacataaacaagcaccttgaaatcacaaccatggaagtcctgttggccaggtgaaagctgaaaaccacatctgtcccgttaattcaggcataggtagatgcttttttaatgctttcataactatggaggacaatcatcattttaataatgattcatgttagaaaaggcaacaagcttgatcacaattgcctcaattcaaaattcattaatactctgtaaccaactgaaatcattacatttgagctctatacttcataaacatatgttctaagggaattgtcaagccacttgatttctgtagtctgtattttaaagctgcctttatatgtcaatatagttcaccrtccatagtcactccctataaattgaggcacactcatatcaccttgagacatctgaacatgaagggccacgaaagcttaaccagctgaatagatgctattttctaaatgtctaggtttattatttataaaacatcctagtgagacaaaacggagcaaacaaatataggtttttctttaattacagtaatgttggtgaatcagatctcaaatgtctggaaattactactttctacaacttgtgattctgctcaaatgccaaacttaaaaaaccca

SEQ ID NO: 646563 - DNA, 617 bp, Homo sapiens
tacataaacaagcaccttgaaatcacaaccatggaagtcctgttggccaggtgaaagctgaaaaccacatctgtcccgttaattcaggcataggtagatgcttttttaatgctttcataactatggaggacaatcatcattttaataatgattcatgttagaaaaggcaacaagcttgatcacaattgcctcaattcaaaattcattaatactctgtaaccaactgaaatcattacatttgagctctatacttcataaacatatgttctaagggaattgtcaagccacttgatttctgtagtctgtattttaaagctgcctttatatgtcaatatagttcaccatccatagtcactccctataaattgaggcacactcatatcaccttgagacatctgaacatgaagggccacgaaagcttaaccagctgaatagatgctattttctaaatgtctaggtttattatttataaaacatcctagtgagacaaaayggagcaaacaaatataggtttttctttaattacagtaatgttggtgaatcagatctcaaatgtctggaaattactactttctacaacttgtgattctgctcaaatgccaaacttaaaaaaccca

SEQ ID NO: 646564 - DNA, 567 bp, Homo sapiens
aagttgatttttgtctatggtgcaaagacattttgtctacggtgcaaggactttttgtctacggtgaaaagacttttaagttgatttttgtctgtggtgcaaagaaggagcccagtttcagtcttctgcagtatggctagccagttgtctcagcatcatctattaaatagggatttttttccccattgcttatttttgycagattcatcaaagatcagatggttgtatgtgtgcagccatatttatgagctctctattctgttccactggtctaaatgtctgttttcgtatcagtatcatgctgttttgattactgtagccctatgatagcatgatgcctcctgctttgttctttttgcttaggattgccttggctacttggactcttttgtggttccgtaagaatttttaaatagttttttctagttctgttaacatgtaattggtagtttgataagaataacactgaatctataaattgctttaggccatatggccattttaatgatattgactcttcctattcatgagcatggattttttatccatttgtttgtgtcatttctg

SEQ ID NO: 646565 - DNA, 655 bp, Homo sapiens
aaaacattatttccagtcagactcactgtcatggctttttattagtttattattatttaatagtagttttaaataatacattggtttttttattggcttaccttatccatagtctcaaattaactaaaaatcattagtttgaaaactattattttgttcattacataatttaaattgaaaaaatgttataatgatgaattttagttcaaaaatgaaagaaaagtcactttcattggctatttggtatgtgctacaacctttgacacaaatggcatcattttatcttgataacaatcctacagtaaacattttcggaattattttgtagatgaggaaataagctcagagaagctcctcaacatgcctaagatcatatagtttttgagtggcagagttggaatacaaataaaagtcagtcagacttcgaaacttgtgtcttttgcaaaccagtaggacaatgtgaacctttactttggagcagaagaaggcagagaacaatcatttcttgcttgtagactatggcttacgttgttcctgygtctcctgattgacagccgaagtaaacaacgtggtttacctttgccagcactttgttctccactcaatactcattcaggctagatgaactcctgattgggttctctgcttccatttt

SEQ ID NO: 646566 - DNA, 547 bp, Homo sapiens
ccacacgtggctggagccaccacacccagcccacgaaagtaggttttaatggggaaattattaagtcatctagaaagaagttgttgtcttgtcctgggcttgagtgccaaggacatcaagtatagagtcaattattttctgcggatatctacttagattataaatggttcagatatacgggactaagggcaggagttgacatgacttgctctgaacttcacactgttgctgacccagagtcccaaagccagatttctaggaaaataatcagactaggttatgtgtccatcctttgtcctcagctgtggctactgggccagctccttcagcagwgttgtgggtgcgtggataagaataagaaaccaggtctcctaggctttcattttaaagaggagagaattgaacacctgtgaggtgaagtgatttgtccatgattatacagccagttactgatttacagacagcaatgaaacccagggctccttattcctctatagtccacaccattttgcctttaaaaaaaaatcaccaaaggtttattatatct

SEQ ID NO: 646567 - DNA, 547 bp, Homo sapiens
ccacacgtggctggagccaccacacccagcccacgaaagtaggttttaatggggaaattattaagtcatctagaaagaagttgttgtcttgtcctgggcttgagtgccaaggacatcaagtatagagtcaattattttctgcggatatctacttagattataaatggttcagatatacgggactaagggcaggagttgacatgacttgctctgaacttcacactgttgctgacccagagtcccaaagccagatttctaggaaaataatcagactaggttatgtgtccatcctttgtcctcagctgtggctactgggccagctccttcagcagagttgtgggtgcgtggataagaataagaaaccaggtctcctaggctttcattttaaagaggagagaattgaacacctgtgaggtgaagtgatttgtccatgattatacagccagttactgatttacagacagcaatgaaacccagggctccttattcctctatagtccacaccattttgccttwaaaaaaaaatcaccaaaggtttattatatct

SEQ ID NO: 646568 - DNA, 589 bp, Homo sapiens
tttttgaggcacgtacttagctgcaggtgatttaaacaaattatcagtatatcttgaacaacaagccaataatatatttatatggtaaaatcatttagatgtgacataaattactctcaatggcattatctagtctgtatgaaatcacaatactacgaaacatctcagacctttaattatgcttgttgacactaaaactgcacttgcttgttctgccatggagactgcagggagaagcaaatgaacggrtggacagaaatctctattctgtgctctactggctgctgttcggtgaacggtagtacgctagtaaagtgctcagaggacttctgccaccatctgctcttaataaaaataaatgaggctctgaagaaagcggaagcttttgtagttctttgtggaaccctttgatagtacaaaagcaagcggatgggttgctctaagacggccccttgcaggttgtgacagcgccactatcttggtggtccttgtctcctattcccaggtctctaagtagcacttttctgtttcctggctatttatcatgagaaattatcatgcttggacaacctttattgcctctcaggcc

SEQ ID NO: 646569 - DNA, 626 bp, Homo sapiens
tagtgaacaagcctgggtactaaagttaaatattacagaggcagataaaataagtctgagaaaaattcatgcatttaattctatctattttgcccacatagttatgctgatatttcattcacttggattcaccaacytaaaatttgtaactataatggagaatcttttttctgtatttgaaaaaagtgcactgagcaaattaatagtataaatatgatttcaaggataactaagagaatatttatttctatgtatggttaatcaacatgcccccttccatactccatgtgccctttgactaattatctccaattcatctttcaggtcacaattcaagtataaataataaattagaagtacatattactataaaaaattgacatgtgaattatgaatcaatctcctcaatttgttaaggaatcttctaccaagtactcttttcttgaataaacttttacccatattacagttaccatatctttgtaacaacattaagggagcattgattttactatattaaatagacagttttctatttcaaatagacttggctgaattattttgattagctcaattaaaaaatacaagattctaataagagactttattacttactaaaggcattg

SEQ ID NO: 646570 - DNA, 361 bp, Homo sapiens
gaagcaatgactgagacaagccacaaaaacacrtctagccttgagatttgcaacgaatattcccagccaaatgagtctgtttaatgtgttttcatgcatgcaagtttatctgcttagctcaaactgtttgaacttacagtcccatcatagttatttccaatatttttgaaaacaaacatatacttacacatattttaaaaaatcaccattctgcaatatttctgttgaatcagaccttacattatgttgtttaataaagtatggtaagttttggcatgtatgatttttatcatataagaagcataatttcttagccaaaaatttagcctttgactctttagtagaaagttgagttctgtac

SEQ ID NO: 646571 - DNA, 407 bp, Homo sapiens
tttatttaatgatagaatgggaatacaatgggagggaagcaatgactgagacaagccacaaaaacacatctagccttgagatttgcaacgaatattcccagccaaatgagtctgtttaatgtgttttcatgcatgcaagtttatctgcttagctcaaactgtttgaacttacagtcccatcatrgttatttccaatatttttgaaaacaaacatatacttacacatattttaaaaaatcaccattctgcaatatttctgttgaatcagaccttacattatgttgtttaataaagtatggtaagttttggcatgtatgatttttatcatataagaagcataatttcttagccaaaaatttagcctttgactctttagtagaaagttgagttctgtacattgtgttcta

SEQ ID NO: 646572 - DNA, 317 bp, Homo sapiens
ttttttttttttttttttttagagacagggtctcactatattgctctggctgstctcaaactcctgggctcaagcaatcctcctgcctcagccttccaaaaccaggtgtttaactggggactaacatgaagcacttagaagactacatggaacatagtgagctacataaaatatttgctattagcataataattttattgtatatcttaacaaaattgtgtgttttacgcaggtggcatgccaatggaagtattctcctatagctgcacttaatcattcttaccactgagagttgcagcaaatgggggacataattt

SEQ ID NO: 646573 - DNA, 591 bp, Homo sapiens
acaatacttactagctcttatagctcactgccttaatgaaaacagcagcctatttgagtagaaagagctcagtctttggattccgttcaactagggcttgagtcctactttaagccttgacacttaccaactattgcttagcctttctgtgcctcaacttcctcattaataaagatgacaatagtagctatctcataggacaccatcgtkatgcttaaatgagaagctatgtaaagtatgtagaacagttcctacaacaactcaataattctaagatttttgttttttgagacaaagtctcactcttttgcccaggctggagtgcaatggtgtaactatacctggaactcctgggtcaaatgatcctccatccccagcctcctgagtagctgggactacagatgagcaccagcatgcccagctatttatttaaaaatttttgtagagtaagaatctcactttgttgcccaggctggtctcaaactcctggcatcaagcaatcctctcacctcagcctcccaaagttctgggattacaggtgtgagccactgcacccagccagatattataattattactattactactaaa

SEQ ID NO: 646574 - DNA, 591 bp, Homo sapiens
acaatacttactagctcttatagctcactgccttaatgaaaacagcagcctatttgagtagaaagagctcagtctttggattccgttcaactagggcttgagtcctactttaagccttgacacttaccaactattgcttagcctttctgtgcctcaacttcctcattaataaagatgacaatagtagctatctcataggacaccatcgttatgcttaaatgagaagctatgtaaagtatgtagaacagttcctacaacaactcaataattstaagatttttgttttttgagacaaagtctcactcttttgcccaggctggagtgcaatggtgtaactatacctggaactcctgggtcaaatgatcctccatccccagcctcctgagtagctgggactacagatgagcaccagcatgcccagctatttatttaaaaatttttgtagagtaagaatctcactttgttgcccaggctggtctcaaactcctggcatcaagcaatcctctcacctcagcctcccaaagttctgggattacaggtgtgagccactgcacccagccagatattataattattactattactactaaa

SEQ ID NO: 646575 - DNA, 563 bp, Homo sapiens
agatgtacttttcatctcatgtgtatatataactgatatatataacatatctgttatatatgtatacatatcagtaatatatatatatatatatcttaygatatataataaacaacataggccaggcgcggtggctcacacctgtaatcccagcgctttgggaggcggaggcaggcagatgacttgaggtcaggagttcgagaccagcctggccaacgtggtgaaactaaatatacaaaaattagccaggcatgctggcacctgcctgcaatcccagctacttgggaggctgaggttggaaaattgcttgaacccggcaggcagaggttgcagtgagccaagattgtgccattggacaccagcctgggcaaagaagcgagactccgactcaaaaaaatatatatatatataatgaattccctataaaatgaaaacatacttttcatctgaaaaaatatatatatataatatagtaaatatttttcaagtaagctctcttatctgacaacttttcgcccactgaaataactcacggtatttttgataggggaacgagttctctc

SEQ ID NO: 646576 - DNA, 563 bp, Homo sapiens
agatgtacttttcatctcatgtgtatatataactgatatatataacatatctgttatatatgtatacatatcagtaatatatatatatatatatcttacgatatataataaacaacataggccaggcgcggtggctcacacctgtaatcccagcgctttgggaggcggaggcrggcagatgacttgaggtcaggagttcgagaccagcctggccaacgtggtgaaactaaatatacaaaaattagccaggcatgctggcacctgcctgcaatcccagctacttgggaggctgaggttggaaaattgcttgaacccggcaggcagaggttgcagtgagccaagattgtgccattggacaccagcctgggcaaagaagcgagactccgactcaaaaaaatatatatatatataatgaattccctataaaatgaaaacatacttttcatctgaaaaaatatatatatataatatagtaaatatttttcaagtaagctctcttatctgacaacttttcgcccactgaaataactcacggtatttttgataggggaacgagttctctc

SEQ ID NO: 646577 - DNA, 581 bp, Homo sapiens
cctgtgacctgcacatatacatccaggtggcctgaagcaactgaaagtccacaaaagaagtgaaaatagctttaactgatgacgttccaccattgtgatttgtttctgccccaccctaactgatcaatgttcttcgtaatctccccgacccttaagaaggttctttgtaatctcccgcacccttaagaaggttctttgtaattctccccacccttgagaatgtactctgtgagatccaccccctgcccacaaaacattgctcctaactccaccgcctatcccaaaacctataagaactaatgataatcccaccaccctttgctgactccttttttggactcagcctgcctgcacccaggtgaaataaacarccttgttgctcacacaaagcctgttggtggactctcttcacacggacatgcgtgacaactactatataaaatccatgagctcatagttattctcataaaagcaatccacattaaaagcaaataatgacaatttcaggaggtcaagaccatcctggctaacacagtgaaacttcatctctaataaaagtacaaaaaattagctgggcgtga

SEQ ID NO: 646578 - DNA, 438 bp, Homo sapiens
gaattcctgctggacattgatttctcatctgtgcatcaagagaggaacctgggaggtgcttaatcagctgccaatggcaagatttactctaatttagaataggaaacaacaacagttagattttctgtctttccctccttttttttttttttctatctggtctgtttctgaaatgtaataaagctaagaattaacaaaaaaaaaagccacaaaccttcaggcaatttcagtctgaagcaaatgcattctttcttcctccaaactgcaaacattccagaaggggcatgtgtcaaagacagtaagacagattcaagtttatgctcttcttcaccagactgacctcgagaggaggcayactaagcccttgaacgccccttttcctctagaaacttcccttctctcagctggaggcagatagcacagagtgcagattctgaa

SEQ ID NO: 646579 - DNA, 542 bp, Homo sapiens
ctggaactcaagggctgctgttcagattcttgtgtcccatgggggtgctcccttgacctggtgctctcccctttgccctagggatggggcttcctgagagccaaactgcagtgattgttagttctcttctggatctagccacccagtggagctactgggctttgggctggttctggggagtayctataaagagtcttttgatgtgattcatcttcaggtctctcagctttggataccaacacctactctggtggaggtagcaggagaatgaagtggactctgtgagagtccttggttgtatttttatatgtgttggtttttgtattttcatgtgtgttgcttttgtgttggctggcctccaggaaggaggtagcactttcaagagcacatcagctgtgattgtataaggaggatacaagcttgccctagggtcacccttggataagtattcaggtttctcaggcagtgggcagggtcatagagctcccaaaagattatgttctttgtattctggctaccagggtgagtagagaaagaccatc

SEQ ID NO: 646580 - DNA, 542 bp, Homo sapiens
ctggaactcaagggctgctgttcagattcttgtgtcccatgggggtgctcccttgacctggtgctctcccctttgccctagggatggggcttcctgagagccaaactgcagtgattgttagttctcttctggatctagccacccagtggagctactgggctttgggctggttctggggagtacctrtaaagagtcttttgatgtgattcatcttcaggtctctcagctttggataccaacacctactctggtggaggtagcaggagaatgaagtggactctgtgagagtccttggttgtatttttatatgtgttggtttttgtattttcatgtgtgttgcttttgtgttggctggcctccaggaaggaggtagcactttcaagagcacatcagctgtgattgtataaggaggatacaagcttgccctagggtcacccttggataagtattcaggtttctcaggcagtgggcagggtcatagagctcccaaaagattatgttctttgtattctggctaccagggtgagtagagaaagaccatc

SEQ ID NO: 646581 - DNA, 599 bp, Homo sapiens
taaatcaatgtattaaatggaatacgcatctaataaattaagaaacaatagatatataataatatgaacaataaaatagagcagttatattaaactgttcattaagtatttgttaggacagtttgctttctgtgtgtgtgtgtgtgtgtgtgtgtgtgtgtgtgttttgggttacaatataaaacatattctttatcatacttttgtcccagtttgtttaataaattacccagacttagtggcttaaaccaacagtaatcatttattatgtcttacaatttatgtggtcagaaatccagaaggaacataacttatttctgctctagatgcctgtggcatcagctgaaagacatgcaggctgaaggctgctgtcactttcattctcatccactctcatgtctggttcttgatgtgtgcatgtcttgatgatctcatttgggctgtttgccggaacacctacaagtgtcctctccatatgactgcagtttcctcacaagctggtggctgggttccaagggsaatcattgtaatagagtgagagacagaggcagcattgcttgtgttgacctagccttggcagtcacaaagtcacccgatgt

SEQ ID NO: 646582 - DNA, 527 bp, Homo sapiens
gttttctcaccctctttttattatggcttgtttctactcacaccttgagtagcaactgcactattaagttcacagataaaatctcatttgaatacagtcttgtctccctatttcctcttaatttatttttttttacagagatcaatataatttgcaattatttcaatattaatttctgttctttgccctttaaatattaacattatattttattgagggcctactatgtgcctgacattgctttaaatcctttttataactcaatgcattcaatcatgcaaaaaccttataaagcaattattgtcaatcttatttgcaagtgaagagagtaaagtttagacagattgtgatatgctcacaatttaatagttactaagcagctaactacagaattgagttgtatgttaattgtctatatgttatagatggtagtatatacacaaactttatattctrtgaagaagggatagaatcagctttattctttattttattaatagttcctaccatgctatccagtatatact

SEQ ID NO: 646583 - DNA, 564 bp, Homo sapiens
caagctctataatatggctgatatcattttggtgtaatagactgcttgtccataagcaaatcatacataaaacttaagttagatatttctttctaaaaagtgaggaatagaaagactaagcacctattcagctttgtatatttgcatacctatatcttaaygaatattaaatgaagtgaatgattaaatgtctacaacaagtaaagaacaaaagctcttctcttgtggtaccaaataaatgaacacaatccaactttctcatttgtttgtagccttgttcaaaggctttgggctctttccaggattcccacttagaaaagacaaataacaaaaagtaaacaggcaaataaaatatataaaggaataaaagtaaacaaacaagtatctcctgggtagatcatgaattgttagctttgggaaagtaattctctctgaaaacaatctctacttttcacatatactttaaaaaatggagtctaaaaatttctggttattataatatgagtaataagaatatgtctgctttgtgtctcatgtattccaaagactctggcactataatat

SEQ ID NO: 646584 - DNA, 563 bp, Homo sapiens
taatcactctcattcatcaagggaaaaagggcacttacgaaactcaacaggggatataacagaggagaaatcctgtgaacttcacataagaagaggcgtaatctctacgcttttcatcacgccagcaacaaaccagaataaaggccattgctctgttggcactgaacttmtgtgtgctgcctaattctggcaatgaattcttacccaaattttctgataactaataatccctctaaatgtatcacaggagaaaatattttataacaatttgtagagttttcccctatttcttttgtctctttgtacagacacaatctcacttgaagttggtagtgatttttgcagtagactctgagcattatagtttatcagaaatttattattttgctttaaacattgcttgaaaatgttttctggactttgatatatcgtggttgcttcactcttgtatcatataagaaataataattatgcattgatagtgcatagacaagtacaacaagaggaaaggctttttaataaaagatctttttattttactctgcacttgataagagggtaaa

SEQ ID NO: 646585 - DNA, 563 bp, Homo sapiens
taatcactctcattcatcaagggaaaaagggcacttacgaaactcaacaggggatataacagaggagaaatcctgtgaacttcacataagaagaggcgtaatctctacgcttttcatcacgccagcaacaaaccagaataaaggccattgctctgttggcactgaacttatgtgtgctgcctaattctggcaatgaattcttacccaaattttctgataactaataatccctctaaatgtatcacaggagaaaatattttataacaatttgtagagttttcccctatttcttttgtctctttgtacagwcacaatctcacttgaagttggtagtgatttttgcagtagactctgagcattatagtttatcagaaatttattattttgctttaaacattgcttgaaaatgttttctggactttgatatatcgtggttgcttcactcttgtatcatataagaaataataattatgcattgatagtgcatagacaagtacaacaagaggaaaggctttttaataaaagatctttttattttactctgcacttgataagagggtaaa

SEQ ID NO: 646586 - DNA, 563 bp, Homo sapiens
taatcactctcattcatcaagggaaaaagggcacttacgaaactcaacaggggatataacagaggagaaatcctgtgaacttcacataagaagaggcgtaatctctacgcttttcatcacgccagcaacaaaccagaataaaggccattgctctgttggcactgaacttatgtgtgctgcctaattctggcaatgaattcttacccaaattttctgataactaataatccctctaaatgtatcacaggagaaaatattttataacaatttgtagagttttcccctatttcttttgtctctttgtacagacacaatctcacttgaagttggtagtgatttttgcagtagactctgagcattatagtttatcagaaatttattattttgctttaaacrttgcttgaaaatgttttctggactttgatatatcgtggttgcttcactcttgtatcatataagaaataataattatgcattgatagtgcatagacaagtacaacaagaggaaaggctttttaataaaagatctttttattttactctgcacttgataagagggtaaa

SEQ ID NO: 646587 - DNA, 594 bp, Homo sapiens
ctgctatttgaatgcatcggccttcctggctgtcttctggcaacactgtcctttctgtttcttagacacgcacacatattaccaccttatgacttcgggtgtgctactttgtctgattgggatgttctctttcctgctcctcacatgattaactccattttaaagtacagcttaaactccatccctttagagaagctttttctcctccaacatctaatttcatacctcagtcactctgtcacattaccatgttttgtttacttcatagcatttattaacttctgaaataactatttttatttatatatacagttatatgtgtgatttttaaatttatgaacctacccacctcctcccactactgtgtgagaagggagaccttttgttcctaccattatatctccagcattgaaaagaatttctagcacaaataggtacttaatttaattattattcaataaaaatcrtattgattaacaacagttatctgcccaaaatatataacaaacatcatattcaatgataacatattacaaacaggtaagttaaaatcaataatggcactatacttttttaaaacgacatatgaataac

SEQ ID NO: 646588 - DNA, 616 bp, Homo sapiens
tgtcaactttacattgcgctttatgtttgcattcttgatttgggtctccctccttaattattaattagtcttgccattttcatttacctactcagactgggacaatgtgtttgaggaatgaactccaaccttgccactcatctgtctttatgtkcctgcttctgtctccaaaggcagccctagtgtcagtgtggtatttcccatcccagcatctataagtcacatgggcctgccttgaaaattgctcccaaagaacctacaacatgtcaaatgtcaagtgaaataggcaattattttaaattatatttctttcctttaaaaaatatagatattgcaaactgatgtctcagcagtattttgtaagtgttagcaccatatctttctgtaaactcattaataagaaagatcatattcaatcataagaatgatgcaataataatttgtttcctgaccttagatttggcattaaataatgcaatagatacatcaatattataccaatataacatcagaatattggtaaaccttgataatacacatagtacagttttgctctaatttttgtaaaaaaatggaatatgtatattgcaaatattaactgaacaaaattgccaaa

SEQ ID NO: 646589 - DNA, 527 bp, Homo sapiens
caataatggcatttagagtcacatatattgccatatgtgttccttgaatatgtcgatgttgcratttgtaaaatagcacagtggttaagctggaatctctagcttaagttgtctctaggtttaaatgtccacatctaccacactagccgcatgaatatttcaagttacttacatatttctgtgcctcagttgctttataagttgggaaaataagaatagggcttttagctatatctataataccacatttcctaatgcaatgcactaatttttccagatgatttgaatttcctactccttaattgctgctaatgtttgagtgctttaagcattataggcatagccctttaatgaaagtttaaagtgcacactagctttaaaaacttctcggctgggcgcacggctcacgcctgtaatcccagcactttgggaggcagaggcaggtggatcacaaggtcaagagattgagaccatcctggccaacatggtaaaaccccatctctactaaaaacacaaaaattagccgg

SEQ ID NO: 646590 - DNA, 527 bp, Homo sapiens
caataatggcatttagagtcacatatattgccatatgtgttccttgaatatgtcgatgttgcgatttgtaaaatagcacagtggttaagctggaatctctagcttaagttgtctctaggtttaaatgtccacatctaccacactagccgcatgaatatttcaagttacttacatatttctgtgcctcagttgctttataagttgggaaaataagaatagggcttttagctatatctataataccacatttcctaatgcaatgcactaatttttccagatgatttgaatttcctactccttaattgctgctaatgtttgagtgctttaagcattataggcatagccctttaatgaaagtttaaagtgcacactagctttaaaaacttctcggctgggcgcacggctcacgcctgtaatcccagcactttgggaggcagaggcaggyggatcacaaggtcaagagattgagaccatcctggccaacatggtaaaaccccatctctactaaaaacacaaaaattagccgg

SEQ ID NO: 646591 - DNA, 523 bp, Homo sapiens
ttggtccccatcttactaatgaggactgagagcccttcacaagctttccctcctgtctgattggccaagactgtatgacaattctttagccaatccctggcaaagggactgagattttgcttatgttgattagtcctttcatgcagatgggactaagatcaacacctttcttcagacacacatcttgtgggagaggagtgagtgggacttgaacaaaattggggctttgttaagaaggagaaatgaagtatgtgtgtgaagccttgatgagggggatgatagtagtcaaacttaattttagaaggcacataagaacattgaaggtggacgcaggcagggaagaaaggcatgctgggaagagaggacagcatggatgaaggcaaagtagtgtaacagggtgtgtctctttcagggcaatggggaaattgtccatatyatctcctcacacaaactctacatttcatgaggtcatctgaggacagaagactgctattaagaatgccaggagagttttgcaggacaa

SEQ ID NO: 646592 - DNA, 523 bp, Homo sapiens
ttggtccccatcttactaatgaggactgagagcccttcacaagctttccctcctgtctgattggccaagactgtatgacaattctttagccaatccctggcaaagggactgagattttgcttatgttgattagtcctttcatgcagatgggactaagatcaacacctttcttcagacacacatcttgtgggagaggagtgagtgggacttgaacaaaattggggctttgttaagaaggagaaatgaagtatgtgtgtgaagccttgatgagggggatgatagtagtcaaacttaattttagaaggcacataagaacattgaaggtggacgcaggcagggaagaaaggcatgctgggaagagaggacagcatggatgaaggcaaagtagtgtaacagggtgtgtctctttcagggcaatggggaaattgtccatatcrtctcctcacacaaactctacatttcatgaggtcatctgaggacagaagactgctattaagaatgccaggagagttttgcaggacaa

SEQ ID NO: 646593 - DNA, 636 bp, Homo sapiens
ctagaatatcaaattattgatttataatggatcatcagtggcccaaaagctcatgttcgtctttcaagattccaccttcctggtaatagtgggcctggtggctggtagtcaaatgactctttggtgactgtgaatcagagtaaagtgaggtatgcactctctcagatcaagtaataataacaaagtatgataataatcactaacactattagatgtttactatttgccaggtcctgggctgaacacggtgcataaactcatttaatatctaaactagtgatatttccatcttactaaagaagaagctgagccttctagccagtgagtcacttgktgaaagtcacatggcacaggttgagctgtgattgaggcccacacagtagtgagcattataatacccaggcctatagtcctttggctgattggggccagatgtagttcagatttctgaatttttaagatttgagagaagtaaacagttcatatactgtacattaaaacacccctagtgggtactctaccttttaacgttcctactaggaatatgggcagcctctcatgattaaacacattaattaatatatctgtcataaaagataaaaatactcacattaagataataaagactatgtcctc

SEQ ID NO: 646594 - DNA, 512 bp, Homo sapiens
ttgggtaaatacagccattctaaatgggagaaattggccaaaacaaagaggctacaggccccatgccaatccaaaatccagtgaggcagtcaaatcttaaagctccaaaatgatctcctttaactctgtgtctcacatccaggtcatgttggtgcaagaggtgggttyccatggtcttgggaagctccacccctgtgggtttgcagggtacagcctccctgccagctactttcatgggctggtgttgagtgtctgcggcttttccaggtgcatggtgcaagctgtcgaaggatctaccattctagggtctggaggatggtgggcctcttctcacagttccaccaggcagtgccccagtagggactctgtgtaggtgctcccaccccacacttcccttctgcactgccctagcagaggttcttactgaggggcccacctctgcagcaaacttctgcctgggaatccaggtgtttccatacatcttccaaaatctaggtggatgttccaaaatc

SEQ ID NO: 646595 - DNA, 535 bp, Homo sapiens
tgttgtggttattatttttgataggttcatcttgtagtctttctactcaagattggagtagtttacacaccacaattacagtgttataatattctgtatacctactaccagtgagttttgtaccttcagattatttattattgttcattaatatccttttctttctgattaaagaactcccactggcatttcttgtaggataggtttgatgttgatgaaatcccttagcttttgtttacctgggaaagtctttttttcttcatcatgtttgaaaggactgctggatatactattctagaataaaaggtttttttccttcagtactttaaatatrtcatgccactctctcctgccctgtaaggtttctgctgagaagactgatgccagacataatagagctcctttgtgtgttatttcttttctcttgctgcttttagaatcttctttatccttgacttgtgggagtttggttattgactatcttgagatagtcttattttggttaaatctggttggtgttctataaccttcttgt

SEQ ID NO: 646596 - DNA, 506 bp, Homo sapiens
cacttctctatttttctctatatatttacttgcatgttaaaaactgtgattagtaatgatactttcaattccaatccaacaccaaatagttcattcactctttccatgtttataagtctcttctgactgtgagacgcttgcttcccattaactttattacacgtttacttactaatcactttctgtataatcaatctttgtaatcaatctcccatcgccttagaaaggaagtgctcgtgatgggagattgattatattccttcctttccatgctaagctgccagtgtgcaaagatgccctcctcatcttgaacaggctctgacatcctcttcctgtccttttctggtatggatacccccttctcccagcttcagctctgatctcccatggtgggctatccccctcgatgaatgctgtcttcaccctgctcaggctctgatatccagtcytgagatacctctctgctgggatgcctttcttacctttagcttctagaccccatatgg

SEQ ID NO: 646597 - DNA, 497 bp, Homo sapiens
tctgccaccaagcagataaataacttcatgtttgttcctcccctctctgggtctcactttcatactctgtaaaaagagaaaataatactgtcaattgcacagtgcggttgtgaagattaaatgaattaatgtaatgcttcgaacaagtcttagcacatgttaaatgctcacctgctagctccaatattattaggactgatactcattgcctagtgagtgaatctagcagcttcccagtgctcatactttatttcctaaactccaatcatcttcataaagggtctagggaggcacttcattatttatttattgaataacttatctcccagagcaatggttatagacagatctgagatgctgmgatatttttttggagaagtagaaggactgggtcactatatgccacctatgtgatttatttgattcttgcagcggtctttccacagagttaccattttcctcattttactgatgaagaaatgaaggttcaaaggcaa

SEQ ID NO: 646598 - DNA, 549 bp, Homo sapiens
ccctttccttggagattctttcccccatgggacagggcttagcaatccatattttagcaacctctccaagtgaktcttatgactcagcaaatgggggctatgtacactcccaaatcactttccctccacaatatggaagagtctgtctggcatctagttaggctggcagaggttctgagtaacacaaaggaacaaagaaggtgatcctgctgtgttagattgtttcgattagttccactgctcaatgacttatagcagaaggtgacagatatgtttttcctaaatgaaactcctatagttacaaattttcttttacccagagcccacctacctatcactgcttaagaattggtttgtttttaaaattgacacatgggtgtttttattttttccccctcgtttcttttttgggtgggaagcaataaggctctatttgctaaagaaatggaggggaatgtttccagttctctctaattgaaatgatctcatatgcaaacacaaaaaattaagccataaatgcgcctttgcagaattgaggggtaatgaccc

SEQ ID NO: 646599 - DNA, 549 bp, Homo sapiens
tctcttgtgggcatttagtgctataaatttccctctacacactgctttaaatgtgtaccacagattctggtatgttgtgtctttgttctcgttggtttcaaagaacatctttatttctgccttcatttccttatgtacccagtagtcattcaggagcagatccaaccccacatttcccctcagcactccmctagcagaggttatccgtgatggctgagcccctgcagcagacttctacctggacatccagatgtttccatacatcctctgaaatctaggcagaggttcccaaacctcaactcttgtcttctgtgcacccacaggcccaacactatggagaagctgccaaggcttgggtttgcactctctgaaacaatggcctgagctgtaccttggccccttttagccacagctggagctgcagcagctgggatgcagggtgccatgtcccaaggctgcacagagcagtgggggcctggacctggcccatgacaccatttttccctcttaggcctctgggcctgtgataggagaggctgtgaagatctc

SEQ ID NO: 646600 - DNA, 595 bp, Homo sapiens
tcactgatcacagatcatcataacagatataataataatgaaaaagtttgaaatattgcaagaagtaccaaaatgtgacatagaaacatgaagtgagcacatactgttggaaaatggcaccaatcgacttgctcaatgcagggttactaygaaactttgacttgtaaagaatgcagtatctgtgaagtgcaataaagcaaagtgcaacataataaggtatgcctatatgaggagaggctgagtggattaaagatccaactgtatgctgtctacaatgaactcagtttagattcaaagacacataaaagctgagaataaagggatggaaaaagatattccatgcaaacagcaaccaaaagaaaacaggggtggctaagtttatgtcagacaaaatagactttaagttaaaagttgtttctaaagacaaagaaagtcattatataatgataaatgggtaaattcaataggaagacataaaaattgtgaacatatatacatccaatatcagagcacctaaatatataaagcaaatattgacaaatctaaaaggaaaaattgacagcaacataataaaaaaaagaaagctcaatactcc

SEQ ID NO: 646601 - DNA, 595 bp, Homo sapiens
tcactgatcacagatcatcataacagatataataataatgaaaaagtttgaaatattgcaagaagtaccaaaatgtgacatagaaacatgaagtgagcacatactgttggaaaatggcaccaatcgacttgctcaatgcagggttactacgaaactttgacttgtaaagaatgcagtatctgtgaagtgcaataaagcaaagtgcaacataataaggtatgcctatatgaggagaggctgagtggattaaagatccaactgtatgctgtctacaatgaactcagtttagattcaaagacacataaaagctgagaataaagggatggaaaaasatattccatgcaaacagcaaccaaaagaaaacaggggtggctaagtttatgtcagacaaaatagactttaagttaaaagttgtttctaaagacaaagaaagtcattatataatgataaatgggtaaattcaataggaagacataaaaattgtgaacatatatacatccaatatcagagcacctaaatatataaagcaaatattgacaaatctaaaaggaaaaattgacagcaacataataaaaaaaagaaagctcaatactcc

SEQ ID NO: 646602 - DNA, 595 bp, Homo sapiens
tcactgatcacagatcatcataacagatataataataatgaaaaagtttgaaatattgcaagaagtaccaaaatgtgacatagaaacatgaagtgagcacatactgttggaaaatggcaccaatcgacttgctcaatgcagggttactacgaaactttgacttgtaaagaatgcagtatctgtgaagtgcaataaagcaaagtgcaacataataaggtatgcctatatgaggagaggctgagtggattaaagatccaactgtatgctgtctacaatgaactcagtttagattcaaagacacataaaagctgagaataaagggatggaaaaagatattccatgcaaacagcaaccraaagaaaacaggggtggctaagtttatgtcagacaaaatagactttaagttaaaagttgtttctaaagacaaagaaagtcattatataatgataaatgggtaaattcaataggaagacataaaaattgtgaacatatatacatccaatatcagagcacctaaatatataaagcaaatattgacaaatctaaaaggaaaaattgacagcaacataataaaaaaaagaaagctcaatactcc

SEQ ID NO: 646603 - DNA, 585 bp, Homo sapiens
agcacatcacattcccttggggtataagactctgggcaggctgcttttcagggttccttagctgtagtgtaagtgggatacatgactccatccactctgggcagcttttctaagccttggggacccactcaacatgaatcctgggcttctgttgttctttgctgtctggaagcaataaatatttttcctgtaacttgttgcgtgtgagtgtggtctgcctcgctggactcagacaagttagtaacctctggacagtgagcctgcttcacaaacccctgttggtggagggaggggatccttcaacttccctgggcataacccagtgcagaacacttctctgggtcctcaccttggtctggtacagggcctcggcctcagcctcaaccttgcaccttcaaataatctcctctcactgcaccttgacctcagagaggatgcrgccaggtccaggtgcttgttgctgtccatggagggccccacgctagtgtcattgatggtctgctgcacctgggccagctcctatgcagcagggcaagggttactcctcaggaaacagtctctcaccttttggggctctcagagcca

SEQ ID NO: 646604 - DNA, 585 bp, Homo sapiens
agcacatcacattcccttggggtataagactctgggcaggctgcttttcagggttccttagctgtagtgtaagtgggatacatgactccatccactctgggcagcttttctaagccttggggacccactcaacatgaatcctgggcttctgttgttctttgctgtctggaagcaataaatatttttcctgtaacttgttgcgtgtgagtgtggtctgcctcgctggactcagacaagttagtaacctctggacagtgagcctgcttcacaaacccctgttggtggagggaggggatccttcaacttccctgggcataacccagtgcagaacacttctctgggtcctcaccttggtctggtacagggcctcggcctcagcctcaaccttgcaccttcaaataatctcctctcactgcaccttgacctcagagaggatgcagccaggtccaggtgcttgttgctgtccatggagggccccacgctagtgtcaytgatggtctgctgcacctgggccagctcctatgcagcagggcaagggttactcctcaggaaacagtctctcaccttttggggctctcagagcca

SEQ ID NO: 646605 - DNA, 587 bp, Homo sapiens
acctgcccatccctattctgaaattccttcaaagcagaaccctggcccaagccctgcatggagaacctaaggaaggaggagacacggtccctgacctcagagagcacacagattgtgaggacaggcttaaagaacagtttcagatagccaccaacaagaagaaacaaatatggtgtgaactgagataggtggaattaagatgggaactggagcccaactagagatgcaagcagggtctggaaagaacagggggctgccagacacagtcctgaagtcccacatggaggcgtccaggggyagtgctatctctgggcctttcagactggagtggctttgtgctcctgaatcaccatgaactagttgagcaaccacagatgagtctctgtgtcctctgtgaactttagttttagtatttatgaaaactaaatactgatacttgccttgctacctaaaagagctattgagaggataatgccagccagacagtagtgtattagcagctttgaaaagaatccaagtgctacacaaatgtaaggcattgttttccctatgtcagaaggcttggatttgaatcctagcttcactag

SEQ ID NO: 646606 - DNA, 587 bp, Homo sapiens
acctgcccatccctattctgaaattccttcaaagcagaaccctggcccaagccctgcatggagaacctaaggaaggaggagacacggtccctgacctcagagagcacacagattgtgaggacaggcttaaagaacagtttcagatagccaccaacaagaagaaacaaatatggtgtgaactgagataggtggaattaagatgggaactggagcccaactagagatgcaagcagggtctggaaagaacagggggctgccagacacagtcctgaagtcccacatggaggcgtccaggggtagtgctatctctgggcctttcagaytggagtggctttgtgctcctgaatcaccatgaactagttgagcaaccacagatgagtctctgtgtcctctgtgaactttagttttagtatttatgaaaactaaatactgatacttgccttgctacctaaaagagctattgagaggataatgccagccagacagtagtgtattagcagctttgaaaagaatccaagtgctacacaaatgtaaggcattgttttccctatgtcagaaggcttggatttgaatcctagcttcactag

SEQ ID NO: 646607 - DNA, 587 bp, Homo sapiens
acctgcccatccctattctgaaattccttcaaagcagaaccctggcccaagccctgcatggagaacctaaggaaggaggagacacggtccctgacctcagagagcacacagattgtgaggacaggcttaaagaacagtttcagatagccaccaacaagaagaaacaaatatggtgtgaactgagataggtggaattaagatgggaactggagcccaactagagatgcaagcagggtctggaaagaacagggggctgccagacacagtcctgaagtcccacatggaggcgtccaggggtagtgctatctctgggcctttcagactggagtggctttgtgctcctgaatcaccatgaactagttgagcaaccacagatgagtctctgtgtcctctgtgaactttagttttagtatttatgaaaactaaatactgatacttgccttgctacctaaaagagctattgagaggataatgccagccagacagtagtgtattagcagctttgaaaagaatcmaagtgctacacaaatgtaaggcattgttttccctatgtcagaaggcttggatttgaatcctagcttcactag

SEQ ID NO: 646608 - DNA, 619 bp, Homo sapiens
tgacagaaggacatggatagatgtacatacagacatatagatatgttatctcttctatggatacaacatgacaacaacatattgagcttatctgtaaaatggcctatcattttattttgatactcagtgagtaaatgttcacacttgataatttttaaagtgtcaatagaaaagtcatacttccttattgtatgaaaagattttttttaatcttggaaagtgaattctattacaattggtttgcaattctaactgtaaaatcatataaaagagaataataatattgataacacttctttcttctgggttcatctggatatttaaaactttatagccttgtataacttcttattcaataacaagcacaatccatgctcaagaaatgcggtgtttataggagcagaacctagagttagttttaatgtaacctgacaagagtgaagactagggaggaaaaatagtgaccacaatatttaattgtaagacctagctttattttcmatataaaaaatgaatataaggtactcagtgccataaatatgcaaccatagccctttatgttttgacatatatcatttggtcattgtaataactacaaacaggtcaaataatataacta

SEQ ID NO: 646609 - DNA, 620 bp, Homo sapiens
atataaatttctcatttacaacaaataaaaattccagggtcaaacattatcaaacaaaatttatgatgactgcaaaaatattacacagaaaggaataaattacatgagactactgtagatcagtgccccaagcatatgactaaagccaaaatcttaagagttcttatgctgatttattatctttcttcattgttacctgagagcaatttatttaaccttgatgtgcttcaggtttccaaaattctaaaagtaatgttgtggtcatcaggccccccccccmaaaaaatgatattacatttattttcaatttcccttgtccatgaagttttatgcaaagtcaataagctttcttgtagattagcagtgaacacaaatgaaaaagcaattccctccctagtgaaatccctttgcaaatttaatgtcattcggatgtttgagagaaaggcttcaagctttcagaattgtttttttaccattaggacaaattttggcatcaatctttgaagaattatttagttcagagttctgacccgcttggattaggctcattcaggtttactgtggacacttctcagtcagtgctgcttcataagctgcacatgaacaatgaattaaccaag

SEQ ID NO: 646610 - DNA, 582 bp, Homo sapiens
agttgtcttggagcaaagcattcctatattattttatgtttctaaggcaggtgtggctagcacctctataattaaaataaagttcaattaaatctgaacaagtattatttaatatagttttttattattttaatacaggtttcaatgtaatcagacagtaacaatgtctagctctgtcttcatttagcatgtatctataaacacgctccttaaaaacatacctaaacacacacacaaaaaaagatgtctttataacaaattttcacaagttatgcatttttgarcaacagttaacaggataagttcaaggtaacagttgccagtgattttcatccctaggaagtaggtaaatcaaccaggctaggagttttcaaaaataaacataaactcctttgtactagctaatccttatcatttagcatcacctgtccttcagctggccctatgcttgaggcatcagaatgaagccctgggaactagtattcaaatcacaattattttaaagtttacaatgggcaatttcctaaaagtgatatgatagaaagagtatgaattctggagtcagacaatcccagttttgca

SEQ ID NO: 646611 - DNA, 517 bp, Homo sapiens
agcggcaatttgccaccaatattgccaaaatagccagtatggctgcccaattaacagatcaaaaactaaagatcagctgctaattcctgccttgtacattctcagagagtaaggaccttccatttcccgactaaatgctcagaatgagccatcaggcctgttaggtaaaaatgagaaatttgaaggatcaagcggccccgcagacgctggtagagagggcaagcttaaggtgtagaagaaaactgtcattcccacttaatccaaaaaagtaaaaatatatgcctcctattttctttcagatataayaaccaccttttcttaaacaatagcttatttgggggcctgcattcattacaaacaaaccagagtaggcttatatatcatctgaaggttcttttttaaaaaatttcttttgagacagggtcttgctctgtcacctagactggagtgcagtggcacaatcataactcactgcagcctcgacctactgggctcaaggaattcttctgcctcagcc

SEQ ID NO: 646612 - DNA, 576 bp, Homo sapiens
cactatcatgagaacagtatgggaaagacccacccccatgattcarttaccccccaccaggtccctgccacaacatgcggggattatggaagctacagttcaagatttgggtggggacacagctgaaacatatcactgttcatggttctaagctttgaaactacaactcattctcttttttttaaattatactttaagttctgggatacatgtgcagaacatgcaggttacataggtatacatatgccatggtggtttgctgcacccatcaacccatcatctacattaggtatttctcctaatgctatccctcccctagcccccaccccgcgacaggccccagtgtgtgatgttcccctccctgtgcccatatgttctcattgttcaactcctgctccttctcctataaatcctttccccactcctccacccaaggttattttctcttcatcagcccctaaacttcaagagatcttagcagcctgggagcataagggcactcttcctctcagcagcatccaaatttaccccatcttcatgctccagaattaagtgagaggggcctatgacttgagc

SEQ ID NO: 646613 - DNA, 580 bp, Homo sapiens
aactaagcttggattcaaaagaaaaaagtcatccctctgccaccctcttttgccctctagtctagaggttagtaaactatggcccacagggcaaattcaacccaccatctgtctctgtaaataaaattytactggaacacagccgtgtccactcatttacggattgttaatggctgctttcaccctataatagcaaagactatgtggtccacaagacctaaaatatttactttctagtgctttacagaaaaaaaaaaattgtcaacgcttgctctagttccatactccacaagccactcttatttgtttgtttgtttgtttgtgacagggtctcactctgtaacccagactggagtgcagtagcacgatcacagctcactgcaggctaaagcaattctctcacctcagcctcccaaatagctgggattacaggtgcacgccatcatgctcagttaatttttttttttttttttttttttttttagcagagacgagctctgtctgtgttgcccaggcttgtctcaaactcctgggctcaaacaatcacctgcctaggcctcccaaagtgctgagattacag

SEQ ID NO: 646614 - DNA, 580 bp, Homo sapiens
aactaagcttggattcaaaagaaaaaagtcatccctctgccaccctcttttgccctctagtctagaggttagtaaactatggcccacagggcaaattcaacccaccatctgtctctgtaaataaaattctactggaacacagccgtgtccactcatttacggattgttaatggctgctttcaccctataatagcaaagactatgtggtccacaagacctaaaatatttactttytagtgctttacagaaaaaaaaaaattgtcaacgcttgctctagttccatactccacaagccactcttatttgtttgtttgtttgtttgtgacagggtctcactctgtaacccagactggagtgcagtagcacgatcacagctcactgcaggctaaagcaattctctcacctcagcctcccaaatagctgggattacaggtgcacgccatcatgctcagttaatttttttttttttttttttttttttttagcagagacgagctctgtctgtgttgcccaggcttgtctcaaactcctgggctcaaacaatcacctgcctaggcctcccaaagtgctgagattacag

SEQ ID NO: 646615 - DNA, 580 bp, Homo sapiens
aactaagcttggattcaaaagaaaaaagtcatccctctgccaccctcttttgccctctagtctagaggttagtaaactatggcccacagggcaaattcaacccaccatctgtctctgtaaataaaattctactggaacacagccgtgtccactcatttacggattgttaatggctgctttcaccctataatagcaaagactatgtggtccacaagacctaaaatatttactttctagtgctttacagaaaaaaaaaaattgtcaacgcttgctctagttccatactccacaagccactcttrtttgtttgtttgtttgtttgtgacagggtctcactctgtaacccagactggagtgcagtagcacgatcacagctcactgcaggctaaagcaattctctcacctcagcctcccaaatagctgggattacaggtgcacgccatcatgctcagttaatttttttttttttttttttttttttttagcagagacgagctctgtctgtgttgcccaggcttgtctcaaactcctgggctcaaacaatcacctgcctaggcctcccaaagtgctgagattacag

SEQ ID NO: 646616 - DNA, 456 bp, Homo sapiens
  misc_feature 1, 2, 3, 4, 5, 6, 7, 8, 9, 10, 11, 12, 13, 14, 15, 16, 17,18, 19, 20, 21, 22, 23, 24, 25, 26, 27, 28, 29, 30, 31,32, 33, 34, 35, 36, 37: n = A,T,C or G
nnnnnnnnnnnnnnnnnnnnnnnnnnnnnnnnnnnnnaaatgcatagtattatgtgtggaaagagaagaaaaagaactaatgtttattaacatctatgtgctatgcactgtgatagggaatttacgtgtattataatccttgcagcaggattatcccagcttacaaataggaaaatgattctcagagagtttaaagtaatacagttgataccacagttattaagtggtgggaagcatgtayatttttaaaataaacttttaatttttgaatggttttatatttacagaaaagttgtgaaaatccatataccccacaccgaggttcccctatttttaacatcttatattagtgtggtacatttgtcaactcatgcaccagtattgaggcaccaataatcttggtgaaactaatgcaccaatatcttggctgtgacagtttctcagtctttccttgat

SEQ ID NO: 646617 - DNA, 456 bp, Homo sapiens
  misc_feature 1, 2, 3, 4, 5, 6, 7, 8, 9, 10, 11, 12, 13, 14, 15, 16, 17,18, 19, 20, 21, 22, 23, 24, 25, 26, 27, 28, 29, 30, 31,32, 33, 34, 35, 36, 37: n = A,T,C or G
nnnnnnnnnnnnnnnnnnnnnnnnnnnnnnnnnnnnnaaatgcatagtattatgtgtggaaagagaagaaaaagaactaatgtttattaacatctatgtgctatgcactgtgatagggaatttacgtgtattataatccttgcagcaggattatcccagcttacaaataggaaaatgattctcagagagtttaaagtaatacagttgataccacagttattaagtggtgggaagcatgtatatttttaaaataaacttttaatttttgaatggttttatatttacagaaaagttgtgaaaatccatatacccyacaccgaggttcccctatttttaacatcttatattagtgtggtacatttgtcaactcatgcaccagtattgaggcaccaataatcttggtgaaactaatgcaccaatatcttggctgtgacagtttctcagtctttccttgat

SEQ ID NO: 646618 - DNA, 456 bp, Homo sapiens
  misc_feature 1, 2, 3, 4, 5, 6, 7, 8, 9, 10, 11, 12, 13, 14, 15, 16, 17,18, 19, 20, 21, 22, 23, 24, 25, 26, 27, 28, 29, 30, 31,32, 33, 34, 35, 36, 37: n = A,T,C or G
nnnnnnnnnnnnnnnnnnnnnnnnnnnnnnnnnnnnnaaatgcatagtattatgtgtggaaagagaagaaaaagaactaatgtttattaacatctatgtgctatgcactgtgatagggaatttacgtgtattataatccttgcagcaggattatcccagcttacaaataggaaaatgattctcagagagtttaaagtaatacagttgataccacagttattaagtggtgggaagcatgtatatttttaaaataaacttttaatttttgaatggttttatatttacagaaaagttgtgaaaatccatataccccacaccgaggttcccctatttttaacatcttatattagtgtggtacatttgtcaactcaygcaccagtattgaggcaccaataatcttggtgaaactaatgcaccaatatcttggctgtgacagtttctcagtctttccttgat

SEQ ID NO: 646619 - DNA, 510 bp, Homo sapiens
  misc_feature 30: n = A,T,C or G
ctcagggctttcacttgatttattactggnggttattcatatttcattaattcaccccaaaatatatttcattccctttaagaaatgagaagactacacttagtttctgaaaatttaataacaaaaagtatttaacttgtaataacatgtttaattttttgacactcaattcatgagtttgattatattgactgtattatattcaagaaggttgctttttacttccagggtatttgaaagtatactttatttttagtacttgtagtaatttgtttgcattttttcttagcagataatggttgattagggagttaaagtactgaacttcattttcagactgtatatctttttaatgtgtataatatggtttgcatttgtgtcgcttcccaaatctcatgttgaattagaggaggggccttgtgggagacggtwgaatcatggggatggtatcccccttgctgttctcatgatattgagtgagttctctaaagatctgatggtttaaagtgt

SEQ ID NO: 646620 - DNA, 532 bp, Homo sapiens
  misc_feature 218: n = A,T,C or G
taaatccttagaacgtcaagcatttaacctgaattcataaaataatgtaatctattataacataaaatgtagtaaaacaatagttatttgacagtgttgaagaaatcttaattaaacagactagatcccagacagagtacaaagacctacagcactgacacatcagagatatactgaaactgtacagtttttaatagaaagaatacctggatttgatntaggtaatatagatttaaattccaattttcttattttttattgtatcctatagatgttaaaaaagataatctgatataaactcacaaaatatttcttctcgtatgtaaaggtaaacttatcaaaggtaagtttcccctatcttattctgckatgctatcatcaatgtgtatgctgcctgctcaaactcttactatcacatctctagagccaaccagaaaaagaaaacagagaaaacaaggtcatgtcttggcctttaaaaatactccttggaaactgtacataaacatgtttacttataatgtactggccaaaa

SEQ ID NO: 646621 - DNA, 566 bp, Homo sapiens
tataaaattaagaaaactacaaaattattaaatacatcatctgaagagaagaactgatcaatgatctcataggccaatttgtagatgtcttcattttcatgattttgaagttgttcaattttctccagccctgcaagaaattttgcaatgtgaaacaatagtaatatttaaagagcagtgacaagttagaataatctttggaacacataatccaatttctgaatcgcaaattttttgaattataatttttgggaatttaaaggtgaatcttaaatataaaaaaattttatgcacaaagatacagcatatttatcttaaaatyaacaacctgagtgtctaactgcttgtaaatgtacaaataagtgtataaataagtaatgagacatctgcctattcatcagaatacataaccaatgtttataaccagcaataacatgtaaaattccatttaagtaaaaagcggaatcttcctactttccagcacctgccaagtttttctagtgagcacgtatgaaaataaatttaaaatactggtgattaataaatatgatgcttaagatacctgt

SEQ ID NO: 646622 - DNA, 594 bp, Homo sapiens
ctcattccagtctcacatacaatgttttcttaaataccttcagtcttcagatatgataagtgaccctctatgtgctctatgtaaaaacaagtctcctacttgtaggggaattaatagagaaattttcaatgaatgtttaggaggaagcaagggacaattagatcaaaaggtgagagactaaaggactgagagccttatgtgaaataggtagtgatactatgtaactaaagagacagagatagagaaacttctttactttcttaacttcaactacctaatatttgatatactattacttaaaccattggaggaggaaaatagaatacagattagaagaaattcatttctctctatatacatatagatataggtayagacatagatatagatagatatacagatacatataccctccattccagcctagacaacagagtgagaccctgttttccccacctctctgctccccccaaaaatatatatttttaaaggagaaaaatgcatatttttggccggaaaaacgggtggactgaaaatgaactgttctcaaatgttttgtccatggcatatacacctaggaaaaataaaatacta

SEQ ID NO: 646623 - DNA, 594 bp, Homo sapiens
ctcattccagtctcacatacaatgttttcttaaataccttcagtcttcagatatgataagtgaccctctatgtgctctatgtaaaaacaagtctcctacttgtaggggaattaatagagaaattttcaatgaatgtttaggaggaagcaagggacaattagatcaaaaggtgagagactaaaggactgagagccttatgtgaaataggtagtgatactatgtaactaaagagacagagatagagaaacttctttactttcttaacttcaactacctaatatttgatatactattacttaaaccattggaggaggaaaatagaatacagattagaagaaattcatttctctctatatacatatagatataggtacagacatagatatagatagatatacagatacatataccctccattccagcctagacaacagagtgagaccctgttttccccacctctctgctccccccaaaaatatatatttttaaaggagaaaaatgcatatttttggccrgaaaaacgggtggactgaaaatgaactgttctcaaatgttttgtccatggcatatacacctaggaaaaataaaatacta

SEQ ID NO: 646624 - DNA, 580 bp, Homo sapiens
ataacctacataatgggagaaaatacgacaaactatgcatccaacaaatgcctaatatccagaatctataagggacctaaaaaactcaacaagaaaaaaaaaactcatgaaaaagtgggcaaaagacatggacacttctaaaaagaagacatataagtggccaacaaataaacgggaaaatgctccacatcagtaatcatcagagataatgcaaatyaaaaccacaatgagataccatgtcatagcagtcaaaatggcaatcattaaaaagtcaaaaaacaaatgctggcagggctgtggagaaaagggaatgcttatacactgttgatgagaatgtaaattagttcagccactgtggaaagcagttttgatatttttttttaaatatggaatctcactcttttgcccagggtggagtgcagtagcatggtcttggctcactgcaacctccgcctcccgggttcaagtgattctcctgcctcagcctcctgagtagctgggattacagacatgtgccaccacacccagctaatttttgtatttttgtagagatgggattttgccatgttgaccaggctgg

SEQ ID NO: 646625 - DNA, 590 bp, Homo sapiens
ggtcggttcacttctaacattatctaacgttcaagtttatattgggagaaatttctatgaattagagtcaaagtcccgtagtattagttttcaatagattgtcaagaattcattcaaatcattcaattattctctacagtttttattaattaattwatttatttatttattttaatgattatgaattgttcatgctgagggtagaattcaaaatggtatcttttagaagcaaagtcatttacatttgtagtcaattaatggtgtccacagttgcaattttcctaaattgcatggtaggctttaagtagaacttagattttttcatccaaggttattgggtggttactgtaagagagagcagtgactattttacggggggctgctaagcatttgaactcaattcctagttttgagaaatttattactggtgagtcttaccatcaaaggccagagactggctttctaacttcctcaaagataggacatggacatgagacatggtaggaccctatagatacagccaggacatgaatctggaacgagtgatacaaaataatgtgctagtttataagcatttttctgacagtgca

SEQ ID NO: 646626 - DNA, 532 bp, Homo sapiens
atttctttgcttttgaggtatgtgggctttttgttgttttgtttttatctttttgtaggttggtttatttaastgggccttttccaatggaaaaagaaattaaaatgtatttcagcccctctgttttgcagcggtagtaccattcatgcaccaaaagccccatcaggagagtcccctggctgtcgtccataagaggaagggcaggaaatggaacctagatatatagccagtcagcctcccccgcaagccgaatagaggaagcagatggaagcatgcaggatagaccctgggagccaacctttaaattccttgaaagaaagcaagcaagcacgccaggctgcaaaaggaaagggcaaaacagccctatggcccttgacaaaccagcagggagaggcgctggagaggaaatgagtgccgaggaccaggaaacaaaacaggctgttgctaaaacagaggggagagtgtgtgtcgcccaatccgacactgggttgagctaaagctgacttcccacgcttctctgtgggaggcaggg

SEQ ID NO: 646627 - DNA, 385 bp, Homo sapiens
agactgagaccctgtctcgaggaaaaagaaaaagcaaactagaagaaacggaggctgcaaacagagaagaagtyaacttcaccaaaatttttttgaggtgttcaacaaaataagagaagaaacaacagagacttccattttttcatttgcccaagctacaaatcttgaattcatccttgactcctttctttctgacacacgcccatagtcaatctgtcctactacacggcaaccagtcatccttttaaaacgcaaattgattatctcactccctcatccaaaagccacatcaaattctgttttcattcagagtaaaagctaaagtggcttcaggggcttaagtggctcacccccaccacatcacatcccacttttagaatgtcat

SEQ ID NO: 646628 - DNA, 496 bp, Homo sapiens
cttaaacataaaagttaaaataaataagtaaaacttttttttcttgtttttttcttatttttgataaccttgactgtttggtgatatactygtcaggtatttgtataatgtccctcaactgaggttttactgatttttaaaaaagtcataattagaataaaattatggtattttggaagaatgaccaaaggcatgaagtgccattttcatcacagtatatcaaggatacacatgatcaagatgactaataaccgtttatctttaccttaatctcttcactgaaatactgtttgtcatactattataaagttaatcttttccacctctttccatactgtgctccctgagaaaatgtcactatgaacagtccacacttaagatgacagttattctctacctttttaagggtggaatacctacataaattatttagaattcttctgcaggggagagttgtctactctccatcattaatttgttttttaaataatttgtg

SEQ ID NO: 646629 - DNA, 609 bp, Homo sapiens
cagtgctctttcttacacactaagccatgccaaaatccactctaaaataaaaccctaaatctactagccttaacatttataaggtgtttccacaaggacataggttttgctccatgcctcatgtgaggtctttgtttccttcttgtttaaagaaagagtgacctggacaacagtctcatagtgacatctggtgactaagtcagggtaatacaaaacataagaagaagacaaagtatcaatgtgcttttgtttgttaagatttaggtaggacaattaaatccaaaacttagaggacacattgtaattcctaaagattgtrtttcatggttcccttcttctttaatatgtctacaaacaaggtgatgttttatattaattctctttttgtaataacagtgaattattgccaatcttgtggcatctgagtctacataagctattcaacaaagatttatgagaacctactatgtgacagaagcagttgtagctcctggggacacaaagcctagttgtggaattaacccaatacagcaaactatgaaataatgtgataagagctagagttaagatatacataaaatatgctgaggaaagagtgactgactgact

SEQ ID NO: 646630 - DNA, 431 bp, Homo sapiens
gagttttgcccaaaactctcatcagatacagaatccatccgctaactatctagtattatttccataagttagatcaattatcactcccaaaacaaatgcacatggcacccagaatctgtgcatttctcccaagtaaaagaggaggtggacgggcrcagtgtctcatgcctttaaccccagcactttgggaggccaaggtgggtggatcacctgaagtcaggagttcaagaccagcctggccaacatggtgataccctgtctctactaaaaataaaaaaaattagccaggtgtggtggcatgtgcctgtagtcccagcttcttgggaggctgaggcaggagaatcacttgaacccaggaggctgaggttgcagtgagcagagatcacaccactgcacctcagcctggatgacagagtgagactctgtctcaa

SEQ ID NO: 646631 - DNA, 516 bp, Homo sapiens
tagactttcagacaaatacaatagaacagatttgagatcctacaagttagtcctcacatatatggtcaatgactgttcaacaaggtggccaagtctagtcaagggaggaaagaacagtctcttcaacagctggatgtcagtgcacaagagagaagttagacccctaccttgcagtatatacaaaaattaattctaaattaataaaagacttaaattaaggactaaaaatatgtaactcttagaagaaaacacacggtaaacctttatgacctttgagttttaagtgtattttgaaatatgacagaaaagcacagataacaaaagaaaatacacgaaaattagatttaatcaaaataaaaaaaccctttatgcatcaaaggatactatcaagggagtgaaaagacaacccataatatgtgagaaaatatgtatctgataaaatcaaartgtgtatctgataaaagcttaatatcccacaactcaacaacagaatttctaagatcccaattaaaaaaa

SEQ ID NO: 646632 - DNA, 383 bp, Homo sapiens
agtttaatagagcaataaacgattcacgaatcagacagtccccagaatcacagcagattcacagagactccagcgcattcrtgtggtggaagaagatttatagacaaaagggaaatggcatactgaaatcggaagtgaggtacagaaacaactcagtgtttgccttgtttgaacacagtttgaacatttggcagtgcctgagtggttgaagtttggccattgggattggccaagatgtagctgttgttcaagatgcatactcttaagttagtttttcattcttctatacctattaaggtaggttacagttcatccacaatgactcatatatagaattatggagtccttctcaggccacacttagttcactttaacaatgcctt

SEQ ID NO: 646633 - DNA, 383 bp, Homo sapiens
agtttaatagagcaataaacgattcacgaatcagacagtccccagaatcacagcagattcacagagactccagcgcattcgtgtggtggaagaagatttatagacaaaagggaaatggcatacygaaatcggaagtgaggtacagaaacaactcagtgtttgccttgtttgaacacagtttgaacatttggcagtgcctgagtggttgaagtttggccattgggattggccaagatgtagctgttgttcaagatgcatactcttaagttagtttttcattcttctatacctattaaggtaggttacagttcatccacaatgactcatatatagaattatggagtccttctcaggccacacttagttcactttaacaatgcctt

SEQ ID NO: 646634 - DNA, 572 bp, Homo sapiens
aaacgttattactcttggagtcctactccaagtaaaagaactctttcaaatcctcagattaacctaaatagctgtttctctcctataccatgaacagaaggagctctctgtctggtctacctgttgatgacatccccaacatccaaaataatctgtgcatctgtcagcagcagttgggatccaggcagaaagcagatggctcctacagacaaagtcatctaagagtcctttaataaagggtgacttatgcagcatgcccacaaatgttggggaagttcccttacatagtaacagggccactctatgagcactgactactctaaggaaagttaaaggctctaggtattacctccctctgctggcaatctggaaggccatrgagaggtaaaaactacatttattttgtatgtatcctgagaaagaggaaatagcagtagaggaaattgaggtagggaagtgataaactctctgccaaaatgttgctccttatttttttttctgtctctcttgattaacttactttttcattattgccaaaagaagagtaaggtaggcagaggttagaatcaaac

SEQ ID NO: 646635 - DNA, 572 bp, Homo sapiens
aaacgttattactcttggagtcctactccaagtaaaagaactctttcaaatcctcagattaacctaaatagctgtttctctcctataccatgaacagaaggagctctctgtctggtctacctgttgatgacatccccaacatccaaaataatctgtgcatctgtcagcagcagttgggatccaggcagaaagcagatggctcctacagacaaagtcatctaagagtcctttaataaagggtgacttatgcagcatgcccacaaatgttggggaagttcccttacatagtaacagggccactctatgagcactgactactctaaggaaagttaaaggctctaggtattacctccctctgctggcaatctggaaggccatagagaggtaaaaactacatttattttgtatgtatcctgagaaagaggaaatagcagtagaggaaattgaggtagggaagtgataaactctctgccaaaatgttgytccttatttttttttctgtctctcttgattaacttactttttcattattgccaaaagaagagtaaggtaggcagaggttagaatcaaac

SEQ ID NO: 646636 - DNA, 536 bp, Homo sapiens
gaaaactgaaaaaaaatgtaaggcaatcattgtattaactgagtaggtttgcaagcgggtcatctctggtcttctctattatgacatctattggtttggtgcaaagtaatggcaaaacctcaattacttttgcaccaacctaatatatgtttaatgtctattggttcaattgccaacaattgattggtggcrattgttgatcaaataaaaccaacttgaacttttttgctttcatccttctctcctcctatacttttattccctttttaacatggtggctcacccttgtaatgccaacattttgggaggccgaggtgggaggattgcttgagcccaggagttccagaccagcctgggcaacatagggagaccctgtctctacaaaaatagaaaaattaaagttaaaatttaaaaatatcaaagaattgcttctaactcctattctatcccaccacatcattattactctatcttagagatcttcaggtatacggagttaattctatactgggaaaggcatttgaggtagatagtat

SEQ ID NO: 646637 - DNA, 593 bp, Homo sapiens
atattttgcttttttcttcgctaatttgtaagcataaaactgtacatggttgttttattgtaatacatattgtattattgttaaaatttcttttattctaccttttaaatcttttaaaattaataaggattattgcttttttgagatacatatgtcttcaaacttttttcataatttatttcattgcttttaaattttatcctgcttcctccagagatatcataattgatcaaatattcttatattttaatggtgttatttttatgtttcatcattttatcaaatgagaattaatttttgataaggcagatttcttaaataatcatatattgaataactctgtctttataatatattggaaatgtttattgtataccaaattaaagtattttatgtaatgttatttgtttaaactctattcatttagttctcatgatcttcatattcacttyatagcagcatcacttcttttaagttattctagttttcaatatgtaataatgttaggacaaatcttaatcctacatcactattcatagtcaaaataaataacatttcctccttttcatttttttcttctggttattatatca

SEQ ID NO: 646638 - DNA, 565 bp, Homo sapiens
aaaattattaaaattctagaataaaatataggaggaatctttgtgaccttgggttaaacaaagatttcttaactataacagcaaaatcattatcagtaagacaaaaacaatagataaattatggttaattaaaattagaaactgctattcttcaaagacactgctaataagcaagacatagaacatattcaaaagtatctgatatacaatgtgtatctagaatacataaaactcaaataattcaatacaaataggcaaaatgacaaccctatgctcacaaagttcataattttgataaagtagaacaattccttgmaagacaccaactgccaaaactctcacaagaagaaacagacaatccaaatagccctatatatattaagtagagtctatagtataaccttttgaaacagaaagcaccaaccccagatgggttcactgttgaatactaccaaatatttaaggaaaaaaatgtgctaattctctacaatctcagagatttgaagcaaaggggataattcttagtcctatgagaaatacttcctcatcatatgcagccagcatt

SEQ ID NO: 646639 - DNA, 410 bp, Homo sapiens
aattcacaagtgtttcaggttcaaggttgtttgtatttttggctaaaagcagtatccttgtatcatcataaatcattagattcaggacttatgaagtctagttacaaatttcatttcaaataggtcaggttccaggctatattagagcagggccaaattaaaaaaaaagaaattaagaaataattaaatgaaaaagaaatgggactaaaagaagtaggattaggattacaaaaataagttaggattacagaacttcccttgattgaaacatatatacagtttaaaaaatatgtatagcaactaaaccaagaaaggaaagaaatcttatggcaaaagcttacaattayggccataagaggaaataataaaactgggtcatgccatatttcaacactgtcactcccacttcc

SEQ ID NO: 646640 - DNA, 590 bp, Homo sapiens
acgtttcgctctgctgcccaggctggagcgcaatgacgcgatctcagctcactgcaacctctgtctcccaggttcaagcaattctcctgccttagcctcccgagtagctaggattacaggcacctgccagcacacccggctaatttttgtatatttagtagagatgggttttcaccatgttgaccaggctggtcgcaaactcctgacttcaggtgatccacccgcctcagcctcccaaagtgctgggattacagacgtgagccaccacgcccrgccctaaaaattctttaatcagtatagatacccttgacttttactctttccttagtccctacttagcttattttttaactttttactgtcactgttttttaaaaaaatgaatatgtattgccttttaaacagaaaaaagacaggatttttttaaaaattatagaaccaagatagtttctaaagcaaagaattcttccgccccgaatcacaaatgtacaagggtttaacaaaggacctacacacacgcgcacacacacttttatatatattatttagattaccagaaatactgctagaaattttagaatttcctgtgg

SEQ ID NO: 646641 - DNA, 589 bp, Homo sapiens
ttggactctcacaaataacttacttgctgacaggcagaggatgaagtgtgaatttattgccttttgcctaagtgtactgaggcaaagagcagaggactttgcttgttcaattgttaattgagttaatacactttcttccattgctgtaaaaatcgtcctcttaaaagaggtcagagctaggagagatatgtgagaatgatttcaaaagattaattaagtgctgaataatcttcaaaacctacaggctaatattcaagaaatgttaatcatcagcaacatggacttaaaggagaaatgaaataaaaatttacagagcaaagtttgtccaaatgggaaatggaaactaaaggcacatgttcttcaacacagtgtttgttcatattgttgactctaatgcttccgtattaggattttccaggagsctctaagatggaaaacgttactgtgaacagtccacctccctaaggaaaaacacagaggactcaatagaatagttaacctcacttaggaagggataaatttaaactttgatactgactatgaacataaatatgtggctatttatcttactgattattgtttaaatagt

SEQ ID NO: 646642 - DNA, 607 bp, Homo sapiens
ttggtttgggggtttctggagttgactgctgaatatgaatggacccaaacatgttaaggactctacttctcatactagggagaatactgatagtccttgacatgaactgtttggagagttatgcaaaataaatacatatgacactcctgattcaccacttgtgagaggcaaggagtttagtgactttatacatactaccttttatgatatgtggaaagccaaggaacataatgaagtggtcagttgctcctaagtttgctggacaaagtgatgaaagaaaataatgaactcagggattctaactctyggcttcactagcagacatagaggctcaaatctgctaagattgccctgtgtgtgagtcttatctcctgtagagaaagctgaaattgtggaaaaacagacataagctcttatcatgctagtggctggcctgcaatgaaaggtgcatgcacagcctcaccaggtgcctactgttaaaatgagggcattgattggaaagaatggggtcctgctacttagatgggatgtgttggaggactctgatgatgctggggacactgagcctgtaaactctgatgaacccattttttaagaagaaacacct

SEQ ID NO: 646643 - DNA, 610 bp, Homo sapiens
  misc_feature 546: n = A,T,C or G
ccaaggggtcattgcccatgaatgcacccatcccactatagagtatgttgtccgcatgacaactgtagcctatcttgtcatgctctcatgaggctgaagggcggcatatacagctgctgtttctctgtcaagaaataccggagctcagctgctttccaaagttgggaccaaaaatctactggcattctaaagggctccgtgcactgcgaggggccccagccaaaaccatctgtggtcacatgcacatgcagctcaaatgggtgcccctggtcaacttcctgtagggcttgtgcctgctgaatagcccasctggctgctaggaaggaggtccagccgcaccattcaatccaggaaagaggagcattgcatttctaatctgcaaatatcagaagttgacataatatcacccatgacatatagagaccatgacatatagtgaggctatgcatatagcctgcggcaacactgtgaaagtccattgtcatcgttccatgaaggaaagctatttctggctctctagagcaatgtcaattgagaagaatgcanatcgactatgtggccactattgttccactatagtggtactgttccaatttcatcataaagtggt

SEQ ID NO: 646644 - DNA, 565 bp, Homo sapiens
gctcataaataatctacaagtaagtcctaaaactgcaaatgattcagtagttcacattttgacttcttaagactttgcaaactgccaaagactgtctgcttcttcttgaagaatgcttttgtttctttctcttaactcaggcagctttctcctggtccccatgactgctgagtccagaaatgtgaagcattctcacaggagagctccccctcctgtctttcgtctttcacatctcgtttaaatttctaattcctcaaagcttaaagaaagagaaatgcctcaagacaagctgaactgggaaagtcaaagtgaatcgtgataaggggttcaattacagcccgtgcattctccttatctgggtgacaaacacactcatataatttgagttcccactcttgttatactttgaaagtgattagaaagccttaatatattttgaaagaacgcaacttctctactgtattctacataaattgcatrctaagctagcctgaaaggagaaattttatttcaaaggaagattagaaagtgccttttttaaagctatcaaagctgataccaagat

SEQ ID NO: 646645 - DNA, 592 bp, Homo sapiens
aaaccaaacaaaatatatcacagtagttttcaagacactggacattaggcagtaaaggacagtaatcctgagaaatgggaaataaacaagatgagccctatgattactccagcttactgccatgagaaagtttccagtccatggtggaggaaaagagaattcaggtggcacccagtgaactccctaggtaaagagaaccctgtaagtaaatatagctgatactctgggagaccaagctgcctagagtctgctgattaaagtgccagagaggaagagagttgcatggagagaggatttctgagatttgtggaacatgcccctaaagaatttagcagagtgttgataagcacatgcatgtaaggaaactatgtgaggctggggaaggaagtgtcatggaggattagagaagagtaccacgaccagataaagagcctcttcccaccactgagagagaaaagcatcaggattaatgtrtcattagataggcacacaaagtagtcttttctcagtaatgtggaatagttagcttgtgatgaagcagtgctctgttccaagtaaagattctttaaagcaagacccaaaaggatcaaat

SEQ ID NO: 646646 - DNA, 561 bp, Homo sapiens
cacctaggtagattctatatcttggctattgctattagtgctgcaataaacatgggcagtggggagggtggtggttgcagatgtctctgatacaccaatttcctatcctttggataaatgaccagttgtgggattgctgaatcatattgtagttttatctgcagttttgtgaaatatttccaactgttctccatagtagctatactagtttacattcccaccaacagtgtataagaattccctyggccaggtgcggtggctcactttgggatgccaaggtgggcagatcacgaggtcaggagatcaagaccatcctggctaacatggtgaaaccccatctctactaaaaatacaaaaaattagccaggcatggtggcacgcacctgtagtccccagctactcaggaggctgaggcaggagaatcacttgaacccaggaggtggaggttgcagtgagccgagatcgcatcactgcactccagcctgggtgacagagcgagactctgcctcaaaaaaacatataaataaaaataaaaataaagcattcccttttctccacatc

SEQ ID NO: 646647 - DNA, 584 bp, Homo sapiens
ggtttatttgaacctggaagaaaggtagcaagaaagagcaacattttgctttctataaaactagatacaggaaggggaacatcacacaccagggcctgtagtggggtggggtgagggggagggatggcattaggagatatacctaatggaaatgacgagttaatgggtgcagcacaccaacatggcacatgtatacatatgtaacaaacctgcacgttgtgcacatgtaccctagaacttaagagtataataaaamaaagacaccaatttgaaaagagaaaaaaaatagatgagtaagaaaactgaccacattattcttcactttctactgactaccaggcacaaattgagagagggacacagagagacaaggtcagtcttaattgttggcaaaatgaaatactacttggagcactgctcagcaaactttatcagtaatttgcagccatgtgtccaactgttatctgttaacacccaaattcatatacatactttgaaaatagctcactaaagcattatcctcatattattctgatacttagtatggaaaagtcataaggtcatgtactgtttctccaaatgag

SEQ ID NO: 646648 - DNA, 584 bp, Homo sapiens
ggtttatttgaacctggaagaaaggtagcaagaaagagcaacattttgctttctataaaactagatacaggaaggggaacatcacacaccagggcctgtagtggggtggggtgagggggagggatggcattaggagatatacctaatggaaatgacgagttaatgggtgcagcacaccaacatggcacatgtatacatatgtaacaaacctgcacgttgtgcacatgtaccctagaacttaagagtataataaaacaaagacaccaatttgaaaagagaaaaaaaatagatgagtaagaaaactgaccacattattcttcactttctactgactaccaggcacaaattgagagagggacacagagagacaaggtcagtcttaattgttggcaaaatgaaatactacttggagcactgctcagcaaactttatcagtaatttgcagccatgtgyccaactgttatctgttaacacccaaattcatatacatactttgaaaatagctcactaaagcattatcctcatattattctgatacttagtatggaaaagtcataaggtcatgtactgtttctccaaatgag

SEQ ID NO: 646649 - DNA, 640 bp, Homo sapiens
cagtgacttgggggaaggactatggcttgttgggaagagatcccttccacacatacacttgtatgtgccacactgtaaagttaggtaatgttctgcattcatttaacaaagtgtacataaatctggctggagcgagtggccacactgtgcagaaataggtgaagccaattacaccacactctccttagaagccaccaagtccagaacaggagctcacagctaccactgacactttccttgcaagatggggcctagagagttctgagaagcatcattttatggttcattacattctttgatttttagggcctaaataattattcataaaagatacagtcaaacaatctataagcctaattcttcattaaaaaaatgtttttagacatagtaacctcctgattcctggagaaatctagctcactgtctgaggccaygtgtttaccaaggtaagacagcagagtcagcacccaggattcgtagttagctttctcctctcaccacaacatgcagtagttctgaatgtggtttctcttatcaacataaacaatttgaccagtaattgcatgtcaggaaacacccacatgcacccaccccaccatagagcaaaatatagcagacacacagtcatatgttgcttaac

SEQ ID NO: 646650 - DNA, 533 bp, Homo sapiens
tccgtaagtgtcagccggctgagaaataaagagaaagagtacaaagggaggaattttacagctgggctgccgggggtgacatcatatatcggtaggaccatgatgcccacctgagctgcaaaactagcaagtttttattaaggatttcaaaaggggagggggtgtaagaacagggagtaggtacaaagatcacatgcttcaaagagcaaaaggcagaacagagatcacatgcttctgaggaaacacgacaagggcaaaatcataactcctgataagggtctgtgttcagcagtgcacgtattgtcttgataaacatcttaacasaaaacagggttcgagagcacaaaactggtctgaccaaaaatttaccaggatggagtttcccaatcctattaagcctgagtgtactgcacgagaccacggcatatctcagtcattatctcaaccgcatatgacagacattcccagagcagctgtttatatacctccccccacgaatgaattcctttcccagagtattaatatcaatattc

SEQ ID NO: 646651 - DNA, 533 bp, Homo sapiens
tccgtaagtgtcagccggctgagaaataaagagaaagagtacaaagggaggaattttacagctgggctgccgggggtgacatcatatatcggtaggaccatgatgcccacctgagctgcaaaactagcaagtttttattaaggatttcaaaaggggagggggtgtaagaacagggagtaggtacaaagatcacatgcttcaaagagcaaaaggcagaacagagatcacatgcttctgaggaaacacgacaagggcaaaatcataactcctgataagggtctgtgttcagcagtgcacgtattgtcttgataaacatcttaacacaaaacagggttcgagagcasaaaactggtctgaccaaaaatttaccaggatggagtttcccaatcctattaagcctgagtgtactgcacgagaccacggcatatctcagtcattatctcaaccgcatatgacagacattcccagagcagctgtttatatacctccccccacgaatgaattcctttcccagagtattaatatcaatattc

SEQ ID NO: 646652 - DNA, 533 bp, Homo sapiens
tccgtaagtgtcagccggctgagaaataaagagaaagagtacaaagggaggaattttacagctgggctgccgggggtgacatcatatatcggtaggaccatgatgcccacctgagctgcaaaactagcaagtttttattaaggatttcaaaaggggagggggtgtaagaacagggagtaggtacaaagatcacatgcttcaaagagcaaaaggcagaacagagatcacatgcttctgaggaaacacgacaagggcaaaatcataactcctgataagggtctgtgttcagcagtgcacgtattgtcttgataaacatcttaacacaaaacagggttcgagagcacaaaactggtctgaccaaaaatttaccaggatggagtttcccaatcctattaagcctgagtgtactgcacgagaccacggcatatctcagtcattatctcaaccgcatakgacagacattcccagagcagctgtttatatacctccccccacgaatgaattcctttcccagagtattaatatcaatattc

SEQ ID NO: 646653 - DNA, 533 bp, Homo sapiens
tccgtaagtgtcagccggctgagaaataaagagaaagagtacaaagggaggaattttacagctgggctgccgggggtgacatcatatatcggtaggaccatgatgcccacctgagctgcaaaactagcaagtttttattaaggatttcaaaaggggagggggtgtaagaacagggagtaggtacaaagatcacatgcttcaaagagcaaaaggcagaacagagatcacatgcttctgaggaaacacgacaagggcaaaatcataactcctgataagggtctgtgttcagcagtgcacgtattgtcttgataaacatcttaacacaaaacagggttcgagagcacaaaactggtctgaccaaaaatttaccaggatggagtttcccaatcctattaagcctgagtgtactgcacgagaccacggcatatctcagtcattatctcaaccgcatatgacagacattcccagagcagctgtttatakacctccccccacgaatgaattcctttcccagagtattaatatcaatattc

SEQ ID NO: 646654 - DNA, 580 bp, Homo sapiens
tattaggtatattcccaaaggaatataaattgttctacaataaagacatgcacacatatgtttatcacagcactattcacaatagcaaaggcacagaatcagcctaaatgctcatcaacagtagactggataaagaaaatgtggcacatgtacaccgtggaatactacacagccataaaaagcaagatataatgtccttcatagcaatgtggatagagcgtgaggccattatcctaagtaaattaacacaggaacagaaacccaaatactgcatgttctcacttataggtgggagtgaaatattgagtacacatgaacacaaagaagggaacaacagataatgaggcatagttgagggtgaaaggtgagatgagggcgaggataggaaaactacccatggagaacccatggagaactattatggtgaaataatctgcacacaaaactcctgtgacacgcaatttacctatatagcaaaccggcacatgtacccttgaacccaacataaaagttttwgaaaaaacaaaaacataaaaaaaagagcatcacagtggaggtaagaaaagtagattctcacttc

SEQ ID NO: 646655 - DNA, 529 bp, Homo sapiens
tgagggttattctacataatatctgacaaacactcctcaaaattgtcaaaattgtgaaagtcaaggaaagactgagaaactgtcacagattggaggagactaaagagacacgatgactaaatgtaggatcctggattgggttctggcacagaaaaatgacattagggaataaactggaggatctgaatgtgttagtcaaggtcttccagagaaacagaaccaatataatatttatgtgtctgaagtgggaattcactcaatgctattatgggggctgagaagtcccacagtctgccgtctgcaagctggggaaccaggaaagctggtggtgtaattcagtctgagtccaaaagcctgagaaccagggagcagatggcataagtcttggtccaattctgaaggcctgagaactaaggggttgggagtgcacaartctaagtctcggtttgagtgcaaaagcctgagaaccaggagcatctacatctgagggcaggagaaaatgaatgtcccagctcaataagagagagag

SEQ ID NO: 646656 - DNA, 619 bp, Homo sapiens
cttggtagtaagtcagcattttaccctaattatttcatgttggtcatatctactttttagctattactatttcaaagttaaaaataataaaactgaagatttagagaatttaaataatttacttaatgtcacacagtagacattaatgtagtatttgaatctagtgaatctatacttttactcatgacatttacctccattactcaggtactcaccattattccctggagattttgctcaagtaggtaaaatcaaatgtattagctatgaattcagttacatgccagggagctgtggaattggtagatgttgaacaaaacgtcattattgcctttggggagtctatattatagtacgaaagtagatgatctgggtaaagttattttacataggaagaaagtagagtaaatcatagactcctgtcctattctgggtagaagagatttcacaactgactagcrtcttcttagcaattctgatcaatttactccctctttataaaatggagtgataagattagaagctctccatgatgtctttcaaatctaaaatgtaatgattgtaattttgcattacctactcatcagtttttaagttctgctttctaaagccaggaggg

SEQ ID NO: 646657 - DNA, 598 bp, Homo sapiens
aaaattatattaaaagaaagcaggggtatctatactatattagaaaaaatagatattgaatcaaaaaaccttacaaaacacaaagaagatcattatatattattaaatggttcaatacagtaagaaatataatatatataacatataagtgttataaatatttacacacttaataacagaatatcaaaacatatctagcctaaatgaaaggaatttaagagagagagatagttctacaataacagttggcaaactcaatacaccactctcacaaatgaatagaataaccagaagaagataagcatgaaaatagaagaacttgaatggcacaataaaccaactagatctagcagacatatacaaaacactctacctaacagtaaaagaatacacatttttctcaaatgcacatggggcattttccaggatagaccayattttaagccacatactaagtctcaatagattttaagtatcactagatttaaaagataaatgtcatacagagtatcttctgtgatcacatagatgaaattagaaatcagtaacagaagaaaaaaaactttaaaaatataaatttatagaaattaaacaatac

SEQ ID NO: 646658 - DNA, 516 bp, Homo sapiens
agtttgaaacttttatatattctggcaaatcgaacttttattatttttatttaaactattttattgaggtatgtttgccataaaaaagctgtacatatttgcaatttgataagcttgaagatgagcatgaacctatgaaaccatcagtacaatctatgccataaacgtattcatcacctccaaaaatttcctcctactctctctagtttttatttttacaatacattatttcattataattaatctagttatgcttcagaattttgtttgactcgtagtataatttatatcacattaatataactacaccagctttcttttgactaatattgaattagtatgccttttgctgttttctctttgtggtttcatttttagacaagtttttgtaggctatctttgtcttttgtcttgtaaatwtaaaccttttatagatatgtgatgagttatatttagatttatttctaccagcctatttcttgctatttttaaaatttgtagtgtgatttcgagcaa

SEQ ID NO: 646659 - DNA, 590 bp, Homo sapiens
ttggttatgtatttaataatgttgatgctcactaacagagagaatcagcattttgcctagcaaacttttcacaaaaagttaaaatgttaaaagcgtgatgtagatctagaagaaaatggtaccaggaatcattatttacctagagtttttgtttctcctccttcttcttttcgtctcctcctcttcctctttatcttgaccatgtgcaatacaaagttaattagagaattatataattacatttgttattgttagaacatgattctaatgagaacattagtgttttgaaggaaacaaatgaaagaaatcaccatagaaaacacaaaatacagaagttttttgtacagtggaaacggtaatagagactgaagtttgggtgtggtacctgaatactaccattcaacacttgtattctaaatgttagagtcttcattcataaaaactgaaagcacagactcattattcctgatgataagcaaatccaagagtttaagatgagtgtacactatctttcctgaataawctcaaatatctgaaaataaaaggttaattggatttttaatagcttaccaataaaattagtttttcct

SEQ ID NO: 646660 - DNA, 572 bp, Homo sapiens
tctaaagaggacataagaggcaaaaaccagggcattagagaaaattttaacctcttactcctacaaaaacagcaaacaatgacttagataaacgtaagtccttacatgagagatctgtttatttcagtttcwtttatcaaacattatattcagctttcaacaaaaaattaaaagttaggataaacagcaaaaacaaaaacaaaatacaaaaataacagtctgaagagacaaagcagcattgtaaccaaacttatacatggcagagattttagaattaccagactgaaaatttaaaataattgtggctaatatattggagacttttatggaaaaagtggacaatatgcaagaatagatgggcaatgagcaatgtaggtaaaatcaaatggaagagctaaaaatcaaaacactgtgacagaaatgaagaattcctttgatctgataatcactacactggaaatggctgagcaaagaatcagtgagtttgaaaatgtgttggtagagactttcccagctgaaaagtgaagagaaaaaataatttaaatatgaaacaaaatatccatgaattgcag

SEQ ID NO: 646661 - DNA, 561 bp, Homo sapiens
agtataattcaccatttcatcagaataaagaattatatgattttcttagctgttggagaatatacatttaataatatacaatatccatacataagttttttaaaactttggggcaatcttgaaatggcaggaaactttcataatctgataatatgtatgcacaaaaagctgatagcaaatatctayttgatgataaaatattgaaagcattttaagagaatgcccagggcttctgtttatcatggtcttagaatctacagaaaaatatctataattaataagtcaatttggcacattctccctctatagggtcaatatacaaatattaattttatttctatatcatagaaacaaaaaaatagaaaagaaaaaatatttttaacttttaggttcagggaacgtgcaggtttgttacataggtaaactcatgtcacagggtttgttgtagattatttcatcacccaagtactaagcctggtacccattagttatttttcctgatcctctccctcctcccaccctccaccttctcaaaggtgccagtgtgtgttagccccctct

SEQ ID NO: 646662 - DNA, 573 bp, Homo sapiens
gcatatattgtataattacatgtatataaaattttcagaaaaagagagtttagattgtggcataataaaaatatatctggactttgttcctagttcctggcacagggcttcaaaaacccttggaatttcaaggtgacagtactgtctttgctatgctgatgargttgctcatggtgatagcttccagctagggactggtcaccaaaaaaaccaaacacatgattagagggttggaactctaggccaacagcacctccaaggacaggaggggagctggagacagttcaatcacatggccaataatttaatcaatcacacccatatactgaaaccccaataaaagctctgaacactgaggcttggtggacacactgacatgcagagagggtaatgtaccctgactctacagggagagggcatggaagctttaggtccaggtcccttccaaaccttgtcttatgtgtaccctttataataaaactatataacatttttagtgagctctgtgagtcattccagagaattactgaacctatacatttgggaatctccaattttatagtcagtcgtcag

SEQ ID NO: 646663 - DNA, 678 bp, Homo sapiens
tgtcagagtgatatggaaaattagatgcacaaatatgcataaaaggtctagaatggtacccagcccaaagaaagggctcagtagacgttattattcggctagtggcacactttgtctccagcacctaaagcggtacaaatgatggcttcaaaaatattggtgcaataaatgaataacagcaaatgtttttatctctgctgtaagcgctttacacatattaactggtgcaatcttcatgcaaccctgtgaggtgcaatttattattcccattttatagatgaggagactgaggcacagagaagttaattatctaaactaatgtacacagctactaagtggcagagccaggacttgagcccaggcagcctytactcttttattccccctaatgtttattaattagaatatttaccagattatacagctaatgtattcaaggtaaaaaaaattttacaatacaagaaagtatcattttaaaatatcaatttaaattctaccacccacaggtgagcacttggtgaatgttctttctgtgtgtcctgtgtgtttatgtgtaagtgtagtatttgtacataataggatcacgacatatatgcacttttttctttatcgtgagcacactcatgggttgaattttgtctcccccaaaattcacatattgaagtcctaactgccccc

SEQ ID NO: 646664 - DNA, 255 bp, Homo sapiens
ttaaatagcctcgggcgcagcctagcagcggaaagggcggagcttcactcctcctttccatcagtcacccccaactttcccaggctacacctcgtaggaaactgttctcctgctttgatttcatgcgccacctttgggacaatctaagaacttacargttttcttggccagatttattaggaattgtatgcactgaaacactgaaaaccaactagtggttctgtgcttcccacgttgtggttttgacaccagcag

SEQ ID NO: 646665 - DNA, 255 bp, Homo sapiens
ttaaatagcctcgggcgcagcctagcagcggaaagggcggagcttcactcctcctttccatcagtcacccccaactttcccaggctacacctcgtaggaaactgttctcctgctttgatttcatgcgccacctttgggacaatctaagaacttacaggttttcttggccagatttattaggaattgtatgcactgaaacactgaaaaccmactagtggttctgtgcttcccacgttgtggttttgacaccagcag

SEQ ID NO: 646666 - DNA, 407 bp, Homo sapiens
cagatcttcgcggagcggatcagcggccggagcgtttggcggactctgcgtggacttggagctcacagcgtcttgcgacttgraagcggattcagaggacaggacagaacacttgggcaagtgaatctctgtctgtctgtctgtctgtctgtcccattggttggttgatttccatttccttaaggggcccatacctcacaccgcacacacacaaacacacacacacacacacacgcacacgcacacacgcacacacactccttccttctgcgagttagaacattagtgggggcccctgggagctgcaggtttcctaatcatgtctgcacctaagaacagtagggtcttgtctggctcttcttatgaacggtcccccagcacggacaccccaaggtccatgcgagcct

SEQ ID NO: 646667 - DNA, 417 bp, Homo sapiens
tcaccttgatgggaaatcaatgaagccattgggctctgccgtgtcctcctctgaggactcctcagagtccccacgttcatcaataatataccacatgttcttactgccatcacccagcagctcayccccagctctcggggggtctcctgtgtctcccagctactctccaaacaaccccagatttcagctggagtcagccccccacacccaggaatcacctacaaactcacgagcctcacgttgctccacccctgtgtcttgcatctcttcacccccaggcctcagggaccctcctgtggctcccagttactctccagccaaccccaggttcctgcgggagtcagccccatgcacccaggagtcccccagagactcacaggtctcgggagaatatgagcggtcccccagccctgactc

SEQ ID NO: 646668 - DNA, 600 bp, Homo sapiens
tctcataaaagcaggatgttggcaaactgacaaactgcatctgccacccagaaggaatgctgagggcagtcacgccctaagcacagtgtttcttgtgattaggcacatctgaagcttgttagcaataataggagcctctgatcaattgagcagctgaccaatcgttacttcctcctccctgctctttctacccaataaataggaagggctgtggaagcttaagggggctgcctttgatcactagaatcagggagctctcttcttcccctgggtcctttaaaacagtttcttttgtcttaagttttcatttctatgttcgtcccttcgttcagtctcgtaaatgacggtctcaagcagtaacagtagtaactgctgtaacgacggtctcaagtagtaaacatgccagtctgccacacgtgamtgaataagtaaatcctagaaaataaaacggaggaagcagtgtttttaatgcctccagaaaatagccaaagtgtagaagtttatcagtccttagggaaaggaagaacattcaaaagaaattaactctaaatacatgaaaaggaacgtggatatatgagtaaaagggagtgtaggcatgaa

SEQ ID NO: 646669 - DNA, 611 bp, Homo sapiens
ccaatttttctataactatttaaaataattaaggagggaggggggaatccttccaaccccattctgcaaggcatgcatcgccctgatactaaaactacacaaggacacartataaaaaggataatacagggcaatattcctgatgaacatagatgcacatattcttaacaaaatactagcaaactgaattcaatagcacattaaaaatataatttgccataatcaagtgcaattaatcccagggatgcaagaatggttcaacatatacaaagcaataaacattatatatcacattaacagaatgaattacaaaagttatagaatcatttcaacaattgcagaaaaagtatttgagaaaagtcagcatcccttcataataaaaagtttcaccgaaagtatagaaagaatgtaccttaatataataaaggtcatatatgacaacccataactaacatcatactgaatgaggaaactgaaaggttttttttctaagatccaaaacaagataaagatacctatttttttaacacttctattcaacatagtacttgatgtcctggccagaacaattaagcaagagaaaaaaataaaatgtatcaaaattggaaagg

SEQ ID NO: 646670 - DNA, 504 bp, Homo sapiens
acaacataaacaatcttcttgtaccactattccttcatcattcacttgaaagtttttctttttaatttgaagaggattctaataagtttaataatttgatttccaatcacagaagcatgataggaatatttttttaaaaagtaagaaatgctagtacaaaataaaccataccatgaatgtgatcattgacaacaaaaataggagagcacaaaaacacaaaaaagcaacaatcagataatcttgcacatgattaaatggtcctgaatcactcagtagatctcatgsgcataattgcaagaatttccagagacttgcataattatttctcattgtgagaatgctcaagaaaaatttaagcatttttttttctgaacaaaattagagaaatatacagctgtgtctctgggcttacgtatgtgtgcagttcatataatgaaaataggttttcttgttaatgtctcctgaatttgacataagtattaaagtacatatcttactaatgaa

SEQ ID NO: 646671 - DNA, 498 bp, Homo sapiens
aaccaggcaataccagacatcaactgaagaatcaccattattcacagtattcaagaatcatctttttaaaatacattaatcacttcttagtccagattgtcattaactactaaacaaatttttacctccacaaataaactcatccatttactctcctccatgtttatagtcggggccttgctatccctcactaggatgcttagtattcagaacaaaaataagaggttttattttaatttatactttgttttgttttattttatttaacttttattttaagttcaagggtacatgtgcaggttttttacataagtaaacttgygtcatgcggatttgttgtatggattatttcatcatgcaagtattaagcctagtacccattagtgattttacctgatcttctccctccttccatcttctacactcaagtaggctccaatgtctgctgttcccatctttgtgtccatgtgttctcatcatttggctcccacttataag

SEQ ID NO: 646672 - DNA, 602 bp, Homo sapiens
acaaattttctactttttttccctgaacatatactactttcttcattaatttttacagtgttttctaatacatttatctgagattatagcatatctgcataatgtaatcaagttgtacatcatgatgttatggatgtatatcaaatttttgtttgattatcatgcatttttatagattatttttatttgttgcataagtaatattagcacttagaagagatttcttctcrtaagtatatgtattaatctttttggaccaccataactgaatatcatagactgggtgacttaaacagcagaaactcatttgttctaagttctgggggttagaagtccaataccaagccgctggaaaatgtagtttctggtgaaacttccctttctggcttgctgatgaccccttctcgttgtgttctcacgtggcctttcctttggcacacacgtgaagggagggagagagagagagagagagagagagagaaagagcgagctagagagagacaaagagaaagagcaagctctggttcctcttcctctcttataaagactttggtattattggattagggcttcaatctcaggacctcatttaacctaattac

SEQ ID NO: 646673 - DNA, 508 bp, Homo sapiens
cacaaggtcgattgatcagttaaggtagggcagggacaagtcacaatggaggaatgttgtaatgttggttaatcaattaaggcaggaagtggctgttttatttcytttgtggtttttcggctgccccagacttcttggctcctgcaggccatctggacatatatgtgcaggtcacaggggttacaatggctgagcttcggctcagaggcctgacaccaccacccaagccttccctatctcagtaaatggtacttctgtcttttcagttactcaaacataaaactaggctgctactttaatgtcttcatttttctctattctatatctaattctttttattattattattattatgctttaagttttagggtacgtgtgcacaatgtgcaggttagttacatatgtatacatgtgccatgctggtgtgctgcacccattaacttgtcatttagcattaggtatatctcctaatgctatccctcccccctcccccaaccccacaacagtc

SEQ ID NO: 646674 - DNA, 508 bp, Homo sapiens
cacaaggtcgattgatcagttaaggtagggcagggacaagtcacaatggaggaatgttgtaatgttggttaatcaattaaggcaggaagtggctgttttatttcctttgtggtttttcggctgccccagacttcttggctcctgcaggccatctggacatatatgtgcaggtcacaggggttacaatggctgagcttcggctcagaggcctgacaccaccacccaagccttccctatctcagtaaatggyacttctgtcttttcagttactcaaacataaaactaggctgctactttaatgtcttcatttttctctattctatatctaattctttttattattattattattatgctttaagttttagggtacgtgtgcacaatgtgcaggttagttacatatgtatacatgtgccatgctggtgtgctgcacccattaacttgtcatttagcattaggtatatctcctaatgctatccctcccccctcccccaaccccacaacagtc

SEQ ID NO: 646675 - DNA, 606 bp, Homo sapiens
gtgagtttatttctgagtcttctattttgttccgttggcctgtgtgtctgtttttatgtcagacctcatagaatgttaccggggcccagggtrggggaaatgggcaagatgcttgtcaaaaggtacaaactgtcagttataagatgaataagttctgaagacccaatgtacagcatggtgactacagttaatagtaatgcattatatacttgaaatttgctaagagagtggattctaagtactcttacaacaaagaataagaaaaggtaattacgtgaaatgataaatatgttaactagcttgattgtggaaatcatttcacaacatatacgtataccaatgcatcacactgtacacctcaaatatatataaattttatttgtccattttactcagtaatgctgaaaaaaatgttataaaatattggctgtatataaaatcacctttacagtcctattgaaataataacaatttctacgtataaagtttcagagcagaaaaacactctcataataaagcagctacttaatatctgggcaaaaaaaataataattattggtatctcagcttttgatctgctgttcagtaggtgcttttcacaattac

SEQ ID NO: 646676 - DNA, 608 bp, Homo sapiens
atactaggatatgaccttgaaacctggtcaaaaactcgacagtcacttttttctatcagagacaataaaaacctgtgggtattgactgagttggatcttcgtaggacataaactagatatataccttcatggagaacaagatagaagataaaagaagtggagctgctctttaggtacctgggcaattttacagcatttatagaataataatataaaattatgtcacaactttagtttgcagaacaaataagaaaataatagtgtaaaactatcacaatgtgttccatttaaagtaatagatctagttggacacattaaaacacattataggccttcagaaggggttaaatatcaagtccacatataatattttctttatgatagctgtctatgcaattttaccaacctcttctggcagagagagagagttaaatgatgtgttactaaatcacataaggcaggctcacctattgtgcttcatgtattttttattcaaaataaatttctgaaaacagcacrgcattccctttggtgtctgtgcctttgtgatttcttcccatgctgctgcaaagagctcctccagcatcgcatactctccacagggccgg

SEQ ID NO: 646677 - DNA, 344 bp, Homo sapiens
catcaatgaaatggattgcaaatagaaagagtaataccatgtcacttaagaatacaatcatggacgatgctgccacctgctgttgggggccactgcagaagaaattccagaacactggactggagagcacctcactttccttacagctctaagtttctgactcagtgacctgattcastaccatatacacaaagacccacttacacaaatgactgttcttcacactaggcccatggagacagggataaaattctgaatttgctcagataccttctctgctattgacatctaggcattacacaattcatctcttcatacttaacctttgaagtttgctacttctc

SEQ ID NO: 646678 - DNA, 415 bp, Homo sapiens
ggggccactgcagaagaaattccagaacactggactggagagcacctcactttccttacagctctaagtttctgactcagtgacctgattcagtaccatatacacaaagacccacttacacaaatgactgttcttcacactaggcccatggagacagggataaaattctgaatttgctcagataccttctctgctattgacatctaggcattacacaattcatctcttcatacttaacctttgaagtttgctacttctcagagagactaatgagtastgagcaaatatcctgaagctgagaatgcttctacctcctctcaaaacaacagaatattcatcaaaacacagcagttctgcacttaactttaggccttttctaacacctcatttcttggcagtaactgtggccagaata

SEQ ID NO: 646679 - DNA, 572 bp, Homo sapiens
acacacagctgaagtcagaaaaaccagattgataatttcactcaaactattttccttcattctaacaatttactggagtacacaattgtgactatttttagccataggaactcatagaaagaccaacttcattagacctacaaaatcgatattgtgtaacagtatatgcagtatgtgtaggaataaaaagcatttctcaaatatgcagtactggattttgcaaaagcaccttacacttagctataaaggagtggaaaacacaaagatgagtaactgcacctttcaaaagactagagctataccaataatacaaaggtgtaaacaaataatgatgagatgacaaaggctgagtgttttctatttggaagctatgttgttgaattatttatgtatataatttcatgcaatcttcatgttatgggggtgttctaatccactgtgactctgtccttaaataaaagggagatttggacatagagasaggcacacggggaggatgccatatgagaattgacactgtgctgtcacaagccaaggaactactggaaggagagaaagaggactggaacagt

SEQ ID NO: 646680 - DNA, 561 bp, Homo sapiens
atgcgatgacaacagaatatattatcatgctccttttgtgaatctcattcataatataaagtataaatttgtgattttgctttaatttgaaatattaatttcaaatatgttatcacaatttgatacaaactattgacartaaatctgtggattaagtaatgtcttagtaggtattgggaaaatttgaaactagtaacatggaggactattgtcattgtttatttcaaagccagttaaaattctgcaaagcagtgtaaataaaaataatttcaagaaatttataaaataccgagattatggtgtataaacaatctttagattctttaagaatttctgccagtttgtaatatatgcttcattcaaagtagctaagggctgtacctggctaatagtaggcacctaatatttgttgaaaaggaatactgagtagctgggacctcctgagtagctgggaccacacacatttaacctgtatttataaaattactgtttagagaaaaacatttgatggaatcatgcttttactttctgcttatgactcaattgtttgtactgacacta

SEQ ID NO: 646681 - DNA, 627 bp, Homo sapiens
gtgattttgctttaatttgaaatattaatttcaaatatgttatcacaatttgatacaaactattgacaataaatctgtggattaagtaatgtcttagtaggtattgggaaaatttgaaactagtaacatggaggactattgtcattgtttatttcaaagccagttaaaattctgcaaagcagtgtamataaaaataatttcaagaaatttataaaataccgagattatggtgtataaacaatctttagattctttaagaatttctgccagtttgtaatatatgcttcattcaaagtagctaagggctgtacctggctaatagtaggcacctaatatttgttgaaaaggaatactgagtagctgggacctcctgagtagctgggaccacacacatttaacctgtatttataaaattactgtttagagaaaaacatttgatggaatcatgcttttactttctgcttatgactcaattgtttgtactgacactaacatccaaatccttagcatggcctacaaggccctgagcaatgtggcacctgctgaagcctgctgcctcatttaataactttttgtctccttcccagatccagccactctaacattttttagttcctggaccaagac

SEQ ID NO: 646682 - DNA, 262 bp, Homo sapiens
tatgcagtaagggctgaacaaacactaaataaatgaacaagtgaataaatggatattgtctcatttttagaacagagtactaaatggatcatgaacactatctggtatgtcacrtaggtaatttacaagggatacaatttcagctcagatttaccttttcctggatacaggtcttgataggtctcttgatgtcatttcacttcagattcttctttagaaaactttgacaatagcatttgctgtcttgtccaaattgttacta

SEQ ID NO: 646683 - DNA, 262 bp, Homo sapiens
tatgcagtaagggctgaacaaacactaaataaatgaacaagtgaataaatggatattgtctcatttttagaacagagtactaaatggatcatgaacactatctggtatgtcacataggtaatttacaagggmtacaatttcagctcagatttaccttttcctggatacaggtcttgataggtctcttgatgtcatttcacttcagattcttctttagaaaactttgacaatagcatttgctgtcttgtccaaattgttacta

SEQ ID NO: 646684 - DNA, 510 bp, Homo sapiens
tcaacactatcatgtaccagtrggcctcataacccacctagccctgtgatttttcaggttcacttttctaaacttgtgaattaaatatttattttcttcgttcagaagagggaaaaaactcttgtaattgttgcccatttcaggagaaatcttgcatatgaaaacaagagataaatatacacaactgagggctgtggtttaaacaaaatcttgagaatgttttttgaccttatacatttgtgctttagtataacaaaatgatatagacaaaggtaacttttaatagaaccagtcactaaattaaaaaaatgacacattcttctgcttagctaagcaacagagaaggtaaaatactaattcaattcatcaatttaagcaatactcattaagagccaagtatgtgcttactgaataagctgctaaggtttggtggttacagagtgtgcggtgaaatgatgtctacatcacagtccaacattcacagagtttagaagcctaccaagaatcaag

SEQ ID NO: 646685 - DNA, 470 bp, Homo sapiens
gtagagtttatagccagaatccagctctcaaacaggtttcagcctgaactcacacaatctgtgtggcttccaaatttgcaagctgagaatttaattcaaagtggtctcaggttgatagcagtccaaaatgccaggtaggaaaaaaatcctctctggacaaataaatcatcaaagcaagctcayaagagcaggtttcaaaggtcatgagcttctaacacacacacaaaaatcacacacacaaaatgggggtagcagcaacatgggtagcatattcaatcttgaaaagactttaaatatttgtattattagatgtagattatgaaacacatattttaatgtggttaatttttttaaggaatcaaaactatgagtaaagaccaagaaaattgtgctggatggccacttccaccatggctcccctcctatttaagtctgggtactgtgtcacccgaagtcttcaggcacattgt

SEQ ID NO: 646686 - DNA, 576 bp, Homo sapiens
taaaacatgttattgagcttaaagttgcaaaaataaactcatgtaccataattcatgagtagaaaaatagactagtggaataacataaaaataaaaacaatgcttacataaaatgttgtaactgatttggatgtcattagaaatcagtaagtaaatagatggacaatgtaatgaaagatgctaggcaaataatgtggtagggagaataatagccctcaaagatgcccatgcctaaccctggaacctgtgaatatgttacactgaatgcaataaaggcttatcagatgtgattaaggatgcaaaccgagatggagagatcttcctgggttayccagatgggcccagtctaatcacatgagttcttaaaaatggagaacctttcttagctgagtccagagagagatgtgacaatgaaagaatggtcagagaaatgtgacatcgccagctttaaaaagagagaggagaggcaatgagaaaaggaatgctgatgttctctagaagatagaaaaggccaggatatggattctaccctagccgccagaaagaaacatgcctgtcgacaacttgattttagtt

SEQ ID NO: 646687 - DNA, 576 bp, Homo sapiens
taaaacatgttattgagcttaaagttgcaaaaataaactcatgtaccataattcatgagtagaaaaatagactagtggaataacataaaaataaaaacaatgcttacataaaatgttgtaactgatttggatgtcattagaaatcagtaagtaaatagatggacaatgtaatgaaagatgctaggcaaataatgtggtagggagaataatagccctcaaagatgcccatgcctaaccctggaacctgtgaatatgttacactgaatgcaataaaggcttatcagatgtgattaaggatgcaaaccgagatggagagatcttcctgggttatccagatgggcccagtctaatcacatgagttcttaaaaatggagaacctttcttagctgagtccagagagagatgtgacaatgaaagaatggtcagagaaatgtgacatygccagctttaaaaagagagaggagaggcaatgagaaaaggaatgctgatgttctctagaagatagaaaaggccaggatatggattctaccctagccgccagaaagaaacatgcctgtcgacaacttgattttagtt

SEQ ID NO: 646688 - DNA, 543 bp, Homo sapiens
atgtaagtatcagcaaaacatattgtttagtgaaaaagaagctgaagaagaatatatacaatatggttacatttatatgaagtccaaaaacttgcaaaataaagaaatgtatttagaaatagattcacatgtgagaaaactagaagaaaattaatgaaaggataaaagggatagcagtaattctgagtagttgaggggatttcaattggaaaaaaatagtatcatattctttaagtcaggtagtgggtattagcattwgttttaccatcgttctttattcttatagctacattatatattttctatgtatttaatgtattttttgcataattaaatattatgcaataaaaatgagaaaacaaaaaagtagaaaatgataaataacatacaataaagaaatggagaaaaaattataatctagttgagtaatggtatattacatagctattttcttaagtagatgtatgtacatgatgtatgcacgattgtacatacatgttcttaattatatataaatatatatgtacatatttttaatataaa

SEQ ID NO: 646689 - DNA, 573 bp, Homo sapiens
aattaatagtgtaatggataatttgactttggcaaatattgtgaatttttgtgaaagtacaactaaaaggcaatgtcactccaataatcaccagagtaatcaatttgcttattgctgtccctttaaatatagttctctggtatcaactaacatgtttttaactaatgatgcttcttaaagaaaagggaaaagacctttttctttctttcagtcttcaatgattcactgcttcatctcgctccaccaaagataaatgaaatctacatctcttatacattaacaatgcatgacaatttayaaatagctaaatttttggagctaactttaagtacctgaatggaatttaatcaacccactaatctcctcacttctcagttatttatcaagtttatgtcaagggacaaggaaaaattatccaaacattgtttaaaacaatcatcattaattagtaacacttatccagggggggttttaacctttcccccactcaaggattattctaatgtcagagtagaataaaaaataagtgcagcgatgctgactcttccaagcttaacatttctcacaagtcaa

SEQ ID NO: 646690 - DNA, 513 bp, Homo sapiens
gttttagtttgagatcttataggcctgtctcatcaagttggtgtcagcccagctaggattaggcagaattgggtgggggctgtagtgcatytttggcacagcatgtacctgtctgactaattctctgtcttttctttcctgttgcaattcatgggtcttagcatcttctgaatggtgtttagtaggtcatcctgttgatttcctgctagggagtagcatactctggctctgtaccattggccaagggacttaaggataggtgaagggctgcagttttgttaaatggaacaatatgaagagatggcattgtaaaaaaaaaaaaaaaaaaggcttggcagcagggcccatttgaatggttggtccttggctcctttgttgatataggcagatccttgatgggaatttggaatgatcccaaatattgtagatcactggtacatcaagtcatcctcaaggttgtctgtgtaacagtcttgaatgatattttgtcagtctttggagattctctgtata

SEQ ID NO: 646691 - DNA, 513 bp, Homo sapiens
gttttagtttgagatcttataggcctgtctcatcaagttggtgtcagcccagctaggattaggcagaattgggtgggggctgtagtgcatctttggcacagcatgtacctgtctgactaattctctgtcttttctttcctgttgcaattcatgggtcttagcatcttctgaatggtgtttagtaggtcatcctgttgatttcctgctagggagtagcatactctggctctgtaccattggccaagggacttaaggatagrtgaagggctgcagttttgttaaatggaacaatatgaagagatggcattgtaaaaaaaaaaaaaaaaaaggcttggcagcagggcccatttgaatggttggtccttggctcctttgttgatataggcagatccttgatgggaatttggaatgatcccaaatattgtagatcactggtacatcaagtcatcctcaaggttgtctgtgtaacagtcttgaatgatattttgtcagtctttggagattctctgtata

SEQ ID NO: 646692 - DNA, 539 bp, Homo sapiens
atatgtacagtaatagttgatttattttaatggctatatattattccattgttagaatacaccaggatttatttttacttatttttttttgctggaaaattgggtcttttttattttttgatataacaaacaatgttgtaatcattttgtatttacttcctagtccactcctgtaagtttctcttgagtacatactagcaatgaagatgctgagtcactgcatatacatactcacaactttattctataawgtaatattctataaagtagctgtatcagtttatactttaaccagtaatggacaagattttctgttacttcccatctttgttaattattacttttagactctaacttttatcaggctcatggatgtaaaaagcatctcagggtggttttaatttgaatttatctgctcatctatgaagatgagcttcttttcatataattatgagtcatttttgttttgccttcttttgtttatgcattttgcttgttctatgtcttatttttcctgttgatttttgagagttcatata

SEQ ID NO: 646693 - DNA, 410 bp, Homo sapiens
ttaaaccagtggaacactcccttcttgaaaatttctcttcctttgcttttttgtcatcacagtctcttgattttcattttactttcatatgccctgtcttctttatacacgtatcccttatgttttgttttcctgtgatttgcctgtgttctgctgccctcgtcattatatgtactctttcttggtggtttcataagcactacaagagtttcaaacaccttgtaaatgccattgaccctcaaatcatctttttaataaaattttctcttcctccttttctccctgactctgtgagttaaaccaccactgattacccaagccttacaagtgagagccacagctaaccttcttgctstcaatgaattctatgttcaatttgccataaattgttatagattctacactctgaa

SEQ ID NO: 646694 - DNA, 410 bp, Homo sapiens
ttaaaccagtggaacactcccttcttgaaaatttctcttcctttgcttttttgtcatcacagtctcttgattttcattttactttcatatgccctgtcttctttatacacgtatcccttatgttttgttttcctgtgatttgcctgtgttctgctgccctcgtcattatatgtactctttcttggtggtttcataagcactacaagagtttcaaacaccttgtaaatgccattgaccctcaaatcatctttttaataaaattttctcttcctccttttctccctgactctgtgagttaaaccaccactgattacccaagccttacaagtgagagccacagctaaccttcttgctctcaatgaattctatgttyaatttgccataaattgttatagattctacactctgaa

SEQ ID NO: 646695 - DNA, 660 bp, Homo sapiens
tatgctttccaatttcagctgggccctcaaaattatttggcaatccttttacttgtcrgtcaaatgaatcttgattttatagccctgacctatgtactagtatgaacattgctctctttttcaccctgtcaagtcatgatttttgggagtctgacaatgacactttgcaagtaaccacatgggaatttataagcttctttctccatgccaaattgtccctgattctgctgtcttgctcctgctaccatttgcccatggctgtgagcagcttgtaagaagtctcaccattgttccatcctaaaatgctgacatccctagtaagtaagttgtttttagataatctgagaaattctcatctttgggatattggaatgattctgatctcgctagaggcagggagaaggccttctcccagtctaatgctatacttcattgtgccagctccaaagcacaatatccaacatccctctaacagaaccttgaaagtttctgaccctcactccttaaccagaggtgcgctcattcaatcatactgccacaaatgaagtggacttctgtgaactctttattagagttcattctttattagattactctttattatttttttccaatattttacccttctaattctattgctttagagaaaatctcttctct

SEQ ID NO: 646696 - DNA, 660 bp, Homo sapiens
tatgctttccaatttcagctgggccctcaaaattatttggcaatccttttacttgtcggtcaaatgaatcttgattttatagccctgacctatgtactagtatgaacattgctctctttttcaccctgtcaagtcatgatttttgggagtctgacaatgacactttgcaagtaaccacatggraatttataagcttctttctccatgccaaattgtccctgattctgctgtcttgctcctgctaccatttgcccatggctgtgagcagcttgtaagaagtctcaccattgttccatcctaaaatgctgacatccctagtaagtaagttgtttttagataatctgagaaattctcatctttgggatattggaatgattctgatctcgctagaggcagggagaaggccttctcccagtctaatgctatacttcattgtgccagctccaaagcacaatatccaacatccctctaacagaaccttgaaagtttctgaccctcactccttaaccagaggtgcgctcattcaatcatactgccacaaatgaagtggacttctgtgaactctttattagagttcattctttattagattactctttattatttttttccaatattttacccttctaattctattgctttagagaaaatctcttctct

SEQ ID NO: 646697 - DNA, 660 bp, Homo sapiens
tatgctttccaatttcagctgggccctcaaaattatttggcaatccttttacttgtcggtcaaatgaatcttgattttatagccctgacctatgtactagtatgaacattgctctctttttcaccctgtcaagtcatgatttttgggagtctgacaatgacactttgcaagtaaccacatgggaatttataagcttctttctccatgccaaattgtccctgattctgctgtcttgctcctgctaccatttgcccatggctgtgagcagcttgtaagaagtctcaccattgttccatcctaaaatgctgacatccctagtaagtaagttgtttttagataatctgagaaattctcatctttgggatattggaatgattctgatctcgctagaggcagggagaaggccttctcccagtctaatgctatacttcattgtgycagctccaaagcacaatatccaacatccctctaacagaaccttgaaagtttctgaccctcactccttaaccagaggtgcgctcattcaatcatactgccacaaatgaagtggacttctgtgaactctttattagagttcattctttattagattactctttattatttttttccaatattttacccttctaattctattgctttagagaaaatctcttctct

SEQ ID NO: 646698 - DNA, 649 bp, Homo sapiens
ctctttattagagttcattctttattagattactctttattatttttttccaatattttacccttctaattctattgctttagagaaaatctcttctctaacagatataaaataaaacatggccttcattttaatggaatcagtagatagtggggaatgtagagagagatggaaggaggaagcatactgttaacttttgaacagaagtagggagcaaaaatattatttgtcaccattgtctgaattcatcttctttgtgggctttccttggcttgcactatgaatgtgaagtgttctattctaagcctgcgtgtccttctttgatgtctattcatctttttttttcataactctaagttgatgctattgcttccaacttcacagagaaaaactagtttctcatttatgtattcgttcaacaagcatccatttagarctagaaacacctttttcttcaagaagtttacagtgtaatagaggaaacaaaacaaatattaagtgattatgtcgctgtggtcaaaatccacatagaacacaggggctcagtgaagggagagtgaaattctgttagagatggaaatcaaggcttcataaagaaattgaaatttcagaagtctgcatttattcctcccaccaatataagattgtt

SEQ ID NO: 646699 - DNA, 649 bp, Homo sapiens
ctctttattagagttcattctttattagattactctttattatttttttccaatattttacccttctaattctattgctttagagaaaatctcttctctaacagatataaaataaaacatggccttcattttaatggaatcagtagatagtggggaatgtagagagagatggaaggaggaagcatactgttaacttttgaacagaagtagggagcaaaaatattatttgtcaccattgtctgaattcatcttctttgtgggctttccttggcttgcactatgaatgtgaagtgttctattctaagcctgcgtgtccttctttgatgtctattcatctttttttttcataactctaagttgatgctattgcttccaacttcacagagaaaaactagtttctcatttatgtattcgttcaacaagcatccatttagaactagaaacacctttttcttcaagaagtttacagtgtaatagaggaaacaaaacaaatattaagtgattatgtcgctgtggtcaaaatccacatagaacacrggggctcagtgaagggagagtgaaattctgttagagatggaaatcaaggcttcataaagaaattgaaatttcagaagtctgcatttattcctcccaccaatataagattgtt

SEQ ID NO: 646700 - DNA, 600 bp, Homo sapiens
gtgcctattactcccttcctggcatgtagaggtgtcagttagagaggaagaataagtattagtgatctattgcacagcatggtgaccatagttagtaatagtgmactgtataatccaaaattgctaaaagagtagattttaaccattctcatcacaaaaatataaggtgatgaatatgttcattgtattgatttaatctttcttcaatgtatacatatatcaaaacatcatattttactccataaatagatgcaatatttataagtgaattaaaaattttaaaatgctaacaacatagtgtacaagtcacatttttagaaacatcttttaaacatgtgtctgcaaacacctcacaacatacataacatctattcaataaaataaccacaaattataaattgttttaagataaaggagcatttcagaaaacaaatatcattatttcctctattagtgctcccccacaaaatcttctaagtaattctctttatctttcattgtctctttttctttctcttttcttctttttttttttccaactttgttggaaaatttaaacttaaaaaataattaggtatttcaattatatttgttttctaa

SEQ ID NO: 646701 - DNA, 649 bp, Homo sapiens
cagtgaccctattttcacagctccaccaggtggtgccttaggagggactctgtgtgggggctctaaccccacatttctcttctgcactgccctagcagaagttctccatgagagcctaacccctgcagcaaacttctgtctagacatccaggcatttccatacaccctctgacatctaggtggaggttcccaaatttcaattattgatttatgtgcactggtaggctcaacacttcatggaagctgccaaggcttgaggcttgcaccttctgaagccacagactaatctttatgttggcccctttcagctagggctgcagtggctgggatgcagggtaccaagaccctagactgcacacagcatggagatcatggtcctggcccatgaaaccactgtttcctcmtaggctccaggcctgtgatgggaggggctgctgtgaagacctctgacatgccctggagatattttcctattgtcttggtaattaaaatttggctcctcattacttatgcaaatttcttcagccagcataaatttctcctcagaaaatgggattttcttttctattgcattgtcagcctgcaaatttgttgaacttttatgccgtttcccttataaaactaaatgactttaacagcacccaagtca

SEQ ID NO: 646702 - DNA, 599 bp, Homo sapiens
actatatgtcttcttgtgtacatatctcctttttcacatccttagaataaaatctccctgcccccatattctaatttagcacaagtcatttgtctattgttgggaraaacactcaataatagacctggattcttagttaccagcaagggtaatgggtactgtgactggctttactaattaggaaccatttcctgaatctgcaatcaattcccaaaactatatgattgaatcagtgaaagaaggatgggatggatgttagagatttaagtatgatagattcattcttcttattcagtagcctcctctctcagattaacacaaacaaaagaatttgagaaaagtctgtttagaaaagtaggaatatgaataaatgtgaaagcaaaaggattttaaacctccttcatttttcataaaggatataatcttacagataaacctctatttctttaataagtaaaaaagaataatgaggattaaatgtgtccttcaattccagtttaggatttttttctcagcctaaatgattgcttttggggtaacttattcaatgccttcaaagtgtatcatgttacaggatcaacaggttcatatgcctgctg

SEQ ID NO: 646703 - DNA, 651 bp, Homo sapiens
gtaatgtcttcatagggcctcttacaaagtagatgttcaataagtatttacttaaagtttgtaaaagctctctttgcaaattatggtcccttccttaatgcttatgaccaccacatgaataaagaaaaccactgatgaatgtgatgatttcttgagtctttcaagcagttcctttcatgaagtaagcacacagtgatttcttgttgacaacaaattgcagtaatatacacarctttcacttatctttgtctcaatgtcaacagactattttagtttgctatataatccaattacttttctaaaatagccacatgagcatctcttaagcctttgcagaatctaaagataaaatgtgaaaatatactagcctaaaatagcaatcttgtatttacaaaatgatggcatatatttatgccatgctgtcttttacatatatatgtacacaaacatatacagatacatctatgtgttatagaagtgtgtgttagtaagcacatacacattcacagattcatatatataaaatatatacacactagttataaaaatatgttaatattttattccaaaaattagcagctctcgtgtgaaataatttaatgatataaggatcaaaagtatttacactggctttcctgtcatatgtagcaa

SEQ ID NO: 646704 - DNA, 597 bp, Homo sapiens
tgatgcttgaatttaaaacaaataaatggaaggtgaaggagaaattcacaacttgataatctgtttgaattttcttttgaacaattmaaaactacatttttctctgcattttttaattttttaaaaagaaaatcctttcatatatgacaatatacctgaacctctaggacattaagagaaataagccagtcacagaaggacaaatactgcaagattctacttattagagatatctaaagtagtcaaacttatcgaaacagatggttgaatgctggttgtgaggggccagtggaagggggaaatggagaggtgctgatcaatgggtctaaagattcagttatgcaagatgagtaagttccagagatctgctgtccatcattgtgtccataattaacaatactgtattgtgtaactaaaaaatgattaagagggtgatctcatgtgttttaccacaattaaaataaagtaaaatcatttaaaagttttaaaaataaaaataaattttaaaaagggaaagcagtgtgaagtaagctggtacatataatgttgagtttaaataaaataaaatattaatatccttaaataggatagctgtct

SEQ ID NO: 646705 - DNA, 597 bp, Homo sapiens
tgatgcttgaatttaaaacaaataaatggaaggtgaaggagaaattcacaacttgataatctgtttgaattttcttttgaacaattcaaaactacatttttctctgcattttttaattttttaaaaagaaaatcctttcatatatgacaatatacctgaacctctaggacattaagagaaataagccagtcacagaaggacaaatactgcaagattctacttattagagatatctaaagtagtcaaacttatcgaaacagatggtygaatgctggttgtgaggggccagtggaagggggaaatggagaggtgctgatcaatgggtctaaagattcagttatgcaagatgagtaagttccagagatctgctgtccatcattgtgtccataattaacaatactgtattgtgtaactaaaaaatgattaagagggtgatctcatgtgttttaccacaattaaaataaagtaaaatcatttaaaagttttaaaaataaaaataaattttaaaaagggaaagcagtgtgaagtaagctggtacatataatgttgagtttaaataaaataaaatattaatatccttaaataggatagctgtct

SEQ ID NO: 646706 - DNA, 688 bp, Homo sapiens
atacctaatgctaaatgatgagttaatgcatgcagcacaccagcatggcacaggtatactrtgtaactaacctgcacattgtgcacatgtaccctaaaacttaaagtataataataataaaaaatatatatatacaaaaattaaaaaaaatctagtcttagcaatcttcaattatataatgtgtcagtgttaactataggcaccctgctgtacagtagactccaaaaacttatttctcctaactgaaactttgtatcattgaatgaatctccccattttgagtccccatcagcccttgataaccaccattctattctctgcatttcattttacatattgtatatagttaaatactgaccttaatattacatttcccagagagtactgtgatccaatgaacagaacacatgacagaataagaatgtcagcatttgagatatgagtctcccccttgttgtgtgatattatgcaaatgaatcctaatcttaatctgccttagtttattttccttatatataacatgaggacaatcattgctttgtctccccttgggggaagtaaggaaggttaaaggaaattgatgttaaaatgcatttgaactctaagggctatatgaatttaatatagtttttgtttcataaggttgcccatgcaaataattataaatattcaaatgtttttctaaaca

SEQ ID NO: 646707 - DNA, 643 bp, Homo sapiens
aaactagaaaagtcaaggaacagcttctcccctagagcctccagaaggaaccaaccctactaacactttgatcatagtcctataagactcattttggaattctgaactccagagctacaagagaataaatttgtgttgtattaagccactaagtttgtggtaatttgttatagcagcaacaaaaaaaactagtataatgcaaaaggagagtgtaattttagttctaggctataaattcattgaataytaaaataatctcaacattaattctcgtatgaatcatgaatatactaactttaaacacttattgaaaggcaatgcctctaaattaaggattcagctatgagttttagatttcttagaattatataaaatgttccattaaaattctttatttttggaaaaatgtgccaatatggctggcttagaagcagctagtgtgcaccactctcgtggagaggaaacagatcttcaagtggattgttcaggaggccatgttgggattcatcaaggaagcaacagagacccatggagtgcagacaggagcaaggcaggacagctgcccacccaagattgatgcagagccagagaaggctccctactgtggggaaaggtaagtgagtgagagcccctggaaatccac

SEQ ID NO: 646708 - DNA, 643 bp, Homo sapiens
aaactagaaaagtcaaggaacagcttctcccctagagcctccagaaggaaccaaccctactaacactttgatcatagtcctataagactcattttggaattctgaactccagagctacaagagaataaatttgtgttgtattaagccactaagtttgtggtaatttgttatagcagcaacaaaaaaaactagtataatgcaaaaggagagtgtaattttagttctaggctataaattcattgaatactaaaataatctcaacattaattctcgtatgaatcatgaatatactaactttaaacacttattgaaagscaatgcctctaaattaaggattcagctatgagttttagatttcttagaattatataaaatgttccattaaaattctttatttttggaaaaatgtgccaatatggctggcttagaagcagctagtgtgcaccactctcgtggagaggaaacagatcttcaagtggattgttcaggaggccatgttgggattcatcaaggaagcaacagagacccatggagtgcagacaggagcaaggcaggacagctgcccacccaagattgatgcagagccagagaaggctccctactgtggggaaaggtaagtgagtgagagcccctggaaatccac

SEQ ID NO: 646709 - DNA, 659 bp, Homo sapiens
taaatgccctacacagactagacatagagccatctatcacaaacccacagccaacttcatactgaatggacgaaagctgcaaccatcccccttgagaagtggaacaaggcaaggatgcccactctcagaactgctgatcaacgtagtactggaagtcctgcccagagcaatcaggcaagagaaagaaatkaaaagcattcaaataggaaaagaagaaatccaactatctctatacactgacaatagaaatcaaaatatctctctctatacattgacaatataattctatacctaaaaaatcctaaagactctaccataaggttcctagaactgacaaacaacttcagtaaagttttaggatacaaaagcaatgtaggaaaatcagtagcatttttatacccaaacaatgtctaggctgagtgtgaaatcaagattggaatcctacttgcaatagccacaaagaaaaagaaatatctaagaatacagctagccaaggaggtgaaaggtctctacaagaactgccaaacactactgaaggaaatcacagatgacaaaaacaaatgaaaaaacatcgcatgctcatgaattggaagaatcagtattgttaaaatggccatactgcccaaagaaattgacagattcaagatgattcctatcaa

SEQ ID NO: 646710 - DNA, 659 bp, Homo sapiens
taaatgccctacacagactagacatagagccatctatcacaaacccacagccaacttcatactgaatggacgaaagctgcaaccatcccccttgagaagtggaacaaggcaaggatgcccactctcagaactgctgatcaacgtagtactggaagtcctgcccagagcaatcaggcaagagaaagaaatgaaaagcattcaaataggaaaagaagaaatccaactatctctatacactgacaatagaaatcaaaatatctctctctatacwttgacaatataattctatacctaaaaaatcctaaagactctaccataaggttcctagaactgacaaacaacttcagtaaagttttaggatacaaaagcaatgtaggaaaatcagtagcatttttatacccaaacaatgtctaggctgagtgtgaaatcaagattggaatcctacttgcaatagccacaaagaaaaagaaatatctaagaatacagctagccaaggaggtgaaaggtctctacaagaactgccaaacactactgaaggaaatcacagatgacaaaaacaaatgaaaaaacatcgcatgctcatgaattggaagaatcagtattgttaaaatggccatactgcccaaagaaattgacagattcaagatgattcctatcaa

SEQ ID NO: 646711 - DNA, 596 bp, Homo sapiens
actaatctttagaaaaagagagcgagattataggattggcattatcagatttcgatacttattaaaaacttatactaatcaggacactatggtattggaataaaattcaacaaaaatattcatgactctgaataaaaagtccaggaagtaacacccacatttacakagttcattgctttttaaataaagagccaaataaattcaacagaggaaaataaagtgtattttaaataaatgatgtgaaacaacagaaaaaaatttatgggaaaaacgtaaaagtaaacttcaacccctacctcccactgtacaccatagttattttacaatgagtggtagacataaaaagtaaagctaaaactataaatatcctagaaaaaacatagaagaatatttataaggccttataatagtcaagcataccagattgaaaacacaaaatgtactgttaaaagtagctgattatctgtacttcatcgaattaaacacttcagctcatcaaaagacaatacttaagaatgaaaaggcaggctcagaaaagaaaatatatttttgtacatatgtctttctaaggagtggtattcaaaatatgtaatata

SEQ ID NO: 646712 - DNA, 596 bp, Homo sapiens
actaatctttagaaaaagagagcgagattataggattggcattatcagatttcgatacttattaaaaacttatactaatcaggacactatggtattggaataaaattcaacaaaaatattcatgactctgaataaaaagtccaggaagtaacacccacatttacagagttcattgctttttaaataaagagccaaataaattcaacagaggaaaataaagtgtattttaaataaatgatgtgaaacaacagaaaaaaatttatgggaaaaacgtaaaagtaaacttcaacccctacctcccactgtacaccatagttattttacaatgagtggtagacayaaaaagtaaagctaaaactataaatatcctagaaaaaacatagaagaatatttataaggccttataatagtcaagcataccagattgaaaacacaaaatgtactgttaaaagtagctgattatctgtacttcatcgaattaaacacttcagctcatcaaaagacaatacttaagaatgaaaaggcaggctcagaaaagaaaatatatttttgtacatatgtctttctaaggagtggtattcaaaatatgtaatata

SEQ ID NO: 646713 - DNA, 602 bp, Homo sapiens
aataagcattgtcttgtgctcagcaccatttgaatctgcatgagaagacataaaataattgycatatgcataccttcttgatttatattatagctcaatctcaaattgagaacaggtaaatgactaacaaattttaattatctgtaaaactggtgtgttagtctgttctcatgctactatgggaatatacctgagactgcataatttataaagtaaagaggtgtaattgactcacagttcagcatgagtgggaaggcctcacaaacttacaatcatggcaaaaggtgaagcaaacatgtccttcttcatagggcagcaggaaggggatgaatgagagctgagcataggggtaagccccttataaaatcattggatcttgtgagaactcattcactatcaggagaacagcatggaggaaaccagtcccatgattcaaatgcctcccactaggtccctcctacaatacattggggattatatgaactgcaattcaagatgagatttgggtggggacacagccataccgtatcaactgggatacctattatctacctcaaacattattttgacagttaaataagaacaacaaagtaatctgccag

SEQ ID NO: 646714 - DNA, 602 bp, Homo sapiens
aataagcattgtcttgtgctcagcaccatttgaatctgcatgagaagacataaaataattgccatatgcataccttcttgatttatattatagctcaatctcaaattgagaacaggtaaatgactaacaaattttaattatctgtaaaactggtgtgttagtctgttctcatgctactatrggaatatacctgagactgcataatttataaagtaaagaggtgtaattgactcacagttcagcatgagtgggaaggcctcacaaacttacaatcatggcaaaaggtgaagcaaacatgtccttcttcatagggcagcaggaaggggatgaatgagagctgagcataggggtaagccccttataaaatcattggatcttgtgagaactcattcactatcaggagaacagcatggaggaaaccagtcccatgattcaaatgcctcccactaggtccctcctacaatacattggggattatatgaactgcaattcaagatgagatttgggtggggacacagccataccgtatcaactgggatacctattatctacctcaaacattattttgacagttaaataagaacaacaaagtaatctgccag

SEQ ID NO: 646715 - DNA, 602 bp, Homo sapiens
aataagcattgtcttgtgctcagcaccatttgaatctgcatgagaagacataaaataattgccatatgcataccttcttgatttatattatagctcaatctcaaattgagaacaggtaaatgactaacaaattttaattatctgtaaaactggtgtgttagtctgttctcatgctactatgrgaatatacctgagactgcataatttataaagtaaagaggtgtaattgactcacagttcagcatgagtgggaaggcctcacaaacttacaatcatggcaaaaggtgaagcaaacatgtccttcttcatagggcagcaggaaggggatgaatgagagctgagcataggggtaagccccttataaaatcattggatcttgtgagaactcattcactatcaggagaacagcatggaggaaaccagtcccatgattcaaatgcctcccactaggtccctcctacaatacattggggattatatgaactgcaattcaagatgagatttgggtggggacacagccataccgtatcaactgggatacctattatctacctcaaacattattttgacagttaaataagaacaacaaagtaatctgccag

SEQ ID NO: 646716 - DNA, 602 bp, Homo sapiens
aataagcattgtcttgtgctcagcaccatttgaatctgcatgagaagacataaaataattgccatatgcataccttcttgatttatattatagctcaatctcaaattgagaacaggtaaatgactaacaaattttaattatctgtaaaactggtgtgttagtctgttctcatgctactatgggaatatacctgagactgcataatttataaagtaaagaggtgtaattgactcacagttcagcatgagtgggaaggcctcacaaacttacaatcatggcaaaaggtgaagcaaacatgtccttcttcatagggcagcaggaaggggatgaatgagagctgagcataggggtaagccccttataaaatcattggatcttgtgagaactcattcactatcaggagaacagcatggaggaaaccastcccatgattcaaatgcctcccactaggtccctcctacaatacattggggattatatgaactgcaattcaagatgagatttgggtggggacacagccataccgtatcaactgggatacctattatctacctcaaacattattttgacagttaaataagaacaacaaagtaatctgccag

SEQ ID NO: 646717 - DNA, 600 bp, Homo sapiens
cgtggcaaaaccccgtctctccaaaaaatataaaaattagccaggcatggtggtgcatgcctgtagaccagctacttgggaggctgaggcatcagaattgcttgaacccaggaggcagaggttgcagagagctgagatcatgccactgcactccagcttgggtgacaaagtgagactctgtctcaaaaataaataaataaaatgaataaatagataaagctttcttttgctttcattgttgaaagataggcatttttaattgttatcctgaatggtgtttgttgagcttataggagtggtgggcttatattcttcatcgaatttgggaaattttcagctattragtttcagatattttctttttactactcttaccccttcacccactccattctgggactacagttgcataaacactagaccagcattttaccacatattatgttcattatttttttaaatggttccatttgaatattttgattgttttatctttgaattcagtgatcatttttttctgtactgcctaatctgttgctaatcccatcttgcatatttttcatttattatattcttattccatatctagttctatttggg

SEQ ID NO: 646718 - DNA, 600 bp, Homo sapiens
cgtggcaaaaccccgtctctccaaaaaatataaaaattagccaggcatggtggtgcatgcctgtagaccagctacttgggaggctgaggcatcagaattgcttgaacccaggaggcagaggttgcagagagctgagatcatgccactgcactccagcttgggtgacaaagtgagactctgtctcaaaaataaataaataaaatgaataaatagataaagctttcttttgctttcattgttgaaagataggcatttttaattgttatcctgaatggtgtttgttgagcttataggagtggtgggcttatattcttcatcgaatttgggaaattttcagctattgagtttcaratattttctttttactactcttaccccttcacccactccattctgggactacagttgcataaacactagaccagcattttaccacatattatgttcattatttttttaaatggttccatttgaatattttgattgttttatctttgaattcagtgatcatttttttctgtactgcctaatctgttgctaatcccatcttgcatatttttcatttattatattcttattccatatctagttctatttggg

SEQ ID NO: 646719 - DNA, 646 bp, Homo sapiens
tctcttaaaaaatattaacaaacaaacacaaacatataaactcctgatattgaaattcaagttttgaaatgagcaaaaytaacttctgctatttctatgtatactagaaaatttttcagcatgaatggaaaacctgttatataaaatgaattccatctattttagacatattgtggacattattatagctaaataaactaaaatgtattttaaattgtgttattataaatatgttattttaaaaggctataaaagttattaagtgttgctcggtgccatggctcatgcctataatcccagcactttgtgaggccgaggcagtggatcacctgaggtcaggagtttgagaccagcctggctaacatgataaaaccccgtctctactaaaaattcaaaattagccaggtgtggtggcgagtgcctgtagtcccagctatttgggaggctgagacaggagaatcacttgaacccgggaggtggaggctgcagtgagccaacttcataccactgtactccagcctgggcaagacagagcgagactctgcctcaaaaaaaaaaaaaaaattattaagtatttataccctaaataaggctatgaggtgggatctatacctcattagaaaggtgttccaggtttttaagtaag

SEQ ID NO: 646720 - DNA, 646 bp, Homo sapiens
tctcttaaaaaatattaacaaacaaacacaaacatataaactcctgatattgaaattcaagttttgaaatgagcaaaactaacttctgctatttctatgtatactagaaaatttttcagcatgaatggaaaacctgttatataaaatgaattccatctattttagacatattgtggacattattatagctaaataaactaaaatgtattttaaattgtgttattataaatatgttattttaaaaggctataaaagttattaagtgttgctcggtgccatggctcatgcctataatcccagcactttgtgaggccgaggcrgtggatcacctgaggtcaggagtttgagaccagcctggctaacatgataaaaccccgtctctactaaaaattcaaaattagccaggtgtggtggcgagtgcctgtagtcccagctatttgggaggctgagacaggagaatcacttgaacccgggaggtggaggctgcagtgagccaacttcataccactgtactccagcctgggcaagacagagcgagactctgcctcaaaaaaaaaaaaaaaattattaagtatttataccctaaataaggctatgaggtgggatctatacctcattagaaaggtgttccaggtttttaagtaag

SEQ ID NO: 646721 - DNA, 596 bp, Homo sapiens
tgtataaatatattttttgtatgaagctgattatacttttgtacgaatcacaagctaattatagcaacggattcttttatttatagcagctcaacttgtttaatamacagttattatatgcagtcctgagccaagtccaatgccataaactagtcaaaacacattatttttaaccccctcagtattcccgctggtagaacagtgatacttttcttataaaaattccgcctttggggcatcaagcttttccagctttaaataagacaaaattgattttgttgcaacagcctcgatttttgtgtacacatatgttaagatactttttttaattaaatgtcaaatccagcttggcactgcaaacacagtgcatgcttgatgtttgaggaaaagctatcagcttgtctctccctgtcaaattgccagctgccttgtagtgatagtttaggctaagggatcactgttaggcagaacttcgtatcacaaatggctcaatgctgtgtgacttgggggaagatgtgagacaacctatttgtctttgtgagattgaattttatacttttaattatttaaggttattttaggtagttttcttgtag

SEQ ID NO: 646722 - DNA, 596 bp, Homo sapiens
tgtataaatatattttttgtatgaagctgattatacttttgtacgaatcacaagctaattatagcaacggattcttttatttatagcagctcaacttgtttaatacacagttattatatgcagtcctgagccaagtccaatgccataaactagtcaaaayacattatttttaaccccctcagtattcccgctggtagaacagtgatacttttcttataaaaattccgcctttggggcatcaagcttttccagctttaaataagacaaaattgattttgttgcaacagcctcgatttttgtgtacacatatgttaagatactttttttaattaaatgtcaaatccagcttggcactgcaaacacagtgcatgcttgatgtttgaggaaaagctatcagcttgtctctccctgtcaaattgccagctgccttgtagtgatagtttaggctaagggatcactgttaggcagaacttcgtatcacaaatggctcaatgctgtgtgacttgggggaagatgtgagacaacctatttgtctttgtgagattgaattttatacttttaattatttaaggttattttaggtagttttcttgtag

SEQ ID NO: 646723 - DNA, 613 bp, Homo sapiens
tgtactatagcatagcctgcctttgctggtgtgtggcgattaggcctggtggaactgccatcaataaattaagcatgatcagggtgaggaacaggaaaggaggaaatatggggaaatggggtgaatgtcaggtggatctgagagatacagtcatgggggtcaggtgtggcatcaggaataatgtgggaggccagattgaagtccgggccaggaacaatggtaattgtgggagactcaacaaagagtgagtacagctgaaggagccaggaagcagaaagtatatgtgtcaggtgtgaggaagaaaataggttttggaagttatgagaactgtagagagtgagttgagcatagtttgtgattttaagggcctctaaaagtattagggcagcggtggccgccacacacagacttgagggctaggcaaaacagtaaggtcaagttgtttggataaaaaggctacagggcacggtccargttcttgtgtaagaatttcgactacatagccctgcatttcagctgtgggtaatgaaaagggttgggatgaatcagggagagctagggtgggggcagtctctaaagctgtcttcaaggaacagaaagaggagtggggaaa

SEQ ID NO: 646724 - DNA, 622 bp, Homo sapiens
taaataattaactaaatcgcttgtccttactgatctatcagttcaaaatacttgctaaccaaactttgttttttgtttttgttttccttccctggacctttaaaccttgacccaccttcagcctgagccaacatacaacatgcaacccttcctgaaaattggctggcttcagaataaaacattctctgacttactatcccactcttatgccactctttcctcctacttctccacacacyattcttcctagccttgtttactcctccccataaaagagaaacctcttttgcctaacacttcagatgcttgcagagctcataatcagagtgaacttcctatttgaaatagtcctctcccctaggcagggcgcggcggctcacgcctgtaatcccagcactttgggaggccgaggcgggcggatcacgaggtcaggagatcgagaccacagtgaaaccccgtctctactaaaaatacaaaaaattagccgggcgcggtagcgggtgcctgtagtcccagctactcgggaggctgaggcaggagaatggcgtgaacctgggaaggggagcttgcagtgagctgagatcgcaccactgcactccatcctgggcgacagagcgagact

SEQ ID NO: 646725 - DNA, 660 bp, Homo sapiens
taaacatcctagtaggcagttggagtttgataggagtgatgagagctgcgtgttaatttgagagtcatcagcataaaggctatatttaaacaaagtcactagaggagataatctatgaagacagtaaaaatggagaagaagagaaagaaagtttaggactgagacttagagtacactaacacttagagatcaagcctaggtgtaagaactgacaaatgaaatcagctgatgccttgtgctgggggagggaatcaaaacattaaaaaacttataggaatcagaaatgtatcaacagtgtgatccaagagaacaaaataggtgtcttgagcttgtgcaaccactcattctgcttgccacacaacagccaataaattgagagacaaggagttagagcaaggaaggcaactttattttggatagccrgcaaaccaataacatggtagactaatgtcctaaagaaccatcttaagtcagcacagatttcaggctctttttatgttgaggacggcggaagatgaggaggttgggatcaagaggttactgatgaccgcagacatctggatgccagcaagggtccaaggaggtttggaatttctttgcccttggtcaggtcacaatgcttctataagtttttaacaaaaagtagtcaggtgtttacat

SEQ ID NO: 646726 - DNA, 491 bp, Homo sapiens
tctttatactatcgtctaaagaaacatcagacacatatttatgagaatgccaagaagttgagtttcaatgaatgctacatatatagcattcagtacttgaaacatttattaataaaaataatcatcagggctgggcatggtggctcacgcctgtgaccccagcattttgggaggccgaggcgggtggatcatgaagtcaggagatcgagaccatcctggctaacacggtgaaaccccatctctactaaaaatacaaaaaattagccaggcgtggtggcaggcgcctgtagtcccagctactcggagggtgaggcaggagaatggcgtgaacccaggaggtggagcgtgcaatgagccgagattgtgccactgcactccagcctgagtgacccaaagagcctccaaccccccccmaaaaaaaaataataatcatcatcatcatcattagcacaccagctataatacaaagttgtcttttgttgctttatttt

SEQ ID NO: 646727 - DNA, 491 bp, Homo sapiens
tctttatactatcgtctaaagaaacatcagacacatatttatgagaatgccaagaagttgagtttcaatgaatgctacatatatagcattcagtacttgaaacatttattaataaaaataatcatcagggctgggcatggtggctcacgcctgtgaccccagcattttgggaggccgaggcgggtggatcatgaagtcaggagatcgagaccatcctggctaacacggtgaaaccccatctctactaaaaatacaaaaaattagccaggcgtggtggcaggcgcctgtagtcccagctactcggagggtgaggcaggagaatggcgtgaacccaggaggtggagcgtgcaatgagccgagattgtgccactgcactccagcctgagtgacccaaagagcctccaaccccccccaaaaaaaaaataatmatcatcatcatcatcattagcacaccagctataatacaaagttgtcttttgttgctttatttt

SEQ ID NO: 646728 - DNA, 654 bp, Homo sapiens
ttcctttttttatttttcttttttctcatttgactcaattaatttcaaataacctgtcttcgagttcagagaatctttcctctctgtgatcaagcagttgttcatgctctctactctgctttttatttcattcattgtattccttagttccaaaattttcttttaaaaaataattttattatctatgtgaaatttctcaagctttctactctgctttttatttcattcattgtattccttagttccaaaattttcttttaaaaaataattttattatctgtgtgaaatttctcattttgctcatttataatcttcctgatttttgaattgtttctgtgttttattgaaactcactgagattccttaaacaattattttgattcttttttttttgagatagygtttcacacttgtgacccaggctggagtgcagtggcatgatctcggctcactgcaacttctgcctcccagattcaagtgattttcctgcctcagcctcccaattagctggattacaggcatgcaccaccatgcctggctaatttttgtatttttagtagagattgggttttaccatgttggccaggctgctcttgaactccttacctcaggtgatccacttgccttggcctcccaaactgttgggattacagg

SEQ ID NO: 646729 - DNA, 666 bp, Homo sapiens
agatatgcttcatacaggtgcttgatatatggatatatgttcttttactgaaacactgtagaaaagcagagagattcacaaagaatgttacaatgtttcaaattttttaaagctctataattatcccattttggaaggtagtgaaaggacaacataagcagatagcaaacagagactgtctttaggaatatgatttatgatgtcctyactttgaaaaataagtgaaggtcatacgttgtatattgttagctgttgaatgtggtgttttaaagtaaataaatcagagacaatttgcattgataaatgattcttggccacaaaatattttaatcccttttcattgctaagcttcttgcccaaaaataagataaaatggtaatttaactcatactttcttgaaaggatcttatgaaaaactgaggatcttagagccaaaagaccaataatagtcaagcacccattgcatcaaccttaggagaaagggacctgtcagcaacaggtcttgttctaatggctttggtgagactgctgtgacgaacacccacttttgtagatgatagcttcagaaccagtgcagtggctatgactgccctataaaataagcaaaaaactttgcacgtcatgttttgagaagagttactagcctcatatcctctcagaaaaatt

SEQ ID NO: 646730 - DNA, 666 bp, Homo sapiens
agatatgcttcatacaggtgcttgatatatggatatatgttcttttactgaaacactgtagaaaagcagagagattcacaaagaatgttacaatgtttcaaattttttaaagctctataattatcccattttggaaggtagtgaaaggacaacataagcagatagcaaacagagactgtctttaggaatatgatttatgatgtccttactttgaaaaataagkgaaggtcatacgttgtatattgttagctgttgaatgtggtgttttaaagtaaataaatcagagacaatttgcattgataaatgattcttggccacaaaatattttaatcccttttcattgctaagcttcttgcccaaaaataagataaaatggtaatttaactcatactttcttgaaaggatcttatgaaaaactgaggatcttagagccaaaagaccaataatagtcaagcacccattgcatcaaccttaggagaaagggacctgtcagcaacaggtcttgttctaatggctttggtgagactgctgtgacgaacacccacttttgtagatgatagcttcagaaccagtgcagtggctatgactgccctataaaataagcaaaaaactttgcacgtcatgttttgagaagagttactagcctcatatcctctcagaaaaatt

SEQ ID NO: 646731 - DNA, 574 bp, Homo sapiens
tctggacatttcttataaatagcataagacaatattggccctttgtgactagcttctttcacttcaaatgttttcgatattcattcacattgcagcatatatcagtacttcattcttgttttatggtcaaataatttatcattgtatagatataccacatcttstttatccattcattgacttatagacattttggtttacttctaccttttgactattatgaataatgttgccaaaagcatttatgtacaagtttttgggtggagatacgtttcatttctcttgggtgtatacctaggagtggaattgtgaaatcatacagtagttctatgccaaaccatttgagatactgccagatagttttccaaagcaactgcaacattttacatttctaccagcaatgcatgagtgtttcatttctccacatccttctaacacttgctattttttatcttttagattatagtcatcatagtgactgtgaagtgttttctcattgtgtttttcatttgcatttgcacaatgactaatgatgttgaacacattttgctgtgcttacttgtcatttgtacat

SEQ ID NO: 646732 - DNA, 574 bp, Homo sapiens
tctggacatttcttataaatagcataagacaatattggccctttgtgactagcttctttcacttcaaatgttttcgatattcattcacattgcagcatatatcagtacttcattcttgttttatggtcaaataatttatcattgtatagatataccacatcttgtttatccattcattgacttatagacattttggtttacttctaccttttgactattatgaataatgttgccaaaagcatttatgtacaagtttttgggtggagataygtttcatttctcttgggtgtatacctaggagtggaattgtgaaatcatacagtagttctatgccaaaccatttgagatactgccagatagttttccaaagcaactgcaacattttacatttctaccagcaatgcatgagtgtttcatttctccacatccttctaacacttgctattttttatcttttagattatagtcatcatagtgactgtgaagtgttttctcattgtgtttttcatttgcatttgcacaatgactaatgatgttgaacacattttgctgtgcttacttgtcatttgtacat

SEQ ID NO: 646733 - DNA, 579 bp, Homo sapiens
tctactttgtaataatttttattcagatcctttgcccatttaaaaaaatcatctttttattattgagttgtaacagttctttatatattccagaggcaagtacctgctacataaaccagcctaagatggcctctttttattggccctgaggatgtttatttcttcayttaggctgagatttgttaacttaaaagctcactggtgccaaacttaaaagttttgcacatcaattattttttaagttgcccaaacaagctgatttttagccatttagagactgcctgctttgcatatcccataaaaccttgcctcacgtctgctagcaatagataagccgggccctataaaaataccaagctgttgctgctttttggagctctctaacctagagttttccttcctagtgaccagaagttcccttgcctttttccacttctgtgtaggaaccatcacttcttagtcagtgtagcccaatatagttgtgtgtgctattgccgcctcatggccatatatttttccttgattagcctcccaagtcccttcaaaccccgatactatcttatcagatatgtgatttgc

SEQ ID NO: 646734 - DNA, 594 bp, Homo sapiens
aatttttataattctggtcactaattcaggacctacatttgctaatatccttcttggaatgtgttgcctagaaattaaagttttccagatatgctgatcagagcacagcattcagaagaactctattttcctgagaaaatacttttttctactcatgtatcctaaatttgctttagatattttttacagtaaattgatggttccaytgaatttataatcaacttaaactcacagctctttttcaaattatcagtagttgctgtgtgcttaatgtattcaaacccaaacaggaactttttcttcatccatatgcagttctaccatacttattacctattagagaccttggttgttgaatgtccatgtccttaccgattttgattctattaacttattaaactttactccacttggtggcagtcacagtttgataaataaaaaacttctacatctttaggcattttaaacctttccatgagtacagggccaagtttaagtccttaagaacaccattacagacatcttctccagacagatactgatatatttacaccaattctgggtcatgttgttagagtaggtatgaatttatct

SEQ ID NO: 646735 - DNA, 624 bp, Homo sapiens
  misc_feature 603, 604, 605, 606, 607, 608, 609, 610, 611, 612, 613, 614,615, 616, 617, 618, 619, 620, 621, 622, 623, 624: n = A,T,C or G
agcatgacactgaggaacttaaagtcctcagagatgaagatctgggcaacccacctgacaaaccacctgaactaatggaaataaaattaaaagttgagattaaaagttatctagtatgagtagtggagaagggaaatgatgaattttttttaaagcattggagaaaactggagagacagagcctatagtttgttccactaagcctctttagtacatcattaacctaaaaaaagctttgcctcaggtgtgtaacttagcctgagaaacaagtataactatgtggtacagaaagtgggtgttgatgcctcacccaaatttctttcacgtttcagccaaccatcttccagctgctgtgagtgttggctgataaataatcatagctgctaccttttctggagaatagtaattagccaaactggaagcattttgcttacaatgctatactmcacatacacactgggatatccctcagccttgactgaccgtgatacaaaaggagtccttctgttctaaaagtgagccttactcttagtgctatttgcactccagcctacctcccgtggaaccaacctcaatgtagccaaggccacatcttgcttagtnnnnnnnnnnnnnnnnnnnnnn

SEQ ID NO: 646736 - DNA, 561 bp, Homo sapiens
tttaaataaagtactgggcaaaagaagcaggtaactaactcttacaaccccaaaacatcctcaaaagtaaatctgtattaataggataataataaatatcatcaataataacattgaattattacattaacttgtctttgcaagttgcttatagcattattgatgcataaaaagttaaaatgatatgttataagtaattagcctaaaagcaaaatgaatttccctaaaaaataaatttatcacttagatttcctaaccatacacatatagtacatttcaaatatattcttactaaaatttcatatgtgcattttatttgaaaatgcttaataagcatagaaaagcaaatattaatgtaccaaatagccaagcattttctcagaataagcacacatactaatctgtttttactttataactatacataaagaaaatacattcagtaggtttttttawttttttttttagatggagtctccatctgtcacccaggctggagtccagtggtgcaatattggctcactgcaacctctgcctcccgtgtccaactgattctcctgc

SEQ ID NO: 646737 - DNA, 630 bp, Homo sapiens
ggggatggatgcaataagtgtatacaataagtatatacaataagtgtaatagacacaataagtgtttactacaatcacattggacaaattgccaaaaatacctgagtctcagttttctcatctgtataatgggggtaaaatgcctatctcatggaattactgagaaggttacagtaatgtaaatgagatcactataattcagaaggcactacccaagtagaagatattaatatcactattgaccttgaatgataggaagcaaaatccaaataaacaaaggaaaagatagaaagacaaggaaatgaatccagaaaaaaacctatgtcattccaaaagaaatgaacatggcagtggaaataaattaacctgggccacaactttaaaattgaagggataaaaagacaaaactatggaggcagtaaaaccatcagtggttgccgggggttatagagggagtgagggatgaataggtggagcacagagggtttgcayggcagtgaaaacagtggtggaaatgtcatttcacatttgtctgaacccatagaatatacaacaccaagagtcaactctaaggtgaactatggactttgggtgataatgatgtgtgaagtaggttcaccagttataaca

SEQ ID NO: 646738 - DNA, 552 bp, Homo sapiens
tgttgaaacaaccttgctcccagggataaagcctacttgcttgtgatggattagctttttgatgtgctgctggatttggttgactagtattttgttaaggatttttgcatctgtgttcatcaaggatattggcctgaagttttctttttggttgtgtctctgccagattttggtatcaggataatgctggcctcatggaatgagttagagagcattacctcctccttatgactgatattatgtttaatttttcttgccctatgtgataattccttacaataaacttgtgttattagagtcatggtgattgaggaaaggggctgtgtctatacttcagaaagagtgtcaagatggcaagaggtacgcaaaggaacagtctggcataatcatcttgagagaggtaactgccatcaactcatctggaaattttcagctatatttggtaagaaactaaatttccctcagtaatgcaaaatgagactaagtgattttttttkaatattctttttaaaagtaacttaaaggggtaatacatttgtttggggacaagga

SEQ ID NO: 646739 - DNA, 565 bp, Homo sapiens
gcttttttttatgaaaaggatctatattcaccatcagataattgttccctaatttaaaattaagaccacggggaaaatactgtcgaaaaataaagcatttgaaagacagtgacaacaaaattaaagaaatgtgtataccatgcattcagagaggtatgaaaggcagctctcaaattccatgtgtgtggttaaatgggtgtagttatatcactcaatgtgcatggttttttgaagtgggaatagtacacatggacacaagcacatacttggtgggaaaccaaaacatggattayagcacattaattagagagcgtagtatccgagcagagctagatcatcaattcatttcattcaagttaagtggtttaattcccatattttccaacagtcttcagagtaaaaacaaaaaaatagagttatagtaattaacatttgacttaatttaacaatgatcaaaaggaccagaataataaaagaaaatagagggtttatgcttacatgcatgtagggctgataattgtccatttccctataattgctagtatttcaccttcatcagtgtact

SEQ ID NO: 646740 - DNA, 541 bp, Homo sapiens
ggaatagaatggaatggaatggaatggaatggaatggaatggaatggaattaacccgaatagaatggaatggaatgsaatggaacggaatggaacggaacggaatggaatggaatgcaatggaatggtatggaatggaatggaatggtacggaatagaatggaatggaacgaattgtaatggaatggaatggaatggaatggaatggaatggaatggaatcaacgcgagtgcaggggaatgtaatggaacggaatgcaatggaatggaatcatccggaatggaatggaatggaatggaatggaaaggaatcaacccgagtgcaatcgaatggagtggaatggaatggaatggaatggaacaacccgaatggaatagaatgtaatggagagtaagggagttgaatagaatcaatccgaatgtaatggaatggaatgcaacggaatggaatggaatgtaatggaatggaatgcaatggaatggaatcaacccgagtacaatggaatggaatggaatggaatggaatggaatggaataccttga

SEQ ID NO: 646741 - DNA, 597 bp, Homo sapiens
tgaatagtactgatagaaaatgttgaaagttttaggctccatacatagttatacgattgctatttcaaactagcagcagatctaccagggttgaaagttaaaactgataaaacaatagcacttactatgtcccaggcactcttccaagcacattacatgtatactctcacttaattcctaggacaatctatggagttgacaccattagcttcatttgttaaatgagaaaactggactataagaagatyaaagaatttgccataaggctaggaaatagggaaagcaggattatttagagtgatatttcctattctcgatcccacactttcttgcacaagatcgtagacttgccctagataataaaaattttcactgaagattaaaaggaggtttttgaaaagcacactatttatttggacactagtctgtgcttcaacacattatttgaataagcacacagaagatactgtgttagatgtgatagggaatatcaaaatgaataaacatagttattatgctcaaagacttagagcaaaataggaaaattaaaacaggacacaaatagtcataaaacaagccaggttagctggaatgaac

SEQ ID NO: 646742 - DNA, 541 bp, Homo sapiens
aaaatctacctaaaactagcataagcataaaagctaatccatcaatttatataaccaaagattaaggagcttgatgcagagctcaatgaacatcaccataatctttttcttgactctccatttctcttgccagcccctgccacattgcttggatcctcagcgtggcaaaattccatagataagttttctgtagtcactgtctccagttccttacctttcattctcctgtaagtctactccagtcatgcttttgcttcattcaatccactgaaacttctcttgtcaagaacacctgtgatgccaaaccccatgatctgttctcagtctccaggttccttgatctattagtactwgacacagttgatgaggttctcctgcttgtgcactttgtcacttgacttccaggattccacactctcttgattttcctcctatcatgctagtcatttcttcttagatgtctttcctcgttcttcctcttctcttctcacactcactcccttgatgatttgaactagtctcaaggccttaaatagtaatt

SEQ ID NO: 646743 - DNA, 604 bp, Homo sapiens
atgtattaatgcacataattctccagcgtccaagtccatgtaacctagatgtatttatagaaattaaaaagcacaatgttgacagaattggacaagaataattttctattttcccccaccatagagtaagatgttttaaattattttagacattctctgtagcttctaagttaggttgggaagtaccaacccttcatgagcacctttcagaagcttattacagagctatgcatgcacatctactctgcctttttattcaagaaattgaccctagttctcactggaaaaaataaagttggaaaactcctctgtaaaagatagataagagaataacagaggtrccatctctgtttaggataactctcattgtctctcaagcctgccggacaaaccaaggtttaacatggcagccaccttccagaattttcctgatgcctgaggtccagccattatttgacttacacatttattcctggtttactggcaattgtgcacatttatagactgacgaatagttttagagccaggagatggagtgagtgacaattttccattcctaaaaaaaaaaaaaaaacatgattattctgaaccaaacaaagaaact

SEQ ID NO: 646744 - DNA, 604 bp, Homo sapiens
atgtattaatgcacataattctccagcgtccaagtccatgtaacctagatgtatttatagaaattaaaaagcacaatgttgacagaattggacaagaataattttctattttcccccaccatagagtaagatgttttaaattattttagacattctctgtagcttctaagttaggttgggaagtaccaacccttcatgagcacctttcagaagcttattacagagctatgcatgcacatctactctgcctttttattcaagaaattgaccctagttctcactggaaaaaataaagttggaaaactcctctgtaaaagatagataagagaataacagaggtaccatctctgtttaggataactctcattgtctctcaagcctgccggacaaaccaaggtttaacatggcagccaccttccagaattttcctgatgcctgaggtccagccattatttgacttacacatttattcctggtttactggcaattgtgcacatttatagactgacgaatagttttagagccaggagatggagtgagtgacaattttccattcctaaaaaaaaaaaaaaaacrtgattattctgaaccaaacaaagaaact

SEQ ID NO: 646745 - DNA, 519 bp, Homo sapiens
agttcgaggttgcagtgagcaatgatcacatcactcatcactatactccagcctaaacagtagagtgagactctgccttaagaaaagaaattattctttttccttcaaataatctcctgatgttaccagcctttgtttggcataaagacacagaaataaagaaaacattattcttgacttccaacagctactctctaactaagacactgkcttgcttttgttgacctgattctattttctaggtcacaagctggagtttcactcactgaccaccttgcacttactgggtcactatctctaattattattgttactagacgctacttacaacttctctatatcaataacttatctgcattcactgaccttgttctacttcctgggtcattaactcacatctcgctgaccttgatgttgctccttgggtctccttaatagaatatggacatatttggacctcaaaaataaagatgcaaaaacatgaaatattaccttcatggttgttgctttgtaagcaat

SEQ ID NO: 646746 - DNA, 618 bp, Homo sapiens
gatggtttctgacgaaaactccctctccaggtaatgtgaaatgagatactttaggcagctatttcttttaacaactcttcatatgatatacaactttagaggaaagtttctgcaatctgtgtcaaactcctcgtcttcagggaggccaattcacctacatcaaaccttcgtattctcaaatgagtgggaaaggctggaaggcgagagggctttgcagagaatgaaaaagaaagtgacataaatcaagagagagaagtcaaacatgtcctaacagggttgaacatagaaacttgtaccaaggaaatgaaatamgcatgatatgggcaatttatttttacacaaaataatcctcagtattctgaatgatttgaaactctgaattaaaaactggcattaggaagatgccatactttttagataaaagtgaaggtgttaacagtaaccaaaatgaaactacaaaatagataaatgatgaaaataaataagtaaatttgcttatgaagacattactttatttgaaaaattgttgtttatggaactcttcagaattcagtgttttgaagataagtattgttgcttacatatgtaaacaacattaattatcctagaggaaagatt

SEQ ID NO: 646747 - DNA, 612 bp, Homo sapiens
aggttatctattattgtggtcagattattttttagccatcatactacttttagaagagcattggaaaattcattcaaaattgctgcttgagtacaatagtgaaggtctaaatactgttggtaaggaaagtgaaaaagtraaaagcagtttttaatttataatacatttgtgcaaaactgggaggaataacattacatttcaattgaatgagctatcagtctattgaaccgtacaaatctccttaatatatttggatcctgtgaagttcatttatgcaaaaaatgtcaaaacccatttgagggaatgatcaatgaaatgtgacagtaccatgtaataaataaaacaataggtatcaatcacagaatgaaaacaaacactgaggcaagttatgcagttgaatcctgccccttttgttgtattgacctcttgcctgtgcctagtagtgtagatgaacacacatgaccactacttaaattgtttttttactttagagagtgatccataaatgatatagatattaaaatgtgggggggagggagaacaaacaaaacaaaaacaatgcattttggagtgtctagacctggatatgagcccctgctttactccttatta

SEQ ID NO: 646748 - DNA, 612 bp, Homo sapiens
aggttatctattattgtggtcagattattttttagccatcatactacttttagaagagcattggaaaattcattcaaaattgctgcttgagtacaatagtgaaggtctaaatactgttggtaaggaaagtgaaaaagtaaaaagcagtttttaatttataatacatttgtgcaaaactgggaggaataacattacatttcaattgaatgagctatcagtctattgaaccgtacaaatctccttaatatatttggatcctgtgaagttcatttatgcaaaaaatgtcaaaacccatttragggaatgatcaatgaaatgtgacagtaccatgtaataaataaaacaataggtatcaatcacagaatgaaaacaaacactgaggcaagttatgcagttgaatcctgccccttttgttgtattgacctcttgcctgtgcctagtagtgtagatgaacacacatgaccactacttaaattgtttttttactttagagagtgatccataaatgatatagatattaaaatgtgggggggagggagaacaaacaaaacaaaaacaatgcattttggagtgtctagacctggatatgagcccctgctttactccttatta

SEQ ID NO: 646749 - DNA, 612 bp, Homo sapiens
aggttatctattattgtggtcagattattttttagccatcatactacttttagaagagcattggaaaattcattcaaaattgctgcttgagtacaatagtgaaggtctaaatactgttggtaaggaaagtgaaaaagtaaaaagcagtttttaatttataatacatttgtgcaaaactgggaggaataacattacatttcaattgaatgagctatcagtctattgaaccgtacaaatctccttaatatatttggatcctgtgaagttcatttatgcaaaaaatgtcaaaacccatttgagggaatgatcaatgaaatgtgacagyaccatgtaataaataaaacaataggtatcaatcacagaatgaaaacaaacactgaggcaagttatgcagttgaatcctgccccttttgttgtattgacctcttgcctgtgcctagtagtgtagatgaacacacatgaccactacttaaattgtttttttactttagagagtgatccataaatgatatagatattaaaatgtgggggggagggagaacaaacaaaacaaaaacaatgcattttggagtgtctagacctggatatgagcccctgctttactccttatta

SEQ ID NO: 646750 - DNA, 612 bp, Homo sapiens
aggttatctattattgtggtcagattattttttagccatcatactacttttagaagagcattggaaaattcattcaaaattgctgcttgagtacaatagtgaaggtctaaatactgttggtaaggaaagtgaaaaagtaaaaagcagtttttaatttataatacatttgtgcaaaactgggaggaataacattacatttcaattgaatgagctatcagtctattgaaccgtacaaatctccttaatatatttggatcctgtgaagttcatttatgcaaaaaatgtcaaaacccatttgagggaatgatcaatgaaatgtgacagtaccatgtaataaataaaacaataggtatcaatcacagaatgaaaacaaacactgaggcaagttatgcagttgaatcctgccccttttgttgtattgmcctcttgcctgtgcctagtagtgtagatgaacacacatgaccactacttaaattgtttttttactttagagagtgatccataaatgatatagatattaaaatgtgggggggagggagaacaaacaaaacaaaaacaatgcattttggagtgtctagacctggatatgagcccctgctttactccttatta

SEQ ID NO: 646751 - DNA, 569 bp, Homo sapiens
aaaggataaaatgaaaccctcatcttacaccatacacaaaaatcaacttgaaatggataaaatacctaaattaagacctgaaaccatgaaattcctagaaaagaacataggaaaaaagctgaaccttggctttggcatgatttttttaaaatttcacaccaaaagcccatacgacataagtgaaaataagtaaatgggactgcatcaaactaaaaagcttccacaagcaaaagaaacaacaaaatgaaaaagcaatctacaactgggaaaactacttgcaatccacatatcggataaggggttaatatcyaaaattcataaagaacaattacaattcaatagcagaaaaataaataacctgattaaaaaacgggcaaagaatccgaacagatatttctccaaaatatatatatatatgatcaacaggtatatggaaaggtgctcaatatcactaatcatcagagaaacgcaaatgaaaaccgctatgaaatatctttggctattatcaaaaagacaagtaaggctgtacacgatagctcacgcttgtggtccaaacaactcaagagatt

SEQ ID NO: 646752 - DNA, 542 bp, Homo sapiens
catcagctatttagtcataaatcattagttcaattgctgaaatatgccagctattactgatcactgcagttacactttacgacataggtcttcacttccagaatgctttctgtaaagtttaacaataaagaaaaaaaaatttaacaatcttgctaaaaaaagattttcaacatctgagtgattgaagttcgtagttttgataatgataaaaacaggggaaagggaaaacaaatcaaagacattctactgatttctcttagaaatagtagaattagtaccttactgtacctctcaagttacttacattaatgtctctttcatgtatttcacctacagttacatgactgattcctcaaatgcctgattctaattttcttaggagcagaccttcaaaagaaaaacaatcaacaaactgtagaaaagttcaaagaagcaaatgtctggacagttatctatatttcaactaagataccccagcatcaatttaaaaaataatcacgtgtacatttaaactaytaaaaaggtgatagtacactatgaaa

SEQ ID NO: 646753 - DNA, 550 bp, Homo sapiens
atctggttttcctgatatccayacttgggtgtgacagagacagaaactatatcaagtgacgtgatgctactgatatgcttgaacttgtaatatcgggttgtggattagaatggagtgattctacacctgcccacctctcatctttagttgtttgcccctagaaatttcaacttgattatactgataaatttatgtgaaatgttcccgatcatttttattccagtgtgctttggccctctttaccctgtcttaattttcttaatagcaattatcactacctgatactaaattttatatttgtttgtttattgcttgtttccaccactacatgtaggttccataagagtagttactacatcttcagtatttagaatagtggctggcacatagtaagcactggatatatatttttaaaataaatgttgagtggatgaattagccacaggcaagaaggacagcatattatcaatgatcagtatcatgtcccctccattggaatctttcagacgaagatctctaggctgttttgctatagttttgcctaacgttg

SEQ ID NO: 646754 - DNA, 550 bp, Homo sapiens
atctggttttcctgatatccacacttgggtgtgacagagacagaaactatatcaagtgacgtgatgctactgatatgcttgaacttgtaatatckggttgtggattagaatggagtgattctacacctgcccacctctcatctttagttgtttgcccctagaaatttcaacttgattatactgataaatttatgtgaaatgttcccgatcatttttattccagtgtgctttggccctctttaccctgtcttaattttcttaatagcaattatcactacctgatactaaattttatatttgtttgtttattgcttgtttccaccactacatgtaggttccataagagtagttactacatcttcagtatttagaatagtggctggcacatagtaagcactggatatatatttttaaaataaatgttgagtggatgaattagccacaggcaagaaggacagcatattatcaatgatcagtatcatgtcccctccattggaatctttcagacgaagatctctaggctgttttgctatagttttgcctaacgttg

SEQ ID NO: 646755 - DNA, 550 bp, Homo sapiens
atctggttttcctgatatccacacttgggtgtgacagagacagaaactatatcaagtgacgtgatgctactgatatgcttgaacttgtaatatcgggttgtggattagaatggagtgattctacacctgcccacctctcatctttagttgtttgcccctagaaatttcaacttgattatactgataaatttatgtgaaatgttcccgatcatttttattccagtgtgctttggccctctttaccctgtcttaattttcttaatagcaattatcactacctgatactaaattttatatttgtttgtttattgcttgtttccaccactacatgtaggttccataagagtagttactacatcttcagtatttagaatagtggctggcacatagtaagcactggatatatatttttaaaataaatgttgagtggatgaattagccacargcaagaaggacagcatattatcaatgatcagtatcatgtcccctccattggaatctttcagacgaagatctctaggctgttttgctatagttttgcctaacgttg

SEQ ID NO: 646756 - DNA, 550 bp, Homo sapiens
atctggttttcctgatatccacacttgggtgtgacagagacagaaactatatcaagtgacgtgatgctactgatatgcttgaacttgtaatatcgggttgtggattagaatggagtgattctacacctgcccacctctcatctttagttgtttgcccctagaaatttcaacttgattatactgataaatttatgtgaaatgttcccgatcatttttattccagtgtgctttggccctctttaccctgtcttaattttcttaatagcaattatcactacctgatactaaattttatatttgtttgtttattgcttgtttccaccactacatgtaggttccataagagtagttactacatcttcagtatttagaatagtggctggcacatagtaagcactggatatatatttttaaaataaatgttgagtggatgaattagccacaggcaagaaggacagcatattaycaatgatcagtatcatgtcccctccattggaatctttcagacgaagatctctaggctgttttgctatagttttgcctaacgttg

SEQ ID NO: 646757 - DNA, 650 bp, Homo sapiens
aatacacaatgagatatattagtggtatacaatggagatgtcagagcagtagagaaagtttgagtatcaccaatgtaggcagaatacataatagtcactaaatgtgataaaacatcaatagagtgaaaatacatagaaacgggagaggttggtgggctgtcccttatagcagttgggtgttatgaggtcaggatgtgaggaagagycaacatgagagagcgagaaagattggcctaaagggtgtgtttcaattcagaaaatgatcaattgtgctgattttttttctttcattttcatgagtttttaaaatgaatatgtattattattcacatatttttaaaagtaatgcactcatttacttattaccaaaaccaaattcagtagataattttttcttgatttgaaaatgttggacttatgaaaatggcatttgagtagtttacagagtaataatgtacttgaaaaaaaatcaaagccagggaaatttacctacttagaaaagagtaaacaattccaaataaggaaatttctccccttaaaaatgactgtccatcctcagtgactgactgcaagtgttgagaatttttgttttcagaacctgaagccaatctcttccacatgagccctagctccttttaatccacatgaag

SEQ ID NO: 646758 - DNA, 650 bp, Homo sapiens
aatacacaatgagatatattagtggtatacaatggagatgtcagagcagtagagaaagtttgagtatcaccaatgtaggcagaatacataatagtcactaaatgtgataaaacatcaatagagtgaaaatacatagaaacgggagaggttggtgggctgtcccttatagcagttgggtgttatgaggtcaggatgtgaggaagagtcaacatgagagagcgagaaagattggcctaaagggtgtgtttcaattcagaaaatgatcaattgtgctgattttttttctttcattttcatgagtttttaaaatgaatatgtattattattcacatatttttaaaagtaatgcactcatttacttattaccaaaaccaaattcagtagataattttttcttgatttgaaaatgttggacttmtgaaaatggcatttgagtagtttacagagtaataatgtacttgaaaaaaaatcaaagccagggaaatttacctacttagaaaagagtaaacaattccaaataaggaaatttctccccttaaaaatgactgtccatcctcagtgactgactgcaagtgttgagaatttttgttttcagaacctgaagccaatctcttccacatgagccctagctccttttaatccacatgaag

SEQ ID NO: 646759 - DNA, 436 bp, Homo sapiens
cataattttcaataggcataaatattttcatgacatatcatwttacttattatttcatagtgatttctgaccttcctttatgccattaagtagattatacattttgtagtaacaatgccaagtattaaatttggttatatttcttgaagcttctaagacaaataataggactaaaaggaatctaagatatttgggcatatgttagaaacaatatagctctttaattggcaacattattttaaacactactagaatatattacattgctatttccatgttaaactgaggattcattaaaagttggctatttaaaatgtataaagcacatattaatgtgcgctgaatctgagccaaggattgtgaaaaaatatatatgcacatgctcacaaattcataaccttagtggtaggcaggataacgtaccccccgcaccaca

SEQ ID NO: 646760 - DNA, 590 bp, Homo sapiens
tttttatttctacatcgatcacataggaatctcagatttaaaaacctcttggggttatgaagccaaaccaaggcagagtttagatttttcctgtagacttaagattcctgaacctgacaggaagtaataatttttactccctcactgtaaggctgggaacccttgaaaccagccattttatgcacattctcaaatacaatattccagttgaagccatggtaataaaaacaatgttttcaattttatcctgtgataaatagggaacaaatttttattgatcttatatgcaaataattacattgctgtaaaaatagaagtactcatgaatagtttttgaattttgtaggggtcaggtagggagaaaaaatgttttaacctttgttcaaaaaatatactttactaaattgttttaaacaataaatagcttaaaagaaaaaaattatcatcaatctggmaaacagtaaataatgttttatttttactttttaatttaacttttaagtttggggtacatatgcaggtttattgtataggtaaacttatgtaatgagggtttgttgtacagattattttattacttaggtattgat

SEQ ID NO: 646761 - DNA, 555 bp, Homo sapiens
tctaaagaaagtgaaactttttgagatttctttttttttttttttagaaattaaaaagaccaaacactgctctgctggtgattcctcaataaagtgcccactgagctctattttaatgcttttttttccccccttggaagctgtacagaaaatctttaacatggcaggtttgagactgcatgttcttagaaagagaagcttagcccttggttgctgtctgggaacttagatttcccagcattaactgataagagtgatttactctgcctaaactgttctgcctaaaccttacaataggttcacctggtttatgttgaacaactgctttctttttaagtgtttggaattttggtatatgccaggcagaaactgcctatatgaccaacccgaagtaaacacccagggcactgagtccctaatgaacctccctagttgaaaacatttcactcacatcattacttatttttgggaaattaagagcatcctgtgttattccactaggagaggacctttgaaaacttgtgcctggkttcctccagatttcactccatgtac

SEQ ID NO: 646762 - DNA, 597 bp, Homo sapiens
cataccacctttcttctcacctctttctgagggaaacaaaagggaaagaaaactgcatcatcatgctttccagagtgccagcagtagtatctggtacacaggargccctcaatgtgtgtttattgaattaaactgcatttttaaactttgttaaatcttagagacaaatctaacaaattccacaatatttttctttgtctaggggtaatgacgtggcttgtgataatatgataattttgatacagttgacagatattttcccatgacttgtagcaatgtattgttagcaaattaatgccagatatctctgtatactgacttcacttttcttttgtcagagataaaatgagattaggtcagaaatttcaatggaattattaactgtaatatttatgcccccagaacatattctcaataagatttgacactaaatgtaattgggataaaattactttatttttctggaatgtttggttgtgtgtgaagttaaaaattacaagttcaatcagtaaaaaatgttaaatgaccatttactgaatgttagacactaagctaaacactgctggcgtaaaaaagatataatacatgtgcccagtt

SEQ ID NO: 646763 - DNA, 597 bp, Homo sapiens
cataccacctttcttctcacctctttctgagggaaacaaaagggaaagaaaactgcatcatcatgctttccagagtgccagcagtagtatctggtacacaggaggccctcaatgtgtgtttattgaattaaactgcatttttaaactttgttaaatcttagagacaaatctaacaaattccacaatatttttctttgtctaggggtaatgacgtggcttgtgataatatgataattttgatacagttgacagatattttcccatgacttgtagcaatgtattgttagcaaattaatgccagatatctcygtatactgacttcacttttcttttgtcagagataaaatgagattaggtcagaaatttcaatggaattattaactgtaatatttatgcccccagaacatattctcaataagatttgacactaaatgtaattgggataaaattactttatttttctggaatgtttggttgtgtgtgaagttaaaaattacaagttcaatcagtaaaaaatgttaaatgaccatttactgaatgttagacactaagctaaacactgctggcgtaaaaaagatataatacatgtgcccagtt

SEQ ID NO: 646764 - DNA, 597 bp, Homo sapiens
ggtattgagtggccccacctatggtatttgctacaaaaatacaagtgtgtaaaaggcaggaatgatgtgtcatgggaattcatgaaagaaaataactttgggctataataaacaggggtaatttaaacccctsacattaaaaatagtgtctgcagtgttttaatggatgaagatggtcagatttagcacattgtgggtgaatcaaatatatatatatatatgaactgatacagaagtagaaaagattaatgtttaattaaaaggtaagcagcttaatatattccaaatgcaaagtaagcttatggtagtatcagaaagtgtactagcttggtactaggttagcaaatgagcctatggatttgtcttttatttgctatgtaattaccatatttgaagatgcatacattgtattgacggctttatttatgtttttatttaattcccaaatgatattaaaaagaaagcatcatgacatttttatagaagagggaactgatgaccagtttaccttgatgatctaaggttatacaatttatcattcaagaaacattgaaagtttttgacaagggaagtaacatgatggaaagtgtaagttcc

SEQ ID NO: 646765 - DNA, 573 bp, Homo sapiens
tttaataacagccttacagcttcctgatgatcaaggtcaatcatccctaccaagggatgatttcctggttcctggaaaaaggaagcccacagatctcagggaggggctgtagcttatagcataatgaggctctttctgtgtcccatggtgaaaatgtaccccttttgaagaccaagacctctagcccagagttgcatgggggaaagccaaagtcccccagtgggccattggaagcaacataagtggggccattcccgcttccaccctttcagagtttccttttggggacagacccccatataaagtcttttactcgatgttgatatgcgtcttttgaaggatggtgctccatccttgcaaagcagagctaggacttcagccatgtctttggcaggctattccaatgatcagatcatacattgcaccaccccaaaccagaagctgtggttgatctgaccagtgtgygatctgaccagtgaatgccttagcgatgattccatttctgcatttctcttgctacaaagtgggttctttggtccaacacgatataatatggagtcctggactgatggg

SEQ ID NO: 646766 - DNA, 565 bp, Homo sapiens
actgaagagatactacttttgtactgctgctgttgtacagtagacggtcactgggtccacccaactttgtaatttggtggggctcactgaacagcacaataagcagttttgaactcatagtgactcwgggttccatgtttaggagttttatgtcaaccaggggctgatcaaaagttgttttttaaaagccatatacttttttcctggagatggaccccaggagcatacggtgtggtttatattgaaggtaaatctgggaaacaccagcagaaatataaaggggtgaaacaaggaagaaaagaaaataggcaagaaagtattttttaaataaaggaagttacactgtgggtatccagtggttaatctttccagagaaggctgtgttccagtgtaaaatgcatgtctcaggtgtatcccacctgagggatgcggaacctgggttatttgtacaacagcccttgttagtcattagttgaaggctgtttctagacagggcaataatttctgcctcttccagcttgccttatgggcagcaaaatgagctgtagaatgtggagaaagcccc

SEQ ID NO: 646767 - DNA, 565 bp, Homo sapiens
actgaagagatactacttttgtactgctgctgttgtacagtagacggtcactgggtccacccaactttgtaatttggtggggctcactgaacagcacaataagcagttttgaactcatagtgactcagggttccatgtttaggagttttatgtcaaccaggggctgatcaaaarttgttttttaaaagccatatacttttttcctggagatggaccccaggagcatacggtgtggtttatattgaaggtaaatctgggaaacaccagcagaaatataaaggggtgaaacaaggaagaaaagaaaataggcaagaaagtattttttaaataaaggaagttacactgtgggtatccagtggttaatctttccagagaaggctgtgttccagtgtaaaatgcatgtctcaggtgtatcccacctgagggatgcggaacctgggttatttgtacaacagcccttgttagtcattagttgaaggctgtttctagacagggcaataatttctgcctcttccagcttgccttatgggcagcaaaatgagctgtagaatgtggagaaagcccc

SEQ ID NO: 646768 - DNA, 565 bp, Homo sapiens
actgaagagatactacttttgtactgctgctgttgtacagtagacggtcactgggtccacccaactttgtaatttggtggggctcactgaacagcacaataagcagttttgaactcatagtgactcagggttccatgtttaggagttttatgtcaaccaggggctgatcaaaagttgttttttaaaagccatatacttttttcctggagatggacyccaggagcatacggtgtggtttatattgaaggtaaatctgggaaacaccagcagaaatataaaggggtgaaacaaggaagaaaagaaaataggcaagaaagtattttttaaataaaggaagttacactgtgggtatccagtggttaatctttccagagaaggctgtgttccagtgtaaaatgcatgtctcaggtgtatcccacctgagggatgcggaacctgggttatttgtacaacagcccttgttagtcattagttgaaggctgtttctagacagggcaataatttctgcctcttccagcttgccttatgggcagcaaaatgagctgtagaatgtggagaaagcccc

SEQ ID NO: 646769 - DNA, 565 bp, Homo sapiens
actgaagagatactacttttgtactgctgctgttgtacagtagacggtcactgggtccacccaactttgtaatttggtggggctcactgaacagcacaataagcagttttgaactcatagtgactcagggttccatgtttaggagttttatgtcaaccaggggctgatcaaaagttgttttttaaaagccatatacttttttcctggagatggaccccaggagcatacggtgtggtttatattgaaggtaaatctgggaaacaccagcagaaatataaaggggtgaaacaaggaagaaaagaaaataggcaagaaagtattttttaaataaaggaagttacactgtgggtatccagtggttaatctttccagagaaggctgtgttccagtgtaaaatgcatgtctcaggtgtatcccacctgagggatgcggaacctgggttatttgtacaacagcccttgttagtcattagttgaaggctgtttctagacagggmaataatttctgcctcttccagcttgccttatgggcagcaaaatgagctgtagaatgtggagaaagcccc

SEQ ID NO: 646770 - DNA, 441 bp, Homo sapiens
taaagtcattatatagatgggttatatatatataggtattttaaatatatttttatatatattttatatatatatttataggtatttaataatgacttttatatatatataaaacccatctatataatgactttatatgtctttatatatatttatatatatatctctttatataagtcatatacataaattcycatgtaggaaattctatagaaatgatatatatatataaatatataaatgtatatataaatggatataaatatatattcaaacatacatattcagcatacagatgaaaaaaataagactggaatagaaaagggtgctttttttttggttgttaccactaacgtaatataaatgaaatgctaccactcatgaagtgtacaatgtaatgcttactaaataaagagataccaaaggacatttaatctgaag

SEQ ID NO: 646771 - DNA, 430 bp, Homo sapiens
tttgtgatagctattgacctggcaaggaaaacattaggtaactttttaaaaattgttattattaagcaagggacatttcttgacttctcttaaatgccatgaatgattaaatagtgaattagagagttctgtatcttttaaaaaattactacactaaaactttgcttgcattcttataggataaatgtatattgcacacaaaatcacatgtatgatttaaatcttagtgaagacttgcatgcagcttatttctgataatcatttgattactcctcagtccaaataaaaaaaaatctaggtagcaaggcrtttattcacatcattcatttttgtgcaacaaaatagtcttgcagttgacagtgaacttcagaatgcacgttttcaactcagggcaataattattaacatgaatattcaccttatgaatatt

SEQ ID NO: 646772 - DNA, 543 bp, Homo sapiens
gtaattcagaattttcttgaataccaaactgattatgccacatgcaagcttaacagtgattaatagttccacatttccttctggataaaatacagacttgttaacatggcacctagtaccagatccggctgaatattaacttattaagtaaatgaatgaaacttctatagaatgttttctctttcatgcatgccttgaaaagttcacttgtgtatttctatagcagtccttacttatgcttcttatagtacttttatgattgtcaatttacttgtttggcttccatacttgggttttaaattccttaaaatcaaggacagcatcactgattattttatttccagcatatagtatgattccttgtacccagtatgttctaaagtattgagtatatgaatgaatagacagttgttcctgctagggatcagaaagcaaatttagagtgttgtgtagggggttcatttcttgagtattgatcrcaattgatttttgtctaattaggtagagactcgtattcatcagaattgcaagggacatcaattc

SEQ ID NO: 646773 - DNA, 545 bp, Homo sapiens
ctgtacacattccagttggtaaggagctgttgggttgtgtagtagatactcttgatcatgtccttaattatgtgggtccagtgattccaaaacctatagacaagttggttagaaaaatcttggaattattcctcaaactttgttgcagaaactaagtagtctggcattaaggctttgggttgcttcgtgttagttagttgtggtccgtgtgaactgattattgacaaccgacagactggcaaaatttaaattgctattgacacaatcattatacactccaatgatctgatagaagaagccatattgtctctacattgcaacgagttaagagatgattttccagttggtgaagagacttacacatgtagatgtcatgaagtaagctattgtggttcagctgytatttctgatgttgccccacttcagtacctggcttcttattctggctgttctatgggagaatattttagagataatggcaaatgtacatttgccatctatgatgatctatccaaacaggctggtgattgctatcagatgtccct

SEQ ID NO: 646774 - DNA, 600 bp, Homo sapiens
atttactcctagaatttcaaattactgaatatctcaaatcttttactttaaaatacagctatgtccttaacttcaaaccatctgctgaacatgtagatacccttggaaactgcaagtgtaagaatgaagtgttctaaaccttggagtggaagcyttcagctgggagtcattccaatggtctacagagagatggtcaacatcagaaccagagtaatagcagtgaagatgtaaaggagaatatgaatgaaaaaatgtgcaccagattgaaatcttatgacttcaaaaattctcttctattggaaaaatggagaggaagaggaaagggtctatgatgacacacaagtttctgacttggcaacctgaataggtataagaagtatcttttctctttgtataagatgatagaataactaatgagaataatttcagagtttgggactgagatgtgttgagaacctccaggtaaatatatctgttaaggactagcatatggggcttgaagtctaggagtgaattccagacatgaattgaaaccatgatcttgggagatataaccctgtgagaacatgtggaaacataatgaatagaaaatacaataca

SEQ ID NO: 646775 - DNA, 620 bp, Homo sapiens
gctgttccttctttgctcagcctagttagaggtttattgatattgtaaaagacacatttggtttcattgatttttttttaatttgtatctctttctaatatattgattacttccttctactttgaatttttctttttcaagattttgaaggtagaatttgagaccattaacttagctcttttttttcctaatacaaacattttaggttacacatttccttctaaaccccactttagctacattccacaaattttgctttgatgtatttaatcatcattcttccccaaatatttttgagttactttattactttttatttgatccacagactatttagaaatttgcttattttccaggtataggggatttttgataaatattttgctatttatttayagtttaaatcttttatggttcaataatattctgttactttaattctttcaaattaattagtcttgttttatatcccagaaaatgctctatattggtgaatttttcatttgcactagaacagattatgtattttgtaggtgttgggtggactgcttataaatgtctatcagttcaagtttgctaatattacatttcatgtgttttatatccttgttaatgttctg

SEQ ID NO: 646776 - DNA, 567 bp, Homo sapiens
gagttacttttagaataggctagcaaactgactatgccactgacagccttagctttccagctcttccatccctccttgcacgcgacctgctctgtttttgctgctggtcttggtgctgacatgggtggagctgactgcagacaagatattaaaacccatccatcaggatcaggagctttttctcagcaccagatggaaaaagctctggatcattctgttcagacaaaagaattcaacttttccccctgatgaccctcttggtcttgctgccagggttctctcttattttcattgacaaataacactccctgttgggaacaagacatcctgggctctgtgtttcagagggagttggtaaacttctaaagccactcaatcttcatgctgggattttacagcacccctgtggtcctccataattgctcggaaatgcatggggtctcccgtcatgtkgcttaattaaaattcagttctgtgcaacacagtcacacttaagaggtgtgttttttttctttctttttcctgctatcattttcagacccctgattgtgatgctcccttgcttaa

SEQ ID NO: 646777 - DNA, 567 bp, Homo sapiens
gagttacttttagaataggctagcaaactgactatgccactgacagccttagctttccagctcttccatccctccttgcacgcgacctgctctgtttttgctgctggtcttggtgctgacatgggtggagctgactgcagacaagatattaaaacccatccatcaggatcaggagctttttctcagcaccagatggaaaaagctctggatcattctgttcagacaaaagaattcaacttttccccctgatgaccctcttggtcttgctgccagggttctctcttattttcattgacaaataacactccctgttgggaacaagacatcctgggctctgtgtttcagagggagttggtaaacttctaaagccactcaatcttcatgctgggattttacagcacccctgtggtcctccataattgctcggaaatgcatggggtctcccgtcatgtggcttaattaaaattcagttctgtkcaacacagtcacacttaagaggtgtgttttttttctttctttttcctgctatcattttcagacccctgattgtgatgctcccttgcttaa

SEQ ID NO: 646778 - DNA, 567 bp, Homo sapiens
gagttacttttagaataggctagcaaactgactatgccactgacagccttagctttccagctcttccatccctccttgcacgcgacctgctctgtttttgctgctggtcttggtgctgacatgggtggagctgactgcagacaagatattaaaacccatccatcaggatcaggagctttttctcagcaccagatggaaaaagctctggatcattctgttcagacaaaagaattcaacttttccccctgatgaccctcttggtcttgctgccagggttctctcttattttcattgacaaataacactccctgttgggaacaagacatcctgggctctgtgtttcagagggagttggtaaacttctaaagccactcaatcttcatgctgggattttacagcacccctgtggtcctccataattgctcggaaatgcatggggtctcccgtcatgtggcttaattaaaattcagttctgtgcaacacagtcacamttaagaggtgtgttttttttctttctttttcctgctatcattttcagacccctgattgtgatgctcccttgcttaa

SEQ ID NO: 646779 - DNA, 617 bp, Homo sapiens
atgagccagccatagtctacacattttgcatgcatctaaagcctcaattaatccacacagttaccctgtaagatagttacaattacatttcacacaggaggacactgagatccaagatgtttaagtagcttccctaatgtcatacagcttttggcacacatggcagtaaatccatagggtctggatagggtctggttcttgacgactgtacttttttttttttttttttttttgtagatgttgtctcactctgtcacccaggctggattgcggtggcgcgatctcggctcactgaaacctccgcctcctgggctcaagcaattctcttgcctcagcctcccaagtagctgggattacaggtgcgccaccacaccccactaattcttgtagagacagggtttcaccatgttggmcaggctggtctcaaactcctgacctcaagtgaaccgctcacctcgacctaccaaagtgctgggattacaggcctgagccactgcacctggccgaggactgtgctctttaacactagggaatatatcttctcacaggaatgggaatatcaggtaactaatattgtgaaaccatctagatgcaataattggggatttgttaagaaa

SEQ ID NO: 646780 - DNA, 405 bp, Homo sapiens
gaattcttcaaactatagctctcaactrgtggggcaagctggtcaaaacaagttacagttataggaataaaatttctctaatcctggctcagcaaagagcttcccaaaggaactgcaggtgaagtaaaagaaagaaggcaacttacacagcttattcccctctaattcaaaccagctctagtactcttatctaaatctggcttaaaatttctttgtctttgcaaattgttctcctttctctccactccaagcctccttccttcatactttctaatcattctctcttcccttcagtagctgactgaatatgtgtatggtattaagaggcacttggagcctcttatgacaactatatttgtatgagaatatttgctctggatgactttgtgtaaagtattaacctac

SEQ ID NO: 646781 - DNA, 405 bp, Homo sapiens
gaattcttcaaactatagctctcaactggtggggcaagctggtcaaaacaagttacagttataggaataaaatttctctaatcctggctcagcaaagagcttcccaaaggaactgcaggtgaagtaaaagaaagaaggcaacttacacagcttattcccctctaattcaaaccagctctagtactcttatctaaatctggcttaaaatttctttgtctttgcaaattgttctcctttctctccactccaagcctccttccttcatactttctaatcattctctcttcccttcagtagctgactgaatatgtgtatggtattaagaggcacttggagcctcttatgacaactatatttgtatgagaatatttgctctgratgactttgtgtaaagtattaacctac

SEQ ID NO: 646782 - DNA, 587 bp, Homo sapiens
gaaccagctgcttatattcttttgtggcctcgtttcctactcacagcctcaccagcactggcaactgtctgcacatttgtatccaacatctccaaattgatttgtagaaaaaggtaactggggtatgaattgtgtgagttctggtgagctcttggccaacaagttgctatgcacccttgcacaataaatgatgccacaggtgacatttctttttctgtaaaatcagacttttctagatctggcactaaatgtttcttaactctaaagataaggattacattttggtcctctgacttcttagattttgaaaaatgtatacatactgtaaagggttatcttgcctcattgaaggttcaaatggtatggtgataagaccatattaaaagcatttataaaaggttcatggtaaagagttcattatggttcattaaatcccttcatgcttttatccactytagttactgtatttcctgtaaatgggatttatgccagggccacgttaacaccatttcacattctgctgtgctattacccacggagcttgaatcaattgaatgaaagaggtcttttacaagtgtaatgatttt

SEQ ID NO: 646783 - DNA, 544 bp, Homo sapiens
ggcaaactgtagcccgcagatagtttgggtgggcaaactgcatcaaacacaaaaactttatctcagtactaaagatcagatttctgttgcttcataaaagtgcaaaaatattaaccattaatttttaattaaagccagtgtgaatgttctcaccaacactattctagtcaattgcataggctgtacatatttttaaaatgtgtattctcttatgggactgcgtaaaattatttttattttgagaggagaagttttgttttataagttttttatttttcctgaattagcatttattagaaagagakaaaaagttgctcagcttctatgtaccacgctcaaataaaaggaatcagggctccttggagaaatggcagattccattgttggacggggagaatacaagtcaagcctgagtcatcttctggtgtcagaaataaggaagtgctcaaaaacgtatggaagctgtccaaggaagaaaagctaactggaaagagctccaatggccaaagtaggaacaacctgagaaacaaatagatgacattat

SEQ ID NO: 646784 - DNA, 544 bp, Homo sapiens
ggcaaactgtagcccgcagatagtttgggtgggcaaactgcatcaaacacaaaaactttatctcagtactaaagatcagatttctgttgcttcataaaagtgcaaaaatattaaccattaatttttaattaaagccagtgtgaatgttctcaccaacactattctagtcaattgcataggctgtacatatttttaaaatgtgtattctcttatgggactgcgtaaaattatttttattttgagaggagaagttttgttttataagttttttatttttcctgaattagcatttattagaaagagagaaaaagttgctcagcttctaygtaccacgctcaaataaaaggaatcagggctccttggagaaatggcagattccattgttggacggggagaatacaagtcaagcctgagtcatcttctggtgtcagaaataaggaagtgctcaaaaacgtatggaagctgtccaaggaagaaaagctaactggaaagagctccaatggccaaagtaggaacaacctgagaaacaaatagatgacattat

SEQ ID NO: 646785 - DNA, 564 bp, Homo sapiens
tgtcatttcatcagagtcccattctgactttccctccactgctgtctctcataacaccctctgctgctgtgtcacagcacctgtcacatttgtgggatttggtaggcatttgtgtgagtagatgtctctcatttccactaaagttgaagtggggaccatagcttactgtaaaaatttggcttgtagacaatggctaattaggctcataatggccctctgctaactttttggctctatttttctcatatgtaaagtgtgatgatggttcacagagtatatgtacatattgtttttatatacacatttttatatatgacatatatacacatttttatatatgacatatatacacatagtgtatatctttggaaaaattacgtttagtaatgatactgtgaaacacttcatggtgcctatcacatatcttgtcacatactgtgtgtatataatatgtatatgagaatatatataaatatacatgcatcatttataaaaggaccataktaattattacgcaagtgcttacttacatgggattttgttcattaccaaatgtgcaatggc

SEQ ID NO: 646786 - DNA, 548 bp, Homo sapiens
ttttgtgcagcataaatctactgcggcactatgggctatggtgggggacagataatgtatggrggtgagggaatggcctgagctggaaatgccctggtttagaacagggcctgggatgggcccatcagggagtttcccaaaatcgggttcccttctttatcaaacttagagtgacactgattagcccaaagttttccttttttacattttagacatatttcaggatcagcagttttcttttttcacctatctggtggcctgacttgctgatttctttttttacattctttttagtatgaccatgcttcccacagttaaaacaagctccaggaaatagagtatttcctttatccactctcagtcctgccatcgcctgtgccaacaaagtatctctgatatcatcacaggccttgttataatcaactaaatgtgctttccctctgataggtcacagagcagcctggcaatagggattagcattgtcaaaactaataactgcaacactatatcctaagcagccaaatctgcaatcatctttttcagagact

SEQ ID NO: 646787 - DNA, 548 bp, Homo sapiens
ttttgtgcagcataaatctactgcggcactatgggctatggtgggggacagataatgtatggaggtgagggaatggcctgagctggaaatgycctggtttagaacagggcctgggatgggcccatcagggagtttcccaaaatcgggttcccttctttatcaaacttagagtgacactgattagcccaaagttttccttttttacattttagacatatttcaggatcagcagttttcttttttcacctatctggtggcctgacttgctgatttctttttttacattctttttagtatgaccatgcttcccacagttaaaacaagctccaggaaatagagtatttcctttatccactctcagtcctgccatcgcctgtgccaacaaagtatctctgatatcatcacaggccttgttataatcaactaaatgtgctttccctctgataggtcacagagcagcctggcaatagggattagcattgtcaaaactaataactgcaacactatatcctaagcagccaaatctgcaatcatctttttcagagact

SEQ ID NO: 646788 - DNA, 548 bp, Homo sapiens
ttttgtgcagcataaatctactgcggcactatgggctatggtgggggacagataatgtatggaggtgagggaatggcctgagctggaaatgccctggtttagaacagggcctgggatgggcccatcagggagtttcccaaaatcgggttcccttctttatcaaacttagagtgacactgattagcccaaagttttccttttttacattttagacatatttcaggatsagcagttttcttttttcacctatctggtggcctgacttgctgatttctttttttacattctttttagtatgaccatgcttcccacagttaaaacaagctccaggaaatagagtatttcctttatccactctcagtcctgccatcgcctgtgccaacaaagtatctctgatatcatcacaggccttgttataatcaactaaatgtgctttccctctgataggtcacagagcagcctggcaatagggattagcattgtcaaaactaataactgcaacactatatcctaagcagccaaatctgcaatcatctttttcagagact

SEQ ID NO: 646789 - DNA, 548 bp, Homo sapiens
ttttgtgcagcataaatctactgcggcactatgggctatggtgggggacagataatgtatggaggtgagggaatggcctgagctggaaatgccctggtttagaacagggcctgggatgggcccatcagggagtttcccaaaatcgggttcccttctttatcaaacttagagtgacactgattagcccaaagttttccttttttacattttagacatatttcaggatcagcagttttcttttttcacctatctggtggcctgacttgctgatttytttttttacattctttttagtatgaccatgcttcccacagttaaaacaagctccaggaaatagagtatttcctttatccactctcagtcctgccatcgcctgtgccaacaaagtatctctgatatcatcacaggccttgttataatcaactaaatgtgctttccctctgataggtcacagagcagcctggcaatagggattagcattgtcaaaactaataactgcaacactatatcctaagcagccaaatctgcaatcatctttttcagagact

SEQ ID NO: 646790 - DNA, 513 bp, Homo sapiens
attgggtgcacattgtcataaacacgggaataatagacactggaaaataagaacggggagggacagagtgggccagggttgaaaaactacttcttgggtcctatgctcactacctgtgtgatgagttcaattgtgctgcaaacctcggcacccctaaatatgcctttgaaagaaacctacagaggtaccacgttaatttagaatacaaactagaaaaaaaagagaaaagtttactataaatagagaacagaaatttctttttmagataaaatttattgaagtaaaaaatgggttaaactttcataaagggcagagttttctaagaatttcaaagcaatccattcattgcaaaagatggctttaattacttaattttttttttttgagacagggtctcactctgtcaccaggctggagtgcagtggtgcagtcttggctcactgcaacctccacctcctggcttcaagcaattctcctgccttagtatcccaagtagctgggactacaggtgcg

SEQ ID NO: 646791 - DNA, 513 bp, Homo sapiens
attgggtgcacattgtcataaacacgggaataatagacactggaaaataagaacggggagggacagagtgggccagggttgaaaaactacttcttgggtcctatgctcactacctgtgtgatgagttcaattgtgctgcaaacctcggcacccctaaatatgcctttgaaagaaacctacagaggtaccacgttaatttagaatacaaactagaaaaaaaagagaaaagtttactataaatagagaacagaaatttctttttaagataaaatttattgaagtaaaaaatgggttaaactttyataaagggcagagttttctaagaatttcaaagcaatccattcattgcaaaagatggctttaattacttaattttttttttttgagacagggtctcactctgtcaccaggctggagtgcagtggtgcagtcttggctcactgcaacctccacctcctggcttcaagcaattctcctgccttagtatcccaagtagctgggactacaggtgcg

SEQ ID NO: 646792 - DNA, 457 bp, Homo sapiens
catctctttttcactggctctacactttcttaagttttgccatcctcatggaactgtcagccagcacactgaaacgattctcagaaaacaaaagcatcatcaagttctcagggtttcggtagagattgaaggccaacagacmtaagactcattcagaaatacttagctgagcaataacccttcataagcagtcacttgacaggtgacattttaaatctcctgtcaattactatgtcattggcttacacttgttctcaggaaaagttccaaatttttcaccatgaaatgaaaacacccatatcaaagtaattctcgtcaagttactcagccttgtctctcgccacttactgcactctgtcctttgctctagcaccaaactggatggagtggaactctgcagggctcttcctcacctctggctctttgccttcccctcttccctctatctgggaagctt

SEQ ID NO: 646793 - DNA, 586 bp, Homo sapiens
aattttacaccgattttttatttctaatttagatgccttttatttctttgtcttgcctaattgctctggctagaactgccagtgctacgttgaatacaagtggcaaatgcaccatccttttcttctagatgttaggaaaacagctttcagtgtttcatcattgatcatgatattaactgttgggtttttgtacatcccattgtcatgttgcagaagatcccttctatgcctagtttattgagtatttttattatagaagggtgttgtatttcatcaatgttttctctgcatcaattgaaataatcacgtgcttattcattttactgttacagcatattacactgattgattttttatatgttgaaccacccttgcattttggggataaatctcaaagggtgatagtttacaatcctttgattatacagtattgctgctagtattttgctagtattkctagtattttgctgagatttttgcttatatattcataggggatatagtgctgtatttctctcttttgtgctctctttgtctttggtataaggataatgctgttatcaaaaaatgaattagcaagtattcc

SEQ ID NO: 646794 - DNA, 619 bp, Homo sapiens
atctgtttccctttcacattttccccattttgtgagcatttccttacttcctaacatgacaaaatatttcaaactaatcttgtattttccctgcccaatcctgatatcaaatatgtccccaaggagccttggttcctttaattggagaatggtgttctcattgttactgggatgatgttgtttctaggcccttttgttagaggagctagaaaatatatgtatgtatactcacacatttatacacatctgtacttatttatacrattatccatctgtacgtatactaaaaacaatgatttcatgaaacttttgatcccaatccaacactagataaagactatataggcccatttatttgcaaatcagcacataaacatagaagaattattaacaatataagctgtagcttatgctaaatgttggttggaacagacaataagttatggagaacttcagaggacactaaggttggatgggattttggaagttgtgcaggtcaatgccactccagctatttgctgagtttcactaggttaatacatgaacaacaacaaaaataacatagatcagaagttaaagatcattttattgactatctgccgtgtctgtgccattgcag

SEQ ID NO: 646795 - DNA, 619 bp, Homo sapiens
atctgtttccctttcacattttccccattttgtgagcatttccttacttcctaacatgacaaaatatttcaaactaatcttgtattttccctgcccaatcctgatatcaaatatgtccccaaggagccttggttcctttaattggagaatggtgttctcattgttactgggatgatgttgtttctaggcccttttgttagaggagctagaaaatatatgtatgtatactcacacatttatacacatctgtacttatttatacgattatccatctgtacgtatactaaaaacaatgatttcatgaaacttttgatcccaatccaacactagataaagactatataggcccatttatttgcaaatcagcacataaacatagaagaattattaacaatataagctgtagcttatgctaaatgttggttggaacagacaataagttatggagaacttcagaggacactaaggttggatgggattttggaagttgtrcaggtcaatgccactccagctatttgctgagtttcactaggttaatacatgaacaacaacaaaaataacatagatcagaagttaaagatcattttattgactatctgccgtgtctgtgccattgcag

SEQ ID NO: 646796 - DNA, 619 bp, Homo sapiens
atctgtttccctttcacattttccccattttgtgagcatttccttacttcctaacatgacaaaatatttcaaactaatcttgtattttccctgcccaatcctgatatcaaatatgtccccaaggagccttggttcctttaattggagaatggtgttctcattgttactgggatgatgttgtttctaggcccttttgttagaggagctagaaaatatatgtatgtatactcacacatttatacacatctgtacttatttatacgattatccatctgtacgtatactaaaaacaatgatttcatgaaacttttgatcccaatccaacactagataaagactatataggcccatttatttgcaaatcagcacataaacatagaagaattattaacaatataagctgtagcttatgctaaatgttggttggaacagacaataagttatggagaacttcagaggacactaaggttggatgggattttggaagttgtgcaggtcaatgccactccagctatttgctgagtttcactaggttaatacatgaacaacaacaaaaataacmtagatcagaagttaaagatcattttattgactatctgccgtgtctgtgccattgcag

SEQ ID NO: 646797 - DNA, 484 bp, Homo sapiens
attttttaagtgataagacttgaaagttgaaattattctttgatccaagggcaccagaatgaatgttggkttagtaggcatgaaaacaatattcagctctttatacatctctgtaaaagcccttgagtaccaggggcattgtcagtgagcggtaatactttgaaaggaatcttatttcttgagcagtaggtgtcaacagtgggcttaagatattcagtaaaccgtatttgtaaaccgatagtctgtcatccaggctttgttcccatttgtagagtacagacagagctgtgttttatcataattcttcagggcccttggattttcagaataataaatcatcattggtttcgagttaacatcaccaactgcattagcccttaacaaaagagtcagcatgtcctttgaagccttaaagccaggcatcaactcctctctagctgggaacatcctagatggcatctccttctagtagaaggctgttttg

SEQ ID NO: 646798 - DNA, 484 bp, Homo sapiens
attttttaagtgataagacttgaaagttgaaattattctttgatccaagggcaccagaatgaatgttggtttagtaggcatgaaaacaatattcagctctttatacatctctgtaaaagcccttgagtaccaggggcattgtcagtgagcggtaatactttgaaaggaatcttatttcttgagcagtaggtgtcaacagtgggcttaagatattcagtaaaccrtatttgtaaaccgatagtctgtcatccaggctttgttcccatttgtagagtacagacagagctgtgttttatcataattcttcagggcccttggattttcagaataataaatcatcattggtttcgagttaacatcaccaactgcattagcccttaacaaaagagtcagcatgtcctttgaagccttaaagccaggcatcaactcctctctagctgggaacatcctagatggcatctccttctagtagaaggctgttttg

SEQ ID NO: 646799 - DNA, 497 bp, Homo sapiens
gataagacttgaaagttgaaattattctttgatccaagggcaccagaatgaatgttggtttagtaggcatgaaaacaatattcagctctttatacatctctgtaaaagcccttgagtaccaggggcattgtcagtgagcggtaatactttgaaaggaatcttatttcttgagcagtaggtgtcaacagtgggcttaagatattcagtaaaccgtatttgtaaaccgatagtctgtcatccaggctttgttcccatttgtagagtacagrcagagctgtgttttatcataattcttcagggcccttggattttcagaataataaatcatcattggtttcgagttaacatcaccaactgcattagcccttaacaaaagagtcagcatgtcctttgaagccttaaagccaggcatcaactcctctctagctgggaacatcctagatggcatctccttctagtagaaggctgttttgtctccattgcaaatctatttagtg

SEQ ID NO: 646800 - DNA, 497 bp, Homo sapiens
gataagacttgaaagttgaaattattctttgatccaagggcaccagaatgaatgttggtttagtaggcatgaaaacaatattcagctctttatacatctctgtaaaagcccttgagtaccaggggcattgtcagtgagcggtaatactttgaaaggaatcttatttcttgagcagtaggtgtcaacagtgggcttaagatattcagtaaaccgtatttgtaaaccgatagtctgtcatccaggctttgttcccatttgtagagtacagacagagctgtgttttatcataattcttcagggcccttggattttcagaatartaaatcatcattggtttcgagttaacatcaccaactgcattagcccttaacaaaagagtcagcatgtcctttgaagccttaaagccaggcatcaactcctctctagctgggaacatcctagatggcatctccttctagtagaaggctgttttgtctccattgcaaatctatttagtg

SEQ ID NO: 646801 - DNA, 294 bp, Homo sapiens
acagtttgtttagtagaattttacaggaatgccctgctgctcgatggagaattctttgatttcaaaattttctggtggaaccaycgattatgaaataattgctaataaatattttttatcatagtaaatattctcatctgtgataaaaatactttaaaatgccttcctctatagtgagaaattttagctgaaaataatttatggtaaaattatatataattaatattcacttcagatgtaatttcataatttatatgttttcaattttcaaaatgttataggtagaagtaagtt

SEQ ID NO: 646802 - DNA, 272 bp, Homo sapiens
ccaaatttaccccgcaatcactctgccataatgtgtggaattcctcttgtatttacttcctcatagtgagcacagtattcaacccttctcagtagagggcaccggagagatgttgtagaggaaagggctctcctatggtgcctggctccttacagtgagtgggtggtgtgagtgtgagaacatctagaggtgctatacttcagaatctgaggtccctcaggaatcttacagctggggctggcttcctgcakccttctcagcatggacaccac

SEQ ID NO: 646803 - DNA, 600 bp, Homo sapiens
aaaaatattaaggaaatatcatacctttcaaggaaacggtgtttctctagcaatagattccartgaaaaagaaacttatgaaattccagaaaaaaaatgatattaacaaagctcagtgagatacaaaagaacacagaaaaataatacaaataagtcagaaaagcaattcagtgcatacatgagaaacttaccaaagagacagaaatcattaaaaaggcacaaacaatcctggaactgaaatagttaaagaaaaataaagaaagaagaatgaaaaagaatgaataatgcctacatgacatataggacaccatgatgcaactaaatattcagatttttaagtatcatagaagaggaaaagtaaacaaaagggatagaaaacaaatttaacaaaatagctgaaaacttcccacacctagcaagagatttagacattcagatgcagacagctcacaaatttccaacagatacaattcgaaaatatcttcttcatgggacattatagtcaaattgtcaaaagttaaagagatatagtaaattattgaaaaagcaagataaaagaagctagtcatttataagggagccataactggaccaacagta

SEQ ID NO: 646804 - DNA, 599 bp, Homo sapiens
aaagatcttgctccattgtcttctgggtcattttttcttgctttcttgtgtgaatctcatcattttttattgaatgctggacagtatgtgtggaacaggatactgaagtaaatattatttatgatttatgacaggaaacaggtctatctcttctgctatcaggccaggagttgggtcaatctagccagcagttaagctggatttgtttttggttgttgctatcattgcccgggtccccacagccttcccttgccttcagctctggagtgttgctacttgtggtcaatatgggacctgtattaccagagtacatttttaagatttcctgcttcaccctcagcttkgagcaaaccccgaacaccctgcaacgtggaagaagtctctctctttgctcttgtcccctccccaaaggtaggctggagtagcttgtgaataagttcaatacttgagttgggaacaggggtactgtttcttggctcttctgcttccaagggtggggctttctgaatgctcctcatactctctccatggcagctgaattttcccttgtatgtgtagcggtaaggtggtttggggagggaacagatttcctgccacat

SEQ ID NO: 646805 - DNA, 588 bp, Homo sapiens
aaatgtgttttgtatatataaatatatatacacacacacacacacacacacacacacayatatagtgttccattgtgtatatatagttagcctttaaaaagtaggaaattctgtcatttgagataacacagatgaatctagaggatactatgctaagtgaaataagccaggcacagaaagacaaataccacctgatctcacatgtgggatgtaaagaaatggaactcatagaggtagagactagaatgttggttaccagatgctaagggggagaggagagtacaggaaaggagagtattggtaaaagggtacaaagtttcagttagaaagaataagtcctagtgattgattgaacagcatggtgactatagttaatgatagtgtattgtatgtttccaaattgctaaaagaatgaattttaaatatttgtatcacaaataaatgacaagtatgtgaagtgatggctatgttagcttgatctgaagagtcttgaatcactgatgccacctgccccaaacaccccagcagtggctgcatggcatggaaagagaatgtgtgtgtgagagagggagaggacagggattctga

SEQ ID NO: 646806 - DNA, 578 bp, Homo sapiens
aacatggtagaaaaaaaaaaaagacatctgtactcagaccaatgataatgccttctgattgatttcaactttctttcattcacttgtaatagtataaattactgaaggagatacttgagtttttccctacaaatatcaaattacattctagttatttaatcttaacaagtaatgtgatggttgtcgtgagtacacagcaagtaacttctttgttattagttctttcatagtggaatatctatgttagatgaagacatatgtgatgaaattataagacacattaatggagatactcccatgttttataagagccaatgttgtatgctatatactcagactagaatttagaatktattttatgctctataaatattttataactgattcattaatgaatgatggatttgtaaaatgatatccatgcagtgtggaggttactaaaaatatggactgctcacttgaaacaaatgaggacttaacagtcgaccctaccaccataatagtttggaaatgaacaacacacagagggagagtaatattgtctgaactttcaagaaagcagtaagagtgaaaagcaa

SEQ ID NO: 646807 - DNA, 525 bp, Homo sapiens
acagaaggtgagagccaccttctggcttctgcagctttctcacatgccaatgtgccatattttggggtagtgtgtcctgaactccatcaccgattaaactaaacttaacatgcatatttagtttctagtaatgaaaataattttcatttgtattggcattatttgatgctcaaaaaaccatgtgaaataaaaacaaaatactttaatctcatttgacaatcaagcttagtgggtttatgtgacctaaagatattacttagtattaaacgaaattagagttgtcatctaagcctagattttgcccaacaattttcacattaacaaaatgggacttccaatcatgacttattttacaccaataaataatgatactaagagttaactaatactatattgtagaataatgtaaaataagaaacatcgtgctgcttttatggatgaacatgaatttttataaataaagaaayatgtacatgtaaaaatattctcctgaaaatatgtatggctaaaacagaggctgaacaa

SEQ ID NO: 646808 - DNA, 577 bp, Homo sapiens
gttccacttgtgccttaaagtgttgtcaatttgaattcaaagtgttctgtggcagtttaaagaagggacaaagaagacaaagtctgctttatcaaaattccaacaattctatcactgcttgtccaatgattaaggctaatgatatgtctcccaaagcctctggctaacagcattctaacaatcactgtcaatttttcttccctttttctatatgttctctttctgttattgttcactatcagctctactcaacagctcatatcttttttttgttttgttttgtttttttgttttttttttaattttgttagctgctttcctacaggaaagattctcagtatctagtttttccaccatactttctcttctacaattcctgtcttagacaatttgtgttgccataaaggaatgcctgagtctgggtaatttataggmaaaagtgtctcatgtttttgcaggctgtacaagatgcatgctgtccacatatggttttgatgagggtctcacactgcttccactcatggcagaaggcataagggagccagcatatgcagaaaccttatgggcaagagagcta

SEQ ID NO: 646809 - DNA, 567 bp, Homo sapiens
gtctttgttgcaaagcattgactgaagagtaaaaagaaataaagatatgtgcaattggtcctgtttatttcttttagtgatctcaggaatcttaagagcagctatagaaacaaagttatagggtgaattttgatgaccatcttgtaaggtcaagaatcccatgttgtcattctaaagaatgacatctgagttaccatctggtaactcatttattttataaatatttattgagtaccactctatcatgcattgttttatgttctggggttaaagcatcaatcaagatagtcaaggtcaaaattctcacgtaatgcatacagagaaaaaataaaaaaagaaaaataytagacaactataagcactatacagaaaattaaaatagggtaatagagagtgatttggaggccacttgagactagaataagaaaaagacttcttggaagaggtgacatttcagctatacccagattaaatagaagaagtttcttatcagagaacagttagtagacctgttctatctgttagaaactaagactctaaggcaaaccctacatagtaggtaacaga

SEQ ID NO: 646810 - DNA, 363 bp, Homo sapiens
ttaataaaagatgctgagaaaattggatagtcacttgyggaagaataacactggatttctgtctctataaaaatcctggaagaaaacctagaaaaaactctttagtacattggcctagccaaataatttatgattaagacctcaaaagcaaatgacacaaaaacaaaaatagacaactgaaaatcttctgcacaatgaaagaaataataaacagagtgacagacaacctagaaagtgggggaaaatatttgcaaactatacatccaacaaatgactaatatccagaatccgtaaggaactcaaaaactcaaggagaaaaaaaataatttcattaaaaaatatgcaaaagacacaaaaagacat

SEQ ID NO: 646811 - DNA, 512 bp, Homo sapiens
ctacataaatactaagatgaaaacaaatgataaagggctatttgctttctttttcctgaggataaaattaatatatgctccttacacaaagtttagaaaatagtttttaaaggtaataaaaagagcccttggtaattctgccatgaagaatttgggggctgagttgggaagttcacttacggccaggagttcgagaccagactgggcatcatagtgagaccctgtctctacaaaaaaataaaaaataattaaccagscatggtggcatgcaccagtagtcccagctacccacaagatagctgcaaagagctatgatcatgccactgtactctggcttgggcaacagaatgcaatcctgtctcaaaaaaaaaaaaaaaaacaaaagcagagagagaattaactgttaaggtttttggtatgtttttatcataaattacatatctatataaggaaaatatttctgtaaatatatgtaatgcatgtataatgtttccgtaaataatatatgtaat

SEQ ID NO: 646812 - DNA, 572 bp, Homo sapiens
agcccaggagcaatgcaggggtcagtgaatggaaaatcactaagaggaaacatcaggagtaagggagattctggctaaaccgccctaaaagaattcttgctgaagactggccaggrtgatcagacatcacctgcagaatggtgaagaatgaagaacctgatcagatattgagaatgaggggttctttggtaaacttggcagtgttctttgctaatgctggattttgcgaggaagtgcacagtttagcctagctgaagatttacaagcctgactaaagttggccaagcaaagaatctttgttatcaacatattccatcaaacctcacatccctgccttaaatgatcaaaccatccacactcctgtatgctactgttctccatgaaaagttacttcttctttgccttaaccaaaatccagccattctagaaagacaccagaaggctttctgcagcatctaaaattccccacattctaggcccaaatccttttcctttccctgttgcttttagatccacattgtgtaaccctcatctggaaacctcagtttcttggagtcattttttttgggggg

SEQ ID NO: 646813 - DNA, 347 bp, Homo sapiens
atgtttagatacataacctcttaccactgtgttcttattgcctgcagtattcagtacagtaatgtagtacacagatttgtagcctgggagaaagaggctataccatataacctaaacgtggtaggctgtacaatctaggtgtttgtaatactctctgtgatgtttgcaaaatggtaaaattgcctatgratacatctgttaaaacgtatccctatcattcagtgatgtgtgactgtactaaaatgctcaatgtaagtttcaatgccctccataaaattgttgtactgtgaaatacaaatctctcacccatggcctgaatatgtttgcaaactaagcagatcatggga

SEQ ID NO: 646814 - DNA, 347 bp, Homo sapiens
atgtttagatacataacctcttaccactgtgttcttattgcctgcagtattcagtacagtaatgtagtacacagatttgtagcctgggagaaagaggctataccatataacctaaacgtggtaggctgtacaatctaggtgtttgtaatactctctgtgatgtttgcaaaatggtaaaattgcctatgaawacatctgttaaaacgtatccctatcattcagtgatgtgtgactgtactaaaatgctcaatgtaagtttcaatgccctccataaaattgttgtactgtgaaatacaaatctctcacccatggcctgaatatgtttgcaaactaagcagatcatggga

SEQ ID NO: 646815 - DNA, 561 bp, Homo sapiens
caaatgtgctaataatgaatcagctcagtatttgttctgaaaagtctttttctttttggaagacatttttgctggttaaagacttctaggttggcaaaaatgtttttaagtactttaaagaacagctctatagttcctggccatttttttcttacttacatagattccgatgaggagtctgcagtattcttgattgtatgtagtgggttttcccctcatgagctgttctgcccctctctctcggttctcttcttctggcactccaattacatatacagtcaactccttgacgctttcccaagtgcagtgctggagactgaagatttaactgcagtgagcttggactgtgaggattgaagmagagccaaaaactgacagacagttagtaatcattgcagatgtttgctgaacaattgcaaggtagcaagcactattctacttttcacctgtataattctgacttatcctcaagatttatcttgaaattttccagaaagccttcctataccatcctttctcactctaacctctacctcacctctcacactaggttaggtagcc

SEQ ID NO: 646816 - DNA, 561 bp, Homo sapiens
caaatgtgctaataatgaatcagctcagtatttgttctgaaaagtctttttctttttggaagacatttttgctggttaaagacttctaggttggcaaaaatgtttttaagtactttaaagaacagctctatagttcctggccatttttttcttacttacatagattccgatgaggagtctgcagtattcttgattgtatgtagtgggttttcccctcatgagctgttctgcccctctctctcggttctcttcttctggcactccaattacatatacagtcaactccttgacgctttcccaagtgcagtgctggagactgaagatttaactgcagtgagcttggactgtgaggattgaagaagagccaaaaactgacagacagttagtaatcattgcagatgtttgctgaacaattgcaaggtagcargcactattctacttttcacctgtataattctgacttatcctcaagatttatcttgaaattttccagaaagccttcctataccatcctttctcactctaacctctacctcacctctcacactaggttaggtagcc

SEQ ID NO: 646817 - DNA, 574 bp, Homo sapiens
cacggtctttattgtatttgatgctccacaaaatgttgcaagggactcagacaaagtcttgtttgtactatgttacaggtgagaatgctgacatgtagaggggcaagtacttacctgatcacgttgtcttagtatgatgaagcctcacttaaacccatgatctcatgtctwcccttaaactgatgcactgaaatacagtcaggtaaaataaagagttaggggcacattttaaaatacatttaaggtgcatcaaagatttaaaccaatcacttgtaacatctctatttgtcaaactcattggtgatcattagcatttagagagacccaggaaaatcgcaagattctaaataattttcaaaccatagtagaggatactttgtttactgttatttatgtattaaatatcttttaatatactatagctttataagaacagataatccatttttggaatttgtgttttaattggccaaagagttaaatccattttttctagatcctctggataattaggaatcggtagtaaaaagcaattgcacttttccaataaaataatatgctcagttgttcaaac

SEQ ID NO: 646818 - DNA, 574 bp, Homo sapiens
cacggtctttattgtatttgatgctccacaaaatgttgcaagggactcagacaaagtcttgtttgtactatgttacaggtgagaatgctgacatgtagaggggcaagtacttacctgatcacgttgtcttagtatgatgaagcctcacttaaacccatgatctcatgtcttcccttaaactgatgcactgaaatacagtcaggtaaaataaagagttaggggcacattttaaaatacatttaaggtgcatcaaagatttaaaccaatcacttgtaacatctctatttgtcaaactcattggtgatcattagcatytagagagacccaggaaaatcgcaagattctaaataattttcaaaccatagtagaggatactttgtttactgttatttatgtattaaatatcttttaatatactatagctttataagaacagataatccatttttggaatttgtgttttaattggccaaagagttaaatccattttttctagatcctctggataattaggaatcggtagtaaaaagcaattgcacttttccaataaaataatatgctcagttgttcaaac

SEQ ID NO: 646819 - DNA, 441 bp, Homo sapiens
aagatctgtgatttccattctcctttatagtaattgttaagcactcacaattagatggttataacaactatcaaagaaaaacaattattttaataaatatttttcatcattttctcctttctaagccctatgctatgcactaaaaactgcagagaaaatcaacacattctctacctcacagcagatttcttggagagagataggggtggggaggggaataaggkttgctaaatgttgtcaactttgtaatacaactctcaaagggagatagttattagggaggcaaagtgctcaggctcagatttcaggttgcctagatttgaattctgtcttcactgcttctttcatgatttgcccaaattacttaagctctttaaaccacagtttcctcatccttaagatagggataataaatagaacttatctcataaaattactgtg

SEQ ID NO: 646820 - DNA, 406 bp, Homo sapiens
taccactgaactgtacacttaaaatggttaacagagtacattttatgttatgtgtattttaccacaataaaaaaaataaaataccttaggaacattttcatgaaaaagcccacataaaattcattttaatgcacgtgtttatgcatagctttctatttttctcttttctctttatattccaaattctaatcagagaagggaatcccctctgtacctccaggatattcagtaaagaccactggaggtycatgccctagtgacagtgctcatttagctccaaattacagatggctctagactaactcaacaaagtttaaagagaagatttaaaacaacagacaaatactcatcctgaagttactgaactgcctgtcacaacattattcaaaggtagccaataaaatct

SEQ ID NO: 646821 - DNA, 582 bp, Homo sapiens
ccaggcatttttgtcgttagagccgatgcttagatgtgaaattgtttttactgagttattgatgactgtatctacgcagagcctaagtcaaattatagtatattatggaagcaatagcttccttcaatcttttgcattattgtactataagagccacctaagcccattacgaagctgccatgaatgttgtgtctagactataagtcatcttggttttaaccaaattaagtctctactacatgactcagatttagtatcttctgaacatagcaatgtaatctgcagccatgcaattattataagagaaaactaaaacctagtgccttacaaacaatggrcatacaataaatattagttgaactaaaaatatgacctggatctactacaaatctttcctatttttcttctaaaaatgaattaagagttaccaatctataacattttcatcatgtcatcaacattgatatatgaaatgatattcctgggaaaatctggaactcacattagccagaacagaatagactaacacacatcttctgaaagaacaatgcattcttttaatctacaccagtatgcaatcaa

SEQ ID NO: 646822 - DNA, 580 bp, Homo sapiens
gtgtccctgccctaatctcatgttgaatcgtaatccccaatattggaggagggggtctggtgggaggtgattggatcatgggggcggatttccctcttgctgttctcctgatagtgagttcttacgagatctggttgattaaaagtgtgtagcacttcccccttcactctcttcctcctgtwctggccatgtaagatgtgcctgcttcctctttgccttccaccatgattgtaagtttcctgaggtctccccagtcatgctttctgtacagcctgaggaactgtgagccaattaaacctcttttctttataaattacccaatctcaggtagttctttacagcaatgtgaaaacagactaatacagatacaaacagacacttcccaaaagaagacatacaagcagccagcaaacgtgaaaaaatgctcattctcactaatcatgagagaaatgcaaatcaaaaccacagtgagatgccatctcacaccagtcagaatggcaattattaaaaagtcaaataacaacagatattggcaaggctgcagagaaaagggaatgcttatacactgttggtgggaatg

SEQ ID NO: 646823 - DNA, 419 bp, Homo sapiens
tacattctattcactttctaaaactgaacacatccactgcaatcaacaagagttgatagcaatgggcatatggcttacaacgataattgtttaaaataatataatgcgtacataatagaaataagattcactattccaatgatagcaacttaactttctatctgaagttaaattatgtgtctaggtaaattgctggaaaagatagaagtatgatgcaaygactaatctctgctctattgttttcaagtcctatcccacattattttttttttcaagatatatatggaaacttccaattttcttcaactttcctgttctttactctttgatttactttttcatctcatttactttttccttttgctttctaaaatgccttttttgtattccttggggttttctaattaataattttgttt

SEQ ID NO: 646824 - DNA, 588 bp, Homo sapiens
aaactatttcttaaaatgagttcctgtttgcaagaatgaagagaaaacaaatcataggaaatgcagcctgtattgaccccatttcttagtcattaagctatttttgagactaatgagaaaatatgtcaaacatatttaatttttctccacatgaacaaccagaataaacctctgtggtgarcctagcacactgatcaagttttcatatcatttttttaagtgagcacattccccaaacagtttttttgagtgaaatagtcaaggtaaggaaaatttccttgccagccttccttgagcatactgaagcagcagtaacagaaatgattgtaccagccctttcactgtgtaaattcaagctgtagttcagagaacatcaaaggggtcaaagggatagtaggggtttttgtgtcccaacttgtccctattctttttgtggtagctgatcccatctgtctccaagagctgattgtagcttatgctttgtgagtattgttcacaagtcacctaagtaaagattaaacttgtggctcctttcccatgtgttcagtctggtgttaaaatgtaaaaacagccgtctatttgtacaag

SEQ ID NO: 646825 - DNA, 579 bp, Homo sapiens
ttctgtttactaccaaactcttttactgcagtacagaaccatttgcaaaataatctatttgcaaactcacgaaattacctgctattttctaagacatgcaaatctgctatggcttctgccacctaatttacatgtgatattctaaaataattaacagtatagataacagcgttttttaagtatwtttttttattatttcatataaaaataatctcctgttatagtgagaaatatcaaaaggaaacccaaggaatacatatataaaagtgaattttggtccttaatttactcttttactaaaagtctctacatcaatcagaaaagcattatggatcttctgcatgaaataaaagattttctgctgtcttgtgtgcttattccagtataaacatttgaaaaatagtatttttatattcattagttggccattgagagacttcataatttttctgttttgctttcctaggcaggtctaataatttattatataagactatttacaaacatatatcgattctatattctcatagaatgtaacagagactgacatgaaagagaaattgaggtctcctatatgaa

SEQ ID NO: 646826 - DNA, 579 bp, Homo sapiens
ttctgtttactaccaaactcttttactgcagtacagaaccatttgcaaaataatctatttgcaaactcacgaaattacctgctattttctaagacatgcaaatctgctatggcttctgccacctaatttacatgtgatattctaaaataattaacagtatagataacagcgttttttaagtatatttttttattatttcatataaaaataatctcctgttatagtgagaaatatcaaaaggaaacccaaggaatacatatataaaagtgaattttggtccttaatttactcttttactaaaagtctctacatcaatcagaaaagcattatggatcttctgcatgaaataaaagrttttctgctgtcttgtgtgcttattccagtataaacatttgaaaaatagtatttttatattcattagttggccattgagagacttcataatttttctgttttgctttcctaggcaggtctaataatttattatataagactatttacaaacatatatcgattctatattctcatagaatgtaacagagactgacatgaaagagaaattgaggtctcctatatgaa

SEQ ID NO: 646827 - DNA, 377 bp, Homo sapiens
gaattcctcataaagattggggatgctgtaagaaggggtgctgggacctcattgtgcatttgagcttctgtttagacaacaggcttgtgtgtactgcaaaggaagcacaaagggacggacaaagatggtggagctgagaggaccagtggcagagatcgcttgcccatcatctgaaaaggcaaagacatgtgagtctttcaagaataagtgggyactgtggaaaatgtctacttttagcctttttgtctgtactctggctgcccaagggtgacccatggagaaatagtgacaacagaaaagagaatgacaactgagaagtaaccagatgtatattctccatcctcagtccctcctccaggccctaaccaaacaggaag

SEQ ID NO: 646828 - DNA, 555 bp, Homo sapiens
agaaagcccccttccctcactctgcagaacagttgcatccatgtgaccctgagacagaagccctctgctcattatcaaagatgtgacagctgccacttggtcactttagaatcaacagtcctaggccccttattgacagctcccggctcccccagctggactggccagggggattgcctctcttacaaatcccctccaggatgcagcgaatagraaacttgcatttagaaaaaggatggaccaggattctgggtgtgaggggcattatccattgtacaagagggtttccggtatgtcccatcctaaatatctagcttcttttaatgcccttacaatagattcattgtaaggatttgagcgttttagggagtaggtctaaactgaagtctgctgccctgttgttggagtcccggcgtatctggaggtgagaagggcactgccctctgagcaaatgcccagtgaaattgcagaaggaggtgggtgtggggtggggaggaaggaaaagtcatgcgggccacttgtcccatcgggcggcttcacaaggtcatcatcaaa

SEQ ID NO: 646829 - DNA, 571 bp, Homo sapiens
tgtgcattacacttctgttcacattacctgctgcattatcccagcaattttcatttgcaaaagataagttcaaagaaaaaattattaagaatttaagaaggtaacaaccaagtattaaaccaagttgtggcccttctgaacatgggactctgtgtgattgctcagatcataaacccatgaagccakccctgactggttgcatatattatttttgcatagggaaaatgagaggctgtatttacatcttgagcccacattttttgtacctgttttatttgtcattatgtcaaatataatctgtttgcagtgaactgaatgtctgtctgtatctctccaaaattcttacgttgaaattctaaccttccagtgacagtattcgggggtgggtcctttgaaaggtgattaggttatgagaatgaaatcctcatgaatgggattagtgcccttataaaagagatcctcagagagctctctccattctttcctccatgtgaggatacaatgaaaagtcagtcatctgcaatcagaaagaaggccctcaccagaacctgactatgctggcaccctgata

SEQ ID NO: 646830 - DNA, 570 bp, Homo sapiens
atcagggtgccagcatagtcaggttgtggtgagggctttctttctgattgcagatgactgacttttcaktgtatcctcacatggaggaaagaatggagagagctctctgaggatctcttttataagggcactaatcccattcatgaggatttcattctcataacctaatcacctttcaaaggacccacccccgaatactgtcagtggaaggttagaatttcaacgtaagaattttggagagatacagacagacattcagttcactgcaaacagattatatttgacataatgacaacataaaacaggtacaaaaaatgtgggctcaagatgtaaatacagcctctcattttccctatgcaaaaataatatatgcaaccagtcagggatggcttcatgggtttatgatctgagcaatcacacagagtcccatgttcagaagggccacaacttggtttaatacttggttgtcaccttcttaaattcttaataattttttctttgaacttatcttttgcaaatgaaaattgctgggataatgcagcaggtaatgtgaacagaagtgtaatgcac

SEQ ID NO: 646831 - DNA, 493 bp, Homo sapiens
ctactaaaatgacatttacatttatgtgagaggkgaagtaataaatactcgacataatttttgatagtaatataacacagcctgggtcccatatctcaaagccttattttttttttcaatctgagtcacaagtttctttcatattttatgatttctgaaaggaggatttctgaatcaattgatacataaatttaatgtagtacatcctatcgttttgtgttgttttctgtgaaaacttgttaatggcatatgtgatgaagaatggtttcttggtttgaagaaaataatactacagtaccttgagaaaataccacttttaagttctgtgtacaatttcttacggaatattgaaaaccagttcattggattgagccaagaatagatagtacactattcaccaactgtctttctactaaagtgctatattcaaacattctctatatagatcctatcccaccccttttaattagctcatgctatatatgcatggtag

SEQ ID NO: 646832 - DNA, 493 bp, Homo sapiens
ctactaaaatgacatttacatttatgtgagaggggaagtaataaatactygacataatttttgatagtaatataacacagcctgggtcccatatctcaaagccttattttttttttcaatctgagtcacaagtttctttcatattttatgatttctgaaaggaggatttctgaatcaattgatacataaatttaatgtagtacatcctatcgttttgtgttgttttctgtgaaaacttgttaatggcatatgtgatgaagaatggtttcttggtttgaagaaaataatactacagtaccttgagaaaataccacttttaagttctgtgtacaatttcttacggaatattgaaaaccagttcattggattgagccaagaatagatagtacactattcaccaactgtctttctactaaagtgctatattcaaacattctctatatagatcctatcccaccccttttaattagctcatgctatatatgcatggtag

SEQ ID NO: 646833 - DNA, 572 bp, Homo sapiens
attaaaagtaaaaatatttatacgttacgaacatgctttatttgaactgcttaatttttttgagacagatatcagtctcaaataatttaattgtgtactggaaatcatttaaaacattacatatatatatttataccttggttatcagaaatttagaaggctaaaaataaacatcaatcattcttgttaatgtatatrtcataatgataactagtgtcttaattattatgtacttgacactttatatatattatctcaattaattctcacaacaatcttcttagaaagatatactagacaatttgtcattcagttttgacttgtttttcaactcaaggcagcaacgtgaaggtgtaagcaaaaaaaaaacccaacaagctattcacatcgatgagccctttacaaattatttattctatcctcatttgagttatcacttttcttttgcaattagaattactgaaacataaggtggaaaggccagatatgcaaggaatttctgcacttaatcaatattcattgaaaaagatcacattacacatcaaatcttgacacactacaatatttacctg

SEQ ID NO: 646834 - DNA, 572 bp, Homo sapiens
  misc_feature 242: n = A,T,C or G
atttttaaagataaagaatctgaggtttgtaatcatccaaccagtaagttgtggaattggactttggaccaagatattcctgataccaaaatctgggttctgactacactactacattcttaagtaaattttactccattcctaaagaagcttactgtctggaaataacaataagtttatgcagaaagttacaaggattgtactaaattttctcttgttgccttgccttctggaaggctcanggctaaggaatgtgattgggttaatagtttcttttagtcttgagttcctgacacagttacctactctctgtttttcatcacttttggtttcctcttctatctttgtttaaatgtttgatttatcaagagtcttttacacagacatataaattaggccaaatccactgaagaggcaatagctggaaaccttaggaaagaaatccraatatatagtaactatatgtatcaacatgaaactttcactcataatactgtattatgtaaccaaattattctctacacaatatgtccccaatagatgtcagggtttcttgcttttttccacttatc

SEQ ID NO: 646835 - DNA, 598 bp, Homo sapiens
aatcttttcagttaggcttcatcctcaatcaatatttacatagaatacaaatcctctagaaggtwtattcaccctaatgaatagtaatcaatcatgatagagatatattgagtatgccagataattaatttgctaataattacttcattatgagagacagaatagcataatggctaacagcctgcgggctctggactcagacttctagtgttcaaatctcaatgtcacagtttactgagtgtgtgactgctggggataggcccccaaatctgcccataaactggtcccaaaactggccataaacaaaatctctgcagcattgtgacatgtttgtgatggccatgatgcccacactgaaggttgtgggtttacaggaatgagggcaaggaacacctggcccacccagggcagaaaactgcttaaaggcattcttaagccacaaacaatagcatgagcgatctgtgccttaaggacatgttcctgttgcatataactagccagagcccatccctttgtttcggcccatccctttgtttcccataaggaatacttttagttaatctataatctatagaaacaatgtttatcactggcttgc

SEQ ID NO: 646836 - DNA, 568 bp, Homo sapiens
caagtcacattggacagtttgtagttttgtgactgaatctaacattaagtttattagggactttggtctacatgtaaaactcacctggatgttaatggaagagcctctgggtattgaaacagaatatattcagcattttgtctggtctagaagtcaatcagaatgcaattrttcattaagcctcctgcaagcaatagtcactgtgctgtgccaacattcatcaagttaagggccaggaaatgtgattgccaggggcagatctcacagagacagcacaaaagtcagctcgtctcaattacaacgcggcaatggccttcttccttgaaactgcattgtcagaagggaatctgagaggcagttcagaactttttcactgggctcactctcaacaggaatacctgataggaaacaaactaggagacttattttcctgttctcaattttcacaagaatgtttggactatagtgcctgtgactgactcaagaaattgaagaagcaagaattaagaggaacagtgaatatttggtgctacatggaaggagaatattgaagtgggaacacttaaca

SEQ ID NO: 646837 - DNA, 460 bp, Homo sapiens
tctacaaaaagtgaaaaagctggacatgctggcatttgccagtggtcgtagccactgaggaggctgaggtgggaggatcacttgagcctaagaggtcaaggctgcagtgagctttgatcatgccactgcactccaccctgttcatcagagtgagatcctgtctcaaaaaaaaaaaaaaagatttgtcaagtagttaaacaatagtattaaccatctggatttggtgatgtttatgtgggttgtcagcttttttaattaataatttgttgtgacatctttcttcatttgaaataaactttcactctcttactaaattgtatttttaattttgtactctttyttctctgttgtcataagtccatactggcattgctgagatattgacattctgcctggccaacagtcttcgcaggttactactgtatcctactcacccacattctgcctccccctgctcccc

SEQ ID NO: 646838 - DNA, 664 bp, Homo sapiens
ttttggttttttaatttagaaaaaaaatctgcttttcatatctggttttcctatttaaagctatgtgatttaaggaaaatggtttaactcctctgagctttagtgtcatctacaaaatttggataatgatactgagggaagctgaaaagccatatcaaccaacttatacaaaaaataataaacattcacttccatttctaatgcatggtgctgaaaaagtccttgtatgtggaatattgttcacctttaaggaacctgctctcaagagctgatgcgggactttttttagggcagttctgttgtctctggctgttttgttcatttaattggcacctacaagtctctttgaacattaaaataaaataaagattgtggaggaatagaatacaaacacatagtraggtgagatttgcataacagagtatagtaaacgatttgtgcctgattctttttgcattctccttgaatcatttttagcctttattctaagtccccaattattgtcatccttttcccaacaagattgtttctctccgccacggacattctggtcagggtctctgcttaaccatcttgacctcctgaacactctgtttgtcctgataacctgatttatgctcaaatgatgctcttccataggacggcttcctgctttgcccaaaga

SEQ ID NO: 646839 - DNA, 527 bp, Homo sapiens
gaatagcagaactgattaagcagaagaatctaaatttgaagacagattatttaaaaatgtacattcagggaaaaaaggagaaaatgaatgaagaaagcttgctggatgcatgtgataacatcagaaaagcaaatatttgagtcatgggaattaagcaatatactgaatgggaaaaaatactcacaaatatgcatccaatataggcctaatatygagaatctataagaaatctaaacaattcaacaagcaaaaaataaactaccacattaataaatgggcaaaagacatgtacagacacttgtcaaaagaagacatacaagcagccaacaaacttatggaaaacttcttaacatcactagtcatcagaaaaacgcaaatcaaaaccacagtaagataccatctcacactagatgaaatggctattattaaaatgtcaaaaaacaaccgatcttggtgagactgtagagaaaatgaaacacttatacattgttggtgggaatgtaaattagttcagccactgtgggaag

SEQ ID NO: 646840 - DNA, 497 bp, Homo sapiens
ctcactcactctttcttccgcttgatcaattctgctgttgagagaatctaatgcatttttagtatgccaattgaatttttagcctcagaatttctgcttgggttttaaacattatttcaatctctttgttaaatttaactgataggattctggactccttttctgggttacattgaatttccttgagctycctcaaaacacctatttcagattttctgtctgaaagatcacatatctctgtcatgctcggatagggcactgtgttatttcgttcatttagagagatcatatttttctccatggggctgatactcgtggatgtacatcagtgtctggccattgaagaattaagtgttggttgtagtcttcacagtttgtgcttgtttgtacccatctggggaggggggggccaagcacccctgtggccaccaccactggaactgtgctgcatcagacccgaagccatcacagctctgggtctcacccaaggcccgtgg

SEQ ID NO: 646841 - DNA, 497 bp, Homo sapiens
ctcactcactctttcttccgcttgatcaattctgctgttgagagaatctaatgcatttttagtatgccaattgaatttttagcctcagaatttctgcttgggttttaaacattatttcaatctctttgttaaatttaactgataggattctggactccttttctgggttacattgaatttccttgagctccctcaaaacacctatttcagattttctgtctgaaagatcacatatctctgtcatgctcggataggkcactgtgttatttcgttcatttagagagatcatatttttctccatggggctgatactcgtggatgtacatcagtgtctggccattgaagaattaagtgttggttgtagtcttcacagtttgtgcttgtttgtacccatctggggaggggggggccaagcacccctgtggccaccaccactggaactgtgctgcatcagacccgaagccatcacagctctgggtctcacccaaggcccgtgg

SEQ ID NO: 646842 - DNA, 468 bp, Homo sapiens
gcctgcctgtcacatagtcacaaaaaactaccaactactgttaattctgtacactgattcaaacttttttcagctaaaaatacccttgaagagtcatggcatgccactataccttgtgatgtccccatggcactaaaaaaattgtgaagtagattatatttgtttttgcttattaagttgccccatcaattccaccatgtccccttttcaaaccttactaaagatctttctactcttaagagcctttatgtttaatgaaatgagttgagttctatttttactatcatatctaagagtatttyaataaagaaataagatttggtttattggaattttgatagtaatgcataaggaattcatttggaggttacacatttcatcttgtcttagaccttatcacaatgaatatttttcatcacgagatctctctggtattgaactataagaaaaaaagtgaaatgtaagtga

SEQ ID NO: 646843 - DNA, 570 bp, Homo sapiens
accaatactagggcagtatggagaggaaatgtgtggttggagcccccacacagagtcctcactgggcattgcctagtggagctatgagaagagggccatcatcctccagatcccagaatggtagatccaccaacagcttgcactgtgcacctataaaagccataggcactcaatatcagcccatgaaagcagcctagggagctgtgccctgcacagccagaggagagaagctgttcaaggtcttgggaggccaccccttgcattggtgtggcctcaatgtgagacatggggtcaagggagattattttggagctttgagatataattacttctctgatgggtttcagacttgcatggggactgtagcccctttgttttggctkatttctccattttggaatgggtgtatttacccaatgcctgtattctcattgtatcttagaagtaactaacttgttttagattttatatgcttacaggcagaatggacttgccttgtctcagatgagactttggactgtagacttttgagttaatgctgaaatgagctaagactatggggacttaagt

SEQ ID NO: 646844 - DNA, 586 bp, Homo sapiens
tctggatgagcccttacaaaatatagcatgagtttctacttaaaaacaaaaaaacagtatggagcaagttcttggtgaagaatatcactttggtgagagtacaattctattgttttgtgccttcagaatatgaatgatgtgactgctgattagagtttctatagaagttagcacttagataaaagaatctaacattgttagcattataaacacasaggtgagagttcaggaaaatcattactttcagagtctctaattccagagtatgttgacacacaattgtttaactcattcagaaaactggtacaggatgttcttgttagtatgcataggcattatagtttgcattcatcttttcacaaataattaaaaattattgtgaaaagctcctggcaatgttgtcctgattcacttttgtaaatagacagagaaaattcccttaatgcctagaaagaacttttaagaatgccagacactttcttattgagctttcttgagatataattcatatactatacaactcacctacttaaagtatcagtttcacggttttagtatattatcagagttgtacaaacatcatcac

SEQ ID NO: 646845 - DNA, 586 bp, Homo sapiens
tctggatgagcccttacaaaatatagcatgagtttctacttaaaaacaaaaaaacagtatggagcaagttcttggtgaagaatatcactttggtgagagtacaattctattgttttgtgccttcagaatatgaatgatgtgactgctgattagagtttctatagaagttagcacttagataaaagaatctaacattgttagcattataaacacacaggtgagagttcaggaaaatcattactttcagagtctctaattccagagtatgttgacacamaattgtttaactcattcagaaaactggtacaggatgttcttgttagtatgcataggcattatagtttgcattcatcttttcacaaataattaaaaattattgtgaaaagctcctggcaatgttgtcctgattcacttttgtaaatagacagagaaaattcccttaatgcctagaaagaacttttaagaatgccagacactttcttattgagctttcttgagatataattcatatactatacaactcacctacttaaagtatcagtttcacggttttagtatattatcagagttgtacaaacatcatcac

SEQ ID NO: 646846 - DNA, 548 bp, Homo sapiens
tgtttttagatagaaatagtctaaaaaattggctttatatttttaaatgcctggaagcagcgaacagcagggacgggttcagtttatgaaaacttgagatataattctgtcttgggagagcaaagaaggggcasaatcatatccttggaagggaaattgatggatggagaaccctatggatactcacatctgttgaattcctgctcttttccctttgggtgcactgtattcaatagtgcattcgagtcacatccacaccaactgcgaaaatcttattgtggtgttatctctgtgattgctctttcacttgttgaaatttcctatgcaaaatttgcctgcacgaacatcagcttatgcagtgggttaaatggcatttcatgtagttgtaaaaccactttggagagtctgatttttttcttttatgtcatatcatcattgcctatgtttctcaaatgttcttagcataaacggcagtaaaggaaaatttctgtcccatgaaggtgtaatttgcaatttttaaagatagtccattttccttgtgtaggagt

SEQ ID NO: 646847 - DNA, 567 bp, Homo sapiens
ttcccactccacatttaccaacctatcagctgatttatctgattttcatttccctgagaaggaaaatttgacaatttcccatgccatgtttactagtctacctgcaccttctctacctttcttcctgttattatacaaaaactcccttttcgtttctaaagtcaactcgtcttctgtctagtgttttagattctatctcttctcacttatttgagaacattattccagcacttatgtcatttttcttttgcatcataaattattttctctgctagatcatgtgtatcagcrttaaaaaatgccatcaaatctcctgtttatctttctaacttatgtcccatttctctggtcctctttatagcagaaccagagtaagaactatgtctactttgcctccctcctctgattgtcttttgaatctattctcatcaggttttcattcctattactttagcagctaaacagcatttgtcatgatcagtaatggctccatattgctaaatccaaaggataattgtcagtgttcctcttccttgggatatctgcccagtggatcaattgctcact

SEQ ID NO: 646848 - DNA, 551 bp, Homo sapiens
atcattattaatcatagaatttagttttgtaagccaaggcccaaaggtaacattggacagggaagagaaacatctgttattgttgttctctacaaatatttatttgttgtcacttatatacttcaaaagccacctgaattattgtggtctggagtaggctttttaaaaaagtagattttgagggaggaagaagaaaggaaggatagtttggaaataatatatagtttctgttcttattgacattgcttgtactttttattgttcttttgatgtttatggaagtgcttttagacataattaacaatgcgaatcctttgggatcacactgaattgtattaatgaacataattataggtgttgatttygtggggagaaaaatgtgtcctatttaatatgtagttttaacagggaaattgatttgaaaactaaggctaaattaaatatacttatgagaacatattagtagcacatgcaacctctcttcctcacagtctactaggaaagaacagacataaacctcattgtctctgctcagcaagagagaatattcc

SEQ ID NO: 646849 - DNA, 619 bp, Homo sapiens
ctacagtccagcaggcacatgaaacatgtgccttcattactatgtaatccaaatgtatccagccctcactagtgtagtgataataaatagagttcatattaacagaaataactctaattttcctaacttttacctgattgctgaagcatagccttccacctcaccctgaatccacamaaatatttctgcaatggtgtctcccaggtgctctattctgttcctcccaggtgatactggtattatttagcttctgacaagcactgtgatctcacacagcgaacatggttcttttcatttttatttataacccattcctccagcaccctgctttgctatggcacctagctgattttacctgactccttctttcctcggcatgagtgttctccaaagaggaacctcagggtgcatgcaaacagtgcatgctgtcccatcgtctaatcggtgggctacacttggctgaatgcagcataggtggtcactgtttattctgaccacacaccccgaggccttttacagctgtcgccaggagttaaacgcggccagcacagtgggatgctcagcttccccagagctgccagtctaatcaaaagtgttaaggtggcgcctccacatgtgg

SEQ ID NO: 646850 - DNA, 619 bp, Homo sapiens
ctacagtccagcaggcacatgaaacatgtgccttcattactatgtaatccaaatgtatccagccctcactagtgtagtgataataaatagagttcatattaacagaaataactctaattttcctaacttttacctgattgctgaagcatagccttccacctcaccctgaatccacacaaatatttctgcaatggtgtctcccaggtgctctattctgttcctcccaggtgatactggtattatttagcttctgacaagcactgtgatctcacacagcgaacatggttcttttcatttttatttataacccattcctccagcaccctgctttgctatggcacctagctgattttacctgactccttctttcctcggcatgagtgttctccaaagaggaacctcagggtgcatgcaaacagtgcatgctgtcccatcrtctaatcggtgggctacacttggctgaatgcagcataggtggtcactgtttattctgaccacacaccccgaggccttttacagctgtcgccaggagttaaacgcggccagcacagtgggatgctcagcttccccagagctgccagtctaatcaaaagtgttaaggtggcgcctccacatgtgg

SEQ ID NO: 646851 - DNA, 599 bp, Homo sapiens
aaattatattaagtatgtaaagtaagtcattcaatactttttctagtaaagaatagaatgtgtatgtaatggttcacagattttgaatcatgctgtatatacagttttgtactcactgtcaatgaataatgaagatttgcatatgatagtttcttaatatgattttcattagtgtatagtataataattattgggcacaatattttttaaatttatttaatttaaattgtaatttaaatattaatttaattaatcgatttaattttaattaatttaattaatttgcacaattataacattaatgaacactattacacatcaagctttgtgtactaattttatatttataatattggaaaattagaaataatragtaaatagatactttaaagcttggcatatatattgacgtttttcaatcctagcttcacataattatttcggaagcttttaaaaaatgttacctgcgtgtgcactattaaagttttagtttgatcaatctcaggtaggacccaatttcccttgcatttaaaagttccccaggtgattcaagtataaattccagctaaaggctgatattcacattaacaaatttaagc

SEQ ID NO: 646852 - DNA, 599 bp, Homo sapiens
aaattatattaagtatgtaaagtaagtcattcaatactttttctagtaaagaatagaatgtgtatgtaatggttcacagattttgaatcatgctgtatatacagttttgtactcactgtcaatgaataatgaagatttgcatatgatagtttcttaatatgattttcattagtgtatagtataataattattgggcacaatattttttaaatttatttaatttaaattgtaatttaaatattaatttaattaatcgatttaattttaattaatttaattaatttgcacaattataacattaatgaacactattacacatcaagctttgtgtactaattttatatttataatattggaaaattagaaataatgagtaaatagatactttaaagcttggcatatatattgacgtttttcaatcctagcttcacataattatttcggaagcttttaaaaaatgttacctgsgtgtgcactattaaagttttagtttgatcaatctcaggtaggacccaatttcccttgcatttaaaagttccccaggtgattcaagtataaattccagctaaaggctgatattcacattaacaaatttaagc

SEQ ID NO: 646853 - DNA, 584 bp, Homo sapiens
atgtataggcatttaaagaaagcctttttgcttgcagacatagctccccatcacccacctcaatttctctccctaaaggtaatcattgttattattttgtgtatattcatttacaaataatctatgaaaatgcatgcatatatgtgtacatatcctttcttacataagacacaaaataccacattgtacacaatgtgtacacttggctttttttccttaacgttagatattacagctctttccttgtcattagtataaactggattcattctttttaacggttacagagcatttcattktatgagaaaacctaaatatattgatctcatttcagtcaatcaatacttaggcagtttccagtcttttgtgattgcaaacatgctgcaatggaagttgttgcagagatatttttgtgcacatatgccagtctacctgtaagatattccacttgaagtggaatggctgcgtcatatggtttgcatattttggactttgatagatgctaccaagttgtcttccgaggggttggacatgcccaacaaatgtgtgtaggagaatcatcttcaagctgggtgactgggtaa

SEQ ID NO: 646854 - DNA, 624 bp, Homo sapiens
catggtggctcaggcctataatcccagcactttgagaggccaaggggggaggatgacttgaggccaggagttcgagaccagcctgggtaacaaagcaaaatcccagctctgaaaaaaaaaataataataattagctgaatgtgctggcatgtacctgtagtcctagctacttgggaggctgaagcaggaggattccttgagcacagaagttcgaggttacagtgagctatgatcatgctactatactctagctggagcaacagtgtaaaactctgtctctaaaaaaaaaattaaattaataaaaggaaaatacatatatgtataattatttctggaaggatacacaagaaattatgaacagtgacaatctctaggagtaagaccatggtaaggagtatatttgtgcttttcagcttatatactttcatgtctttgaggtttttaaccatgagcatgaattaccataatayaaactattttaaaaccgaaaaaaaaattaatacaaaatctgtaaatgcagtgaatggcaaatatcaaatatatcaaagaaaaaaatgaaggcttaagaaagtgaaatcattatttagtccaaaaaaagagataattttcaataagaagaaatgt

SEQ ID NO: 646855 - DNA, 558 bp, Homo sapiens
aggatttttaggtgatataggcagaaaggacggcaagtttttataactttstctaaatgaactttctaaatgcctgagtattaaaagatagcatgtctataaatcacaatgtatatattactgtatgacctaggaccaatcaaaaccgttacctctgataacattatattgtgcccagtataaaatagatataataatacctcaaacttaaatccgggcattgtcattgaatatcttaagaatatgcaacaaaggtgcttttaaaaatacaagctagtgattgtaccaaatttgtaaatcacataggatagtgggtcattttaagaatattagttatttcaatctataaacgtggatgtctttccttttttgtgttttctttaatttctttcattaatatttgtcatttttgttgtcgaaatcttttacttccttggttaaatttatttctaagtacatttttgtagctattgtaaaaggaattgctttcttaatttcttgtttcagctagtttattatcaatatatagaaatgctactgatttttgtatgttgattt

SEQ ID NO: 646856 - DNA, 515 bp, Homo sapiens
cagagtattgaaccctgcctcccaggtgggtggaagatgcctgtcgccaaactagggccmagcttgccgggtgagatgggtgaactggtgatcccccgagagagtggacgtcagaactacatgttcctggacttcacctcggccagcgaaggagagagagggttaatgttaactgcacgaggcccactctagccttaaattctgtaattcaaacccttcccttggagacaaaacaaacatgacaaggaattctgaggtcaggggacaagaatcacaaagtgggagactgaggaggcagtgtccttcctgcccttggtctactggctaagaaccttcctcagcctgacctttgcacattgcactttcagctctgtttgcaattttcctcctttagtgctgagggaatcccagtgttccatcctgaaatctataggttcctaatgggtggttaaaaaaaaacctcagcgagagaagcagaaaatgtttcctcttcctgaaaaactgtagaaaggcag

SEQ ID NO: 646857 - DNA, 632 bp, Homo sapiens
ggctggtcggggtggaggtcaaggaatatcctcaaggatagctagatgtcctttccagtctggagattctaggcagaccagagggaatggtggcgacctggctgccagctctctggagtcgagaatctgaagcaatgtgagcygccgccggttcatgccactgccagtgtttgccctgcgccatcactatcagcatcaaactcactccctgctttgttaagtgctttgggatttctcaagtagaaaaggtgctatataaaatcaatcacaggaaaccctgctgctggcagctcagaacagctacagtaagcagtgtccactcaatcaatagtccctcaccgagaaggggaaagaataccattaaaaaggtgtgctcttagaaaaacttcccttaagtaagggggggaaatcctaccttacaaagagtgtatatatacagaaagcacacaatatattgttcctctgtgaccaatattacacatgatgggagaaggaacttactgcttactacatacttttgcttttcttttaaccacgcaagaacacaaactgatacacgttgagcctgaaaaaccttgtaggccccgtgcaggaaatgcttattggattcatttataaaatgaaaatggaat

SEQ ID NO: 646858 - DNA, 632 bp, Homo sapiens
ggctggtcggggtggaggtcaaggaatatcctcaaggatagctagatgtcctttccagtctggagattctaggcagaccagagggaatggtggcgacctggctgccagctctctggagtcgagaatctgaagcaatgtgagctgccgccggttcatgccactgccagtgtttgccctgcgccatcactatcagcatcaaactcactccctgctttgttaagtgctttgggatttctcaagtagaaaaggtgctatataaaatcaatcacaggaaaccctgctgctggcagctcagaacagctacagtaagcagtgtccactcaatcaatagtccctcaccgagaaggggaaagaataccattaaaaaggtgtgctcttagaaaaacttcccttaagtaaggggggraaatcctaccttacaaagagtgtatatatacagaaagcacacaatatattgttcctctgtgaccaatattacacatgatgggagaaggaacttactgcttactacatacttttgcttttcttttaaccacgcaagaacacaaactgatacacgttgagcctgaaaaaccttgtaggccccgtgcaggaaatgcttattggattcatttataaaatgaaaatggaat

SEQ ID NO: 646859 - DNA, 632 bp, Homo sapiens
ggctggtcggggtggaggtcaaggaatatcctcaaggatagctagatgtcctttccagtctggagattctaggcagaccagagggaatggtggcgacctggctgccagctctctggagtcgagaatctgaagcaatgtgagctgccgccggttcatgccactgccagtgtttgccctgcgccatcactatcagcatcaaactcactccctgctttgttaagtgctttgggatttctcaagtagaaaaggtgctatataaaatcaatcacaggaaaccctgctgctggcagctcagaacagctacagtaagcagtgtccactcaatcaatagtccctcaccgagaaggggaaagaataccattaaaaaggtgtgctcttagaaaaacttcccttaagtaagggggggaaatcctaccttacaaagagtgtatatatacagaaagcacacaatatattgttcctcygtgaccaatattacacatgatgggagaaggaacttactgcttactacatacttttgcttttcttttaaccacgcaagaacacaaactgatacacgttgagcctgaaaaaccttgtaggccccgtgcaggaaatgcttattggattcatttataaaatgaaaatggaat

SEQ ID NO: 646860 - DNA, 632 bp, Homo sapiens
ggctggtcggggtggaggtcaaggaatatcctcaaggatagctagatgtcctttccagtctggagattctaggcagaccagagggaatggtggcgacctggctgccagctctctggagtcgagaatctgaagcaatgtgagctgccgccggttcatgccactgccagtgtttgccctgcgccatcactatcagcatcaaactcactccctgctttgttaagtgctttgggatttctcaagtagaaaaggtgctatataaaatcaatcacaggaaaccctgctgctggcagctcagaacagctacagtaagcagtgtccactcaatcaatagtccctcaccgagaaggggaaagaataccattaaaaaggtgtgctcttagaaaaacttcccttaagtaagggggggaaatcctaccttacaaagagtgtatatatacagaaagcacacaatatattgttcctctgtgaccaatattacacatgatgggagaaggaacttactgcttactacatacttttgcttttcttttaaccacgcaagaacacaaactgatacacgttgagcctgaaaaaccttgtaggccccrtgcaggaaatgcttattggattcatttataaaatgaaaatggaat

SEQ ID NO: 646861 - DNA, 625 bp, Homo sapiens
ctaagctttagagagagttgtgcaattgacaatcaaatggagcttaaagggaattaggaggttttcaactaaagtcttgaaataaagaaagtaatattttacggcaaaaaattgcaagtgtcaagtttaaatcataagactttgcaccattgagctactagctagttctatagcttcttcagtccttaacacagggaaagaccaactttcatgcttgataaaacttaagaactttagaaatacatttaagaacataattcatgtatttgtgactttttccctccctaaatggctaattgtagaagaaaaatgagtgagcataagaacttcttggatggtracctattcccccatttgctttagactctcatgaattcttgtgttttttaaatagggctgccaccaatttggtcattcgaagaaaaggcgggtctcaggaatatggatggctgtcctccctttccccttcagatgtcagccgcatctactcctgcttttggaaaaccccagggcaaacggacctgccaggcagccaaccaaccaccagcccccgtgaaaggctggaacccagctgcccaattcggttgctcctgtccaaagccagacaggtggcaacccagattga

SEQ ID NO: 646862 - DNA, 515 bp, Homo sapiens
acattttctagtctttgttctcccatatctcatccagcatccatatctttcagaaaccagaagccacacaatcttgaaggcaaatgttgccttggagatcatgggatatgcttagagataccagcactgttcaacccagtgcccctggggaagttgcagagtgaccggaaattcaagggagcgactgaaagggtagtggggcccagcggggaagagacaggaacaaaaccagctgctcagttagttcgtcagtagtcaggactgaaaacacactgtgctggtagctaaaaggaaggtgacaagaaacctgagaacagggaacttaattatcactaaagcttccagagacacctccaccttctcaggttttcctccagcattgatgacacagcttaacactaacagcrctagtattgtgtgcttcatttgtgtctggccagaagataattcggaaaactggattctttgttctcctataaaacttacgcttccttatgggttgaactgatatagga

SEQ ID NO: 646863 - DNA, 575 bp, Homo sapiens
  misc_feature 455: n = A,T,C or G
ttctcggaaacatttatgtgaagcgtgcattcaactcacagagttgaacctttcttttgatagaacaagttttgaaaaaacactcttttgaacaattgcaggtgaatcttggagcgcttgaaggcttgtggaaatgggaatatcttcacacacaaactagccagaagcattctcagaaacttcttgtgatgtgtgcgttgaacccagagagatgaaactttcctttgatagagcagtttgaaacgtgttttgtaagatctgcaagcggataatggcttcgcttgtgtccttggtggaaacgggaatatcttctaataaaawctagacagaaatattctcagaatcttcttgtgatgtgggcattcaactaacacagttgaacatttcttttcacagaacagtttgaaacactctttgaacaatgcaggtgaatcttggagcgctttgaagccttngttggaaataggaatatattcacacacaaactagccagaagcattctcagaaacttcttgtgatgtgtgcgtgaacccagagagatgaacctttcctttgatagagctgttttgaaacgt

SEQ ID NO: 646864 - DNA, 347 bp, Homo sapiens
agggtagaagttctactatagtaagttgaggagttaatggaagatcagaaaaatgactaacatttgcagactctagaaacttggctttaaaacaaatttatattagatggttagakgagaatggagacatgggttgtttttgttttgtttatggatggtaatagagcacattttaggctggggaaaattaatctagtggtttggaagacattaacagagcaataaatgatctgttttccagaacataagagccaaaaggaaaaagaatttctatttgtttggtttgctgttgtgtcacatgcatagtagttattcaaaaatatttgcagaatggattaaacaaatcc

SEQ ID NO: 646865 - DNA, 557 bp, Homo sapiens
tttaacaccaaactgagcaacatggcaagaccccgtctctacaaaaaaatacaaaaattaaccaggcatggtggtgagtggctgcagtcccagctgcttggtaggctgaggtgggaggatcacttgagcccaagagatggagagatcaaggctacagtgagctgtgatcatgccactgtactccagcctgagtgacagagtgaaacgctgtctcaaaaacaaataaataaatatcatagttatctactaaatggacccatgtgattgagcaaaaaggcctatgttctcaccttccccttaaaagtatttcatcaggaatatttttagttgaattcatatgcactcacgcatgcacacactcatacaacgtcatgtttatttttatatcwacatatgtaattgataatttaaaaaactcaactgaatttgctttatctgtgatgaaatagtattgataaagtaattgtataataatattttggtttaggagacatatttaaccttatgagaacaaaatatcttttaattcccttatctatcttcattttgttacagtt

SEQ ID NO: 646866 - DNA, 570 bp, Homo sapiens
atattaacttgttcaaagtcattttgttataacattgatgagaaaaaaagtagatttctggctggggacactgtctttgtggagtttgcacattctccctatgtctgtgtaggtttatggggggtactccagtttccttccacatcccaaagatgtgcacattaggttaattggcatctctgcattgtcccaatgtgagtgtgtgtgggtgtgggtgtgtgagcaagtgcacctgtgatggaatggcatccctttccaaggttggttctcttattgtgacctgagctgctgggacaggctgtcccaacctgactctgaactgaaataaataggttgaaaaatgaaagaatgaataagtcaaaattattccaaaataaaaatgtgtaaagtatatggtaatcatacaaatgcccaacaatacataatatagtacaaaagcactcagtgagtcatacwtgttattgtttgtttctgaactgtgtggtgttaggaggtgttccttacaattttgtctttgcaaacagttattccttgattcaacccaccaccactacaactactatccctcac

SEQ ID NO: 646867 - DNA, 570 bp, Homo sapiens
atattaacttgttcaaagtcattttgttataacattgatgagaaaaaaagtagatttctggctggggacactgtctttgtggagtttgcacattctccctatgtctgtgtaggtttatggggggtactccagtttccttccacatcccaaagatgtgcacattaggttaattggcatctctgcattgtcccaatgtgagtgtgtgtgggtgtgggtgtgtgagcaagtgcacctgtgatggaatggcatccctttccaaggttggttctcttattgtgacctgagctgctgggacaggctgtcccaacctgactctgaactgaaataaataggttgaaaaatgaaagaatgaataagtcaaaattattccaaaataaaaatgtgtaaagtatatggtaatcatacaaatgcccaacaatacataatatagtacaaaagcactcagtgagtcatacatgttattgtttgtttctgaactgtgtggtgttaggaggtgttccttacaattttgtctttgcaaacakttattccttgattcaacccaccaccactacaactactatccctcac

SEQ ID NO: 646868 - DNA, 584 bp, Homo sapiens
acctccctcacaatttgcccacaaggaagttccttgtggacaaaggacagatagaactcaaagtcatctctccaaggctcacctgagacaaatgtgtatctgattgcttcctctgccttttgtttatgtaaaaatgaagattcactgagccagactaaattgtgcattcagtggaaggctgatcaaggactcaaaagaatacaaccttttgttttgtatctacttataacctggaagcccccacctcaaattgtcagaaaccaatgtatatcttagacatattgaccaatgtcttatgtctccctagaatgtataaaagcaagctgtaccctgaccacctcggacacatgtcgtcaggacctcctgaggctgtgtcacaggcaaatcgttaatcttggcagaataaactttctaarttgattgagacctgtctcagataccttttggttcacacaaccatcttggatcataagatgcatcttcaaggactgtaagacctcaaggttgaaagccaccccagagaaatagaaagaaggaaagaaccagggaccagggtcccttatgacttaatggatgctctgtat

SEQ ID NO: 646869 - DNA, 584 bp, Homo sapiens
acctccctcacaatttgcccacaaggaagttccttgtggacaaaggacagatagaactcaaagtcatctctccaaggctcacctgagacaaatgtgtatctgattgcttcctctgccttttgtttatgtaaaaatgaagattcactgagccagactaaattgtgcattcagtggaaggctgatcaaggactcaaaagaatacaaccttttgttttgtatctacttataacctggaagcccccacctcaaattgtcagaaaccaatgtatatcttagacatattgaccaatgtcttatgtctccctagaatgtataaaagcaagctgtaccctgaccacctcggacacatgtcgtcaggacctcctgaggctgtgtcacaggcaaatcgttaatcttggcagaataaactttctaagttgattgagacctgtctcagataccttttggttyacacaaccatcttggatcataagatgcatcttcaaggactgtaagacctcaaggttgaaagccaccccagagaaatagaaagaaggaaagaaccagggaccagggtcccttatgacttaatggatgctctgtat

SEQ ID NO: 646870 - DNA, 534 bp, Homo sapiens
gagtcggggaggctgtggggttcctggggcggtcagttgatatcatcggagacaacacagcattgctgagaatggccagctccctcctggccatgatgaagccgagaggacagcgtggcttgtgtaggtgccaatgggaactgtgtctccatctgcttccaggaggcttaacttccaagaataaataattgactttaaatttcaccccacacacttgtttggtggccccaaataattttccattccatagaacctcaaaactacaagccatcatttgttgagtacctctgccagacaggggcaagggcagtaagcacaatggttaagaacacaggctctagaaggaggctccaaatcctgcacagagtaggtgctcaatgaacaataactactgtggctattatggacaaaccaaaacagtgatggccactggttgmaaatgcccatctgaaaaaaagaacaagcatgaacacagggtgtctttccatttatgtataccctcttcagtttctttcatgaatgtgttacggtttt

SEQ ID NO: 646871 - DNA, 603 bp, Homo sapiens
ttccccatcctgttccctttacctggatgccacaaataaggggtcacagggtgatactagacactatagagccttaacattttcaactagatcatgagcatttcctggaagtgtttcaaactttctcaagctttctttgggaaattctctgagcattttcttatctccaaagttgaaatcagagcaatttttttttaacaaaaaaattaaaattccttgctgatstgggctatcagatacttcctgtggaatactgatctcattatttataagtcaaatgctttaggatcagtctgctaacagatgtacatttagttgtagtatgtctttgattcataagccaaaagaaaaaatgtttactgatataacatgtaatgcatttttacctttaaataaaatttcatataaaaatataaatgtattaaatatatacctctagaggctaaggaaatagtaaaaaatatttctccttcctctgcttaaagcattcttttctaaagtagccattttaaaaagtcatcatcaaaatgcatgaaaatggaaccttcccaagacaccattaattctcccgtagagaaagccaatgtggttgattatttgctt

SEQ ID NO: 646872 - DNA, 633 bp, Homo sapiens
ttccttggaaatcactgggtatgtttctatgggtctttacaaattcctccatgactatataagaatctatatacactggaataacttagggaaaaggtaaataaccctaatttgctttctgtggcttgattttttttatcctcttcttctttctttccctatccttctttttctataatttgctaccgttgaaacataatacgtaaagggagtaccacatctttagaacatgaagcaaggaagtgaagatactttgccgatcaaaaactaattattaaaaaatggttaagaaatagaactaaagaaaaatattcaaacaatgaaggtcctaaattaaaatagacacaaaaagcttactttatagacttcagcattttatggttggtacacagcttacacataaaattaattttctggaacgttgctcattaacatttttattgtttkccatattttaaaataatatcgttatgtaccactggataaaactaatagtgcattaaaatggtctcaccttaaatcagagacagtttgctgtaacaagaattttcaattctctaatgacttttttctctgctatgaaaagaaaaagcttctatattaaaatgatgtacacgggcaaaacgaaattta

SEQ ID NO: 646873 - DNA, 612 bp, Homo sapiens
tgtaagtgttttaattccaagaaatataaaggaagcaagagaaaagtatctggttgtgtgtcttgayacatattcaaagaaactgagaaaggttatattggcttagttgaatgaataaaaattgaatcagcatcgataacttctaccaaaaatatttgtttaacaaatactatgtatcaggcactacttttagtactagggagtacaaattaaacaaaatgaagatcttgtttttaaagaaggtgctttatgttgaagtcaatctgactaaatagagatctggagctgataataattatgaacaacattaaaggagtaatgtgatatagagcaatgttgtagaatggtgccttttttaaagtaataattgaccagttatctgaaagaggggagcaagctatctcgacattctgggaaaatatgagagaggaacagaaaaaagttaagtacggttagaatagcatgagaatgaagagaattatgagagagaaatttagagagttagccaggagtggaacctgtacagtctttagacaaagtgaaggacttagatggatcaaagtgaagataaattgtatagttttaaaaggacttgtacagttgatttgtatt

SEQ ID NO: 646874 - DNA, 304 bp, Homo sapiens
ctcaagttaacaatccaacaccatacttagaggaacttaaaaaaaaaaaagaaccaaccccaaagataacagagaaataaataattaaaattagagaacaactaaatgaaattgaaatgcaaaaayccatgcaaaagatcaatgaaaccaagacctagatcttcaaaagaataaacaaaattcatagatctctagctagactaataatgaaaaaaacccagaagatctaaataagcaaaatcagaagtgacaaagatgacattacaattgataccacagaaatacaaaagatcctcagagacta

SEQ ID NO: 646875 - DNA, 575 bp, Homo sapiens
gtatgtttcctctgggctatgatctgagagcacacatataatagagtcatattttctgcaggtaaaatcgttgcttgctacttctgatgacagaatggaatctatctgctgtttcaggtgctatgcattgagccccaggcatccagatctgccctggccagatgaatttgagttccctgtttaggtcattcggttacttaatttcctggcagttggggcttgcagtatctcggtgccattacctgagtccagaaatgcaatcccaccaaaatgacttggacttggccgtcccagcccattaacctggggcaaggttgggaaactacacccaacaccaatcagagccagaggcttggacagccatgtgcaagtggaccttggaaagatccctcatggaagagttaagagacttggtgctagttttgttgctactttgaatctaattttcctcatttctaaaaggcagagatccccaaaggggtcaggtagggggaacaaaatgatttcaaagttctcttccagtttaaaractgtaggtttttggaggaactgcctcctgtcggaaggaactaaca

SEQ ID NO: 646876 - DNA, 493 bp, Homo sapiens
aacatcaaattccaattaggaacttacaaaatgtaattatgaagcaatrataatgaatatcattgtcttcagaaatattttctggatacattcagaaagttttcttatgtgcagatataatgtgagaactcttttacaagtttaaacttagacatgaagtcaaaagaagcctataaaaacatgaacagtctactgtattcattttcatcttcttttgcatcatttaaagctaatcctttgtgcagagtctttgtacaggaaatttaagagctgtgataagctctatgataaacatgacagttcctaaatgtcccactatgtacggtgttacctggtgaaataatgtggctttctgattattcagatctagtaacattttatagcaaaattactttcatcaggtttattacagtttatatgaccctagtttttttatagttaggtgagcagtttttatttggaatagtgcctggttcagagtttgtagtaaaaa

SEQ ID NO: 646877 - DNA, 590 bp, Homo sapiens
ctctgatcttcgtgaatcttcatattaatgtcccatccctaatataactgttcttcacgtgtttttcccacttccaactggctttcttgtttctatmtctataaagatttttttctgtatgataatttttactaagaatgaggaggttcatacatttggaaaggagagctttatttctcgtaaagggctgcagcctgcagcatggccattctgacagactgggaaacacagcctctggtcagatgctagaaacagacacttcaggccttggtaaaataaccaacgtctccaactgtgtcctgtttcaaaagaaaacagattcttacaaacttatgcaaataaccatgttgccataaaataagaatactcatgaaaagtttccaaattttggagaactgaggtagacagaaaggtaaattctgctgacaaaagtatactttttacaattagagtagcagccttccaatcaggatgttgtctgttcaccttgaaactgccatcctcaaatcaagcagctcattgtcagtcaggtgagagctgtttatcaggcactgcagaatccagcaactccttgcacaggtccagagtca

SEQ ID NO: 646878 - DNA, 590 bp, Homo sapiens
ctctgatcttcgtgaatcttcatattaatgtcccatccctaatataactgttcttcacgtgtttttcccacttccaactggctttcttgtttctatctctataaagatttttttctgtatgataatttttactaagaatgaggaggttcatacatttggaaaggagagctttatttctcgtaaagggctgcagcctgcagcatggccattctgacagactgggaaacacagcctctggtcagatgctagaaacagacacttcaggccttggtaaaataaccaacgtctccaactgtgtcctgtttcaaaagaaaacagattcttacraacttatgcaaataaccatgttgccataaaataagaatactcatgaaaagtttccaaattttggagaactgaggtagacagaaaggtaaattctgctgacaaaagtatactttttacaattagagtagcagccttccaatcaggatgttgtctgttcaccttgaaactgccatcctcaaatcaagcagctcattgtcagtcaggtgagagctgtttatcaggcactgcagaatccagcaactccttgcacaggtccagagtca

SEQ ID NO: 646879 - DNA, 614 bp, Homo sapiens
cgattaatattgatttttttccctcttgtccaagactgaagttctgtcttagctataatttacacagctggtatataaagatacgcttactcctccttactttcatggtaagtagtattgttttgtctgaaaatcagtttactctatttttagcccatacataggttgaaaaggctgmacactttgcagttccagccatttatattgccacatgtttccaataacatcttggagcttttagaaacttggagtttttaatacgtacaaaactttggaaaaccacaaggagctggcaagagcacactgcattcaactagctaaacaccaaaaattataaaacaagtgagtgtgtgtgcatgcttgtgtgtacttgtgtgtgtgtgtgtgtgtgtgtgtgttacctattttataattttaaattctggaattcttaagtcaaaaattttcaccagaatgtttctgctttgttcagttataatccttcaaatttcccttcaccatagccccccaaatacacccattctcacctctgcaccattgctcagaaatattccctgcctataaccccctcattctcctctatcactgcactaaacttagccactcttcaatac

SEQ ID NO: 646880 - DNA, 480 bp, Homo sapiens
agagagtagaagagtcaacatgtgaaagggaaatgcttttgatcatccctgatgatgagtacacagaaggaataattctcaaatagtgacacaccaaacatgattttgaactgctccactaaacaacataccatttctggagtagtggctgcagttggggctactgtctggttaggtctatggtgaacagcaattactttctatgtcccaattgactttggcacagattagacaagtgatttgaataggatatgatggtacttacagctcctgagtccttcatgtcttcatgcttcccctaacctttgccatttctcctacatgtatgattgctactgatgcactgtcttgacgagtttaggggattcttcttggcttttcctattataatgacacttacttcttaggtcagaaaactcacaygaagcctctgcccgcttcagtagataatctcagttatacacttgcaaacttggagaa

SEQ ID NO: 646881 - DNA, 600 bp, Homo sapiens
agggtgggtactcctcagaaggaaaataacagaaccrtctttcaagcttcactgagccttgtatgaagtactacaagataatcaatgaagtatggagtcagaaatctgggttgtacgtttcttgtcacaaaacttctggcacacttctccaaaattattgaattattttctacacatagttttcatgtgtaaagtacaatttgctaccaatgagaaaaatatatctatttcacagttatagttattaatatgtatctttctcaaaggttccaagccctttacaagagaactttatgaaaatactgtacacagacaccatactgcctctggctctcaatttaggagtattctcactaaagtcatcctattaatgtctttaatgaatgtagtatcagctgatgtctttaaaattgtctcacaagccattatgtaacattctgtggtaagataagcatggtttgtttgcattgattttatccaatgtcagaattatttaacttttatattaaataatacagtttgtctattatatttaatgaatatgtgacatatttagaacctccttgctctttaaaagtattccaatggttaatttgtatg

SEQ ID NO: 646882 - DNA, 600 bp, Homo sapiens
agggtgggtactcctcagaaggaaaataacagaaccatctttcaagcttcactgagccttgtatgaagtactacaagataatcaatgaagtatggagtcagaaatctgggttgtacgtttcttgtcacaaaacttctggcacacttctccaaaattattgmattattttctacacatagttttcatgtgtaaagtacaatttgctaccaatgagaaaaatatatctatttcacagttatagttattaatatgtatctttctcaaaggttccaagccctttacaagagaactttatgaaaatactgtacacagacaccatactgcctctggctctcaatttaggagtattctcactaaagtcatcctattaatgtctttaatgaatgtagtatcagctgatgtctttaaaattgtctcacaagccattatgtaacattctgtggtaagataagcatggtttgtttgcattgattttatccaatgtcagaattatttaacttttatattaaataatacagtttgtctattatatttaatgaatatgtgacatatttagaacctccttgctctttaaaagtattccaatggttaatttgtatg

SEQ ID NO: 646883 - DNA, 550 bp, Homo sapiens
tctctccccttccattggcatgtaggctccattgtttcagacacctcatttgttttgctcagcgccatataccccagtgctcgtaatagtccctcctttaataaatgctcaataaacacctcttgaatgaatggatggataaatgaatcaatgaatgaaatagaactgtgttgttattattattatgatcatattgtgctaccaagccctcaatgactgggggaaacgtgtggtcctagatgtctaagatccagacaatccactcagtaactgattgagaggagaaaaataataatcagggagagagcacaccttcggtaggctgaggccattgcacatgctaaatcatgtaactactgcagatgaggaaatgtaggcatagctacatagctgagaagtatagagagcagagatgtgcactggaatctctggctccaactctttttcwttgcaaatggaaggctggggatgagggccaagtatagttttaagtatttcaatattttccctattgtacaaattgttcatagaaaagtttggtaacttgtgt

SEQ ID NO: 646884 - DNA, 560 bp, Homo sapiens
taaaaacacacaatgcaagccaggtttaaccccaggatggccagaattccagtttcaaccattcagtgaatgtagtagatatgttgattatctgtgaaattatattttagttaacatttaatagtactttatagattgcacatcactttcatgattttatatgagttttgtgaaaaccttcaagtaccgttatccctgttttacggaagataaaactaaagctcaggaatattaagctacttatctgaggtcacgcagcaagaaagtggcaaaatatggacatattcttcagtcttgacactcccacctcttctgccaaccatattgtcttattcttctcttcctgaacatgttaagggcagacacctatctgaccctttactgtctttcttcttacagtagtgttttatataggtgttcaatgtgtgtttgtttgcttgaaataaagaamacatatagacacacttagaagtaggaaaacagccagcacagattatgtttctctttttataccaatgaaacagttgtgctataatttttttatgagtattttctatggt

SEQ ID NO: 646885 - DNA, 554 bp, Homo sapiens
cacccgccaccgctcctggctaatattttgtatttttagaaaaaaccgggtttcaccttgttagccaaaatgggcttgatctcctgacctcgggatccacccacctcagcctcccaaagtgctgggattacaggcgtgagccaccacscctggccctggatatgtgttttaatctgtgttattaattttggaatattcttggtcatcattatttcaaataattctgctttattatcttctgttactccaattgtatgtgtgttacactttttgaaattgttccacagtctttgaataacttcttttttattgttttgtttctgcctcatttcattctaggaattttcttttgaaatattgaagctcactaattctttccgtagctttgtccagcttactaataagcctataaaaggcattctttatttaggtcacagtgttttggatttttaacattttcttttgcttctttcttagagtttccacctttctgcttatattttccatgtgttcttgtgtgttatctactttttctaatagagccactaatatac

SEQ ID NO: 646886 - DNA, 577 bp, Homo sapiens
aaatgtaaggaatttatgggacactatcaaatgcatcaatatacacattatttgaataccaaaagatcaggaagaaagatgaagaaagcttttgtttaaagaaacaatggctaaaaagtccccaaatctgaggcaggaaatggacatctaaggtataagaagaccagaatgaaaccaagaaaacccataccaagacatgtcataatcaaattgtaaaaatcaaagaaagaattttgaaactggcaaaaaatgcaattcattatttacaaagaagctttcgtaaaactcttagcatattctcagcagaaacctggcagtccagaagcaaataggatgatatattcaaactacttaagaaaaaaaaatattgccatccaagaataatatatcaagtaaaactgtttttcaaaaattaagaagaaataaagtatttcccagataaacaaaaactgaagtatttcataaacaccaggcctaccttayaagaatgctaaaaggggtccttcaagttgtaatggaaggacaccagacagcaacccacaagtaaacaaaagtgtaaagtatgctggtaaagata

SEQ ID NO: 646887 - DNA, 617 bp, Homo sapiens
atatgctgtgagttgatcatctgcatctgcttggcatgtttgggtctaaatgaagcaagttgaatttccaaagaaagtatccatttactgccgcatagtcaaagcaattacatttctttcctgctgcactcatcaatcatagaacaagtcaaatattcacactgcagcttaagcaagaacaccaaaggaaccaggtgtcacacaccaggtattaagtatgtgagtgagatactgaagagaagaggctgggtgatgctggagatggaggatagagggaaagcccttgaggcaccctgactgcatggagtcatattgtctcttttccacagaattaatttaattagcctctccccagtattttgtactgttcctaacgttgaatggtcactgatagaaagttgcgtcactgctgcccttactagaggagcactcttctgttctgtaatggtgatttgcctcaggtgaaaaataggatcactctctrttcctactgatttctgaaaaagaaaatgcttcctcccaaccagcactgcactattatttttgttatcacttttcatacagctgcaccttctctaaggaaaactgggggaaaagtatcaaactcttgcctgtgc

SEQ ID NO: 646888 - DNA, 630 bp, Homo sapiens
gtcaacctcttcaaaatttcatgtgaaatcacaacctggtaggagaaatattttcagtggagtgagggctagggtgattatcggtgctttgcaagtacctgcacaaagaccactttgtgctttgccatgagtgggctaagtgcagagtgtaggactttcacagggacaattttgaagggtgtgggttttgcaggcagacagatctgggctccacctcagcagtgatggtcactgtgccctgggaaaagtatcaagggtctcctccatgaaatgcagggagtatgcctaaagtccagggtggatgtgtgggytccattgatgataaggatggttatgaccatgatgaagatatggtattgtgagatcaatgtgacctgtctgaggagtatgcaaaaagtattgatgtacacttgattcaaatggagcaacgtaaacaactgtaccttagctggatacctaatagtcagctgcattgctaagacttaactcttaattgcttttaattaatacacaatttctctttttgttttattagttaataaatgctccatatgcagcacccggttggtttgcaaactccgtagaagaacttctgataatcccacatctctgaacttgatttaggggtaa

SEQ ID NO: 646889 - DNA, 630 bp, Homo sapiens
gtcaacctcttcaaaatttcatgtgaaatcacaacctggtaggagaaatattttcagtggagtgagggctagggtgattatcggtgctttgcaagtacctgcacaaagaccactttgtgctttgccatgagtgggctaagtgcagagtgtaggactttcacagggacaattttgaagggtgtgggttttgcaggcagacagatctgggctccacctcagcagtgatggtcactgtgccctgggaaaagtatcaagggtctcctccatgaaatgcagggagtatgcctaaagtccagggtggatgtgtgggctccattgatgataaggatggttatgaccatgatgaagatayggtattgtgagatcaatgtgacctgtctgaggagtatgcaaaaagtattgatgtacacttgattcaaatggagcaacgtaaacaactgtaccttagctggatacctaatagtcagctgcattgctaagacttaactcttaattgcttttaattaatacacaatttctctttttgttttattagttaataaatgctccatatgcagcacccggttggtttgcaaactccgtagaagaacttctgataatcccacatctctgaacttgatttaggggtaa

SEQ ID NO: 646890 - DNA, 630 bp, Homo sapiens
gtcaacctcttcaaaatttcatgtgaaatcacaacctggtaggagaaatattttcagtggagtgagggctagggtgattatcggtgctttgcaagtacctgcacaaagaccactttgtgctttgccatgagtgggctaagtgcagagtgtaggactttcacagggacaattttgaagggtgtgggttttgcaggcagacagatctgggctccacctcagcagtgatggtcactgtgccctgggaaaagtatcaagggtctcctccatgaaatgcagggagtatgcctaaagtccagggtggatgtgtgggctccattgatgataaggatggttatgaccatgatgaagatatrgtattgtgagatcaatgtgacctgtctgaggagtatgcaaaaagtattgatgtacacttgattcaaatggagcaacgtaaacaactgtaccttagctggatacctaatagtcagctgcattgctaagacttaactcttaattgcttttaattaatacacaatttctctttttgttttattagttaataaatgctccatatgcagcacccggttggtttgcaaactccgtagaagaacttctgataatcccacatctctgaacttgatttaggggtaa

SEQ ID NO: 646891 - DNA, 630 bp, Homo sapiens
gtcaacctcttcaaaatttcatgtgaaatcacaacctggtaggagaaatattttcagtggagtgagggctagggtgattatcggtgctttgcaagtacctgcacaaagaccactttgtgctttgccatgagtgggctaagtgcagagtgtaggactttcacagggacaattttgaagggtgtgggttttgcaggcagacagatctgggctccacctcagcagtgatggtcactgtgccctgggaaaagtatcaagggtctcctccatgaaatgcagggagtatgcctaaagtccagggtggatgtgtgggctccattgatgataaggatggttatgaccatgatgaagatatggtattgtgagatcaatgtgacctgtctgaggagtatgcaaaaagtattgatgtacacttgattcaaatggagcaacgtaaacaactgtaccttagctggatacctaatagtcagctgcattgctaagacttaactcttaattgcttttaattaatacacaatttctctttttgttttattakttaataaatgctccatatgcagcacccggttggtttgcaaactccgtagaagaacttctgataatcccacatctctgaacttgatttaggggtaa

SEQ ID NO: 646892 - DNA, 608 bp, Homo sapiens
cgttcccccagtatttaattgtgttgagaactttttcatatacttcttgaccatttgcatattttccttggtatgttcaagtattttgctcatcctcttattaatgaatataaattctttctagccaatggatataatttctttattggatacacatattacaaatattttctcccaataaataatttgccttctttcttaatttttttattaagtcattcttaattttaattttactgtataattcatttttatggtcagcactatttttgtactgtttaagaaaactttgattaccctaatgtcatgaaaatgctcttatttacatacacacagtcagcaccttttagctgtgcatttcacytctgtgagttcagtcaatcacagatcaaaaatattagaaaaaataaagcaataaaattcatacaatttttaaaaaattatgtaacaactatttgaatagcaattacactgtattgtgtattgtaagtaatctagagataatttaaactgtacaggaggatgtgtttaggttttttgcaaataccacaccattttatgtaaaagactcagcattcaaggaatttggtatcctggaaccagtcccc

SEQ ID NO: 646893 - DNA, 608 bp, Homo sapiens
cgttcccccagtatttaattgtgttgagaactttttcatatacttcttgaccatttgcatattttccttggtatgttcaagtattttgctcatcctcttattaatgaatataaattctttctagccaatggatataatttctttattggatacacatattacaaatattttctcccaataaataatttgccttctttcttaatttttttattaagtcattcttaattttaattttactgtataattcatttttatggtcagcactatttttgtactgtttaagaaaactttgattaccctaatgtcatgaaaatgctcttatttacatacacacagtcagcaccttttagctgtgcatttcacttctgtgagttcagtcaatcacagatcaaaaatattagaaaaaataaagcaataaaattcatacaatttttaaaaaattatgtaacaactatttgaatarcaattacactgtattgtgtattgtaagtaatctagagataatttaaactgtacaggaggatgtgtttaggttttttgcaaataccacaccattttatgtaaaagactcagcattcaaggaatttggtatcctggaaccagtcccc

SEQ ID NO: 646894 - DNA, 576 bp, Homo sapiens
aagttccaatttttcaaaaatgttagaccattttgttgaacagcttataacaaagcacaagatacaatgctttcaasaactctgggcatattaattgaagataatattctttatttcttcaacactagtttcttttacagcatcttcaaatctagattcacactccaagttctaatcctaggcctgacagacacttacatgcattcagcaaataacgttagcattctgttctcattttcttggttataaagtgagaatatcaaaccttgctttcagtgttataagaattaattatttaatgtttataaagttctttccagctctaaagtataaaattcatagaagaagttcttatactcagaatagatggtctcataaatgcaaatcatagttagaatgtaaaaatcagtattagaaatggaagcaaggagaagatgacatagtgcatgatacatattgcaattatttattagaggtgtgagtttatatgttttattgttttttatttccagctatgctgaataacacaaatttaagggataggtcaagatggtctgatacagtaaagatgagtac

SEQ ID NO: 646895 - DNA, 562 bp, Homo sapiens
tttcaacatactcacatttttgtgtccctaattagaattctttatttaataattatttcattttagataatttggcaataagcaccatggaataagtctttgaattttttttatcttatttgaaattattggtgtgttggtagttaagccagtgaggatgaggataggagaaaatgagaaaagaaagagagaaatgtgggagaaagtcagataagaatgtctgaagtgctaatgatgtcgtatgttttagcaaaattagacaagtaagtcktctctgtttcttttatttcactaaaatgcccaagtaatagaaccttagtaataatttttcatgtatttttaagatacatgaagaagtcagtggagtgtgtgagagaatatctgctgtattatatttactttttgttacaaatgaaagatagtatttcaactccaattatgcgggatgggaaaaagctttgtctattccactctcttgctttcaaaaaaaatactctggagcaaaatttgagactctcattcctctatagttttctatatccatttttctttcattcttgct

SEQ ID NO: 646896 - DNA, 629 bp, Homo sapiens
aatctctctgcctcctgactgactctggtgtttctccatgtccccgcccccaacccaacccctaactcagcttgggtgtggtgtggcaggccctcctcctctggggatgtgtgagtataacaaactaaatttttaataacagtgatctcctgatctgctggccccactatgcttgaataacaataaagcctacattttcaaacaaatgggtggtacctgccaacttggctttgcatgttgttccttgtatgcattcacccacagcctagaggcttcaagcaaccactattcctcctgccagggagcttttgctcttgctgttcctccaaccagaagcaaccctattcatcctgaaccattccccagacctagggagcctctccacacttcagatatcatctcaatcatctaaatcctcagagaccttccctgarccccagtctatatttgggcatttgccattgttctaatggcattctattttgtctttgtagtgcataacatagtctgtgtttgattacctgggagattatttggttaaggtttgttttctcctttaagattggaaatgccaagatagcagcagctgaatctttttttttctcattattgcatccctattgcactgt

SEQ ID NO: 646897 - DNA, 310 bp, Homo sapiens
tgtgttctttccacatataacatgctcagtgaaggaagaacaaggaaggttacgctgccctgaaacatatctgggagagcttttckgctctgggaggatcaccaagttatgttgttaagtgacaaaaacaatatccggaagagtgtcaaacagctaattattgtgtaagaaggaaaaaaagaagactacattagtcacatttacttatatttatatgaaaagctaataaaagtagctaggtatacgtaaggcagtcagaaacaagacttttcaattataacttttatatcattttaatttaaaagttacg

SEQ ID NO: 646898 - DNA, 557 bp, Homo sapiens
cacctctacctttacattgacatttcttaatttttaggagatatatatatatatatatatatatatatatatatccatatatatcaatgtacagaaatcatgaatgtgccacttgataatatttatgatgtgattttagttatataactatcactcaaagaaaaattatcagccacccagctcttaaggtctgtctcagacaatactccaaagtataagcacatttctgacttctagtcctatgaaaaaactttgtggaaatggaattatatagcatgtattctttcatctctcttttttcttcaacactatgcctgtgaaatcttctcattttattttatatcrctgtagcttcttttgtaatggctgactaatgtttttgtgttttctactattgaaattaaatgaggtgttttgcaattgatattaactaatgtgctatgaatataatttcatatgtattttgttataaatatatacaaatttcctaaaatgtattccaagaaatggactcaatgacactcctgatatgcatatattcatttagcaaataataa

SEQ ID NO: 646899 - DNA, 370 bp, Homo sapiens
aattagttgcaactttatttggcagtgaattgaaataaaacactggcagaatagcaaggtaagatttagatagtagtaaatttactacatttccacttaatataatattcttctcttttcttttcagccttggaatcagtacctggtattaaataggctttctgattgtcacacaacaaaattgactagtactctagggaagagttatccactgttgaacrctcaacctgcttaaagggatggcaactggatgttcataaagaattaccatagttgccacgtatccaggtatccacatatttccacagacatctctggatggagaccaaccacccccatcccatacttcccaccacctacccacccccta

SEQ ID NO: 646900 - DNA, 574 bp, Homo sapiens
ctttctgatcttcttagtatgaattccaacaagaggcttccttttcttctgactgctgagtgaattcaatgagttaaagtgaatgatttgtattctcaggaaagcagagagcaagatcaagtaattttaacactggcttcccacgggtgattggctttgtcccttaagcttaggtggttgctcttttcctgatgagtctactttatcctaaagttagtaaacttgctctgccactggccctttcaaactaggggtgataaaaatcactctaaccaaaggttactgcagtctcttgtgttctttctcatcccttcaacagctttgcaaagagtctccaaaccctctctgcattatccttattaaattgcactatcagtttctttatatgaccccaacaaatacatgaatctcctagttagggaaactgatagactaagagtacttttctttcatgttcaaagctagaaggtaagtattttctaataatgtgaagcagytgaaatgacaatttgggttagagctgtgctgtggactacagctatttgaaagtacagttttatttttatgacagttt

SEQ ID NO: 646901 - DNA, 324 bp, Homo sapiens
catctgtggttttgccatcctcaatacatagctcttgggggttttctgtggattgttttaatgttagccaaccagagagaataaaaagagtattaaaaattattamttgtgggtctatgtgaccctgtaagaaggctatatcactactatatacttagaacctaaatttctatgccaaaatataggcgaatatagcaaatattgtccaaatttacagggaaagagaaaatgaattgtgtcttcatcttacagtttctaataaaatccccaacattgaacttaaatgactctccagttgttcattaggagaatatgctgttggtt

SEQ ID NO: 646902 - DNA, 324 bp, Homo sapiens
catctgtggttttgccatcctcaatacatagctcttgggggttttctgtggattgttttaatgttagccaaccagagagaataaaaagagtattaaaaattattacttgtgggtctatgtgaccctgtaagaaggctatatcactactatatacttagaacctaaatttctatgccaaaatataggcgaatatagcaaatattgtccaaatttacagggaaagagaaaatgaattgtgtsttcatcttacagtttctaataaaatccccaacattgaacttaaatgactctccagttgttcattaggagaatatgctgttggtt

SEQ ID NO: 646903 - DNA, 503 bp, Homo sapiens
cttgaattttcatcactagcatgtttcctacatacataaacatagtcagtagtgagtatattcacatataaagtaacaaagaattatagcaaacccccacatccaatcgggaaaaatgttttaactctgtatattcattaaattgttcacaaactgacatcttttagcatataatatggtttcctttagcttgttaaagagaatgaactcatgactaaaacataagaacacccaatgaagctcaactgaatcaattcaactatgaaaaataaaatgactagtgatcatctctttattattattgaaagaataacttacaagtaaaaacattcaatttttgaaaacagctttatatttattgaatttatgcatataatgttagttgcatttcaaaataaaatggctgccttaaaagtsatgcaaaattacatatttatacattctctgaattaagcaggattaattgaaaagtggttatgaaggcatgactgcaaggtacaaat

SEQ ID NO: 646904 - DNA, 487 bp, Homo sapiens
ccattctgtgtgatacttagaaaactgcaatacagtgctgagagacattaaggcggacctatataaatggagagataaaccaagttcaacactttgaatgctctatagtgtkaagaaagtagttctactaaatttatttctagattaattgcgatatcagtcaaaatctcagtaggctttttatataaataacaaatattttttcaaaattactatgtgatgtgataaaatattataaattaatattgaaaatattttacatgaaagttcaaatttctggagccttttaagataagaggatggcagtatttctatggtataaacactatgtatataaaaactgaagacttctattaatatcagacaacaatgggccacaaatcaagaaatatttttagcaggataaagatcactgtgattggtccacttcatcaagagaacctgataatgcgcaatgtgttttcacacattaacaaacacttctgca

SEQ ID NO: 646905 - DNA, 487 bp, Homo sapiens
ccattctgtgtgatacttagaaaactgcaatacagtgctgagagacattaaggcggacctatataaatggagagataaaccaagttcaacactttgaatgctctatagtgtgaagaaagtagttctactaaattkatttctagattaattgcgatatcagtcaaaatctcagtaggctttttatataaataacaaatattttttcaaaattactatgtgatgtgataaaatattataaattaatattgaaaatattttacatgaaagttcaaatttctggagccttttaagataagaggatggcagtatttctatggtataaacactatgtatataaaaactgaagacttctattaatatcagacaacaatgggccacaaatcaagaaatatttttagcaggataaagatcactgtgattggtccacttcatcaagagaacctgataatgcgcaatgtgttttcacacattaacaaacacttctgca

SEQ ID NO: 646906 - DNA, 487 bp, Homo sapiens
ccattctgtgtgatacttagaaaactgcaatacagtgctgagagacattaaggcggacctatataaatggagagataaaccaagttcaacactttgaatgctctatagtgtgaagaaagtagttctactaaatttatttctagattaattgcgatatcagtcaaaatctcagtaggctttttatataaataacaaatattttttcaaaattactatgtratgtgataaaatattataaattaatattgaaaatattttacatgaaagttcaaatttctggagccttttaagataagaggatggcagtatttctatggtataaacactatgtatataaaaactgaagacttctattaatatcagacaacaatgggccacaaatcaagaaatatttttagcaggataaagatcactgtgattggtccacttcatcaagagaacctgataatgcgcaatgtgttttcacacattaacaaacacttctgca

SEQ ID NO: 646907 - DNA, 487 bp, Homo sapiens
ccattctgtgtgatacttagaaaactgcaatacagtgctgagagacattaaggcggacctatataaatggagagataaaccaagttcaacactttgaatgctctatagtgtgaagaaagtagttctactaaatttatttctagattaattgcgatatcagtcaaaatctcagtaggctttttatataaataacaaatattttttcaaaattactatgtgatgtkataaaatattataaattaatattgaaaatattttacatgaaagttcaaatttctggagccttttaagataagaggatggcagtatttctatggtataaacactatgtatataaaaactgaagacttctattaatatcagacaacaatgggccacaaatcaagaaatatttttagcaggataaagatcactgtgattggtccacttcatcaagagaacctgataatgcgcaatgtgttttcacacattaacaaacacttctgca

SEQ ID NO: 646908 - DNA, 615 bp, Homo sapiens
aaaatgtaactaaaaatttgaaaacatttatgtagataacacacgaggtcataacaactttaacaatctaagctttcagtgacagtttttgtgaagcatttttactgtcattgcctctattctctgcaatttgctctctccttttgtgtgtatgcaggaaaagcatcattcacatcgaggctatagatcaaattatctgtatgacaattgatawcttcagtaatcacggggcatgattatggaggtaagctgactctagttacttttctttctagaagtatcaacactgacagttaaaacaaggaaaaataaaaaaaaagccattaagccaacaatcattccagtttaagaaatgtagcgtgggttagctctttgaagtgtgttgatttatatagatgcttctgactttgtagatatgtggtgttatttctgaggtctctgttctgttccattggtctatatgtctgttttggtaccggtaccatgctgttttggtaaccgtagccttgtagggtagtttgaagtcaagtagtgtgatgccttcagctttgttccttttgcttacaattgtcttgtgtatatgagctcttctgtagataattatgaaatttaagt

SEQ ID NO: 646909 - DNA, 630 bp, Homo sapiens
ccttctcttctatctttttgaagaatttgtgcagaattgctttgatgtcttccttaaatgtttggtagaattccccaatgaagattttcagagatagagatttctttgttggaagactttttttacaagacgttttaaactgcatgtttaaattctgtaatagacatagggctattcaggtatgtctatttcatcttaaataaattttggtaatktgtttgtgtctttaaaaacattggtccatttcatttaagtggttcagtttatagtataaagttttccacattattcacttattattgttttaatatctgtatggtctgtggtgatgtccctccttaatttctgacatgagcaacttttgctttctttcttttggttagtctgtcaagatgcttagcaatttggttgacgttttcccagtacaagctttggttttaattttgattgttttgatgttttcaacttcattgatttctgctctaatctttattattttctgtcttcttcttgctttaggtttaatttatttctcttattctgagaaggtagaagcttacatcattgacttgagaactgtttcttttttaatatgaatattttaatgctgtaaatttacctccaaacaca

SEQ ID NO: 646910 - DNA, 630 bp, Homo sapiens
ccttctcttctatctttttgaagaatttgtgcagaattgctttgatgtcttccttaaatgtttggtagaattccccaatgaagattttcagagatagagatttctttgttggaagactttttttacaagacgttttaaactgcatgtttaaattctgtaatagacatagggctattcaggtatgtctatttcatcttaaataaattttggtaatttgtttgtgtctttaaaaacattggtccatttcatttaagtggttcagtttatagtataaagttttccacattattcacttattaytgttttaatatctgtatggtctgtggtgatgtccctccttaatttctgacatgagcaacttttgctttctttcttttggttagtctgtcaagatgcttagcaatttggttgacgttttcccagtacaagctttggttttaattttgattgttttgatgttttcaacttcattgatttctgctctaatctttattattttctgtcttcttcttgctttaggtttaatttatttctcttattctgagaaggtagaagcttacatcattgacttgagaactgtttcttttttaatatgaatattttaatgctgtaaatttacctccaaacaca

SEQ ID NO: 646911 - DNA, 601 bp, Homo sapiens
ggtaactttgaataaatgggaggcaggtttgccctaagcagttcccagcttgagttttctctttagcttagtgatttgggggtcccgagatactttactttcaaaacaaaaaaaaaaaatcaattcccagccaggaccactgttcatgtggagttttcacattctccccatgtctgttttctccaagtactccaatttcctcccacatcccaaagacatggaggtaggtgaatctgcatgtctacatggttcgagcctgagtgtgtgkattgtatgtgtgagtgtgcccgatgggatggtgtcctgtctgggttggttccagccttggccctgagctgccaggatatgctctggccattcgttatcctgaactgaaataactgggtaaataattaccttacttgtttgtattgatctttcataaatgtgtgtatagctcacacttatttaaatatttaaaattggtagatttgggggcctttgtttagaagtttggtgatgttttgtgaccagaaatacgctataggaacttacatcttgtttatatcaattagtgtatggtaaaattggtttcattatatgttgtttcacttaaagtcac

SEQ ID NO: 646912 - DNA, 601 bp, Homo sapiens
ggtaactttgaataaatgggaggcaggtttgccctaagcagttcccagcttgagttttctctttagcttagtgatttgggggtcccgagatactttactttcaaaacaaaaaaaaaaaatcaattcccagccaggaccactgttcatgtggagttttcacattctccccatgtctgttttctccaagtactccaatttcctcccacatcccaaagacatggaggtaggtgaatctgcatgtctacatggttcgagcctgagtgtgtgtattgtatgtgtgagtgtgcccgatgggatggtgtcctgtctgggttggttccagccttggccctgagctgccaggatatgctctggccattcgttatcctgaactgaaataactgggtaaataattaccttacttgtttgtaytgatctttcataaatgtgtgtatagctcacacttatttaaatatttaaaattggtagatttgggggcctttgtttagaagtttggtgatgttttgtgaccagaaatacgctataggaacttacatcttgtttatatcaattagtgtatggtaaaattggtttcattatatgttgtttcacttaaagtcac

SEQ ID NO: 646913 - DNA, 547 bp, Homo sapiens
tttgctataattatcccaatgtagcactgaggttgaaaaaaaaggtaactgcaatgttctccaccaaaacatatctaatgagagctctttagaggtttatgaggatgcacctttaaaggagtcctttggaaaatgccccagtaatccagatgcttcacaaagytcctctgacagaacactagatcccttctgggaacaggaaactttctctagcacatctctttaatcccgcagaaggataactaaaaccttggtaatattttggataaaatattgttcagaatgcttcaaaaaccagacttggagggagttaagcttctttgtcaattaattgattgttagaaagaatcagttaggtgagaaataaaacactatttttgaactaaccaatggaagttgtgatacaaagaatacctagttgtaaaatctatagaacactcctctggcattgccctatttaacttggagagagcttgcttgcagggaaaaaaaagtggagcaggtgattatttcccatgacaaatgtataaaacattttttcttaaat

SEQ ID NO: 646914 - DNA, 525 bp, Homo sapiens
tcttgggctgggggtgcatgggaagtaggtagggctcctgtgaccacaaacccaaggcctctgggatcagaaggcaacaacaagggccaggacctaccccggggcctgtgcttgcagggaccctggctctcatttgtatrtggggtgcctgagtgatttcagattcctcacccatccccattggctcttctaggggagatgcaactataacacctgtaggtgaccctgtgtaggaaaagattgcagaacccacacgggcccatgctgagtgaggctttctccaggtgggcacaaaaacccctagctccccagccactgccagagcttggggttgggggccctacatggaggcaaatgcagggagcattggcagaggcagggctgagtgaaaggagaagaagagcacatggaaaagacacaggggtctctgacagttccagggccagaggcacttgggagtgggagaggcatgactgggagataggtccagggctttttctgagccctgaggccccagcaggttta

SEQ ID NO: 646915 - DNA, 547 bp, Homo sapiens
aacacattttaaatatgtatatataaatataaggatacacaatacacatcaaaatatcaaaatgattatrtataaaggaaggatataacggtagtggggaatcgggacaaaataaaatcaaacaaatgtctcatacaggtaacattaattgagaagtataattaaccctcagagattgaaatccaaaaattaaaagcaaaagtaaaaaggaaaaacaacaaaatattatatacgtttaaaatatttaccttgtctaactcatttatactcattagttgtacttccttaaaatatttctttaaaatatctcttctatcctttcattcttctttaccttttctcccctccttctcctctcctcccttcccttctcttgctttctctatccttctcttttgacccccttccttaccctctccaacactgtctctctctcctttctctttttatcttgaactaatttacagtggtcattttagagctaaacagctgttttagaagttcaagagggctctgtattatattgctaatcatctagtttatgaaa

SEQ ID NO: 646916 - DNA, 643 bp, Homo sapiens
tggtaggttcggtgcattaaacgcatttttggcatatggtattttcaacttactattggtttattgggatgtcaccccatcataagagccatctgtagcatagaattggaggtcttctctatccttaatttattaattgtcagataatattatccctttatttactttaaagatctatgagaagggtcaaattagacatttgggaaagccttttgagagttctcttgtttacagcaatgtgtgttcatattcctttcctcatttgatctgcccaagttaaagaaattaatcttctagaggaagccttttttattttcaaaaaaacctcattttgagtaaatgaaacatttatctaccacagaaacactgtgctgttacaaagagctrttttagcttgatttactaaaagatttctcatctgatctgagatctatgtcttcttggaagattaagtcaagctttttgtctttctggaagatgactataatctgtttctttcttaataaatatcaccatatatgttctaatatattttatgtgactattacataaagtatattttatgtgaatatttatactctgtagtcatcttctaagaagaaaccataatgtttatacatagaaaactatagaggctgctatg

SEQ ID NO: 646917 - DNA, 643 bp, Homo sapiens
tggtaggttcggtgcattaaacgcatttttggcatatggtattttcaacttactattggtttattgggatgtcaccccatcataagagccatctgtagcatagaattggaggtcttctctatccttaatttattaattgtcagataatattatccctttatttactttaaagatctatgagaagggtcaaattagacatttgggaaagccttttgagagttctcttgtttacagcaatgtgtgttcatattcctttcctcatttgatctgcccaagttaaagaaattaatcttctagaggaagccttttttattttcaaaaaaacctcattttgagtaaatgaaacatttatctaccacagaaacactgtgctgttacaaagagctgttttagcttgatttactaaaagatttctcatctgatctgagatctatgtcttcttggaagattaagtcaagctttttgtctttctgsaagatgactataatctgtttctttcttaataaatatcaccatatatgttctaatatattttatgtgactattacataaagtatattttatgtgaatatttatactctgtagtcatcttctaagaagaaaccataatgtttatacatagaaaactatagaggctgctatg

SEQ ID NO: 646918 - DNA, 638 bp, Homo sapiens
tatagggttgatcaagcaaatagaggaaaaaaataaaagtactagaaaagtgaggatgctggtaaggaactcattttcacgaccattcatggggtcactgccaaggtggaaagatgataaaacctagaagaagttgacgctctgaaaacagggaacatctttggaataagctgctttaaaaagctgggggtggggcgtggggcaggccttttttggaagaaaaggaatgcaagaaaataaaaaagactgtaattcagtcagcyatacctgatacagagctacgaacatttcacagcccagaacaattttgttactaactctagttgaacaagaggacctcacaccctggctaagttataattctgctgctgattttaccttgaatgcagtgtctcagggctgctgagatgtctttaccaaactgtagctgctccatttctgtgacatccttattgtgaaaataacttatttggctgaataagagaatatgggcttcctatcatgagttactcactttcactggatttctactgatatacccttctgaatttctgttcacaacagcctaacaacctaatttttcagtccttctagaaagacttattcttttttgtcttttttttttttgaaacggagtc

SEQ ID NO: 646919 - DNA, 560 bp, Homo sapiens
atgcagattgaacaaaagttaattgaacacaaaagttaacatttactctctccagcagccaaatgaaaatgacaataaagcatcagatgcatcaggaaagaagatactagaactcacataaagtttttgtaaatagctgggaactgctgggaaggaagtatttttttatggcacggaattttcaaaatgtgtaaaaactggggacactttatatatctgactgtcaggttaaatgtgaaaagataaagattgaccatttttaataaggggcagytagactcttctgggttctctcttcgactcaaacaagggagtgatttctgagggccatccactgtactcccacccatagaagactggagcgtcaatggtatgttctcaggccaccagaaacagttaaatataaggttgtcaaactgcagtgaaaatcagggttccatgttagcctatgttgttagcctatgtatcaaacattgttaatgaagttatcttcccttactagacctccagaaagctgccagtccacagcttacatccttacataagagatggaggaattc

SEQ ID NO: 646920 - DNA, 605 bp, Homo sapiens
tactattaaggctaaagctaattttttttcttttctttttttttttttttttgagacggagtcttgctctgtcaccacgctacagtgcagtggcatgatctcagctcactgcaatctccacctcccaggttcaaacgattctcctgcctcagcctcccgagtagctgggactacaggcgcccaccaccacgcctgrctaattttttgtatttgtgtaaagatggggtttcaccatgttggacaggatggtctggatctcctgacctcgtgatccgcccacctcagcctcccaaagtgctggaattacaggcgtgagccactgctcccggccataaagttaattttaataaaaccttgtaaacaaatctgtcaatctcagtcaactttgactacacacgataagattttcatcaaccttttatagtctcttaaattttttaattctttttccccctactgcttataataatctaattttatctataccattgtatcttttttttattttggaataacttttagatactctttaacctaaacaaaattactgttatttaacaaaaaccacatcctcataccgtataacattttacttttctcataca

SEQ ID NO: 646921 - DNA, 544 bp, Homo sapiens
gagaaaggagtttctcttgctgcctcccatgtgctcctctttccagatctttgtggcacaagtagattttccaaggtttggctcttgccacatgtgcaacttctctagtactaggctcctatagtatgaatggcttctctgacacccagtggccagcagcttctcctggcactccttcaggtggcttcatagtagagccaccagcaaggtttcactctgtggatggtttcctcagcaacccagaggcagctttctagcaagttctcctggtacagcacctcagcaacttctctgccwtccaataagccacaacttcaccctctccagtggggtctggatctcagctcttctagagggagattcttccttaggggtactagctctgtcataagagtcacagctgcttcttttatatagtctttctatattccttagagtttcatttgcttcttcctagccaatctcctgttgaagttagtaacacttatagtaaacattttctgttcaaattcctgttccttgatcacatcctgactgacataaa

SEQ ID NO: 646922 - DNA, 544 bp, Homo sapiens
gagaaaggagtttctcttgctgcctcccatgtgctcctctttccagatctttgtggcacaagtagattttccaaggtttggctcttgccacatgtgcaacttctctagtactaggctcctatagtatgaatggcttctctgacacccagtggccagcagcttctcctggcactccttcaggtggcttcatagtagagccaccagcaaggtttcactctgtggatggtttcctcagcaacccagaggcagctttctagcaagttctcctggtacagcacctcagcaacttctctgccatccaatragccacaacttcaccctctccagtggggtctggatctcagctcttctagagggagattcttccttaggggtactagctctgtcataagagtcacagctgcttcttttatatagtctttctatattccttagagtttcatttgcttcttcctagccaatctcctgttgaagttagtaacacttatagtaaacattttctgttcaaattcctgttccttgatcacatcctgactgacataaa

SEQ ID NO: 646923 - DNA, 544 bp, Homo sapiens
gagaaaggagtttctcttgctgcctcccatgtgctcctctttccagatctttgtggcacaagtagattttccaaggtttggctcttgccacatgtgcaacttctctagtactaggctcctatagtatgaatggcttctctgacacccagtggccagcagcttctcctggcactccttcaggtggcttcatagtagagccaccagcaaggtttcactctgtggatggtttcctcagcaacccagaggcagctttctagcaagttctcctggtacagcacctcagcaacttctctgccatccaataagccacaacttcaccctctccagtggggtctggatctcagctcttctagagggagattcttccttaggggtactagctctgtcrtaagagtcacagctgcttcttttatatagtctttctatattccttagagtttcatttgcttcttcctagccaatctcctgttgaagttagtaacacttatagtaaacattttctgttcaaattcctgttccttgatcacatcctgactgacataaa

SEQ ID NO: 646924 - DNA, 520 bp, Homo sapiens
aaacactttagctgtgttctcatcatagaaaagtaatatctgagccaaagtgcagtggtcgtctcattcctttagcaagaggtttttgttgttgttgttgttgttgttatttgtgtgtgtgcatgtgtctttccaaatgtaccaaaatgtgcatccatttcattaatgaggttactaatggagagaacatttaccttttttattctttcttactttggaaagcattattctagwaccatgctttttccacaggaggaaaataattgcattgtgaaagagatctttgatttacattacttcgtgtggatggaaacataggccgataaaggaaaaaaaaatctactcacatttccatgaaaatataagcctagaaacctggacaagttactaagcttgaggatcattctgattgattagtgagcttgagttttctatcttttttttttaattactccttaaagttggcctattcatctagaaaccaaattgtgtcttttctctaagggatttagagttttgg

SEQ ID NO: 646925 - DNA, 562 bp, Homo sapiens
ttttcatgatatcgattcttcctatccatgagcatggaatgttttttcatttgcttgtgtcctctcttatttccttgagtagtagtgtgtagttctttgtgaagaggtccttcacatcccttgtaagtggtattcctagatattttattcttttggtagcaattgtgaatgggagttcacccatgatttggctctttgtttgtctattattaatagacaaatagatgaggattcttataagctgcaatactgaggactataaaatagtggaaataaagtcactatattttttaaraagtgaaaaaaaaattaaaaatcacgaaatccacaatataaagttagagaattatttaatttactgaattcaagttaaaatgaatattcacatgcatacatcattacatatatgtggaaatctacaaatagtacataatgttattttttgtacaaaattatttctcttcattagccattggagcaccttctagacatgtgaggccaagaaaagtttatgtcatggatcaattttagacctgaatttgtatccttgaatatacttcag

SEQ ID NO: 646926 - DNA, 419 bp, Homo sapiens
tgatagtagggcagttacaccaaccaatgagagatgggaagaggtacagaaatgtcccaactccttattctgctcggagacctctctgagaccattccatatggtccatcctcagggagtccccagtggcctgagcccytctgttttctccatgacaacccatttattaatatagtctttattcacttttctcccttccttctcttactttccccactcatttctgcttcctgaaatcacctcttagagaaactgcctgcacccaagtccttatgttgggtctgcttttgggtcatctaaataagatccctccatccatccctccatcctgccatgatcccctactaggttccagctactggacacggagaggggaagggaaatcaagagaatcccgagctgaaaatatatcctttctc

SEQ ID NO: 646927 - DNA, 627 bp, Homo sapiens
atactgataagcttttccttcacattggagttagatttgaaaatctggtctcaaattaagattggcgtatctggtcttccagatggtgactcgtatcttgatgtaaaatgaaatgacttctgtcttttatggtagctctgacatcagcatttattacacttgtagagcgtgctggtgtctgctgtgtgaaacatgctcaaaagatattgtttgccaagggttcaatgaggaaaacaaagcagaaagagggcatggggtaccttagaaagggcaaaggggrtagagcagataacctggatttaagtcttatgtttctttgaacaacttgagtccctctccctgagttgatatggatgaagctaaacagaatggcataatgaaagagtaagtttttagggttaaataaccacatgttcaaatctcacttttgccacttactagtcatgtaactttaatttagttactcatgatttctgaacctcagttttttcctctgtagaataaaaatatatgttcttcttcccttatagaattaaaaaataagaaataacataaaagctgggcacttagtaggtgttccttatatagtaggtaccattattaggccaaatcaaattgttggattta

SEQ ID NO: 646928 - DNA, 454 bp, Homo sapiens
ggaggcaggggtagtaggaggtttggggctccccagagggcaaggaacctctaggacctggaggtgtgggcagaggtgagcagacagaggccgtgcaaggggagcgacaagcatgtcagtgtcctttgtggttgagatctgacatccctgattggtggtggcagctgaggcatggcatggcatggctaggatcgatcccttgccagactcaaacatgtctctgggctgtcagttctgtcacttctgtcacttctgtgtcactgtactagggaaccgtacacatgggaagatttcaagggcgccaccatgagagcaatattcccttccttgccaaaactcttgtcttcttggcctgaaattctaccacctggcactttagcttaaggctctgaytgtggttaaactacatctctcttgggaatgagaaccctttcagctatgatcagtccctcat

SEQ ID NO: 646929 - DNA, 608 bp, Homo sapiens
tagccaaggaataatttatctcattaatttataacaaaatctgtttgtcacagcatgtgaaatatgaaaacaccatatagaattacacagtatattctgttttctaaataaacatatggatgcattttattttacaacttgaattatattatctctattacttattcaaggatatggaataatttttactttctgcttcaagactacagattgagctcatgaggtgcatatcttttctttctgagacaccattaaaatgacaataaagaaataaaaagcttttaaacttacaacaaagaagaggataggagaattctacaggaaacaggatatttcaacacacttattkcaaatagaaatgagatagatgagtttatcttgataagccaaagcacaggaagcttccactgtaaatatttatgaaaagttttatagcggaagagggttacagactaagagattgcaagataaatgaatagcaagagtgaaaaatgagtcctaaaatagtggcattaattggtggttttctggggtcatgatgaaagtactcaacaactgatacaataaacaatattaattagtcagctggatattcacaagaaacatca

SEQ ID NO: 646930 - DNA, 580 bp, Homo sapiens
ccgtttaacatcctgctttgctattgatagtggaacaccgccataacctgatcaggtttccattcccaatggcagctaatgccttgctggctgaccccttctggaaagctctatcagtgtcactacttgctgaagctctggctatctacaaaaatgtgggcgcaatggagtaacctggcctggcttcccttggtgctccaacttgttagcatcctygctcattcatctgggccacagtgattccaacatgcagagaaggatgatctttctctcaatgtgactcactcagagatgtcccagagcaaaactgtctgagccccaaaggcttcaactccctagcaggtgacgtcttctgattcacccacacccttctctataagaagcacccatgtcaactgcgtggtggcacttagatggtgctgggatcatcacttcctctagtggcctcaggcctgctcttcagtctcagactcctctctgcgatttccctttactgaaaatctggccttggttagggatcctttagtctatcagctgcatttctctacctttcaagctcaaacaaaaaagaaaataaaag

SEQ ID NO: 646931 - DNA, 552 bp, Homo sapiens
taaggcctctccagccctgtggaactgtgggtccattaaacctctttttctttataaattacagtctctggtatgcctttatcagcagtgtgaaaatggactaatacaaggttgctctctttttcctcccatgtcatcattttcagcctaggtgggtaactaatacaggaaagtagcatgagtatgaaagaatagaagtgtttctcatagcatcatgtcatccttctggaacctaagcacgttctagtgagaatggaaagaatggccacttgggctgtcagctctgtgcttacttagtacaagtaacacactttgagtctctctgaactcccacacatcctgggtctactggaattctgtgttcatggarcatcttattgtgttcgagatgctcaatgaaaataaggcagcaagaaatgacagattcacatactgcatatatatcctctattcattcacaggcatgctcctttgtcccaacagacttcacttacaaaccacaagtccaaagataatgttattaaaaacatcaggacaacaacagcagagcat

SEQ ID NO: 646932 - DNA, 552 bp, Homo sapiens
ctggctcataccacaaccaactggccacccagttgttcacagcagctaagcccccacaccacctccccttgagagcagctccagctggggaatctctttgtagtgagccagtccccacccccttatccccagctagtgtcagccagttgctacagctaagcaatcagacccacctgtatcctgacataggccaaacccaaggacrctagtgaagtaggtgggttatctctcctttaagtgttcttagacagacactccagtgctggccatgacccattcttgctctcatataactataagatcattcctatgaaatctttcattaggcatttaggcaacagccgttaccagcttaacatgtgcctgcctttctccttcccaaaacttgccctttcatgcttatctcttaagaggagtggagaaagcattaaagttggaatcaagagattgggttccaaaggaacttgagcaagtaacctctaagtgtctctgtttattgtgaagactaaacaagataatgctcattggagtttagaacaatacacaacatct

SEQ ID NO: 646933 - DNA, 552 bp, Homo sapiens
ctggctcataccacaaccaactggccacccagttgttcacagcagctaagcccccacaccacctccccttgagagcagctccagctggggaatctctttgtagtgagccagtccccacccccttatccccagctagtgtcagccagttgctacagctaagcaatcagacccacctgtatcctgacataggccaaacccaaggacgctagtgaagtaggtgggttatctctcctttaagtgttcttagacagacactccagtgctggccatgacccattcttgctctcatataactatragatcattcctatgaaatctttcattaggcatttaggcaacagccgttaccagcttaacatgtgcctgcctttctccttcccaaaacttgccctttcatgcttatctcttaagaggagtggagaaagcattaaagttggaatcaagagattgggttccaaaggaacttgagcaagtaacctctaagtgtctctgtttattgtgaagactaaacaagataatgctcattggagtttagaacaatacacaacatct

SEQ ID NO: 646934 - DNA, 414 bp, Homo sapiens
gctaagtggatctttggatttttgtctttcattaattttggaaaattgttggccatcatcttttcaaatrtatctttgacccttgaactcttttctctcttctcctataactccaatgatgtgtactctagacaattagttattgtcctatcattcttgaatgccctattgcgttttattcacttcttttctttttgtgttttattttgaataatttctgttgacatctccagtttattctgtctttcttctatggtgtttattctgtcaatgagcctattgatagatactgggtttaattctggaatttcaatttcattctttcttatagtttacatttttttcttaggaagttgccaatctcttcacgtataatattaaactttcccaatagattctttaacatattaattg

SEQ ID NO: 646935 - DNA, 541 bp, Homo sapiens
agttgaaggaaaaaaaactctctttgacaatatgcagcttccgtttgtgaaaaaaccctcagaaaatgagaaataaattaaataagaacttaacctcataaagggcatatgcaaaaacactacagctaatgtccaactttataataaaatrctgaataaagcaaaagaatatatacgaataaatacagcaaggagactggaataaaatatataacatcacctccattctcaggggcataattgtctatgtataaaatcccaagaaaatgccaaaaaaattctacaactaataaatgagtataacaaagtggcaggacacaaggtcaatgaacacaaatgagtcatatatccatataatgaaatgtagaaaccaaatttataataccatttcactgacactgaaaaaagaaatatttatatataaatctaaatattgtatatggtctatatgctgaaaactacaaaactacaaaatgccaatgaaagaaatcatagagcacctaaataaatagatagggacactttgttcgtggacttaaag

SEQ ID NO: 646936 - DNA, 580 bp, Homo sapiens
ggacttaaatgtaaaatatgaaactaaaaaactggtagaaaaaaaagacagaagaaaatatttggtatctagagctggaaaggagtttttagaagagagaaaatcatatctgataaagaaagaaaatgttaaactggacctcatcaaaattataaacttttgytctatggaataacctgctgggagcataaaagctatagactaaaataaaatatttacaaaccacgtatctgacaaagtagtcatgtctaggaagatatacagaacaatatataaaaacaattcaattagataatgggtggaatacatggcagacatttcactgacaagaataggcagatggcaaataaacacttgaaaaggtgttcaacatcactagccattagaaaaatataaataaaaaccacaattagatatcactataaacatatccaaatggaaaaataataaaccaagcaaatgctggtgaggataaagaaaaactggattattctttgctgggggaatgtaaaattgaatatccactctggaaaatcatttggcaatttcttataaaactaaacatgcaatttacatatag

SEQ ID NO: 646937 - DNA, 617 bp, Homo sapiens
attctggccactagattgccagttctcctgctagctttccttacctatgttgtagagttatctagtactagagttgattgttgctaaaataaggagccagagaacccaatgttttaaaagaaaaactgtaggtgacctcagtctcttctataatataactacattgtaagctttgtgagagcaggagctctgtatggttcaccattttatctcgtgttcgcacagaggaaacacttgaatgcttgaaagaataatttattatcctgtttttataaatttaagacctcaagtgatatagaccatcactatgaactgtcattcattccaatttaagatatgggaatgaatatttattgactagctgttatatataaggcaacacactagacttttacatgttttgtatatattatatttaatatwtacatatatatgtatataacagttactgattactaggaacacttatagcatgagacatttgctaagcattttctacatactgccttattgaattttcacagttgtcctaaaaaatagatactattatcttcatttatcaagatcatgaagctgaggctcacataggttagtaaattttccagaataactaagtt

SEQ ID NO: 646938 - DNA, 518 bp, Homo sapiens
taagggtttttgtttgaattttagggcarggtaaagtagctctgtgaatttttccctggaggtttggggcgaaagcacttttccttagtgatggcatgaggggcacttttgctccactacatagctggtctcactcaaaacaatcacgatggaaagcaggtcttctgagactgacagtgcactgcctctaatcaacaccagctggttttatgcacaatacttttggtccttttacctgcaagtgcttagataagtggatccacctaacttggcatggtcataagcagcaacacccaaaatggggaccctttgaaatgcctaaaatgatttacttgggcacacaattggaaaaagctggatttagaattagacaaattgaatggaagacttacttccaatagcacctagaagcttccataaaaaattttgaaagaaaaaattgcctccattcaagaggtaaacaaaaggatattcgcaactatctctgccgtgaaaaagacttcagagactttgtccct

SEQ ID NO: 646939 - DNA, 518 bp, Homo sapiens
taagggtttttgtttgaattttagggcaaggtaaagtagctctgtgaatttttccctggaggtttggggcgaaagcacttttccttagtgatggcatgaggggcacttttgctccactacatagctggtctcactcaaaacaatcacgatggaaagcaggtcttctgagactgacagtgcactgcctctaatcaacaccagctggttttatgcacaatacttttggtccttttacctgcaagtgcttagataagtggatccacctaacttggcatggtcataagcagcaacacccaaaatggggaccctttgaaaygcctaaaatgatttacttgggcacacaattggaaaaagctggatttagaattagacaaattgaatggaagacttacttccaatagcacctagaagcttccataaaaaattttgaaagaaaaaattgcctccattcaagaggtaaacaaaaggatattcgcaactatctctgccgtgaaaaagacttcagagactttgtccct

SEQ ID NO: 646940 - DNA, 599 bp, Homo sapiens
gacgtttgcctcttccagggaatgggctttgggcccttactcctagagtgcaggtcttcaggagagtcaggtgaaagtctggagctctacccaagcttttgctccataccataaactccagtgtttttcactcctgttgtatgagtcagccagatgctctgcttataatagcagcttcccttcccctgcattctgttcagattctgggactcatgaccctgcatggtttaggataagacaaatgacttgatgaacaaaagctgcttaaaatatctaccttacttccttttggtttcctttcctctagcatcttgccttcaaaagacttgctttcctttattgtgctcagacttcaaacagctttttgttatcattttatgtagctttcatagctgtgtggagggaagactggcttcatacaaccactttgtcatagttagaaggcgatgtccccttttactttctaccctatatatytgtgtattgcttttcaacacatatgtattcattaattctcatatacaatttttaaaggaaaataaaaggtttaataatcaggattaaaaatggagaacagacacagaaactgtgtatacagt

SEQ ID NO: 646941 - DNA, 366 bp, Homo sapiens
tggggatgtgtttactaatgtggccactactcaaatttatctttaaccatatccatatagcatttttagcatattgtaggccttcaatgaataataaatacagatctctgtcattccttcttctttgaacaagctgttgtctacctggaaaataattttttatctactcatatatccgttccttatatcacaataactcccaaatgtcaagaacccttatgtgctaggtagagaatggagaacaaaacagccatagtactactttaaaaagcttyaataactttctaagaagctttcctgacttcctacccttattcccattccctaaaccaacttaggaatacttgctagtgccatccttcctct

SEQ ID NO: 646942 - DNA, 366 bp, Homo sapiens
tggggatgtgtttactaatgtggccactactcaaatttatctttaaccatatccatatagcatttttagcatattgtaggccttcaatgaataataaatacagatctctgtcattccttcttctttgaacaagctgttgtctacctggaaaataattttttatctactcatatatccgttccttatatcacaataactcccaaatgtcaagaacccttatgtgctaggtagagaatggagaacaaaacagccatagtactactttaaaaagctttaataactttctaagaagctttcctracttcctacccttattcccattccctaaaccaacttaggaatacttgctagtgccatccttcctct

SEQ ID NO: 646943 - DNA, 584 bp, Homo sapiens
gggaggagggggcagggatagcattaggagatatgcctaatgtaaatgacgagttaatggctgcagcacaccaacatggcacatgtatacatatgtaacaaacctgcacattgtgcacatgtaccctagaacttaaagtataataaaaataaataaataataattggcatatccagaagccctttgctatcttctgctacatttgcacaaattcacagctatttgaataccagtcattgtcaatcctggtcagctttgaaaatactgttccttagttttgctctctgcctgatttacttggatttaggggaaacccaggaatcagttgatttgagtatgtagccaatgttgtaaagaactaattgctttaacttctaatagaaaaatatcactatttttttaaaaagttacataattcatgtgtaggaacataatccttttagcctagaagtaaaaaatgatatagtcttgccctatagcactgatcatggccatatataatttayaataaccaaaataatgacaatattttggtaaagcatgctcgattaatttgaatgctcacgagttaacacataattgaa

SEQ ID NO: 646944 - DNA, 584 bp, Homo sapiens
gggaggagggggcagggatagcattaggagatatgcctaatgtaaatgacgagttaatggctgcagcacaccaacatggcacatgtatacatatgtaacaaacctgcacattgtgcacatgtaccctagaacttaaagtataataaaaataaataaataataattggcatatccagaagccctttgctatcttctgctacatttgcacaaattcacagctatttgaataccagtcattgtcaatcctggtcagctttgaaaatactgttccttagttttgctctctgcctgatttacttggatttaggggaaacccaggaatcagttgatttgagtatgtagccaatgttgtaaagaactaattgctttaacttctaatagaaaaatatcactatttttttaaaaagttacataattcatgtgtaggaacataatccttttagcctagaagtaaaaaatgatatagtcttgccctatagcactgatcatggccatatataatttataataaccaaaataatgacaatattttggtamagcatgctcgattaatttgaatgctcacgagttaacacataattgaa

SEQ ID NO: 646945 - DNA, 586 bp, Homo sapiens
atttaaagagggtagggaagaaccacctgggtggattttcactggggatcttataataaactctcaaaatcccagattgagacaagggaagggatgctcagtcttatgtaattaggaaaaagagaggaattttgaacccacccctgcatcatctaagtcaaatagagccagtgtaactgttgggaccgttgcaggtagggtgtgctaggtaccaagccgcagttaggtaaccaatgacttttacaagcttattttcatctcagtacaccacatgcttcatgtgccacttgcatgtatgtaagttacacatmtaagattatattattgggttacactactatgaattatctaaggaaaatagaatgatcatcattgtgtgtgcaaagacgacttctgaaattaataccaacaagagatttcttctttgcatattttcaagcagaaagtggactaaattatatcattggagcatgacgtctcaaaaaatatttattgccaaataattctctactgctaaaaattatttattgcatgaaatagaaaagatctgagactgaaacttccatttaaaaacatgaattattta

SEQ ID NO: 646946 - DNA, 537 bp, Homo sapiens
gtctcctctctctctcaggctggagggctgtggtgcaatcacagctcactgcagcctcaaaatcctgggcccaagcatacctcccacctcagcctcccaagtagcttggattacaaatgcctgcctcagtacccggctacttttaaaacattttttgatacacatagrgtctcagtttgctgctcaggccggtctcaaactattggtctcaagcaatcctcttgcctcaagcttctaaagttctgggattacaggttaaccaggacacctggcctagaggttattttttgttgttttagtttctttatttaatagtctgtgtatttaaattttgttgacaataatcttaacagcaacaatagtatctacttgaaaggtatgcattctatatataattccttagatataaatttaagtataaatatttgaaaactctttaattttttaatattgtgtcccatttcttaaaaaagagagaagctatattaacttttgaattcagtacacagttaacagttctttcatttaatatgtgat

SEQ ID NO: 646947 - DNA, 537 bp, Homo sapiens
gtctcctctctctctcaggctggagggctgtggtgcaatcacagctcactgcagcctcaaaatcctgggcccaagcatacctcccacctcagcctcccaagtagcttggattacaaatgcctgcctcagtacccggctacttttaaaacattttttgatacacatagggtctcagtttgctgctcaggccggtctcaaactattggtctcaagcaatcctcttgcctcaagcttctaaagttctgggattacaggttaaccaggacacctggcctagaggttattttttgttgttttartttctttatttaatagtctgtgtatttaaattttgttgacaataatcttaacagcaacaatagtatctacttgaaaggtatgcattctatatataattccttagatataaatttaagtataaatatttgaaaactctttaattttttaatattgtgtcccatttcttaaaaaagagagaagctatattaacttttgaattcagtacacagttaacagttctttcatttaatatgtgat

SEQ ID NO: 646948 - DNA, 646 bp, Homo sapiens
acatttttgtggtttttgagagaaccattgcagcagttcttattatagacatatgtacatgaaggccgctctttcatggcctcccagcttcatttttttatggtttgatgtaagtgactccattttggtgctcacaacttccacatttctcccttttggttgaaatatttttctgaaagcatttcacacttaaaagatacagattggccgggcatgctggttcacacccgtaatcccagcacgttaggaggcggaggtgggtggatcacctgaggttgggagttcgagaccagcctgacaaacatggagaaaccccatttctaccaaaaatacaaaattagctgggcgtggtggcacgtgcctgtaatcccagctactcaggaggctgaggcaggagaatcacttgaatccaagaggcagaggttgcagtgagctgagatcacgccattgcactccagcttgggcaacaagaacgaaactccatctcaaaaaacaaaaacaaaarcaaacaaacaaaaaatgaaataattgtaaaaaccaactatagttctcagtaatgatagtttcattactgtcagctattagtagagttaattaactcctatcaacctcacattttccatttaaaaaatacaggagaaaaagt

SEQ ID NO: 646949 - DNA, 563 bp, Homo sapiens
cacccttaatatctaattagtttctatccactgactcactcactcagctctttgcttataaatttccagctccatgctgggagaaattttagttcaatctctctctactatagctatattattcccccattgctatagtcctgaatagtcttccttgctatttttaacaagcatccagtgtacacatttccttttgacaaaacatagtgtccatatgtagagggaagaggaaagctaacaaaatataaagtcatccaaaccacacacaccttggacaagcttatcatgtgtgggaataaaatgctggaggtgggtttggcttccaaaaaaaacaagtgtgtaatttgaaattycatatcaagaacagttaaattcccagattctttgtcattactgaataccttagtaattattcttcatttaacacaacaggaaataggagatttattttctggagagacttgtccaattaaggtggggatatggttgctctgttgagcagaaatttggcttatatagacccaaagctcagaaaaagagttatagatctaaaatgacaatca

SEQ ID NO: 646950 - DNA, 563 bp, Homo sapiens
cacccttaatatctaattagtttctatccactgactcactcactcagctctttgcttataaatttccagctccatgctgggagaaattttagttcaatctctctctactatagctatattattcccccattgctatagtcctgaatagtcttccttgctatttttaacaagcatccagtgtacacatttccttttgacaaaacatagtgtccatatgtagagggaagaggaaagctaacaaaatataaagtcatccaaaccacacacaccttggacaagcttatcatgtgtgggaataaaatgctggaggtgggtttggcttccaaaaaaaacaagtgtgtaatttgaaattccatatcaagaacagttaaattcccagattctttgtcattactgaataccttagtaattattcttcatttaacacaacaggaaataggagatttattttctggagagacttgtccaattaargtggggatatggttgctctgttgagcagaaatttggcttatatagacccaaagctcagaaaaagagttatagatctaaaatgacaatca

SEQ ID NO: 646951 - DNA, 615 bp, Homo sapiens
atgacatggtatcatattttctcttttctttgacatcaatcacatgacaccatgaattctacagtggattaatccttccatgctttgtacataagttgattatacaaattgaagtcaaatactcaatacttataatttgagatatgaaaaatagtttcagcaaaaatataagaattataattcttgacagtgtaaaacaattatataactaaaagacaatcaagaacagagatggaaagaagtccaaagtaagtgcattaatttattcatctttcagagtagaagatagtagctatttcaatacaaatagggagttcaaatgcatcattcaaggagaactaatattgaggctataaacaataattttgaaagtagaagtgcaagtaaactaaattcctcatacttcatagcaggtaaatgcagcaacaaagcraggtaaatgattaccatatttagttataaccataaccacaaaaagagcaaaaacaaaccactgagagtagacgcctttggaaaatgaaacagagcacagggcttaagaagaatgattagtatatattttctgctctttcaattccttaaattaaaaaaaaaaactttgaaatatatgttttt

SEQ ID NO: 646952 - DNA, 598 bp, Homo sapiens
atggtgaaacctcgcctctgctaaaaacacaaaattagccgggcgtggtggcgcatgcctataatcttagctacttgggaggctggggcaggagaatcacttgaacccggaaggtggaggttgcagttagctgagatctcgccattgcactccgcctgggtgacaagagtgaaactctgtctcaaaaaaataaaaataaaaataaataaaattaagttcaaacgaaatgaacctactttatgtacaatgccctctgatattttatgtatctttttaaattaaataatagaagaaaaaatgctaataataagcccaggttgatttcatgatgcastaaagccttgtgatgtatggtttgagatgctagctacctctgtctctgctctgctcatacaaaatcactgtaacacaaaagacactttttggtcacttgaatgcaaattcaaaacagaaagcctaattctgtttccaacttccaaaaatgtaatgcttcttgacatttccatagttgtctatttaagttcaatgtaaatagctgctgctactttgggagtgcctgataatgtctatcacagtacaaggatgtatgtctctctgg

SEQ ID NO: 646953 - DNA, 602 bp, Homo sapiens
cctctagctttaatcagtgtctttcttgggcaataatgcccaagcactgatttttttaaatcagaattgtagactggttttggaatcaactttttgtcagtgatgaccttggcaaactcgttaatgaatttctttttgtttgttcatttgagacggagtcttgctctgtcacccaggctggagtgcagtggctcgatctcggctcactgtcacgatctcctgacctcgtgatccacccacccttggcctcccaaagtgctgggattacaggcatgagccaacgtgcctggccattaatgaatttcttaattgaatttccctatgatcagcagatgcattattaccacaaatcttaaaaaatttaatgtcgtgtcctttttaaaatttccacaaccagactgttgaatagtcgcagcttctttcaattttcagttcatcatgatgtttgctgtttcatagtcagcataccattaagtggcttgtgttcattgcaaagctgatagatcaactctttcaatacacaatcaggatctccatttttagcttcatgtgatgtttttctactttttattaacttytgttcatcaacttcagcacagaac

SEQ ID NO: 646954 - DNA, 607 bp, Homo sapiens
ctaaacattacagaaattaaaattacaatactgattgaattacttaacatttaaaagtctgataataccaatgttaaaaaatattttaagaaataagaactctcattcactgctagtggggaagtaaattggtacaagcactttgatgagcaatatgattgtgcttagtaaatttgaaggtgtgaaaattatttgtcytagccattttacttttaggtatttatcctaaagaaacacttacacatgtgtacaagaaaatatttataagaatttattgcaggattgtttataatagaaaaataagaaacaatgcccatcaacaaaaatacgaataaatgcaatgttatgcatccatactgaagtgccatatagcagttaaaatgaattaactagaggcacatttatcaacataataaatccctaagcattaagttgaaagaaaaagtagcttttagtagtaaaagtagaatatgacaccacttatataaagttttaaaacatgcagaagtttgtacattatttatagatacatacatatacaataatagtataactgcatatgattataaacactaaatcgagcctaagaagagaagcaaggatttat

SEQ ID NO: 646955 - DNA, 589 bp, Homo sapiens
ttctttttgtttcctggctttgtcttcatgaacaatgctttattaggtatccttgtgtttcacgtttgtatctgggtgacaatatttctagaatatatatccagaagtgagattgttagatcaaagatatataaattactaattttgatagatgtcagctttgaaaggcagttaaaatttatgtcagttattttagattgcaactctttttcacctttctatcatcagtagatattatttctcattttacktttttgtttatttgacaaatgaaaacgatgcgacaatttaaaaaatatccttaattattaaggaggttgaacattgtttcatatatttatcggtttttttttacatatttattaatcatggtaaacatatctgttcatatttttcactcatttttttcattaggttgtctacttgttcctgccaagttgtaagagagtatatgtgttgtgggccgggcgcggtggctcacgcctgtaatcctagcactttgggaggccgaggcggacggatcatgaggtcaggagatcgagaccacggtgaaaccccgtctctactaaaaatacaaaaagttagccgg

SEQ ID NO: 646956 - DNA, 589 bp, Homo sapiens
ttctttttgtttcctggctttgtcttcatgaacaatgctttattaggtatccttgtgtttcacgtttgtatctgggtgacaatatttctagaatatatatccagaagtgagattgttagatcaaagatatataaattactaattttgatagatgtcagctttgaaaggcagttaaaatttatgtcagttattttagattgcaactctttttcacctttctatcatcagtagatattatttctcattttacttttttgtttatttgacaaatgaaaacgatgcgacaatttaaaaaatatccttaattattaaggaggttgaacattgtttcatatatttatcggttttttttwacatatttattaatcatggtaaacatatctgttcatatttttcactcatttttttcattaggttgtctacttgttcctgccaagttgtaagagagtatatgtgttgtgggccgggcgcggtggctcacgcctgtaatcctagcactttgggaggccgaggcggacggatcatgaggtcaggagatcgagaccacggtgaaaccccgtctctactaaaaatacaaaaagttagccgg

SEQ ID NO: 646957 - DNA, 504 bp, Homo sapiens
tatgaacaggcacttctcaaaagaaggtatttgcatggccaacaaacatatgaaaaagctcaacatcactgatcattagagaaatgaaaaatcaaaaccacaatgagataccatctcatgcccatcagaatggcgattattaaaatgtcaagaaacaacagagtcatacttattatttctatttgcagaaattgggtcctggagtggataataagtagcccaagatcatacagctggtaagtggtagagctgagaattgtgctcagaaccattggtaccaagacagaagtgtgataatactgacatggcccagggattttaagcctcatgcttgagttatttgattggattcatttttgttcttttgttctactgcttatatccaagtcatttctttctctttctttctctcttgcattgttaatarggctctcttcctctctttcctcaattataatgtacatttcatgagcatgggaagttttgtctgtttcatttcctatt

SEQ ID NO: 646958 - DNA, 570 bp, Homo sapiens
aagaattgtgggaatgtgtcaaagacactattgtaaagaaacttctagccaaattttggacaatttgagcatcaaaataattatagcaacaaattataatctgttgaataaaaatgtgtaagtctataatgatataaataaattattatctaaatctagaaaaaggaaagctttttcttacagttaactgccaaatgataaatgtaaacagaataaagcagttagaaaatcacaatatgacaaccatctgagtagtaattaattcagccaccaaacatgaagggatactaaagctacttaggaaaggtttaatgaagaatgttgatatttacatagtttcttttttattattattattatactttaagttctagggtacatgtgcacaactgtgcaggtttgttacatatgtatacatgtgtcwtgttggtgtgctgcacacattaactcgtcattcacattaggtatatctcctaatgctatcgctccccactcccccaaccccatgacaggcccctgtgtgtgatgttccccttcctgtgtccaagtgttctcattgttcaattccca

SEQ ID NO: 646959 - DNA, 573 bp, Homo sapiens
accggccactccggctttcscgctggccttgctccctcgtgccaggcaacgctctccctccaccacctcttttagcaccccctgcccacttcctaccaactgcaatcctggtgccccaattgacttcaggtctcagcttcgatgtcatcacactttgggaaaggccttcctgagccccagaccaggtcagtttccctggatatctggtcttatcgtactctatatgttccatggcacttgtataactgtcatgaaattctgtaattgctgtccacagtctgtctgcctcctagaatgcaagttgcatgaaggcagagaccatgcctgcctcgtgaattgctgtttcctcagtgctaagcaaaaagcttgaataaaagctggacagaataaataacctgtgggctgggcactttatggattccacgaatgatctcaatggcaatcctgaaaaagaggtggttattgctcccatttcacagatgaagaaactgaaacttggagcagtgtgacttacctaagcaagtggtcttgaactcacatctctctgactctgaagccacactcggtccggga

SEQ ID NO: 646960 - DNA, 573 bp, Homo sapiens
accggccactccggctttcgcgctggccttgctccctcgtgccaggcaacgctctccctccaccacctcttttagcaccccctgcccacttcctaccaactgcaatcctggtgccccaattgacttcaggtctcagcttcgatgtcatcacactttgggaaaggccttcctgasccccagaccaggtcagtttccctggatatctggtcttatcgtactctatatgttccatggcacttgtataactgtcatgaaattctgtaattgctgtccacagtctgtctgcctcctagaatgcaagttgcatgaaggcagagaccatgcctgcctcgtgaattgctgtttcctcagtgctaagcaaaaagcttgaataaaagctggacagaataaataacctgtgggctgggcactttatggattccacgaatgatctcaatggcaatcctgaaaaagaggtggttattgctcccatttcacagatgaagaaactgaaacttggagcagtgtgacttacctaagcaagtggtcttgaactcacatctctctgactctgaagccacactcggtccggga

SEQ ID NO: 646961 - DNA, 513 bp, Homo sapiens
gggtcaacaaaaaagcaatttatataaataatactttcaactaaatgataataagacatatcagaatttgtgggatgcagctattaaaaatgtatagctttgtaagattaattttaaaaaagcacaagttattactatgagttatgagaaaaggagacatcactacagaatcaacataaaaygtaaagaaattacatttacatgttctgtggtgtctattaccacttacttcaactatggtattctatattaaataaaagatacagaaagtacagcctgagaagttttataaagaagtgcttagagggggtaaactgttagaaaaggggcccttgagggcttgtcttatgattacatttgcatagtaatgctcagtttttatttatgtgaatttttgtttggtatggcctaaacctacatttgcagaccaagaattgtgcttttacttagaacatgtatttatttgaatgatgacaatttggaatgtgaaaagcttcccttctggccactccc

SEQ ID NO: 646962 - DNA, 559 bp, Homo sapiens
ctatgaaactcttccattgtagtgcaaaagcaatcatagataatatacaaaaaacttgcaaggctgtgttctaataaactatatgcacaccaataggcatgggccacatttggtctgtgarctgtagtttgtagcaacttgcattatacagctcctgtttctttcctgaacctagtctgtttagaatgtaaacacttgatggcaaagatttttattaatagtagatcatcaattaacaggcatagtatatagtgaattaacatttttaaataaatattgaatgttacataaatctatttctcttttagtcttatttttgtaattgttacttttttctgtgatattctgaatgggttgagcagtaccaaatgatattttttgttgttcaagaagtaattgtgtatgttttagttgaagaaagaaaaatccagctagtggacttttttagattctctttatgaaaaaataaaatcaatcctctgcatgttttatgattaggcacattattattattgtttggtacctttgaattgcattttcttaaaaattaaaaatggaa

SEQ ID NO: 646963 - DNA, 642 bp, Homo sapiens
ctacagtttaagccccacagtttaatcctgctttgggaacttaagctatgtaactctgaacaaattatttgacatatctgagctttaattttcataaaacagggataataagattaccttctttcccaggttattggtgattttaaaagaggcactgtrtgtggcacccttccttcagggcctagcatagagtgaacattcaataaattagagacttagagttttcgtcgctgagatctgtcccagggaagggaaggaatggatgtttgcagaacagctgcaggaaaggatcatggtgagatgcaggaataaatgacgggctaacccacagctcattacagcctcgcaaattattatagttgtatatattagcaaattctttccagtcttacttttaacctgggcactgttcacactactcaattttagagacttgaatgtttatgtgagccaatgtaaatgaactataactcatgaaatgtacatagaagagatacacttttgtaacatgcatgccataaactgttgagactctctgaattgcgttctcttccttgtgaaatatagaaggtgagtttctaggtaattataaacaattttctccttattccaattcaattaacttaattgactgctttatga

SEQ ID NO: 646964 - DNA, 593 bp, Homo sapiens
atttcaaacctatttctgaattctttttatttttttctagcagaaaaaagtaatacactctaattatcatagaaatattcaaatgcatatttaacctgacaaaatctatgattaattaatatgcttacttttctcctttacaaggatattacatggctttaactgcagttattcccctgtaattactatggattagtagtaagttttgtcttgcttattttatattcttccaaattggacattatcattaatgttacaaatatttgctttttgcctagaaattcatccacgtttgctatgtctktttgcttctcaagtattctttacacagtcagttctcactattcataaattccatatttgtgaatttgctacgtgctaaactttgttatcccaaaataaatatgcgtgtcactttcacactcattcatggatatacacatgctcagaacagcaaaaaaattgagtctcgtaagctatgtattcccagctgcggctgaacaaggtaatactctgccttcttgtttcagctctcattctgtaaacaagtgcccttttcatggtctatttaatgttaaatttttcatattttt

SEQ ID NO: 646965 - DNA, 554 bp, Homo sapiens
cagcactaaacagatcatgaaaaagatacttgctgaaacaaaaaggcagtgcataaccttgttctatctcaactgtgaatatgtgtattgggagaatcaaattttcacttctccgtgcrtgtttgagaatgatcttaaaagcttgcctagggtattgatgtgggggttgcaaacaaattttagcaaataggcaagtttgcaaatatagaatccatgaataatgaagatcaactgcacttgtgaatattaaagataaaattctaatatccttagataaaattctttatattaagcagaggtcccagaatttatttttcattaacatgtcaagggtatgtagacctcctactctaacttttgcaagatcctaggccttagaggatgaagagatggcagtgttccagtgttccaacaaagtaagatgaagatgctgatttgtgagggtccaaagaaccaaggcaagaaaggaaaggctactcttaaattgtttgtgtaatgtagtttataaatgatttttactcattcgtttgtttagcaaacaatttaatatcgta

SEQ ID NO: 646966 - DNA, 554 bp, Homo sapiens
cagcactaaacagatcatgaaaaagatacttgctgaaacaaaaaggcagtgcataaccttgttctatctcaactgtgaatatgtgtattgggagaatcaaattttcacttctccgtgcgtgtttgagaatgatcttaaaagcttgcctagggtattgatgtgggggttgcaaacaaattttagcaaataggcaagtttgcaaatatagaatccatgaataatgargatcaactgcacttgtgaatattaaagataaaattctaatatccttagataaaattctttatattaagcagaggtcccagaatttatttttcattaacatgtcaagggtatgtagacctcctactctaacttttgcaagatcctaggccttagaggatgaagagatggcagtgttccagtgttccaacaaagtaagatgaagatgctgatttgtgagggtccaaagaaccaaggcaagaaaggaaaggctactcttaaattgtttgtgtaatgtagtttataaatgatttttactcattcgtttgtttagcaaacaatttaatatcgta

SEQ ID NO: 646967 - DNA, 600 bp, Homo sapiens
tttctgtaataaattagtaagtacttagtaattactttcacttaaagcaatacttatcacttcaagcaatacttatcacttcattctaatgatgttgyagctttattttagggatgacagtatgtactatcaccattttagtgagaaatccacatatatttacatcaagtatttgttacagaagccaaataggagagaaaaaaagaaaaagcaagatgcattgaattgtttaaatgtgctcttcttagatttatttcaagtaaacctgttggcttttttggcttccactttgctaaatattatttaaaaatttatttaaacactggtttaaaaatgtagatttacattaaatgttagttaatgttagttggctctgatgattttagaaatcattttgttctttgtgtattcaaataatgatacattcacaaatttggaaactcagccacttttccttttgtcccacatgtaaataaaacaatattaacagtcaattttggctcactttatttaacctccttagttttgctacatgactgtcatgactgtgaaatcaagtttctacatttagtattttatggttaattttgcaactttcac

SEQ ID NO: 646968 - DNA, 600 bp, Homo sapiens
tttctgtaataaattagtaagtacttagtaattactttcacttaaagcaatacttatcacttcaagcaatacttatcacttcattctaatgatgttgcagctttattttagggatgacagtatgtactatcaccattttagtgagaaatccrcatatatttacatcaagtatttgttacagaagccaaataggagagaaaaaaagaaaaagcaagatgcattgaattgtttaaatgtgctcttcttagatttatttcaagtaaacctgttggcttttttggcttccactttgctaaatattatttaaaaatttatttaaacactggtttaaaaatgtagatttacattaaatgttagttaatgttagttggctctgatgattttagaaatcattttgttctttgtgtattcaaataatgatacattcacaaatttggaaactcagccacttttccttttgtcccacatgtaaataaaacaatattaacagtcaattttggctcactttatttaacctccttagttttgctacatgactgtcatgactgtgaaatcaagtttctacatttagtattttatggttaattttgcaactttcac

SEQ ID NO: 646969 - DNA, 330 bp, Homo sapiens
ttttcaaactcaaaaagtacaaaaatgcacctgtgaataacaagtgatgaatcaaagacaagtggggaaataaaacaaacacacaagaacaacagcaaagggaaaaataatttgttgtggtttttgggctgatttattgkatacatttctgaagtaccataaaattattggacatatataaagtgtattgtgggtgatcagatttaaatgtatctgctgatgtattagttgagtaatgcattgtgcttcagagatgtttctcctaattctctgtggcatagagtctgctattccatttattggaatagaaaactgacttcttgcagcaaa

SEQ ID NO: 646970 - DNA, 558 bp, Homo sapiens
gttccaggtgccactgaggtatgaaaaaaaactcctgcagctagctcagggtctgcccaaacagctgcctagttttgtgcttgaaacccagggctctggtcatgtaggcacacaaaagaatctcctggtctgcgggttgcccgccttctgcgttggtctctctgggagctgcagaccagagctgttcctattcagcaattttggctgtgtctcaagccaatgttttaaattgtaaaatttcagtgaaatacacaatttccatcaaatgacaatataaaacttacagtctaaatatatttaatagacctaaaataaattgaatatctatcaaaaataaaacactctagtgttaaccaaatgtatrattacattcttttttgtctttggtttttgatgttgttgttgttgttgtttgcacaacacagtcttgctctgtcacttaggctggagtgcagtagcaccttcatagctcactgctgcctcaaattcctgggctcaatcaatccttttccaccttttcgtccaagctcaaaaatctttctcaactgccgttaagat

SEQ ID NO: 646971 - DNA, 487 bp, Homo sapiens
ttcaacattctttctgataaaaactctcaacaaagtgggtataaacggaacatatctcaaaataataaagactatctatgacaaacccacagctaacatcatattaaacaggtaaaattaaaagacttttttytaaaatttagaagaagacaaggacatccaccttcattaattttttttttaaatagagatggggtctcactctgtcacccaggctggagtgcagtggtgtgatcatggctcactgcagcctcaaacttctggcctaaagcaatgttttcacctcagcctccctagtagctgggaccacaggtgcatgccaccacacccagctaaattttttttttaactttctgtggagacagggtcccacaatgttgccaggctggtcttgaaccctggactcaaacaatcctcccaccttgccccccccccccgcaaaatgctgggattacaatcatgagccattgtgcctagccctttctta

SEQ ID NO: 646972 - DNA, 601 bp, Homo sapiens
tttaatagaatggcaatgtccagtctcaaaatgtgttatcagaatacactgtctcttatcacctcttatctctaccgtgttggtttcattctcaggaacacccttcccatgcagtagcaaaatggcccccagtaaccccagaccttattctacccatttagcatgctctagggacctctttcagatgcttttagtaaattccattgaaacagcttccaatggtcacagtaataagatgcccacgcttgagccaagcatcgtggccaagggratgcaatactatgacaagccacactttgggcgatatgttctcacctagaaccagaagtcatagccatctaaaacatatgaactaagaattaaaaagaggcagtaggttcccaaaagagaaataaaactactgttaggagaaacaagactgctttgaaggtaaaaatatcagatatctattagaaacaagggaatcaattaatctggctggtgaattaggaataaggaaaaatcccttcttcctctaaaaaaatgtccttgggaattattcataaatgtgcacctccaaaaatgtttaaattaaagaaataggtctttatgctacaagtcc

SEQ ID NO: 646973 - DNA, 515 bp, Homo sapiens
gacggggggaggggcatccgtcactgttgaggcttgagtagctcacagtgtgaacaaagcagccgggaagctccaaatgggtggagcccactgcagcttagcaaggcctactgcctctctagattccacctctgggggaagggcatagcagaacaaaaggcagcagacagtttctgcagacttaaatgtccctgtctgacagctctgaagaaagcagtggttctctcagcacagcgtttgagctccaagaacagacagactgcctcctcaagcaggtccctgacccctgtgtagcctgactgggagacatctcccagtaggggccaacagacacctcaaagaggtgggtgctcctctgggacaaagcttccagaggaaggatcaggcagcaatatttgctgttctgcagcctctactagtgatacccaggcaaacagggtctggagtgggcctccagcaaactmcagcagacctgcagctgaggggcttgactgttagaaggaaaactaataaac

SEQ ID NO: 646974 - DNA, 663 bp, Homo sapiens
tttgggtggggctatagaataattagtcttatgtaagacagaagtaaactagcctatgattttaatctatcttggaaatataaatattctaatctttgttaaaaatagcaacaaaagttatccatttaggttacattaactcatatttaatccataggaactgatatgaccaaaacattcacagaacttcaactccttttcagctcttagtagctaaacttgctatttttaatgcttyatcgaaatctatcaatttgaaaagtttttagctaggcatttttgcaaataatcttgaagaaccatttttttgtaacgatgcattttatttgcaaaatatattaccttaaaaataattgcacttattttttacataaatcttttctgcagaaaagcagacagacatcaaatgcgcatctctcccttcaagactcaaaatcagatatggtgaaacagtaagaggcaaaagtgctacagtctttgaagaaacttttgtaaaaatagcaccttatgtgaaactaaattcctccatttccaaagctatctttcattcttaatctaagtaacccttaatctatgttcttaaatatcagcattgggcaagcggtatggattgttaaaatgaaaacagatttcttttaggtaggtacaagtatgtttaaccta

SEQ ID NO: 646975 - DNA, 562 bp, Homo sapiens
taaacatactcaagaacataaaagttgttttaagaggaaaagaaacaaaaagaccacagttttaacttttatatatatattaaagttttgagtttataaatttaagacatgaacatcatcagaaaatgttttttcaaaaayccagatatcaagagataaagaatacaaacaggacaaagatgacattttcatcagagtcccctaatcagtgggactcaactatgaaaatatgctcttaaatgactgacgacctgctagagttcaaaatcattccagagtctccgtccccctcccaccctcacagggaaacaggaaatactctttacaattattatttttttttataactagttaaaaccagtttaacatcaataagtttctaacaaaaatttaatatctgaagtcattcgcattgtcctagcaaattaaaattcttaagtaactctgtataatgtattcactgtcaacaaagaaactagcaaacaattacagaataagtaaacgacaatttcatcatctccgcaggtataatttatttccaactctatgttatttaatgtaa

SEQ ID NO: 646976 - DNA, 562 bp, Homo sapiens
taaacatactcaagaacataaaagttgttttaagaggaaaagaaacaaaaagaccacagttttaacttttatatatatattaaagttttgagtttataaatttaagacatgaacatcatcagaaaatgttttttcaaaaacccagatatcaagagataaagaatacaaacaggacaaagatgacattttcatcagagtcccctaatcagtgggactcaactatgaaaatatgctcttaaatgactgacgacctgctagagttcaaaatcattccagagtctccgtccccctcccaccctcacagggaaacaggaaatactctttacaattattatttttttttataactagttaaaaccagtttaacatcaataagtttctaacaaaaatttaatatctgaagtcattcgcattgtcctagcaaattaaaattmttaagtaactctgtataatgtattcactgtcaacaaagaaactagcaaacaattacagaataagtaaacgacaatttcatcatctccgcaggtataatttatttccaactctatgttatttaatgtaa

SEQ ID NO: 646977 - DNA, 564 bp, Homo sapiens
acctagaattctacctgaggtaagggggaatggattggaatttaaggatgttgaggtggttagaatttgtgggacagagtaatgaagaagagggagatacagagagtggggagagcactttggaaatctgcagaggatcccccccagtcttctcctaagtatgatttggatatgagctggaagaaactacttggagttgaagaaaaaaacactgataggcaatagctgagtaattcctggagctcacacagggctgagactaccctgtgtttccatcagccagtgtggagagaccccaaaatacacaggacattggataaaatcctcagaaaagccacatcttagtagtaaaaacaaattaactctaaactagatgttactctggatataccctaaagraaagtctcaaatggatcaaagtgatctgtaaaaactcaactgcattccagaacacaactcaatgctcttaaaaggaatataacaacatccagtgctcaacaatgtaaaattcaaaataatcaccaggcattcaaagaaatgaaaaaatatgacctatacccataa

SEQ ID NO: 646978 - DNA, 622 bp, Homo sapiens
attccgtggatcagagatgtgctgcttcactgagtcatgtctaagtcaagatcatgagcaaaataaatggccagcaattccactccaatgtattctcctgagaaacaatgaaaacatatgtcaataaaaagacttgtataagaaagtttataagtaycaaaaactgggaaaattccacatgtctattgaaaggacaacaacaggtagaccattgcactgtatctgtaaaatggagaagcagcagggaaaaggaaccaaatacttatgtatacatcctttccagtcaatccccacactggcccatcccacaggagtacatactgcatgatgcatttgatccatggtgataaaaacaaggtggtggttatgaaggccagtgtgggagacagactggaaaggatgcagtggggctttctaggaggatggaaatattgtgtgtcttgtgttgaatatggccacacagagttatactactgtcaaaaacttatcaaaccaaacactcaaaatctatgtattttactgtatgttaattatatctcagtctcttaaaatggtacctgtgtaactgcacccagcttctaaaatacttgtactctctcattccaactagacatatttaata

SEQ ID NO: 646979 - DNA, 336 bp, Homo sapiens
ccacccacctccctggggcactctaagccaccctcacagccctctgatgccagtcctgctcccaggtcatgccagccccatcttacccatctggtttttgagtttggacaagctcctctccagcttctctacccgacgcatatcttgctgcttctctttctttaatgtgcaaatctgcccaaagcacaaggggaaagggccctggagagaggggctggaggctggacaggctgccctctccctctctgcccccacctccacaaagcccagacccatgaccacctctggctstactattcccattttacagatgaccagaaagatccagtgacctat

SEQ ID NO: 646980 - DNA, 478 bp, Homo sapiens
gtatcaatacctttaatactatagttttcaagaaacgcaaaataaaattttaaggcaaaaacaacacattcaaacaacttaataatttattacattacagtggcatcacaccagcagtcaataaggccactctagggaaaaatctttcagtatttccaytacacattctgtttacaataattcataaactggtaaaattcattctaagaaaacttggcaaataaaactttggactggaattggcatttctttctctgcttttcgttcccactgtttctttcttttatactacagtattcatattttaaaatgttttaaattatttcagaacattaagatagcagttacatattttaatagttatattattttaaaacgactctttaaaattaagttttagagaaactatattatggatagggctgatttacattttcaaattttctaaaatcagctttggttttagagctgatttttt

SEQ ID NO: 646981 - DNA, 478 bp, Homo sapiens
gtatcaatacctttaatactatagttttcaagaaacgcaaaataaaattttaaggcaaaaacaacacattcaaacaacttaataatttattacattacagtggcatcacaccagcagtcaataaggccactctagggaaaaatctttcagtatttccatkacacattctgtttacaataattcataaactggtaaaattcattctaagaaaacttggcaaataaaactttggactggaattggcatttctttctctgcttttcgttcccactgtttctttcttttatactacagtattcatattttaaaatgttttaaattatttcagaacattaagatagcagttacatattttaatagttatattattttaaaacgactctttaaaattaagttttagagaaactatattatggatagggctgatttacattttcaaattttctaaaatcagctttggttttagagctgatttttt

SEQ ID NO: 646982 - DNA, 601 bp, Homo sapiens
ggtctataaaaatatgaacacagaagtttgggtcagttcaatgactgaactaaaacattatttcccaacatgtccatgttgtacaagatgatggggttgttatctgtgatgccattgcaaagatcttgatggttccaaaacactaagcatcacataagccatgttatasgtgtcgccccaaatttaccaaaccatttggattaaaactctcagtaaggacctctgaggcacaaagatctatgagtaactccttaacccctttgctcttactcttcaggtacaatttcaaattttcacctttccctttctgcactgaccttgggaaagtcactttatctctgtgatctaattttccacatcaataatgtatctatacttggcatagagagttatgagaataaaataataacatatatgggcaatttctgtgaataccaattgtacaggtggatttttaaataatagatttagggccgggcgcagtgactcacacctgtaataccatcactttgggaggccgaagcgggtggatcacctgaggtcaggagtttaagaccagcctgaccaacaaggtgaaataccgtctctactaaaaatacaa

SEQ ID NO: 646983 - DNA, 633 bp, Homo sapiens
  misc_feature 559: n = A,T,C or G
ttcatttgaactctatgattgccactgaataatttggtctttccatgcctataagcaaagaagttacgtgtattaactggaacaattggtcctgattattaaggagagtaagtttttcctacagacaaagagatgtatgtatgggacccagggaattttacagaagcatctctaagaacttccatgcttttttgtcaagttaaatggacaactatcgcaaccacatacaggcagaaccactaaragtaaaaacccctcaggaattaggattcgggtcaccctgcttggcgagcctaattagtcacagtgctaggtgaggtcaaaagtaatatgaagtaggaagaggataaacagtgtcataaacaactgtgatcttatggccagttgcagagtaagaaattaataactactcctgttctcttctttgccttgttatgcatgtactgactttttacctctttctttttccctacaattttataaaaatggtgatacatttgtaatttgtccctcaaattacagactatcagcttgaaactatgattggaattgaaggttnaagaaacccagctatagattcagtgactaacaaaattttggggacagtgttaagctcattctaattgcataagg

SEQ ID NO: 646984 - DNA, 633 bp, Homo sapiens
  misc_feature 559: n = A,T,C or G
ttcatttgaactctatgattgccactgaataatttggtctttccatgcctataagcaaagaagttacgtgtattaactggaacaattggtcctgattattaaggagagtaagtttttcctacagacaaagagatgtatgtatgggacccagggaattttacagaagcatctctaagaacttccatgcttttttgtcaagttaaatggacaactatcgcaaccacatacaggcagaaccactaaaagtaaaaacccctcaggaattaggattcgggtcaccctgcttggcgagcctaattagtcacagtgctaggtgaggtcaaaagtaatatgaartaggaagaggataaacagtgtcataaacaactgtgatcttatggccagttgcagagtaagaaattaataactactcctgttctcttctttgccttgttatgcatgtactgactttttacctctttctttttccctacaattttataaaaatggtgatacatttgtaatttgtccctcaaattacagactatcagcttgaaactatgattggaattgaaggttnaagaaacccagctatagattcagtgactaacaaaattttggggacagtgttaagctcattctaattgcataagg

SEQ ID NO: 646985 - DNA, 583 bp, Homo sapiens
gtgtttaatactataaactttcctattaacactgctttagctgtgtcctggagattctggtgtgtcatatctttgtatattgtttaatttccatgtaattgtatggttttgagagatattttggtattgatttctatttttattgcactgtgatctaaaagtgtcattggtatgatttcagtttttctgtatttgttcagatttgctttacagttaagaatgtagttcagtttaggaattgtgccatgtttatatgaraaaaatgtgtgttttgttgttgaatggagtgttctgtaaatatctgctaagtccatttggttaagtgtcaagtttaggtcctgaatgtctttgttagttttctgccttgattatctttctaacactgtcagtggattgttgaagtctctcactattattgagtggctatctaagtctgtgtgtaggtctctaagaacttgtttaatgaatctggctgttccagtgttggttgcatatatatttaagatagtgaagtcttcttgttgaattgaaccctttaccattatgtaatgcagttttttgtctttttcttatcattgtcagt

SEQ ID NO: 646986 - DNA, 583 bp, Homo sapiens
gtgtttaatactataaactttcctattaacactgctttagctgtgtcctggagattctggtgtgtcatatctttgtatattgtttaatttccatgtaattgtatggttttgagagatattttggtattgatttctatttttattgcactgtgatctaaaagtgtcattggtatgatttcagtttttctgtatttgttcagatttgctttacagttaagaatgtagttcagtttaggaattgtgccatgtttatatgagaaaaatgtgtgttttgttgttgaatggagtgttctgtaaatatctgctaagtccatttggttaagtgtcaagtttargtcctgaatgtctttgttagttttctgccttgattatctttctaacactgtcagtggattgttgaagtctctcactattattgagtggctatctaagtctgtgtgtaggtctctaagaacttgtttaatgaatctggctgttccagtgttggttgcatatatatttaagatagtgaagtcttcttgttgaattgaaccctttaccattatgtaatgcagttttttgtctttttcttatcattgtcagt

SEQ ID NO: 646987 - DNA, 395 bp, Homo sapiens
ttgtcctgttttgaattcaagtgggatattagcagtgagtctggctttattaatggcggcatctttagtgttatcgactttctcactcactcctcgctctcactccaagctctgtttcctttaattaagccccaagctaagtgctgagcaggtgatgtgagtctggaacagcctttgttctgggatttaggcactttctcatgagcttgggaatggagagacagcgtgctactgcctttgaagtctgacatccatccccacaatcagaaaagtgggacagtgtagagcgtcaggccagagaggcagaaactatrctctgtccccactcagcctccctacctgtaaagttgggggtgagacgcatgagagtgtctgccatccctctcagccccgtg

SEQ ID NO: 646988 - DNA, 548 bp, Homo sapiens
aggatataacttcagcagaaagtctgccctttggtcacctgacagggagtcctgctttgtgctttttaaacagggcacattaatctggaaactgattatggcatgaatgttgcaagaacagcacagcacagggcatgagtttgggacaggtaccatgttgtaatgtctctatcgcacccttaaacttatccatcctgtaaaaggttggttctcccttttctgtccactaaaattcaggggggacaaggactgtctgcatgttaatcatagctgataagaacaaccggaatctttgtactgcttagcactaattccaccctaacatttaaggctcaagcaggcawaaagcattttcataataacacttactgaagtgttaattaaatgcttgttatagtagtcaggttagcccttaccagcatggattcagagagacctcaagttcatgctgtatttgttgactaacttactagctttagtttctcatcaggaaagtgtgtgcagatgtgtacttaatatgcattgtggaaatcttaaatgaatacaaa

SEQ ID NO: 646989 - DNA, 597 bp, Homo sapiens
atatgacataagaagcacacaagaatatcactgctttttgtcctagagtattctaaagcaaataattttactactaaataggcaaatgaatatatctaacaaataaggattaaaaaagaaagcataatcacaatagcatcattataccaatgtaattaatatcagttccttcatatcacttaatacacaatctatgctcaatttttttctgtctcaaaaatgtcttattgtagttgatgtgttcaaatcaggacccagaccacatctacacaacacatttaattcctgattcstatgtcccttttaatatatatcatttcctcctcctttataattctgttactgaaaaatctgggtcattatttcctgctttgattctgtatcctcacaatatcattagaatgtttctataattggtcattaaatatagatgcatgattggattcaggtttaatacttatatcaagaatagtttatagttagtgctgtttctgagtattgcatcaccaaacataatttctggtttcttcatttcttgtaatattaatactacaaaagtgtaacaggaggtgtcagcctttacaaagtcattctcaa

SEQ ID NO: 646990 - DNA, 580 bp, Homo sapiens
ctaggctggctggtcctcagggccctgcagttstgtgtacaggtgttggccatggtaggcaggaatggggcaacctctaggccactggcagaatgccactgggtggtgttggtggagaggcaatgtttttagtgatggcagcctaggccagcagatgttaagcatgtgtgccacttgtgcctcagccccaggtatggtagcccatggttgcttgttcctaagccctggggtcaacagccagctcttctcttgcacctctgtcccagcactgctggcttccaggatagtgcatactctgttgggggtagggctctagaatggtgccttgctcagccctggttgtagcctgcatcttgatcatgcctcctacctgggtatggtagcccacggttgcttgtgcctaagccctgagggcagcagctcatgcttctcccgcacctcagccctggtgctactgggttgcaggatagcattcagtctattgaagacaaagttcttttttttttttttttgagacggagttttgctcttgttgcccaggctggcgtgcaatgatgcgatctgggctcactgcgacttc

SEQ ID NO: 646991 - DNA, 609 bp, Homo sapiens
actggattttagaggctactgtcactcagcctgatcagcatgaatctatccttgtatcaagtgttccttgagatctttgaatctaaaaccttttaaaatttgtataagttattctaaagtgagaaaataaatagaatagaatacattcttttaggttgataccaaagtaatcatggtttttgcactactttcaatggcaaaaacttactttgcatcaagctcatagtagaacattacagagagataaaataaatctttctcatctcgcctttggtgacatcacactttaaaaataggtatgagcaggagcccaaaggaggaatttcagttaggctaatcggcttacaagtagaatgtcttccaggattcaagaacttttggcaaacattagttagcacattcttactaaaaggtaaaaaccttttttttctttgtcaggttttaaatgacacttgaragggaaactctccaaaccatagccaaaagcaggttaatctaacttcccccagccagctcaagatcaatgaaaaagttagccctgaggagttcaggatgttaattgtgaaacataattccattacatttatggctgtataaactgagcagagc

SEQ ID NO: 646992 - DNA, 609 bp, Homo sapiens
actggattttagaggctactgtcactcagcctgatcagcatgaatctatccttgtatcaagtgttccttgagatctttgaatctaaaaccttttaaaatttgtataagttattctaaagtgagaaaataaatagaatagaatacattcttttaggttgataccaaagtaatcatggtttttgcactactttcaatggcaaaaacttactttgcatcaagctcatagtagaacattacagagagataaaataaatctttctcatctcgcctttggtgacatcacactttaaaaataggtatgagcaggagcccaaaggaggaatttcagttaggctaatcggcttacaagtagaatgtcttccaggattcaagaacttttggcaaacattagttagcacattcttactaaaaggtaaaaaccttttttttctttgtcaggttttaaatgacacttgagagggaaactctccaaaccatagccaaaagcaggttaatcyaacttcccccagccagctcaagatcaatgaaaaagttagccctgaggagttcaggatgttaattgtgaaacataattccattacatttatggctgtataaactgagcagagc

SEQ ID NO: 646993 - DNA, 558 bp, Homo sapiens
ggtgtactgatcaatgactatataacttaggaagtaattgttctgattattgctagaaagcaaatttcctaaaacttttgtggttgaaatagcacctcaagattgtgtgggtcaggatttccaaagcgtttccttagaggaattttctgtttgcttgaaggtattcagctggaaaatgggctggttaggatkgtccacgtgagtttcactcacatgtctgtattcttggcagtgaaacaggaaatttaccctgactgcttcgcgggcaggaactagagtgccggcactggagctagctagctgcttcagcaacagcaggggcaaacttcactcactggaacctactgtgctcaacccctcgcgggaaggagcatgtgggtgcaggagccggggcaactgcttctgggcaccagcaggagcacaactccatgcggggcctgcagcagcatctagtggggggcactcccccttaagcccaaaaagaagtgttacagtcagcaatcctttaccattgctgtctgcagacggcttatgtgttagcagctcagtgtagggtca

SEQ ID NO: 646994 - DNA, 409 bp, Homo sapiens
gtattgtcaacagagaaccaagttagaaaaaactagttatagtctgaaacaatgctgtttaaaagactgtagtcaccagtgtaaactgactcaggcaacacttcccagggtccatgccgtggacaactgactaatctctctataaatactaaaagataataaggttccataaccaaacaagayggggaaatgctggatttaatgtcaagcctgtttccatactggttataggcttgagaatcctatggagcaagtctttctggatttgaatcccagctcttccattccagcttagccgtgtgacttaaattgagatagttgctgtaaagactggaaacaataatgcatgtgggagccttagaacagagccttagacagtgctcaataaatgttaaatcattaatagtaa

SEQ ID NO: 646995 - DNA, 575 bp, Homo sapiens
ccgggctgatgtccagagccacccagacctcagattccatcttgtgaggctggccttgggcacgccccaacattgtgggggtgtggggtgggaaatggggaggcagatttcctaagggtcttgtttacaccacgaaaatggtctgggggtttggaactatccaggtgtcgggtcccaactgctcagccaccaagcagctgccttcgccttcccctcctccgccctcaccagtgtgtcaccctgggggcagcagggtcacttgtgctgtaaccctgcagggaccaacgagcaggctatcatcgatgtgctcaccaagagaagcaacacgcagcggcagcagatcgccaagtccttcaaggctcagttcggcaaggcaaggggaaggctggtgggggtggggataggtgagccttggggttgggggtacagcctgggaggcagctccattctggacgactttcccctagagccagcccactggcagcatgggcacatggaacmtgtttgcatgaaaacaattgttctttattgaaattcaaatgtaactggctgccctgtgttttatctggcagatc

SEQ ID NO: 646996 - DNA, 593 bp, Homo sapiens
aggattaaatatgtgcacagccatggttgcctcaagcctctagtgactcatatcattagtttggagatgtaacgaaggaagatcagctcaaatattctcttggagaacccrgtatgcatttttacagtttccctctcttagtcctcacagtgatacattctttgtattcaaacatttggggaaactggcactcagagaggttttaagttgcccaaggtcccagagcctgtaatcaacaaggtggggattaaaatccaggtctgacaaagcccttgatctctctgctgctctgtagatcagctgatgtagcctggtggctcctcgtagcaacatgtgaccttagaaggaggcacatgtgagacgaagtctttaattcaggcatgcattcattcattgagtgccaagtgacaggtattttatggtgatgccatactcagagcttgcagtctagctagcaataccaatttcattttactgagagcttatgatgtgcccagcactgcactgaatgctgaattgagtcacacacaaccccctaagcaacgggatgaagcaggagcacgtttctctccgtgtaaccggtaaagatactg

SEQ ID NO: 646997 - DNA, 565 bp, Homo sapiens
tgtaaatatctattaagtccatttgttctataatgcagattaagtctgatgtttccttgttgattttctgtctggatgatctgtctaatgctgaaagtggagtgttgaaatctccagctattattgtattggggtctgtttctgtctttagctctaatatatatttcttaatatatctgggtgcaccaatgttgagtgtgtgtatatatatatatacacatatgtatatattttaattgttatgtattcttgctgaattgacccttttctcattatataatgaccttctttgtctcttttgtagtgtttgtcttgaaatctattttgtctgacataagtatagctactcctgctcacttgtagtttgtatttgcatggaatatctttttccatccttttattttcagtctatgtgtgtccttataggtgaagtatatgtcttatagacaatagaacgtggastcttgtttttttatccattaagccactcaatgccattttaatttttttaattttattttttgtggatacatagtcagtatatatatttgttgggtatatgaga

SEQ ID NO: 646998 - DNA, 412 bp, Homo sapiens
ttaaaattaaaaagaaaacaaatttaaatataaaaaataattttctatctaatttatttctctcttctcacatattactataatcagtcaggaaaaacagactgctcattcaacacttcacttagaagtctcctcggtaaatattgaacttcattgctcatcagttttacctttcaaaaaacactggaactcaaacacaatttagccaagttctttgctacttyataacaagcattgcttttcctccattgtccaatgatgcattcctccttttcatgtgaacctcattaggatggcttttaccatccacagttccacaaacatcctgtatattattattttatgtattctctaagaagagaaatgctttatctacagctctcctctttcttatcccttattataatcacct

SEQ ID NO: 646999 - DNA, 657 bp, Homo sapiens
gatatatgctaagacatggtgatatagtagacaatagacaatataaaattaatatacttaattactttttaaaagactgagcaaaaatgaatgataaacggaataacaagtgtttattttggaatacagagagaaaaagaaaaaagggaagtaggggaaagagaaaactagtactctggcagaaaaattatgaaaagaaagacatttatctttgccaatattctaataataggaaatctatcaaatctatcaaaatctctaaaatatctaaatgacatttttaaccctcaccagaatttcccccatttaatatttggttatagaaaaaagatgaaatgataaagaaacaactacaaacacacctgtggacatgtttgtacatttctgtatttttctgtgtggtgtgcagcaaagagggaatkgctgggttacaattttttgtgtgtgtttgtctttaacatacaccactagcaatgtatgagttctacttattacatacccttaaaccttgagttttctcttttcttatagttaatctaatgagagttgtagaggtatatcattaaagttttagtttttccctggtgattaataatggtaaatgattttcatatcttacaggctgtaggcatatttaaggtggttaagtgtcttctc

SEQ ID NO: 647000 - DNA, 666 bp, Homo sapiens
ataatatgcagttttctccaaatgacttagtcattagaatcctttttcagtagaacatttcacagaaataatgttctctggagcaatgaatgtcgaatcctgggaggtgaataagggactttattgtaacaatcaaaagaaaaattcatgaaatcttgaggaacggtttttcaaagagaggaacactaagcagaaaaatgggtttttaactgtagcacataaaccaaatttatttatgttcttaaagagggtgtttttcactataatgatggacttaaacaatggctgaaatttcatggggaaaattaaatgatattgtagttacttttggagaacacatagttacttagaacatcaagttttgaaaaaaatgtttatataggagctgaaattctagtagaattgatagaaatatgcttgcggtagaaatgtgtgtacttaaaatacacacgttacatgtgtaagtacgatgatcaagcattttaaacaartacattagaaaaatatatctttaatgtgtgaaatctttatctaccctttgttagaagaccagagttttacttccaagtctactactacccgattgtagcaacccagacacatgcatataatgacttaaatttttcattagtaaaatgaagatattacccttgtggtcagataagc

SEQ ID NO: 647001 - DNA, 435 bp, Homo sapiens
agcagccataaggataagaatgatgtgagatgaatctggggttgcacagctagtaccctagtttctctgaaattgtttcttctaagcccactccccatccttctcctgcctgttttagatatgacctttacattactcaaggacaagcaataaaatattttgcaytttgttttatttctttcaaggaacttcacaagagcagtcctgtatctgcttttcttaccattgaacctacagtgcccagcacatagtaggcactcgacacatacttgttaaaggaatgaacagatgagtgaccaaactggaaacaaccatcaaatacaaggataatacaaaaatccatgattcctgtcccgagatttctttcttttttaaccttttgtctgttgagattcatttatgtgcagtgaagtgcacccttattagtatacagtt

SEQ ID NO: 647002 - DNA, 562 bp, Homo sapiens
attcaaccagctacagcagcttagcacccagccaaagcctgcatctctcccaccttaagatttagtggttggctaaagttagcagcatccaggccacatctatctctgcattctaagtttgcttacaagataaagatacaaatgcaggctggctccaacctagycagagatcccagccccactctctgcatcccaaaatccctcaaagacccaagagactttccagatttctacagtctcctcacaggttcccttgacagttaaatgccctctctttacctcaactagctgcaggtagaatataatgggtacaacagaaaatcactgtaagtgtaatatgaagatacacagcccttttaagcatttcattatattacatctagcttacctctaagggatttattcagatgtgactgaagaaagtctaaagggaaaaaaagcaatttaatttgataaattaaattatcaattatagccaaattatttggctataacaaattaaacattttaagcagacagaagatgcaaacattttaagttgacagaagatataaaatgttca

SEQ ID NO: 647003 - DNA, 562 bp, Homo sapiens
attcaaccagctacagcagcttagcacccagccaaagcctgcatctctcccaccttaagatttagtggttggctaaagttagcagcatccaggccacatctatctctgcattctaagtttgcttacaagataaagatacaaatgcaggctggctccaacctagccagagatcccagccccactctctgcatcccaaaatccctcaaagacccaagagactttccagatttctacagtctcctcacaggttcccwtgacagttaaatgccctctctttacctcaactagctgcaggtagaatataatgggtacaacagaaaatcactgtaagtgtaatatgaagatacacagcccttttaagcatttcattatattacatctagcttacctctaagggatttattcagatgtgactgaagaaagtctaaagggaaaaaaagcaatttaatttgataaattaaattatcaattatagccaaattatttggctataacaaattaaacattttaagcagacagaagatgcaaacattttaagttgacagaagatataaaatgttca

SEQ ID NO: 647004 - DNA, 562 bp, Homo sapiens
attcaaccagctacagcagcttagcacccagccaaagcctgcatctctcccaccttaagatttagtggttggctaaagttagcagcatccaggccacatctatctctgcattctaagtttgcttacaagataaagatacaaatgcaggctggctccaacctagccagagatcccagccccactctctgcatcccaaaatccctcaaagacccaagagactttccagatttctacagtctcctcacaggttcccttgacagttaaatgccctctctttacctcaactagctgcaggtagaatataatgkgtacaacagaaaatcactgtaagtgtaatatgaagatacacagcccttttaagcatttcattatattacatctagcttacctctaagggatttattcagatgtgactgaagaaagtctaaagggaaaaaaagcaatttaatttgataaattaaattatcaattatagccaaattatttggctataacaaattaaacattttaagcagacagaagatgcaaacattttaagttgacagaagatataaaatgttca

SEQ ID NO: 647005 - DNA, 450 bp, Homo sapiens
ggaattcaatgtaatggaaacaaaccgattggaatgtaatggaatggaaaggactggaatgtaatggaatggattggaatcaacccgattacaatccaacggaatggaatggaatggaatggaatggaaaggaatggaatggaatggaaaggaatggaaagaactggaatggaatggaatttattggaatggaatggaatggaatggaatcaacccgagtggagtggaatggawtggaaaggaaatgaatggaatggaatggaatggaatggaacggaacgaaatggaatgtacccgagtagaatggaatggaatgtaatggaatggaatcaacccgagtggaatggattgcaataaatacgagtggaatggaatggaatggaatggaatggaatggaatggaatggaattaacccgagtggaatgcaatggaatagaatgaaatggaat

SEQ ID NO: 647006 - DNA, 181 bp, Homo sapiens
gggacctggtcaatgtgggctgctgagcactgcttggataagccaggtgcaatgtgcattattgaaggccytgtggacagctgggatagcccagtgatgcccaagggcctagtcaaaagtggacaaagcacgtatttggatggacctgggagatcctgctcagagatcctgacaggacaaa

SEQ ID NO: 647007 - DNA, 545 bp, Homo sapiens
aaaaaaaaaaaaaaagaactccccattctcccctctccccagtccttggtaaccgccatcatactttgtatgaatatgactactctaggtatctcaaataagtggaatcatacggttacaataaaacaacttttaataaataaatgtcaaacacagccctctctcactctcaraaataacctggtttgcaacacaaatgtatatgcgatcactgtacatttgagaacaccactatcaccaaacaatgacatcttgctattcagcaaaaagtaaggttcctgaaaaggcgcctttctcccaagtgtgatgtttctgttacatgcatgcctccccatagacattcccttttgagctatctcatctcatggctttgtacagttccaccttaactaagcaggagctgtttcccatcatccccttctctgtagggttttgaattagtgttgcccataggtgacattctgtgcaagatttggaaggcaaaatgaagcaccagccattccgtttttttgtttgtttgtttgtttgtttgtttgtttttttaa

SEQ ID NO: 647008 - DNA, 388 bp, Homo sapiens
ttactttcatttccattcagttccattccatttgattccattccactcggtttcaytccatttgagtccattccattccattccattccattccattccattccgttctgttccattccattccattccattccattgggtaccattccatattgttccgttcgattccattcgaatccattccattccagtccattccattcgattccattccattccattcgattccacttgattccactccattcccttccactgcattccattcgattccattccattgcattgcattccattccattggattgcattccattcgattccattccattcgaatcaattacatagcaatccattacattcgagtctgttctattccgttccattc

SEQ ID NO: 647009 - DNA, 388 bp, Homo sapiens
ttactttcatttccattcagttccattccatttgattccattccactcggtttcactccatttgagtccattccattccattccattccattccattccattccgttctgttccattccattccattccattccattgggtaccattccatattgttccrttcgattccattcgaatccattccattccagtccattccattcgattccattccattccattcgattccacttgattccactccattcccttccactgcattccattcgattccattccattgcattgcattccattccattggattgcattccattcgattccattccattcgaatcaattacatagcaatccattacattcgagtctgttctattccgttccattc

SEQ ID NO: 647010 - DNA, 388 bp, Homo sapiens
ttactttcatttccattcagttccattccatttgattccattccactcggtttcactccatttgagtccattccattccattccattccattccattccattccgttctgttccattccattccattccattccattgggtaccattccatattgttccgttcgattccattcgaatccattccattccagtccattccattcgattccattccattccattcgattccacttgattccwctccattcccttccactgcattccattcgattccattccattgcattgcattccattccattggattgcattccattcgattccattccattcgaatcaattacatagcaatccattacattcgagtctgttctattccgttccattc

SEQ ID NO: 647011 - DNA, 388 bp, Homo sapiens
ttactttcatttccattcagttccattccatttgattccattccactcggtttcactccatttgagtccattccattccattccattccattccattccattccgttctgttccattccattccattccattccattgggtaccattccatattgttccgttcgattccattcgaatccattccattccagtccattccattcgattccattccattccattcgattccacttgattccactccattcccttccactgcattccrttcgattccattccattgcattgcattccattccattggattgcattccattcgattccattccattcgaatcaattacatagcaatccattacattcgagtctgttctattccgttccattc

SEQ ID NO: 647012 - DNA, 632 bp, Homo sapiens
tcagaaatatttctgatcacaatgaaaaattgctttttagaaatacaagttctttttatttctgtaaatcttatttactgttttctcattgaagacaagaggtgtggttttactggtgattaggaaattttaggactgggctaataaatatcatatatgaatattgccctaagatataatgcaagctattattgcaaacttatatgaacaaataattaagtggtaatatttaattcacagatgacacttacctaaagattttccaaggaaaattgccttgaattaggccatgagaaaaagttatattatttttgaattgacaaataaaatggtacttttctttmaaagagagtatgcatcacatgtttttgtttgtttcgcacactatgaaactgactaattgtggtaactctcttatgccaaactctgttttttttatctcttttcttagcctgaaacagatttctgtctttgcccttatattaattgtcctttctttgttttctgcatttcattaaatttccttcaattaatttgtaagtagaacaaaataattagagaatagaaatgtttatcctctgatcgatctctgactccatgtaggtagccatcaaaaaactaaattgtggatt

SEQ ID NO: 647013 - DNA, 577 bp, Homo sapiens
tgaaaaaggattaataaccggaayatataaggagctcaagcaactctataggaaaaaaatctaacaatccaatttaaaaatgggcaaaagatctaagcagacatttctcaaaagaagacatacaaatgacaattagacacataaaaatgtgctcaacatcactgatcatcagagaaatgcaaatcaaaactgcaatgagatatcatctcaccctagttaaaatggcttttatccaaaagacaggcaataatgaagctggcaggggtgtggagaaaggagaacttttatacaatgttggtgggaatgtaaattcgtacagccattatgaagaacagtacggaggttcctcagaaaactaaaaatagaactaccatatgatccacaaattccatggctaggtatataatcaaaagaaaggaaatcagtatattgaaaggatacctacattcccatgtttatttcagcactattcacaataaccaagatttggaatcaacttaagtgtccatcaacagatgaacagataaagaaaatatgggaaatatacacaatggggtattattcatcaataaaaaaa

SEQ ID NO: 647014 - DNA, 577 bp, Homo sapiens
tgaaaaaggattaataaccggaacatataaggagctcaagcaactctataggaaaaaaatctaacaatccaatttaaaaatgggcaaaagatctaagcagacatttctcaaaagaagacatacaaatgacaattagacacataaaaatgtgctcaacatcactgatcatcagagaaatgcaaatcaaaactgcaatgagatatcatctcaccctagttaaaatggcttttatccaaaagacaggcaataatgaagctggcaggggtgtggagaaaggagaacytttatacaatgttggtgggaatgtaaattcgtacagccattatgaagaacagtacggaggttcctcagaaaactaaaaatagaactaccatatgatccacaaattccatggctaggtatataatcaaaagaaaggaaatcagtatattgaaaggatacctacattcccatgtttatttcagcactattcacaataaccaagatttggaatcaacttaagtgtccatcaacagatgaacagataaagaaaatatgggaaatatacacaatggggtattattcatcaataaaaaaa

SEQ ID NO: 647015 - DNA, 591 bp, Homo sapiens
taccatgaagccattttcaagaagaaaaactttctttatctatattctaaagtaacagttaaatgtttttaaattrtattttttgttttcttttgacagtcaaaatagtgcttgttcatagttaaaaaattagaaaatgtaaataaaattgaaaaaaattaaaaacaccctaatcacaccaaaaaaacaaattgattgctttaatgtattaagtatctaattatatctgaagaaccaaatgtcactcacattttttttgtttttcatgttgtcctatttcttgtatttttttattttacgaaattatatcctcaaacaataattttaggaaggcagtgtggtaggcaaattttctgagtccttgttttccaaaactgttcttattttgcctttacacttaatactttgggtgcaaaaggctagatttataataatttttcttaaaacagatgacagctaatctgtatttggattaaaaagaagttgactaagaaaagcaagaataaaaaaagttctaaaagtaaaactagtgagtggttaattgcaaagagcatttggggaccaagaagtttcaacataaaaaaaaaaagt

SEQ ID NO: 647016 - DNA, 608 bp, Homo sapiens
tacatgttacaaagctacatattattttgtgatactttggtttcaattatttgtgtaaatgcatgtgtgcgtgcatgttgtgtgcatatgcatattgtgtatgtatgttggggttcttcaaatcatgtaaaatgtatttcttattgtaagtaaagttcaaagatagacaagtgtctgtcatttaactaaagagagtaagctataaaagtccaagccatatataacataaagaattaaagttgaaaatctgtattagacccatawtttttgtcattaaagaagttaataagatcactaaatttaaaataaataaaaatttgttcacacatatagttaagataataatgattgctgtaaagatacaaagtagggagtagagatattttaacatccaaagcatatgtaaatatacatattttagttgtgatcatcctcagtgataatttattgtccaaatgctttatgttatttttcctacctagaagaggccaataagaatcgctgttgttctaaccctatacagggtagaatgatatgataacaaagtaaatttgtctaaagcaggaaatttttaaaaattagaggattttcaaaaagaattttaatat

SEQ ID NO: 647017 - DNA, 608 bp, Homo sapiens
tacatgttacaaagctacatattattttgtgatactttggtttcaattatttgtgtaaatgcatgtgtgcgtgcatgttgtgtgcatatgcatattgtgtatgtatgttggggttcttcaaatcatgtaaaatgtatttcttattgtaagtaaagttcaaagatagacaagtgtctgtcatttaactaaagagagtaagctataaaagtccaagccatatataacataaagaattaaagttgaaaatctgtattagacccatattttttgtcattaaagaagttaataagatcactaaatttaaaataaataaaaatttgttcacacatatagttaagataataatgattgctgtaaagatacaaagtagggagtagagatattttaacatccaaagcatatgtaaatatacatattttagttgtgatcatcctcagtgataatttattgtccaaatgctttatgttatttttcctacctagaagaggccaataagaatcgctrttgttctaaccctatacagggtagaatgatatgataacaaagtaaatttgtctaaagcaggaaatttttaaaaattagaggattttcaaaaagaattttaatat

SEQ ID NO: 647018 - DNA, 533 bp, Homo sapiens
ccccaattaatctacgaactcaatattacttaaatcaaaatcccaaatgtttaaggaagatcaaaggtcacagagtagccaaggcaatgttgaaaaagaaaaaagtagaaagatttgttctgctagatgaaaagacataccaccaggggcagtggctcacacttgcaatcacagcactgtgggaggccaaggcaggaggactgcttgaggccaggagtttgagaccagcctggccaacatagcaagaccccatctcttaaaaaaaaaaagacttrtgataatgttacagtaatcaaaacagttggtattagcatagaaagagacaaatgataatgtgtacataaaaaatatgtctatttagaatcatactatatgacagaggaacattacacttcaacggggaaaggataagctgttctgagataactaattatccattgggaagtaaaaactataccagatgaattaaagaactaaatattttcaaaaacctaaaatttttgaagaatatattagatacattttggttggaa

SEQ ID NO: 647019 - DNA, 427 bp, Homo sapiens
taattctgctcattgatttacatatgctgcaaggtccctctaggatttgccattagtgagattttaayatgtgtctctacaaatttaaagaaatgagatggaaaggacatattcatattacaatcaggcaaagagtctaatccaagactattaatgctgaggcttcactaaaatccaagtggcaggacaactggaaagtacaagttctcttagtggaagcctaccaacaatcaatatatttaatgatattccatgagctaggatcattttccctagcaataaaaatgattatgcatgatataaaattacaaacaggagcaaatatatttgaaaaaacaaacacaccagaaagcaaaaattgtcagtttaagaattgattcccatattccagtgctaatgtggatcaggaaaaagaaaacttgaatac

SEQ ID NO: 647020 - DNA, 643 bp, Homo sapiens
gtatacacaggttgaatattccttacctgaaatacttgggaccagaagtattttggatatttttggattttggaatatttgcattatacttactgcttgaacacaccaaatctggaaatctcaagtgctccaatgaaatttttattctttgagcattctgtcagtgttcaaaaagttttggattttggagcctttcagatttctgaatttgggattttagatgctcatcttttataaagtttttttttgtgtttggcttatttgctacttttatatgtgtgagattcattcatgcagtacctagcagtacttttgtttgttttttttttctatttcagtgtatttttacatagtatgaaatagatcacaggttttttccgttttatttagggtagatatttggattttattttcatttgaraactactaatataataatacatgctactctaaatattcacataaattttggggggtatacattcatatacatttctgttaagtatatacctagaattagaattcctgaaccataaggtatttgtatatttatttctaatcaataatgccaatcctccaaaaaagttgttcttctaccagcatatattagactttctgtttctctacagcttcaacaatagtt

SEQ ID NO: 647021 - DNA, 587 bp, Homo sapiens
aatgtcatggagatttttccttgttttattttagtagtttcataggtacaggkcatatactgtctttcatctattcggatttgatttttttatatggtatgaaatacatgtctaattttatccctctgtatgatgatatccagttttaccaataacatttactgggtggggtgcagtggttcatgcctataatcccagaacttttggaggccgaagtgggtggatcacctgaggtcaggagttcgagatgagcttggcctcatctctaccaaatggtaaaacctcgtctctactaaaaaagtccaaaaaaattagctaggtgtggtggcatgtgtctgtagtcccaggtacttggaaggctgaggcacgataatcacttcaacctgaggggctgaggttggagtgagccgagatcatgccactgcactccagactaggcaacagagtaagactctgtctcaaaaataataataataataacatttgattgtataagtgtagattcatatctaagatccttattcttttccacaggcctatgtgtctatttttatgctggtgtcattctgctttgcttactatagcct

SEQ ID NO: 647022 - DNA, 587 bp, Homo sapiens
aatgtcatggagatttttccttgttttattttagtagtttcataggtacagggcatatactgtctttcatctattcggatttgatttttttatatggtatgaaatacatgtctaattttatccctctgtatgatgatatccagttttaccaataacatttactgggtggggtgcagtggttcatgcctataatcmcagaacttttggaggccgaagtgggtggatcacctgaggtcaggagttcgagatgagcttggcctcatctctaccaaatggtaaaacctcgtctctactaaaaaagtccaaaaaaattagctaggtgtggtggcatgtgtctgtagtcccaggtacttggaaggctgaggcacgataatcacttcaacctgaggggctgaggttggagtgagccgagatcatgccactgcactccagactaggcaacagagtaagactctgtctcaaaaataataataataataacatttgattgtataagtgtagattcatatctaagatccttattcttttccacaggcctatgtgtctatttttatgctggtgtcattctgctttgcttactatagcct

SEQ ID NO: 647023 - DNA, 583 bp, Homo sapiens
aatggcctggccatgtgaccaggcagagggacaatggcaaactgggctgtgaaaggatgtccacatggagcacagcactgcaggaatttaaagggcacattaaagtaggtcatgtcaatgcccacctgaagaacccctcccaggttcagtgatcagatctggtaggtggatatcctggtgaccttgaggtggccacctgggcttaacaaaggagtggacacaggggagctgcagccgtgcagggwtgggctgctcagcaacacgtccctcctccaccctcagaggcaccaaatgccaacaagaaccgtcctatctgacagcaggaagacagagactgcaggtggctatggggcagattcccagtgggaaggcaccactcatagctaacaagtagattataccagactgaagccagtatccctgggaggctataatgggtcctgacacgttctctggactgggctttgcatagtcattagattcaaatcccaaaaatactataaaagaactggaacagatgataagacatcaacttggaccaccaagttttatttcttcaggccaaagaacacatttatggccc

SEQ ID NO: 647024 - DNA, 511 bp, Homo sapiens
aaaccaaataccatatgttcttgcctataagtaggatctaaacatggggtactcatgaatataaagatgacaacaatagacactgagaactaccaggtgaatgagggaaggaggagggcagagggtgaaaaaccataggtgctatgcttactgcctaggtgatgggatcaattatatcccacaatatatgctcactaccttggtgatgggatcaataatatcccacattgctcagcatcacacaatatatccatgtaataaacctgcaaatatactccctgaatctaaaaaatttaaggcagagacagagtaagagggcagaatagaagcctacattctcatccaccacacgaaaacaccaaattttcacaactmactacattcaagaagcactgtcaaagggaccaaaaattgggtgagcaatcacagtacctggtattaacttcatatcactgaaacagacattggagaagacaaaaaaataaaagacggtttagaagcatggatgcca

SEQ ID NO: 647025 - DNA, 574 bp, Homo sapiens
attatccgagttccacactgaccaccaggacatatctgaagcaaactggaaaggttttgaaaactcgattattggaaccacagctcacaaaacagagattggaacttgcagcttgaatatgacaaggtcaattgcttctaaaacaaaaatagcatccatccgcctaatattttatgaagacccaggcctcaaaacttaatgtccatgacrcaatccaaaattacaaaaaaaacagataaactgcaccccacatgagaaaagacaatcagtactaagtagctaccaatactgagaagaaacagaaatttgaattacatcacaaggattttaaagcagcttttataaaaatgttccaacaagtggtcgcaaacactttttttctctcttgggacggagtctcactctgtcacccaggctacagtgcagtggtgcaatctaggttcactgcaacctcggcctcccgggttaaaacgattctcctgtctcagcctaccaatgagctggaactacaggcatgcaccaccacgtccagctaatttttgtatttttagtagagaaggggtttcaccatgtt

SEQ ID NO: 647026 - DNA, 307 bp, Homo sapiens
ttttacatgttgatagcaaatcttcataccttttttgtgttaaagggggctattattccctctccatagtttggcctttgcacccttgttgaagatcattttgaccatatatacaaggttttgtggagagaggggtctctattattttctatgtctacacgtcttgatttaatacatttctttttagattttctcctttttactttttgagacaggttctctgtcatccaggctggggtgcactggtgcgaccatggctcactgcagmcttgctctcccaggcttaaaaaatcctctcacttcagcc

SEQ ID NO: 647027 - DNA, 298 bp, Homo sapiens
ctgggttttctagtttttgtgccaaaaggtgttcatagtacccttgaataatctttaatatttcagtggtgtcagttgtaatatcccctgtttcatttcttagagaggttatttggatttyctctcttcttttcttggttaatcttataatggtctatcgattttgtttatcttttcaaataaccaactttttgttttattcatgttttgtatttgttgttgttgttgttgctgtgtcaatttcatttagttctgctctgatcttggttatttcctttgtttgctgggattgggtttg

SEQ ID NO: 647028 - DNA, 298 bp, Homo sapiens
ctgggttttctagtttttgtgccaaaaggtgttcatagtacccttgaataatctttaatatttcagtggtgtcagttgtaatatcccctgtttcatttcttagagaggttatttggatttcctctcttcttttcttggttaatcttataatggtctatcgattttgtttatcttttcaaataaccaactttttgttttattyatgttttgtatttgttgttgttgttgttgctgtgtcaatttcatttagttctgctctgatcttggttatttcctttgtttgctgggattgggtttg

SEQ ID NO: 647029 - DNA, 583 bp, Homo sapiens
aatgtcttagtttctctgtgcttcagtttcctgatctgtaaaactgggataacaagactacctgcctcaatctgtggttatgagtaaatgagttaatacataagagcaatgcaataatccttggcatgtggtatgagttcaataaacattagctattattattatagtaaattagaaatttaattctagagaataaaaagctgaactcaaatatgtaactatttatttgatacagacatattttctacaaaataaaaaaccgycagtttgcacttcccttatataatgactattctggtgtttgtgtgtatctgttgtgggtcggggtcttgggctgagtaaataatcacattaaaaattttaaaaacttccgattaaaacagaaataagaacaaacggccattcgtggatcatttgcaaagctgaacgaatacttgacatgtctttctgtgattccttgcagatatcatggaaatcaggacagtagcagttgggattgtggcaatcaaaggggtggaaagtgaattctatcttgcaatgaacgaggaaggaaaactctatgcaaaggtattgataattgata

SEQ ID NO: 647030 - DNA, 520 bp, Homo sapiens
gatcccaaactccctcctaccagaatctggacccgaatccacccattgyccgttttccgctgccgctggagagaatctctgaggtccccaggagagcctgcctgcacggaagagacgcctcctcggtatggccgcccccggagaggagcgattaagtgcagacctccatgttgctcttgagcctgagcggcttcagggagccatgtttgttactggcgggcgccgacctcactgagcatgtgcagccctggccgggcggcctcaaagttctgacatcacagggcggttcctgaagtggacatagttgtaagagctagttattttagacaatgcctctgtgatcagggactctaatctggaaataggtagtcggagaggtcggtgatgcagtctctggatcagagacctgagctatatggggttagagaggggccctgggcaggcgagtctctggggagtgtggtgagaatccttgtgtaagatgctgggaggaggtggggtcagggctggggtccgtggg

SEQ ID NO: 647031 - DNA, 520 bp, Homo sapiens
gatcccaaactccctcctaccagaatctggacccgaatccacccattgtccgttttccgctgccgctggagagaatctctgaggtccccaggagagcctgcctgcacggaagagacgcctcctcggtatggccgcccccggagaggagcgattaagtgcagacctccatsttgctcttgagcctgagcggcttcagggagccatgtttgttactggcgggcgccgacctcactgagcatgtgcagccctggccgggcggcctcaaagttctgacatcacagggcggttcctgaagtggacatagttgtaagagctagttattttagacaatgcctctgtgatcagggactctaatctggaaataggtagtcggagaggtcggtgatgcagtctctggatcagagacctgagctatatggggttagagaggggccctgggcaggcgagtctctggggagtgtggtgagaatccttgtgtaagatgctgggaggaggtggggtcagggctggggtccgtggg

SEQ ID NO: 647032 - DNA, 520 bp, Homo sapiens
gatcccaaactccctcctaccagaatctggacccgaatccacccattgtccgttttccgctgccgctggagagaatctctgaggtccccaggagagcctgcctgcacggaagagacgcctcctcggtatggccgcccccggagaggagcgattaagtgcagacctccatgttgctcttgagcctgagcggcttcagggagccatgtttgttactggcgggcgccgacctcactgagcatgtgcagccctggccgggcggcctcaaagttctgacatcacagggcggttcctgaagtggacrtagttgtaagagctagttattttagacaatgcctctgtgatcagggactctaatctggaaataggtagtcggagaggtcggtgatgcagtctctggatcagagacctgagctatatggggttagagaggggccctgggcaggcgagtctctggggagtgtggtgagaatccttgtgtaagatgctgggaggaggtggggtcagggctggggtccgtggg

SEQ ID NO: 647033 - DNA, 520 bp, Homo sapiens
gatcccaaactccctcctaccagaatctggacccgaatccacccattgtccgttttccgctgccgctggagagaatctctgaggtccccaggagagcctgcctgcacggaagagacgcctcctcggtatggccgcccccggagaggagcgattaagtgcagacctccatgttgctcttgagcctgagcggcttcagggagccatgtttgttactggcgggcgccgacctcactgagcatgtgcagccctggccgggcggcctcaaagttctgacatcacagggcggttcctgaagtggacatagttgtaagagctagttattttagacaatgcctctgkgatcagggactctaatctggaaataggtagtcggagaggtcggtgatgcagtctctggatcagagacctgagctatatggggttagagaggggccctgggcaggcgagtctctggggagtgtggtgagaatccttgtgtaagatgctgggaggaggtggggtcagggctggggtccgtggg

SEQ ID NO: 647034 - DNA, 590 bp, Homo sapiens
cattcctgagtacctgcttaggcttttgttgcccactaacaaaatggggagagttgtgcaggtggttgccttggatttcactggtgtgatctagtgtactcagtcaccaagaagcagattctaaaggatctgaaacgctctagtgtctgagtacactagaatggagcmatggcatgaccactgtagacttgctgttggtggctctttatggtgtggattatgggtaaaatgcctacctctattagcagtttggtacctggtctaaatagctggcaggtacaagttgtggaaggtgccatgcaccacttgtccacccagcagagccaacctccactgtgtgcttcctattgagcatgatggggtagattatgaacagggtgggcaaaggtcacaactactgaatcagccattccttgagtggtcctttgttggtgacaatacaccaagtgaaatgatggcattgcccagtttcactggttgctccatatgtatatttgagggggatgtgcataggacttctgcaggatttagctggctatagaagatgcctatatagtaattattttcagttatttttatttttgatgtac

SEQ ID NO: 647035 - DNA, 592 bp, Homo sapiens
gaacaaacaaaatcaaaggttagtagaagaaaaaaatgaaaatcagrttagaaatagttaaaatagagactaaaaaatacaaaggattgatgaaatgaaaaggtggatcttcaaaaggattttaggcaatgataaatcactgactagattaatcaagaaaagagaagacccaaataaacaaaatcaacaaaaaaaggagacattataactgatactacataattactaaagatcatcagaggctattatgaacaactatatgctcacaaactagaaaagctagaaaagagtgatacattccaggaaacatacagcctatcaagattgaatcaggaagaaatagaaaacctgaacagaacgataatggattttgagattgaatgagtaataaaaagtttccaacaataaaaagacagaaccaaatagactcacagccaaaatctaccaaacgtacaaactagagctaatacagttctcctgaatctattaaaaaaaaattgtagagcagagaattcttcctaatttattccatgaggccagcatcactctgatttgaaaaagaaataaggacacacacaaaaaaagaaagcta

SEQ ID NO: 647036 - DNA, 536 bp, Homo sapiens
gacttgcttcttctcagtgccctgatgatgtgggctcctcgaccacttgagtgctggctgcagatcttggcttggcactcctgggctgtacactgcagccccaggaagaactcaggatttatcttccctccccagcctgagggcagcatgtgcagggaccttggcatggcagtggcagaaggcctttcacttgtcacttggggctgcacctcagggaaacacagagctggagtgagacagctgtgctgtggtcccaagccagggtccctccctggtgatgagctgaggggtaaggggctcatggggaagacagactggactcttctccttaagktacctgtgacatgctggaggtgtgagtacagcattcaggttttttttgttgcttcctcagtctaaacgaagcaaaggcagtaccactgcaaaggtagtggcagaagggctttcagttgcttctgagagctctaccctagagcaatgcagagccactgccaataggaatgttcagccaggggatgtggtggttgtgctgtggg

SEQ ID NO: 647037 - DNA, 577 bp, Homo sapiens
gatctgagtgaaaaattaagcttgagaggaattataataatgggatagatttacagataataaattggattcacaaggcaatttggtaaggaataaggctacaagcagcaggttagggtaggagggagacatacctttagttggtagattaggatttagggcaaataatttgtccttggtagtatgggtgacagcaaagctgaagagtaacttggatgtatgcaaatgagacgaccaaggcagagtgatataagaaagagacaggattataagacatagggtccggtgtggaaacaactcaggcacataaataacaaatcagctgcttataataccccaagcataaagctatacttgtggtagcagcaatttgattcaattattataattgtatgctatttaacacaatttattagatacctattatgcgtctggttctgagttaggcagccagtatatgagaaattgtctaaggtgggyatggtggcatgcacctgcagtcctagctagtttgggggctgaggcaagaggatcatttgagcccaggagttaaagaccaggttgggcaacatatgga

SEQ ID NO: 647038 - DNA, 566 bp, Homo sapiens
gaaaaaaataagcgatatgcrttaaaatgttaaacaagtgttaattttagagttatgtaacagggtgggggctaaagtttgtgaaaaatagaagtggcagttccatatttagtttaattactagcaatattgttatttgaaatagctccatctgtgaaatcttggtaaaggccttaagcaaacaagttcatttatcttgttttttctttgtaaggaaataatagttttataggcctgagagaaggtaattaaaatcagtgaagaaattaaaaatgagaatatattagcgtagtaagagtcctaagaagccagaggcctggaaatgaagtgaaaaacaacaacaacaacaaaaagttcatattagttaacactgtaaaccttggccctactggatttcctcgccaatctatactgaataaaacaaatgtcatattgctaattatggggcgtgtgtgtgtgtgtgtgtgagagagagagagagagagagagacagagaaaacaggcttgtatatggatgaattagtatagctccataaacattgcatgtatctgacaaatggctattt

SEQ ID NO: 647039 - DNA, 603 bp, Homo sapiens
tgcaggtgtaataattacattaattttctaagtagtaattggtgcaaacaataaacaatctataatggaaaatgaaagtatttatgacacatattagtaacaaaatcataggcgcttctatctattatgagtttgtccacattccaaaatgaaagaaatgccaaattttagagattgcttaaaaaaaaaagatgtaatttttttctccatccaaaatcatgaagcctctaaattctaacctcatagataccaaaggctctcacagatttggaaactctctttctattggtttttgttttagawaaccctatatgttccattttaatcccttttcatcaacatatattctttttccttgtgacctgagacactactaaagatttcagaatttgaaggcatttattctctagttcattttctggccagtcactaaaggtaaaatctttgaacaatggatttgtttaacaacatgtagcaatatgctgccagcctctttaatatctcaagttgctggagacacttttttgtctctataaaaatagcagctttgccaactaaagcacttttgaaatccaacagcatgataatgacagcagcccctaa

SEQ ID NO: 647040 - DNA, 497 bp, Homo sapiens
caagatatgaaaaagtgatcctaaattttcctcctgctctaaaatttcatgacttcatgatattaatgaacttgtcggtctaacaatagctctttttcatttcttattttaggcatgagtttaaaatgaatgctctgaattatagaggattgttatactggcttccatgattccattgcctacaaagttcttttgtaatttgttccttagctttatcattgtaacttaaaaagctcatagaggagcccatagaaatacttcatatccctgacagcatccattaaaaatagttacaggccgggcgcagtggctgacgtctataatcccagcactttgggaggccaaggtgggcggatcacgacgtcaggagmtcgagaccatcctgactaacacggtgaaaccccgtctctactaaaaatacaaaaaattagccgggcgcggtggcaggcgcctgtagtcccagctactgggaagcctgaagcaggagaatggggtga

SEQ ID NO: 647041 - DNA, 575 bp, Homo sapiens
gagaatacaccgtggtcagtaccactacaggggcagaccttgggtgccacacgaacacacaaaaggagcttctaacccagtcttggctggacagggaaggtttcaagtgcagaaaagaaggttccagaaggaaaaaaccagtagtatcttgctatcaaatctatccattatttaggtttctttgggaaatttccttttcatttggcattatgtcatcgtcctttcaagggtattcactttttgaatacatttcaatcgatatatatttatcgaaccctgaagactaaaaagcctcatcgtcattctcctggaggattcaccatttgctcggggctaaaggtgtatgaagacaaacctttctcctgagaaaaaaaatgagttcttaggtcaaatatttcaataatctaccctttaagaaaaatgtaacactgccttggaatgcatgatttcttcataagacttcctttttamaattgtgtgtggctttctacccaaactaactttaaacatccctccacaataaaattcaggaaggccactttaataaaacgagggggaaaatcccaccaaaatgt

SEQ ID NO: 647042 - DNA, 619 bp, Homo sapiens
tttacttttctatcaaatatttccactctgcttgtgtacatatggactttctaacatttaaggattaggacacagaagcaggggccagagcatcccaacagtggctcatataagaacttaacagtctaggatagtagacaggcgactgggtcrtgtgcagtagccacatccggagaaactggaacttgcttcacttaatagatggccagtgctgccttcttctttattctgagtttctaaggatgagatctacctatagtctttgcagaggtatcctgcttttcatctatttcttattccatgctcactacagagagacaggagtttccctccttcatgaggcaccagtccagtactggaaagccctgtaggtgacaaggcatcaagagcctgtgttccttctagccccaatggcataccagtggtcttgggcatattcacctaatccatctggtattttgtttctcttccaaaaaatgaaatggctggactagatatattctaagcttccttccacctctaaaaattcaatgaatctcattgtaaatctaaatctaaaatttcaatgaatcttagactagtgaagcacactgtaaaatctatctgtacagagcttgca

SEQ ID NO: 647043 - DNA, 600 bp, Homo sapiens
atcttcttgcctccatgatggtcttagggcctccgttccccatggagtctctctccaaattgtatctccagtagaatatccagatttctttcatggtagtgtagggctccccatagtgcaaaggtggaagcttccatgttgtcttttgtcttaggcagagaattgggacagtattgctctccccatatcctaatagttcaaacaaatcacaggcccagcctagatacaagggaaggtgaattattaggttgtgaatgtcaagagatgtgatcactgggagccatcagtgtaacagacttccaaacacactgccaatctatctagttagctagatttaccargttctacaaatgaaccctaaatttaaaaatattttcgtttcacacacacattctaacagtgtcaatggaaatacaaggaacacagtgtcattatgcaaacaaatggccattcaatgccatcctccattaataaatttgagagtgatcagagaggagggagtagatactaaatttcctgcccgagttcatttccaattctatttcaagattagactccaacaagactattaatatttaataataaacataactttatggt

SEQ ID NO: 647044 - DNA, 619 bp, Homo sapiens
aagtgtactcactttataaaaatcaatcaagctgtatacttaataataagtacgttttccttgtatgcattactcttcaataaaatttttttttaattctaaatgataatggtgcctcttatcattgagaaatattartggactttgttgttcaaagtcttgaaatcatctaagacttggaagttgaaagttaagccacagctaccacctttcttttggctttatattctggcaggaaagaccatgaaaatgtcttgtgtttttggcagcagtcttccactgacttttcttcagcttcttgcttggtgagaacagtggcagcaatgatagctgagggagtaaaggttcttgttttcagcttcctgattccagaatcgctgctccagagatgcattccgaaacccgctccacaggtggttttaagtgcagaagtgtcagtgttgaagagttctgcacggatctggtgatcattcttggaggaccagtctaaagcctgtttcttcagactcatgggtgacagcccctaagatgaccccaatgatcctgaatcccagtactcaagtccttgtgtatcattctcctcttgagtgtggacgggacctagtgactgccttgcaat

SEQ ID NO: 647045 - DNA, 619 bp, Homo sapiens
aagtgtactcactttataaaaatcaatcaagctgtatacttaataataagtacgttttccttgtatgcattactcttcaataaaatttttttttaattctaaatgataatggtgcctcttatcattgagaaatattagtggactttgttgttcaaagtcttgaaatcatctaagacttggaagttgaaagttaagccacagctaccacctttcttttggctttatattctggcaggaaagaccatgaaaatgtcttgtgtttttggcagcagtcttccactgacttttcttcagcttcttgcttggtgagaacagtggcagcaatgatagctgagggagtaarggttcttgttttcagcttcctgattccagaatcgctgctccagagatgcattccgaaacccgctccacaggtggttttaagtgcagaagtgtcagtgttgaagagttctgcacggatctggtgatcattcttggaggaccagtctaaagcctgtttcttcagactcatgggtgacagcccctaagatgaccccaatgatcctgaatcccagtactcaagtccttgtgtatcattctcctcttgagtgtggacgggacctagtgactgccttgcaat

SEQ ID NO: 647046 - DNA, 514 bp, Homo sapiens
attgttcagatctgggtccagtgcaattgagataactagtgggacgttagttgcaaatatttgggaaattcaagtctggagcctggaagaaaattcaagagtatatttagaaatatagatgtcttcaacatattgataatacacaagaacataagaggaagagaagaggtgaaaataaataaagattcatgagatgaaaaacaaaacattactttctcataatgtgtattattctatccgaatcatataatagtcacagtttcaggatgaatttctgccatcttaattgatttctcaaagccrttatctcaaagacgttagtatcattgttttacagtttatgaaacggatgctcaaagaggttagacgtttgacccaaagcgtacaatctgaaagcagagatattggaacacttgtgcttggctttagactgtaaatctcatctttaatagtttatagttaactgaaataagtataaatataaaagctttgtatttgaaatattaaagaaaat

SEQ ID NO: 647047 - DNA, 675 bp, Homo sapiens
tatttatttgtgcaataataactgataaagtaagaaggacagttggatatgtaagatcaaagtacctaaaacacaatccttatttgtatttttaacagtaaaattactttaaatgggcacaaaattaattatccatcatttcactattagttgaagagttgagaggttggaaatggaatatctgcttatacaaatgaatttggaaagaaaggatgatgaagtttattgggataataaggaccggagagctcgtgggtgaattctgtcactattttctctatctgtcacttccattaaatgtgagctgcataagtattttcctacatatgacaattcctagtttatagtaagtttcaaatatttctggtactggcctttcttgttgccataaaatcagaagcatatattcttatacttcctcaacacttctgtcccttcttgattaaaattctgatrccactcctttccttggctaacagaaaattttcttttatataatatctggggatcattattgggctttttaacattgcaattatacaaacagattatgctcttgctttgagaagtctaaaatgtgttttatactaattgtctcaataatcctacataattctgaataaatgtttcatttgcattagttttgacaatttttgaagtacttttacatcatag

SEQ ID NO: 647048 - DNA, 571 bp, Homo sapiens
gacctctggtcatcctcactgctaccccacgagtgccatgagagtttacaagtgccatggcaacaycagaaagttacccgacatggactaaaaagaggaggaaccctcaactccagggaaatgcccacccctttcccagaaactcctgaaaaatgtactgcttgtttagtatgtaatcaaacaataaccacaaaaatgggcaaccagcaaccctggagtagccattctttattcctttattttcctaataaacttgctttcactttattctgcaaacttgccctgaattctttcttgcacgagatccaagaaccctctcttggggtctgaatcagcacccttttctggtaacaaaattagttgcttggtacctctgttaggccccagagagaaagtcccatgccctgggccctgtagtgaaggaaaaaaatagcatgcctccacccatttaagttatttggcttggctataaattaaattagcataagaccgatgaagagaaaaaaatacctttttaattacatgcacattcacaagaatcccacagaaatatgaaacttaaagaaaggac

SEQ ID NO: 647049 - DNA, 606 bp, Homo sapiens
tattcaatttgaaccttaatattgggcttttgtggcattaaattaaacagggaaatcccacaccttttttcccagaatttttttctttctcaagctcaccatcaaaagctattgctgcttcagttggcctctttaaaacttcagtgaataactttctgatgaggtgactactactaatgttactcaaaacaagcagaacatatcacactcataagaaatgtgactggagttacaacggtcagcctgtctgagcagagcaaccactgtacagttatctacttccatggtgccrtggaaagtcctaaggtgtcattcatagttaaatacaccatcccaaaccaactcatgaaatgaatgcctattgagtttttgctccagtttacagtgattccctcttctccaatgacttctcccctcacacctccatcctcatggtcatagctatggagctctacatagcctttcgtgcaatatgaacttttctaatgccgtggccatcgctgatgggtctgggttgggcaattgacccagactgggaaatcagtctcttctttaggaatttggaattggtgtgggtgtgtgacggagatctccctggagagtcac

SEQ ID NO: 647050 - DNA, 290 bp, Homo sapiens
cacatgtggcctaggatggctttgaatgcagcccaacacaaatcagtaaactttcttcaaacattgtgaggtttttttgcaatttttttttttttgagatggagtctcactctgtcaccaggctggagtgcagtggcgcaatcttggctcactgcaacctccacctcctgggttcaagtgattctccagcctcagcctcatgagtagctaggactacaagcgcgtgccaccacgcccagctaatttttgtatttttagtagaggtggrtttccaccatgttgggcaggat

SEQ ID NO: 647051 - DNA, 651 bp, Homo sapiens
tacaattttgcttgcatgtgaagctccatcaatgatgctcatgtcttcatttcatagctgtagcctgggctctgcaatggtgatggcttgcagtttactatctatttcatttggggttaatactttcctgttatacttattgttcagccccactctcctgcctggtactgtaatacactgctttcagtattctmatgggatcgcacaagtctgccatcactagcttgatttttaacaggaaactaggacaacaagagccttgagaaagtgaatatgagaaatgtatgcttctgtctagggacattagtgcaaaatgaaaacaacactatcttctattgcttgcttctgccaccccattttcaccagtacataactagagcccttccctgcactattggcatgaacaaagaaaaatggcttcagctatcgggggctgcactttgagatgtgaaatatcactttccttgtaaacatataattgtcacctgctggctgctttctttccttccactcaatactcaactctaagcaaattcttggttcaaagagcaaaccttgagccaagaataaataaacctattattattattattattaacaaatgacattttaaaagaaaaactcaggaaacctagtggcagataaatatta

SEQ ID NO: 647052 - DNA, 589 bp, Homo sapiens
ctttccagatttatgtttaatcttctatagtaacacatggggaccctgaccagtaacccagacctgttttgcctttaagtgcaaaacatctaaattttagaacaggggctggaatattatgacagcctgtgggccaaatctctttcttctgctacctatttttgtcgggcccatgagatgagactggtttttaagtgttgaaatggttaagaaataatcaaaagaagaagaatattttatgacacatgaaaattatattcaaatttcagtgtccataaataaagttgtattaaaatgcagccatgctcatctgtttatgtatcatctatggctgtttatgcactagaatgacaatgttaagaaaccaccactgagaccatatctggtgctctcattactgctcaatactactaagtacactatccatcaagtgacacaattataattccacagtgtttaamgtgccacacatagtcataacacaccataagcaaaacatatttattatgcagagacattatagttattgtttatctttaggaaatgcacaaactctttattactgtagcccaatacctcaccttgccaa

SEQ ID NO: 647053 - DNA, 589 bp, Homo sapiens
ctttccagatttatgtttaatcttctatagtaacacatggggaccctgaccagtaacccagacctgttttgcctttaagtgcaaaacatctaaattttagaacaggggctggaatattatgacagcctgtgggccaaatctctttcttctgctacctatttttgtcgggcccatgagatgagactggtttttaagtgttgaaatggttaagaaataatcaaaagaagaagaatattttatgacacatgaaaattatattcaaatttcagtgtccataaataaagttgtattaaaatgcagccatgctcatctgtttatgtatcatctatggctgtttatgcactagaatgacaatgttaagaaaccaccactgagaccatatctggtgctctcattactgctcaatactactaagtacactatccatcaagtgacacaattataattccacagtgtttaaagtgccacacatagtcataacacaccataagcaaaacatatttattatgcagagacattatagtyattgtttatctttaggaaatgcacaaactctttattactgtagcccaatacctcaccttgccaa

SEQ ID NO: 647054 - DNA, 586 bp, Homo sapiens
acagcttattttgaagtcttgtagtcagaaaaattagaatttaattaaacagtagcaaataataactgaaaaacatcaggcaactctagaatttaacaagaggggtgtcatagttttggaaacataatttcctctctccactttcccatttttattaaaagacaaattatggtaggtttgctttaggatacttggcttacttatttgcatacagtgctgcaagaataattatttgttacataggccttttaaatgggctttggtggaatttggttttgtagaagcaatctgagataaaagactttttaaagccaagcccagccatggatttgtaccattaaatacctatgacttgggtgaattcctctcctcttgatgtttcaagataacttagggttcctggcctgttagaaagtgacatgttctgtttaccacagatcacaaaccctgtacggggactgtgtacacaaaatatgaggccagtttttcaagggctttattggctttataagttaaagctggattccttaaaggaaaagcacaccattccagtyaaagccttggtaagaataaccagtttttccaa

SEQ ID NO: 647055 - DNA, 583 bp, Homo sapiens
tccttcctattttatgattttaaaatagttttttggayaaatcgactttagtaatactgacctctgctgtgtcaagtgcctttcccagttcactattcaaatcaacccacagaagacgctctcctgatccagtttaatttagccagctatcggattacttcctgtggagaccaagaatattaacagttgcttgctatttgaaatgactgaagtgtgctgaaataatgcagtcagcaaaatgtcacttatggcttacatatggatctgttgcagcctgtaaaacattgtctccatgagggacagccaaaatgaagagttatgtgggagtaataaaatatgataactaggcctcaacctcaagtacaaacccagctgcgcatgtacatacacatccacgagaaagcctgctgataataaaaagcaaaaaaaaactcaatcatgtccagtgtgtgtgcacttcgccgcagaactggtcggggaactgtcctttcagcaccacagcaagaaacctgaatacaagcctaaacacaggcaacccaaagctggaccaggagaaaaaattcttaagggtcctacaaggaaa

SEQ ID NO: 647056 - DNA, 583 bp, Homo sapiens
tccttcctattttatgattttaaaatagttttttggataaatcgactttagtaatactgacctctgctgtgtcaagtgcctttcccagttcactattcaaatcaacccacagaagacgctctcctgatccagtttaatttagccagctatcggattacttcctgtggagaccaagaatattaacagttgcttgctatttgaaatgactgaagtgtgctgaaataatgcagtcagcaaaatgtcacttatggcttacatatggatctgttgcagcctgtaaaacattgtctccatgagggacagccaaaatgaagagttatgtgggagtaataaaatatgataactaggcctcaacctcaagtacaaacccagctgcgcatgtacatacacatccacgagaaagcctgctgataataaaaarcaaaaaaaaactcaatcatgtccagtgtgtgtgcacttcgccgcagaactggtcggggaactgtcctttcagcaccacagcaagaaacctgaatacaagcctaaacacaggcaacccaaagctggaccaggagaaaaaattcttaagggtcctacaaggaaa

SEQ ID NO: 647057 - DNA, 507 bp, Homo sapiens
ctccagaccctgtttgcctgggtatcaccagtggaggctcagttggaaatgcatgaaccacctgccttctgtgttgatcccactgggtgctgcagaccggagctgttcctattcagacatcttgccagctcttctgtaatacttttatgaatgggtgtagtcctaycttctcaaggtccccaaataacttgaggttcctgggcccgtcagaaagtgacattctttacttcttaccacaaggacagcaactttgtaaaggacccttgtagacaagacaccaagccagtcattctaaggggctttgcattggtgctataaagtcaagctcaattccttaaagtggtctggttgtatctgctgttcgagttaaagccttgataaaacaaacagtgtctccaattgaatcctgttaccaaaaatagattcttattgaaattatgcaaataattatattgccataatttaggaatgctcacgaatggcttctgaattctggagaaatcagtt

SEQ ID NO: 647058 - DNA, 511 bp, Homo sapiens
aaaaaataaaagttagctgaccatggtggtgtatgcctgtaattaacagctacatgggaggctgaggtgggaggatcccttgagmgcagaaggtcaaggttgcagtgagctgtgatcatgccactgcacttcagcatgggtgacagacagagacactgtctcaaaaaaatttcaaaaatacattaagatgtcttgtatagacatttatccatttacatttacttatttttgacagtttatctagagtatttgtgagaactgaggtattagacaaagctagtcatcatttctaggttattttcttgttaaccatgttatagcctgtgaatatcaggtgttcacgtaagtgaggacttcaaagttaaatacatgggtattttaccaataactcagaaaattccattatttttgttcaacaaaccatattaaattggtcttatgtatttaaaaaatcacataaagaaatattcttttttcctgtgtttatagctttataaccttcatgccaaac

SEQ ID NO: 647059 - DNA, 519 bp, Homo sapiens
ttctgttctgaatggtttatttctcattataagagctcagcaaagcaggcagagttaaaaagcagagacatgaaggctttaaaatcatggacttcactcctacactgaatctcaggtccccagaaagacagaaacaccatgggaccacagcaaaggcagaaggaggagtgagagagggaggtggacagaacaacaaacaggagttggctctcattttttcacgcgtgccattttctttaggtttttctagtttatggagtctctttgttccarttgagcacacagataaactagagatctcacaaggcttttgctgagaacatcaaagcctttaacctctgttgggccaaatatttagaccaaaaatacagacagacacacaaaagccagaaccggaccagattgagtagcttagtggctacagcctttattccctttattctttaggatacgaactcaaaccagattcagggttctaacccaaccaggacccccctggggtgaaactgaaaccccaca

SEQ ID NO: 647060 - DNA, 622 bp, Homo sapiens
agtgcttctgcttctggggggcctcagaaatctttcaatcattgtgcaaggtaatgaaagagtgaattgtctcatatggcaagaggaaatcacggagagtagggagtgatatagagttttcagtggccagatctcacgagaattcactcatgattgtgaggasagtaccaaggggatagtgctgaaccactcatgagaaatttgccttcatgattcaatcaccttataccaggatccacctccaacattaggaagcataactcaacatgagatttggtggggacacatattcgaattgcctcatcagtctttgagtataaagacatccatagcaggctttatccagccagcttctttgggattctttatagggtttcaggtctatagcatatccactaaaatattcctacttcaaaaggcaataaagtaagtggtattatcattcttcaaaaagttataatggtagtgtaggcattcatagtatgatttagttcatttgctactgtttctattctatcaccatattaacactttcctacacaattctatattcagctgggtttcagttgagcacaaagtcatccttgtactaccaccgatagctggcactagctctttgata

SEQ ID NO: 647061 - DNA, 579 bp, Homo sapiens
catggtaaaaccatatgtccactaaaaatacaaaaaacaaacaaggtcaggagatcgagaccatactggctaacacagtgaaaccccatctctactaaaaatataaaaattagccgagcatagtggcaggtgcctgtagtcccagctacttggtaggctgaggcagaagaatggcatgaacccaggacgcggagcttgaagtgagccaagatcgcgccactgcactccatccagcctgggagacagagcaagactctgtctcaaaaaaaaaaaaaaaaaaaaacmaaccaaaaaaaaccacctagccaggtgttggggggcatgtcttgtgcctgtaatcccagctactcaggagactgaggcaggagaattgattgaacctggtaggcggatgttgcagtgagctgagatcatgaaactgcactccagcctggccaacagaatgagactatgtctcaaaaaaaaaaaaaaaaagaatcccgataaccaggcacccacatcctagagttagccccatagccagctcacttggtgggagatgctcaagagagcaagatgttcctgtgctgcatccgcaca

SEQ ID NO: 647062 - DNA, 552 bp, Homo sapiens
cttcatgtttacctgccctgcctgcacaagctgagagatttaaaataggaatattgggacttattctccttgaaactttgtcacccaactttcaaacaaaagcatttttgaagttagaaaatagtagaagataagctttaactgcccactcaaaagtttatcagtcttaaatactaatattaatcatgggaatgtcttatttmcatatattctgtaagcataaatattgaataaaatgagccatatgtattcatttgaatcatgagtttcctttgtcttcaatttgtttgaaaatcaaggaattaatttgtttgaaaaatgcattattattatttcagtgttctatccccatagtacctttaagcaggcggacaagccagcagcctcacccactcaaggaagcccagatggccaggttccaacagcatgagtagctgccacctgatggctgatggagcagagtcctgaggaaaagcagatggcactggggccctaactctagggcagaataactgatgtactgtgactggcagcatgtgaggttggtgattg

SEQ ID NO: 647063 - DNA, 510 bp, Homo sapiens
acatttacaaccaattcaagtccactttcagataacactatcccacttcacgggtgactacctgcttaacaaagaaaacacctgattcctctctcccatccttccattccattccttgtattatttttccttatttcacttgtgtataagcatacataatctatctgtgtgtatttattattatctacaaacttattggtcagatcaattttgaataaatacatgtttttattgtaccacaattcctccctcccatccttccattccattccttgtattagtgttactcatttaacttctgtataagcatacataatctatctgtgtgtatttgttattgtctatgaacttcttggtcagatcaattaagaataaatacatagstttttattgtaccacaattctttaatgctctttttaaaaaaatgttgatccaggtttcagttatatatcttttgtttccctctaaagaatttcatttaacatttcttgcaagacaggtctcctggc

SEQ ID NO: 647064 - DNA, 504 bp, Homo sapiens
caaaccctttcctcaccccgtgaaggtaaagtcctcagagccaaggagagaaggctcagggatggtacctaggtgtttccaacactaaccatgcattgtagtttttagtgttcaagtttaagcttcttatgttaaagttaccccagctttaattatattgtaacaagatttatttttgtaattccatttttggattcttgatttcttggtaaagaaatacagttatttttgtataccaatcttatatagtgttacattccaaaatttgttcatgagtcctaacactttttagtaaatttcttatgattttctaaatgcaagatcatgtcatctgtacataaagataactgtacttcttcctttccaatctagatgcagtttatttatttacattgccaagttgtcccagctaccactgttatcaagtaaaagggtctcactacccaaagctytagaagccagtaacatgacactaagtttttgagaagagaaaaactttaaagt

SEQ ID NO: 647065 - DNA, 606 bp, Homo sapiens
aatctcttgcagttcctggctctgcccctcatccctgattccgtgtttcagttgctgcctgtcctgagcgctcaccatactccttcccatctgcctgccactcatctctcaaggctcagtggaagggatgccacctctgtgaagtcttcccactcccctcagcctcctcgctgtcccccagcaccccagatagatctggggaggcagtattgggaattgtaaagagcacgggcttggaagtccaccaattcgattcattttgccagatgctggcccctaggagactctgggccagtgrtttcacttctccaaaatcccattttctcatctctaaggagtggatgaaaatagtacctgcctttataacatacacacaagtctgaggctggggactaggcaagtccctgaccaggagttgcttacagaattgatgcctcctacagactctagttctccatacccttagtggtatcatcaccaagtatatttactcacaaacccttacatatgatttattatgtgcctggcgctgttctagcatgcatctccccattactattcccctactacctgctgcacaaggaggttaactcccttgctcaaggt

SEQ ID NO: 647066 - DNA, 582 bp, Homo sapiens
atgttatgcccctggaattcacaattgtctgtgaatccccagtctatctggggctaargctagactacttacatgaccctatgtttcttcccctctcttctgcacacccactccatcgctgtttgctctggttgctacatctggctgggatgtcacctcctgcctgcagccacagctctttgctctccagcactgactttctcaccattgctggcaacgtgcacacattcaccaaagtgctggggtgcctccgagggcattactgacttcagcaggtcccagacaggtgccatttttctctaaaccacctctggaaaagccacttaaagcgaggtaggcctgatgagtttttagtgaccttgaaaacttttagatgttttatccgtgaacaagcggtttgttctgaggactataaagatgatgaagagcttgaacaaggccccagggatcttgcttctcacatactgctgagtctgtctgtgggagatacaaatgtttccacttcctggcttagaaagtcctccaaggacagctcccaaggtgcccggggccaatcagccctttctcatcatttaaccaggt

SEQ ID NO: 647067 - DNA, 651 bp, Homo sapiens
tacaatgagggtacagacattgggtaaacatgcccattccaaatgtgagaaatttgacaaaacaaaggggctgcaggccccatgcaagtccaaaatacagcgaggaagtcaaaayttaaagctccaaaatcatctcctttgactccagagcttacatccaggtcatgctcatgcaagaggtgggctcccaaatggccttgggcagctctgcccctgtggctttgcagggtacagcccccgctcttggctgctttcatgggctggcattgagtgaagcttttccaggcacacagtgcaagctgtcagtggacctaccattctgcggtctggaggatggtggccctcttctcaccactccagtaggcagtgcctcagtgggagctctgtgtgggagctccaatctcacatttcccatttgcattgccctagtagagtttctccatggggctctactcctgcagcaaacttctgcctggacaaccagatgtgtccttacatcctttgaaagctagacagagattcctaaacctcaattcttgacttctgtgcaccctcaagctcaacaccacatgtaagctgccaaggcttggggcttgcaccctctgaagcaatggccagaaatgtaccttgaccccttttagccacgactgg

SEQ ID NO: 647068 - DNA, 651 bp, Homo sapiens
tacaatgagggtacagacattgggtaaacatgcccattccaaatgtgagaaatttgacaaaacaaaggggctgcaggccccatgcaagtccaaaatacagcgaggaagtcaaaacttaaagctccaaaatcatctcctttgactccagagcttacatccaggtcatgctcatgcaagaggtgggctcccaaatggccttgggcagctctgcccctgtggctttgcagggtacagcccccgctcttggctgctttcatgggctggcattgagtgaagcttttccaggcacacagtgcaagctgtcagtggacctaccattctgcggtctggaggatggtggccctcttctcaccactccagtaggcagtgcctcagtgggagctctgtgtgggagctccaatctcacatttcccatttgcattgccctagtagagtttctccatggggctctactcctgcagcaaacttctgcctggacaaccagatgtgtccwtacatcctttgaaagctagacagagattcctaaacctcaattcttgacttctgtgcaccctcaagctcaacaccacatgtaagctgccaaggcttggggcttgcaccctctgaagcaatggccagaaatgtaccttgaccccttttagccacgactgg

SEQ ID NO: 647069 - DNA, 651 bp, Homo sapiens
tacaatgagggtacagacattgggtaaacatgcccattccaaatgtgagaaatttgacaaaacaaaggggctgcaggccccatgcaagtccaaaatacagcgaggaagtcaaaacttaaagctccaaaatcatctcctttgactccagagcttacatccaggtcatgctcatgcaagaggtgggctcccaaatggccttgggcagctctgcccctgtggctttgcagggtacagcccccgctcttggctgctttcatgggctggcattgagtgaagcttttccaggcacacagtgcaagctgtcagtggacctaccattctgcggtctggaggatggtggccctcttctcaccactccagtaggcagtgcctcagtgggagctctgtgtgggagctccaatctcacatttcccatttgcattgccctagtagagtttctccatggggctctactcctgcagcaaacttctgcctggacaaccagatgtgtccttacatcctttgaaagctagacagagwttcctaaacctcaattcttgacttctgtgcaccctcaagctcaacaccacatgtaagctgccaaggcttggggcttgcaccctctgaagcaatggccagaaatgtaccttgaccccttttagccacgactgg

SEQ ID NO: 647070 - DNA, 606 bp, Homo sapiens
caggatggagaagatatcctagtgggttgtctctcggttttctttcagggctgtgaagaagaataggaagccagctagagttagaaataaccaattttttwaaaaaagtatgtcatatgaaaggttatgataatctgaaaggattcttatcaggaaccattcaaaatgtttgaacccatgaaaactacccgtttgcaactttcatcatgagtctttctccttgggaagagaaattttgtgctagtgttgcttcagtttgtattatctcaccctttggccagacatattcggagtatctaaggctcacatcatgatttttactatttcatgagacttttcctcacttaaattcttgtttgcatagtttgagtccccaactgaatagttgctttctccatttggaagaaactaataaaaactagttgcacaatgaccagttgcagaagatattcattccaataaagtggcagtttataagcttacttctcaagttcttcttcctcttcacctaaataaattttttgcagtctacagaggcacttcacgcctgccagttcgcaaataaccccggatcctgggcagctgagttggcccaaaaagaagctt

SEQ ID NO: 647071 - DNA, 554 bp, Homo sapiens
cttaaagagcatataaaccatatttaggtcttgattcaagcaaaccaactaaaaaagcaaaccaaccaataaacaaaaaacaacaacaaattataaygtggacactgatagaacatttgatgataattgaggaattattttgaactttttggtgtgataatgtagatgaaatattttatcttaagttatttcctagcactcttcaccaaaacgacctggaaacgatgaccaactcagtattaatgggcaccctagtgtccaggttgtaatttctaaatactatttccaactaaaaggaaccagggatcattgaaaaaatggcttgtccaagtctgcagcattatatatacacgatgagcctgggatgttttgtcacaccagaaagccagatgaaatgttgtgataatttgggttttctccaaaataatccactggaaaggtagtgcgtgtgtaacagatgaagcaagattgctcacaggttgatcattgttgaaggccaatgatgaaggcatgggagtttattatacgatctgcttgtgcatatgtttgaactg

SEQ ID NO: 647072 - DNA, 580 bp, Homo sapiens
aggtgatttggaagctgggtggatggtggtgtgaatctgacgtgttgagccctggcagaagaggaaatcaggagaggaaaggtaagatgaggtcaatgcaagacagacagccaagtggagataacaactgggcagttggattcatcagcctggagttatacagagagctctggaatggaaataaagaggaaaggactttgggaataggtgaatcctcccagaataatgtgtaagaaaggagaatagaacacaggggacagaaaaagggragagatttgttattaaaaccaaccatccatcagacatcttccaataaaacacttgttagaggtttcctcagtgtgagttattcaggaccagagctaaagaccatattcccaataaaatcactggtgggaaggtcttcatgaaaacatttaatgctgcttttaaaacaacaacaataaaaaggctttagctactgcacagaccctggagcaatttttcggcaagagtctatcaaacacgaatctgatctgactcaaggaggtgtcatatcaagtgtaaaaatccaattccaatgtccataagagcctttctg

SEQ ID NO: 647073 - DNA, 580 bp, Homo sapiens
aggtgatttggaagctgggtggatggtggtgtgaatctgacgtgttgagccctggcagaagaggaaatcaggagaggaaaggtaagatgaggtcaatgcaagacagacagccaagtggagataacaactgggcagttggattcatcagcctggagttatacagagagctctggaatggaaataaagaggaaaggactttgggaataggtgaatcctcccagaataatgtgtaagaaaggagaatagaacacaggggacagaaaaaggggagagatttgttattaaaaccaaccatccatcagacatcttccaataaaacacttgttagaggtttcctcagtgtgagttattcaggaccagagctaaagaccatattcccaataaaatmactggtgggaaggtcttcatgaaaacatttaatgctgcttttaaaacaacaacaataaaaaggctttagctactgcacagaccctggagcaatttttcggcaagagtctatcaaacacgaatctgatctgactcaaggaggtgtcatatcaagtgtaaaaatccaattccaatgtccataagagcctttctg

SEQ ID NO: 647074 - DNA, 580 bp, Homo sapiens
aggtgatttggaagctgggtggatggtggtgtgaatctgacgtgttgagccctggcagaagaggaaatcaggagaggaaaggtaagatgaggtcaatgcaagacagacagccaagtggagataacaactgggcagttggattcatcagcctggagttatacagagagctctggaatggaaataaagaggaaaggactttgggaataggtgaatcctcccagaataatgtgtaagaaaggagaatagaacacaggggacagaaaaaggggagagatttgttattaaaaccaaccatccatcagacatcttccaataaaacacttgttagaggtttcctcagtgtgagttattcaggaccagagctaaagaccatattcccaataaaatcactgstgggaaggtcttcatgaaaacatttaatgctgcttttaaaacaacaacaataaaaaggctttagctactgcacagaccctggagcaatttttcggcaagagtctatcaaacacgaatctgatctgactcaaggaggtgtcatatcaagtgtaaaaatccaattccaatgtccataagagcctttctg

SEQ ID NO: 647075 - DNA, 588 bp, Homo sapiens
aacaatgaaacagagaacccaaaaataaacccaaatactgattatagaaaaacatacttaaacattcatgtttctaggagcacaattcacaatttcaaaatcgtggaaccaaacaaaatgcccatcaatcaacgagtagataaagaaggtgtggtgtgtatatgtgtgtgtatatatgtgtgtatatatatatatatgttgggatactactcaaccacaaaaaggaatgaattaacagcatttgcaatgacctggatgagattagagactattattctaagtgaagtaactgaggaatggaaaaccgaacgctgtgtgtcctcgctgatatgtgggaggtaagctatgaggacacaaaggcataagaatgatacaatagactttggggacttggggggaagagtgggaaaaaggagggatagaagacaacatatatggtgcagtgtatacyggtcagctgatgggtctatcaggatctcacaaatcactaaagaacttactcatccaaccaagtatcacctgtaccccattaaattatggaacaatgagattttaaaaaaaattattcttataattacagactagctc

SEQ ID NO: 647076 - DNA, 631 bp, Homo sapiens
atagttttcaaaattcctctagttattaatttacagttttattccattgtggtcagagaagatgcttgatattatttcagttttttaagtgttttaaaacttgtcttgtgatctaacatatgatctatccttgagaatgatcatgttctcaatgtgctgaggaaaagatacatatattctgcaactattgggtgaaatgttctgtaaatatctgttaggtttatttggtctatagtggagattaagtctgatgttttggtgttgattttctgtctagaatatctcttcagtgctaaaaataaggtgttaaaatctccagctgctattgtattgggaactgtctctctcttcagctctaataatatttgctttatgtattctgggtgctccagtgttggatrcatatatatttacaatttttatatctcctttatcattgtatagtgactttctttgtctcttcttacagtttttgtcttgaaatctattttgtctgatataagtaaagctactcctgctctttattggtttccattggcatgaaatatctttttccatccctttattttcagactgtatgtttcttctaagccatagatcattgggtcttattttttttaatcccttcaga

SEQ ID NO: 647077 - DNA, 520 bp, Homo sapiens
ttataaagcctacagtatatacagcaatatccttggccttcacatttactcattcactcactcacccagagtaacttccagtcctgcaagcttcattcatggtaagtgctctatgcaggtataccattaaaaacatcttttatactgtattttactgtactttttccatgtttagatatgtttagatacataaatacttaccattatgttacaattgcctacagtgctgagcacagcaacatgctgtacaggtttatagcctgggagcaataggctttaccctatagcctaggtgtgtaggtttgtgtaagtacactctargatgtttgcacaatgatgaaataacccaataacgtatttctcagaatgtatctttgtcattaagcaactcatgactgtacttaattaatggtatttaaactgacagagcccaagtcttggtatttggggcagtactattttactcgcaagggacaataattgtcttgagctaacttagggtaaaatggaggaaattcat

SEQ ID NO: 647078 - DNA, 599 bp, Homo sapiens
ccatcttgttgacatttataaatattaactaatgataattaggtgctctagtttaaagaattacacatggagtctcttcattgccccgagaaaggttctctggctgctccaagcattgcaattcacttttacatgtcatgcaagtgcttttcattcagttatattcctttttcaataggatatactgagaaattaaaactacaaagactagctcttgcttctagtaagtaatagtgtgtttcaaggttaaactatactgggtcctacaaaggaatttatttagtattgaaactaaatttctcagtcttttgaattcatctgatacttctgatgtacaaagaaaaacacatcttactatagctaagaaactatagatatacagataagaarctataattccaaagatctcaattctgtttacatactgaattggctccagaaaaagcatttattctagcatgtaacacaacacatttgttttagacatcaatatttatactgatctctttcaacccttttagtatcgcagaatttcaaatcattaggtattcattttgcattgtgcttttcaaggtcatagaaagagaattctctatctt

SEQ ID NO: 647079 - DNA, 527 bp, Homo sapiens
gagttcatttttgctaagattcctcagctgatgccaaatttagcaagggacccattttttcccaatgaatgacaatctccatttacatttttaatgtccactcctttasgcaggtctagggctggagcaacttatttgcatatagataggagacaggaccctggctcctacagactacattgggaccctcagagaccttcctgagccagagtccctttacctcactcgcttacaaaaggggaggggtctcctaccccagagcctgaagtaggaaggactcaggggctgaaaaaagctggggccaaactcattctgttttaaagacagccttgaagatgcattcaccaacagccatccctgcctagtgcctgcgactcctgccagtgagaggtggcctctaggcagctcctctaggttaattctgtcatccttgaccttgaggagccctttctttcacaccactcactgggtcctctatatctattcccaaggagctcaggtaatgccctatattttctgttcttatc

SEQ ID NO: 647080 - DNA, 619 bp, Homo sapiens
gcacagtacaaaagataaatgcacaaatagctactgcagtggtagtacagtcaatttgggcaaagatcatgtaaatttgtgaggaggttagtagatatttgtggtaaaggaggagtgactaacaactcattaccatgtaatgtactatttaattgaacatgactgtattcctrtaatgattaaaagaaaacgtccaagaagtcaaggtattcattacccaaataataatatttattcatgaatttaaaatattgggaaaaggggcctgaattcatcaattcaacacccattattgagttaaacagatatagaacattcttaaaaatcaagaatgcttggaatcaatgacttctcaaatgttgtgattttagagtcaaggttaaattagtagtcaaggactgaaaatacagtgacaagcatagacagtacctgcccttcaccctctccttcctttacaaaaagaagttggatctaaatgcctcctaccccaatatatcctcttgtctgtcaccaatgacatccttgttgctagatcctgagtccctagctcagacgatcatctctgtttgcttcctactccagttccttctatctggtcttgctttgctacaatttatta

SEQ ID NO: 647081 - DNA, 619 bp, Homo sapiens
gcacagtacaaaagataaatgcacaaatagctactgcagtggtagtacagtcaatttgggcaaagatcatgtaaatttgtgaggaggttagtagatatttgtggtaaaggaggagtgactaacaactcattaccatgtaatgtactatttaattgaacatgactgtattcctgtaatgattaaaagaaaacgtccaaraagtcaaggtattcattacccaaataataatatttattcatgaatttaaaatattgggaaaaggggcctgaattcatcaattcaacacccattattgagttaaacagatatagaacattcttaaaaatcaagaatgcttggaatcaatgacttctcaaatgttgtgattttagagtcaaggttaaattagtagtcaaggactgaaaatacagtgacaagcatagacagtacctgcccttcaccctctccttcctttacaaaaagaagttggatctaaatgcctcctaccccaatatatcctcttgtctgtcaccaatgacatccttgttgctagatcctgagtccctagctcagacgatcatctctgtttgcttcctactccagttccttctatctggtcttgctttgctacaatttatta

SEQ ID NO: 647082 - DNA, 619 bp, Homo sapiens
gcacagtacaaaagataaatgcacaaatagctactgcagtggtagtacagtcaatttgggcaaagatcatgtaaatttgtgaggaggttagtagatatttgtggtaaaggaggagtgactaacaactcattaccatgtaatgtactatttaattgaacatgactgtattcctgtaatgattaaaagaaaacgtccaagaagtcaaggtattcattacccaaataataatatttattcatgaatttaaaatattgggaaaaggggcctgaattcatcaattcaacacccattattgagttaaacagatatagaacattcttaaaaatcaagaatgcttggaatcaatgacttctcaaatgttgtgattttagagtcaaggttaaattagtagtcaaggactgaaaatacagtgacaagcatagacagtacctgcccttcaccctstccttcctttacaaaaagaagttggatctaaatgcctcctaccccaatatatcctcttgtctgtcaccaatgacatccttgttgctagatcctgagtccctagctcagacgatcatctctgtttgcttcctactccagttccttctatctggtcttgctttgctacaatttatta

SEQ ID NO: 647083 - DNA, 541 bp, Homo sapiens
atgtaaatctctctaactggtataatttcaccaagggcaatttggaattgcagtgacatttagaggaacttttaatatgaataaggttgttcatttgagaggctttgtaaaacaagcatttaatgactcagattataaggtcttgtaccatctattgaatcttatataggtatttgtataaaggtaaaatgaaaattaaaagaaatttttaaaaatgtttaactcccaatgctttaaatattttgacccttccaaggagcccttcctccccacataccaagtagctcaaaaaaatgttttttgttttaaaattcagtgaattaatctaaaggccttggccttggttagcactgagaattcttggttggcactcagaatttttaaatataatttttaaaagtcttttaaaatttgattcatatatatagagttttataacttttatttttttaagttcatttaatatttytgaagaatagacaagaaagaaagttctttttaaaaaattaatgtgactatactgattttaaaacaaccttgc

SEQ ID NO: 647084 - DNA, 590 bp, Homo sapiens
taaaaagtagaatcacaatacatggtcttttgtcacttactatattttaagcatgtttctatgggagaaatatatcctggcatcatcactttcaacagctggatgtatgttaagtgaatcattgccaccccagaggtggatttccttctatatatattttaatggactcgagtgaggatttttgcactgaattcatagaagtagaatttctagaagaaaataatataaaacagttttaggatttttaaaacaaatgttcaaatcatcctataggaaaattggttgagtttacgctcccaccaacagggacagagctccaggttccgccttccatttgtcgtcttcgctggtctttaagcagaaaatctcattgttttcatyacctttctttgatttctagtgcttttgaatctttttcatttgctcattggccatttttattcttgtgggaagtgctggtttctccattgcccattttctgctgcaaatcattcatttttttttctgagtaattttaaagatttctttataggctaaggatacaaacctttaatctgtcattgagtttacaaagatcttctcccagtaag

SEQ ID NO: 647085 - DNA, 503 bp, Homo sapiens
aatgctgcttcatctttattatagtatatttacctctgacattaacctggcatggtattcttgtattatttcctttcctgataatacaatcctgggaaatcctgggaaatcctrggatcacatgattatattattcctttcctcatttcccataaagctttatgttgtagtttgcaaataatagatatggcataaaagaaagaaatcaataaaggtaagtgaccctaaactatgtaaatttagaagtttaaaatttatataagaatataaaaatctaatacttaagtacaaataaaaactcatcaaacaataggtgagtaaaactgtgtgtgtatgtctgtatatatgtatagatgcatgtatgtatgtatataatttattgggtgtacctggaagtttaaatctatcattcattagcaagtcaaaatgattactggattctgagctcaaaagtccccttttctgttctgtacctcacctataggttgccaaaccaagttcat

SEQ ID NO: 647086 - DNA, 503 bp, Homo sapiens
aatgctgcttcatctttattatagtatatttacctctgacattaacctggcatggtattcttgtattatttcctttcctgataatacaatcctgggaaatcctgggaaatcctaggatcacatgattatattattcctttcctcatttcccataaagctttatgttgtagtttgcaaataatagatatggcataaaagaaagaaatcaataaaggtaagtgaccctaaactatgtaaatttagaagtttaaaatttatataagaatataaaaatctaatacttaagtacaaataaaaactcatcaaacaataggtgagtaaaactgtgtgtgtatgtctgtatatatgtatagatgcatgtatgtatgtatataatttattgkgtgtacctggaagtttaaatctatcattcattagcaagtcaaaatgattactggattctgagctcaaaagtccccttttctgttctgtacctcacctataggttgccaaaccaagttcat

SEQ ID NO: 647087 - DNA, 562 bp, Homo sapiens
acttatctttatctttcattaatttagggaaataaggcaaatctatcttgcatgctgttataatctcagtaactaggagtgaaataggtatgaagtataagcatgaaagactatgtacaaggacatttttgaccatacaggttgagaatcccttatccaaaatgcttgagatcagaagtgttttggattttggaatacttgcattacatttataccagctgagcaccccaaaccagaaaatctgaaatctcaaatgctccacatragcatttcatttgagggtcatgtcagtgctcagtaaatttcaggcttcagatttggagtgctcaacctgtgtaagttgttaacactgacataatgaagataacctaaatgtccatcaaaagaaaagttagataaactagtatatccaagttatggaatactacatactgacttttgaaagagaataaaataaatcaaaaaatgattagcagactcatgggccccttctgctaggccccaaatgacattcaagaccaaagattttgacatctatatgtaattataatatattgcatta

SEQ ID NO: 647088 - DNA, 619 bp, Homo sapiens
aaaggaaagagagaaataagagaaagtgaggttaggtaagatgatatgatgtgaggtaagagaagaaggaaacaaaagcgttaagtgaaaacagtggctagaaattttcccaaaataatgagacaagaaagctcaaagttaaaasgaactatgtacctaaagcagaatatatacaaatgaaacctcaatttactgaaagtcaaatacatagggaatattttgatttaaacaaaaggcacattatctttgaaacagcaacaatgtcatctatagctgactttataacataagcaatggaaactagaagataatatgatgctgttactagagagctaaaaaataaaactgccaaactagaatgctgtacctaaaagaaaacatcctccaaataaaaagaaaataaaaatttatatcaaaaaaattgagagaatttgttgtcagcagcttcaagtaaagtgagtttttttcctgcaaaggaaaataattgcaactgaaaacacagaaatacagggaggaataaaaaccaatgatactggtagataaatataaaattaaaatgcatgacaatataacactgaagctaggaacttaggaaaaaataaaaataaattaatagtgg

SEQ ID NO: 647089 - DNA, 583 bp, Homo sapiens
tgaagcttaaattgatgtctatagagtgttttgccccctcatattaaacttttacacactattaaagttaaaatattttatattctctgaactcacaaatgctagctggccattttagttggaggaatgtaataaataatgagacaacgttggtaaattcattctcaaatgcagtgtttgtyattattcctttatgaaattagagctatatgcagcattttacttttccacatgtgtatattaaatagaatattcaagaaatgacaccatccttttatttttcttgtagtttcttaaagttttaacatttttacatttagaattttttttacattttgtaatcaggttgtatttcttaataatattattttagtatagtagaaaacagttacgtgtcttattatcaatgttcacatcacatacacactatcttatttttgaccttaacccagatacatgtgcagactgatgtccaagtatcatcagacttttttccaaaggacattctgaaaataaattactgaaaggtcttgaagtttagtatctctacttttccaaaagaaacaccactaaaaaatcacaa

SEQ ID NO: 647090 - DNA, 576 bp, Homo sapiens
ttacctattggatctacctgtaagatatatggtactggcaaatttcagttggagaaattaaacctggccttttatcattattgacaagtaaccaggcaattgcagccattgcttgtatcctatgaggcagtattgaaagtcctgttgaggaaaacactgcagaaagaactttctgcggtttagaggggactttattataaktctccatagtctgctttggcttgagctaaatcataaattaatgtattaagcaatttttttttaaagaaggagatggttaccaagggaaaaaaaagagtatcagtagtgtcagtgaggatggagagaagtgggtggctttgggagatttaggatgccgaactgacagtcctgcgtggtagattgcctgccagtgagcagggtgcagggaggggttagagaggacggctggaaatctgttttgggctgctggtggacatcagctgaccatgtgacccactgtaaataatacagctgtaattatagtataaggctctctacagggtaaacatagtaaataatgatttaacatttatcatgatttagaatcataaaatg

SEQ ID NO: 647091 - DNA, 576 bp, Homo sapiens
ttacctattggatctacctgtaagatatatggtactggcaaatttcagttggagaaattaaacctggccttttatcattattgacaagtaaccaggcaattgcagccattgcttgtatcctatgaggcagtattgaaagtcctgttgaggaaaacactgcagaaagaactttctgcggtttagaggggactttattataattctccatagtctgctttggcttgagctaaatcataaattaatgtattaagcaatttttttttaaagaagragatggttaccaagggaaaaaaaagagtatcagtagtgtcagtgaggatggagagaagtgggtggctttgggagatttaggatgccgaactgacagtcctgcgtggtagattgcctgccagtgagcagggtgcagggaggggttagagaggacggctggaaatctgttttgggctgctggtggacatcagctgaccatgtgacccactgtaaataatacagctgtaattatagtataaggctctctacagggtaaacatagtaaataatgatttaacatttatcatgatttagaatcataaaatg

SEQ ID NO: 647092 - DNA, 597 bp, Homo sapiens
taaagttccttttcacaaaaggaactctccattgccatgactttttgttttcaaaatatcactgtattgcaaaagaaagtcatattgctatgttagtgacagcctgggcctttgtcatgtatctcctggagaggtatttgaatagtaaccaattttytctctcttttaaagcaaatctagcagagccgttagtgcatcttctccaagaagggccgttcataaaaaaaacaacaaggtaaatagacacatttacaatgaaaggaaatgatgttttctacttaaaaagtctttagagaaatcagtcaagaatttttttctcatttctttgttcagaaaatccctagtttgcatccttatgtactatatgtgtttaaatattagccctctagtacatattaaatggcttttaaaagcaaagtttagagaaacgagtacagaatatgtcagtctcagaattattatctgcaagtttttgtttatgttgtccccttcaggtggaagtcagcagcctcggcatacagatggccttgtgctgccagatctatgtacatgccttgaccgccacccccttatctttggctttaggagatcccaaag

SEQ ID NO: 647093 - DNA, 597 bp, Homo sapiens
taaagttccttttcacaaaaggaactctccattgccatgactttttgttttcaaaatatcactgtattgcaaaagaaagtcatattgctatgttagtgacagcctgggcctttgtcatgtatctcctggagaggtatttgaatagtaaccaattttttctctcttttaaagcaaatctagcagagccgttagtgcatcttctccaagaagggccgttcataaaaaaaacaacaaggtaaatagacacatttacaatgaaaggaaatgatgttttctacttaaaaagtctttagagaaatcagtcaagaatttttttctcatttctttgttcagaaaatccctagtttgcatccttatgtactatatgtgtttaaatattagccctctagtacatattaaatggcttttaaaagcaaagtttagagaaacgagtacagaatatgtcagtctcagaattattatctgcaagtttttgtttatgttgtccccttcaggtgraagtcagcagcctcggcatacagatggccttgtgctgccagatctatgtacatgccttgaccgccacccccttatctttggctttaggagatcccaaag

SEQ ID NO: 647094 - DNA, 597 bp, Homo sapiens
taaagttccttttcacaaaaggaactctccattgccatgactttttgttttcaaaatatcactgtattgcaaaagaaagtcatattgctatgttagtgacagcctgggcctttgtcatgtatctcctggagaggtatttgaatagtaaccaattttttctctcttttaaagcaaatctagcagagccgttagtgcatcttctccaagaagggccgttcataaaaaaaacaacaaggtaaatagacacatttacaatgaaaggaaatgatgttttctacttaaaaagtctttagagaaatcagtcaagaatttttttctcatttctttgttcagaaaatccctagtttgcatccttatgtactatatgtgtttaaatattagccctctagtacatattaaatggcttttaaaagcaaagtttagagaaacgagtacagaatatgtcagtctcagaattattatctgcaagtttttgtttatgttgtccccttcaggtggaagtcagcagcctcgkcatacagatggccttgtgctgccagatctatgtacatgccttgaccgccacccccttatctttggctttaggagatcccaaag

SEQ ID NO: 647095 - DNA, 560 bp, Homo sapiens
ctcttgctttttgtaaatttccacttccctgactctgctcaagcccccaccattccccactccctactccttcgctttcctttaaaatgcccactttctgtacaaatcaactttttatgcacttattggtcattcatatatcttcttttgcaaagtgcctgttcagttgccttcttcttatggagctgtaagattctttatatattctgaatacaagcttggttttgtttggttttgtttttttgagacaggatcactgtcactctggctggagtgcagtggtccaatcacggctgactgtagctcgayctcccgggctcaactgatcctcacacctcagcctcctgagtagacgggactacaggagtgtgccaaaacacccggttagggtttttgtttgttttgtattttttgtagagacagggtttcaccatgttgcccaggctggtctggaactcctgggctcaagtgatctgcccaccttggccttccaaagtgctgggattacaggcatgaactaccatgcctggtcacaagtccttttttctacacacgcacac

SEQ ID NO: 647096 - DNA, 554 bp, Homo sapiens
gagcatgggcttagggttaggtggaggtgaagcacaggatgagaaagggagatccaccattaggaatttatctatggttttttaatcagaaaagtcaagaaacaagccattttaggctttcagataacatggtagttttgtgtggtggggagccataatcttttcagtaactgggtcctgtgaacattttatcccagtcagcatgaacatatcatggttgcttctytcccatagacaccagccttccagttccatttgcttccctggtggtttgacagcacactttgaaatttaagcaagatttcctgaaggataactgttaaggctttttgacaacagagcttaattatatctttctcttcttgctaaaatgatgtgtaactacaatcacgggggccccgcataatttaaagaaattaaattgttcataattcctgatccaaataaccctatttttctagggccaagcaaaaagtgcattcatgatctctcctagagtcagaaggctgccaagtcctacacaggctttggctctacagctttggtatgtggag

SEQ ID NO: 647097 - DNA, 422 bp, Homo sapiens
agctacttgggaagctgaggtggaaggatcactcgagcccaggaatttgaggctgcagtgatctgtggttgcaccactcatactagcctggacgacacagcaaaaccatgtctttaagaaaaaaaaacattaaactcctttgacttcactggtactgcacgcccagggccgtgaactctgccctttcaccatccaggaagcagtggggaaaggacacccaggcttttgaaaccacctaaagagacaaatctctcactggcctggggatrgagacagggatctctcagcccagagcggagatcaggggcagccccagagtccttacccttctgggtgcatgggaaggtcggcatgtcctcgtcgtcacccgccaggtcctcttctgtaacgcacaaggcatctccatcgccgccggccgacct

SEQ ID NO: 647098 - DNA, 625 bp, Homo sapiens
ccattcccttgttcaattaggttaaaaagtttaaaaagatgagaactgtgaggcttaggagaaaacatgcacaaaactatcaaggaagctgttaaacttactgtcactgacctagcctagcaaagttggcttttattaaatggcagctgtgcttgattaaaaaattatgactcccctcaggaatcataggggtcattaaaaaccaagtcataaaakcccctgctccctaaaggcccactgacagagaacacttcagatttccttagtgtaatttaactttaactaccataatacccaacacgtacttaaaagatttttaaaaattgtcattttatcctttacgtacctacatcaaattgttaaataattagattaaattaatatttgaaaaatacaaatgatctgaattataaatctggtctgatacttggtcaccttaaatcagccttttttcagatccattagtgccttttcaaccaaagtgttttaaatgagtattttcatatgttttacttaccttagtagttttaaaagtgatcaaataagaaactaatagatcatctgagagaaagcaatctataaaagtgcatagatttaccagatgttagacatacatgggttttta

SEQ ID NO: 647099 - DNA, 579 bp, Homo sapiens
tacaacttatttgtcaaatttaatgaccaaaaatacagtttccacactgaatcagctaagctgcctttgattgttagtaactgaatctctcaccagcagtggattaatgataagcagatttcatttttcacaaaaggctatagtaagtggcttacttcttcctgactttctgccatcctcaggagattggcattcccatcctcaggctctttgtctcatggtcacaaggtggttgcctcagcttcacatcrtaaactcacatagcagaatccaaagaaagagggaaggaaagaaggctcttcttggacatttttctatttctcttttcaagaagcacccctcacctcaacccagcagtcttgaccttatatttcattggccagaattgcctaacatggacagacctggctgcaagaaaatgtggcaaattattgggtatttccagactttatcatgggaagaggaaaaagaggaaaagaaatggctattgagtaggcaacaaccacatctgccacacctgcttatagattatattctttccctggtttttcttctgcaaaactcttaattattatttaa

SEQ ID NO: 647100 - DNA, 655 bp, Homo sapiens
agagagaaatagatgataaagtgatggaagaaaaaagttaaagaaaggaggaagtgagaagctattagaaataagattctatacttgagcaacagataaaaatggaatgattcactgattagtataactgaaaatatagggaggtgtggattctgcaggacagcatctggattaaatactttataagaaaaaatataattcagcaaaagtttttctcttctgtgataacatgacagacatttcagtgcctacttgcctcagaaagaggagcttgacacagagcagcaatcagaagctacttactctttcatcattagaatatgttgcygagtaattaatgaagttgacaagttgaaggcaattttctggttcttgttttaacaacaatttaactttgttttttataacccaatgatgctggataaaataaaaccaattgacagagaagtcaggacaggacttggttgtttctgaatatgaaaaatatctagaaagatgcttcatctttatcctttaccttattctgttgccctcatagcatacatgaattcagtttttaaatacttatttttaattttttaaatatataacaaatcatgcatagcaaaagttttattccgtagaattcatactctcattctctgatttttacatt

SEQ ID NO: 647101 - DNA, 579 bp, Homo sapiens
atgctgaaaggtggtattgatgccaaactgtaactaaccccagagcactgcactaatcatttccttacactatgaccacaattttgtataatgaatagtccttcttaaaactctcctcgccgggcgtggtggctcacgcctgtaatctcagcactttgggaggccgaggtgggaggatcacgaggtcacgagatcgagaccagcctgaccaacatgatgaaaccctgtctctactaaaaatacaaaaattagctgggcatggtggcacgygcctgtaatcccagctactcgggaggctgaggcaggagaattgcttgaacccaggaagcagagattacagtgagccaagatcaagccactgcactccagcctggtgacggagccagactccatctcaaaaaaaaaaaaaaaaaaaaaactctcctcaaaactctcctcaatggctaggtgcggtggctcacatctgtaatcctagctttttgggaggccaagccgggtggataacttgagctcaggagttcgagaccagcctgggcaacatggtgaaaccccgtctctactaaaaaatacaatacaggt

SEQ ID NO: 647102 - DNA, 508 bp, Homo sapiens
tttgtgaagtgttttattttttaaaaaaaaagctaactaaagaactaaaagaaccacaagcaaaccaaaatataaaaaataaacatttttctagctctgcaatgtaagacayatactttaaattattcaaatatacctaaataggaatctaatttaatttcaagtttatgctatttttgaagtaagaaacatgctgtgtcatttatgaaactagaaatatatgattgaaaaagagtctacatagtgagagaacttgaccataatctttgaaagtaaaatcaaacgaaagcttatgtaaaaagtgtgattattaggctttaatttttaaaatatgataataaaataagagatattgaatgttgctaaaatttttaaatgtgttatgaaaacagcatacatggaatattatacatttattcaaattatgttttaaaaataatgacataaacatacttcttatacattatgattgaaatgctgaggttttatttaatacataaccaataaa

SEQ ID NO: 647103 - DNA, 508 bp, Homo sapiens
tttgtgaagtgttttattttttaaaaaaaaagctaactaaagaactaaaagaaccacaagcaaaccaaaatataaaaaataaacatttttctagctctgcaatgtaagacacatactttaaattattcaaatatacctaaataggaatctaatttaatttcaagtttatgctatttttgaagtaagaaacatgctgtgtcawttatgaaactagaaatatatgattgaaaaagagtctacatagtgagagaacttgaccataatctttgaaagtaaaatcaaacgaaagcttatgtaaaaagtgtgattattaggctttaatttttaaaatatgataataaaataagagatattgaatgttgctaaaatttttaaatgtgttatgaaaacagcatacatggaatattatacatttattcaaattatgttttaaaaataatgacataaacatacttcttatacattatgattgaaatgctgaggttttatttaatacataaccaataaa

SEQ ID NO: 647104 - DNA, 508 bp, Homo sapiens
tttgtgaagtgttttattttttaaaaaaaaagctaactaaagaactaaaagaaccacaagcaaaccaaaatataaaaaataaacatttttctagctctgcaatgtaagacacatactttaaattattcaaatatacctaaataggaatctaatttaatttcaagtttatgctatttttgaagtaagaaacatgctgtgtcatttatgaaactagaaatatatgattgaaaaagagtctacatagtgagagaacttgaccataatctttgaaagtaaaatcaaacgaaagcttatgtaaaaagtgtgatyattaggctttaatttttaaaatatgataataaaataagagatattgaatgttgctaaaatttttaaatgtgttatgaaaacagcatacatggaatattatacatttattcaaattatgttttaaaaataatgacataaacatacttcttatacattatgattgaaatgctgaggttttatttaatacataaccaataaa

SEQ ID NO: 647105 - DNA, 508 bp, Homo sapiens
tttgtgaagtgttttattttttaaaaaaaaagctaactaaagaactaaaagaaccacaagcaaaccaaaatataaaaaataaacatttttctagctctgcaatgtaagacacatactttaaattattcaaatatacctaaataggaatctaatttaatttcaagtttatgctatttttgaagtaagaaacatgctgtgtcatttatgaaactagaaatatatgattgaaaaagagtctacatagtgagagaacttgaccataatctttgaaagtaaaatcaaacgaaagcttatgtaaaaagtgtgattattmggctttaatttttaaaatatgataataaaataagagatattgaatgttgctaaaatttttaaatgtgttatgaaaacagcatacatggaatattatacatttattcaaattatgttttaaaaataatgacataaacatacttcttatacattatgattgaaatgctgaggttttatttaatacataaccaataaa

SEQ ID NO: 647106 - DNA, 550 bp, Homo sapiens
gaagcctccccagccatgcagaactgtgagtcaattaaaactattttgattctaaattacccagtctcagtcagttctttatagaagcatgagaacagactaatacagtgacccacccctttatatttgtttaactgagttgattcaatgaatccatctcacagctctcagtttttttcctcagcttagtcctttctgttgttaatacttccagttaaacaatgaaatgctcatagtgagtttttcagctmttagacgagtttgggtcattgtctttttttccttttttttttttttgtgtgtgtgtgtgtgtgtgtgtgtgtgtgtgtgtgtgtgtgatggagtcttgctctgtcaccaaggcaccaaggctggaatgcagtggtgtgatctcggctcactgcaacctctgatttcaagccagtctcctgcctcagtcacccgagtagctggaactacaggtgtgtgccaccatgcctggctaagttttgtatttttactggagatggggtttcaccatgttggccagcctggtctcgaactcctgaac

SEQ ID NO: 647107 - DNA, 550 bp, Homo sapiens
gaagcctccccagccatgcagaactgtgagtcaattaaaactattttgattctaaattacccagtctcagtcagttctttatagaagcatgagaacagactaatacagtgacccacccctttatatttgtttaactgagttgattcaatgaatccatctcacagctctcagtttttttcctcagcttagtcctttctgttgttaatacttccagttaaacaatgaaatgctcatagtgagtttttcagctattagacgagtttgggtcattgtctttytttccttttttttttttttgtgtgtgtgtgtgtgtgtgtgtgtgtgtgtgtgtgtgtgtgatggagtcttgctctgtcaccaaggcaccaaggctggaatgcagtggtgtgatctcggctcactgcaacctctgatttcaagccagtctcctgcctcagtcacccgagtagctggaactacaggtgtgtgccaccatgcctggctaagttttgtatttttactggagatggggtttcaccatgttggccagcctggtctcgaactcctgaac

SEQ ID NO: 647108 - DNA, 550 bp, Homo sapiens
gaagcctccccagccatgcagaactgtgagtcaattaaaactattttgattctaaattacccagtctcagtcagttctttatagaagcatgagaacagactaatacagtgacccacccctttatatttgtttaactgagttgattcaatgaatccatctcacagctctcagtttttttcctcagcttagtcctttctgttgttaatacttccagttaaacaatgaaatgctcatagtgagtttttcagctattagacgagtttgggtcattgtctttttttccttttttttttttttgtgtgtgtgtgtgtgtgtgtgtgtgtgtgtgtgtgtgtgtgatggagtcttgctctgtcaccaaggcaccaaggctggaatgcagtggtgtgatctcggctcactgcaacctctgawttcaagccagtctcctgcctcagtcacccgagtagctggaactacaggtgtgtgccaccatgcctggctaagttttgtatttttactggagatggggtttcaccatgttggccagcctggtctcgaactcctgaac

SEQ ID NO: 647109 - DNA, 550 bp, Homo sapiens
gaagcctccccagccatgcagaactgtgagtcaattaaaactattttgattctaaattacccagtctcagtcagttctttatagaagcatgagaacagactaatacagtgacccacccctttatatttgtttaactgagttgattcaatgaatccatctcacagctctcagtttttttcctcagcttagtcctttctgttgttaatacttccagttaaacaatgaaatgctcatagtgagtttttcagctattagacgagtttgggtcattgtctttttttccttttttttttttttgtgtgtgtgtgtgtgtgtgtgtgtgtgtgtgtgtgtgtgtgatggagtcttgctctgtcaccaaggcaccaaggctggaatgcagtggtgtgatctcggctcactgcaacctctgatttcaagccagtctcctgcctcagtcacccgagtagctggaactacaggtgtgtgccaccatgcctggctaagttttgtatttttastggagatggggtttcaccatgttggccagcctggtctcgaactcctgaac

SEQ ID NO: 647110 - DNA, 334 bp, Homo sapiens
tatctgtggttttgccatcctcaatacatagctcttgggggttttctgtggattgttttaatgttagccaaccagagagaataaaaagagtattaaaaattattaattgtgggtctatgtgaccctgtaagaaggctacatcactactatatacttagaacctaaatttctatgycaaaatataggcgaatatagcaaatattgtccaaatttacaaggaaagagaaaatgaattgtgtgttcatcttacagtttctaataaaatccccaacattgaacttaaatgactctccagttgttcattaggagcatatgctgttggttgactgccagc

SEQ ID NO: 647111 - DNA, 317 bp, Homo sapiens
tctgcagtctcacatacttaagaggctaaggtgggaggactacttgagcccaggagwttgaggcttcagtgaattatgatggtgccacaacactccagcctgggaaacagagctggaccccatttccaaaaaaaaaaaaaaaaaagtagttacccaggtaaggtggatgatcaagtacacccagtgagaagcacacaaaccttaccctttacccaaactctctcccttacctggcccatttctggtttctggaggaggatcagttagggggtgtgacccaagttacccagataattaactgtggaagcacgagtttt

SEQ ID NO: 647112 - DNA, 583 bp, Homo sapiens
aatcccgtttcgaacgaaatcctcaaagctagacaaatatccacttccagattccacaaaaagagtgtttcaaaactgctctctcaaaagaaaggttcaactctgttggctgagtagatacatcatgaaaaagtttctgacattgcttctatstagcttttattggaagatatttcctttttcaccgtagtccttagaacgctccaaatgtccacttccagatactacaaaaagagtgtttcaaacctgctctatgaaagggactgttcaacactgtgacttcaattgaaacatcccaatgaagcttccgagaatgcttctgtctagagtttatatgaagacaatcccgtttccaacgaaatcctcaaagctatccaaatatcctcttgcagattttacaaaaagagtgtttcaaaactgctctatcaaaagaaaggttcaacactgttagttgagggcgcacatcacaaataagtttctgagaatgcttctgtctagttttcaggggaagatatttcctttttcaccataggcctgaaagcgctccaaatgtccacatacagatactacaaaaagtgtgttt

SEQ ID NO: 647113 - DNA, 583 bp, Homo sapiens
aatcccgtttcgaacgaaatcctcaaagctagacaaatatccacttccagattccacaaaaagagtgtttcaaaactgctctctcaaaagaaaggttcaactctgttggctgagtagatacatcatgaaaaagtttctgacattgcttctatctagcttttattggaagatatttcctttttcaccgtagtccttagaacgctccaaatgtccacttccagatactacaaaaagagtgtttcaaacctgctctatgaaagggactgttcaacactgtgacttcaattgaaacatcccaatgaagcttccgagaatgcttctgtctagagtttatatgaagacaatcccgtttccaacgaaatcctcaaagctatccaaatatcctcttgcagattttacaaaaagagtgtttcaaaactgctctatcaaaagaaagsttcaacactgttagttgagggcgcacatcacaaataagtttctgagaatgcttctgtctagttttcaggggaagatatttcctttttcaccataggcctgaaagcgctccaaatgtccacatacagatactacaaaaagtgtgttt

SEQ ID NO: 647114 - DNA, 239 bp, Homo sapiens
atatcttccaataaaagctagatagaagcaatgtcagaaactttttcatgatrtatctactcagctaacagagttcaacctttcttttgagagagcagttttgaaacactctttttgtggaatctgcaagtggatatttgtctagatttgaggatttcgttggaaacgggattacatataaaaagcagacagcagcattcccagaaactactttgtgatgtttgcattcaagtcacaga

SEQ ID NO: 647115 - DNA, 239 bp, Homo sapiens
atatcttccaataaaagctagatagaagcaatgtcagaaactttttcatgatatatctactcagctaacagagttsaacctttcttttgagagagcagttttgaaacactctttttgtggaatctgcaagtggatatttgtctagatttgaggatttcgttggaaacgggattacatataaaaagcagacagcagcattcccagaaactactttgtgatgtttgcattcaagtcacaga

SEQ ID NO: 647116 - DNA, 239 bp, Homo sapiens
atatcttccaataaaagctagatagaagcaatgtcagaaactttttcatgatatatctactcagctaacagagttcaacctttcttttgagagagcagttttgaaacactctttttgtggaatctgcaagtggatatttgtctagmtttgaggatttcgttggaaacgggattacatataaaaagcagacagcagcattcccagaaactactttgtgatgtttgcattcaagtcacaga

SEQ ID NO: 647117 - DNA, 478 bp, Homo sapiens
tcacagtgttgaacagtccctttcatagagcaggtttgaaacactctttttgtagtatctggaagtggacatttggagagatctctggactacggtgaaaaaggaaatatcttccaataaaagctagatagaagcaatgtcagaaactttttcatgatgtatctactcagctaacagagttgaacatttcttttgagagagcagttttgaaacactctttttgtggaatctgcaagtggatatttgtctagctttgaggatttcgttggaaacgggattacatataaaaagcagacagcagcattcccagtaacttcyttgtgatgtttgcattcaagtcacagagttgaacattccctttcatagagcaggtttgaaacactctttttgtagtatctggatgtggacatttggagcgctttcaggcctatggtgaaaaaggaaatatcttcccctgaaaactagacagaagcattct

SEQ ID NO: 647118 - DNA, 468 bp, Homo sapiens
gaacagtccctttcatagagcatttttgaaacactctttttgtagtatctggaattggaaattttgagagacctcaggaatacggtgataaaggaaatatcttccaataaaagctagatagaagcaatgtcagaaactttttcatgatgtatctactcagctaacagcgttgaacctttcttttgagagagcagttttgaaacactctttttgtggaatctgcaagtggatatttgtctagctttgaggatttcgttggaaacgggattacatataaaaagcagacagcagcattcccagtaacttctttgtgatgtttgcattcaagtstcagagttgaacattccctttcatagagcaggtttgaaacactctttttgtagtatctggatgtggacatttggagcgctttcaggcctatggtgaaaaaggaaatatcttcccctgaaaactagacagaaacattct

SEQ ID NO: 647119 - DNA, 466 bp, Homo sapiens
gtactgtaactttttctggatttgtsaaatagatttcttaaattgctcattccaactaacgttctgtcagggctccaatttatctacatcctctcaaacacttgttatttcctgcttttgaaaatttattgcccttccagtgtgtgcgtatgaaatatgatatctcattttggatttgaaatgcattttctgcacccattaactcatcatgcacatggaccctagaacttaaagtataataaaaaaaaaagaaatgcgtcttctgaatcactgaatatgagtatctgtcccatgtgcatcttgggcatttgcccattttatttggagaaatatccattgagatgtttggccttttaattttgtttaagttgtaagttagtcatatatcggatactagaagttgaaaatttaaaatttgttgcttaaacttatgcatacagaaatcatcgaagttcccgagaaacta

SEQ ID NO: 647120 - DNA, 468 bp, Homo sapiens
aaagaagaaataggtagagagtaaacaaaatccatctcccctctgcagagtccccaccttgacttcttttaagtgttgttggaaaacctcctgcccctcgctctgtctttctcccttcccctcccactccacaaacacagtttttcactttttatctatatatacagtgtctataaatcagatattttggtccccaaatacatgagtrtttaccaagaaaataagatgctttccagagaaagccagcatttttatggaggtgcacccacactcaaaaacacatgtgtgccagtgagctcttgcctgaagcaggcccaggctactggggcttctgcggaaccctgcctctgcccaggtcccccccacctcacagagtcgacctcaggcctgggccatgctcttctgccagcttcagccatcgccccacccacaagcaggcctgcaagcagagtgtcagcatgacttggc

SEQ ID NO: 647121 - DNA, 589 bp, Homo sapiens
tgcattttcataacatcccagcacataacaggtggttgttatgtgcrttaaagtttgagaagcactgctgttttataatatcacctcccattactcatcaagacctatttaaacttccccatttaggaaaaaaatcactctctagggaagcttttatagtggtggtgaacagctctcacagtaatgaagtcttttcttacattaattaaagatcagcttctctgttacttccagctaatttgtcaagattcttccccttaagtcattcagaataaattcagtttttctcttttagcaaaatattttagataattgcaaatagaacctttgtcttcttactcacctccagttacttcaatcacttttctaaggtcataatatttactatccctcaacatgttggtgctctattctaaaatctgccttattttttttcccatgaaagtatgacttccagaattgaatgcaatattctttgtacagtctgaaatttgcagaatttaaaatgattgtctcctcacttactctccatatttgacctctattaatatagccaaatttattttctgtagagaaggggggatagtat

SEQ ID NO: 647122 - DNA, 551 bp, Homo sapiens
gtaacccttgcttttcttactgcttctttttgccaggtaaatttttgtcaatatcatttttttttagcctttttgaaatcactgaaaaaaaattaagtggttctcaattacagttgtgtgatttttcatgtgctttatcccacattacacaaacaacagtctcaggtcatccatatcaaaactagcaccggcaaaatgatgaatgtctaccctacaagggttatgcagtcaaaccttaatggtgggccttaacgtcatttggaatartgtctggctgtgtgtgcttacatcatctgactatacaggttcatttgtttcattttccttttacttttagaagttgccttttttaaattaatttttttaattatataaaatgtttatatgttttaaatcggagttgcaaaacaaagtttattcaaagaagcttagtttttcctactaacccctctaacctagcccccccccacatatgtaatcatttattatcttatagtttaccttccattgtttattattattttttaattcttttattttttttgagatag

SEQ ID NO: 647123 - DNA, 399 bp, Homo sapiens
agcgctgtctgcacattagtgtgaaccataacaagaactgcaagctgaaactatgcaagccatcttaataatcaacagggaaaaattatgactgcttgatgatctgtaaacattttttcaaaacatcaaaaaatctttactgtgaatttaaaatggctataaaaaatraaaagtagcaacactaatatttaatgcactataatttaaaacattagtaacactgaaaattaaaatgttttattttttctgtttggtgtttgccttctttttctcatcatataatttataatacagaggaagcatcttttgcatcttagcaaattattaaactcctaaatttggatcagcttacaatatttttttctttgtgttttcaatgtcataaaatatctcagaatt

SEQ ID NO: 647124 - DNA, 544 bp, Homo sapiens
aataatataaagttttcatttcaattatgtgacaatgctttgtatagctgtattccaaatacatagcatggtgcctagaacatagcaggcagtcaatacatttttaccaaatgaaatgaataaattaccagttgattttatactgaggaccaamctatgacctttaatctctccaaaataaaacacacaatcccattatatgtgaaccatatccacaataccagaatctaagattcccactctgaaagagtaactagaacaacttctttttgaggcaattctgcttacttagcacattactcccccctacagttttccttcttttgtttttgtactaaggatatttgtataaaaacaggatctttgttgcttagtaattcatctgctccagctgcttgtattctgttcccaatcaaaattcttggttttcagcctcctcatcatttttataaggagttgaatgaattggccaggcttgttcctttctccctctccatggaacaccaggccccaagctccccgacactgctcctctttttgtttc

SEQ ID NO: 647125 - DNA, 544 bp, Homo sapiens
aataatataaagttttcatttcaattatgtgacaatgctttgtatagctgtattccaaatacatagcatggtgcctagaacatagcaggcagtcaatacatttttaccaaatgaaatgaataaattaccagttgattttatactgaggaccaacctatgacctttaatcyctccaaaataaaacacacaatcccattatatgtgaaccatatccacaataccagaatctaagattcccactctgaaagagtaactagaacaacttctttttgaggcaattctgcttacttagcacattactcccccctacagttttccttcttttgtttttgtactaaggatatttgtataaaaacaggatctttgttgcttagtaattcatctgctccagctgcttgtattctgttcccaatcaaaattcttggttttcagcctcctcatcatttttataaggagttgaatgaattggccaggcttgttcctttctccctctccatggaacaccaggccccaagctccccgacactgctcctctttttgtttc

SEQ ID NO: 647126 - DNA, 600 bp, Homo sapiens
  misc_feature 566, 567, 568, 569, 570, 571, 572, 573, 574, 575, 576, 577,578, 579, 580, 581, 582, 583, 584, 585, 586, 587, 588, 589,590, 591, 592, 593, 594, 595, 596, 597, 598, 599, 600: n = A,T,C or G
tgggaagatgatctcctcttacaaatgtttagtttcaaatagtggcagcacatattaggatagagagatgacttctagaaaactgaacatatgggactggaacagtgtattttggagtcagttacaggaaggaagttgtttaaaaccaagtgaacaacaacagtaacaaatgcatttgagagaaagagcagtgcagtccagacttaaacattagggtggccataatagatggggaagaaggagaaatcagcaatccagactaagacttcactgggttttgagttagacagagggagtcatagaagccaaggtaaaatgattaaaacggtgcatggagtggttagcaattctccctataggagagagaatttccttatgaagtttcagatgagaccactgaacttgactagaggaaagtcattgtttttagaaaacagtttctaagcaataattagaattaaasttttgttgcggagggataagtaagaagtagatggaaaagaaagagaaatatctgaaattaggctacagtcatagaaggttagctgtgaaacagataatttggnnnnnnnnnnnnnnnnnnnnnnnnnnnnnnnnnnn

SEQ ID NO: 647127 - DNA, 537 bp, Homo sapiens
ttcaccatgttggccgggctattctcaaactcctgacctcagatggtcctcacacctcagcctcccaaagtgctggaattacaggtgtgagccactgtgcccagcccacttgcaaaactttttaacatttataaggttttttacatacttgattttgttcagttcttagaataatctcatgatgtaggtgaccttattaactatttacaatgtgagaaaatggatagtcagtgaagataagtaacttgtccaaggtcacagcaccagaactccaaaccagaccttctgaccttcttgatacagactcctcacagtcacctgcatgccatctttggtttcagtgctatgaactttcttcactgcctgttggtctgtagctacacctactcatgaagatgcccagagccttagccgctccttgctcygccatgcttatcttatgcagctctgggaggggtgaagaggctgtggccagttacctcactaccactatagctattcaccaccctgttttctcctttagccattttagctacc

SEQ ID NO: 647128 - DNA, 619 bp, Homo sapiens
gaaaaccactgtattagtttatgactgccattcttattttttctttttataatcatattagaaatctctcagtgcaagtctcagaagctaacctaattggtactggaacaagtgaacactgggtcgatgatgaagggccccagccaaagaaagtaaaggtgaggtggccatggtagaaccaccattgtcagccattatctggttacatttcaaatttctgtcctttagctccagagtgtcctgaatgggagtaaagagtgatagtcttgatgtcttacccagacaataactatcctaggttctcctaaacagcaggaatccttaggacrtaaatgaccttgggttacctatatatgctcttcaagaataactctttaaaaatactaagcacatctgtttcctttagtgttatgctggcagtagtcaagtcaggaatggtgtgtgtagatggcaattccttcatggccacatctcttccttatcctttatgggcacttcttctataagagaagatgaaattaagcagtggaagaaagccagttatcattgacattggcaaaatgaaagccagtgatcatggcaaaacgttgacattggaggctccataccttgagcccag

SEQ ID NO: 647129 - DNA, 619 bp, Homo sapiens
gaaaaccactgtattagtttatgactgccattcttattttttctttttataatcatattagaaatctctcagtgcaagtctcagaagctaacctaattggtactggaacaagtgaacactgggtcgatgatgaagggccccagccaaagaaagtaaaggtgaggtggccatggtagaaccaccattgtcagccattatctggttacatttcaaatttctgtcctttagctccagagtgtcctgaatgggagtaaagagtgatagtcttgatgtcttacccagacaataactatcctaggttctcctaaacagcaggaatccttaggacataaatgaccttgggttacctatakatgctcttcaagaataactctttaaaaatactaagcacatctgtttcctttagtgttatgctggcagtagtcaagtcaggaatggtgtgtgtagatggcaattccttcatggccacatctcttccttatcctttatgggcacttcttctataagagaagatgaaattaagcagtggaagaaagccagttatcattgacattggcaaaatgaaagccagtgatcatggcaaaacgttgacattggaggctccataccttgagcccag

SEQ ID NO: 647130 - DNA, 535 bp, Homo sapiens
gtttttaattttgatttgatacagttaatctttttttttacttttatggcttatgcatttggtatcaaatataataacattttgctacaactaagaagcttgaatttttttacgttctttttttctgaaaacgttttataaaatgtgttgtaattttatattacattgaaattcatgagacattttgagttaatttctgtagtataagatttatgttatggctttatttcttaaatttataaatatccacgtgccctggcaccatttgtttaaaggctgtttttcctccactgatttctgcttgccagatttgtgtcatatcacttggtcatatccacacyagtgtggctctattcctgggccttctcttctgctccatttttatatgaatctatttctatgccaataccaaactgttatgttcattttagctgtgtaataagtcttagaaatgttgatgaatttctcccactatatacttgtatactcataattgtcttagctatcatggtgagtaagtttgctttgtctgcaa

SEQ ID NO: 647131 - DNA, 661 bp, Homo sapiens
tattttgctttggtgtaaagttctgaagttttagaaatttctgtaaaaatctaatttggataattagttacattagttgattgcactcagttttttttcctcaggattttcttttgtaagaaaattcaaaattgtttcaagatacattgagatgtttaattatgtgaaatagacttaaaggtattttctttgaaaataaagtttttataacctgtcttttctactaataatatgtgattacttcttctaacttactagaaattaattcgttttcatcttgccttcatctaaagttcacctgcaatacataagaagtgaataactgctagcagagaaggctgttcttgtctgtaactgacccactaccatcaaccctggttttgagctgcttgcagcaccagctattggctgtgtaaaaaatctcacaatgatgctagactgtttgactgaaacatattacaaagacaaagcaataactagtgaatattttaaattataaagmagtttttgttcattaatcacactttagtttaaaattctattatttcatttgcaaaaattaacttatgggttttttctttttgattaactagtttaccattttgtagccatcaggtatataattaaaaccatgtaagtaagagaacattatttttcaaaa

SEQ ID NO: 647132 - DNA, 323 bp, Homo sapiens
ctgttagggagccttagtagaaatgtccttctctgaatcaacaaagccattaatattttttccttcatggttctcstttggaacaatgagaaatatcaatcctcaatgaaacactgaccacatgcagttaagtctgcctcagcattaatattctcatggggcagctcaaagtggttaactgtaaaaaagccattaataagatgcattagtcaggaaattcccatgcaataatcagcccaatgcaggaacctggtactctgcacgctaaaggcaaacttagagaatgtaactgctttgtatttaaaagagaacatgtattgcca

SEQ ID NO: 647133 - DNA, 323 bp, Homo sapiens
ctgttagggagccttagtagaaatgtccttctctgaatcaacaaagccattaatattttttccttcatggttctcctttggaacaatgagaaatatcaatcctcartgaaacactgaccacatgcagttaagtctgcctcagcattaatattctcatggggcagctcaaagtggttaactgtaaaaaagccattaataagatgcattagtcaggaaattcccatgcaataatcagcccaatgcaggaacctggtactctgcacgctaaaggcaaacttagagaatgtaactgctttgtatttaaaagagaacatgtattgcca

SEQ ID NO: 647134 - DNA, 447 bp, Homo sapiens
ccacaacacacacgtgcacatacacacacacgtacacactcacacacatttttttcctggtaaagtaattccccttgccttgcttaagtgaagagtaggaggcaggaactgaggagtcctgtcctgggacaaaggataggsaaagcttggaacgggtctcacaggcttgaagaaattcctctgtgtaggaacaaggtccaggaaccgggctactgtgatctggaaaaggtgtacactagaagacctctccaagcagccaagctgactgatcaagtcccggcttccttatgcaatgagccttctgtgcctgtctctgcggaccctcccgttgcctaacctccctgggctgagcctgctacactcaccaccagtgcttccccagcgcatggaggccgcccaattatagcttctctggggcccctcaggagtgtgtagagtgatggagag

SEQ ID NO: 647135 - DNA, 658 bp, Homo sapiens
acatctcttcctgtaacctttctgaaaacattaaaattttctaactggatagatttatgaattttaaaaaacraccagtaggacaacacgtcctccattaaccttggacaaaagtggctcatccatttaagaagaaaaatcaacaatattccatggaaatatttatgaaaaatcaaatacagtcactactgaagagctgataaagaaaataaggcatatgaagcaaaaatacctactaatatatatatgtatgtatgtacatataagtaaaatatatgtaaacatgtacctatacaataaaatataaaatgttgaatatatgtatacatgtagtttttacacaaataacatatatacgtacaccagaaatactctacctccttattccttaggcagagaaaaaaatatatatatatatagaaagagagagagagagactgatttactttgtcacagattagctgaagatgaaatgttttgaatgaggctcctacctgctttactgttacatttacgttttgtcctctctctgcaattgactaaagccctagtagaaatgggcacaggaactggaatatatgacagaatgctgaaattgcattgacaattactggatgtaggctgctacatatattatactgacatcaattacaattac

SEQ ID NO: 647136 - DNA, 576 bp, Homo sapiens
  misc_feature 1, 2, 3, 4, 5, 6, 7, 8: n = A,T,C or G
nnnnnnnntggaagcctgtctctccagaggtgatactgtagccgttgactgagagctggtgggaaagaaagccatgagctccgtgtacctgcctgttgtggagctaaaatggggagctgaactggggagaggagtgagtgaggactgaagtgccacagacaatcaccgttctactgtgacttagtaaattttcttaaataaatgtttcttggccaggcacagtggctcacgcctatagtctcagcaytttgggaggctgaggtgggtagatcacttaaagtcaggagttcaagagcagcctggccaacatagtgaaaccctgtctctactaaaaatacaaaaattagccgagcatggtggaccacacctgtggtcccagctacttgggaggctgaggcaggagaatcacttgaccccgggaggcagaggttgcagttagccaagatggcaccactgcactccagcctgggcaacagagccagactctctatgtctcaaaaaaaaaaaaaaaaaaaaaagtttatcatatgtctttgaccaacttccaaatactttatatgtttgctgtttttataa

SEQ ID NO: 647137 - DNA, 578 bp, Homo sapiens
gaagtctatataaaaaaatgatctttggctgggcatggtggctcatgcctgtaatcccagcactttgggaggtcgaggcaggmggatcacgaggttaggagtttgagaccagcctgaccaacatgaagaaaccctgtctctactaaaaatacaaaattagccaggcatggaggcaggcgcctgtaatcccaactactcgggaggctgaggcaggagaatcgcttgaacccgggaggcggaggttgcggtgagttgagattgtgccattgcactccagcctgggtgacaaagcgagtctcaaaaaaaaaaaaacatcttttactttcccccatccctcattttagtcaaacttctcccacctcatttctgccctggttggggaagtgcaagagtttcagataaggtacctatgtgttttagatgggattcttgattttaagtgagtataaagtaaaagatttaattcttagttcaggtatgttccagtgcctcgaaagttagttatgtgacaaatagtacctgttgacaacctagaaaagatgagacattctaaggtgccctaacaatcttcagtctct

SEQ ID NO: 647138 - DNA, 578 bp, Homo sapiens
gaagtctatataaaaaaatgatctttggctgggcatggtggctcatgcctgtaatcccagcactttgggaggtcgaggcaggcggatcacgaggttaggagtttgagaccagcctgaccaacatgaagaaaccctgyctctactaaaaatacaaaattagccaggcatggaggcaggcgcctgtaatcccaactactcgggaggctgaggcaggagaatcgcttgaacccgggaggcggaggttgcggtgagttgagattgtgccattgcactccagcctgggtgacaaagcgagtctcaaaaaaaaaaaaacatcttttactttcccccatccctcattttagtcaaacttctcccacctcatttctgccctggttggggaagtgcaagagtttcagataaggtacctatgtgttttagatgggattcttgattttaagtgagtataaagtaaaagatttaattcttagttcaggtatgttccagtgcctcgaaagttagttatgtgacaaatagtacctgttgacaacctagaaaagatgagacattctaaggtgccctaacaatcttcagtctct

SEQ ID NO: 647139 - DNA, 414 bp, Homo sapiens
cctccagattcattttcacagtctttcatgttttggtcatatgacattgtattttgctgccatatgactgatctttttttgttaaatgtgagatacttgttaaaaaatgtttagcaatgaattgaggcctagtagcatgttatcttgctgcagaagagatgggagtctacttctgggggatggtcaggggtcctccatacaggctgcaattgaggtcgtcggtgcaggctcagtccctacaaaggccagggtatttcctgtccacctttattctgatgcatgactcttctgggtctcaaccagagccagtggacttcagtatgggtcgctttcattggcagaccctcaatccacttgttttccatctaaycccacgcatgtgtgcaaaagctgctgtgtttctttgcatctcag

SEQ ID NO: 647140 - DNA, 422 bp, Homo sapiens
tgaattcaatgcttgggtcacctccagattcattttcacagtctttcatgttttggtcatatgacattgtattttgctgccatatgactgatctttttttgttaaatgtgagatacttgttaaaaaatgtttagcaatgaattgaggcctagtagcatgttatcttgctgcagaagagatgggagtctacttctgggggatggtcaggggtcctccatacaggctgcaattgaggtcgtcggtgcaggctcagtccctacaaaggccagggtatttcctgtccacctttattctgatgcatgactcttctgggtctcaaccagagccagtggacttcagtatgggtcgctttcattggcagaccctcaatccacttgttttccatctaatcccacrcatgtgtgcaaaagctgctgtgtttc

SEQ ID NO: 647141 - DNA, 552 bp, Homo sapiens
ttgttatttgccaccattttctctcctgagcacttaagataaacccgaaaacctgatggagagattcctaccacttagttctccttatagatgcaacaggaaaatgcytaagttatttgtttctttgctgttccaaatgaaattaaaaatatagatcttgctaagaatgccaatcaagcaggtggctcttagggcattacatgatatggtttggctctgtgtccccacccaaatctcctgctaaattgtgatcccaagtgctggaggtggaggctagtgcaaggtgattggatcatggcggtggtttctaatggtttagcaccatgggggtgttgtcttgtgatagagttctaacgagatctggttgtctgaaagtgtgtagcacctacctttctctgtttcttcctcctgctccaccacgtaaagaaggcgcttgcttccccttcacccttctgccatgattgtaagtttcctgaggcttccccaaccatgcttcctgtacagcctgtggaactgtgagccaactaaaccttttttcttcataaattaccc

SEQ ID NO: 647142 - DNA, 552 bp, Homo sapiens
ttgttatttgccaccattttctctcctgagcacttaagataaacccgaaaacctgatggagagattcctaccacttagttctccttatagatgcaacaggaaaatgcctaagttatttgtttctttgctgttccaaatgaaattaaaaatatagatcttgctaagaatgccaatcaagcaggtggctcttagggcattacatgatatggtttggctctgtgtccccacccaaatctcctgctaaattgtgatcccragtgctggaggtggaggctagtgcaaggtgattggatcatggcggtggtttctaatggtttagcaccatgggggtgttgtcttgtgatagagttctaacgagatctggttgtctgaaagtgtgtagcacctacctttctctgtttcttcctcctgctccaccacgtaaagaaggcgcttgcttccccttcacccttctgccatgattgtaagtttcctgaggcttccccaaccatgcttcctgtacagcctgtggaactgtgagccaactaaaccttttttcttcataaattaccc

SEQ ID NO: 647143 - DNA, 540 bp, Homo sapiens
cactttttttcctactgtctgaaaacaagctagctgggatgcaaagcttatttttactgaagcatggggcagaaactagactcaaaatcccccaaaactggggaccctatctttcccattcagggtacttagtgtttcccagacacttctccaaataattggcacctatgctcttggtaccaaatagtctgtttttttccccactggcaaagtcactacctcagtaaccccatataaaaactcargcaaaaaagggaaaagctccacactagccacaccacccactgaagtacaaacccacagtattttctgccattccccagcatgcttccacagaaaatgccagcaggtcaaagaaaagttacctatagacctttctgtaggtctccagcctgtcctcagtgacactgttatcatccatgacagtatcataacagctgtaatccccaaactgggaatattctttaataccaatgtctaggtaaatattgctggatatagcgaacatcatcaagaatgtatatccatacaggcggtcaa

SEQ ID NO: 647144 - DNA, 540 bp, Homo sapiens
cactttttttcctactgtctgaaaacaagctagctgggatgcaaagcttatttttactgaagcatggggcagaaactagactcaaaatcccccaaaactggggaccctatctttcccattcagggtacttagtgtttcccagacacttctccaaataattggcacctatgctcttggtaccaaatagtctgtttttttccccactggcaaagtcactacctcagtaaccccatataaaaactcaggcaaaaaagggaaaagctccacactagccacaccacccactgaagtacaaacccacagtattttctgccattccccagcatgcttccacagaaaatgccagcaggtcaaagaaaagttacctatagacctttctgtargtctccagcctgtcctcagtgacactgttatcatccatgacagtatcataacagctgtaatccccaaactgggaatattctttaataccaatgtctaggtaaatattgctggatatagcgaacatcatcaagaatgtatatccatacaggcggtcaa

SEQ ID NO: 647145 - DNA, 540 bp, Homo sapiens
cactttttttcctactgtctgaaaacaagctagctgggatgcaaagcttatttttactgaagcatggggcagaaactagactcaaaatcccccaaaactggggaccctatctttcccattcagggtacttagtgtttcccagacacttctccaaataattggcacctatgctcttggtaccaaatagtctgtttttttccccactggcaaagtcactacctcagtaaccccatataaaaactcaggcaaaaaagggaaaagctccacactagccacaccacccactgaagtacaaacccacagtattttctgccattccccagcatgcttccacagaaaatgccagcaggtcaaagaaaagttacctatagacctttctgtaggtctccagcctgtcctcagtgacactgttatcatccatgacagtatcataacagctgtaatccccaaactgggaatattctttaataccaatgtctargtaaatattgctggatatagcgaacatcatcaagaatgtatatccatacaggcggtcaa

SEQ ID NO: 647146 - DNA, 529 bp, Homo sapiens
tgggagcaggacttcaacattatgagttttgggaaagcacagttcaatctctaagagccatcttttctctgtgttcacatggtttttccactgtgtgtgtgtgtgtgtgtgtgtgtgtgtcctagtctcttcttataaggataccagacatattcaattaagacctgaccccagcgacctcatctaaccttaattatctgtttaaagatcatctcttccraaaacaataacattctgaagtactagggtgttttcttcaatatgtgaatttcagaggtacacaattcaacccataacaataacttaaacagtttagtcatgtgagatctgttccaagtgagtttaagacaaataaaggtcttcctttttattctagtaagacaatcatgctttcaaagtattctgtggatgacaattagtacaatatggaacagatctcctgcagtcattgaactattttaggtaatttggcaaccaacagagaatgctgcaacaggatcgtagcagctcaagagaaagcaaagtaatg

SEQ ID NO: 647147 - DNA, 529 bp, Homo sapiens
tgggagcaggacttcaacattatgagttttgggaaagcacagttcaatctctaagagccatcttttctctgtgttcacatggtttttccactgtgtgtgtgtgtgtgtgtgtgtgtgtgtcctagtctcttcttataaggataccagacatattcaattaagacctgaccccagcgacctcatctaaccttaattatctgtttaaagatcatctcttccgaaaacaataacattctgaagtactagggtgttttcttcaatatgtgaatttcagaggtacacaattcaacccataacaataacttaaacagtttagtcatgtgagatctgttccaagygagtttaagacaaataaaggtcttcctttttattctagtaagacaatcatgctttcaaagtattctgtggatgacaattagtacaatatggaacagatctcctgcagtcattgaactattttaggtaatttggcaaccaacagagaatgctgcaacaggatcgtagcagctcaagagaaagcaaagtaatg

SEQ ID NO: 647148 - DNA, 529 bp, Homo sapiens
atttgggaaggttttcttcagggcatttaaaatgaaccatatacaatacatggacttatagagggaagggaggagtagaaaaaaatgggggcatcaggaatgaaaaaaatatcagcaaaaattcggcaatgtcaacttgcaggggagagtagctgtgtggtgagatatagagaacaggctgcaaataggggyaaatcatgttcatgtggaagtcaatctccagtgttagaaaagatggttaaatcttttaaagcatggacaaaatttccctgtatctttacaaacctggttgcataactgaagcaaagatcaacttgagctctaccataattttaaaaaactatcacacttcctgtttgagcaggtctgacttaatatttgtctatagcacatagacgcacacacatacagccgtgagcagctgatgtctgaacaatcatatcttggccattcattctctccacccaatttctcccatatggcaaattgcccagagatcattattagttccacgaatagccaatcagca

SEQ ID NO: 647149 - DNA, 592 bp, Homo sapiens
aaaataaaatatttagattatgtgaacttaacctcatagttacacttcttaaaatttatctcaggaaaatagttggataaatgagcaaagaagtatgtatagtcatcccttggtctcaaaggggyattggttccaggaatcctatagataccaaaatcagcaaatgctgaaatcccttgtataaaatagcatagtatttgcctatagcctacacacataatcccacatactttaaatcatctctagattgctcatgcctactctaatgtaactgctatggaaatagttctactgtattttaaaatttgtatttttattgttatatttttgttactttttaaaaaatatttttgatccatggtttgttgaattcatgggtacagaatccatggatatgtagggccaaatgtatagatatgtttatcacagcacttacacagttaactattagaacttatagagaattgtttaactaattgtagatttatacagaggatatgtataaaactacaaattattatatttatcaatttaaaaagataaccaccacattctctgtgtctatatatgcacacacaaacacatactacat

SEQ ID NO: 647150 - DNA, 592 bp, Homo sapiens
aaaataaaatatttagattatgtgaacttaacctcatagttacacttcttaaaatttatctcaggaaaatagttggataaatgagcaaagaagtatgtatagtcatcccttggtctcaaaggggtattggttccaggaatcctatagataccaaaatcagcaaatgctgaaatcccttgtataaaatagcatagtatttgcctatagcctacacacataatcccacatactttaaatcatctctagattgctcatgcctactctaatgtaactgctatggaaatagttctactgtattttaaaatttgtatttttattgttatatttttgttactttttaaaaaatatttttgatccatggtttgttgaattcatgggtacagaatccatggatatgkagggccaaatgtatagatatgtttatcacagcacttacacagttaactattagaacttatagagaattgtttaactaattgtagatttatacagaggatatgtataaaactacaaattattatatttatcaatttaaaaagataaccaccacattctctgtgtctatatatgcacacacaaacacatactacat

SEQ ID NO: 647151 - DNA, 541 bp, Homo sapiens
actaaaaatacaaaaattatctgggcatggtggcaggtgctgtaatcccagctacttgggtggttgaggcaggagaattgattgaacccaggaggcacagtttgcagtgagctgagatcacatcattgccctccagcctgggcgacaagagcaaaactccatctcaaaaaaaaagaatctagtcctctggaatacggtgggaacataaatatgatggatttcatttcatcccatgattaagttaggggattgtgcaaatatagttaagccccaaaacaattcactttgagttaatcaaaagagagattgtcctgggtgggcctaactcaatcagatgagcccttaacaaggacttcctgaagtcagagactggattcatagcttgagagagacatggtcctcctgggcttgaagaagtagtaaatttgctrtggtgtgggagggcccatgaacaagaggcctctaggagctgagattgacctccagctgacaagcagcaagaaaacagaccctatgccctctaaccactaggaagtgaatt

SEQ ID NO: 647152 - DNA, 541 bp, Homo sapiens
actaaaaatacaaaaattatctgggcatggtggcaggtgctgtaatcccagctacttgggtggttgaggcaggagaattgattgaacccaggaggcacagtttgcagtgagctgagatcacatcattgccctccagcctgggcgacaagagcaaaactccatctcaaaaaaaaagaatctagtcctctggaatacggtgggaacataaatatgatggatttcatttcatcccatgattaagttaggggattgtgcaaatatagttaagccccaaaacaattcactttgagttaatcaaaagagagattgtcctgggtgggcctaactcaatcagatgagcccttaacaaggacttcctgaagtcagagactggattcatagcttgagagagacatggtcctcctgggcttgaagaagtagtaaatttgctgtggtgtgggagggccyatgaacaagaggcctctaggagctgagattgacctccagctgacaagcagcaagaaaacagaccctatgccctctaaccactaggaagtgaatt

SEQ ID NO: 647153 - DNA, 581 bp, Homo sapiens
gttagacacaggggctctaggaatttagaaagtcttctcccaaggcaattgtctgcttgacaagacttaaatctggcttcagaatcctgttttctgtgtccaaagctcattactacttgtttcctactctgtcctttcattttctaacaatcctatctcccccaggcaaccaaatgcctcaggccaattatcaagaaggtcaggtactcgagaagacaaagggaaaagcaaagtcagtgtggaaacaccttcctatcagacagttgtagcctcactttgcttccctgtggtccctaaacaaaaggctagtttgtcattaactacacatgaaaaagattctggctgggcgctgtggttcatgcctgtaatcccagcactttgggaggcttaggtgggctgatcactaggtcaggagtttgagaccaccctggccaacatggtgaaaccccgtctctactaaaaacacaaaaaattggccaggygtggtgggagacacctgtaatcccagctactcaggaggctgaggcaggagaatcacatgaacccaggaggtggaggttgcagagagccaagatcatgcc

SEQ ID NO: 647154 - DNA, 602 bp, Homo sapiens
tgttgtgttagatgttcactgtcctgtacaagtagataatattatttgcccttgattaatttttcttatctatgaggmtctttctatttaaccttgagtttatgctattttcttttaaaaatttgattttattccatatttacgttatgcgatcccccaataaaacactgtgcgttggcattgttaggaaagatgagctgagtaaattcttatgaaaaccacataattttaggtttctactcgctcagcaaaatcagaagtaacacaaagctgggcttcaaaacaatttagcattgagcacaagtcctcagaaggggataaaatagaaggctattcacctctctttaatcacagcatggtgctaatcagctattcattataaatgtaccattagaggagatgccgctaacaccactctacttaatggtcaattggtttttccattagaaacccattttcagggtttaatatatcaacattccaccttgcaatagatctgaaattatgcacaaaacaccgaagcctacaaataacacttggaaaaaaatgagttgcttttagtatccagtaaagtctgctatttaacaaaatacacaggccca

SEQ ID NO: 647155 - DNA, 602 bp, Homo sapiens
tgttgtgttagatgttcactgtcctgtacaagtagataatattatttgcccttgattaatttttcttatctatgaggctctttctatttaaccttgagtttatgctattttcttttaaaaatttgattttattccatatttacgttatgcgatcccccaataaaacactgtgcgttggcattgttaggaaagatgagctgagtaaattcttatgaaaaccacataattttaggtttctactcgctcagcaaaatcagaagtaacacaaagctgggcttcaaaacaatttagcattgagcacaagtcctcagaaggggataaaatagaaggcyattcacctctctttaatcacagcatggtgctaatcagctattcattataaatgtaccattagaggagatgccgctaacaccactctacttaatggtcaattggtttttccattagaaacccattttcagggtttaatatatcaacattccaccttgcaatagatctgaaattatgcacaaaacaccgaagcctacaaataacacttggaaaaaaatgagttgcttttagtatccagtaaagtctgctatttaacaaaatacacaggccca

SEQ ID NO: 647156 - DNA, 507 bp, Homo sapiens
tgggtggattgcctgagctcacaagttaaagactagactgggcaacatggcaaaaccccatctctacaaaaaatataaaaattagctgggtatggtggcaggtgactgcagtcccagctatttgggaagctgaggtgggaagatggcttgagcctgggaggtggaggttgcagtgtagccaagatcacccccctgcactccagcctgggtgacagaaccagaccttgtctcaccaaaaaaaaaaaaaaaaaaaaaaaaaaaattgcagttgctaaaaaacaaaaamctcaatggaaaggttaaaggttaaataataaactaaacttaattggaaaagtaaatgtatgacagatccaaggaaatcaccaatgagatttaaaaaataaaaaaatttgaaaaatttggttaaaaaacatagagatataaggaaaatccaacccacatttaataaaatctccaagggaatggaaaatgaaagggaaacaatatttaaagagataacagctg

SEQ ID NO: 647157 - DNA, 517 bp, Homo sapiens
agctaaatccaaagtaaaagctacccattattgggtagctggcaagatgggcaaataggaacagctgcagtctgcagctcccagtgagatccacgcagaaggcgggtgattcctgcatttccaactgaggtacacagttcatctcattggaactggttggacattgggtgcagcccaaggagggtgagccaaaggagggtggggtgtcacctcacccaggragcacaaggggttgggggatttcccattcctagccaagggaagctgtgagagactgtacggggaggaacagtacattccggcccagatactgcatttttcccatggtcttcacaaacaaaagaccaggagattctctccagtgcctggctcatcaggtcccactcccacagagcccagcaagctaagatccactggcttgaaattcttgctgctagcacagtagtctgaggttaacctgggatgctagaggttgatgggaagaggggcaatcaccattgctgaggcttgagtaggc

SEQ ID NO: 647158 - DNA, 517 bp, Homo sapiens
agctaaatccaaagtaaaagctacccattattgggtagctggcaagatgggcaaataggaacagctgcagtctgcagctcccagtgagatccacgcagaaggcgggtgattcctgcatttccaactgaggtacacagttcatctcattggaactggttggacattgggtgcagcccaaggagggtgagccaaaggagggtggggtgtcacctcacccagggagcacaaggggttgggggatttcccattcctagccaagggaagctgtgagagactgtacggggaggaacagtacattccggcccagatactgcatttttcccatggtcttcacaaacaaaagaccaggagattctctccagtgcctggctcatcaggtcccacycccacagagcccagcaagctaagatccactggcttgaaattcttgctgctagcacagtagtctgaggttaacctgggatgctagaggttgatgggaagaggggcaatcaccattgctgaggcttgagtaggc

SEQ ID NO: 647159 - DNA, 581 bp, Homo sapiens
aatagtcatacacaaaatgtgaatctgttttcaagtgcagctgtattcctagaagcatgcattaaaatagacgagatatttttctgttataattttgaatttcctgggacatctcccattaggtgtttgccagacacctaataacaaaatttagcttgctcaatcagcacacctactttacaagatgataagcattgttctaaaaagaacattagtgattactgtaataatgataataataataataatataaatggggctatccttaaattaggcaaaactgagtaatgaacacaaattactgaaatacggtttgaaaagaatgcattaaatttttctcaccaacaaggattaattgactaaatggaagattacctgtatagaatgcttcagaaaagctaccagatttgaacctctctaaattaatttcttaaatcagacaaatctcttattcttcttatatcatgcaagatatactctggaactagtttaactgccattaatatccagtaagaacaaagcacacctctttgtagttttatacagcaatrttacaatttcccactggatttcaatgtaaa

SEQ ID NO: 647160 - DNA, 645 bp, Homo sapiens
tttatggttttaggtctaacctttaagtctttttttaatttattttttttaaccacacaaaaaaatgtagggtaaaagatactacatattatcaattgaagtctataagaaaaaaacctacacagaaaattactgtcatcaggttaacttcatattgtgtcatttcccattgcaggaaacactgtttctaactaaggcattttcagaggatgaaaataataggcaaaacaagagaatataccgcaaattatagggcaggggtgataaaagcttttctacagcaatgtataagcatcataattcttcagattatatgtgccatttttcccaaaaaaatttaaataagtttactaaaatatgattagctaaaatgtttaaygaaagaaaagtataaggttgtatatgatgaaatcatttattgttcccttattgaagcttctgtctactaaatatcaattaagcatttcactcccaaattacagactcttagaccatcacagaacaaatatttagatgattttttgagcacttgtattacagattgagtatcccttattcaaaatgcttgggaccagaagtgtttcagagttctgattttctccaattttgtaatctttacaaatacataatgagatattttgggga

SEQ ID NO: 647161 - DNA, 574 bp, Homo sapiens
gcttaaggtataacaattggtatggactgggaaaataaagtgagggtgaaagtccctggaggtgaggacaacaaagacctttacatcttttgcccagaagtcaccagagaaaattcctcctggtgataacctgagccaaagtcctcaataaaggagggagagtttccgggaaagtgatggatgacagagaagagaaaagaaaaatgacatgaacctaaaacagaattcagcaagaagctgggagactttcattaaggcaatttgctacaatgggcgttttttgaaatggccaagaatactcttgcttttscctcccatcctcccccattccctgatttcaattactaagtggagtttgggctccattgggctgctctttctgtagactccaacaggtcaagttctatcattgcacctctacctgagctgctccccaaatcctataaccctgcttctgcttttgggcctacactcatccctcagggtaaactggaagtacttttgtcttcatgacttccttgcagttctgaccccaaaagtgtgctccatatatgaactcctaacatagcttggc

SEQ ID NO: 647162 - DNA, 582 bp, Homo sapiens
caggtagtggtaagccaagcattcyggaccttgggccaccaggtggcatatgcaagcacagttttagtgagtgcaggtgggcaaattcttgagactccaggcagtcttcctgtatgctggcagtgggagtggtaagccagatcggtgggtgagtccttaggcccttaagccgaatatatggcctggattatggtagtagtgatggcaggataattttggggctctcatgtggcactcactaatgttagctgttggtatgatgggctgagcaagctggtccccaggttccttggttgtgcatgtgcatggatgtagttgatggtattgatgacaggctatatgggctcaccttcaggattccagaagtagggtacagatgctagaggtggtagaaggggttgggtaatccccaggtccctgggaggggtgctcatgctttgggtgggggaagcaatggtgacaggtctggtgggcctgatctcagggcatcagggtgtgcagagctccaggaggtagtaggcagggcaggcaatctgtggtgttggttgtggagagcctgacctctgggctggtgctagagtg

SEQ ID NO: 647163 - DNA, 582 bp, Homo sapiens
caggtagtggtaagccaagcattccggaccttgggccaccaggtggcatatgcaagcacagttttagtgagtgcaggtgggcaaattcttgagactccaggcagtcttcctgtatgctggcagtgggagtggtaagccagatcsgtgggtgagtccttaggcccttaagccgaatatatggcctggattatggtagtagtgatggcaggataattttggggctctcatgtggcactcactaatgttagctgttggtatgatgggctgagcaagctggtccccaggttccttggttgtgcatgtgcatggatgtagttgatggtattgatgacaggctatatgggctcaccttcaggattccagaagtagggtacagatgctagaggtggtagaaggggttgggtaatccccaggtccctgggaggggtgctcatgctttgggtgggggaagcaatggtgacaggtctggtgggcctgatctcagggcatcagggtgtgcagagctccaggaggtagtaggcagggcaggcaatctgtggtgttggttgtggagagcctgacctctgggctggtgctagagtg

SEQ ID NO: 647164 - DNA, 582 bp, Homo sapiens
caggtagtggtaagccaagcattccggaccttgggccaccaggtggcatatgcaagcacagttttagtgagtgcaggtgggcaaattcttgagactccaggcagtcttcctgtatgctggcagtgggagtggtaagccagatcggtgggtgagtccttaggcccttaagccgaatrtatggcctggattatggtagtagtgatggcaggataattttggggctctcatgtggcactcactaatgttagctgttggtatgatgggctgagcaagctggtccccaggttccttggttgtgcatgtgcatggatgtagttgatggtattgatgacaggctatatgggctcaccttcaggattccagaagtagggtacagatgctagaggtggtagaaggggttgggtaatccccaggtccctgggaggggtgctcatgctttgggtgggggaagcaatggtgacaggtctggtgggcctgatctcagggcatcagggtgtgcagagctccaggaggtagtaggcagggcaggcaatctgtggtgttggttgtggagagcctgacctctgggctggtgctagagtg

SEQ ID NO: 647165 - DNA, 582 bp, Homo sapiens
caggtagtggtaagccaagcattccggaccttgggccaccaggtggcatatgcaagcacagttttagtgagtgcaggtgggcaaattcttgagactccaggcagtcttcctgtatgctggcagtgggagtggtaagccagatcggtgggtgagtccttaggcccttaagccgaatatatggcctggattatggtagtagtgatggcaggataattttggggctctcatgtggcactcactaatgttagctgttggtatgatgggctgagcaagctggtccccaggttccttggttgtgcatgtgcatggatgtagttgatggtattgatgacaggctatatgggctcaccttcaggattccagaagtagggtacagatgctagaggtggtagaaggggttgggtaatccccaggtccctgggaggggtgctcatgctttgggtgggggaagcaatggtgacaggtctggtgggcctgatctcagggcatcagggtgtgcagagctccaggaggtagtaggcagggcaggcartctgtggtgttggttgtggagagcctgacctctgggctggtgctagagtg

SEQ ID NO: 647166 - DNA, 212 bp, Homo sapiens
ttttaaacgtttttattttgaactttggggagaatgaaagaaaatatcatgcaattaaattatatctaaaaatgtttgatatgaacatgagattgtgtatgaaagcataaytgatgaaagacctaactttgttagacacatagataagacattgaccatcactcttgtaacattaaatggaatatgaatatttataaaaggccaagtttaaa

SEQ ID NO: 647167 - DNA, 556 bp, Homo sapiens
attattccacaaaataagttcaagttaggtcagattttgcccttccaaagtgagttaaggtaacagttttcagagctttagggtatcaaaactgcacgaaggcttgaggcactatccaagagcaccacggtgattaacagtgccatctagtggcaaagaagtgaatctgtgcacccgtacatatttgtcaatgactataatgctagtaacacttatatttaacaaaataattaatcaagtattttctctctggggatataaaaatagataagaaattttcccctacagagaggaatttttagtctacgaataaagacattgtgtacacatactgtcagtacaacataattagtgtaatggaagatggtaatacrggagaggctcttacttggatcaactggggaaacgttttctgaaagaggaagcagctgagtgaagacttgaaagtagatggaaaggggtaagactgcttctacaagaaatgcagagaagaaggcaaaaacagaaatccaaactgatagaggtattgacataagataaaactaaacaggacaag

SEQ ID NO: 647168 - DNA, 556 bp, Homo sapiens
attattccacaaaataagttcaagttaggtcagattttgcccttccaaagtgagttaaggtaacagttttcagagctttagggtatcaaaactgcacgaaggcttgaggcactatccaagagcaccacggtgattaacagtgccatctagtggcaaagaagtgaatctgtgcacccgtacatatttgtcaatgactataatgctagtaacacttatatttaacaaaataattaatcaagtattttctctctggggatataaaaatagataagaaattttcccctacagagaggaatttttagtctacgaataaagacattgtgtacacatactgtcagtacaacataattagtgtaatggaagatggtaatacgggagaggctcttacttggatcaactggggaaasgttttctgaaagaggaagcagctgagtgaagacttgaaagtagatggaaaggggtaagactgcttctacaagaaatgcagagaagaaggcaaaaacagaaatccaaactgatagaggtattgacataagataaaactaaacaggacaag

SEQ ID NO: 647169 - DNA, 581 bp, Homo sapiens
tgaagaactttttcttcccaacccctctcaacctttttcccatccagtttattagttctttgcttctagcaaatatctgctgaatagcatgccactctttattctccacaagtaagacagataaaaaaaagacctgattttgaaactctcagagtctgtataaatccccatcattattacgtgagtgcatgtgggtatgtgtgtgtgtgtttgtgtgwgtgtgtgtgtgtgtgtgtgtgtgtgtgtgtgtgtgttcagtgagggaaaatgtattctaacaactatgcttctatgttatgtaccagtactaattctcctttgagctcatattttatactgaagtttattcttaaggcagtctagcaacaaagcagatgtgtatctgtgggtatcttcaattaatcattttatttactatacacaatctttcttttccatctgaccatttaaagacaagtttaggcttaaaatcacttaagggaggattttaaatatacaattgactcttgaacaatgtggaagttggggcacagccgcccctatgcagtcaaaaatttctgtataagctttgactacccaaa

SEQ ID NO: 647170 - DNA, 585 bp, Homo sapiens
gccaaataatattatattgtatggatgtaccacattttgcttttgcattcactagtttatggatacttgtattgttttatgatttggctattatgaataatgctgctatgaacatttgtgtagacactttttgtggatgtatattttcatttctcttgggcatgtacctggcagcggaattactgagtaataagttagctccattctttctattttgatggactatggtatggtttggctgtgtcacaacccagatgtcaccttgaattgtagctcccaaaattcccacatgttgtgggagggacccagtgggaaatatttgaattatggggtggcttttcctatactgttctcatggtagtgaataagtctcacaagacctgttgattttataaaggatttcgcctttaactattctctcattctctctcttgtctgctaccatgtaagacatgcctttcaccttctgccrtgattgtgagggctccccagtcaggtggaacttcaagtccattaaatgtctttttctttataaattacccagtctctggtaggtctttatcagcagcgtgaaaactgactaat

SEQ ID NO: 647171 - DNA, 562 bp, Homo sapiens
atatctttggaaatgagtggagtctacaagcttaaaggcaaaagaaactatatataaacacaatactataattaataaaggtttttccattgtggtgggtayaggttagcaatttggaagctgctacacaagtataccagaattgaacaaataagcaaatgtagggatccaggtttctaacttttgttcaatattgttcaaaatagaattaccatatgatccgccagttatacttctaggtgtatacccaaaaaatttaaagcaaggatttgtacaaatatttatatacccatgttcataacaacattatccacaataatcaaaatgtgaaagcaatgcatgtttattaacagataaatggacaaacaaaatgtgggatatatgtacactggactattattcaaccttaaaaataagggaattctgacacatgttacaagatgagctttgattgccttatgccaagtgaaattagtcggtcacaaaaagacaaatactgcatgattttatttaaatatggtacatagagcagtcaaattcatagagacagaaagtagagtga

SEQ ID NO: 647172 - DNA, 562 bp, Homo sapiens
atatctttggaaatgagtggagtctacaagcttaaaggcaaaagaaactatatataaacacaatactataattaataaaggtttttccattgtggtgggtacaggttagcaatttggaagctgctacacaagtataccagaattgaacaaataagcaaatgtagggatccaggtttctaacttttgttcaatattgttcaaaatagaattaccatatgatccgccagttatacttctaggtgtatacccaaaaaatttaaagcaaggatttgtacaaatatttatatacccatgttcataacaacattatccacaataatcaaaatgtgaaagcaatgcatgtttattaacagataaatggacaaacaaaatgtgggatatatgtacactggactattattcaaccttaaaaataagggaattctgacacatgttacaagatgagctttgattgccttatgccaagtgaaattagtcggtcacaaaaagamaaatactgcatgattttatttaaatatggtacatagagcagtcaaattcatagagacagaaagtagagtga

SEQ ID NO: 647173 - DNA, 484 bp, Homo sapiens
tgcattaatgaacagctcgttagtttcatgctgtagctccatgggaaattaaggagtctgggtaccatttctagccagtcatggcagtactatacagcaagaagattaaaatgatcrcatccaagttcatttggtgagtgtggctgtcttacatcttagaatcccttggaggtggtgaaccccaaggaagaattgtgtctagcctagcactggagcataataatggaggatcttgtggctaaagcaagttgatgtccctgcacttcagttaagtcagagtgttcctgtccacaactgtcttcagggagaaatcaagaaagctggggatgccaggccatttccaaatagaaactgtgcccctcttccacaggacaagtacacgagccaaactaccaccttttttaaagaagtgggaaaagggtaagtaaaggtgtaaataatactgaacatactcgttacctgcagaggatgcctcactcaacca

SEQ ID NO: 647174 - DNA, 553 bp, Homo sapiens
attacctacattgtacttacctatagagggacaaagataagaactacaaccaacttctcagaaaccaggcatactggaagagagtggagctaaataaactgctgattttcatcccctaccaacctagaattctgtaccctgtgaattgtctttcaaagttgaatgagtaatgaagtctttcgcagacaaaaactgaggaggcagatctgccttgcaagaaatgttaaaataattccttgggatggaaggaaaataatatagstcagaaactcagatgtatgtaaagaaaggaagatcattgaagtaggaataagtgaaggcaaaataaaaaagtttttttcccttattttaattgatctaacagataaccatttgtttaaagtaataatactgacaatatgttcaattatgtatacttatgtatataccatatatatgtttacgtatactatgtataagtggtgatagaaggaatggcagaggaaattagaaatattttgtgtttataaggtgctcacacttcctgtgaagtgatatagtgttatttgaaagt

SEQ ID NO: 647175 - DNA, 312 bp, Homo sapiens
caacttttaaagaatgacatttagtacatagtagatattatcgatcttcgttttaaaaataagatcccttcttttaaaaatttggatttctttaaaaagaaaataaatccattcctcagatgggaagaaaaaagtaaaaatttgacttttcttaaagcttttaaataccacttgaagttctactccttttaggcgtaccagaaaacaaggtatcaatgayatgtaagactatacaaagtgggtaaggaagattcaagttgaatggtatgtctgccctggcatccccattatattcagcaacagcagaacaag

SEQ ID NO: 647176 - DNA, 398 bp, Homo sapiens
gggacacagacccaaaccatcctgatccaatcacctcctaccaggccacacctccaacacagggrattacaattgaaggcaagatttaggtagggacacagaaccaaaccatatcagcaggcttgaagcaaaaatcaaaaggaaagccaagctctggaaaatatttttcactttgataaggatggcaaagaaatatttttgtcaatattctcaaaacaacagtgttccaaattggaaaagaaggagataactcttactatcagagtgaaaaatattttccagaagtctccaaaggctctctctcaggccataattggattcatcacacagtgccctaaatcaacccttggcaaaagaacatgggattgccatgattggcttagaccaatcatggttct

SEQ ID NO: 647177 - DNA, 597 bp, Homo sapiens
acaagtcagacactgattccttgctttgttcatttgggaaggtcatgatttcctgtttcctgttatttcctgtggatgtatgtttgtctttgcattaaattattcattatttattacmgtcttctccatctagcttgttttgattttttgttgggtatatttgcacagagattttccatagcttacctgttcaatttcttatttttttcttgatcttgcctcctttttgacactagataatgcctcaagcctaggtttgcctcagctgcagcaactaatcagagaactgacaatcctgaatgggggagtcccaaaggtgatatcctggtagtgtggaaaggctggctaggggtttatgcccagaggacctgtgaaatgtacctcctacgctgtggtgctgctgaacagcccctctgatgttgtatctcctttggccaagttacagagcagtttccagggctgggtatgaaagtcccacctactctttttttctctggctgtcttcagagatatttcttccttcaggcagttacgttgcttcccatgaattcaggcagagatggatctgctgctagggaactcaagatggtagggaag

SEQ ID NO: 647178 - DNA, 581 bp, Homo sapiens
ttattttgaagtcttgtagtcagaaaaattagaatttaattaaacagtagcaaataataactgaaaaacatcaggcaactctagaatttaacaagaggkgtgtcatagttttggaaacataatttcctctctccactttcccatttttattaaaagacaaattatggtaggtttgctttaggatacttggcttacttgtttgcatacagtgctgcaagaataattatttgttacataggccttttaaatgggctttggtggaatttggttttgtagaagcaatctgagataaaagactttttaaagccaagcccagccatggatttgtaccattaaatacctatgagttgggtgaattcctctcctcttgatgtttcaagataacttagggttcctggcctgttagaaagtgacatgttctgtttaccacagatcacaaaccctgtacggggactgtgtacacaaaatatgaggccagtttttcaagggctttattggctttataagttaaagctggattccttaaaggaaaagcacaccattccagttaaagccttggtaagaataaccagtttttccaa

SEQ ID NO: 647179 - DNA, 603 bp, Homo sapiens
ttaggtgtgatgtggtgagatcatttttaggagagtgtgtctattatcggcttcctaacacttccattttgcatgataatttcctgaaattcatcatttaattaaggctatagattttgattaccatgtgtcttaaaatgtcaaacagtataatatttatactgaaaaagaaaactgcttggtggatacacatcggttagcgggaaaagacaccacagggattcaccatggagtcacccgtggatggggttttagtttctgtctttgaattgaccttcacatagtgtctacctcttgagagttcaggggatgttggagagatcattaggtaaaacaagaaggtcttctcaggatacatgagggagttaaataraaatgcaggagcaattacagttttagttatttgtaactgttgtttgctaagtcataacactgtcatggataacatgaaaaaataaaatatactaaatatcaatagacaaaaaccagtttgcttttctccaaccaaatacctaaatacctagcactgatttccagaacaaaatcccccacgtaccatctttggaataaaagaatattctttcaagttgtcggaccacaagg

SEQ ID NO: 647180 - DNA, 603 bp, Homo sapiens
ttaggtgtgatgtggtgagatcatttttaggagagtgtgtctattatcggcttcctaacacttccattttgcatgataatttcctgaaattcatcatttaattaaggctatagattttgattaccatgtgtcttaaaatgtcaaacagtataatatttatactgaaaaagaaaactgcttggtggatacacatcggttagcgggaaaagacaccacagggattcaccatggagtcacccgtggatggggttttagtttctgtctttgaattgaccttcacatagtgtctacctcttgagagttcaggggatgttggagagatcattaggtaaaacaagaaggtcttctcaggatacatgagggagttaaatagaaatgcaggagcaattacarttttagttatttgtaactgttgtttgctaagtcataacactgtcatggataacatgaaaaaataaaatatactaaatatcaatagacaaaaaccagtttgcttttctccaaccaaatacctaaatacctagcactgatttccagaacaaaatcccccacgtaccatctttggaataaaagaatattctttcaagttgtcggaccacaagg

SEQ ID NO: 647181 - DNA, 603 bp, Homo sapiens
ttaggtgtgatgtggtgagatcatttttaggagagtgtgtctattatcggcttcctaacacttccattttgcatgataatttcctgaaattcatcatttaattaaggctatagattttgattaccatgtgtcttaaaatgtcaaacagtataatatttatactgaaaaagaaaactgcttggtggatacacatcggttagcgggaaaagacaccacagggattcaccatggagtcacccgtggatggggttttagtttctgtctttgaattgaccttcacatagtgtctacctcttgagagttcaggggatgttggagagatcattaggtaaaacaagaaggtcttctcaggatacatgagggagttaaatagaaatgcaggagcaattacagtttyagttatttgtaactgttgtttgctaagtcataacactgtcatggataacatgaaaaaataaaatatactaaatatcaatagacaaaaaccagtttgcttttctccaaccaaatacctaaatacctagcactgatttccagaacaaaatcccccacgtaccatctttggaataaaagaatattctttcaagttgtcggaccacaagg

SEQ ID NO: 647182 - DNA, 512 bp, Homo sapiens
gctctgtcttttcaaagtagaagtagtcacaaaatgttttgtgtgaattttgaaatgaaataaaacatcaacctttttatgtagataagatttacattcatattttcctccataatgagaaatgttttatgttatctggattgcaattataagctatataaaaagagggttttttctttcagtaagtgtcttatagcataaatatgataagaatttgacagatttgctgtttttttcaaatttatgctagcaattctcagtaaaaamcatttctatctttccactgttattttacctaatgcataaggaatatagtaaataatatcatatgtgaaatccagctagagcagtagcatacaaattgaataacttgatggtctactgaaacagcctcttgccacccccatattacacacacacacacacacacacacacacacatacacactatctaaacataaaaaactctagctaactgaactggagcaataaaaattaagtaaaatagagat

SEQ ID NO: 647183 - DNA, 510 bp, Homo sapiens
caaacccttaacaggttggaaacaagaatagcctgtaacatatgaagggtcactcaaccttgttagtaattaggacaacctaactaaaatgtataaatgctatttcacataacaagactgaccaagggttgtgatgatacgcaataataggaayttacgtactttgttattgatagtataaactggtatggacatgtggggaaaaaacttgctcttgtcttacaatgttgaacattgaattactaacaactcagaaatttcacattttatgaagttcttcttagtgttgtttatattatgagatagaaactgttatctgtatagtacaccaagataagaataaggcagttcctgagtggaaacaacattatgatattctcttattgctgtcactcccttccttagacactggctacaaaaaccaatgaactaattcatctgggcataaattgcaaggttgagatagtgtgtcaccaatgctatatattattctgaaatttgtatgtgggt

SEQ ID NO: 647184 - DNA, 530 bp, Homo sapiens
ctgttgatataaaatggtagccttttttaatcttgcttcatgtaaatactataatgatggtatttctttggtgatataaattttgttcatgggataaccataatgtatcattgagattaattatcatgattgtaaagtgagaccagataacatgtctctgtgttagaaccaatggactcaatggcatagtgtttacaaacaatatatataatctttaatcccaaaagcatcagatcactctctcatatacttttcagtttmtcatatataactgctcttacttaaaagaatattactgaagtcttctgttagagtatgagctcctttaattccttaataaggaaagtacctaatttatcacctcttctatgtgcccagtagccctttaaaaaatgttagttgaaggaatgtcaatttaaaatgaaaaacagatgagactactaaatttgtacctgaaatgagaataagaatatataaactcataagattcctaagctttaaaaaatgttcactgcagatttgcaatataa

SEQ ID NO: 647185 - DNA, 381 bp, Homo sapiens
cctatttatagccaatttagtggcatagtctcagaawtttttaccctttccaactctagcaacctcaaacatcgccaaagttcaggcactgacactgcggccatctagtaaaccttgttggcacaagaaatttctatccttctaaagttcttaagtgtcaatattccatttgcagattacaacctcaacttcttccagctttcttatatcctcactcctagtaaaaccacgatttgaccttaatctttgaattcttctttatcttcacttattgattttttttccagtacttaatctggattccatgcatcagcccaataactctgttactaacattcatcctgttacctgcattttgagtgtggggatttgagctcaatg

SEQ ID NO: 647186 - DNA, 556 bp, Homo sapiens
ataactcctacagccattaggaaatattttcttgtatacatacatatatgacatctgggtttcacactctactcagcttctaaggtattgttgaagactatgttgtccagcgtcatgaccattagatacatgtggctactgagcacttaaactctctctgggctaaattcagatatgctgtaagtataaaatacacactgtatttcaaatggaaatgaaatttcaaaatggaaatatattaatatttttataaaatggaaatatattaatattttaaacattgagtacatattaaaatagtgatatttttgctggccaggtgcagtggcttacgcctgtaatccagyactttgggaggctgagatgggtggattacatgaggtcaggagttcgagaccagcctggtaaacatggtgaaaccctgtctcactaaaatacaaaaattagccaggcatggtggtgggcacctgtaatcctagctacttgggaggctgaggcaggagaatctcttgaacccaggaggtggaggttgcagtgagccaagattgtgccattg

SEQ ID NO: 647187 - DNA, 529 bp, Homo sapiens
ttgtagggagactggaacaagtcgtcttcctttaaagttaactatatgcttattttaaagtacatttgagaggtgggaggatcacttaagcccagaagtttgagacctgcctgggcaacaaagggaggaaaaatatctatctcaaaaataaataaataaataaataaataaataaataacgtacaattgaaaatatggagggaaagtaattatcaattcattcataagcaaatgtagccatttttwaaaaatccctatttattttagtcaatcagggctgctataacagaaataccatagactgggtggcttaaacaacaaatatttacttttcacagttctagaggctggaagttcaagatcagggtgcttcatggttgggttcttggtgagtcccttcttcctggtttgcagacagacgtatttttgctgtgtcctcacatggcagagattgcaagtgctagtctgtttctctccttataagtatactaatcctattatgaggactccaccttcatgatctcattta

SEQ ID NO: 647188 - DNA, 581 bp, Homo sapiens
ttttcaggtaaaagaaaactaagaagaattattgccagtacatttgcactaacaaaaattgctacagaaaattcttcaagttgtagggaagttatatagggtagaaacatggatattctgaaaagaataaaaagcaagaacttaattctgccagcaactaatttgagcaaggaaatagattcctgtagtgtctcctgaaaagaattcagccctgccaacagcttgattttagctcagtaagatccatgtcagatttctgacctasaaaactgttagataataaatgttattattttaagctgctagtttgtgggaatttgttatggcagcaatagaaactaatacaggagtgcttggataaatattaaccttgctcatgttttgaatggaaaattctgaggtgaaatctacactgcttttcaaaaggtacacaacagaactgagccctagtttcccaaaacagtaacaagttcaatgatacaactttgaatagactttcccttctgccttgatttattcatctcaggcctccaactgtgagtctctagaatcacattccaaaataagctatttgcaaggcc

SEQ ID NO: 647189 - DNA, 543 bp, Homo sapiens
tttgcaaactctatgtttataccaggctgcattatgtttcctaaagacatcaggtccttgtctttggaacctgtacatattaccttatttggaaacagagtctttgcaggtgtgattaagctaaggattttgagatgaggaaatcatcccagattattcatatgggacctaaatgcagtcacatgtatcattttaagaggaaggcagagggagactgagtaaaggcaaagaagagatgtgaagatagaarcagcgattgcagtgatgttgccacaagccaaggaatgtcaggagccataggaaactaattagtattccagagaccatctgctacttcactgacaattagggtctactaaaaatagaagaaaaaaattgtttcactggtgataccagcttttaaatagtctgacatgtttttttttaagttgactccatatttctataattctattcattattttaaaacaaaacaaaggcatgcacattgaatagtgaaaatgcatggccctagaaagcagattaggggaagaaaattaaaat

SEQ ID NO: 647190 - DNA, 584 bp, Homo sapiens
actagctaaccaaatccaacagcatatcaaaaagataatacaccatgaacaagtggattttataccagggatgcagggatagtttcacatacacaagtcaataattgtgatacatcacataaacagaattaaaaacaaaaatcatataattatctcaatagatgcagaaaaagcatttgacaatatccagcatccatttatgattaaaacccttagtaaacttggcacagaagaaacatacctctaggtaataaaagctacctaagacaaactcacagctgatatcatactgaatgaggaaaagttgaaagcattcctcctgagaactagaacaagacaaagatgcccactttcactgcttccattcaacatagtactagaagtcttaactagggcaatcagacaagagaaataaataaatggcacccagattagtaaagaggaagtcaaactctcactgttcgccaaggatataatttttatacctagaaaatctaaggactcattgaaacagttcctagatctgataaattaattcagtcaastttcaggatacaaaatcaatgtacacaaatcagtagtac

SEQ ID NO: 647191 - DNA, 426 bp, Homo sapiens
gaattcttctgcagaaatttattttttttcctaccactttgccagactgcacatattccaaactttgcactctgtgttgaggtatgtttattctataactaayttattgagagtttttttcatgaataggtcttgcactttatcaaatgctcttcatgcttctattgagatgatcttatggcatttgtcctttattcttttgacatggtgtatcatatttatttatttgtgtatattgaagaatccttgcatccctagaataaattatcttgatcctggtgtattgtcttgttgatgtgctgttgaattttgtttactagtatcttgttaaggatgtttacttctatgttaatcatggatattagcctttagcttttgttgtttttgtgtccttgtttagttttggtatcaggataatgctggcct

SEQ ID NO: 647192 - DNA, 631 bp, Homo sapiens
tcttacatagcagcagacaagacaatgagagccaaggaaaaaggggtttccccttataaaaccatcagctctcatgagacttactcataccataagaacagtatgggggagatcactttcatgattcaattatctctcactgggtcctcccatgacacatgggaattatgagagctgcaattcaagatgagatttgtgtggggacacagccaaaccatatcatctatatgatctgctgttaatataggtactttgaattcttttgattaatgtttgcatacttttacattcaacctgcctataatgttatatttgaagtgaatttcttacagacagcatatagcaggattatgttttttaatccattctgaaaatctcttttaatagcctatttagaccatttacatttaattracatgtcaatgcttaagcctaccattttattttttgttctgtgtatattttctctttttcatttctgttttctttttcctgccttctttcacattaaacttctaagatatatttatatataatatttttgcattatttatgtttatttttattcaatttgtatttatctgtagtgtttttgagtatatctctttgtatcacttttacctggctgctt

SEQ ID NO: 647193 - DNA, 630 bp, Homo sapiens
ataacgaactagctgagaaataagaatagacaatccctttataatagctacatagaataaataaaacacctaggaataatttataccaaggatgtgaaagacctattcaaaaacaactacaaaacattgatgaaataaaacgaaaaagacaaagcaaatgaaaagacatcccatgctcatggatcagaaaaataaatgaccatactactcacagcaaattccagattcaatgcaattcctatcagtatgccaatgtcattttttacataaatagaaaaaaaaatctaaaactcacatggaaccacaaaaagcctgaattgccaacacaattctaaccaaaaagaacaaatgtggagcgctcacaatacctgacttcaaactatattacaagggctatggtaaacaaaagaacatggtattggcataaaaacagacactctaccaatggaaaagaataaagaaacaagaaatccacatatttactgccaactgaattttaaccaaggcaccaggaatatatattaaggaatgaccatcatctttaataactggtgctyggaaaaatggatatccatatgcaggagaatgaacctagatcccatctgtcaccatatgcaaaaatcaactgaa

SEQ ID NO: 647194 - DNA, 538 bp, Homo sapiens
ggcaaagaccccatttgtataataagattagggtggggcaactagccttccctgtgtgctatgtagacatcacatctgattgaacagtctgtgggccctatctaaatcagataccacctccccatgcctggctataagatctagtgcagtccaccrtgggctggattttcccattttggagcccctctttctggcaagggagacagccgttctcctttctctttcttttgtcttttaaacctccactcctaaactcactcctaactcactccttgtgtgtgtccgtgtccttaatcttcttggtgtgagaaaatgaaccccaggtatttaccctggacaatgacattttgtttatccattcatccatgaaggatattttgttgatgtaaggttctgtgttgacagttctgtcctttcagcactggaaaaacggggtgccactttctatggcatccatggttttcaatgagaaatctgctgccattcaaattgtttatttacataggcaaggtggtatttcactctcacattcaagatt

SEQ ID NO: 647195 - DNA, 538 bp, Homo sapiens
ggcaaagaccccatttgtataataagattagggtggggcaactagccttccctgtgtgctatgtagacatcacatctgattgaacagtctgtgggccctatctaaatcagataccacctccccatgcctggctataagatctagtgcagtccaccgtgggctggattttcccattttggagcccctctttctggcaagggagacagccgttctcctttctctttcttttgtcttttaaacctccactcctaaactcactcctaactcactcctygtgtgtgtccgtgtccttaatcttcttggtgtgagaaaatgaaccccaggtatttaccctggacaatgacattttgtttatccattcatccatgaaggatattttgttgatgtaaggttctgtgttgacagttctgtcctttcagcactggaaaaacggggtgccactttctatggcatccatggttttcaatgagaaatctgctgccattcaaattgtttatttacataggcaaggtggtatttcactctcacattcaagatt

SEQ ID NO: 647196 - DNA, 538 bp, Homo sapiens
ggcaaagaccccatttgtataataagattagggtggggcaactagccttccctgtgtgctatgtagacatcacatctgattgaacagtctgtgggccctatctaaatcagataccacctccccatgcctggctataagatctagtgcagtccaccgtgggctggattttcccattttggagcccctctttctggcaagggagacagccgttctcctttctctttcttttgtcttttaaacctccactcctaaactcactcctaactcactccttgtgtgtgtccgtgtccttaatcttcttggtgtgagaaaatgaaccccaggtatttaccctggacaatgacattttgtwtatccattcatccatgaaggatattttgttgatgtaaggttctgtgttgacagttctgtcctttcagcactggaaaaacggggtgccactttctatggcatccatggttttcaatgagaaatctgctgccattcaaattgtttatttacataggcaaggtggtatttcactctcacattcaagatt

SEQ ID NO: 647197 - DNA, 680 bp, Homo sapiens
ttaagcacaggcaataggatgagacggcatcatggtcaagactgcacatgccgatcattgactaactgttaaaagacaacatgaaactctatatctgagaagaaaggttactgcctacccaaactagccctccacaaatataattctggcaactcaatccagatattcaacctatttccagcacaagctttgattcaatcacattctctttttctaatcaggatgcttctccaccttataatgtatatggtcatttaattgttgaaattgacagaaacaatttttaaagtacttttcagcactgtacctcacacagtatcttctattttaaatccatcttaaatattccaatggtctacaaaaaaaaacccttctaaatatatgtatttcaaacacttctactcttagtgagggctctaacaatattaacatttatcatttcttagactccaccttctcctcaaagttaaacgttctgataaaattctatggctccacaaacactttaattctgttattggcaaacacaaatggtgtctaygaaagcaccagataaaaatgttacaggaagatcccccagttggggaaagatggaatctgcagcaaaggatcaatcttttgtcctctcactgaaaaagaagccatttagagctccaatgaagaatgttagttccagccct

SEQ ID NO: 647198 - DNA, 576 bp, Homo sapiens
tcttttttttcatagtgctcattatctgtattaatttgccatgtgtattctttctccatgtgcatttagaataccagccccaagtggacagggatctctgccttgttcattaccacacgccaaagcctagaacaggttactgatggcactcactcagctcccaacacacatttgttggctaaatatctttttcaatttataargaaaagagatttaattggctcacgtttctgcaggaagcatggctgggaggcctcagaaaacttacaatcatggcagaaggcaaacaggaaggaggcacgtctgacattagtttattaagtcaaacagataaatttcaccctatggaccctctcagttttgagaacagcagtgctacactgccaagaattcatgctaaaacaaaccataaacctgacctacgtccctagtctgctgactttgcccaaaatctaagctcttgcattagactttaagtccaaatgatatcatcatggattttagaagaaaacatatattgcctttgatttttatttttaaggtgatagtaataaagaccaggcagtatgaacactg

SEQ ID NO: 647199 - DNA, 477 bp, Homo sapiens
ctaacaaacccttctctttaatcaaaggaatcagacatatgccaccgtcagaagtcagggtggggcgaacacagagcagatgtgttcctgcaggtcagatggaatgaggggatttggaacatacacttggcataatctttaaattaaccagaggatctaattttaaaataaaaccycacattttttgcggggcagagacatcatagccagcagcttttagcagcagcaagaaagcaaacgttctgaggcttttcataaatccatttagaagtatagcattatgtgtggaaatttttgggccagagagtcttacctttttagatgtctacagaagaaagaaaacacttccacattcaaaaaccaaaggggatatagatctctgttttttttttggttttgttttttttttgagatggagtctcgctctgtcacccaggctagagtacagtggcccgatctcagctcactgcaaccttc

SEQ ID NO: 647200 - DNA, 560 bp, Homo sapiens
accaaacaatacaactagaaacatgagaaattctacaaagcagaagaaagaaatttcaaaacaacaaaaaagcagtctgaccactttctggattgtgcatcgagatagaaacattatgttataatttaattaagagcagttttttttccttcctgcattgtatgtaacctaatggtgcatcctataatctatgagctctacatatcaataaaatatagaatgtacataaagtaacaccccaaaaaaggaataaaagaatggttagtaaaattgcttcagttagaaatctctaaaggtatgacagtatgcattatattctagaatagtagttgtcrctgagatgctagtcccagtattcatgaggcacatatcacaaaacactatttgctgtgactcagccttttggacataatgagggaaaaaaacagtagttgaaagcttgttgggccaaactgtcaagagaagatgagaaataatgctaaatcacatcttcaaaaattccacatgacaattaggacaaattcagattactaaaacaaagagaaatagtatgtctttgg

SEQ ID NO: 647201 - DNA, 568 bp, Homo sapiens
caacaacacacactggggcctttcagagagcgaagggtttgaggagggagaggatagagaaaaataactaatgggtacttggctaaatacctgggtgatgaaatcttgtgtacaacaaactcccatgacaaacgttgacctatgtaacaaacctgcgcttgtacccctgaacttaaaacttcaaaaaaaagaaagaaagaaagtaccttgttttatgagtcaaattcaaattagagcatgtctgttagaattctaaaaagggactgggcgcggtggctcaagcctgtaatcccaccactttgggaggctgaggcaggtggatcacaaggtcaggagttcaagaccagcctggccaagatggcaaaactgygtctttactaaaaatataaaaaatattagcctggcgtggtggcaggtgccagtaattccagctactgaggaggatgaggcagagaactgcttgaacccaggaggcagaggttgcagtgagctgagattgcgccactgcactccagcccaggcgacagagagagactccgtctcaaaaatatatacatatataaaaaga

SEQ ID NO: 647202 - DNA, 555 bp, Homo sapiens
tatctatatgaattttagaatcagcttgtgagtgtatgctaagaaaccaactgaagtcttgatggggccatgacagggtcttgataggttcaatctatgtatcaatttggcaaataaaggcaatgctactataatgtttttcaaatcaggaatatgagatatgttttcattcatttagatctttaatttctttccacaatttttagtaattttcacaatttacattttgtatttcttttgttaaagttatcctaagtattttattctttctgatggtattttatgtaaaattgtattcttaatatcatatagaataatttattgcaattatgtggaaatacaaataattttaatatattgatcttatgtcctaaaatttttgtttttttttgagcaaatacttttatagtggattcattaagatgttctgtatataagatcattccatataccaataaagatagttttattatcttcctttccaatatggatttgatttattttatgtttttgcctaatggtcttgcmaaaatctccaaatcaattttgaatgaa

SEQ ID NO: 647203 - DNA, 564 bp, Homo sapiens
cttatgttaatggagctgagaaatgtctgcattgtctgtgatttcaagtattattctctggtagttcatatatacttctaactagcttactstgtgataagcattcagatgacattcaaggtataggttattatttatgtatataaagaagttttaattttgatagccaatattatttaagtgtataaaagcttaaaatatgtccatataatcaaagcattttgaacttttctttatcactaagtgttgtcaacttctgattaacatcagggataaaaaaggggtatgatggcttatggaagacaggtctattgcctcctaccatgtactaatcattattaaaatgactaaaacataacaatcttttttgaccttttgccaacactaatattaactaataatagatttctataagtatatttcagttatatatttttatagaactcaggcataattaatttgcattattattctgacggaggtatttgttgttgtatacattttgtttcagcggactatcttaaatataagagactaaatcaaaatattagcattgtgttgaat

SEQ ID NO: 647204 - DNA, 564 bp, Homo sapiens
cttatgttaatggagctgagaaatgtctgcattgtctgtgatttcaagtattattctctggtagttcatatatacttctaactagcttactctgtgataagcattcagatgacattcaaggtataggttattatttatgtatataaagaagttttaattttgatagccaatattatttaagtgtataaaagcttaaaatatgtccatataatcaaagcattttgaacttttctttatcactaagtgttgtcaacttctgattaacatcagggataaaaaaggggtatgatggcttatggaagacaggtctattgcctcctaccatgtactaatcattattaaaatgactaaaacataacaatcttttttgaccttttgccaacactaatattaactaataatagatttctataagtatatttcagttatatatttttatagaactcaggcataattaatttgcattattattctgacggaggtatttgttgttgtatacattttgtttcagcrgactatcttaaatataagagactaaatcaaaatattagcattgtgttgaat

SEQ ID NO: 647205 - DNA, 530 bp, Homo sapiens
ctctggaccgggagctgtacaactccagcaggtttggctgtggtccagtcatcatttaatttgagaatttgtagtgatggcttaatgagctctgttgatgaaatggtaatgggtttgctgcaataaaattggggtcaatatgacaatcttttgaacataaacatgccagcaaagaagagaaaaggaagaattaaaattgctttatttattttctaaacaaaactaaacaagagccatatttcaaatcccttttcgcttaaattaagaacatgtgaacaaaacctgctctaaaagcttactccaaacccatgtacattcatataagttaatttccttagaataagaatacaaaatacatatataatcctaatattaataagtcccaaattaagttacattagcattaatacttatcagggtagctacataatttatgggkcccagtgcacagtgaaaatcggggggctactggttcaaagcacaggaaagaattttcattaaaggaaataaaataaaagatatgtttttgc

SEQ ID NO: 647206 - DNA, 570 bp, Homo sapiens
tatagttaacaaaaatatattgtatatttcaatagctagaagagaagatttggaatgttccaaatgcaaacaaataataaatgtttaagccaatggatgtcctaaataccttgatttgatcattacacattgtatgcatgtatcgaaatatcacatgtatatacaattatgatgtatcaaaaattagtgagttttaaaaaaagacttataaagcaaaaaaagattagccayggctttttggggttcttgtttgacttcctggactgttgctagacaaagcaacctgactttccacaagtctgacacagccggctggcttcctgggctggctactgtgttggcttcctgggcaggttgctgcaggctgtaggtcagagttctgtcttttaggcatggtctggctgttttctgtttatctattcagtctctcattagtgttgccagaaccaggaggtagaaccaggaaaggctaaaattcctgaaggcacagaagctcggactggattattcatccatttacatcatttcatgtgtcagccatcaaagcgaggttgatgcttgagtcttggg

SEQ ID NO: 647207 - DNA, 547 bp, Homo sapiens
gaagctttcctttatgttttcttctagaagttttagttttaggtcttatatttaagtctttaatctattttgggttttgagtataaagtgtaagtttaaatttcattcttctgcatgtggctatccagttttcaaataccatttgttgaagagactttcctttccccattgtctatccttggcatccttctcaaaggtaagttgacaaaggtaagtttctgggctctctattctcttccgttgatttatatgtctgtctttatgcaaataccaatttattttaattattgtaggaagcytgttacctccaggctttgttcttacttctcgagactgttctggctatttgtggtcctttgtgattcagtatgaattttaggattctatttctgtagaaaaatgccactgagattttgttgggaatatattaaacctgtaaatcactttgggtactatggacaccttaacaaacataagtcttccaatccataagcaccataaatctttccatttatttgtatcttctttaatttcatcaatttttaaa

SEQ ID NO: 647208 - DNA, 547 bp, Homo sapiens
gaagctttcctttatgttttcttctagaagttttagttttaggtcttatatttaagtctttaatctattttgggttttgagtataaagtgtaagtttaaatttcattcttctgcatgtggctatccagttttcaaataccatttgttgaagagactttcctttccccattgtctatccttggcatccttctcaaaggtaagttgacaaaggtaagtttctgggctctctattctcttccgttgatttatatgtctgtctttatgcaaataccaatttattttaattattgtaggaagcctgttacctccaggctttgttcttacttctcragactgttctggctatttgtggtcctttgtgattcagtatgaattttaggattctatttctgtagaaaaatgccactgagattttgttgggaatatattaaacctgtaaatcactttgggtactatggacaccttaacaaacataagtcttccaatccataagcaccataaatctttccatttatttgtatcttctttaatttcatcaatttttaaa

SEQ ID NO: 647209 - DNA, 547 bp, Homo sapiens
gaagctttcctttatgttttcttctagaagttttagttttaggtcttatatttaagtctttaatctattttgggttttgagtataaagtgtaagtttaaatttcattcttctgcatgtggctatccagttttcaaataccatttgttgaagagactttcctttccccattgtctatccttggcatccttctcaaaggtaagttgacaaaggtaagtttctgggctctctattctcttccgttgatttatatgtctgtctttatgcaaataccaatttattttaattattgtaggaagcctgttacctccaggctttgttcttacttctcgagactgttctggctatttgtggtcctttgtgattcagtatgmattttaggattctatttctgtagaaaaatgccactgagattttgttgggaatatattaaacctgtaaatcactttgggtactatggacaccttaacaaacataagtcttccaatccataagcaccataaatctttccatttatttgtatcttctttaatttcatcaatttttaaa

SEQ ID NO: 647210 - DNA, 659 bp, Homo sapiens
gtcattacttttaatgttttgatgtgtttattttttaattcatttcatgcattaaaaataagattgagctcatactgatttagatacgatttataattattttaaaaacatattgtatcagacatttaccaatgttaacatgtagatattgttttaaaataaatcattcatttcttacatacttaaactgattccaatgtttttctgttaaatggccatgtagcttaatcactccatgcaccaaactggacctggaatagaattccttccctcaaataactcatctccagtagagaagataaacatgtaaacaggaccaactatatgatttgtggagctcagtacaaagtaaaaatgcatagcgagctccttcttgaaaaattaggarattcaagacagccatagcatgcaataaaaccaagactggagccctgtgaagcataggttctgtgcaaatgcaaaagtcaccaacccaggaagccagtcctgaacgtaagcctaatgtaagtcagtacaagatggtaaatgccttaatagaaatgtgtattaaattataataggaacacagtggaagtggtacttccatcttgacagttctagcagctctgccaatttgcatgatcaagataaatctgacttcttttagcaaaaaaatgcag

SEQ ID NO: 647211 - DNA, 659 bp, Homo sapiens
gtcattacttttaatgttttgatgtgtttattttttaattcatttcatgcattaaaaataagattgagctcatactgatttagatacgatttataattattttaaaaacatattgtatcagacatttaccaatgttaacatgtagatattgttttaaaataaatcattcatttcttacatacttaaactgattccaatgtttttctgttaaatggccatgtagcttaatcactccatgcaccaaactggacctggaatagaattccttccctcaaataactcatctccagtagagaagataaacatgtaaacaggaccaactatatgatttgtggagctcagtacaaagtaaaaatgcatagcgagctccttcttgaaaaattaggaaattcaagacagccatagcatgcaataaaaccaagactggagccctgtgragcataggttctgtgcaaatgcaaaagtcaccaacccaggaagccagtcctgaacgtaagcctaatgtaagtcagtacaagatggtaaatgccttaatagaaatgtgtattaaattataataggaacacagtggaagtggtacttccatcttgacagttctagcagctctgccaatttgcatgatcaagataaatctgacttcttttagcaaaaaaatgcag

SEQ ID NO: 647212 - DNA, 572 bp, Homo sapiens
gcagtgggcttctgtctggccaggagcagatccagaaatgctgtccaagagtcaagtcgtggaatcagggaccccaagaacccacttggtgctttgtccttctgtggccctgctggcacctaaggtgcaagacaaatctccctttaagagaaaaggctaaagtctctaaggaagaaggaattctgcctccagactgccttcagactgcagctgcaacagcaactcttccctgggtctccagtccactgtcctgcgctgtatgttttagacttggtagcccttataattgcatgagttcatttcttaatataaatcattctattataaagacacatgtacacatatgtttattgcagcactatttaaaatagcaaagatttggaaccaacccaaatgcccatcaatgatagactggataaagaaaatgtggcacatataaaccatggaatactatgcagccataacaaagaataagtccatgtcctttgcagggacatggatgaagctggamgccatcattctcagcaaactgacacaggaacagaaaccaagcaactcatgttctcagtcat

SEQ ID NO: 647213 - DNA, 370 bp, Homo sapiens
ttcagcttagttttttgagtatctttgtatagggtcttggtctttttcactgttatgctggcagtttcagtggtttgtcttagatccaccrtttagaatagaagccagcagcttatgattaagaagtttcctgtttatctccttggcttctcaagaaagaaaactcttagaaactccaatacaagataaagtcaagattattaactgttaccagtggataataaaagtttttcattgttgtttctcccagtctttttttttttttcaaaaggctttttaaacatgttagacaaaatgttcattgtggcactgttaattatctcagtttttctttttgctagcctgggttatagtaaaagtgaagggaaac

SEQ ID NO: 647214 - DNA, 592 bp, Homo sapiens
agtcacaatttctctggatctcagttttctcattcataaaataagagaatcagactaaatgagtagtaaggcccattctagtttttaagttctattttttttttttttttttttttttgagakggagtctcactccgtcgccaggctggaatgctgtggcacgatctcagctcactgcaacctctgactccctggttggttcaaatgattctcctgcctcagcctcctgagtagctgggattaaggcacgtgccatcacgtccagctaatctttgtatttttagtagagacggggtttcaccatgttgaccaggatggtctcgatctcctgacctcatgatctgcctgtctcagcctcccaaagtgctgggattacaggcatgagccactgcgcctggccaaattctatgattctttgtttcaactaataatatttgaattttctgaggaatagaaaacaaaccacatttttacttaaaaattaatataagcatatatatacctcaagaaacttaaccatgaatgaatatttgagtttaggttgagaaaaattttttacaaatacttctcactgtgagctaagtccaaataa

SEQ ID NO: 647215 - DNA, 554 bp, Homo sapiens
tcctgttgtgattagcccttgctatttcaccagctgaaggcaatctcataaatgaatcagcaatagtatatctcctttcaggttgggaagatagaatgagaggctttcccagatgcctgtgagtttcatctctcacaggcttccaggcttctcacaaagccctcacccttggctgtgtgaaatagayggattaaaacactgtattacagagcattgcttcttcttggttgttgacatgaagtgtgatgggttaagaagctgtcaactaaaaccagacaaacccttattgatgaaccttggagtatctgtgaacttttatgaccagaaaattctacttaacagttatcaaggacctgaccagatgcttcatagctcttgggacggatgattaatagttgtgtgagtaataatagcttctgtgttagagtgctttacagtacacgaaaacctgttcacacactttacgtcacttgagcctcaagatatctctgtgaggtagggcaggtagtataatccccattttacagatcaatgaaaataaaagcataagtaaa

SEQ ID NO: 647216 - DNA, 613 bp, Homo sapiens
ggatgccttatattttggagcaaagccctgaaatcctctgtgcgttactgctccccttttgagaaacagtttttagcttgctaccaagccttaaactgaacacttagctatgggcaaccaagtaaccatatgaccagagctttctctcacatattggatgttgtctgttctacaagccataaagttgggaatgcacaaaaatattgcattattgtatgtggaagtcctatatataaaattaggcttaagtaggccctggaggcacaagtttaatcaggaagtgagccaaatattcatgaccccaattcttgctgcactacttactctgtctcctagtctgcagatatggccttataaccagttccctacaactagttgactgaggaagacaaaacttgagcttggtttagtgatggttctgcacaatatgcagacactacccaaaagtggatggytgaagcactatagcccattgtggacattcctgaagacagtggagaaggaaaaccatcccagtgggtggaaatttgagtagtgtacccagttgtttatttactcagaaggagaaatggccagaggtttaagactatattaattcataggctatagccaa

SEQ ID NO: 647217 - DNA, 496 bp, Homo sapiens
caaggacaggaaaatgggataaaagagatgggtctcaggattagctaagaaatggagccaggccygagatcataactgaagacaagtcagagaaactgaggaagcagagggaggggcaacaaagcagaagtgacaatgctcatctttacaactcaccttcatcttcgattccagcttcccaaaaggatcactaggggatttaacatgtgatgtaaatttaacctctttgctcacttttctatccctgcctttttgaattctttgaaagcattcttctctttatagtcacgctgctgaaccctggagagtctggtcatttggcatctcacaccccactgagcactggctctctgaaagataccacatcagggcctatgagcagggcaggagaggacaaaatatataatattgttgttcaaagagctaaaatcaatttacaccaataaaatgtgcacacaaataacagtacggatcagcttgtaaaatttgccatgtc

SEQ ID NO: 647218 - DNA, 554 bp, Homo sapiens
gccttgtgttatctcattttcacctatatctaaacaggctactgatttattacaaaaatttcccagagtaagtgtgcaataaactagtttaagaaaggaaagaaaaacactccctatgaccccagcatatttatttgatttatttaacagaaatacacattatgcttactgtatgccaagcacttttctaaggactttataaatatttgctcattcaacttaatcatcagaacaactgagttagggactgtcacaattcccacttaatagtggcacagagaggttaagtaatttgcccaaggtcatatagctagtaagtggaatagctaggatttaaacccaggcaggttggctaccaagtgtccatgcctaaccactactgctgcactgtgatgaacttgaatcctgtatagtcagaatccaagttcattttgttttggccacattaacttagtaggaaactamtattatttttattcacataaacaattcgaatttataaggctcgtggacttttatgcactattaggcttagcatgtagaaggtactaaat

SEQ ID NO: 647219 - DNA, 630 bp, Homo sapiens
ccagaaaaccaaccatagctcctcaatctataaaaccaatctacatgttagggcttttctcttgcctcccgaaacaaaaccacattagaagcttcctagattatgatccaccagtcctggggttttgggggaggaggaataggaggacaaatgccagaggtcasttggtatgtgtttacttttctaggatctccatacccaagtgtctactcaatgcaatggtagggataagcaaactttaatagtgcctttgctactatcctgccctttgaggctggctcctggcccaggtcaaagtcatcatcttccccaaagatctcaaaacatcttgtaccctccaacccctaagattccccatggttttcttggtcttttgcctctaattcctctagaattcattttggaggggagagcctgttacatctgctagatatgtattataaaattttaaactgatatactttacgtgaacttggaaattatgcctcaaaaggtaatattcagaataaaatatacatgcaaggaaatggacatgtttatataaatcattgattaaatcatatcccagcaagtttactatataagcttccacactttacctactttgctgcaagacttgtgcagtccagt

SEQ ID NO: 647220 - DNA, 564 bp, Homo sapiens
attacttattattatagctcctttagtcatcatggaagtgaagtccaagagtcattctatcagagataaggactcaacatctactgagtacctactagtatccatgctgtatattgacgttctgtgcttatccttcaatacggccttatgaagtggatattattatctccatccagcagataacaaatagataayctaagaggcaaagctttttattaaaggccccatagccaatggggtattaagtatatgcaagtctgtgttctttctatacactagactctatcccatttgtagatgaaatatgagaacagacaattcagaaatatggaaacataattagtaaataaacagaaaataaaatgcttattcgtgggaatggaataaatgtaaatctaaacaatcataatatatcatgtgtatttgtaaaagaaatattgacttaaaatgttaatacgcaaagctgatgaaaatatgataacacatgcccaatcctactctgcttgagcaacggtaacatattacagtattttagaaaagtgtttggaattatgtaccactagt

SEQ ID NO: 647221 - DNA, 594 bp, Homo sapiens
tgggatagtagcagtgaggatgagcagaggtcactctcgtcaccttcttggttttggtgggttttagccagcttctttactgcaatctagttgatcagcaaggtttttatgacctgtatcttgtgttgacctcctatctcattctgtgacttagaatgccttaactgtctgggaatgcagcccagtaggtctcagcctcattttacccagctcctatttaagataaagttgctctggttcacatgcctctgacagtattcactactatcatcagcatttattcagcatcaactcattgcaaggcccagggggtggaggtcttgaatttgtagaaatataagtcctaggcacattcttaaaaatggcttggctaattcttctgtgttgcccatgctttctatatttatattttcattgatagaaagacatttgatctagattcaagatcattgtcctatataaaaatgatacatttttattccagagatttgttttttaggatgggttggcagttacartttctgctttccactttgtttgtaaattgagtggaactaatagatgatgcagttgatccatttttttccctaaaag

SEQ ID NO: 647222 - DNA, 516 bp, Homo sapiens
tattttgttctagtagaccttgttttcctttggcttagtcagtctacagggttggaaagaaccttctcaggacccttggtgagagatgttggagggatggtgagtggttattccaaggtactagagtattcagtttccctttcrtgggggtgtattgctgatctctgttgaaggagctgtttgaaagtcagagagccctgaactttaaactttgagacctgtatactagaccatgctagggtggggaagagggttcagtttgttttgccatcacaacacaattaccggggactcagctggctgacccttctgtttgccagaccacaacacaaatgacctgcttagaggtgacctggaaaatggggggtggggttaggatggatgagaaaggtggggaatagagaaaatatgacatttaggtgaaagaaggaagtcgatgtaggtgggaaggagatgttcaggtacagattgtagttccacgcagatgaggaagatctaattcagtcctcagtgtct

SEQ ID NO: 647223 - DNA, 660 bp, Homo sapiens
tcaattttcttgtcattaaaatgagaaagatagtccctgacttgatggggctgtcctgaggtaaaatgggtgtaaagtagtcagagaagtgcctagcacttaataggtagctccatacatgttagctgtatttattattaattacaacctaatagtgactgtatcagtcggagtttaccaaagaagcagcacctctaggatagatggatggatagagataataaaggaacgtgttacagggaactggccttatataattgtgaagctggttaagcagtgtctaaaggctgtctccacatctgctggtgaagcctgaagtccagagcgggggaattctggagaggaagatcatgaatttgccggtccccacaagtatgaaatggagccccacaaaaatctactgaagcctgcgtccattcttgttgcctctgactttggtagtggaaagggtgtcctgcaaaagctgggaccatttatcacagagctaaacgtacacctgatctgggaattagayaagctgaaggagtgatctaagagaaggcagagaaattgcagacctatagctgctgcttcatgccaataagtgagtcagcagatcagtaacaaaaactatgagctacaaaatggttactgcttctgttccaaaatcttcccagaatc

SEQ ID NO: 647224 - DNA, 553 bp, Homo sapiens
tcactttaagtttgcaggcaaacgtytgaatcatccgtttgaaagaagtggcaggaaaacagggagcccagtctgccaggtgggagagatacctctaagttcttatctctggccactggcttgagccatttgcatgtggtgtagaactggaaactgtgtccaggatgactgagccctgcttctggtatgagaaagttaaacttgtattcaaaatgaatgccaaggcaagataaaaccctgagaattcaccacataggctgatgccagtttccattgccccaaactgcagattggtggttcatcacctgagctgccacagggacagcaggaggctgctgtgtgtcctttctgaatctctcctggagtcaggccaaggtcctttgactttgagtatttctaagattaaataggagatttgggcactaaattatatattcagagtgtccttgctggaatgaaaagttttaattttgtgcaagtgtgttcatttgtttcttgtttctttctctcagataatattaggaaatgtctaatctcctccaagagaaaagat

SEQ ID NO: 647225 - DNA, 522 bp, Homo sapiens
ggaattctcccttatggcctccataaggaacacaagcctgctgacatcttgtctgtagatcattggtacccacccagaacagtaagataataaatttacattgtttttaagccaaattcataatagtttgttatagcagcaattgaaaattaatagtgtggggttttaaattatctttctyatgacatagcttaaaattctctgagcaaacaggaacctttgggagacccaagggagaataatttgcaaggagtctgagacacattgacactgatttttcttatttcttgaaagcagatgggattaaccaactatgactttgattcttaacaaatgccaaagtctctgggcccattccaggagatgagctgtattttgcaatcaagcaggagaatctacaagtctcctgtaaaactcacttgtgttaaaaagcatgcttgcttgcttctgggatatgtatagatttctgtttagaggaaagcgtatccatctgcattcgaaagaagatagaaagaagcatgg

SEQ ID NO: 647226 - DNA, 589 bp, Homo sapiens
caatagacacagaaaaagcatttgacaaaatccagcattcctttatgattaaaaccatcagcaaaataggcatagaagagacatrccttaaactaataaaaggcatctatgacaaacccgcagcccacattgtactgaatggggaaaagttggaagccttccctctgagaactggaacaagacaaggatgcccactttcaccatttatttttactgtagcactggaaattctaactagagcaatcaaacaagaaaaagaaataaagggcacccagtcaaactgtcactgtttgctgatgacatgattgtatacctggaaatatcctaaagattcatccaaaaagctcccagaactggtaaatgaatttagcaaagtttcaggatacaaaattaacgtacacaaatcagtagctctgctatacaccaacagcgatcaagctgagaatcaaatcaagaactcaacccctttaacgatagctgcaaacaaaaacaaaaacaaaaaacaacaacagcaaaaacaaacaaaaaaacttaggaatatagctaaccaaggaggtaaaagacttctacgaggaaaattacaaaacac

SEQ ID NO: 647227 - DNA, 556 bp, Homo sapiens
tgtttatgtctctttcacagacctcacatgaccatattcagctgcaaggaaagctggcaaacgtgcccaggtaaagttcctattactattggaggaggaggaagaagaggaagaaagagaaggagagtaggagttggaggaagaggaagaaagagagaaggagagggaaaactactattaatactattactacaactaccactaataataataatattgggaagaacaagtagcagcctctgccacagttcaatatgccaggtacagtgytggagagacatgaataaatttcagtccctcccctcaagaaactcagttattactatgaactgaaaagtgtccacgcatctttgtatctccagagaccagcacagatccctccactctatttaccaaatactgatgccaaccagcagcaacaataaatatccccaccccaggaccaatatgcacctggtactgaacagtaacttgagaaacaaccatgcgtagggcatcatccctgccttcaggagtgcccagtctacacaaggagacaagatggggcttacacatg

SEQ ID NO: 647228 - DNA, 551 bp, Homo sapiens
taggacccctgaggaaacttgttccctcctcagtccctacctagtatgccatgggtttctacaaatgctggcaaatgcttgcgaatgcaaatttccctgacttttcatggaatgccacttgtcagcctcgtggaaatttggaaagcatctcatgcaggcaaatcaactgcctgaatctcagttaaaaacaattctgcatgttagggctggtcttgtaatcaacactgcccagacctgcctctatgcagtccccagcaagcccacttcccacatcagcttcttccacattgttctgcmtctgttgaggattaaggatgaagggcgttcatttcctggggaattttctgcaacttccagagctttggtctgcaagtttcagccaccaaataaaacaatgatatttgggacaactaccccccacctctccccttccaccaagtcaaaagaggatcttgctgacaactgtgtggaaagaagcaagttttgtcccctagacaggtaacggggctgagactgcctcctggccattgccgcctgtggctgagtccttg

SEQ ID NO: 647229 - DNA, 551 bp, Homo sapiens
taggacccctgaggaaacttgttccctcctcagtccctacctagtatgccatgggtttctacaaatgctggcaaatgcttgcgaatgcaaatttccctgacttttcatggaatgccacttgtcagcctcgtggaaatttggaaagcatctcatgcaggcaaatcaactgcctgaatctcagttaaaaacaattctgcatgttagggctggtcttgtaatcaacactgcccagacctgcctctatgcagtccccagcaagcccacttcccacatcagcttcttccacattgttctgcctctgttgaggatwaaggatgaagggcgttcatttcctggggaattttctgcaacttccagagctttggtctgcaagtttcagccaccaaataaaacaatgatatttgggacaactaccccccacctctccccttccaccaagtcaaaagaggatcttgctgacaactgtgtggaaagaagcaagttttgtcccctagacaggtaacggggctgagactgcctcctggccattgccgcctgtggctgagtccttg

SEQ ID NO: 647230 - DNA, 626 bp, Homo sapiens
tcctacatttggctagtgggagtccattcacactacttactatgtcatttgttatgaatatgtaaaatatttatctggttcaaatcataactagaaagatacagctaaaggttgggtgcggtagatcatgcctgtaatcctagcactttgtgaggccgaaatgggaggattgcttgaggccaggagttcaagaccagcctggtaagtatagtgcgaccccatctcttaaaaaaaaatttttttawaaaagattaaggtcgggagcggtggctcatgcctgtaatcccagcaatttgggaggctgaggctggcggaccacgaggtcaggagttcaagaccagcctggccaacatggtgaaactccatctctactaaaaatacaaaaaattagtcaggtgtggtggcaggtgcctgtaatcccagctacttgggaggctgaggcaggagaattgcttgaacctgggaggcggaggttgcagtgagccaagatcacgccgttgcactccagcctgggcaacagggcgagactctgtctcaaaaaaaaaaagattaaaaaataaaaagatatagctagtgaagtcctgcccatctcctttacctttctctataggtaaccactttcatta

SEQ ID NO: 647231 - DNA, 550 bp, Homo sapiens
attttgtgttttttattgaggtgagaacattcaacatgagatctactctcttcacacatttttaagtgcataatacattattgcttactacaggcataatgtcctactgcagatctctagaacctagtcatcttatgcaacggaaattttaaacccattaaacagtaactccccatttcttcctctgctcagcctgtgacaaccaccattctactctctgcctttatcaggctgactattttaggtacttcacataagtagaatcatgcagtatttgtcctgtgcaactggttcatttcacttagcataatgtcctccaggttcatccatattgttgaatacaacagaatttactttttttagaggctcaaatagcatttcatgtatatgtatgtatgtgtgtgtatatatatatttacacacatayataccacatttatatacatatatataccacattttatttgtctgttcatttataaattgacacttcaattgattctatatctcattgacttatgctccaatgagagatcagatttcaagacgt

SEQ ID NO: 647232 - DNA, 474 bp, Homo sapiens
taggactttgaaggggcttttaaaagttgtttcaatatttttataattagaaaactccaagtacaataagattatcrtgaaacagaaattgtttcctcaacgaatagatagcactttcgaactaaagatagacagaatttgggccatggattattttagcaattcactgttaaggggtttccagaatatgactgtcaacaatgcccattaatttctctgcacttcagttcccgtactctcattggaagacagtggttttgctgttgtatcaggtactttttcttaatgacatatagggcctttggacctaaacattaattaagtttaaccccaacactttcagggtacctgaacagggaattagtgtcaggactataagatttgtcataagcagaccagtacattgatctaatcattcagaacattatatttaaggtatgattaaaatgctatccacggggcagtcttcagatt

SEQ ID NO: 647233 - DNA, 474 bp, Homo sapiens
taggactttgaaggggcttttaaaagttgtttcaatatttttataattagaaaactccaagtacaataagattatcgtgaaacagaaattgtttcctcaacgaatagatagcactttcgaactaaagatagacagaatttgggccatggattattttagcaattcactgttaaggggtttccagaatatgactgtcaacaatgcccattaatttctctgcacttcagttcccgtactctcattggaagacagtggttttgctgttgtatcrggtactttttcttaatgacatatagggcctttggacctaaacattaattaagtttaaccccaacactttcagggtacctgaacagggaattagtgtcaggactataagatttgtcataagcagaccagtacattgatctaatcattcagaacattatatttaaggtatgattaaaatgctatccacggggcagtcttcagatt

SEQ ID NO: 647234 - DNA, 569 bp, Homo sapiens
gaaaataatgtacaatctgtgcttagataaccaaatagagcaaataacacagatgttttatgagatttatagttaaataatatgtgaaatatttctttctaggtagataactatctgtgttagagtcaatgatttagtctccaccatatgctttcaaattctattttatgtcctttccaagtaaagatatgaaaaacactatactgagatcagtaatgatactgaatataattttctggatagtttcagcgatccctctgaggcacattctctgcactatttttgcccagacagtaggcttgtttctcattagttaggagagagaagagtgtctttcaacatgctgtggaactctcatctcaaaaagacaagccagggagttgcacagctataggttaaccctggatgttccttaaaagtaccagattttgtcagtagagtgcatagtgatcatrcacttcatactaggctctggggaggaatctctgtttaaaataggtttcagttgttcattaatagcatgcctgtccaaaacaaataataaactctgaagcaggaagctgttgctt

SEQ ID NO: 647235 - DNA, 590 bp, Homo sapiens
agtaatgggtttcttccactggagacgctatggacccctgaacacagcttcacagcacacccccgcggcccccccacsccccccgaaaagagctctttcctacctttgttttttgggcaccgaatgttcaatctctaagcgttttccttgtaattctactttccctaaagattaaaaaaaaaaaattaccatgagagcttgaacaggggttgggggtgggaagaggaaggggaaaagacactaggataattcaggagttactgggattcgagatcttcctaggaatccaggcagtggcttccgcatccagatgggaaaaaggttgctctaggaatggtggagtctgtaaattcgttattattcattttttaatttttgctttattaaatcactgaggcttgttgagtggatcgctctggaatcccgatttgggaaaggtgcgaggccatttgtgtgggtgcgctgcctacacagctcccagatgtgggaaggagccaggaaagaaagggctccccgttcctcagaaagtggggcgcggggcgggaggcagtgtgcagaatgaaactttatttttctctgttggccaggaa

SEQ ID NO: 647236 - DNA, 632 bp, Homo sapiens
tcttcttaggtgccttctttccttcagccttactaaccaacctcttctagcttcaaacttttcttctgctgcttcctcctcacctctcttagccatataaactagaagcgaattagtaccttgctctgaattaggctttgtcttaacggaatgttgtggctgattttatcttctatttagatgactaactgtcttcatattagcaataggctgttttgcttttggtggatatgtgcaatgtcaatggaaaactttctggaaaggattcaccattctaggggccattaagaacattcgtgattcatgggaagaggtaatagtatcaacattaacaggagtttggaagatgttgattccaatccttatagattacttcgaaaacataaaagggcaaagcgaacsagcaaggcctgatggagaagctgcagcaatttatcctgaagatcttgctaaggtcatggatgaaggtgactacactaaatgccagaatatccatgtagacaaaacagcattctattggcaggaaatgccatctaggactttcatgatacagagaactcaagatctggcttcaaagctgtgaaggacaggctgactctcttgttagagactgatgcactggcaactaagtc

SEQ ID NO: 647237 - DNA, 542 bp, Homo sapiens
aatcaagggtacaaggcgtctaggtcaaaggcccagctttgtctatagcaggtcaaatatctaggcctaatcttagccagagggaccagrgccctcagcaaggaacaaatacagcctatactggcttatccttgccctaagacattaaaacagttgtggtcattccttggaatcacggcttttgctgactatggatccctggatacagcgagatagccaggcccctttatactctaatcaaggagacccagagggcaaatactcatctagtagaatgggaaccacaagcagaaacagccttcaaaaccttaaagcaggccctagtacaagctccagctttaagccttcccacaggacaaaacttctctttatatgtcacagagacagcagggatagctcttggagttgttagactcgtgggacgaccccacaaccagtggcatacctaagtaagtaaattgatgtagtagcaaaaggctggcctcactgtttaagggtagttgtggtggccatcttagtgtcacaggctatcaaaataatac

SEQ ID NO: 647238 - DNA, 553 bp, Homo sapiens
agcatattgacttatgaaatatgtatttatatttctaaattgcttaacaaatgtattaataaatgttgtaataaaagatcaagttttggaaatgtatgccttttttctaccaatctcagaaaaagtttaggagattctagttgatgttaggtattataatacatgcacaatatcttaagcaaagcatctgggttggtatctaagtcgtcaatgagaagagggctgcataatgttgggtaagtacagtagtacccacttatctgcaggggatacatttcaagcccctcagtggatgcctgaaaccacagataataccaaatcctacatatactatgtttttccctatacataaataactataataaagtttaacttataaattaggcacagtaagagattaacaaaaataataataaaatagaacaatttttaacagtrtgctgtaataagtcatgtgaatatggtttctccctctctctttcaaaatagcttcatattttcgatcatggttgaccaggtgaagtgaaaccatggataaggggagactattgaa

SEQ ID NO: 647239 - DNA, 531 bp, Homo sapiens
  misc_feature 90, 179: n = A,T,C or G
tacagatgctttgttaacttccaaatacagtccaagtgtgtgcttgtacattcattctggccattaattaaaagccacttggagagactntaagctcttaaactggattagtgaaagtgatcaaaaggaccaactgagttttggaaattgaggttttacaagacaggggggtgggactntgaaagaaccttcctaaatcagacattattggattgcctcatcacagccctaaaatgaaggccgtcattaagaggactggagtaaattcatcgactggaggtggatactatctgcacagtagatgaaacgggatggaaccaacatcagtggcaaaattccaaaagaaaatccatggtacttcttgaggctggaattattttgacactgaaagttgctttccctgtaatagtgactkatttagaacaaaatttcatagctattctcaagggacactaaaaatattttttacaggcctacattgatgaatttctgaattgaataattggaatgttgttagacacaaacatgatg

SEQ ID NO: 647240 - DNA, 624 bp, Homo sapiens
  misc_feature 21, 488, 599, 621, 622, 623: n = A,T,C or G
tgttataaaccttgacttgantaaaagaagaaagccattacttgttttccttctctaaccctatctatcttttcttatacaggtaaactacgaactgggagttctgaagaatgggtaaagactttcgttactatttccagcatccctggtctcgcatgattgtggcttacttggtgatcttctttaacttcttaatatttgcggaggacccagtttctcatagccaaacagaagccaatgttattgttgttggaatctgtttttcatttgttacaaataaataccctagaggagttggctggaggattttgaaggtgcttctatggctacttgccattctcacaggactaatagctggcaaatttctgttccatcagcrtttgtttggtaagtaccatgacccatgaaatgtaatatcactaattatttaatttctattctccaagatacaactttgctatttctaagtgccaatgtaggaggcattntagtttgtcctcctgccttaagttgttatgcatggttgtaactgggttcttcactactctctgttaatggtttacttttcctactgtctaaggaaaattagcacgaggtanaattagtaccaaacttcattannna

SEQ ID NO: 647241 - DNA, 653 bp, Homo sapiens
caagtaataaaacagagggactcagaggtttaagggatagagaattacttaggacaaatatgtgcaagcccaggtaagagaggtgagtctttgaaaattctgattcaagagctgaacaattggctgctttccagagaacaacagaatgayaatacaaaattgatttaatgagatgaggttaaaggagttaattataacgaacttggaaaaataattattaagatgctagatgggactctcccaagatttgatagctcaaaagcactttgaagtcttgatgattaaagtgtactgcacaggtacacagacaggatgcccaccaagacaggaaatggagtgtttaccaagacataacacatgatgcaattaaatggaaataaatccaatagagctgaatgtcaaggaaaactttttttttctcctaaatttaataaataagtcaattatatatttagtcttcccaggagtaggagcgaatagtgaaatatttgttgctaagaaggtttaaaattaggtgtagggtaggaataaacatttcctgggttggattagactaaaaaaacctacgatttttccctgtcatgtccatttacataattctgatactaccctagatgttgccagagtacgtgagtgttatttactattacaga

SEQ ID NO: 647242 - DNA, 569 bp, Homo sapiens
gtcaggcatggtagagcaattgccagcaggagaaaccaaggtgagatcagattccagggccaaagctgtttgcttcatactcatttttttcatacttcctgttcatctgagtgccaggatcacaggtgtgtgcttcactccacggagaactccacggggggtagtaaacatccccattctgtttactaccayggaaggcataggtaagccaagaggttctgtcactagtggggtaataaaatgccaccaacaattgctccagacaccacttggtggcaccagtaccctgaaatgattgaatgcaacctgcttatcttgttcttccatgggaaattcatataaaccttcagccaaccctcaagttcagttttttccaggattatttgagtttgtcggaactgtcacatcctcctttattgttatccatggagattctggtagaagatgagaatgtctttattttaatgatctcttattatttcaagtattcctttgaatgtacacacacagaattttgcataaatatgaccatttcttactggattttgcctatattagattcttccctt

SEQ ID NO: 647243 - DNA, 545 bp, Homo sapiens
ttcttcctgtcctcaggaagcttttgagaaagtcacagtcttgttgatctgaaaaaatagagggcaaagtttagaactgtggggtggctggaaattgaggcaaaatatctctgaaaggaaggagccaaacaatctggaaaacttatcctattatcgatttcagaactttttattaagctacaacaattaagacaggagggtagtagcagcataaggacagaacaagaaagaaatggagcagaatagagaggatagaaatacatccatatatgcatatagtcaactgatttgttaaaccatggaccaaagtaatttagtttaatgggaaaaagatagttatttttaaaaaatgtattggaacagctgaataaacatatgaaaaaartgaatctcaatctttacttcatattatacacagaaaacaaatttgaagtggatggaagatttaattaatttctaaaagtttaaaggttttaggagaaaatgtggaatatttttgtaacctcaggaaaagacaaagatcaattctttatcaatacggactc

SEQ ID NO: 647244 - DNA, 543 bp, Homo sapiens
gtgactgggagaaaattctggccagccagctctgagagagaacatgaggccacctgtctgtacctgcacctgcttttagatacccattgattcagtaaacttctaatgagtgcctactatgtagcaggcacagtcacagacatgggggatgcacctgtggacaaggctgacgcagctgccgccatcttggaatttactgtggggtsgagaggaaggatgttaccaacaggcaagtgtgagttgtattatagctgtacatatggcaagtgcttgctaagggaaatggcggaagcatagaggtgagatctttaacctggaagtgatgtccacgttgtgtcctaaggaacacataggagttagccaagcggagggcaggaatgaggtgggggagtgttccaggcaggggagcagcatgcataaaagcagaggctagagggagcacgcttgatgtgcacgctgaatgcagagaaggaggaggggagttcaggaggggaggccagagaggtaagtggaaccaggtcccaaaaggtctgattttcttca

SEQ ID NO: 647245 - DNA, 543 bp, Homo sapiens
gtgactgggagaaaattctggccagccagctctgagagagaacatgaggccacctgtctgtacctgcacctgcttttagatacccattgattcagtaaacttctaatgagtgcctactatgtagcaggcacagtcacagacatgggggatgcacctgtggacaaggctgacgcagctgccgccatcttggaatttactgtggggtcgagaggaaggatgttaccaacaggcaagtgtgagttgtattatagctgtacatatggcaagtgcttgctaagggaaatgrcggaagcatagaggtgagatctttaacctggaagtgatgtccacgttgtgtcctaaggaacacataggagttagccaagcggagggcaggaatgaggtgggggagtgttccaggcaggggagcagcatgcataaaagcagaggctagagggagcacgcttgatgtgcacgctgaatgcagagaaggaggaggggagttcaggaggggaggccagagaggtaagtggaaccaggtcccaaaaggtctgattttcttca

SEQ ID NO: 647246 - DNA, 435 bp, Homo sapiens
gagccaagacagagaggtaaactgataaactttcaggtccattcctaagtaccagtccattcttgcccaagtggcatgagctaaccctgtagctttattataaagaatccccccttgttcttttacttaagctagtcattaccagctagctgattataaataacatgtataatctaatttcctgagaatttttaaatcttttgtatgtttacgtgtgtgtgtgtgtgtgtgwgagagagagagagagagagcgtgcactcgcagctataaacacaaaactatttctttttgcgcaaactcccacaaaaactcggcgggagaggaggtaatctcatgatctctgcattaagccagcctgaaattgaactgtgtctctccgtaactcaaagccaagctatttaaatagctctcaggaaacgctttttcccagacacc

SEQ ID NO: 647247 - DNA, 574 bp, Homo sapiens
aatccaccttctaaattctttatatttaattttttatgtccataggttgaccttctgaattatttttctggcaattcagagatttcttcttggtttggacccattgctggtgagctagtatcatctttttggagtgttaaagaaccttgctttatcattaccagaattggttccttctcatttgagtagactctgtcagaggaaagatctgggattctacagctgccgttcagattcttttgtcccatggggtgatccctttatgtggtgctcttcccctttccctaaggatggggcttcctaagagccagactacagtgattgttattgctcttctgggtctagcctcccagtgaagttactgggctccaggctggtactgaggagtgtctgtaaagagtcctgtgacaggattcatcttcaggtctctcagctgtggatactagcacctgctccagtggaggtagcaggacagtgaaatgaactctctgagggtacttggttgtagttttgtttggtgcactgtttttttttttttttttttttttwaaatgctggttgggttaccagggaa

SEQ ID NO: 647248 - DNA, 609 bp, Homo sapiens
ttttattaaatctttcaaagcagagctctagggtctagagtctatgttttgtttgtttgtttgtttagacagagtctcactcctatcgcaaaggctggagcgcagtggcatagttttggctcactgcagccttgacctcccaggctcaggtgatcctcccacctcagcctcccaagtagctgggataacaggtgcacgccaccatgcctggctaattttctgtatttttagtagagacagggtttttccatgtttcccaggttggtcgtgaactcctgagctcaagtgatccacctgcctctgactcccaaggttctaggattacaggtgtgggtcattgyacctggcccagggttctgtatttaggaaagttttggaatggaaagagagggtcctggattatgatggatagatgggattgagcaaagggtagccaaaatgttctacataataaagaaacaggaatgttagctattttcctttgcagcccaagaaacttgtgatttgtaattctagatgcagggaagagactagatgtgaaaacagactctgtgggaaggaatgggcctctagaatatatcaccaagtgagagatctaatgctattact

SEQ ID NO: 647249 - DNA, 531 bp, Homo sapiens
cagcctagaaaattcagattcagaggtatagttagtgtggaacagttgaggctttttaaaattatatatatttattattacatatatatttattatatatggttacatatatatgtaaaatataacatttgcttttagactataaaataaatatattttagtgatggtaatccgttataatttactcagctatagataattcactagcttccctcattctttctttcagcacacctgaaatctttcagcacacctgaaatctttctcargagcctattctcaggctcaaagcagccctctctagctgtccctactattgcaattttgtatgtaaatgcctttcatcccgtcccagagaaaaggatatctattgctctccactcattcccctctctgagctgtccctgacgtccattatgcaagctgagatattcaggagcagaaaggtctcttgtaaaactaactgcttagcaccacacctgtcatagtaagtactttgacaatggctgacatttcgcaatgcttgtgagt

SEQ ID NO: 647250 - DNA, 549 bp, Homo sapiens
gtaaatagataatattaatatttaaaacaatcattaatgaaagatgcaacacacctaaccatgtctctctacaagaagcaaaaaagatttcagagaagagtggtgtggatcttgaaggattaacaggggtttgacaaggatcttctgaactagagagaaacataaactttcttggggttgaaaccatttattttagacttcttaatattttctctgagagacattcagcaaatatattaatttgattagagttttagtttacaatccaatgtaaaaataaattgccagttcctaaaacgtatttccaactgatgatgttagaatgctttttatagccaagttgataactatagtgagtttgtatagttggtgaggtctatttatgaaatacttaccatgggatcaaatcaaataatgatcatgaatgagcatgcaagtaaattgacctttyttaattttttgttttaaatatataaaaatttaataataatgttatctatggaaacctcagattttctgagaaaatctatgcttttgtttgaacttctc

SEQ ID NO: 647251 - DNA, 575 bp, Homo sapiens
aggggagctagtataatcttttggggggtgttatagaaccttgttttctcatatttccagaattacttttctggtttcttctatttgcgtaggctattcagtggaaagatcttgaactcaaggactgctgttcaaattcttttgtcccatggggtgatcccttgatrtggtgctctcctccttcccctagggaaatggcttcctgagagccaaactggagtaattgttattgctcttctgggtctagccacccagcggagctatcatgctctgggctggtgctggggaatctttgcagagtcctgtgatgtgatccatcttcaggtctcccagccatggataccagcatctgctctggtggaggtgacaggggagtgaagtagactctgtgagagtccttgattgtagttttgtttaatatgctgtttttcttgaatactggttatgctagcagtgaagttgtcatgtagacagactcatgacctctgtttagtcaggatgttgcaggcagtggaattaactgtagttttctctttccttggagcagggttattctgttatgagctgctgtaatg

SEQ ID NO: 647252 - DNA, 522 bp, Homo sapiens
agctacactagaccttctgtcacctggttgcaacattagtgtttttctactccaatatgttcactgtcttctttgtgaagaagtagaaacttatttctttttataaaaaaagtcggatttcaagttctaaatatgcaatttattttctgatgaatatttccctttaagaaacagaacgtttggaatagtgaatattctaagcaatcagtcctgcgcaatttgtataatcattttatatgttagccatgtttgtatttttccacatgaaaacaactgtcatgtttaaaatacatttcatgtaaaactgccagcagcacagctttgaaatagatttttatcctatagaaatgcagaagagtttaacaaaaatgaagaaaartctgtcaaagggttgtttttccatgttggcatcgtaggcacttaatacctggttcttgaaaataataacaatgggtgttagcattcatgatacatgcactttgctcatcaggtgtgaatcaacaagacacaatctgaccttcc

SEQ ID NO: 647253 - DNA, 564 bp, Homo sapiens
  misc_feature 515, 554: n = A,T,C or G
aggaactgggggaagagagaaatgggaggtgctacatacgtttaaacaactagatcttgtcagaactcactatatagtaccaagaggggactgtacaaaaccattagaagccaccccataatccactcacctcccaccaggcccaacctccaacactggggattacagttgaacatgagatttgggtggggacagagatccaaaccatgttattccaactctggcccctcccaaatctaatgtccttctcatattgcaaaatactgtygtgccttaccaacagttccccaaagtcttaactcgatccagcattcattcaaaagtccaaagtcccaagtctcacctgagacgaagctagtcccttctacctatgaacctgtaaaatcaaaaacaaggtaattgcttcaaagatacaatgggggtataggcattgggcagatactgccattccgaaagggagaaatctgccaaaagaaagaggctatagggccccattgcaagtctgaaagccagcngggcagtcattaaatgttaaagctctgaaatatctcctntgactcacac

SEQ ID NO: 647254 - DNA, 416 bp, Homo sapiens
atttcaggcaacaaattctttgaaatctttcatttccatagtgagataaggatcagttatgtggcattgtcagccagaaaacatcacttaaagactatcttgtacartaagtacaaaacatagctggcggcctgcggaggacagaaagctcacagcttctgtccatacccctttcacttcctcctcaaggagatggacctctgtggttggtcaagcttaaggatcttttatgggccacagctaatggtgaaatcttcctaactctaggtgaagattaatgggcaagttggagagttaaggtagcttgtggctgctccttttagaaggaagtctgatcattgctctcttatttgtggaacccctctgttcccccaaatgcttggtaagacatgcttgaagaccaatcctgtgtcagt

SEQ ID NO: 647255 - DNA, 416 bp, Homo sapiens
atttcaggcaacaaattctttgaaatctttcatttccatagtgagataaggatcagttatgtggcattgtcagccagaaaacatcacttaaagactatcttgtacaataagtacaaaacatagctggcggcctgcggaggacagaaagctcacagcttctgtccatacccctttcacttcctccwcaaggagatggacctctgtggttggtcaagcttaaggatcttttatgggccacagctaatggtgaaatcttcctaactctaggtgaagattaatgggcaagttggagagttaaggtagcttgtggctgctccttttagaaggaagtctgatcattgctctcttatttgtggaacccctctgttcccccaaatgcttggtaagacatgcttgaagaccaatcctgtgtcagt

SEQ ID NO: 647256 - DNA, 416 bp, Homo sapiens
atttcaggcaacaaattctttgaaatctttcatttccatagtgagataaggatcagttatgtggcattgtcagccagaaaacatcacttaaagactatcttgtacaataagtacaaaacatagctggcggcctgcggaggacagaaagctcacagcttctgtccatacccctttcacttcctcctcaaggagatggacctctgtggttggtcaagcttaaggatcttttatgggccacagctaatggtgaaatcttcctaactctaggtgaagattaatrggcaagttggagagttaaggtagcttgtggctgctccttttagaaggaagtctgatcattgctctcttatttgtggaacccctctgttcccccaaatgcttggtaagacatgcttgaagaccaatcctgtgtcagt

SEQ ID NO: 647257 - DNA, 416 bp, Homo sapiens
atttcaggcaacaaattctttgaaatctttcatttccatagtgagataaggatcagttatgtggcattgtcagccagaaaacatcacttaaagactatcttgtacaataagtacaaaacatagctggcggcctgcggaggacagaaagctcacagcttctgtccatacccctttcacttcctcctcaaggagatggacctctgtggttggtcaagcttaaggatcttttatgggccacagctaatggtgaaatcttcctaactctaggtgaagattaatgggcaagttggagagttaaggtagcttgtggctgctccttttagaagraagtctgatcattgctctcttatttgtggaacccctctgttcccccaaatgcttggtaagacatgcttgaagaccaatcctgtgtcagt

SEQ ID NO: 647258 - DNA, 471 bp, Homo sapiens
tcgttaccactattgtctctttataagtaaaattactagttgctattataaatgattattcaatcacttttcatttttggggggttcagtacaaagttagtaacaaataaacactattggccttggcaatgcaagaggagctcaagtcctccagggcacgtcaggaaaaggctaaatgacagctgtgctgtgagtggacagaatacagctctcatacagactattgagtatttgatgttcttcaacaatttcattaatcttcagtttttttcctctttgaagtgaaagtctgctatgactttyaagtttcttttgaaataattatagattcacaggaagttgcaaaaggtacagggatgtcttaggtactactcactaattccagtggtgacatctcacatagctatagagcattatcaaaacctggaaactgacataggtacaattcagaaagcttactcagattgcaac

SEQ ID NO: 647259 - DNA, 484 bp, Homo sapiens
caaacacaaaatccccgcgtgccggggcacrttgagagattccttctgcctgcgcagcctggctaggctggagcggtgggacggcccttgctccctggctcacgaaagccccctgtgggagagccccaggcatgcagggtgtgtggggtgcggcaagccctgttccccatgccccggtgtgggtgaactcgattgaggagggaggaggatgacatccgccgggggtgttaattagtaagcacagtggcctcaaagagctcaaatgaaaggaagaattgcacgtctctcacttgaagtccagagctagaaatgattaagcatagtgaagatgtaaaattttcatcgctagagagatgtccacacttggcttcaaaacttcaaaggatgggctgactctctttaaggaccactgcagttggtgactttaagttacagccagtgctcattgaccactctgaaaatctcagggccgttaagaattatg

SEQ ID NO: 647260 - DNA, 581 bp, Homo sapiens
gggaagcactcgtaggccctgtggtctctgtcgtgtctgctgaagcctgccgtagtagcgtggaagcagtcagagatgacgtgtaagcaaatggtcccgactgacctccggtaaagcattgattccggaagcatttaacagacctaacaacctttcaaaccgcatggcgtttctttcccggatcccgtttcaggaacgtttctgttggcttacaaggaccgtctccaacatgcttaggctctgtgaactttcccaggatcctgagtagggtatccgccattcgtccttagggctccgggatgtctcgttcttactgtgtccctgccaaccctggtcccatctcgtcatgatcacccactgcagaagagtggaggtgctagagtgaacagggtcaggggagccccgttcatccccagggtcccagaatgaaccagtgttaccatgtacccctgcccttgccttcctccctgctctaatggccgtgtgttagccggagatcagtttgggtctgggtgctatgggtctgttgcgcctgtggccttggtcyggcctctgtccttgtctctgtgaaatgagagtga

SEQ ID NO: 647261 - DNA, 580 bp, Homo sapiens
ttagtcagttttcacgctgctgataaagacctaccagagactgggtaatttataaagaaaaagacatttaatggacttgaagttccacctgactggggagccctcacaatcatggcagaaggtgaaaggcatgtcttacatggtagcagacaagagagagaatgagagaatagttaaaggcgaaatcctttataaaatcaacaggtcttgtgagacttattcactaccatgagaacagtrtaggaaaagccaccccataattcaaatatttcccactgggtccctcccacaacatgtgggaattttgggagctacaattcaaggtgacatctgggttgtgacacagccaaaccataccatagtccatcaaaatagaaagaatggagctaacttattactcagtaattccgctgccaggtacatgcccaagagaaatgaaaatatacatccacaaaaagtgtctacacaaatgttcatagcagcattattcataatagccaaatcataaaacaatacaagtatccataaactagtgaatgcaaaagcaaaatgtggtacatccatacaatataatattatt

SEQ ID NO: 647262 - DNA, 563 bp, Homo sapiens
ctaccactagatggcacgatcagcacagccagctggtgaaaacagctctgaagtctaagggaaagggatcccacttcgttttcttttctcaggatgaagtttggaaataattatcacagatgtactgaagaagtcttcatttttgctgtaaatcatgtattaccatcagagattttcttgggcagtagacttccctgaggaatggttggaagtgaggcctagaaactggagtggtctctttgaaacgtcgtttgatcatgtccttcccatacatgcctcttttatcgtgtccttcccagactttaatctcactgtggtttgctgtcacctattcaagtacatataaaataagtcactcagggctgggtgcggtggctcatgcctrtaatcctagcactttggctgaggcgggcggatcacttgagttagagtgaaactctgtctggaaaaaaaaaaaaatcactcaggttgagagtgagaggcccctagtcctgcccctgaggcaccacagtggagccctggaactccgtgagccatggctgaagaaccactgcaggaggaag

SEQ ID NO: 647263 - DNA, 229 bp, Homo sapiens
ttctattagccaatgaataacgtccaagtaaatttttgttttattttgggaactttgtatattgaattctttgttttacacgtaacccacaaaraaatgttgcttcatatggcagctgcactcagagtactaagataagcatgtgtttagacattttctagacattttcagagtgctccgacagctggggttcttttggaaagaaatggactgaaagtgggtgggtttt

SEQ ID NO: 647264 - DNA, 229 bp, Homo sapiens
ttctattagccaatgaataacgtccaagtaaatttttgttttattttgggaactttgtatattgaattctttgttttacacgtaacccacaaagaaatgttgcttcatatggcagctgcactcagagtactaagataagcatgtgtttagacattttctagacattttcagagtgctccgacagctggggttcttttgkaaagaaatggactgaaagtgggtgggtttt

SEQ ID NO: 647265 - DNA, 503 bp, Homo sapiens
ccctgtccagctcccattccatcccactgtgaaccacctccaccaatcaataaaacccccacattcatccttcaagtccatgtgtgactgggactctgtacagagctcagggtacagaaagttatcacactggccccctgtccctgcaaaaaaggcaaagggtccactgaactggttcacccttaagccacccggggacggcaaatctaagagagtgcactgtaagatgcaccgacttgggctttgggagtcgcagacacccacccctgaatgctgccttggcgccggagcccaaaagcacttgcctggttcctgcacctgcctgtctgcatgcatcccctcccrtaaggggattgagctccaggcagccaaacctacagccacacccctgtcacatgccctgcgaggtgggtgcggggaactcccatttcagtaagttccaggtgagtcttagccatccaccaaagtatcagctccacaaaggcagggatttgggtttgttt

SEQ ID NO: 647266 - DNA, 503 bp, Homo sapiens
ccctgtccagctcccattccatcccactgtgaaccacctccaccaatcaataaaacccccacattcatccttcaagtccatgtgtgactgggactctgtacagagctcagggtacagaaagttatcacactggccccctgtccctgcaaaaaaggcaaagggtccactgaactggttcacccttaagccacccggggacggcaaatctaagagagtgcactgtaagatgcaccgacttgggctttgggagtcgcagacacccacccctgaatgctgccttggcgccggagcccaaaagcacttgcctggttcctgcacctgcctgtctgcatgcatcccctcccataaggggattgagctccaggcagccaaacctacagccacacccctgtcacatgycctgcgaggtgggtgcggggaactcccatttcagtaagttccaggtgagtcttagccatccaccaaagtatcagctccacaaaggcagggatttgggtttgttt

SEQ ID NO: 647267 - DNA, 563 bp, Homo sapiens
tgaacaattcactttgtgttcttgggttctgctttctcgggctgttctctgtctataaagctgacctctttggctcagctccgtgaaacactgattctattttgtggaatgaagtgttttctgattctagaatagcaaataaagccaactgagatctttaaactaaatttgttgcgattttgtcttttgacactactcactcataatttagattcttctaaaagatagccagctgttcttttcataattagtaagatatgggaaataaatcaaaagtcttgataattgtagcaagcagatttgtcctttaggagacccttaccaaaaacgggagttggggtacactgaaataactctataaatagctgccagttttatcgagcttatcatatgtgcttggcattgcatttagtctcttacagactgtgtttaatcttcatagcaactccaggaaattattggcatactcataaggaaaccaatgaaactaacttggagagcttaaataatgtattcaaagttacayagcaagaaagtggtaaagtatcattaaaatacatttc

SEQ ID NO: 647268 - DNA, 472 bp, Homo sapiens
ttagccactcttgattatatacaaatgcaattaggaaaattcaccaaaaatttgtcatgtaatatcaaaaaataygtaccagggaggtttctgctggtgccaatcctcaaatgttctgcttttctcttgacctgcataagcagattgcatcttgcgtgcaaggtggcctggacatgtaactagagaaagacctatttgcatttattctgaaagctatctgaatcatgataaaataggggtaatgctggaattttgatgtttagtaggaatcatcaaaagagtaaaatattctcctcaagtgggtcctgaatactctcacttatgcatctacttacatgcatgccaaaaaatgcaaaaccctctcgtttatattttttacatcagctttatttaaccactactactgctagcatgctcaccacacaccttcaatatcaatgaaactatacatttatttgtaagcaacagatta

SEQ ID NO: 647269 - DNA, 472 bp, Homo sapiens
ttagccactcttgattatatacaaatgcaattaggaaaattcaccaaaaatttgtcatgtaatatcaaaaaatacgtaccagggaggtttctgctggtgccaatcctcaaatgttctgcttttctcttgacctgcataagcagattgcatcttgcgtgcaaggtggcctggacatgtaactagagaaagacctatttgcatttattctgaaagctatctgaatcatgataaaataggggtaatgctggaattttgatgtttagtaggaatcatcaaaagagtaaaatattctcctcaagtgggtcctgaatacwctcacttatgcatctacttacatgcatgccaaaaaatgcaaaaccctctcgtttatattttttacatcagctttatttaaccactactactgctagcatgctcaccacacaccttcaatatcaatgaaactatacatttatttgtaagcaacagatta

SEQ ID NO: 647270 - DNA, 617 bp, Homo sapiens
ggctcttggaaataaaaaagaataatgtgtgaaaattctagagccttacagagtatggggcaggaagatggtgttggtagatgaaccagtggtgggctgtgataatttcaggaggtttgggagatggctgctggtatcttgaagagtttacatgcagaaataacagaggaactgctttagtttctccagaaatatctggatgctaaagtttccaggccaaactgagaggtgggacttgaggcacagcccaagagccccagctgtcaccagcagggaagctgaatgtggtcatgtgtaccrggagcagcaggcaagttgaaagcagtgattggtcagaagcagattcatcagggcttctaaagatcatcttgccctgcttctgacccaggtaggtcagtgcccagtccattctttgtaggtgtcaattcaaagactccccagaggagcagatggcccactgtccccaagaagctcatgcctgtgtcttattcccttagctgtcaggcatagtaggatgccagatccaggcatctggcagggatgagaaagcaggcagagagagcagggagagaaaatcaggtaatgccagggagctttcatgagggattgagtaagga

SEQ ID NO: 647271 - DNA, 611 bp, Homo sapiens
cagccacttctacatgaaggcagaaagttcattcggtggcattacagtgctactccatatatatgccgtgggcatggagagtaagaaaaatggcatttagatagggcgggagtgcggggaggtgagggtagggctaacctgctctcttataggagggttttcttttcctttcagataacatgcaagtcttaacctgaatttctcttttttgaaatacaccctttttaattgatggactccatagatgagcttcagcatgtgaaaattcattctactcttcctagaacctagactaatgcctactctttccccagagacctgttttatrtactccaaaggactgcagatttgtagaccatctgccacaagagaaacgtagcttccaccaagatccactttcttcattttcccatcctggagcccctcctccttgcggcagccaccccagcgagccagaattgtcacactgacttctcagtgaaagagaaagggctttgagttaggctgtgaggagaagcacgccataaagttaccagcttaattaagccattacagtttttaggggtttttaaatacaggcaatttgaatgtataattgagcctgtgcacag

SEQ ID NO: 647272 - DNA, 611 bp, Homo sapiens
cagccacttctacatgaaggcagaaagttcattcggtggcattacagtgctactccatatatatgccgtgggcatggagagtaagaaaaatggcatttagatagggcgggagtgcggggaggtgagggtagggctaacctgctctcttataggagggttttcttttcctttcagataacatgcaagtcttaacctgaatttctcttttttgaaatacaccctttttaattgatggactccatagatgagcttcagcatgtgaaaattcattctactcttcctagaacctagactaatgcctactctttccccagagacctgttttatgtactccaaaggactgcagatttgtagaccatctgccacaagagaaacgtagcttccaccaagatccactttcttcattttcccatcctggagcccctcctccttgcggcagccaccccagcragccagaattgtcacactgacttctcagtgaaagagaaagggctttgagttaggctgtgaggagaagcacgccataaagttaccagcttaattaagccattacagtttttaggggtttttaaatacaggcaatttgaatgtataattgagcctgtgcacag

SEQ ID NO: 647273 - DNA, 516 bp, Homo sapiens
ctcatcctgtgttttccttggtctgctcagaaccagattgtgaatggaaagcagctggggtaacatcctgtgggggtggagccagttctttatttctactgcagtctccacaatggatttttgaattgctatttcttctcttggcttggcccaaaagtgaggggctcgggccctcaaaatgtcaggtacagaggccaacccaggggcaatacttgtgtgactgggagcctgtcctgrgtgatctcaggaacatcactctgcagattcttctgtagaaaaggctacagaatatgcttgagggaaaggttctctttggaaaaatgattctgaacttcagccctgaggttaaagagagaaaactaaggaaagagattgcaactcaatgttcttcaagttcgactagcagaaataaacgtcaatttaaatctccccttaggggggaagtgtacgtttggggaaagtacaaaatgcccatcacatatgctgtgaacataattcagcactctgcaggccagg

SEQ ID NO: 647274 - DNA, 516 bp, Homo sapiens
ctcatcctgtgttttccttggtctgctcagaaccagattgtgaatggaaagcagctggggtaacatcctgtgggggtggagccagttctttatttctactgcagtctccacaatggatttttgaattgctatttcttctcttggcttggcccaaaagtgaggggctcgggccctcaaaatgtcaggtacagaggccaacccaggggcaatacttgtgtgactgggagcctgtcctgggtgatctcaggaacatcactctrcagattcttctgtagaaaaggctacagaatatgcttgagggaaaggttctctttggaaaaatgattctgaacttcagccctgaggttaaagagagaaaactaaggaaagagattgcaactcaatgttcttcaagttcgactagcagaaataaacgtcaatttaaatctccccttaggggggaagtgtacgtttggggaaagtacaaaatgcccatcacatatgctgtgaacataattcagcactctgcaggccagg

SEQ ID NO: 647275 - DNA, 476 bp, Homo sapiens
gtaactgtgtaaattgtgtagcatktctagagaattgtactatatcttaaaatatgcaggcatattaatctagaaatgtattcaagcaaagagaaaaaacgtgtgaaaatatgttcattgcattaatgtctgtaatactaaaaagaactgaaaacaaattgtgtccatcaataaaagaactggacaaattatttataagccatacataataaaacattatgcagctgcttaaaattacagttttttggggatacctaagacatgagtgaactaacacaaatataatactgaaaccattggctaaatgcatttattgatgtatgactggaatggagaaatggaatagagaaaattcaccagaatgttgacagtggttttctatgaatggagggtcttagcaggtgttgtcaatgctctttccatacccactagcttttgtttttcctatgcaagcttttctgtgctctactggcaat

SEQ ID NO: 647276 - DNA, 556 bp, Homo sapiens
tacattcaatgcagttattgataagtaaggacttacttgtgccattttgttacttgttttctggttgttttgtggtcttctcttccttcttttttttccttcctgtcttcctttagtgaatgtgattttctttggtgatatgatttagtttcttgctttttaatttttgtgtattcattgtatgttttttggtttgaggttactgcgaagcttccaaatactgtgttataacccattattttaacctgataataagttaacactgtttgcctaaacargcaaacaagcaaaaagaaaactaataaaaactttacatgttaattttataatcccatttgtaaactttttgttgtccctatttatatctcactctactgctatgtcttgaagagctgttgtagttattatttttgattggttcactgtttagtgtttctgtttagaataagattagtttacaccacagttacactgttataatattctgttatattatattattttctatgtatttactattgccagtaaattttgtaacatcgggtgattatttact

SEQ ID NO: 647277 - DNA, 515 bp, Homo sapiens
agaattcagcttaagtttgaaattctcaacattgacaaaatcagtactagttgacaacagatttagctgcccaagaggccagtgtgttcctgggcttcactacagccctgcagacactctgccctgaactgatcagactgtgcttggacaaccaccgacagttcccatctggaaattrtaaaagggacacggcaaaatggaatgtgctcagcatcacatgctaagattagacccataataaaaatatttatataatcatgttatttaacatatggatttaactgattttaaatttttagaatgaacctacagacaagctactaaagacttagttacatgtacagaatagaatgtaaacttggacaaggtaaataaaataatatggtaaaaaccgggaagtatatagaaagaagaggctaaaaattaggggacattagaagttctcaaggggcagggcttcaagatgatggactagagcatctatcagctgcccctccacaaagaagaataaaaca

SEQ ID NO: 647278 - DNA, 345 bp, Homo sapiens
agcctttctgtccaaacaacttgaccttactgttttagcctagccctcatgtctgcgtgcagcggctgccgctgctttaatacttttagaggccctcaaaataagtagaggcctttcctacagggtctgagaaggccaccgcagtcatttcttccgttctgtcagacataattcctcagtttagccttcccacctcaatacagtctgataactgtatttattagtcaaatcagccaagcagtttttcaggctcttagtattcagtgaaacctttatatcccttayggtcctccatcttcaagaaaagtagaatggactaaaggtcttttaaaaacatatctcacc

SEQ ID NO: 647279 - DNA, 479 bp, Homo sapiens
accagcatatgtctgacatatttagcagtgctgactatattttggctgggacccactatatctttgmtccaggtagatgggtttgtattggctacattaataaggacagtaaaacctaatatccaacacacaacttgtctaaggtccattcagaatatattacataatgtttttgcttcatgatatttggcagaactcttggaactcttgactttcccacaatttcatttcccaccttatcttttctatctcataaatgttactcctgtgttcaatcaaaatataagccagcagttttcaaactttttgttatgatgatctcttcatacttttaaaaagttgaggatttcaaagagtgtctgtggataaattctatctccagctacttaccatgttggaattttaaacagagagctttgaaagcaccaacacacactagccatcatggtgcaggtgccgtttcaaggcaccaagttcat

SEQ ID NO: 647280 - DNA, 600 bp, Homo sapiens
attcttgtagtcattaagcacaggcccaggcaggtctttgtgaaatgggtttccttaatcacatcactgtcactattagtaggaaatattggacaatatataggtttcataatgtaagacaaatttttttctggaactgaccgcatttgcacaaaaccatcagtcatgttggcattagcatctttttccatcacagatgaggttcgaaaaagcatttttccaattcagcttcccccagctgcacactttatcactccccatcagctatcctcctaagagatgtattattgcartatatttggagattccacaaaggagcatgggccctgaaatcaatcacactgcctaatttcaaacctaccagtaactatgtgagtgacctcggttgagctactcaaactcattaagccacagtttcttcatttgtaaaatagggaagagtcacataactcttcatgttactaacgatgattaaatcatatggaaagtgttcagcacagtgccttgcctgtttcaaatcaggcattcaaagactgtaaactttattataattataggacaacatgaaaagctttagagctaaagaataaaactttctca

SEQ ID NO: 647281 - DNA, 610 bp, Homo sapiens
gctaataagtagaggagaagattctcaaattttttaataaccaaagaaatacaaattaaaatgacaatatagcactttattcccattagattggcaaaacttagaaagaagaataacaccaggtcttggtgagatatgaaaaaaacaggagcatttttgcacactggtgatgagttatacaatgacatcattctggaaagtcctctgacagtgctatctaaattagacaggcaggtatctacagaaatttcacccttggatatgtttctggagtccttattaaacaagaccataattggatatacgttaataagtttttgcagggtttatggtactgagaagtaccacaacacatcctaggtagtagataagtaaaatgcatcctaggtagtaggtaagtaaaacgtggtggctctacaccagggaattttatcaggagttagaaagaacaaactagatctatacaaaacaacataaacagatcccaagcactcagaagtgagtgacaagtgagaaagcaaatgggatctccaaaagaataccatttttataacttamaaccataggcccaaagcattacatattctgcaaagatattttgtaacgtgtt

SEQ ID NO: 647282 - DNA, 503 bp, Homo sapiens
agccttcacatcttccatgtctccctcctccattcttcacactaaacataaggcatagtaaattatttcccttcttataaacccatacttcataaagtgaagcattatatgaagatgaactctgatcaagttatcatggtgatctactaaaaattttgtatttgaaaatttgaccataactgtcttctttaaaaaaaaaagttcactttcacagcatctatttcaatgttgtagttagtctcaacttgcaagcagttgtgaacatcattacttatctgtctgtggcatgaccttcatgmgtgataaaattatactcacttttcttttaccacatcaatttgtatgttgatgataaactttgtctatttgatttaattacagaatgaaaccctaagtattagtctacagctatgctataatgtggcagactggctaggtgttcaccatgctgttctattttcctcctggatccagtagacattcttccaggcaggtggggccac

SEQ ID NO: 647283 - DNA, 510 bp, Homo sapiens
tctatgagatccatttttttatattccacctatgagtgagatcatgcagtatttgtccttatgtgtggagaaaggggaattcttatacactgttggtggaaaagtaaattagtacagccattatggaaaacagtatggagtttccaagaattaaaaatagaagtaccacgtgattcagcaataccactgctgggtatatatacaaaggaaatgaaatcagtatgtcaaagcgatatctgtactctyatatttattacagcactattcacaatagccaagatatggaatcaacctaagtgttcatcaacaaatgaatggattttttaaatgtgttatatacatatgatggaatactatttggtcataaaaaacaaagtcctgtcgtttgtgagaatatggataaatctggaggacaatgtgttaagtgaaacaagtcaggcacaggacaaatattgcactggttcttgacttgtctccctctgtgtagtaattcagagtctatggtaaaat

SEQ ID NO: 647284 - DNA, 534 bp, Homo sapiens
taaagtatttagcaaatctaggccgggtgcagtcgtcacgcctgtaatcccaacactttgggaagccaaggcgggtgaattgcttaaggtcaggagtttgagaccagcctggccaacatggtgaaaccccatctctactaaaaatacaaaaattagctgggcgtagtggtgggcgcctgtaatcccagctactcaggaggctgaagcaggagaattgcttgaacccgggaggtagaggtcgcagtgagccgagatcatgccactgcaccccaacctagggggttatttagcaaatctaatatgtgacctgcctaatttagaccaaatgtctttacttatttcccaaagcttactaaagtcacatgaactaaaaggcattacagttttaatttttcttmcaaaatttttctatttaagagctcttctttttaagccaattaatcagacctcttttatatacaaacgtcacacacagaacacataaatacatagaaacacagaagatccagtagttgtaagatgtttcatttgcca

SEQ ID NO: 647285 - DNA, 497 bp, Homo sapiens
catgaatttaaagactaaatattaggatgtccttctccccaattgcatctatacatgcaattcaatctcaacaaaaatatcagcaatttactttgtgtatatcaacaaactattttaaagtttatacaaagaaacaaaggactytaaattaccaacataattttggagaaaaataacaaagtcagagaagtgatactacatgactgaccagtaagacttcaagacttactattcagctatagtaataaacacagagttgtcttaacaaaagtatacacaaaaagactaatggaatagaaaaatgagcccaaaatgacacccacactagaacagtcaacttgtctttgccagaggagaaatggaaatctgacaattggtgctgaaaaaattaaatgttcacatgcaaaaaaaaaaaaaaaaaaaaaaaaaagaacacagatcttacatcttttgtaaaaactaactcaaaatagattataaacctaaatgtaaatgca

SEQ ID NO: 647286 - DNA, 593 bp, Homo sapiens
actttttatccaaggacacacataggcagaaagtgaagggatgaaagaagatattttgtgcaattgacaactaaaaggaagccagagtgtctgtatggtaaaatttaagtcaaaaattgtctctagagacaaaaaattttattacataatgatgaaaggctcatttcagcaggaagatatagcaacaataaatatatatgcacccaatgtccaagcacctgagaatatgattttaaattgagaaaattgaatggggaaattgatagaaatataataatagtaggagacttcaatagttaaccttcaataatgaatagactatctagacagaaaattaataaagaaaatggagacttgtacaaaactatagtacaaatggccctaatagatatatacagaattttctaccctacakcaggagagtatacagtcttctctagggcccatgggacagtctcgagaatagctgacaggttgggtaatgaaacaaatcttaacaatttatttttttaccccatctgagattagtctttaaataagaaaagaagcatttgtcctactcatgtatgagttctgctattgttattaatttt

SEQ ID NO: 647287 - DNA, 395 bp, Homo sapiens
actaaggccactaacctctcaaaaggggcatagcttaagggagtggtgttcagaggatggccctgggtagggaggggaaggctccrggactgacagacttagatataatggggtagaaggggcagtgaagtttaatctaagctccgcccttggttccttcagggttgagccctgggtaaacccaatcatgaggtcttctgaaccaaatatagggggctgccacagctattatcactggatccattttacaagtatgacataggtcaggattctttcttaggtccatgagggcctgtacatagggtatttacagccattttccctgctggcagcaaaataaatgtagttaacagatcatattaaaattatgtttccattttccagccaagatttct

SEQ ID NO: 647288 - DNA, 515 bp, Homo sapiens
  misc_feature 1, 2, 3, 4, 5, 6, 7, 8, 9, 10, 11, 12, 13, 14, 15, 16, 17,18, 19, 20, 21, 22: n = A,T,C or G
nnnnnnnnnnnnnnnnnnnnnntcttctttaatggattgtgtttttcatgcagtatctaagaattcatggccaaaccgtagttaatctacctgtttttctgctgtctgctgcgtagttttatagtttggtgtttggcacttcattaaaaaaaatagtgttttctactatatttgtcgtgatatccaaaaattccccacaaaaaataaaaagtcttttctgactagttattttctacttcttctatggatttaaatcgttttagtctactagcttataaaaatgagtattttcccttgaaacaatttttatgtgcttttggctaaatgcatagtttamaaatagactgcagatgagctaaagataaagagaactgttatcttcataataataatagaagtgcttcctggtaaaatttgccctgtagtcgtagtcatctttagaatgtctaagggattgcttctatcaagaagcctataattgctcaggtctcatcttcaaggttaggacagaccac

SEQ ID NO: 647289 - DNA, 457 bp, Homo sapiens
aaggacttatattcaaggaatgacaaggagttctataggttgtgtcaagagttcaaaatgaatgaatgagcattggggccaaaaatgaatttggaaaggagtttaagcttgattttcggggggctttcatcctaaaagcaataatccatttcaaggctttcttttaatggcttaattaaataatgtaatcaaatttgtgttttagaaagttctccagaaggaggcaagatggtagataagtcaacttgttgtattttttaggaatgtcaggtgagaaacaatgggagtctgaactaaagtaatagcagcagcaatgagagtaatgggacattaaaaagatattttgaagtttaaatgaataagaaattatgaattgtaagacaaagaagataaaagggaagaaaaacacataataaacrttaagttttcttactcaggtgctgctagtgataaagtt

SEQ ID NO: 647290 - DNA, 567 bp, Homo sapiens
tgtttagttggaatttttgtgtatggtgtaagataagggtctaatttcatttatttgcatggaacccatatttcgcagcactctttattgaagagagtatcttctctattgtgtcctcttagtgcctttgtcaaaaattagttgaccatgtatgtttgaattcatttctggactttctattcagttccactggtctctatatctgttttgaggccagcaccaaactgtgttcattacyatagctttgtaatataactttaagtcaagaagtatgatgcccccaactttgtctttctttcttagaattgttttggctattgagatcttttatggttccataggaaagttaggattgcttttcctatttcttcgaagaatgccattgggattttggtaagaattatgttgaatatgtatattgctttcggtggtatggccattttaacaatattaattcttccaatctgtgagcattgaatatctttccatttatttgtgtctgcttcaattttctcatcaatgtattatagttttcagtgtacagatcttttatctcctttgttaaat

SEQ ID NO: 647291 - DNA, 634 bp, Homo sapiens
ccagagaaaaacaaaaacaaaacaaaaaacaaaatacatgaattaacatgcaattacaattcatgataaagactgggaaagagaaggaagaaaaaagccatgaggctataagtaacctaaaagatgagaagaatcagccatagggaaaagagcatttcaggagagcaacagcatgaattgaggctgggaatgggcatgggggaaagagaaggctggtggagatggagcacagtgagagaaagagagggatgcagggtgaagtaaaaaagagaattggaggctttgcagccaagttaggaaatgtattgtgaatctaattttaataagaagccattgaagaatttggtatcagttgtttatggtgacattgggtttggagaaggggcgagagaaatagaacatgggaataaatgttaaatcgatcttctttatgattatgaatttgaatatatacttataaaaacaatttagcatttctttcacttgraaatactctccattgatactttcttcaatttctccaggattattctgcagtctttgggggtacttatattgtccatagagatttaatcaatcaatcattgaatctatcaaccattatttcttcctttaattcaagaaatttttatgt

SEQ ID NO: 647292 - DNA, 598 bp, Homo sapiens
catatcacaaccagtacattaacattgatacactttttccctgttttacatgttttatgtttgtgtatatattgagctcagtgcaattttgtcacatgtgtaatttattgtatccattacctcaatcaaggtacaggacagttccatttctgcaattatcttcgtattgctcttttaaatcatattcaactccctgtcaatctcaaacccaactatgtctctcctacctggcmatcacaaatctgtgcttcatttcgtaaatgggatcacaaagtatgaagcctattgggattgccttttttgactccatgtaattctctggagattcatccaaactgtacatctatagttcattccctttggctgtgtaataatccgtggcatggatgcaccatattttgatataggtgttgtttccagttttgagctattacaaataaagctgttatgaacattcacctgtaggcttttgtttgaacataagttttatttctctaggaataatccccaggggtcaattcgctagattgtatgtttagttttaatgcagaactgttaaacatttttttttccagagtgggtgtaccagttcacaatc

SEQ ID NO: 647293 - DNA, 330 bp, Homo sapiens
gaggttgcagggagccgagatcatgccactgcactccagcctgggcgacagagcaagaatccgtctccaaagaaaaaacaaaaaaaaacaaacgccatctgctacccactttgtgcctggccccaaggcagcctccagtgcagggaaacagccaaacacagacayccctggccctgtagggtcaggggtatagacgagagggtgggagagaggctgcaggagccagagaaggggactggggagagagatggcaactgtctcgatgcgtctctcccctctccttccagaaccagtggctctgaatatcagcgtcggaaccaacgggaccac

SEQ ID NO: 647294 - DNA, 473 bp, Homo sapiens
cccacatgttgtgggagggaccctgtgggaggtaattgaatcatggggaaagttctttcctgtgttgttctcaggatagtgaataagtctcacgagatctgatggttttataggggagtttccctgcacaagctctcttctcttgtctgccaccatgtgagatgtaccttgtaccttctgccatgattgtgaggcctccccagccatgtggaactgtaagmccattaaacctctttcttttgtaaatagcctagtcttgggtatgtctttatcagcagcgtaaaaacggactagtacaagcatttaaccagatatccgggtatcctgtgactcagtgcaggtgaggcataaaatgaaccatcacagcctccaatactgtagtacctgctggagataaacagatgactaagacttacttgcagatctcaaggctctcagaagaccaatgcagcttttttctttccctctgttgt

SEQ ID NO: 647295 - DNA, 560 bp, Homo sapiens
tcgagtgttataatctaagctttatctactttagggggcacccaagcccactaacactgtggttcttgcagactcatagaggtaccaccttgatgatctggattatcaggcacaaactcttgttctgtttttttactttctcccaaacatacagcgactttttctctgttctgagccacctaaagctgggggtggagtgacacaagcacccctgtgaccaccattactatgactgtgctgggtcaaacctgaagccagcacagcactgggtgtcacccaaggcctgcygtaaccactccctgactactgcctatgtttactcaaggccctggggctctacaatcagcaggtggcaaagccagccaggtttgtgtccttcccttcaggatggagaggtcccccaggccctggatgggtccagcagtgctgtctgggagtcagggactagagtcaaaacacttagaagtccaccttgtgttctattgtgctgctgctaagctggcattcaaaccacaagatgcagttagcaggcgatgaatactcccaggacagggcccttc

SEQ ID NO: 647296 - DNA, 563 bp, Homo sapiens
cttggctcccaggtagctgggactacaggcgcacgccaccacacctggctaatttttctatttttagtagagacgggttttccccatgatggccaggctggtcttgaactcctgacctaaagtgatctgcctgcctcggcctcccaaagtgctgaacccccaagcatgagccaccaygcccagccaggatggcagttttctacatagctaaacatattcttactatcccagcattgcactcctggaaatttatgccaaataaattaaaacttatatccatacaaaaccttgacataatgttcactgcaggtttacttgtagtagccccaaactggaaacaaccaaaatgtcttttaataggagaatggttaaacaagctattgtgcttaattattgatacatgcaaaaacttggatggacctcaaaggcattatgctgagtgaaaaaaagccaatcatgaaaggtcacatattgtatggatttatttatattgcattctcaaaatgataaaattatgagtcaccatgccttatctgaagcaagcttccccattataatctgat

SEQ ID NO: 647297 - DNA, 563 bp, Homo sapiens
cttggctcccaggtagctgggactacaggcgcacgccaccacacctggctaatttttctatttttagtagagacgggttttccccatgatggccaggctggtcttgaactcctgacctaaagtgatctgcctgcctcggcctcccaaagtgctgaacccccaagcatgagccaccatgcccagccaggatggcagttttctacatagctaaacatattcttactatcccagcattgcactcctggaaatttatgccaaataaattaaaacttatatscatacaaaaccttgacataatgttcactgcaggtttacttgtagtagccccaaactggaaacaaccaaaatgtcttttaataggagaatggttaaacaagctattgtgcttaattattgatacatgcaaaaacttggatggacctcaaaggcattatgctgagtgaaaaaaagccaatcatgaaaggtcacatattgtatggatttatttatattgcattctcaaaatgataaaattatgagtcaccatgccttatctgaagcaagcttccccattataatctgat

SEQ ID NO: 647298 - DNA, 600 bp, Homo sapiens
agttgctactagaaaatcattgttttatatgtaaatctctactcctttgccatggttattataaataaatctttatatattcaggcaaaagtctgacttaagttgcacatccaggttaatctgaatgtaatataacacaattgctcctcgcttctaaatcaaacactgtaagatataatgcttgataatgtttcattattatgccaaaatgtcaaatttttctcttttattaaggtaagttcaaatcaaagatgctttgtcccatcacatgctgtctcattctataatatttttatgtgctaattgtgactcatataatctgcttacagaaactctccattttcttcctggttgttagtcaaaggaaggaatccagtgtttcctttgatacagagctctgagaaagacttctattttcagttgtctgtttcacttccttgaagctcatgggaattgtggacaaaatgtttacccattgttactccaccatctttttttaaaatggaarttttaacacataaatagaaacagatccccttcttcatatccccaaacatgaatgagtaatcataaaacaggaaaagattcgagtacagtcat

SEQ ID NO: 647299 - DNA, 502 bp, Homo sapiens
atgcatggaattccccccttagctctgccacactgaatctgttagataagctgttcagaactcttactgtttcaacattcaagattcactgcattgctggaccctctgtgaaactgaagccttctctacttgtttttatctcaagtgaacctggagaagcaacaataatggaccttctcccctagtcaaakagcctgtggacctcccctcatagtcagtctccaaaaacatgtatctggaattaatttattacaaagagaagtttagtgtttcttcttttttacatgcgctcaatactgactactggccagacacagcaccatcctcttacaaacatcatttcatttacttttcacaaaaacaaacaaaagtatgaagtaggtagtgttatcccaatgggcaaagagacctcaacttaattttgaggagattggggctcagacagatgaaatcatttgacccagtcactgtcatatagctcaggcatgccgacctggaattc

SEQ ID NO: 647300 - DNA, 584 bp, Homo sapiens
ctagaataaaacagcgagaaagaccaactgatttgtgaagcttcttggatttacaaataaacaaaatcacagagaaggaaaaacacttacttcaacccatttgtaaaagatgggctgtgccacagaagttccggagagaagttgagtttgaagcctgttagctatgctttcgtgagagctggcgcaaagacacccaggtaccgcacgtccacaccatcagctcagggagtttctcccaagggatgccaggccctggctcagatgggagaacatttcagatccaaaagactgtttctcaaaccagattatactgtaattcaacacgatgtcctaggtctttaccacaatttctgcaaagagggaaaaaaggataggtcttcctgtggctgagaggagctgctcaggctaaggggaggcagatgcgaagcacaccagcactacattaccctgtggagctgggttttgtaaacttgacaggacttgcttaaaattaagtgctgtggaatctctgctgcttcagcrtgtttttttccccttagaaaggattgtgtttaagggagctcctgatataaagaaaaaaataa

SEQ ID NO: 647301 - DNA, 637 bp, Homo sapiens
tacacacactccaccctgtttatccattcccctacttttgagcaccaagactcctccaattcttggctacagagtccatgtcttcttggatgtctgagcagatttcttggtaactataaaaggagaagagttactttgtgtatatctatatacccagcttcactaagcactgccagattgctttccaaagtggctgtgccagtgtttacttctagcaggtgtgcaggagaaccttactaccaattttgccatagcccaccagcattattggaaattacttctccttagtcaatcagcacattttttatttgtacattttcttatcacttcatcaagtaataagctcattttgcyagagctttgtctatgttaaatcttttcaggttttaattttactagtccaatctttttttcttgtgctgttttcttttttttttttaatttggtgatgagggattctagtatagcttactaaatcatattgatctaccaagttaaaataagggctagttctaatgacaattgtatatttctctattcctccatataaccctgccagctcttaaatattttgagaccacattatgaggtttcatagcttcatgatttttttgtcttcattatttacatcaagcag

SEQ ID NO: 647302 - DNA, 588 bp, Homo sapiens
tgatgtgacaccgatatatttaagatgtagggctactgatttgatttgtgtaagcataaacacatccacctagtaatctttgtgcagtgggcattcatgatggcatctctgtggatgactgcctctgcgtttgcatcagggcgtctgtatagaccaggttttgtcacccaaagagtragaacataaaaagtgtgcttcattctatcaagtttctgaatatctaattggcatattcctatcaacaacagctttatttctctcttcaactcttcttttaaaatgagaggaaaaaatttacaagagaccaaagcactgaaaaatcaaaaccttgcaaagggccatgcctggaggtttccttccctgtgtgctctctagggattatgcctgattcctgggtgggcttttgggctttccttggcttaatctcaggtgcacgtgaatcacttcctactctactgctgttgtcattggcataaacatcattgtaacgacattaatggagtaattctgcaattgcaatcaattgcttttcaatttcctatagctatgaatagagcagaagtaaagttgtgtatccttttataattt

SEQ ID NO: 647303 - DNA, 588 bp, Homo sapiens
tgatgtgacaccgatatatttaagatgtagggctactgatttgatttgtgtaagcataaacacatccacctagtaatctttgtgcagtgggcattcatgatggcatctctgtggatgactgcctctgcgtttgcatcagggcgtctgtatagaccaggttttgtcacccaaagagtaagaacataaaaagtgtgcttcattctatcaagtttctgaatatctaattggcatattcctatcaacaacagctttatttctctcttcaactcttcttttaaaatgagaggaaaaaatttacaagagaccaaagcactgaaaaatcaaaaccttgcaaagggccatgcctggaggtttccttccctgtgtgctctctagggattatgcctgattcctgggtgggcttttgggctttccttggcttaatctcaggtgcrcgtgaatcacttcctactctactgctgttgtcattggcataaacatcattgtaacgacattaatggagtaattctgcaattgcaatcaattgcttttcaatttcctatagctatgaatagagcagaagtaaagttgtgtatccttttataattt

SEQ ID NO: 647304 - DNA, 641 bp, Homo sapiens
atatttgcaaatagggtaaatttgagtttcaattaccttgaccttgaggcacacaggggcagttggtaaaagcccgtgtcagccaatttgaggcaaactacaaaggtagaagccaaaatttcttccccttgagttattaaatccaaactcaaaaaatcacatacacacacacacacacacacacatacacacacacaaaygcaacaaaacctctggactgtgagaaatgtatttctgctcattataaattactcagtctcaggttttctgttatagcagcattttggtaataactaataataaaacaatacactcttgagaattcatagctatgtgatataagtattatttataagaactagtttacatctaagatgtaattcactctgtgaaatcagaaaaaagtattaatgcctaattattgggagttatgactgcatattgtaacaattttgaactgcttgagttcagtaaaagaagtcttcatggaagtaaagtaactaacatcaaattagagaaaataattcagaagcaaaacaataacaagtaacagtgaaccttcagtacacttctctgcattaaaaattatttgtatattttaaagacataatttagaacttcctgacactgctgtaaaacat

SEQ ID NO: 647305 - DNA, 579 bp, Homo sapiens
ggacttggcatgtgtaggtatacatgatggatacatgtatgcgtgtataaatggataggtaatggatagatgggtgatgaacgggtggatgataggtggatggatggatggatgatagatgggtaggtgatggatggataatgagcagatgaatagrtgaatgaatgagaaatgggtgggtgagtggatggatggatggataatgtttttattggttgcatagaagggcagatgattgtttttcatgttgtttttagaaagccagggatcccaaagtggaggaacttggagtttcagagttagaagagatttgaagccatgtgattcactccctcatattctctagcccaagtttttaaataaaaaattaagagaaatcattgtcaggctcacacatctgggaccataagggaaagtaagccaaggtcttccagttaacccaagggtaatgatcccctctcatcctccatcttcataagagaacaaattctacagaaagcccagaaagtgtctcggagctgaatgaggataatggtgtcacagggagcttaggcctccatggtcatcataagctgagtt

SEQ ID NO: 647306 - DNA, 420 bp, Homo sapiens
gtgacctttcgtcagtgatctttgatatttctattgtaattattttgaggcatcacaaaccacacccatataacacagtgaacgygttgataaaagttgtctgggttttgactgctccaccgaccagctcatcccctgtctctttccctctcatcaagccctcctattccctaagacacaacaatattgaaatgaggccaataaatagccttacaatggcctctaaatattcaaataaaaggaagtcacatctttctcactttgaatcaaaagctgggaatgattaagtttggtgaggatgccttgttgaaaaccaagataggctgaaagctaggcctcttgcacagaacagttaaccaaaatgtaaatgcaaaggaaaagttcttgaaaacattaaaagtactactgcagtgaacacat

SEQ ID NO: 647307 - DNA, 584 bp, Homo sapiens
aagcttgcattcctcattggaagcaagtaaaactcccaaaaaagaggggttgtacagcaaaataaactttagatattgataaaatgttggaagatcagagattttctggaggggtgttctcagatctcagcaaattgtcctattggtgtgagccataaaatctcatgctggtaccaagcaccaatagaagatttgtcaaaggtcagagtcatcttcactcagaatccctctgtggttaccaaaaaggtgaacccagaaaatctgagacaggtctcagctaatttagaaagtttattttgccaaggtttaggacacgcacccatgatgcaggctcaggaagtcctgacaacatgtgtccaaggtggtttcggtgcagcttggttttatacatttaagggaggcatgagacatcagccaagtatatttaagaaatacrttggcttaatccagaaagctggtgcaattcaaagtgggggcttccaggctacaggtaaatttaaacattttctggttgacaattggttgagtttgtctaaagacctgggatcagtagaaaggaatatttgggttgtgataacagttgt

SEQ ID NO: 647308 - DNA, 634 bp, Homo sapiens
  misc_feature 616, 617, 618, 619, 620, 621, 622, 623, 624, 625, 626, 627,628, 629, 630, 631, 632, 633, 634: n = A,T,C or G
tattaatcttataaaaaggcctgtaatcccagctctttgggaggccgagacgagaggatcgcttgttcccaggagttcaagactagcctgggcaacataggaagatgccagctctataaaaaatttaaataattagctgggtatggtggcatgtgcctttagtcccagctactcaggaggctgaggtgggaggatcgcttaagtctaggaggttgtggcttcagtgagccatgattgcaccacttcagaccagcctcggtgatagaatgagataatatctaaaaatttttttaaaaaattttaaagcaaccatattaagaggcatgatcatactagatgtgataaatgctgctcctaaaaatatattagaaagtttctttctaagtattagttttggtatttagggggctcaaggataatagtttctgtctagtcttgagtatatttgtccctgataactgggactatactgtctgggaagccatgtatatgattttctatgtaataacacacccttttttgcaataaaatcaataaagacagagcatcacacaattttttcacaattactgckgttaatacggcaccaatgtaatgagcaactttagcatttgannnnnnnnnnnnnnnnnnn

SEQ ID NO: 647309 - DNA, 593 bp, Homo sapiens
caacagggtactggttagttctgtaccaatgtaattctacatgggttgtcagatctaggacaaatataatttattggctgttctcttcttttgacaccagccactggaggtcattctctacttctagcctcagaagcttatgttctttttaaaaaaaaatccagaatctgaatcccattgctacagaaactgatttgtcaatgcattctgaaactgtgcaaaagggacaaaggaaatacaaaatacaactcycactctatgttcctgtatttcttttttattcccctcagaactgaatttgcaggatttaatggctggatgacagtcccatcctaaggcacttaaaaatgctcgtgacaatgctgttcattcattatgcgaatacaaaaactgtgcaaaaaaaagcctggaactcagctcacggataattgcttctttattttcctgaatgcttctttgctagaatagccaaatttaacatcctggtttctctttagctggttacaatctaactgttccctgaacagtgtctttctagctgtactcaggaaatgtagactttgccacttcaactccattggactagcactgcc

SEQ ID NO: 647310 - DNA, 425 bp, Homo sapiens
ttgttagtgtataggaatgttgtgatttttgcacgttgattaataaggtaactttttaatgaagaaaacaattagtaatacattaatgcatgtaaggtaagcaaaatagattaaacatttaatttaaagcaaagataatgactttaaaaataattttactattgacattcacattagtgttttcacaaacatagataatcktttccattgtccttaaatatattttttaatactttctaataaaccactctaatattgtggaaatatatattgagagatatacatattgacattagatcattctacgtaggtttgttgcttttaaataaatattcaagctttgtgaaaagcacatgtaggcaccacatacttgaattattaaggctaaaacttaagaatttggtgctgtgagtacgaataataaa

SEQ ID NO: 647311 - DNA, 592 bp, Homo sapiens
caggctgtacaggaagcacagcagattctggggaggcctcaggaaacttacaattatggtagaaggtggaggggaagcagggacatcttacatgcctggagcaggaggaagagaggtgggagcggccacgcactttcaaacaaccagatatcatgagaactctattatggtgatgtggtttgactgtgttgccacccaaatcttatcttgaatttccatgtgttgtgggagggactcagygggaggtaattgaatcacgggggcagatctttcccatgccgttctcatgatagtgaataagtctcgggagatctgatggttttaaaaaggggagtttccctgcacaagctctcttctcttgtctgccaccatgtgagacatgcctttcatcttctgccacagttgtgaggcatcgatagccaagaggaacggtaagtccaataaacctcttttttttttttttgtacattacccagtcttgggtatttctttatcagcagcacgaaaacagactaatacacacaggaagagaaccaaaggggaaatttgcttccatgatcttaattacctcccaccagtctccacttccaac

SEQ ID NO: 647312 - DNA, 634 bp, Homo sapiens
agataaaatctaaaatgataagagttctagaagatgatatagtagaaaattcttatggtcatcagttaggcaaagatatcttcatatggtacatgcacaaacacatgcacacacattctgcaaagtaaaaacagatgagtgacttgcactttatcaacattagaatgttctgctctacaaagaacatcattaaaagaataaaagtgacaataaaagcaacaaaatagcagataacatttatatacatatatttgtaatattgtgtgtgtatgtgtttgtatgtatgtaagtatataattgacccttgagccatgcagttttgaagtgtgtgggttcagttatacctggattttcttccacttttgcaaccactgagrcaataagaacaacttctcctcttcctcctcagcccactaaacatgaagaagacaaggatgaatacgtttatgatgatacacttccatttaataaatagtaaatatattttccctttcttatgattttcttaactttttctatctcgagcatactttattataataatacaggatgtagtacatatcacacataaaatatgtattaatggaatgtttatgttatctgaaaggctgccagtcaacaggaggttattagt

SEQ ID NO: 647313 - DNA, 680 bp, Homo sapiens
actttaacccagcattgtttgcttggcgagtatatctgttaatatccatggattacatttggggaaataccaagtttttcatagttacttaacccttgaatatttatcctcttcagagcatggaagcagtggaatgaacccgttagatatatggacttcatttttaaaaattttatttatttatttttttgagatggagtctcgctctgtcctccaggctggagtgcagtggcccgatctctccccactgcaacctctgcctcccaggttcaagagattctcctgcatcagcctcctgagtagctggtactacagatgtgcaccaccacacctggctaatttttttttcatatttttgtattttgtatttttagtttcaccatgttagccaggctggtctcaaactcctgacctcaggtgatccacctgcctcagcctcccamagtgttgagatcacaggcatgagccaccacacctggccagatatatggcctttagactcagacaacctgagttcaaaccccaattctgctatttgccaggtgtgtgaccttgagcaataacttaacatctctaaatgtcagtccatagctaagctgccagtaaatatgaagttcattgcaatttttctttctgaccttgtcattcagaaacaaaatgatagatttgcatggatgatg

SEQ ID NO: 647314 - DNA, 553 bp, Homo sapiens
aactaggccctcctacctccctgtagcctcaactagataaatgcaaacatgttggctcatgcctgtaatcccagcactttgttagtttttttttgttttttgttttttttgagctggagtctccctctgtcactcaggctggagtgcagtggtgtgatcccggctcactgcaacctctgcctcctgggttcaagtgatttacctgccttaacctcctgagtagctgggactacaggagtatgccaccacgcctggctcattttttgtatttttagtagagaagaggtttcactgtgttgtccaggctggtgtcgagctcctgagctcaggcgatctgcctgtctcagcctcccaaagtgctggtattacaggctcaccatgyccagcaatcccagcactttggaaagccaagataagatctgttgagcccaggaatttgagagtagcctgggcaacatagggaaacaccgtctctacaaaaattaaaatactagctgggcttggtggcatgtacccgcaatcccacctacttgggaggctgaggtgggaggat

SEQ ID NO: 647315 - DNA, 481 bp, Homo sapiens
ggatcacccaaggtcaggagatcaagactagcctggtcaacatggtaaaaccctgactttackaaaaatacaaaaaaaaaaaaaaaatcagccaggcatggtgctgcatgcctggaatctcagctcctcggcaggctgaggcagaatcgattgaacccgggaggcagaggttgcagtgagctgagatcgcaccactgcactccagcctgggcaacaagggtgaaactccagttttaactctgtcagatgaatccacacatcaccaagcagtttcacagatggcttctttctagtttttatccaaggctattctgttttaccccataggacacaaagggctcccaaatgtccctttgcagattctacaaaaatagtatttccaacctgctgaatcaaaataaaggtttacctctgtgagttgaatccacatatcacaaggcagtttcacatagcattttttttagtttttatctgaggatat

SEQ ID NO: 647316 - DNA, 481 bp, Homo sapiens
ggatcacccaaggtcaggagatcaagactagcctggtcaacatggtaaaaccctgactttactaaaaatacaaaaaaaaaaaaaaaatcagccaggcatggtgctgcatgcctggaatctcagctcctcggcaggctgaggcagaatcgattgaacccgggaggcagaggttgcagtgagctgagatcgcaccactgcactccagcctgggcaacaagggtgaaactccagttttaactctgtcagatgaatccacrcatcaccaagcagtttcacagatggcttctttctagtttttatccaaggctattctgttttaccccataggacacaaagggctcccaaatgtccctttgcagattctacaaaaatagtatttccaacctgctgaatcaaaataaaggtttacctctgtgagttgaatccacatatcacaaggcagtttcacatagcattttttttagtttttatctgaggatat

SEQ ID NO: 647317 - DNA, 557 bp, Homo sapiens
agcaaacttcttgaattcttttaaaatggcggtcgatattctgttcctgggcaggtgcagtggctcatgcctataatcccagcactttgggaggccaaggtgtaaggctctctttaggccaggagtttgagaccggactaggcaatgtggtgaaatcctgttactacaaaaaatacaaaaattagctgggcatggtggcatgcatctgtagtcccagctacttggaggctgaggttggaggatygcttgagctgaagaggtgaaggctgcagtgagccatgttcagtgcactgcacttcagcttggacactggagtgagagaaaggaaggaaggaaggaaagaaagaaagaaagaaagaaagaacgaaggaaggaaggaaaggaaggaagggaaggaaggaagggaaggaaggggaagaaagaaagatgaaagagagaaagagaaagaaagaaagagagaaaaagaaagattttctttttctagtctgggtgacagagcaagaatctttctcaaaaaaaaaaaaaaaaaaaaaaaaagtctctcagagttagcttgg

SEQ ID NO: 647318 - DNA, 610 bp, Homo sapiens
tgtggcaaggaagaaaatatcatcatgcagtaacctcggaagacagaactgagcaactctcctaaaaagtagaagaaagggctaaatagcaaatagaaaagaaactcagagaatcaatcaggatgtccaacatccaactgcagaggatcacagacggagaaagaacacagagcccaaggttaggaaggaaaagtaggggaaggtcttccagagtcagatgggcccagggagtgtcctgcagctgagcaagactactcaccccaaaatgaaactcagcaccaccaagaaccacaaaagggacctggagaggcttgggcaggtgggagtcagggacaggggcacacagggccttccagttctgagaaagggctccaagactgctggccggaaaagtgccccttctcaggaagctactagaacaaggccagaggataaaccaggaaatgggcgaggargcagaattctgccaggagagggccagggcacctcccaactggctgctaccctggggatcagagcccttgcaatcctcttctcattgggtcctttcagcttcacagcatctccaattagcaaaggaagaagatggcctctgagagtaaaaagtagg

SEQ ID NO: 647319 - DNA, 575 bp, Homo sapiens
tagattgttatatgaaaatttccgatttttagtattggttcaraaagttttaatgaaaaaatttcaaactctataatcagaaatcacacacaaacttatcactgaaacatacacacatgcacacacacacacacacacgcatgcaccccacctatgtccaactgaggccttctgacaaatctatgatgctttagaaactgatttaacactgaaacatttccatctatatacctaaaatttaattttcaagagtaaacatatgaattttgacatctgtatttcataatacccccattgattatattttctttgtacttgatacattcttattcaattcaaataatgacaatagtaatgtttggttgaagagatagtggacacagttacttttgctaaagtgagggaatcatagggaatacggttgtagtttttaaaaatagtgaacattatcaaaatattcatattttgtttaatgaaacatgaccttttccaaaacacacgtatatttttgaaatgcacatgaaactttggctttaaggatcacagaaaatgattaatttatcttggtcatgatt

SEQ ID NO: 647320 - DNA, 569 bp, Homo sapiens
atgcaacaattattacattgaattagaagttaagattgctgctagccactttgggatcctcattaaaaaaaacataaggaggtgctgtactagttgtagtaccaaggggaagtgaattgctggttcacaatgaagataaggaagagtatgtctgaatacaggagatccctaatagtatctctgggtactatgaagccccatgattaaaattaatggaaaactgtaacagtccaagatacgacaactaatagcacagattcttcaagagtgaaggtttgggtcaccccatcaggtaaaaagtcatgaccagccaaggtgcttgctgaaggcaaaaggattacaaaatgggtagtagaagaaggtagttatacatactagctatgaccacatgacccrtcacagaaacaaggactgcaatagtcatgagtattttctccaaattttgttatgaatatgtatgtgtatatataggcatatattaagcaaatgtatctggtttcattcatctcttattttttgtcatgtaatatgagaaatattggcattatgttagtatttaagtattgtta

SEQ ID NO: 647321 - DNA, 501 bp, Homo sapiens
caaacttagggagagcctgctagaagagaaaggcagcacagtgaaagcacagcttacagcaacagaagggggaagaaagagaggatrggagggaagaagagagagatccctaatgccaatgttgaacaccaggggctgaaaatctgttccacctgtgggctttatattgcgtaccccaaaactcttctttttcactcagtaaagttggaggtaggtttctctcacttaatgacaagacatccaggatctacacaagcatgccttgaactcagctccaggcagtcctatccctgctgtccccaaatctattcctactccacctttcaaatctcagcaaccatccagtttcttctgccagaaaccttggaatcatcttggacatcttcccttctctagcgccatcatgaaatcttattggtttatttttatgaccaacatatgtgtaaactctggttccttccctccatccacacggacccccaacaagtccataaaaccatc

SEQ ID NO: 647322 - DNA, 520 bp, Homo sapiens
gaactctttataagtggaatcacgcagtatatatgcctttgtgtctggcttctttgccccaaccatgtttgtgagtttcatccatggttttacatgaggttgtagttcatgaattctcattgctgagtagtaacccaccgtatgattatatcacaatataataatctcttttacagtytatgggcattggctttttttccagttttgtgatatcaccaatagcactgccataagccttcttgtatgtgtctgttgatgaacatacaagcacatttctgttgggtgcatatgaaggagtagaattgcggggtctcagggtaggtgtatgtgcatcaactgtattttgaaacaagctggtgagtgggacttttctctctgactaagtccctgagctaaatttgtcataagataagtgataagtgccccatattctatagaggagctgcaggacacacaccctcagacttcttaagaggtggcctaacaggtcacccactaagacctaagagtatccccatca

SEQ ID NO: 647323 - DNA, 520 bp, Homo sapiens
gaactctttataagtggaatcacgcagtatatatgcctttgtgtctggcttctttgccccaaccatgtttgtgagtttcatccatggttttacatgaggttgtagttcatgaattctcattgctgagtagtaacccaccgtatgattatatcacaatataataatctcttttacagtctatgggcattggctttttttccagttttgtgatatcaccaatagcactgccataagccttcttgtatgtgtctgttgatgaacatacaagcacatttctgttgggtgcatatgaaggagtagaattgcggggtctcagggtaggtgtatgwgcatcaactgtattttgaaacaagctggtgagtgggacttttctctctgactaagtccctgagctaaatttgtcataagataagtgataagtgccccatattctatagaggagctgcaggacacacaccctcagacttcttaagaggtggcctaacaggtcacccactaagacctaagagtatccccatca

SEQ ID NO: 647324 - DNA, 514 bp, Homo sapiens
tgtcaatattggttcattaacttcagtaataaatgtgccacactaatgcaaggtattaatagtaggagacacttggtggtggggcggggatgggggaatagtggcgacacggaaggaaaatgttatgrtaagtctctcaactatctgcacaatttttctgaaaatctaaagctgttctaaaaaataaagtattttaattttattttaaaaagtacatcttagaaaacatacctaggatgatctctaggctctggatccagaaacccctatttcaaacaagtaggaagattcttatggctgctaagatatcagcagtccatggtttcaggaatacagagccccaaggtgaatacaacaaccagactgaaataagtgcagttccaagaatggagcttaaactggaaagactagagagcagctggctagctgtttagaggtaacagatggcagaaccctcaggatcaagtcatcctgaatgaagaaagacctttggagagtgcacacttgagtaaat

SEQ ID NO: 647325 - DNA, 514 bp, Homo sapiens
tgtcaatattggttcattaacttcagtaataaatgtgccacactaatgcaaggtattaatagtaggagacacttggtggtggggcggggatgggggaatagtggcgacacggaaggaaaatgttatggtaagtctctcaactatctgcacaatttttctgaaaatctaaagctgttctaaaaaataaagtattttaattttattttaaaaagtacatcttagaaaacatacctaggatgatctctaggctctggatccagaaacccctatttcaaacaagtagraagattcttatggctgctaagatatcagcagtccatggtttcaggaatacagagccccaaggtgaatacaacaaccagactgaaataagtgcagttccaagaatggagcttaaactggaaagactagagagcagctggctagctgtttagaggtaacagatggcagaaccctcaggatcaagtcatcctgaatgaagaaagacctttggagagtgcacacttgagtaaat

SEQ ID NO: 647326 - DNA, 648 bp, Homo sapiens
ttggcaacaattacaaaaatgtaccagtaaggatataatatcaaatgtctatagatagtcaaaattgcaaatggcatggaaaaaacataagagaaaaccatcacacctttcyctctgttttgcagtcaatgattttctcatttgtattctcctatactgtagacttcccaggacagagattacctgaggttcttctctggatctctagacaaagcccactgtccaatacttaatatatgactgttaactatggaaacaaggaaggaaggaagtcacaatttcattctgaaaactaatccaccttcttatcagccaatatgtcctccttcaaggagcagcactggaaaaactaatgaaataaaacaccaggacaaaacgtggtatccttctccagaatgcacaggaaatttctgaatattaccaagaattaaatatatttgattgttatatagcctcaaatgggccagcacttacttgtgagttactaatctaatctcaactatttcttttctttacaacattgtatttcaaaataactcaaacctacaattggttgcaagttagtacgatgaatacctgcaataccctacttcaactgttaaggttttatcatatctgctttctctcttttacacacacagacacaca

SEQ ID NO: 647327 - DNA, 538 bp, Homo sapiens
actatctaagttctagagcaagtacacaccttctgcagtaaaaactggtcactgttcaatgggcagttcctgttatgctgttgctatacacagagactaatagagaccatgggatattaagcagctttgtaactgcagttgcccatcaagaatgttgtcagactcatcaagtcrtgcatagtaatccattacatgatgaaaatggcatatcagggatcatacctgagcaggtctggagaccatggtagtttatatgaataggtatcccagaatcctatgacacttacatctgttgctctgacactcctccctcagttcaggcttatggcctggtagcagattccttatggtctgaggaaaagtcaaaaattggaccttccccattatccccattggacttgggagcaaggagaactaatgcaatgaattgatactcttgctgcttgctgtgccttgagttataaagttcttggtctatgatccaggagtttcatgtcttctacctgtatccatgagaccaaaacagcagcatcagatc

SEQ ID NO: 647328 - DNA, 538 bp, Homo sapiens
actatctaagttctagagcaagtacacaccttctgcagtaaaaactggtcactgttcaatgggcagttcctgttatgctgttgctatacacagagactaatagagaccatgggatattaagcagctttgtaactgcagttgcccatcaagaatgttgtcagactcatcaagtcatrcatagtaatccattacatgatgaaaatggcatatcagggatcatacctgagcaggtctggagaccatggtagtttatatgaataggtatcccagaatcctatgacacttacatctgttgctctgacactcctccctcagttcaggcttatggcctggtagcagattccttatggtctgaggaaaagtcaaaaattggaccttccccattatccccattggacttgggagcaaggagaactaatgcaatgaattgatactcttgctgcttgctgtgccttgagttataaagttcttggtctatgatccaggagtttcatgtcttctacctgtatccatgagaccaaaacagcagcatcagatc

SEQ ID NO: 647329 - DNA, 482 bp, Homo sapiens
ctacatcttactaacactctgtaaggcagtgtgatggtcaattttatgtgtcaacttggttagagtctggtacccagttgtttggttcaatactagtatgtatgtctctgtgaaggtattttgtagatgtggctaacatctacagtcattcggctttaagtgaaggagattatcctggatagtgtgagtggaccttatccaatcagttgaatgccttaagagccaaattgaggcttcctggagaggaaggaaattctgcctcaagaatgcagtatgtaaatcctgcctgagtttctagcctgttggcctatcctgtggatttcagacttgtgagccataatcctaggagccaatttattgaaatctctcttcctcttgtttctctgaggaagcttggctgaaaaacttgtaattattattatcagagttttatagaaaataaaactgaatgatcctraagatttggtactttatctccccca

SEQ ID NO: 647330 - DNA, 574 bp, Homo sapiens
gacagcatatgattggatcatgtttctaaatccactctgggttttaggggcttttttccaagatagtggattggaggtattgttagcatgcatctcccactttgaaacacaaatactgtgtagatattcacactgtgaattttttccaagaagcaatgcaccaacttaacaggaaaacttaaagaaactacagaccctttgaaagcagcagcaggctgcagcctgcattatgagccaggtagaaaactgtaagaccccagagtgtgagaaagggataaactgcctctgggatatacactcccactggggaacctggcaatccaggccacaggggaaagcattaaccctacccagcactggagctgatttaggcagcaatgggaagtacatgagaaggagtagtatcgaaacatgctttgcytaggcttctagtctccagtgggatggagggaagccattcctgatcctacctcacaggggacccccggaagtcaatctgctaagtcaggtggccgtggcagttggtgagaagctcccaactgagatttgcaatacaatctcaagtggagatgaa

SEQ ID NO: 647331 - DNA, 521 bp, Homo sapiens
ctgaagcactactagaactgataaactcatgcagtaaagtttcagaatacacaatcggcatgcaaaaataaatagcatttctatatgctaacagcaaataatctgaaaaagaaatcaaaaatgtaatcccaggctgagtgcrgtggctcatgctgtaatcccagcagtttgggaggcgaaggttggtggatcacttcaggccaggagtttgagaccagcttgggtaagatagtgaggcctttttctacaaaaaattttaaaaatttgccaggtatggtggcacatgcctgtggtcctagctactttggagactgaggtaggaggattactagagcccaggatactgagggttcagtgagccatgactgcaccactgcacccaagcctcagcaacagtgtgagaccctgtatcaaaaaaaaaaaaaagtaatcctatttacaataggtacaaataaagcaaaatacctagaaataaacttagccaaataagtgaaagacctctgtaaaggaaactgtaaaac

SEQ ID NO: 647332 - DNA, 538 bp, Homo sapiens
agtgctgtttcttttcagggtttattgatattcttccaatccatggctgtttctattttaaattttagtctctgtttacaggatgagtgatcttttttctgatgtgtactgggaacccctgatttagagctcatttgtagcttcttagagccctacctgtccagaggcggttgatagttaagaaaacccatggaccagggctctgaggtgtctgagccagccagccactcagcctctaatccagcctcttggccagccagcagctcagccagcccagcctcccagccctcttctaggtcagactytcacccagccattcggccagcctcccagctggcctttaagacagctagcctgtgggtctctctgccagcctcccaggcagtctgttggtgagccttcgaggtaacctctaaaccagggagccagcccacctctgggcaagattccaagccacccccttggcagatctctcagccagccaacctgccagccagtctcttagcaagcttctcaaccagccaggctctcaggaagc

SEQ ID NO: 647333 - DNA, 622 bp, Homo sapiens
gtagcaaattctgtgttctcctaaaaacaaaaatacaaaaaccaatcaccgcggttttagtttcaacaacctaggtaaaaccctctctaagtcccaagtttctcatcttattaagtgggacaataaaatgcatctcaccaaggagttgtgagcattaaattcactgctgtctatggagcacatagtgtataataggagcaaaactaaaatctgtcaattccattccaagctttgtgacaccactaaataaacaggtaatgtaaaaaaataaacaacaggaaaaataaacaataaggaaaagtaataaacagcaaaaaaaaaaaaagaaaaagaaaaaagaaaaaccaacaggagaaaaggagaattgagaactgtaaacaatctccaagccaggccaaggacacttagtacattctcaactccagagtcatttcccttccttatagcactgcaattggctttccctggagcaaacactacaatgctagaatttgaggaaaggtggaggcatacgaataattcatttaaaaaccraaatctaaaatttgtttaaaaatctgatctgtcttcacttgatgcaagagagcttcgataatccaaagcaaaaccctacctacaggat

SEQ ID NO: 647334 - DNA, 625 bp, Homo sapiens
gttcaatagctctaatcattagagaaatgcaaagcaaaaccagaatgagataccatctcacaccagtcagaatggctattattaaaaagtcaacaatagcagatgctggcaaggttgtgaagaaaagagaatgtttatacactgttgttgggaacataaatttgttgagccactgtggaaagcagtttggagatttctcaacccagcaatcccattactgggtatatacccaaaggaatataattgttctaccataaaggcacctgcatgcatatgttaattgcagcactattcgcaatagaaaaagcatagaatcaacgtagatgtccatcaataatggactggatgaagaaaatatacacatacatcatgaaatatacagccatagaaagtatgacattatctcctttgcagcaacatagatcgagttggaggccattatcctaaccaatttgatgcaggaacacaaaaccaaatacygcatgttctcacttacaagtgggagctaagcttgaatacacatggacacaaagaagggaagattagacactggggcctacttgaggatggagggtaggaggagagtgagcatggaaaaactacctatcaggtactatgctcatta

SEQ ID NO: 647335 - DNA, 539 bp, Homo sapiens
tgtccaaaaacgtattctaaggagatgccaggccaatgtctcatgcctgttttagcaatagtatgcaaatgtttttgaagctcatcccaaaaagttaacctaattatcagttaagactacatttggctgcaagtcctaraaaatctataaaacattttaaacaggagaggtatttatttctctgtacaacaagaagtcagtgtaagcctggtgtagcactaaatgatgcccaaaaggcaccagactctctgtaacttactgcactataatcctggattttggatattacagctcaaacatttctccttaggaaggagaaaggtcaaagccagagaagctgcactagctgacaacatactctttgtccagaatggagtcacaaggctacctgaagctacaatgaaaagatgagctttttgctttgcagcttctacagagaggagaatgtagcgtagaggaataaagtgagaagagagttgtaatagacatagtgagatcacatagagtattgacacatctctggatctggtgactattat

SEQ ID NO: 647336 - DNA, 539 bp, Homo sapiens
tgtccaaaaacgtattctaaggagatgccaggccaatgtctcatgcctgttttagcaatagtatgcaaatgtttttgaagctcatcccaaaaagttaacctaattatcagttaagactacatttggctgcaagtcctaaaaaatctataaaacattttaaacaggagaggtatttatttctctgtacaacaagaagtcagtgtaagcctggtgtagcactaaatgatgcccaaaaggcaccagactctctgtaacttactgcactataatcctggattttggatattacagctcaracatttctccttaggaaggagaaaggtcaaagccagagaagctgcactagctgacaacatactctttgtccagaatggagtcacaaggctacctgaagctacaatgaaaagatgagctttttgctttgcagcttctacagagaggagaatgtagcgtagaggaataaagtgagaagagagttgtaatagacatagtgagatcacatagagtattgacacatctctggatctggtgactattat

SEQ ID NO: 647337 - DNA, 252 bp, Homo sapiens
gtgatgccccctgagccgtaaaactggcaagtttttattagtgattttcaaaaggggagggagtgtacgaatagggtgtgggtcacagagatcacatgcttcacaaggtaatagaatatcacaaggaaaatggaggcagggtgagatcacaggaccacaggaccrgggcgaaattaaaattgctaatgaagttttgggcatgcattgtcattgataacatcttatcaggagacagggtttgagagcagacaa

SEQ ID NO: 647338 - DNA, 404 bp, Homo sapiens
tgaattcttccgtggtgctgtcagagggagcacggccctgccaacactttgatctcagacttctgcccccagaatgtgagaaaataaatttatgttattttaagccacctagtgtttggtactcttctatggcagggacactaatacattatctcattatatatatatgtattaagtrtaggtttatcccaatttctaaaaattaaggtgtgaaagagatctccattttatgaacgaaccaccatggcgggcagatcaacaaagctccatttggcacagcagtgagaatataacaacagaagaaagagacagaataaaaagaatcctgaagtaaaattagaaacaaaacacataaggctctattacaatttgcttaaaatgtgtaaattttgttctgggcttcc

SEQ ID NO: 647339 - DNA, 473 bp, Homo sapiens
attctattttcacccatgttcctgggaaacatggtcaaaatgcaaaaactcatcttaaaggtcatagttaccaacttattttaccttcaggtagatcatgtggaggttcagtggtgatgcacccggggaccgggaaggcataggcactgctggctgtgaccaagggaagtggactcgtagggtagcactgcctcakgatctgaagcaccacagagatgacgggctccatgctcttgtcatccaggcagttctgagcaaagggaagattatatcagatgccaacatctgggcacagtcccctagctgtaacacagctaataacactctccaagctgtaacacagcacagtctcctagctgtgtttcagctaatgaattatacgcatggacagaccgtaaacagccttaatgtagaatgtcaaatttgaacattccaacatagaattttgtctaatgtagaatctgcacttttct

SEQ ID NO: 647340 - DNA, 568 bp, Homo sapiens
ttatacacttttggtgagggataccacagaagtaatgttgcagtcttctcagcgaatcatatcggggatacatgatggctatacatatgtattgttactggtgacattaaccttgatcacttggttaagataatgtcttctgggtttctccactgtgaagggcctatttttctatttctcattgataaatatcttgggggagatactttcagttaatgttaacatcctatttctcctcaaaaatttgaagtgattttagtgttaattggtggatgttgccagcaactgtgatatttcccaaatggtgattttgtatttccctcggatggcaattatttttgtgttttccttccctaagagaacatatttctatgtatacctagattccaagggaaaagtctaattaaaagttgatgtatttgcaaaatttgttaccgcataaattttttaaacctgctcattttagtctcttagtctttgtccatctatgtatctacctacccacctacctatccatctacctgtcwtgtttataaattcatatttatcaactcatatcatttactag

SEQ ID NO: 647341 - DNA, 528 bp, Homo sapiens
actatcataatccagtggcaggcctcaatctggtgtaaagcgggtgtttagttactaatagtaattcagtagtaaacttcacaaattgtttatttttcttttcaatgttattttaataataaatctaccatgtttgtttgaaatctgtcctgcatccttccgaaagggaaagaaacaatggaggtacagctggtgtgctggaaattaaacagagcatcacctaccttaattttaacagtgtttcatgaaagctgtaaatgggaatatcatatgtcatgtctgttgtagcaaatttgagaacacttttaaaatggccagcaaagagataaggtgagttcagcaggtccaatgcattataaaatgtatttctcctcttaaaaaccttcagtgatttctgtttgygtgcaggacaacatccggaaatcacgacatgacacataggggcttcctaggtcttttccttgcctcatgcctggcctctttctggagcctcatccctgggcacacccctgccatatccatgctgaa

SEQ ID NO: 647342 - DNA, 528 bp, Homo sapiens
tatctgaaaaatacaaatcattgctgggagaaatgaaagaacatttttaaaaagagaaacaccttaccacagccagaatgtccattactcaaaagtcagaacaaaccaaaacagcatattgggttggatgtggtgagaagggaaaaattagactctacygatggggatggaaattggtacaacccctatgggaaatagtaaggagatttctcaaaaaactgaaagtagattcaccactgaatccagcaatcccattggtgggtatctagccaaagaaaaagcagtcatgatataaaaacaacaacaacaaaaacaaaaacccacacacacctgcctgtgtagatttattgcaggataatccacaattgccaaaatatggagccaatctaagtgcccacgaactgatgagtggatagagaaaatgtggtagaagtacaccatgaaatactattcagccatttaaaaaaagaacaaaataatgtcttctgcagcaacttggatggagctggaggccattattctaagtga

SEQ ID NO: 647343 - DNA, 564 bp, Homo sapiens
aatgttggtttttcccatctaaaaattaaccagtgaaataagacatcaactatggttgagttggtttcaggaaaatcatttgaaaattacagrtatattattttcttcatctcatcctcagtcattgacaggaactttgtaagccaccgtgctatttactttgtggactaggtagtaaatgcagaaagacagacttcctcagaattggtcactcctcttcccattttttcaggtacaaccaaatctttgtataaatcagtagatcaaaagaaaaaggtcattcctcttcccatttttcaagtacaaccaaatctctataaatcagtagatcaaaagaacaacttccaacagtggcagaaatgtcactgtagctgtgatctgattactaaacagatttcatcctggatagttttctgcgactattctctgggcccaagatgatcttttgcagtcttatcacacttagggtcaaactgccatctttgaaggacctcatcactttcagttgttgagatgactccaatcagtttctgacctgaacgtttgtatagccaatgctttagt

SEQ ID NO: 647344 - DNA, 564 bp, Homo sapiens
aatgttggtttttcccatctaaaaattaaccagtgaaataagacatcaactatggttgagttggtttcaggaaaatcatttgaaaattacaggtatattattttcttcatctcatcctcagtcattgacaggaactttgtaagccaccgtgctatttactttgtggactaggtagtaaatgcagaaagacagacttcctcagaattggtcactcctcttcccattttttcaggtacaaccaaatctttgtataaatcagtagatcaaaagaaaaaggtcattcctcttcccatttttcaagtacaaccaaatctctataaatcagtagatcaaaagaacaacttccaacagtggcagaaatgtcactgtagctgtgatctgattactaaacagatttcatcctggatagttttctgcgactattctctgggcccaagatgatcttttgcagtcttatcacacttagggtcaaactgccatctttgaaggacctcatcactttcagttgttgrgatgactccaatcagtttctgacctgaacgtttgtatagccaatgctttagt

SEQ ID NO: 647345 - DNA, 561 bp, Homo sapiens
aaagcatttattcacgaagttcagaataccactctttataaattatttctttgtctcttttttccatagacatataaagaacactaatgctataggaaaagaatcaacatgcatttcttcttcaccactgaaaaataacccaataatgtgtcatgaatctaaaaatgaccatgtctttcatttgcattagttctcaatgaggagcaattttgccaccccactccaagggaacattgggcaatagctggagacaatttgagctgttggactgggggaaggtgctagaggccagggattttgctcaacattctacaatgcatgggacagtccccttacaataaagagctatcctaccccaaaggtcaacagtgccaaggttgagaaactctgacctacatggagcatctgcatagtttatgtttactccctatgaattctkaagaaatttattcactttgatgactatcttttaaaaatgagaagatatgctgacaacatattgaacatgattatgtcagaattttcattatcaaagtgctaatggctccagtctgatgtcaa

SEQ ID NO: 647346 - DNA, 553 bp, Homo sapiens
gatttgaatcacatggacacacaagttggaatggatagagaacctcgcttgacttgatagtgttgtatgtacagtctgaaatgtcaagaaaatctgaaatgtcaagaatataaatactttcaaaagacaagcatcaaaagccttcttawcacctcttttataacgccaatcatgtattgccacatttgagctgttatgatgtgatatggctgaatggaaaagacactggcaatgttctaacttgctcagaggtcatatataaaaccttcgtggatgctctggactcatccttgagacaggacatcctatggtgtccctgggcattattagcttcacaaaattaccctaagactcaataattattttgcactctgtcttaagatagggccatcctatctcagaagatattatcaactagcctatcccagatcacctaggtattacaccccgcatgcattagctatttatcctgatgtttttcctccccttgcacccccaacaggctccaatgtgtgttgctcccctccctgtgtcaatgtgttctccttgttca

SEQ ID NO: 647347 - DNA, 553 bp, Homo sapiens
gatttgaatcacatggacacacaagttggaatggatagagaacctcgcttgacttgatagtgttgtatgtacagtctgaaatgtcaagaaaatctgaaatgtcaagaatataaatactttcaaaagacaagcatcaaaagccttcttatcacctcttttataacgccaatcatgtattgccacatttgagctgttatgatgtgatatggctgaatggaaaagacactggcaatgttctaacttgctcagaggtcatatataaaaccttcgtggatgctctggactcatcyttgagacaggacatcctatggtgtccctgggcattattagcttcacaaaattaccctaagactcaataattattttgcactctgtcttaagatagggccatcctatctcagaagatattatcaactagcctatcccagatcacctaggtattacaccccgcatgcattagctatttatcctgatgtttttcctccccttgcacccccaacaggctccaatgtgtgttgctcccctccctgtgtcaatgtgttctccttgttca

SEQ ID NO: 647348 - DNA, 553 bp, Homo sapiens
gatttgaatcacatggacacacaagttggaatggatagagaacctcgcttgacttgatagtgttgtatgtacagtctgaaatgtcaagaaaatctgaaatgtcaagaatataaatactttcaaaagacaagcatcaaaagccttcttatcacctcttttataacgccaatcatgtattgccacatttgagctgttatgatgtgatatggctgaatggaaaagacactggcaatgttctaacttgctcagaggtcatatataaaaccttcgtggatgctctggactcatccttgagacaggacatcctatggtgtccctgggcattattagcttcayaaaattaccctaagactcaataattattttgcactctgtcttaagatagggccatcctatctcagaagatattatcaactagcctatcccagatcacctaggtattacaccccgcatgcattagctatttatcctgatgtttttcctccccttgcacccccaacaggctccaatgtgtgttgctcccctccctgtgtcaatgtgttctccttgttca

SEQ ID NO: 647349 - DNA, 553 bp, Homo sapiens
gatttgaatcacatggacacacaagttggaatggatagagaacctcgcttgacttgatagtgttgtatgtacagtctgaaatgtcaagaaaatctgaaatgtcaagaatataaatactttcaaaagacaagcatcaaaagccttcttatcacctcttttataacgccaatcatgtattgccacatttgagctgttatgatgtgatatggctgaatggaaaagacactggcaatgttctaacttgctcagaggtcatatataaaaccttcgtggatgctctggactcatccttgagacaggacatcctatggtgtccctgggcattattagcttcacaaaattaccctaagactcaataattattttgcactctgtcttaagatagggccatcctatctcagaagatattatcamctagcctatcccagatcacctaggtattacaccccgcatgcattagctatttatcctgatgtttttcctccccttgcacccccaacaggctccaatgtgtgttgctcccctccctgtgtcaatgtgttctccttgttca

SEQ ID NO: 647350 - DNA, 597 bp, Homo sapiens
aggagccaatatgaaatggccattgaatttccaagtttgcatcatgcaattcagcttattttatatgtatccagctttaggcttttctttaaagaggcacatcgactattagcattgttatcacaaagatgcattggcattaaggggaagcaataaggcaaactgaccactcttcttgacatagttatttttctcagcattgaaagttatcactgtgcaacatgcgattattatccytaacaggattgttggttaaaaagtgaacagctttcaactgcaataatctaacacacattacctccttcactattacacagagtacaacttttcaaatatgagaagaaaactaaaagatactctctagtacctcttaaaaggtactttttaaaaattctttccattgttctgtgcttttctacatttattttgctcgtttaacactcagtgtgtcttctcccccatttagtcatcatactctttatggcatgaaaggagaattgatcttcctagaagaaagcactgtgtgattttaataaatgggcacattaactatctggaatgaatattctctaaaacttttggtgtaatttataacag

SEQ ID NO: 647351 - DNA, 615 bp, Homo sapiens
gaacataagataacttgaagaaatcaggaggggtataaaaactgatataaggcttgaacacctgagtgaggtgttgagacagatgatgcagtctcagtggcaaactcttgaggatcagccagaagttaagacatggtgcctggaagttgtaatttcaggcagtattcaggtaaggataaacatcaaaacatctaatgagtgccatattagtataaattggtagctaatttaaagagagaaagacttgttataaaaatacaaatgtttctcagggaagcaaaaggcagaacttcagcaggaaggcctaggaaagacatagaarcaatcactggaaaactacaagctaaccacaaaatcatctttctctgtctcgatctcctctgtgctgatctgcttcactcttctctcattctgaaaatgagttttatctgctctatagtgtaccggatagaaaatgatcagcactaatagccctcaactcattatttccctttcaagagcgttgccagactgattggaaccacctgtattccatttcaaagtcctcctggaaaagattcattagcttaagtcagcagttcaattaattggagctataagtggaataacagagat

SEQ ID NO: 647352 - DNA, 615 bp, Homo sapiens
gaacataagataacttgaagaaatcaggaggggtataaaaactgatataaggcttgaacacctgagtgaggtgttgagacagatgatgcagtctcagtggcaaactcttgaggatcagccagaagttaagacatggtgcctggaagttgtaatttcaggcagtattcaggtaaggataaacatcaaaacatctaatgagtgccatattagtataaattggtagctaatttaaagagagaaagacttgttataaaaatacaaatgtttctcagggaagcaaaaggcagaacttcagcaggaaggcctaggaaagacatagaagcaatcactggaaaactacaagctaaccacaaaatcatctttctctgtctcgatctcctctgygctgatctgcttcactcttctctcattctgaaaatgagttttatctgctctatagtgtaccggatagaaaatgatcagcactaatagccctcaactcattatttccctttcaagagcgttgccagactgattggaaccacctgtattccatttcaaagtcctcctggaaaagattcattagcttaagtcagcagttcaattaattggagctataagtggaataacagagat

SEQ ID NO: 647353 - DNA, 615 bp, Homo sapiens
gaacataagataacttgaagaaatcaggaggggtataaaaactgatataaggcttgaacacctgagtgaggtgttgagacagatgatgcagtctcagtggcaaactcttgaggatcagccagaagttaagacatggtgcctggaagttgtaatttcaggcagtattcaggtaaggataaacatcaaaacatctaatgagtgccatattagtataaattggtagctaatttaaagagagaaagacttgttataaaaatacaaatgtttctcagggaagcaaaaggcagaacttcagcaggaaggcctaggaaagacatagaagcaatcactggaaaactacaagctaaccacaaaatcatctttctctgtctcgatctcctctgtgctgatctgcttcactcttctctcattctgaaaatgagttttatctgctctatagtgtaccggatagaaaatgatcagcactaatagccctcaactcattatttccctttcaagagcgttgccagactgattggaaccacctgtattccatttcaaagtcctcctggaaaagattcattrgcttaagtcagcagttcaattaattggagctataagtggaataacagagat

SEQ ID NO: 647354 - DNA, 603 bp, Homo sapiens
gggtttcagttggaagaaatttagagattttaagccaattcacacacataacatrttagactcagaaaggtaaggagacttgttccaggtcattcagctaatttgtgaccaggcacttccaccagaaatcaaacctcaactcccaatttaaccagagacacatgtaagcagaattaaaattgtaaaaaaatcctggttgaattataacatattaaggatttgttagtaggttcacatcaagtgaaggttattgattatgaaattaatatcctgtgtttctacaatgctctaaaggcagtgaaaagaacttcgaagaagtatagcgatttggttttagtcctgattctgcctgagtatgcctaagtgatcctcagtttccaaagaggtaaaataagggatctatataaataatacagtctaattcccctccaaaattttattaagtacccattatatctcatgtgccaagccagatactgaggatacaaagagacataaagtgcaggtcatgctgtgaaaggctaacatctggtagaggatagcacataaagctttaattcagactttgtgctggactcctggctctgccatttactaaccgaa

SEQ ID NO: 647355 - DNA, 564 bp, Homo sapiens
atataattttgtgggtgactaaaaacagtgaagatattatcagcttaatccttggaatagtgtaatatgctttgcaataaaatttgtgactctcataaaatattgaggtctttaatgacctgaaaacttcttgctaaaaaaactgtagattgatcaacatatgttttgtgtttgtgtttaatgttgatcattagactgctctctctgtattctccttgccactttctttccctcactcacacttagccctagccttccactggttatgtgctctgcctctcccatatgccctcttaagaacattaaatttagtgccatatcactgcagrcatttctccctcagaattcctaagttggtcttccaatttctaatttaatatttttgaggcatctcatgtctttgacagctttgatttatagagaaagattattccccagtccctcttcacaacaactcacccctttgcttgactagattttattttctttaaagaaagaggacatgccaatttggttagttcaagttcataacaattgactgagccacattggtgtgtatatttt

SEQ ID NO: 647356 - DNA, 564 bp, Homo sapiens
atataattttgtgggtgactaaaaacagtgaagatattatcagcttaatccttggaatagtgtaatatgctttgcaataaaatttgtgactctcataaaatattgaggtctttaatgacctgaaaacttcttgctaaaaaaactgtagattgatcaacatatgttttgtgtttgtgtttaatgttgatcattagactgctctctctgtattctccttgccactttctttccctcactcacacttagccctagccttccactggttatgtgctctgcctctcccatatgccctcttaagaacattaaatttagtgccatatcactgcaggcatttctccctcagaattcctaagttggtcttccaatttctaatttaatatttttgaggcatctcatgtctttgacagctttgatttatagagaaagattattccccmgtccctcttcacaacaactcacccctttgcttgactagattttattttctttaaagaaagaggacatgccaatttggttagttcaagttcataacaattgactgagccacattggtgtgtatatttt

SEQ ID NO: 647357 - DNA, 637 bp, Homo sapiens
atttctgaaacttagtcagctcaaatgacaaattaaacctaatacaaaagggcagattcaagggcatgaaggatgaagtacaagggccttgaagtcaggaaaaccaagcgtctaacaggcttttgccaacaaattgggtaacatcagaatgagacatgtagtgtagtggtgtgaccatggttctctgcagccttgaccacctggactcaagcgatccttctgcctcagcctctcgagtagttggaactataggcatacaccaccatgcctggctaactttttaaaaaattttttgtagagacagggtctcgctttattgcccaggttggtcttgaactcctgggctcacacaatccttcyacctcgtcctcgcaaagtgttgggattacaggcgtgagccactgcacctggcctgaggtaggtttttgtttgtttgtttgttttgagacggagtctcgctctgtcgcccaggctggagtgcagtggcacgatctcggctcactgcaagctccgcctcctgggttcatgccattctcctgcctcagcctccggagtagctgggactacaggctcccgccaccacgcccggctaattttttgtatttttggtagagacggggtttcaccgtgttaacca

SEQ ID NO: 647358 - DNA, 637 bp, Homo sapiens
atttctgaaacttagtcagctcaaatgacaaattaaacctaatacaaaagggcagattcaagggcatgaaggatgaagtacaagggccttgaagtcaggaaaaccaagcgtctaacaggcttttgccaacaaattgggtaacatcagaatgagacatgtagtgtagtggtgtgaccatggttctctgcagccttgaccacctggactcaagcgatccttctgcctcagcctctcgagtagttggaactataggcatacaccaccatgcctggctaactttttaaaaaattttttgtagagacagggtctcgctttattgcccaggttggtcttgaactcctgggctcacacaatccttctacctcgtcctcgcaaagtgttgggattacaggcgtgagccactgcacctggcctgaggtaggtttttgtttgtttgtttgttttgagacggagtctcgctctgtcgcccaggctggagtgcagtggcacgatctcggctcactgcaagctccgcctcctrggttcatgccattctcctgcctcagcctccggagtagctgggactacaggctcccgccaccacgcccggctaattttttgtatttttggtagagacggggtttcaccgtgttaacca

SEQ ID NO: 647359 - DNA, 553 bp, Homo sapiens
tctacagattcaatgaaatatttatctaacttccaatggcatttttcacagaaatacaaataacaatgttaaaacttatatggaggccaggcgcagtggctcacgtctgtaatcccagcactttgggaggccgaggcaggtgggtcacctgaggtcgggagttcgagaccagcctgcccaacatgaagaaaccctgtctctactaacaaaaaaataccaaatcagccgggcatagtggcgcatgcctgtaatcccagctactcaggagactgaggcaggagaattgcttgaacccaggaggctgaggttgtggtgagcagaggttgcgccattgcactccagcctgggcaacaagagcgaaactccatctcaaaaaaaaaaaaccaaaaacctatacggaaccacaaaagatcccaaataaccaaagcaattttaagcaagaagaacaaaactgaatgaattatattacctaattttataatatattacagagttatagcmatcaaacacgatggtattggcattcatcagaggtatagaccatttaacagaa

SEQ ID NO: 647360 - DNA, 603 bp, Homo sapiens
gagaactgaaagaagacaaggtggcccactcacatcacacctattctgcacagtcctggaagtcttagccaaagcaattaagcaagagaaagaaataaaaggcattcaaataggaagacaggaagtcaaactatctctctttgcagatgatatgattttacacctagaaaaccccatagtctctgcccaatagctcattgatctgatatacaacttcagcaaaatttcaggatacaaaatcattccacaaaaatctgtagcatttctacataccaacaacatccaaggtgagaggcaaatcaagattgcaatcacatttacaatactcacaccaaaatttacctaggaatacagctaaccagggaggtgaaagatctctataacaagaattaaaaacgttgctgaaaaaaatcagagaggacacaaayatgaaaacattccatgctaatggataggaagaatcacctttgttagaatggccatactgcccaaggcaatttacagattaattactatttctatcaagcttccaaaggcattcttcagggaactaggaaaaactattctaaaattcatatggaaccaaaaaagagcccaaggcaa

SEQ ID NO: 647361 - DNA, 579 bp, Homo sapiens
tgagaaaccccaaagacctttagatacgaacaacatttaacagctttattcccataaattcataacttaaatttataaaacaaaaacaacaaaaaaaaagaagaatgggagacaggaagaaaaagaagagaagagaaaagaagaaaagaaaccaaaagaaaaggaaaaaggaagacccagaattttagagaaaactaggaattacagcaaaagttagacattagtttcggatacctattataggcgatgatactttaaacaaacaaagcaagaggaagtcttagaagtgagaaacctttgccataaatgattgaagatcctgaccaaaacacacaacttatatttgaagaccaaaattttgaaatgatttttataagctgttaatcttgatataattatatatatacatatacgtgtgtgtgtgtatgttaaacatactcaaataggtgataratttaaactttttaactctaattttgaaataattacctttactaacatattaaataatggataaatatattatctttaacttaccaacttaataacctgcacactttttaaatcagacaacatata

SEQ ID NO: 647362 - DNA, 507 bp, Homo sapiens
ttattgcggcactattcacaatagcaaagtcatggaatcaatctaagtgttgcttggataaagaaaacttgtggtaaatatacactatggaatactatgcagccataaaaagaataaaatcatgtccttttcagcaacatggatggagctgaaagccattattctaagtgaagtaactcagaaaattaaatactgcatgttcccacttacaagtgggacctaaacaaagcatacacatggacataaagatggaaataacagacataaaataggcctttttcrgccgggcgcggtggctcaagcttgtaatcccaccactttgggaggctgaggcaggtggatcacgaggtcaggatatcgagaccatcctggctaacacggtgaaaccctgtctctactaaaaatacaaaaaaaaaaaaaaaaaaaaaaatcagccaggcgtggtggcgggctcctgtagtcccagctactcgggaggctgaggcaggagaatggcgtgaaccccgg

SEQ ID NO: 647363 - DNA, 507 bp, Homo sapiens
ttattgcggcactattcacaatagcaaagtcatggaatcaatctaagtgttgcttggataaagaaaacttgtggtaaatatacactatggaatactatgcagccataaaaagaataaaatcatgtccttttcagcaacatggatggagctgaaagccattattctaagtgaagtaactcagaaaattaaatactgcatgttcccacttacaagtgggacctaaacaaagcatacacatggacataaagatggaaataacagacataaaataggcctttttcggccgggcgcggtggctcaagcttgtaatcccaccactttgggaggcygaggcaggtggatcacgaggtcaggatatcgagaccatcctggctaacacggtgaaaccctgtctctactaaaaatacaaaaaaaaaaaaaaaaaaaaaaatcagccaggcgtggtggcgggctcctgtagtcccagctactcgggaggctgaggcaggagaatggcgtgaaccccgg

SEQ ID NO: 647364 - DNA, 588 bp, Homo sapiens
acaccacatggtgaaagaaagattagcagaactgttgatattcctataattcattactggaaaatatttattgaattaataatcctcttaattcttaacttaatgtgtttatttcttaatgattagtgagatgcagtagaattatacaaagttcactctctatcccattcttcagaaggttctgctgtaccatttaaacttttatttcttttgtaaatataaaaatataaaagattttagtcttcaaacttttaaacaaatatggtgttaaatgttaaacttccaagtgtctgtgaggttatgtatggtttcgataagctaaaaagaagccttaatatgagggaggcttttactttagggatctaaagcagaaagtattaaagttaaagagataaagcttcagttattaaaatrgaaatctaaacacaacatttaatttttatggaacttttagggaggaaataagagtacaggcattgagaggtgcttcatttattccagtaagaggaatcttcattgactattttttgaaattgtgctagtgattaacaatataaggtcaaagagaggtcaatgaaaaacacataa

SEQ ID NO: 647365 - DNA, 568 bp, Homo sapiens
tgctggtcaggcacagtcagccagcacaggaactatgatgcaggtcctcaggaggtagcctccactgcaccccgctgtgaagctgcactgcaagcaggtgtggccaggctggggccccaggaggggcgagcagactgaaggatgctyaggtcagactggccctgtctcaggggcaagactgccctgcagagttcaggtctgacagttgccctagggctgaagtctcctatgagaacaagtctagcctagggcaatgggtgtccctgaccattctccactacagatgctcccacacaaaaccttctgggctttgcacagtctggagttctaccattaacactttataagcaggtcttcctgacaactcaagtgtccctggtggttgtagggtctcctcctttcaggaattcagggacctgcgacaagaggaggttgccccttgcctgttcaactcacctctcctccaggagattttggggacctggaatgagtcctggtgcacggttgccctttgcagggttcccggcttcctcccccttcagcccaacatctgtgtcttccctctgtc

SEQ ID NO: 647366 - DNA, 567 bp, Homo sapiens
agtcagccagcacaggaactatgatgcaggtcctcaggaggtagcctccactgcaccccgctgtgaagctgcactgcaagcaggtgtggccaggctggggccccaggaggggcgagcagactgaaggatgcttaggtcagactggccctgtctcaggggcaagactgccctgcagagttcaggtctgacagttgccctagggctgaagtctcctatgagaacaagtctagcctagggcaatgggtgtccctgaccattctccactacagatgctcccacacaaaaccttctgggctttgcacagtctggagttctaccattaacactttataagcaggtyttcctgacaactcaagtgtccctggtggttgtagggtctcctcctttcaggaattcagggacctgcgacaagaggaggttgccccttgcctgttcaactcacctctcctccaggagattttggggacctggaatgagtcctggtgcacggttgccctttgcagggttcccggcttcctcccccttcagcccaacatctgtgtcttccctctgtctgctctcaaagcc

SEQ ID NO: 647367 - DNA, 568 bp, Homo sapiens
tgctggtcaggcacagtcagccagcacaggaactatgatgcaggtcctcaggaggtagcctccactgcaccccgctgtgaagctgcactgcaagcaggtgtggccaggctggggccccaggaggggcgagcagactgaaggatgcttaggtcagactggccctgtctcaggggcaagactgccctgcagagttcaggtctgacagttgccctagggctgaagtctcctatgagaacaagtctagcctagggcaatgggtgtccctgaccattctccactacagatgctcccacacaaaaccttctgggctttgcacagtctggagttctaccattaacactttataagcaggtcttcctgacaactcaagtgtccctggtggttgtagggtctcctcctttcaggaattcagggacctgcgacaagaggaggttgccccttgcctgttcaactcacctctcctccaggagattttggggacctggaatgagtcctggtgcacgrttgccctttgcagggttcccggcttcctcccccttcagcccaacatctgtgtcttccctctgtc

SEQ ID NO: 647368 - DNA, 246 bp, Homo sapiens
actaagtatgcaattaccatatatgacccayctattgccctttggggcattaattccagagaaatgaaaactaatgttcacacaaaacctgtacacaatgttcataaaagctttattcataattgccccaaactgtaaacaaacaacccagatgcccttcaatgagtgaataaactctggtatatccatgccaccgattgctaatcagcaatgaaaaggaacaaattactgatatacacaattatg

SEQ ID NO: 647369 - DNA, 519 bp, Homo sapiens
tgaataaaacatggtgcctttcaattctttaatttaattaatgctctccatgttcatgtcacaaaatcaggccagttaatcaattaccagtaattaacagcttgctgtgcccaaaagtttaggggcacaaaaaaatagaaaatacagtttaaaaagatgaagaatcaatggctttacagcacatacatgagtattgctccagcaagagcagagaggtgaaaggtatcctgttaggtacaggatgtgagatgtgctttgttcttactaagcacagctatgaggtggtcagtggtaaggctgggtaggtggagaagcagtaccattgaaaaagagctcgtgccctggtcctcacatattaggacatgctcttcttgttgttcttccccatggggagtatgctctgcaggaccaagaacaygtttccatctggaacccattgtcctaccttccaggtcatgctctgggtcccggtgtccccagaattccttccactatggccctgcatctgcccctgtgtct

SEQ ID NO: 647370 - DNA, 619 bp, Homo sapiens
catatgatcatctcaatagatgcagaaataagtattcaataaaattcagtatccttttatgataaaaaaaaatcttcaacaaactaggcatagaaggaacatacctcaaaataatamaaaccatatatgacaagcccacagccatcatcatattgaatggggaaaagtggaaagcattctccctatgaactgcagtaagacaaggatgccaactttcaccacttttaatcaacttagaaaggaagtcctagctagagcaatcaggcaagagaaagaaataaaaggcatccaaattggaaaataggaatttaaattatttctgtttgcttgtgatgtgatcttatacttagaatattctaaagactcctcctgaagcctcctagatttgattcatgacctaaagaaagcttcaagatacaaataccagtaacatttctatacaccaataacaagatgagaaccaaatcaagaattcaaacccatttacaatagccatgtacaaataaaatatctaggaatacatttaaccaaggaggtgaaagatttctacaaggagaactacaaaatactaataaaataaatcttacacaaacaaatggcaaaacatttcatgctcaga

SEQ ID NO: 647371 - DNA, 619 bp, Homo sapiens
catatgatcatctcaatagatgcagaaataagtattcaataaaattcagtatccttttatgataaaaaaaaatcttcaacaaactaggcatagaaggaacatacctcaaaataataaaaaccatatatgacaagcccacagccatcatcatattgaatggggaaaagtggaaagcattctccctatgaactgcagtaagacaaggatgccaactttcaccacttttaatcaacttagaaaggaagtcctagctagagcaatcaggcaagagaaagaaataaaaggcatccaaattggaaaataggaatttaaattatttctgtttgcttgtgatgtgatcttatacttagaatattctaaagactcctcctgaagcctcctagatttgattcatgacctaaagaaagcttcaagatacaaataccagtaacatttctatacaccaataacaagatgagaaccaaatcaagaattcaaacccatttacaatagccatgtacaaataaaatatctaggaatacatttaaccaaggaggtgaaagatttctacaaggagaactacaaaatactaataaaataaatcttacacamacaaatggcaaaacatttcatgctcaga

SEQ ID NO: 647372 - DNA, 571 bp, Homo sapiens
tccttaaaatgcacaggtgaaggatgcacacattgaaagtggacactggttttacattgaaaatcaactgtcacttgtctttttctatctcagctttctatcacacagcgagccgccctcgttagttctggaagttgatattgagtgtctaccccatgccagactagctctcctttctgcagataaaggaacaagtcacctttggaaaaactaaggcttagattatactgcttttcaaataactgacacatttggaaatttttggaacctctcctcggtaaataatgttgtagagagcaaactgaggcagaggaagtaccccacacagactgatgtaaatccacatcaaagttctgccttcaaatgaagtggcattcctattcaaatgtaaagctttatatgcataaaaattaggtgatcaccagaggaaaataaagtaattttcaaaatctaatttaattcacttaataagaccataaaccaaagaaaatgaaagatgccaaggaaaagagaagatatataccaaccaataacaggtttcatttcctamtaagaaaaaaaaaaaaagagt

SEQ ID NO: 647373 - DNA, 512 bp, Homo sapiens
aggacatccagctttagagacatatgaaatgttctttaagctctcatttttataaagccaatagtgtataatgaaatgttttggggggagttcctctttgagcacaagagtgtttattcttgggaatcaggcatatcttggtttgtctaatgggctagagcggtaagcttgccaggagtgtttgcagtgggaactgagatcrttgtaaggaaaggaacagtcaggatgagcctaatacaagctgtcagtggcctgagaggaggggctgagagccatacagtatggtagtccagtccccatggcctcttgtgtgacagagtggttctattatacatacaaaggaagaaaatatcataaaacaaaaagttccccaaataacccaagattttagaggctcccttcccccacaagaagctctgtaaggcagtgtttttcagggcaggattcctttggttctcttttaaaatccagaagaggaagagaggcattctcctttctttcgtatggaagac

SEQ ID NO: 647374 - DNA, 470 bp, Homo sapiens
ccatgtaaagtgcctgctactgctttgcttttcaccatgggcaaaagctccctgaagcctcccccaaagccaagcaatgtctatgccatgcttgttcwgcctgcagaaccgggagctagttaaaccttttttgtttataaattacccagtctcaggtatttctttatagcaatgcaagatggcctaatacactagcatctggcaaaataatgagacttcatctctacaaagcaaaagtgataataattaaatgttagctgaatgtgatggcacatgtctttaatactagctactcaggaggttaaggcgagagaattgcttgagcccaggagtttgaggttacagtgagctaggatcatgcctctccactccaatgtgggtaaaagagtgatactttgtctcaaaaaaaaaaaaaaaaaagagttgctatgtaacagatataaagtttcagttatgcaagattaataaat

SEQ ID NO: 647375 - DNA, 470 bp, Homo sapiens
ccatgtaaagtgcctgctactgctttgcttttcaccatgggcaaaagctccctgaagcctcccccaaagccaagcaatgtctatgccatgcttgttcagcctgcagaaccgggagctagttaaaccttttttgtttataaattacccagtctcaggtatttctttatagcaatgcaagatggcctaatacactagcatctggcaaaataatgagayttcatctctacaaagcaaaagtgataataattaaatgttagctgaatgtgatggcacatgtctttaatactagctactcaggaggttaaggcgagagaattgcttgagcccaggagtttgaggttacagtgagctaggatcatgcctctccactccaatgtgggtaaaagagtgatactttgtctcaaaaaaaaaaaaaaaaaagagttgctatgtaacagatataaagtttcagttatgcaagattaataaat

SEQ ID NO: 647376 - DNA, 426 bp, Homo sapiens
acattttcttcatttacctttaaggaccctaaatcctcctggctttcctcctgcttgattgacttcccctttgagtcacttttgttaggttcttattataaataccaagataatgcctcttattgttggaatgacaaatatctccaactttgatcttttcctctctctatccactcacatccttgatgacttcatatagatatagatatagatatagatatagattcttaaacaacactatttgtatacctaaagagaatctcmttttaaaaaaaattctaaaaccacatttctgacctcctcccaatgtaatcttcctacagtattccctatcacaagaaatagtaactctagcttccaagatgatcaaagccttaaagcaaatttatctcccatagcagagactgactagctatataaaaaaag

SEQ ID NO: 647377 - DNA, 581 bp, Homo sapiens
caccctgctcaggtctgaacaggagtgtccaggtttgtctggccatccgactttttcaatgtatagaagctctcctattacctactgtattcattttatagggcttttatgacaaaataccacagatcggatggcttacaatacaaaaccaatttcctcacacttatggaggatgaaagcctaagatcaagctgccagctgggtgggtttcctctgaggtctcgctccctggcgtgcagatggcgccttctcgctgttctgtggtaacatggccgtccctcggggcgtgtgcacccccccwcctgcttccccttcttataacaacagtcagattgcattagggccccactccaggaatctcactttaacttatttagctctttaaaagacactaatccaagtatgatttcattctgaaggaccaagggttgggacttcagcacatgaatttaggagggacacagtctcccctagcagcctcctccagggatgtcaaataaaaggaataaaaggacactgatgctccagagggccttgaaagcttgcagctgctttgttgtggtgggacatgggtaagcccg

SEQ ID NO: 647378 - DNA, 581 bp, Homo sapiens
caccctgctcaggtctgaacaggagtgtccaggtttgtctggccatccgactttttcaatgtatagaagctctcctattacctactgtattcattttatagggcttttatgacaaaataccacagatcggatggcttacaatacaaaaccaatttcctcacacttatggaggatgaaagcctaagatcaagctgccagctgggtgggtttcctctgaggtctcgctccctggcgtgcagatggcgccttctcgctgttctgtggtaacatggccgtccctcggggcgtgtgcaccccccctcctgcttccccttcttataacaacagtcagattgcattagggccccactccaggaatctcactttaacttatttasctctttaaaagacactaatccaagtatgatttcattctgaaggaccaagggttgggacttcagcacatgaatttaggagggacacagtctcccctagcagcctcctccagggatgtcaaataaaaggaataaaaggacactgatgctccagagggccttgaaagcttgcagctgctttgttgtggtgggacatgggtaagcccg

SEQ ID NO: 647379 - DNA, 539 bp, Homo sapiens
atgttagccctttgtcagatgggtagattgcraaaattttctcccattctgtaggttgccttttcactctgatgacagtttcttttgctgtgcagaagctctttagtttattagatcccatttgtctattttggcttttgctgccattgcttttggtgttttagtcgtgaagtccttggccatgcctatgtcctgaatggtattgccttggttttcctctagggtttttatggttttatttctaacatttaagtctttaatccatcttgaattaatttttgtataaagtataaggaagggatccagtttcagctgtctacatatggctagccagttttcccagcaccatttattaaataaggaatcctttccccatttcttgtttttgtcaggtttgtcaaagatcagatgattgtagatgtgtggcgttatttctgaggcctctgttctggtccattggtcaatatatctgtctgataccagtaccatgctgttttggttattgtagccttgaagtatagtttgaagtcaggtagtgt

SEQ ID NO: 647380 - DNA, 539 bp, Homo sapiens
atgttagccctttgtcagatgggtagattgcgaaaattttctcccattctgtaggttgccttttcactctgatgacagtttcttttgctgtgcagaagctctttagtttattagatcccatttgtctattttggcttttgctgccattgcttttggtgttttagtcgtgaagtccttggccatgcctatgtcctgartggtattgccttggttttcctctagggtttttatggttttatttctaacatttaagtctttaatccatcttgaattaatttttgtataaagtataaggaagggatccagtttcagctgtctacatatggctagccagttttcccagcaccatttattaaataaggaatcctttccccatttcttgtttttgtcaggtttgtcaaagatcagatgattgtagatgtgtggcgttatttctgaggcctctgttctggtccattggtcaatatatctgtctgataccagtaccatgctgttttggttattgtagccttgaagtatagtttgaagtcaggtagtgt

SEQ ID NO: 647381 - DNA, 522 bp, Homo sapiens
gtttcagcctaagagtacaagttaacatacagagaatcagagggtgaaatcatggacagtgcctggatctttaatatgatcgcaaaactgctgctttactagaatgtgagattataataaccttcccatatgttaactcattgttagctgtgatttctgtgttacttgaagtttaaagcatcttaactgacacaaaacatgaaggaaaatgtttcatatactttagtaaaaatgaaataggaattatttccattagtaaaatgaaattttaagctacttgttcttgagcaggaagttttaattttctgttaatttatttcttaatgttatccatacattataaactttatcttagagttatttgcaaaaaaaaaaaaaaaacamaagaggaattctttaaggaatagataagtaaatgtttagttttactgccgatagaaatacaatttacaaaatttagataagcaaaatataaacacactctcagaattatttatttttaaagtattttgagtgcatgca

SEQ ID NO: 647382 - DNA, 478 bp, Homo sapiens
agtagctgggactacaggcgcccgccaccacgcccggctaattttttttttatttttagtagagayggggtttcaccgtggtctcgatctcctgacctcatgatccacccgcctcggcctcccaaagtgctgggattacaagcgtgagccaccgcgcccggccggcctttcttatggtagtgtgttggagtttttctccatttctatttaaattgggtttatataactcacatatgggggaatatcatgttgttcagacaatgaattgctcaaaagatttaaaaggttataaaggcaaatatctttctctgtacattaagggttagatttggtgaccatatataaatgcacatgaaacccctgtaacaacacacaagcagatgctagaaaatgctcacacttatgttaaagagcaggaagatttgattgtaatatttttgaacttagaatatatttaggtgtagatcccagttttgaa

SEQ ID NO: 647383 - DNA, 560 bp, Homo sapiens
cttgcataaaattgtcagaggagtaaaggctcaagatgtcatgaactcaaggagaaaaaatgtgcacaaaattaagcagtttaargccaaaacaaaacttcaataaggcattatcaaaagaggtggccaaaaccaaattcacatgaaagacgaaagtttcatagagttacaattgtagttaagtgggattaatgaggtggtacgtgccacatagcccataagaaaaatgtaaaataaaagtaatgtttgtaaactggaattctttaacaaaacatgctatttaagaaccaaaattaggtcctgactcaatctatctttcttatggtgtgtttacagtttttaaaattaaaacaaatattacatgcctattctaaaatatggaaatcacatcataagcataaactatcataagttattcatttagagaccaagaatgaaatataatatgtattgtggctggaagttacatggaatggtggggggttgcagattctatctgtaatactaaatcttgactgtattttataagcaatcattcattatgaactcttttatacaaa

SEQ ID NO: 647384 - DNA, 610 bp, Homo sapiens
cctacttactcttactttatgcacgatcatgataacatgcttggttatttgtttttcacactttcagcagaatagaaatactatgttatgaaaacaaaaaggcttaagacgtaagaatactggtagctagaatgtatagccaacayctgacaacaaagaaggcaaaacaactaaaaaacataaaaaagatgtttaaaatgatgtcatttaatgttggggcaaactccacacatttcaaatagtcccgaatcttttagccccaaacaatagctgaaactcacaatgatgatcttgggccatcaagattacattttgttctgtataatccgcgtaaggatataggaaaggacaggatctattgcagaaggaatttcagccaaatggtttcattaaaaaaaagttgtgatgcttaaaggaataaataaatccttaattcttggacacattggctattcagaaaaatgacacttctttgtaagagagtctgaacaacaatttcattctctcattggccaattgtttcagcaatcaccatagataaaagcttccctatagccattttttctaatgagcaaacagttattattcgatacatggctcaatattcaga

SEQ ID NO: 647385 - DNA, 550 bp, Homo sapiens
tattgagagcatttagactgtccaatgggtttcaaaaatattaattgttaacaacaatttttaaaaacttttaaaaagagatttttaatgtcaacctgtcaaacaaatgaatatctttttctttctctgaaagatgaagtgaagaggtgatcaaaacaatgtaagggtagaagagaatgaaagaaattaaattattctctacttggagaagcagcatgttagtaaaagaaaaagccaagaatattataactgtgcaaagcctcttagaatatcttgccacacgtattctgaggatttttactctcctatacctttgattttcatgaatttagggcatactattttaaaaattgtttaagkttgtcagataatataagattaacaatatctctatttggacccgagtatttaatcctttctattctccattttcatttaaattctgagtaaatgcacacatacatgtttactaaagctatatttttgcatccatcaaaattttagggatcctctcaatactacccaaactaggacatgtgaaaacaataaa

SEQ ID NO: 647386 - DNA, 437 bp, Homo sapiens
gattttatgatgactaaatctcctctgctctcaaagaggttaaaaataaattacatagaatgctggtrggaaaatgtgatgaaagattcatctttggggggtgataggaggtaacttgtgtataataaggaacactgtgattcctttgaattttgtggctggtcagtgagatataaaagatcccactgaaattcctgtttcatgttattgactctatttagcttgaaacagatataatgcaatgattcattgttttacaagtaaaaatacattggcatgataggtccctttataaattattgttggcatgttcttcagagatgtggatcataaggaacatttttgttctattttgttggtaagtcaagatacccactgaatgtgtttaactgaagtgttattgaaagtagattttctcatactcgaaagctgttttt

SEQ ID NO: 647387 - DNA, 437 bp, Homo sapiens
gattttatgatgactaaatctcctctgctctcaaagaggttaaaaataaattacatagaatgctggtgggaaaatgtgatgaaagattcatctttggggggtgataggaggtaacttgtgtataataaggaacactgtgattcctttgaattttgtggctggtcagtgagatataaaagatcccactgaaattcctgtttcatgttattgactctatttagcttgaaacagatataatgcaatgattcattgytttacaagtaaaaatacattggcatgataggtccctttataaattattgttggcatgttcttcagagatgtggatcataaggaacatttttgttctattttgttggtaagtcaagatacccactgaatgtgtttaactgaagtgttattgaaagtagattttctcatactcgaaagctgttttt

SEQ ID NO: 647388 - DNA, 437 bp, Homo sapiens
gattttatgatgactaaatctcctctgctctcaaagaggttaaaaataaattacatagaatgctggtgggaaaatgtgatgaaagattcatctttggggggtgataggaggtaacttgtgtataataaggaacactgtgattcctttgaattttgtggctggtcagtgagatataaaagatcccactgaaattcctgtttcatgttattgactctatttagcttgaaacagatataatgcaatgattcattgttttacaagtaaaaatacattggcatgataggtccctttataaattattgttggcatgttcttcagagatgkggatcataaggaacatttttgttctattttgttggtaagtcaagatacccactgaatgtgtttaactgaagtgttattgaaagtagattttctcatactcgaaagctgttttt

SEQ ID NO: 647389 - DNA, 588 bp, Homo sapiens
gctacaccaggcaactcagtgataagcacaacttgtttatttgtctttgatggatgccaggtggattgtagtcagacaatctgacttcagcagactcggtatctgaatccacggattcaacctgacaccctctcctggggcaaaatgcaggtcacacaatggacacaaaatgcaggtcacaaaatgggtacccacaacctaaaggggtcacaatggcagcagccccaagaatgaagacaaataagtacttaggccacaacaaaagaggaagagagctagccagcacccaggagatgcagataacaaggtggcaggtcaggtccaccagcttttctgtttgtgtttcaggtttgctccaagaaaccaagcttttgtcaaccttttaattagacaacctgtattgcttccagcaatgagctcaggcaatttgctgagttttgacatttttcccctctttgagagctgtcagcttgtgaggcagtatcctctagtaggagatttggtgccggctrcaaaattaaaagcaagaaataaccacaaataagagagcactcataaccaaatatttcctgatctggtgtgggctgt

SEQ ID NO: 647390 - DNA, 435 bp, Homo sapiens
aagcattaactactggggaatcctttacatttcagtgacaggttgttatttggggcctcatataatggatgctgtggaaattaacttttttagtgaaatgaaatgacctcactaaattagaaacaagctcttcatcgtccacctgagtttagaaacaacaactgaagttttatcattttactttatctgcttctatcacracctgcagagggtgcaagaaggtttcattttctacaatttatagagaatgttctagaccgtggcctgaggaacacagagatctctgccagccctctttattgatttcttgggggctaggctcaatgtgaaacaaaaatgatccacagatttctcaagacacatgaactgtaagagtggttctgagttggtgcttattatatgttactagtcattgagtaacatatttttcaatgt

SEQ ID NO: 647391 - DNA, 578 bp, Homo sapiens
atctggcctaggcataaactagagaataagtcccatgactaaatttggttaactaagaataatcagttggaccttatcttaattgactgatggtaacatttttcctaaactttccacctaggcatcagttattgtcttgcctggccgataaataattaaaacctttctcttatttagaactcttacagtcaagaaagccatgctagtgtctaggtgtgttgcatatgtactggtaaattatcacttcaggccctcaatgagtaaccagaagatatgttttatatacatggaaaggccagtcaatatcaacaaaataaacattttgcactggaaagcattgaaaggccatctgattacagaaagatagtgttgtgggtatattctcagaggataaaaaagtaacccttcggtagcaattgcagtctgaattaaatcagtgagtctgatttctaaaattctttatgcaaaaaacaaaaaaaaatggccctgttgargcacgtagatgccttggagttaatcctgattagaaagcacacgggctggtaaacaaatctgacagatgaaaacattaacagcca

SEQ ID NO: 647392 - DNA, 602 bp, Homo sapiens
taattagacatccctattatgtaaagctggcatctggtatgagatttcttttccaaaaatttgtgagtaaccagaatttctatgcatctctggaatgcatgtattctaaactcattgtgcaacccttgctgacatcaaggcaccaaaatgtctataaatgtaattgtttaccatgacctatgtggctaatatggtaaaaattacccttaagctcccactttaaggtccataaataccctaaggaaaaatctagtgcagtggcgtactcagtcctctcttgctgaggagccctgctgcactyctctgcagcattctttccatctaatacagctttcctttccaaatctatacagttgttggtaaattcttcttactacccacaagccaaccacactccactgcctgggctgtgacagctcgcatggcagtccatataaatgcacagtctacaaatccatataaccacaaaaagaaaacaatgataaagagagctgcacaaaggaaaatagagaaaggaagcaaaatgaatgaggttagatacgttcttaggtggaataacaaccccatcttggagtaggttagtcttgccaccaaaactttta

SEQ ID NO: 647393 - DNA, 623 bp, Homo sapiens
actcagctacagacaccctgaatccacttctgtcttgtttagaagtgaattctttatgacttatctcctgagggattgttctgttttcttaggagatgtggaagtaacaacgaaattcttcccaagcattaacractatagattataggatagctccacactttccatttcatcttaggtaagtaaaagtgttttgtcagcatccttctgaagaccatgcaccagcatttgtctccaatatagtctataatagagagactgctatttctctgatctgcatttggagtgggaggggggtcaggggaacagcaatattggcaagtttgtgaaagatacctatttgaacttgtagagtttggtggcccctgtaaacgatacctatttatttcacttcatctatcagtcataatgtctgagatagaaatattgaggcaagattcatttgacagaatttaaaataggagggaactgatatttgctgagcacagccctgtatacatgcattaatccatcttcaaattttcaagaatttttttaaaaaaacgtctttacataaaacatctacttattggaaactcattcttgtgtgagtcagaccacataatgtaaaattatgagaaaat

SEQ ID NO: 647394 - DNA, 576 bp, Homo sapiens
tatgttctattacactaccatcttacaataccatcaaagcaaagcttgaaggaaattaccacgttttgtcaatgtcctcaggtcaaaatcggctgcaactttacctttctggtttacagttttcatgtagatgtttgtagctaaaaagttctttctacgtatggtcacatacatgttttagaatattttaatggtataaaatttttgttttcaaccgaaagattggtagcacattacataaacagaattcactaattaacttgaaatttcaaaaatagtatatccatgtattttgcactaggatctctattagtcatgcaatgaaatagttatcatctctgctgatctacttaataaataaactattttatctttccttttctccatcttctttcacttgctctctmgggttgtagccattttgatttctatagtttctgtctttacttttaaaaagttttagagtcaatagaggatagacatagtatacagtagtgtgggcacaaataaacatgattggctaaatagccactctgaatctcatgatattaatttttaaaattgggactgcaatga

SEQ ID NO: 647395 - DNA, 555 bp, Homo sapiens
tatgtcatctttacatgttatagaaataatctaagggaaaaaattatatgcaaaatgatgctgtcagcattattcaaaatagtttttaaaaatcagaatactttaagacatccagcaaaaaggaaatggttaaatatgatatatttaccaagtgaaatactatgctgtcaataaaattataattatgttctacrtgataaaaattacatatataaattcaaaagacaaactgagaaaaaaacatttgtaatacatgatacatcaaagacttatttctttggcattaaaacaggagaaaagattaataactcaatagaaaagctagcaaaagatatgaatagttcatagaaaaggaaatacagctatcttttaagtatatgaaaatatacaacctcacttataagaaaaatggaaattaaagctaaaataaaatatagtttttatttttcacaatggcaaagaaaaatatttgatactgcatggtagagtcaagaatttgagaaagcaggcacttttatatattattggtagaataatacattggtgcacactctc

SEQ ID NO: 647396 - DNA, 585 bp, Homo sapiens
tggttccaatggcaaaggttaatttcaaagtttttatagtgttattcaaagcacgtttgatttcagccttggcaaccatgggcagaatgtcagcaatgctccctctattagctattggagagaaaacactgtgaaactctaagaccttggttattgggccaatgaaacatttatgccctgatcagatggaggaaaacttcagcagggttagtgagacaccttccgagtgtaccaatgaagctcttgcctgctgttacagataaatgactttcatttcactattggcttgtgcttgagaaggttattcaattgattccagttttttgcaatgccttgaaggcaaataatgttgtagcatccactgtcctcataatacactgtttcttttctaaggaaggttgttgtcataataccctagatatyaacagaaaatattccacttcttatcatatattaatttggctctggaataagtaaatgtaactaccagaatgctaatgaggatgttacgctgatgtttatttgtgtgttctaatctgtagataaacagcaagatctcttataattcatgattccaagtctcag

SEQ ID NO: 647397 - DNA, 585 bp, Homo sapiens
tggttccaatggcaaaggttaatttcaaagtttttatagtgttattcaaagcacgtttgatttcagccttggcaaccatgggcagaatgtcagcaatgctccctctattagctattggagagaaaacactgtgaaactctaagaccttggttattgggccaatgaaacatttatgccctgatcagatggaggaaaacttcagcagggttagtgagacaccttccgagtgtaccaatgaagctcttgcctgctgttacagataaatgactttcatttcactattggcttgtgcttgagaaggttattcaattgattccagttttttgcaatgccttgaaggcaaataatgttgtagcatccactgtcctcataatacactgtttcttttctaaggaaggttgttgtcataataccctagatatcaacagaaaatattccacttcttatcatatattaatttggctctggaataagtaaatgtaactaccagaatgctaatgaggatgttacgctgatgtttatttgtgtgttctaatctgtagataaacagcaagrtctcttataattcatgattccaagtctcag

SEQ ID NO: 647398 - DNA, 479 bp, Homo sapiens
ggtatggggtttccttttggagtgattaaaatattctggatctagataatagtggtgatggcacattaggttatgtatattttaccacaataaaaaaatgatattcartgactacaaaagttaacattgtatggtcatgccataatttacttcttttctctattgtctaaattttaatgtatttaaaatttgattttagcctattacaataatttttcattaaatctgactcacagtataataatgactgttaatttgatgcatatgcttttattagtttgaggaaacattaatctattcctaatattccaggaatttttatcagaaataagtgctgaattttatcaagcaccttttcattacccattggttgaaataattattttattatgtgaccttttgccatgatatatttgcacatttccttatagcaaactgctcttgcatttctgttatatatcttggtcataatgtactgt

SEQ ID NO: 647399 - DNA, 573 bp, Homo sapiens
ccagggattagcgagtgggcatttttggtgaggggaatattattatgtctatggcaccatcataaatttaggtcagatttaagatatagtataggtatagtataaatatatattttatttgccatgggtgaactttgaatacattggaatctctagtaaaattaatgtatattttatatcattccccatttttatgtcttaaaaatttcttaagttttttagtataatagttatacaggtctcaggtctatgatagctttcttttttttttttttttttttgctttgtaacatattatggttatttctattacaggaggtatacactgagttccaatcctggttagggttatagccagtattayaatgtgcttctattagattacagtgttcttaataagaaatgtgttctaagacagagacttccagttagacactgatatgactaacagagtatgcccattcttgtttggcttaaaaagacgcatgtagctttaaatggtaaaaggaataatgcaggcacagatagaggttccacaggactcttaaatcttagtgctgaagtaaactctga

SEQ ID NO: 647400 - DNA, 615 bp, Homo sapiens
aatatcgtgaaaatggccatactgccsaaggtaatttatagattcaatgccatccccatcaagctaccaatgactttcttcacagaattggaaaaaactactttaaagttcatatggaaccaaaaaagagcccgcatcgccaagtcaatcctaagccaaaagaacaaagctggaggcatcacgctacctgacttccaactatacaacaaggctacagcaaccaaaacagcatggtactggtaccaaaacagagatatagatcaatggaacagaacagagccctaaattaactaaatttctaaattaaagttcttttaaaatatttactatcacttctaaagtttttactgtgtatgctgggcactgttctaagtgctttgcatgtattagtttatctattccttacgacaattaaaaggtcaattgtgacattggtattaggaggttgggccttagggaagtgatgagatcatgagggtagaaactcataaatgaaattagtgcttttatagaagaggcctcagagagttctcttgcctcttctaccatgtgaggacacagggagaaggtgccatttatgaaccaggaagccatccctcaacagataccaaatct

SEQ ID NO: 647401 - DNA, 615 bp, Homo sapiens
aatatcgtgaaaatggccatactgcccaaggtaatttatagattcaatgccatccccatcaagctaccaatgactttcttcacagaattggaaaaaactactttaaagttcatatggaaccaaaaaagagcccgcatcgccaagtcaatcctaagccaaaagaacaaagctggaggcatcacgctacctgacttcmaactatacaacaaggctacagcaaccaaaacagcatggtactggtaccaaaacagagatatagatcaatggaacagaacagagccctaaattaactaaatttctaaattaaagttcttttaaaatatttactatcacttctaaagtttttactgtgtatgctgggcactgttctaagtgctttgcatgtattagtttatctattccttacgacaattaaaaggtcaattgtgacattggtattaggaggttgggccttagggaagtgatgagatcatgagggtagaaactcataaatgaaattagtgcttttatagaagaggcctcagagagttctcttgcctcttctaccatgtgaggacacagggagaaggtgccatttatgaaccaggaagccatccctcaacagataccaaatct

SEQ ID NO: 647402 - DNA, 578 bp, Homo sapiens
gcatgtggcttttttacaaacactgttagaaatgagcatttttggaagctttgcacactacaaggcatctgctaaaggctctggatgcrtcatctcatttaattctaactacactatgaaatgggcagatttgttttccccactttatacattagacaagatgcagaaagattatacaaccagtcagaggtttgtaataagtaaagggttaggtaagatgtagagccagttagctgccataacattgtccctcttctatgttttactatttccttaggcttgaaaatatcagattgaaaattattcaagacattaaattaaccaagacagaaaattaaccaagacagaggctcttcgagtataaccctcaaagcttagctcaaatgctacctgctttatgaaagtgcccttcctttcagtcttgatgtagtacctcattctcttcgctcacaaaatgttttatttgtctccctttcgtaccactattcactgttggactatagagactaatcagaacagtattccctaagtgtagagactgtcttattgactttgttccttttttttttttttttttt

SEQ ID NO: 647403 - DNA, 430 bp, Homo sapiens
atggatggctgaatatttttaatgttaatctggatgttttggcatcawataatgtaccccaacgttagcctgcaaaaatcagagaccgtcactcttttattctcagatgtggttagatgctgaactgtcacacaaacgaatgatggctatttaacacactgtcatcctaattctgggggaaattccttcaggggagcatgagacagccaagattcctttgagaaatttcccctcctaccagatgttaagtatatgacaggatatgttctagtgtgtttttgaaagcatagagtgtacagagaatttttaaaaaggaaattggcaactaacatcaaacttccttcataggaggcatctgacagaagtttagatgtcagaataattgctgacttttttttttcttctgttacccttcaagcatttcttctcc

SEQ ID NO: 647404 - DNA, 495 bp, Homo sapiens
gcttatatagtcatcttattattgaactttatctactctaaatcacatttttttcacacatctcaaatatgcacatggtttataatcagtgtcatgtcataatttgtttggccacactgtttaatctcctggtgatacacaatataatggtatatgttacaatagatcttaaatccagtggaatatggtgacagccttttattcagcatgattttctgggrgtgctgtgttataattggtactgtagggatgtagttgctgagctaaaacaagctgtccctaacttaggacgttgactttcaaagtgccacaccgattttgtgctctagagtttcttgtggtaaggaaacaggtaggtcaccaggacagcagctctgtccttttgttctttctttttaaacaaatgagacttctatataagctttccttaagagagaagctgtgttgccaaaccaaacagaattttgaaaatcaatgacgagagacattgactct

SEQ ID NO: 647405 - DNA, 552 bp, Homo sapiens
ggacctactgggtgctgggtgggccctgctgtaaaactccagccgctacaggggtcaggcttgatctctcctccccagctaataatcaaatagtggctaccatttagtttacacagaataagctgaagcctcagagaagcaaaacgtcttgcccaagatcccagagtgaagttgcttgagggaagctgccccacccasccctttgattgacaagtcaaggcctaggtttgagctctaagagaagggccacctgtctggctgggatgctggcaggactggaaatggcagggctggctgaggatgggggctgccagaagagcccctcttcctggtgtacggccgttgggggtagctgaggtcggtacagtatcgattctgtcaccacatccgggggctggggctgaggaaggaagtctgaggctggagtgaaaacccaaaccaccacctggggaactgcattgagcccagagggatgggcagggagcacaccacgtggagcccacgaaggctccccttggcgtcatctaagggcctcctgcccacctgcaccct

SEQ ID NO: 647406 - DNA, 589 bp, Homo sapiens
tggcttcatatcctaactttaaggtacaggacaagtccatcacctgtttcagctacacattcacatactgacaccagaatagatgctgctggcttgtcctgtccttcttcctgtccatcttcccttactccatgtcctggggcagaaggtaattatgctgctcatctgccttcatgggtaggcagcaacatcacgtcaaatccctagaccctcaactgcgctgaaataaactgctaattgctgaggaactaatcactttctataatttaggattccctcaacccacgtatgttgatttatggtttatacttgtattaactgagttttatgaacttattaaaaaatagatacaaatattaatccctgctagctagttttctctccataaaaattttgtgaggatgttgcacaaacattggaagcatcttaagagctttagcaaataatattatttggcagtaagagcgatcaatttyctatcctatctccctcatagactgtagctgtgaaaattagttttaccttgtattttgttgtcttaaatgtcagtgtgtgttatagactctctgggatttaaagtttgcaacat

SEQ ID NO: 647407 - DNA, 541 bp, Homo sapiens
tccataatagtggaaaagtaaagcagactattttgatcagagaaaaagaagggaaaatatagatcaaattgttatcaattttttaaagtgtttcaaggtgtggtctatatgattttttgctctcattgcctataactttaaccactcattgtgcttagaattcttgccaaaaaatttagccaaatttgttttggatttctgatgggacatctttttctttctttctttctttctttctttctttctttctttctttctttctttctttctttctttctttctttctttctttcttttttttaaagcaagctaacataggaacagaaaaccaaatactgcatgttcycacttataagtgggagccaaataataagaacacgtggacacatacaggggatcaacagacacaggggccttcctgagggtggagggtgggagaagggagaggatcaggaaaaataactgttgggtactaggacatctttacagtagatttatttttaattcttcctttaggggctttgtgctctatttaaaaaat

SEQ ID NO: 647408 - DNA, 578 bp, Homo sapiens
aatacaaaccacacagtggaatatctgaaacatatgtaactcataaaggactccttcacatggacattttaaaaatgtaaaactttgacaaatcaataagaaaaagatagctacttattaaagataggcagtaaacatatgaaagggtgttcaagtccattagtaataagggaaaagaaaattaaagccacagtgaagagtcaactgatctttgatgcagggtcaaaggcaatactatggagaaaagagtcttttcaataaatgttgctggaactgaacatctgtatgcagatgcaaaaaaaaaaaagtggggggttacaaaagagattacagacctaaatgtaaaatacaaatttataaaattcctagtaaaaattcccagaaagtaacataggataaaatctagatgaccttgggactggtgatgactttttagatatgataccaaaggtacaatcyataaaataattgataaactggacttcattaaaattaaaaatttttggacactgtcaaagaataaaaacacaagccacagactaagagaaaatatttgcagaagacctatctgataaagg

SEQ ID NO: 647409 - DNA, 541 bp, Homo sapiens
aataccagatcactctctcactcccgaagacctattcacatttccacagtgactcaaactagaatgtggtggtataygccaaaagagccagatgtacttctctattcattttcctcaggctttttaggccatatggttctcaccagtcttataatgagactttaggtttaagatgcataagtccatcatttccagaatgcatagcccagacacagagcccaggctattttttcccaagttgacttggcgctggatcgtggtgtgatgaatttattatgtacagcagcaggcatggcactttttaaaagcaagtgccagaaacagaagccattgatgaaaaaaaaaaaaaaaaagtcaaaactttgccaattttctccaaataccagcagagtaaactatcatcaaatacaagtcattttccccataaataacagcatgaagcaaatgtattgcattctcaactctttaaaaagactaaaaataacctcagaaagctgatctaattatcctacataaatacaacatgtgaacattagagtat

SEQ ID NO: 647410 - DNA, 541 bp, Homo sapiens
aataccagatcactctctcactcccgaagacctattcacatttccacagtgactcaaactagaatgtggtggtatatgccaaaagagccagatgtacttctctattcattttcctcaggctttttaggccatatggttctcaccagtcytataatgagactttaggtttaagatgcataagtccatcatttccagaatgcatagcccagacacagagcccaggctattttttcccaagttgacttggcgctggatcgtggtgtgatgaatttattatgtacagcagcaggcatggcactttttaaaagcaagtgccagaaacagaagccattgatgaaaaaaaaaaaaaaaaagtcaaaactttgccaattttctccaaataccagcagagtaaactatcatcaaatacaagtcattttccccataaataacagcatgaagcaaatgtattgcattctcaactctttaaaaagactaaaaataacctcagaaagctgatctaattatcctacataaatacaacatgtgaacattagagtat

SEQ ID NO: 647411 - DNA, 541 bp, Homo sapiens
aataccagatcactctctcactcccgaagacctattcacatttccacagtgactcaaactagaatgtggtggtatatgccaaaagagccagatgtacttctctattcattttcctcaggctttttaggccatatggttctcaccagtcttataatgagactttaggtttaagatkcataagtccatcatttccagaatgcatagcccagacacagagcccaggctattttttcccaagttgacttggcgctggatcgtggtgtgatgaatttattatgtacagcagcaggcatggcactttttaaaagcaagtgccagaaacagaagccattgatgaaaaaaaaaaaaaaaaagtcaaaactttgccaattttctccaaataccagcagagtaaactatcatcaaatacaagtcattttccccataaataacagcatgaagcaaatgtattgcattctcaactctttaaaaagactaaaaataacctcagaaagctgatctaattatcctacataaatacaacatgtgaacattagagtat

SEQ ID NO: 647412 - DNA, 606 bp, Homo sapiens
cccaggctggcctcaaactcccgggctcaagcaatcctcctaccttggcttcccaaaactctgggattatggacgtgagcgactgagcccagcttaaagttctaaacaaaacaaaatatcatcttgccttgattcccacaatagttatgatcctaaaaatttcagtatatattcaaccatgcaaaaaacacatgacgtttatatgtaaaacagagttacattccaggcacaggtagtctgtaagattttcatcaacacaaatgtctaytgtgattttccaaaggcatatgggacacagaacagttgcgtttcaggaagtccagcatccttggcccccacttcctaaaatgctagttgacccacaattttgtcattgtgacaaaaatgcttccataaatgtccaaactacgcaccccccagaagtatggcccccatggaaaatcaatgtctgaggcgaccccaggaactgattagcggtaagatcgcataccttaactctgtatggcatgaattgctcagtagcatcaaggaaatggagggcgaaatactgataaacaatataggcaagtgttagtgacgtgtttctcaagaagttaaaaatacttg

SEQ ID NO: 647413 - DNA, 544 bp, Homo sapiens
agtatgatttatggcaaacatagatctctaatctccatttctctctcatatatctatatttatctatccatatatatgtacctatatatatcaaatatgaagatatgtttatagcaattgcatatacatagagagatagtatgtagtaggaagagagacatagatattattcttcattttagaatgttatcttggtatgtttaaaaggaaaaacttaagatgtgttgcaattgcagtatgagtttcaggtatgtacatgttatgtgtgtgtgtgagagacacacacaaacacatttcaaacatgttttatgtttaagctcaatattcaaacacagaaatataacatctattcttartatgttttatgtaagtacagcagcagcattattaaatactgtatttctatggtgattgaaaattagtaggcagagaatttttgtaatggttcttaataatttttgtaatagtaaatgattactttttgtttagtatagttttataatctatacatgaataaagtggatatttctattcatatagaaat

SEQ ID NO: 647414 - DNA, 544 bp, Homo sapiens
agtatgatttatggcaaacatagatctctaatctccatttctctctcatatatctatatttatctatccatatatatgtacctatatatatcaaatatgaagatatgtttatagcaattgcatatacatagagagatagtatgtagtaggaagagagacatagatattattcttcattttagaatgttatcttggtatgtttaaaaggaaaaacttaagatgtgttgcaattgcagtatgagtttcaggtatgtacatgttatgtgtgtgtgtgagagacacacacaaacacatttcaaacatgttttatgtttaagctcaatattcaaacacagaaatataacatctattcttaatatgttttatgtaagtacagcagcagcattattaaatactgtatttctatggtgattgaaaattagtaggcagagaatttttgtaatggytcttaataatttttgtaatagtaaatgattactttttgtttagtatagttttataatctatacatgaataaagtggatatttctattcatatagaaat

SEQ ID NO: 647415 - DNA, 564 bp, Homo sapiens
actgttctcggtttgacaaacatagccctttttttcctcagtaggcttatttagttcttctaaacagctaattttccttttacttgtggtcgtcaagatagcagcgctaattaattgaataaaacaaggacattttagtgttttatttcctttgtggttttaatttttgctatgaaatttaaaattaaagaagaaaaatagttatatgtctccttttttgccttaaaaggagaaaaaggcaattaatccccacctccagaattaattcatgtgaagactaagggtagaagaaattattgtttttgtctatgcctgtacttgtaagcaaaactttagtyagacagttagactgcagtaattactcatcaagagcctgcctgcatgtcggtagctgtgttggtatatttatgggttgcttttagtgatttctaagaatttacagaaccaagttagaggcatgtgtacagaacaaggaaactttggggctgaattaaacatttcaaataaaagtagtcttttaaagtaaaattatatgcaaccattgacctgacaacagtgagccaa

SEQ ID NO: 647416 - DNA, 605 bp, Homo sapiens
aagctttacaaaaatatgacataatgaaaaggaatgtagcacaatctaatgttgaaactgtgactagccccaagcaagcggcctgcaaggctgtctagccttcgaaacacttagaaatctggtgatgcccctgtgagttcactggaatgcttaagactgacttttaacttttattgtaaaaagtcaaggttttttatcgttaccaacagatgtttttgtgtttactacaaatggagcatcattgtgaaaaggtatgacaagttatttcatcaaacaaaggaaaaaaactttataaaatttctccttcctacaaaacacagtacagtaacataaatgtggatgcaacactataggcaactgactgcttatccttcttgctggctctgttcttaaaatggctggaggaagcaggtgatataggagatggaaactaaagttcttactttcttgtagggagtggggacagggcatgaaagaaaaaacaaagctacatggaaaatgcaggtaattccacccccaaaaacagggaggaagaagatgggttctcttgtctccaatgttctyccatatccatctccccaattctggccaataaatatcaccta

SEQ ID NO: 647417 - DNA, 581 bp, Homo sapiens
gccaccacacctggccagagccctataactttttaattactggagattaaataaaggcagaaagcctacaatgccccaccaacctatccaagcaagcatggtggttaggagggagataaaagaatgggatatgaaaagtgtcaggagraagtagagtttctttctgtccctgtttgtcaaggattgaaagagtttccgggaagcaggagtttcactgctaaaatgaggaatatcccaggggaaatccaatgtggtaagatctggagaagcaaaaccactggatagccaagtacgattgtaatactgtgatggtagtctgtgaccagatagtccttagtgaagatggttaggcagctgaaattctaaattggacttttcagatttgaatatagtttacccatattgtggtttgttgacttttaaataacaaaatatttctgaattacgggtatggaacccctttcacatatgtctgaattcatgtgtgcccaagcaaatctatgggcattgtcataaacaacagcaaattcagagacctttgtgtgactaacatatgaaggaacttgcagctagggttccaa

SEQ ID NO: 647418 - DNA, 562 bp, Homo sapiens
atgggtaatacatttaagtttctaggaaattgtaaaggcaatgaaaacaattggagtttaaaagaaattggtttgagtgatgaacaaagatttcaagatatggaatttaatgtaatctgaaaaaatgtgtcacaaaaaatgatacaaatattcttaatgatgaaatggacatgcacctcatttaagagtttcggaagagatttgcctagctaaagtagaaggctttaaggagacaaatgagagagtttgaatatatggtttaggtcagatttagtttktatagaagagccaaatgaaatatattaagggagaatgtcggtaccacagtaaggaatttgggctttattctgtggctgataaaaaagccacttaagtgtatatatttggcatcctcttacctgccttctgcaactctagtcagtgcactgaaaattgcccaggcagcctcactatggggtcctagtgacaggaagcatggttatgagtacataattaagcagaacatgttcctgaatacaaaatgtacactcatgatctcataggtcaaaattcaatggaaaca

SEQ ID NO: 647419 - DNA, 593 bp, Homo sapiens
ttttagtggagacggagtttcactgtgttagccaggatgctctcaatctcctgacgttgtgatctgcttgccttgccctcccaaagtgctgggattacaggtgtgagccaccactcccagcaggaaacactctttttgtagaatctgtgaaggaacatgcaagagcccactgaggcccacagtgagaaacaaaacaaccagtgatgaaaactaaaaaaaagttatctgtgaaaatgctttgtgatgtgagcattcagctctcagagttaaagctttcttttaattcagaagatctgaaacactctttctgtaggattagtgaagggatatttcaaatcccactgaggtctaaagtgaaaaaccraatatcctggaataaaacctagaaagagctatctttgaaattgctttgtgatctttgcattcagctcacagaggtaaacttttcctttgattcagcaggttggaaacactatttttgtagaatatacagaggaacattttggagcccactgaggcctatggtgaaaattcaaatatcccatgataaaaactagaaagaagctaactgtgaaactcctttgtgttgtgtt

SEQ ID NO: 647420 - DNA, 535 bp, Homo sapiens
ctgaatgtcacatcaaaaaacattttcatagatagcttctttttagtttttatcacgaaatatttgatttttcactataggccacagtgtgctytgaaatgtgtctttgcaaagtctacaaaaagagtgtttccaacctgctgaataaataataagggttaatgctaggagctgaatccacatatcacacagcagtttaacagatgtcttctttttagtttttatcactggatattcagttttttactataggcctcagtgggctccaaaatgcctctttgcagattttacaatgagaatgtgtacaacctgctgaatcaaaacataggtttagctctgtgaactgaaaatacacatcacaaagcaggttcacagatagcttctttttagtttctatcaacagatattcagcttttcactataggcatcagtgtgctttgaaatatcacttcacagattttacaaaaagagcatttccaacctcctgagtaaaaaaaaaaaaaaaaaaaaaaaattaaccctgtgagctgaatcc

SEQ ID NO: 647421 - DNA, 535 bp, Homo sapiens
ctgaatgtcacatcaaaaaacattttcatagatagcttctttttagtttttatcacgaaatatttgatttttcactataggccacagtgtgctttgaaatgtgtctttgcaaagtctacaaaaagagtgtttccaacctgctgaataaataataagggttaatgctaggagctgaatccacatatcacacagcagtttaacagatgtcttctttttagtttttatcactggatattcagttttttactataggcctcagtgggctccaaaatgcctctttgcagattttacaatgagaatgtgtacaacctgctgaatcaaaacataggtttagctctgtgaactgaaaatacacatcacaaagcaggttcacagatagcttctttttagtttctatcaacagatattcagcttttcactataggcatcagtgtgctytgaaatatcacttcacagattttacaaaaagagcatttccaacctcctgagtaaaaaaaaaaaaaaaaaaaaaaaattaaccctgtgagctgaatcc

SEQ ID NO: 647422 - DNA, 535 bp, Homo sapiens
ctgaatgtcacatcaaaaaacattttcatagatagcttctttttagtttttatcacgaaatatttgatttttcactataggccacagtgtgctttgaaatgtgtctttgcaaagtctacaaaaagagtgtttccaacctgctgaataaataataagggttaatgctaggagctgaatccacatatcacacagcagtttaacagatgtcttctttttagtttttatcactggatattcagttttttactataggcctcagtgggctccaaaatgcctctttgcagattttacaatgagaatgtgtacaacctgctgaatcaaaacataggtttagctctgtgaactgaaaatacacatcacaaagcaggttcacagatagcttctttttagtttctatcaacagatattcagcttttcactataggcatcagtgtgctttgaaatatcacttcacagattytacaaaaagagcatttccaacctcctgagtaaaaaaaaaaaaaaaaaaaaaaaattaaccctgtgagctgaatcc

SEQ ID NO: 647423 - DNA, 533 bp, Homo sapiens
ccaggtctgttttgggagggctgtaagccccaggctttggagcagggtgcgtgtgtctcttgcagaaraccccaaaaagtgaaaatggaaaaacagtgtggcgtgggtgggcagcagagactcagtaggacattgaggcaggcagagcagagaagcagcgagaccgcagagaatgctgggagcctctaaggatgactgtcttatctcagaagccaccagggctgtcctgggtaggctgtaaagcccaggctttgaagcaggttacctgtgtctctcacggaaattccccacaaacaaaaatggagccgcagggtggcgagggtgggccaaagtgtctcgggggacacttgaggcaggcagaggggagaagcgacaaggcctcaaggaatgctgaaaacttctcgaggaggtctctctcatcccagaagcccccaagactgtcctggacaaactctaaaaccccagtctttggagcaggtttcctgtgtttcttgtagaaggccctcacaggcgaaaatggggctgcagtgtgg

SEQ ID NO: 647424 - DNA, 547 bp, Homo sapiens
gtggaggcctcattccactcatccatgcatacacatgcgtgaccttggaagtgcagggagtcaacacctcatcgggcaacctttgatcaatggggaacaggagcttgtgttgctcaggtgaaagattctaagatgcgttctacacagatcctaagaaagtgcccagagggacccagacaacagtggaccatagtgtaagctgcttgatattgcacccttgcattgacttgccctccttccctgtttcactctttttcacccccactcctgttccatgcgattacatcccaaagtaactgtaggcaggcccttgtctcaggctgtgcttttgtggagaatgcatgctaaggctgtctgattactccactgctatatttctagccccsagaatggtattgagcacataatagacactatatgaatattttttgatgaaactcttgagtaagtaaatccatttcccatcaatagaaataatacagcatacacatttcacaaggtccacaaaattgaaataaactagtcagagttctaaaaataagatata

SEQ ID NO: 647425 - DNA, 589 bp, Homo sapiens
acctatctctaccaatgacaagattcttttttttgaaagccagagggttaagggatctaatgctataactatgggaaaatgagtattataaaatccaggtctcttacatataggcacataatattacaaaatctcagaaaagctgcaatacaacttttgctgtcactagtggcttagcattgactgaagtcattgctccctgggagctaaattaccccagagttgacaagccagtctagtctcagtagaaaacagaaggcacattcaaaagtgataattgaatagagtttaatataggggctatatataaagatgtagtagggcttaggggagaccaggggtagcatagttcttaggggctagcaacattgggaagccactttctttcctatgactgcagggaaatgggagacagccatgagagagggtagctgcagggagagagcctcccaacaggaactgtggccttcakcatggatgtgtagccaagccttggcaacccctcagttagaaacctagggatataagtatctcgatgccactctccctcctattgagggttttaagaatacaaattttatgtaacgat

SEQ ID NO: 647426 - DNA, 589 bp, Homo sapiens
acctatctctaccaatgacaagattcttttttttgaaagccagagggttaagggatctaatgctataactatgggaaaatgagtattataaaatccaggtctcttacatataggcacataatattacaaaatctcagaaaagctgcaatacaacttttgctgtcactagtggcttagcattgactgaagtcattgctccctgggagctaaattaccccagagttgacaagccagtctagtctcagtagaaaacagaaggcacattcaaaagtgataattgaatagagtttaatataggggctatatataaagatgtagtagggcttaggggagaccaggggtagcatagttcttaggggctagcaacattgggaagccactttctttcctatgactgcagggaaatgggagacagccatgagagagggtagctgcagggagagagcctcccaacaggaactgtggccttcatcatggatgtgtagccaagccttggcaacccctcagttagaaacctagggatataagtatctcgatgccactctccctcctattgagggttttaagaayacaaattttatgtaacgat

SEQ ID NO: 647427 - DNA, 500 bp, Homo sapiens
gaagaagaatgggaaaagcatagatgacatttcttactcaacctgattttgccatttattttgaaagggagagggagggcaatggggatagattccaagccatcatttaaaaatgtgactacaggcatttgttattgacatgtcattgcatcgtgctacttgaaaaaattttaaatgcatttttctttccatgagtctgatttaagtttgtctgtccaaaattccttcaggaatgctcccctctttgwgtcttcatttttcaagggatgagaagttgacataagggttttactgaatttggtcttgaaatcataggaagaaaattggtgttttgttgaatcagcccctctactattgagcgtctctctgaaacttttatgttcttcctagctgactcctgaactaactagaactactggtgcttcaattttgggatgcattcaatatttagcttttactttatcacttcagagtcatctagtttcaagttctttagttcc

SEQ ID NO: 647428 - DNA, 495 bp, Homo sapiens
tgtaatctacactgtgcccttcactggcccaagtgctctcagtcccccgagactgctcctgtctatcagtgtctcaccatccccacagtgtctgtctgtggggatgtccctaccctcacctgtcacctgcaccatcgaaggcatcttaactgatctctttgctgccagagcctccctccctgttcacctgcacccaggtgccttccccaaacgccgaggatctgaacacatcctcctgctgmaacagtaacaggctgtggcccacaggctaacatgcaaactcttcacccaacattccaggcccctcctgctctgatgcctgcagctcccagccttctgtgctgcttcctcctcccacacaccaacacacagcctcccaaatatctcccagatccctgaccacagggcacttgctcccctgcacctgggcctctgcacagcccctcattctttaatcaatggcctccccctcctccactaggccctcagcccttg

SEQ ID NO: 647429 - DNA, 557 bp, Homo sapiens
gatttgggtggggatatagagccaaaccatatcaactctctattcagtgaatgatgctgggataaatggctagtcataggcagaagattgaagctggacccctgctctacaccaaaagcaatcaaaacaaaagccaaaattgaaaagtggggtctaattaaacttaagagcttctgcacagcaaaagaaactatcaacagagtcgacagacaatctacagaatgggagaaaatatttgtacactatgcatctgacaaaggtctaatatccagcatctatagggagcttaaacaaatttacaagagaaaaacaaccccattaaaaagygggcaaaggacatgaacagacacttttctaaagacatacatgtggccaacaagcatatgccaaaaagtcaatatcactgatcattagagaaatgcaagtcaaaaccacaatgagataccatgtcacatcagtcagaatggctactaaaagtccaaaaatagcagatgctggtgaggttgtggagaagagggaatgcttatgcactgttggtgggagtgtaaattagttca

SEQ ID NO: 647430 - DNA, 557 bp, Homo sapiens
gatttgggtggggatatagagccaaaccatatcaactctctattcagtgaatgatgctgggataaatggctagtcataggcagaagattgaagctggacccctgctctacaccaaaagcaatcaaaacaaaagccaaaattgaaaagtggggtctaattaaacttaagagcttctgcacagcaaaagaaactatcaacagagtcgacagacaatctacagaatgggagaaaatatttgtacactatgcatctgacaaaggtctaatatccagcatctatagggagcttaaacaaatttacaagagaaaaacaaccccattaaaaagcgggcaaaggacatgaacagacacttttctaaagacatacatgtgrccaacaagcatatgccaaaaagtcaatatcactgatcattagagaaatgcaagtcaaaaccacaatgagataccatgtcacatcagtcagaatggctactaaaagtccaaaaatagcagatgctggtgaggttgtggagaagagggaatgcttatgcactgttggtgggagtgtaaattagttca

SEQ ID NO: 647431 - DNA, 600 bp, Homo sapiens
ggtttggctctgtttccccacccaaatctcatctcaaattgtaatccccacacttccagggagggacctggtgggaggtgattggatcatgtgggcagtttcccccatgctgttcttgtgatagtgaatgagttctcatgagatctgatggtttaaaagcatggcaatttcccttttgcgckctctctctctctctctctctctctctgtggctctctctctctcctgcctcgcttctccttcaccttctgccataattctaagtttcctgaggcttcccaagccatggggaactgtgagtcaactaaatcgcttttatttataaattacccggtcctggatatttctttatagcagtgtaaaaatggtctaatacactgccatagaaaagatatgatagtttagtttttctggggaagtaacttagaattctaaacttccaaggcagagatgtcagaacaattgctctctacttatttgtaaaagcctgtcaattcttactttacttgtatgtgtgtcagcttctctctgctaaggaagaagaaaccttaataatcatcaaaggtatcttcaaaatctgcagtgtaagagataccagta

SEQ ID NO: 647432 - DNA, 600 bp, Homo sapiens
ggtttggctctgtttccccacccaaatctcatctcaaattgtaatccccacacttccagggagggacctggtgggaggtgattggatcatgtgggcagtttcccccatgctgttcttgtgatagtgaatgagttctcatgagatctgatggtttaaaagcatggcaatttcccttttgcgctctctctctctctctctctctctctctgtggctctctctctctcctgcctcgcttctccttcaccttctgccataattctaagtttcctgaggcttcccaagccatggggaactgtgagtcaactaaatckcttttatttataaattacccggtcctggatatttctttatagcagtgtaaaaatggtctaatacactgccatagaaaagatatgatagtttagtttttctggggaagtaacttagaattctaaacttccaaggcagagatgtcagaacaattgctctctacttatttgtaaaagcctgtcaattcttactttacttgtatgtgtgtcagcttctctctgctaaggaagaagaaaccttaataatcatcaaaggtatcttcaaaatctgcagtgtaagagataccagta

SEQ ID NO: 647433 - DNA, 562 bp, Homo sapiens
atcctataaccataatttatctttgtaattaaacagtgatattttataaaaatcttttgtttcttcctcaaatatagaaattgttcttatatcagtctagctttatcatcaaacccataatactttcatagtgactatcttccatagtgttttggtagataaaaagcctgttcttaacacatttaatagccaatgtaatttttcttttttgataagaatattcattttagtgaccctcatcatcccttatctttaataatctgacaaaagcctgaataactgtaattctcatccacatgcaatttccaaagatattgcaacaacatagtctaggtcctacccaggttctcttgataggaattatatgacacatgtattttcatgttrtgatgcctatatattgctgattgtataaagatgtatactttaccattttagtaagaaaccaatcatccctccaaaatttcttctttttacaattaccccaatgcatttttattgttcagaggctttggacatattcacttacttttgcccctctattttcctcttttcaaattca

SEQ ID NO: 647434 - DNA, 596 bp, Homo sapiens
tgaaagaattagatttggacagaggagagctgtctttctctaagaagtaaaaaaaaaaaaaaaggtgtatctcttctaaagcaaatatgtaatccaattccttttattttagtaaataacatcataactaatgtacttttaaactcagaaaaactagtaaacacataatagatgatggtaaataaattcagtcactctaattaaaaaaaaaatccatctcccaggtgagaagcaggatgcaaaagacttgacacataaatgtaattaacttatctaaatagaagggaggtcagggtggaatagaatcagagagggggtatttattcagctgtatccaggggagttgtattgataaaatctctaattattgttgattccatgcaacagccatagaaccayagtagaaaggaaagtatcaggtaaggagctgaatgacagtagccactgagtcattcagctcattcctcctcctctgactccatgttcataatataacatcctccatgtaacttggcttaccacaatagcctccctgcaaacggttttccaatgaccatgatcattccttttcctggacaattctaattctattttct

SEQ ID NO: 647435 - DNA, 433 bp, Homo sapiens
atttacattaagaactgattctgattaccagggatttaaggacaacctctgttggggtcaaaagagaaaatgaaatcctagtggggtaagaaatagcctccaactttgatatataggctctagtagcttcttttctactgattgtttttgatcctgcatagccacgcacagtcaattgcttactttttttatttgaagcttttaacaataaaaataaatttgtcaattgatatcttatgagatatgctccatatttacacaaagtactttcyacttggatgacatttctgtggacacacttaccagggaaacatgtccaattttagtaggtccaattagactttcatttttgactcatgagacttcatgtgcaaatagatgtcaatattaccagtcacataggtattcctgacagatatgaccctgactacaa

SEQ ID NO: 647436 - DNA, 572 bp, Homo sapiens
aatttaaaaaacacaaactttcagttaaagcaattaaaaacgtcaaattatctaggtagacaaatactgaaaggcaagcttacmttatagcttaggtgacgtagccattgttttgtacagataaaattattagttttaaaggcctcatactaaagataatgactaacttaaactagaaaaagcatggtacagcatactgaaagaatgaaggtaataataattagtgatgtaatagataaaattaataaaatagaaaatgtatattatcaaaaggataaatgtggtccccaaatatgggcctttaggaaaaaaaacctggcatatttgattatgaaaaatatgaaaagataaataaatgcaataattagaaaagcctagttgataacgtcacaggtcctgaaaaaaaaatttataagagaatattatgtatatttcttctgggatcatattttattgataactggtttcttgcttatttacttattctccgtgtatttatatcaccatcaattttgcccattttatcagcactttactctcatcactgttgttacttaaatttaggtctgaca

SEQ ID NO: 647437 - DNA, 572 bp, Homo sapiens
aatttaaaaaacacaaactttcagttaaagcaattaaaaacgtcaaattatctaggtagacaaatactgaaaggcaagcttacattatagcttaggtgacgtagccattgttttgtacagataaaattattagttttaaaggcctcatactaaagataatgactaacttaaactagaaaaagcatggtacagcatactgaaagaatgaaggtaataataattagtgatgtaatagataaaattaataaaatagaaaatgtatattatcaaaaggataaatgtggtccccaaatatgggcctttaggaaaaaaaacctggcatatttgattatgaaaaatatgaaaagataaataaatgcaataattagaaaagcctagttgataacgtcacaggtcctgaaaaaaaaatttataagagaatattatgtatatttcttctgggatcatattttattgataactggtttcttgcttatttacttattctccgtrtatttatatcaccatcaattttgcccattttatcagcactttactctcatcactgttgttacttaaatttaggtctgaca

SEQ ID NO: 647438 - DNA, 580 bp, Homo sapiens
tttattttgtaaagcgaaatcatcctcaggaacttgggagggccctaggaagaatgacctagggcagaaagaaagacaagtaaaaaggtgtctgtgcatctggtcattgtgggcagcagaggtttcacccattgaggagctaggtgattgtggaggaaattcttcagacttgtctgtccagggacccaaagaaggaagtatttcccatcagttaatgtttcctcattggtcgttggttgtgcagtcccttgcacatccaaatttgtgcatgtatcagaatcactgagctggttcccatagggtcacatgtaagagtggcaaaaaattcgttagctagaaaatcagatatatgctgggcattgaaagaaagatgctgcttggattacatttgaccacagctggttgccttacaggagccagaataaaattaggccaagaggatgtgaggtgtggcataaaagtcccaagatccaggccaagatttgcacatktgtgaccaggatgatcgcatgggattctgtgatcagaagggttctgcaactgaggtttaatgctctgtgcaaagtcttatgagtgttat

SEQ ID NO: 647439 - DNA, 616 bp, Homo sapiens
acttaacttctctctaaactttacttaatgcagtaagtaaagtggaaagaatatttgttttcctcacaggatgttgtatctattaaattcaataaacatgaactgttaatgtgcaaaacaataatgccaacattgtcataaaacaatctgtgttctcagtgagtttataatctagtaaaagagataatatgaacaattctaatacaagtcagaatgacctaaagactataatggaggaataaatatatagtgctattcacctctcacagaaaagaaaataattgatttcaatgtgaagggytggggacagaaaaggctgcatttgagctggactttgaggataagtaacagttcaagaagcaacacgataagagtgaaagggacattaatccttgaatcaaaagccagagctcttttctacttctgcctctaccactcactagaaactagcaggaatcccttgcacagaagaggctgtgagcatgtggtcttgtctgagttgctgttgttcacacaagaagggacagctcagtctacttgctgatttcacagtaggctcagctgtttctgtccacctgtggacagaatgctcctgatgcatgagattctggcctga

SEQ ID NO: 647440 - DNA, 616 bp, Homo sapiens
acttaacttctctctaaactttacttaatgcagtaagtaaagtggaaagaatatttgttttcctcacaggatgttgtatctattaaattcaataaacatgaactgttaatgtgcaaaacaataatgccaacattgtcataaaacaatctgtgttctcagtgagtttataatctagtaaaagagataatatgaacaattctaatacaagtcagaatgacctaaagactataatggaggaataaatatatagtgctattcacctctcacagaaaagaaaataattgatttcaatgtgaagggctggggacagaaaaggctgcatttgagctggactttgaggataagtaayagttcaagaagcaacacgataagagtgaaagggacattaatccttgaatcaaaagccagagctcttttctacttctgcctctaccactcactagaaactagcaggaatcccttgcacagaagaggctgtgagcatgtggtcttgtctgagttgctgttgttcacacaagaagggacagctcagtctacttgctgatttcacagtaggctcagctgtttctgtccacctgtggacagaatgctcctgatgcatgagattctggcctga

SEQ ID NO: 647441 - DNA, 578 bp, Homo sapiens
tcatgtctgagagccagatccatctgcctttctatttcaccatccctgagatgttacccttggccacgtggtccacgttggttcagtagccccctcaactttccatgtggcaggaagagggaaaggaggggaggccatgaccgtaagctgcaggcattacgtcctctcacataccattggtcagcacttaataatgtgcccaacccagctgcatgggaggctggacaatgtagtatatattttttgtgagtagcatttgcctagataaaaatcaaggattctattgtagaaaggaagaagagcaaaaatggaggacagcaacattatttaaataaaatgatgcatttggaggtactgcccactgcagacatttggccctacagagaatgctttccctctcccagaacttttataagagcaggtgggattctgacttaygcaggattgcattctcacgcatgggagtgaggagaaagctctaggaagtcaggcttaaactttctgatgtgtctccatctcgtaaatccattttaggggactgttttatttatccgcatcaggagcactgaagttattca

SEQ ID NO: 647442 - DNA, 578 bp, Homo sapiens
tcatgtctgagagccagatccatctgcctttctatttcaccatccctgagatgttacccttggccacgtggtccacgttggttcagtagccccctcaactttccatgtggcaggaagagggaaaggaggggaggccatgaccgtaagctgcaggcattacgtcctctcacataccattggtcagcacttaataatgtgcccaacccagctgcatgggaggctggacaatgtagtatatattttttgtgagtagcatttgcctagataaaaatcaaggattctattgtagaaaggaagaagagcaaaaatggaggacagcaacattatttaaataaaatgatgcatttggaggtactgcccactgcagacatttggccctacagagaatgctttccctctcccagaacttttataagagcaggtgggattctgacttacgcaggattgcattctcaygcatgggagtgaggagaaagctctaggaagtcaggcttaaactttctgatgtgtctccatctcgtaaatccattttaggggactgttttatttatccgcatcaggagcactgaagttattca

SEQ ID NO: 647443 - DNA, 493 bp, Homo sapiens
tttctggtgctggccttccttggagcttcttaactggaattttatttctgatgaccactgggccagctgcaccattgatcatatacaggctcccttgctatatgcatcgtgtcacctccaagaaaggggccgggcagcagggcactggggtatgtttttagagcgtagcctttggtgtggggtggcactaagggaacacaaaagtgttgttgaggatgtrtcccaccatggatcatgtcatcccatagggttcaggttcaagacagctcaagagcgggtcctccctccctcccactctcaaggggatttaagatacaggtgttcgtcccggtgccttgcattttgcaaatagaaagctcaggctggactctgcacgggagcaggaggagtgcacagagaagtttgagagcctgggtctcttctagcatcatggtttcatgccatgttcttcaaaacccacggagaaggttctgcatgtttgcccctagtgtca

SEQ ID NO: 647444 - DNA, 603 bp, Homo sapiens
ttaactgccaatatgatctcaaatggcttaaactcaggaaatttgccttccaattcttttttcctgcttcctcattgtgtttcttctattctcttctcttgataaaatgtgagcccctcagcacagcccatgcattttggctcctagctgcctctaagctctccttgttgccattgaagtcctttgtttttgagcyccagttactctggggtctcagttccttggttataccaagtgttttgtatttctggaacttagcacatgcctggaacacctctcctttctatttcccttagctaattcctctcacccttaaatctccgggatgtcatttcctcctcagagccttccctgacacctgaggttacaagtgatgataggtattgagcatgttgcctatgaccggcttctctatgagaccctgagggcaggggctgtttctgccctaatcaagctggattccccaagcctaggacagtgtctgattctcagaatctataattaatggaaacgtctccatccattactctttcttgtctttcttcttacttttctttcaaaaatgtaaatttgctgatgttgctcacccatttaagattgtct

SEQ ID NO: 647445 - DNA, 632 bp, Homo sapiens
atattttatgtatttataattctctataatacagtctaatcttatctgtaaaatatatttataattctgcaaagcactttctatgtcaaatcattccctgggttataaattctgtgatacttgaatctattaaattcctaaactatggtaagccctaaattggagataattcagcctgattctcagccctgaagatagaaataatgtcataaactcttgasaagtccttagcagatttgcagcaggcattggtggtatgccaatgaaagcagaatgaacctacaccagtgattcaaacctgctgaggcttaagggcagaggggagcaaaggatagtctccctaaaactctttttcctgtgtagccagtgttttgttgcttactgtaaatcagtgcttttacagacagcataatggctgaaggaggccaatacttctggcttggttgggactaagacaggccacttcagagaatttaggaaaaaagcaaagaggtgtttcagtagccacccaactcacaaccctcttctcattctctctcccccctctatctcctccagtctccccataaaatacattatacgttacagcatatggaagaaaaaaatgcacacaatgatggcttttcttgtta

SEQ ID NO: 647446 - DNA, 472 bp, Homo sapiens
caggcccaccagggtctaagccccagctctgccactatggactggatgacagcaggtgaattatctaacatttctacaacttgcttttctcctctagaaaacaaggatgataatcacaagatcctcacccagggttatatgaggaatcagtgagctgacacttgtccagggtgctgtcagagattattaatattatttccwattacagcacacaagtaatgcaagctcattgaaaaagatatggtcaacacagaaatgcataaataagaaagttgagcccgggcatggtggctcacacctgtaatcccagcactttgggaggctgaggcaggtggatcacttgaggccaggagtctgggaccagcctggccaacatggtgaaaccccatctctacaaaatacaacaattagccggatgtgtgtcgcgcacctgtaatcccagctactggagggagctgaggcagaagaatct

SEQ ID NO: 647447 - DNA, 685 bp, Homo sapiens
tatatttatccaaagaagatatacaggccaggcacggtggctcacgcctgtaatcccagcactttgggaggccgaggcgggcagatcacaaggtcaggagagtgagaccatcttggctaacacagtgaaccctgtctctactaaaaatacgaaaaattagctgggcatggtgygggcgcctgtagtcctagctactcgggaggctgaggcaggagaatggcatgaacccgggaggcagagcttgcagtgagccgagattgcaccactgcactccagcctgggtgacagagtaagactctgcctcaaaaaaaaaaaaagatatacaaatagccagtaagcacatgaataggtgccccacatcattagtcatcagggaaatgcaattcaataccacaatgagatactacttcatacctactagaaaaatcagatgaatctaaaaagtgtcacaagtgtcaaggatgtggagaaattagaatccttatacagtgctggtgggaatgtagaaggtgtagccattttggaaaacattctggcaattcatgaaagtgttaaacatagagttacaataaaacccatcaattttactccttgatatgagcccaagataaatgaaaacatatgtccacacaaaaattgtacacaaatgcttacagtggcctacccataatagccaaaaggtaga

SEQ ID NO: 647448 - DNA, 685 bp, Homo sapiens
tatatttatccaaagaagatatacaggccaggcacggtggctcacgcctgtaatcccagcactttgggaggccgaggcgggcagatcacaaggtcaggagagtgagaccatcttggctaacacagtgaaccctgtctctactaaaaatacgaaaaattagctgggcatggtgcgggcgcctgtagtcctagctactcgggaggctgaggcaggagaatggcatgaacccgggaggcagagcttgcagtgagccgagattgcaccactgcactccagcctgggtgacagagtaagactctgcctcaaaaaaaaaaaaagatatacaaatagccagtaagcacatgaataggtgccccacatcattagtcatcagggaaatgcaattcaataccacaatgagatactacttcatacctactagaaaaatcagatgaatctaaaaagtgtcacaagtgtcaaggatgtggagaaattagaatccttatacagtgctggtgggaatgtagaaggtgtagccattttggaaaacattctggcaattcatgaaagtgttaaacatagagttacaataaaacccrtcaattttactccttgatatgagcccaagataaatgaaaacatatgtccacacaaaaattgtacacaaatgcttacagtggcctacccataatagccaaaaggtaga

SEQ ID NO: 647449 - DNA, 567 bp, Homo sapiens
agcattgctgcagggcctttcctggctctaagacttgctcagttttacaagtcatttacaaaatgcaytggggcagcacacacacggcacacacctcattcttggaggccctctgcttcccaatcaacgccttcactttcaaggaacagacagtaagcttgtgagtccaacgtatgatgcaattctacaacccacaggatgacattttagatgtgattttcatttgtgtctgccctatagctagaaaacacaaaagcttccttgagggcaatctaatcactggttatctatccgtgctctgagcagagatttgaaacacagtgcttgtcattttctttctacaaactctccagtactgtcataagtagccattgtactcctcattccttctgatagtcatgattactacctcagaggccaagtgccgcagccacttgggctgacgattctcagtgttcaataggcactttgtcccaggcaaccgtaagtgatgatttaagtgatttaatgtccctgcacaccaaggcatactacaatctcactgtccctggccatgaggttctcact

SEQ ID NO: 647450 - DNA, 540 bp, Homo sapiens
gcgcacacaaccatgcctggctattttttttttttttttttgtatttttagtagagatggggtttcgccatgttggccaggctggtttcgaactcctgacctcaggtgatccacctgcctcggccttccaaagtgctgggattacagcatgagscacagtgcctggcctctttcttttctcctcccctcctatcacacattcctcctcagacatttttctcaactgtatgcaaagtaatatgctaaagattgacatagaatggacatacaaaaattttgtcctaaaatgaacatgcacaatgcctagtgtttagttgatggttgtagaattaaagtgataaaggaatgcccatgtttacaaagttaggggaaaagttaggggaacctgagggaagatgtagtttttttaaaactggaaaaaaatcaaggctaagtaatttgtcctcattttatagcatttttaaaagctaagcatttttcattcaatacagtggaggaatagaatcttattgttagaaattttgcacagggaggtggcca

SEQ ID NO: 647451 - DNA, 621 bp, Homo sapiens
actacattttcaatattggtcatactttcatcttctctcatcactctgctccatctcttacctagattccagaactcttctttctccayctacccaaacttttacttctgctagtctctattacccatgcctttctacaaataaacaaccagaagcattttttaaaagttctttcctcaaccatcataatcaatctctcagcaagtattgtcaattcaacctccaaaatatgtcctaaatccattcactgccctctctctgcctatcaccacccttgttcaagctaccattggctctcacctgaagtgctgtatgagatccttaactggatttcctgcttctactcttacctcttataatcatttgtgaaataataacaagggaaaatattttgaaaatgtagaccaaatcatatctttttcattttgtaaaacttttcaatcctacctctttgattttagctcctaccactttttgccacattcgctatgctgtcaacattctgtttctcatttatctgaacagtccccaggtctccaaacaaatgttatctcttcagagaagtcctttcttattctatttaaaattgaccagctccctctcttctctcaccagtgcttt

SEQ ID NO: 647452 - DNA, 354 bp, Homo sapiens
taaattcatctaatttagctgttaaaattctatatcctgttattgtattcccctactttgtcttctgggaatttatastgtgttagtcctaggtacaaggcagaatgttaattaagcgctgtattcaaagtgaaagtaccaggaaaattcggaaaagggataaagagctgagtttgtcctggtataggcaagaaagccttcaaagtggtggtggtaagtaaaacacaaagcggactcttaaagatgattaggaattgtctattcatgtctcctttgttccaatttcttattctgaacattttaaacacagaaaagatgaacgaaaagcacaaaatcacccatatgcctattggt

SEQ ID NO: 647453 - DNA, 354 bp, Homo sapiens
taaattcatctaatttagctgttaaaattctatatcctgttattgtattcccctactttgtcttctgggaatttatactgtgttagtcctaggtacaaggcagaatgttaattaagcgctrtattcaaagtgaaagtaccaggaaaattcggaaaagggataaagagctgagtttgtcctggtataggcaagaaagccttcaaagtggtggtggtaagtaaaacacaaagcggactcttaaagatgattaggaattgtctattcatgtctcctttgttccaatttcttattctgaacattttaaacacagaaaagatgaacgaaaagcacaaaatcacccatatgcctattggt

SEQ ID NO: 647454 - DNA, 572 bp, Homo sapiens
acatcttgctgggaaaatcggatattcacacatagaagaatgtaattgatccgctgtttcacactacataaaactactcagaatatatgtaagaatgacatgtaaagcttgaaactataaaactgctagaggaaaataagagaaaaaaatacatgacattggtctgggctatgatttcttggattggttccccaagcataggcaacaaaaggaaaaatacacacattgtattacatcaaactaaaaagcttctgcacagcaaagtaaacaatgcccagagtaaagagacaactcatgagttggaaaaatatttgcaagccatatatctgataaagcgttaatattcraaatatataaggaactcaactcaatggctaataaaaaggaattaaccaatttaaaaataggcaatgtacctgaatggacatttctcaaaagaagacgtaccaatggccaacaagtattattatcaacaatacaaaaaatcatcaagtgttatcaaacatgtggagaaaaggacacacttgcacattgttgatggaaatgtatattagtatagccattatggaaga

SEQ ID NO: 647455 - DNA, 521 bp, Homo sapiens
gcgagctggtactgcctcagagtactggacaatctcagagtgaatctgtcattcaagattcttgtaagagagcctgaaggcagagcaggctgacaagagcttacaagagcttgctcttgagyttacaaaagcaggtggtataggactttttgtatctacttgctaataaatgtttccattccagcagaattttgtctaagactttctttcattcttatatctcaactgactcatggccagagcgacaggtttcacaaaggcattggcttttgcagatggtcaaattggcttatcttggttcacaacaggagaactttggtattctatattaaaaagtgactcattggaaggaatgctggggatttcctgtctattccagttcactacagtctttttttttttttttttttttggatgatttgggtcattcttctcactcctatagatttaggtcttcactatgtactaaatatctttatgtagaaataattgaatgccgagagttgtgggagaaacagtct

SEQ ID NO: 647456 - DNA, 572 bp, Homo sapiens
tactagtgggcctctgttgatacccaatgcggtaatggtggaaggctcctcgttactgctgggtagrggtggcactcctgactccccactaggtctccactaacactttcctagctgggaggaaaaagagtgcctggttactgctcccctgtagcctgcctgacactacatgagtcggggctgcctcatgtccactggttggtgagaaaactcttgactctccattaggcctctcctgactccacccagggggaagacggagagatgcctcattactgctgggtggaggtagaagcccagcctccccatgcatgtggtctccactgacataggaggtaaggggaaaaacaggatttgttgtcactcagaggggataaatgtcccagctccctatttggccttctctgataccacctcaatgggaggcaggtcaggtagggggcaaactgaatcggctcctaacagcccagagaaggttaaagtctagactctccacttggcatttgttggcatgggtggtgggccagttttttttttttttttcctgtggtgtttggctagagtagagcaat

SEQ ID NO: 647457 - DNA, 572 bp, Homo sapiens
tactagtgggcctctgttgatacccaatgcggtaatggtggaaggctcctcgttactgctgggtagaggtggcactyctgactccccactaggtctccactaacactttcctagctgggaggaaaaagagtgcctggttactgctcccctgtagcctgcctgacactacatgagtcggggctgcctcatgtccactggttggtgagaaaactcttgactctccattaggcctctcctgactccacccagggggaagacggagagatgcctcattactgctgggtggaggtagaagcccagcctccccatgcatgtggtctccactgacataggaggtaaggggaaaaacaggatttgttgtcactcagaggggataaatgtcccagctccctatttggccttctctgataccacctcaatgggaggcaggtcaggtagggggcaaactgaatcggctcctaacagcccagagaaggttaaagtctagactctccacttggcatttgttggcatgggtggtgggccagttttttttttttttttcctgtggtgtttggctagagtagagcaat

SEQ ID NO: 647458 - DNA, 520 bp, Homo sapiens
ctatcagggataaagatgggcattatataatgataaacagttaatccatcaagcagacatagaaatcctaaacatgtatgtgcctagcaacagagcttcaaactatgtgaggcaaagctgacagaacttcaaggagaaatgaatccactattataatcagagacttcaacccctctttaccagaaatgggcggatctagcaggcagaaaattagtaaagacataaagtaacaatatcrtcacctggatataatgaaaatctatagactacttcctctaacaacagcagaatatccattcttcttaaattcacatggaacattcatcaagatagagcatattctgggccataaaaaacaccttaacaaatttaaaagaagagaaaccatacaatatctgtgctcagaccacagtggaattcaactagaaattgataatagaaagataggtggaaaaccctaaagaacttggacattaaacagaatacttccaaataacacctgggtcaaagaataaatctc

SEQ ID NO: 647459 - DNA, 449 bp, Homo sapiens
taaaaagttacttaaagaatattatgagcagattaattcctatayattaaacatttaagatgaaatggacaaatttccaccaaatgataatttatcagggatcttgagccccctcaccccagaaagacaatataaaagagcatttagagggtgaagagagaatttggaggaaaaactgtgaagaaatttctttggtgaaagctattgccctgtttgagttctaccttctaattctaaccccagtaagaaacatcttaggaaagcttcgaaattgatttcctgatgtggagaaaaatggagaactggtgcctgacccctatagtgtggatatttgtccccacccaaatctcatgttgaaatgtagtccccattggagcttggggctagtgggaggtgtttggatcatggggacagatccctcatgaattgcttgggccatatccttggtg

SEQ ID NO: 647460 - DNA, 525 bp, Homo sapiens
ctactctctcatttgtttcttaaactcccttttttttcagcctgttttttgtatccttgttagagagaacagacatatattgtccctgaatgtacatttaattatattcttcatgtaattacattatgtaattacaactcaatcacctaatttagcactgcttaacacatgttaacttttgctttttgttcgtttttgagacagggtcttgctctattacccaggcttggagtacagtgacatgattatggctcactgcagcctcgacctcckagtcttacatcattctcccacctccaccaagtagctgggactgcaggcgcatgctgccacatccagctaattttttgtattttttatagagataaggtttcaccgtgttgcccagtttgctgtcaggcttctgggctccagcgatctgctcgcctcagcctcccaaagtgctgggattacaggtttgggccactgctctggccacatattaactttcaaccagtcatggtagctgttgttaatattttaata

SEQ ID NO: 647461 - DNA, 498 bp, Homo sapiens
ttttttcagcctgttttttgtatccttgttagagagaacagacatatattgtccctgaatgtacatttaattatattcttcatgtaattacattatgtaattacaactcaatcacctaatttagcactgcttaacacatgttaacttttgctttttgttcgtttttgagacagggtcttgctctattacccaggcttggagtacagtgacatgattatggctcactgcagcctcgacctcctagkcttacatcattctcccacctccaccaagtagctgggactgcaggcgcatgctgccacatccagctaattttttgtattttttatagagataaggtttcaccgtgttgcccagtttgctgtcaggcttctgggctccagcgatctgctcgcctcagcctcccaaagtgctgggattacaggtttgggccactgctctggccacatattaactttcaaccagtcatggtagctgttgttaatattttaatatata

SEQ ID NO: 647462 - DNA, 566 bp, Homo sapiens
tacagatacaagtaaagaaatctcagctcagagcagtctgtttgtcactatgcagccttttcaaccccatagctgcgcgattgggtttgtgttgctggaggtgaggagacccgtgcccaggtgttgttgcctgtctaatcagtttattttaaaatatattaatgaaatttatttcatcatactttatggcctcatacctgagtggttttttgaattctcctttgaatagcttgtaactattcaaayctcttattggttctataattaattctttttctaattagctttttaaaaatcagaattgatattagactaatcagttattaatgaggagatgaaattgagttgtttgtacactttatctaagatagtgttatattggctaactcaaatcatagttcagcaaatgcagaatcagagcttcttcagcgcggaactctcttgtggttcttgaagatgccatttctttttcttttcttttttttttttttttggagacagcatcttcctctgtcaccaggctcgagtgcagtggcacaatctcaattcacagcaacttctgcctc

SEQ ID NO: 647463 - DNA, 555 bp, Homo sapiens
ggcaatccacccaccttggcctcccagtgtgctgagatcagaggcgtgagtcaccacgccatgcccagccatttttaaaataataacrttattgaaatatgattaacgtatcatgcaattcatttatcaaagtacgcaattcaggccaggtgcagtggctaattcctataacgctaagactttgggcagctgaggcaggtggatcgcttgtgttcaggagtttgcgactagcctgggcaacatgacaaaacagcatctctagcaaaattacaaaaattagctgggtgtggtggctcatgcctgtagtcccaactacttggggacatgagactggaagatcacttgagcccagaagccataggttgcagtgagaccagatggcaccactgcactacagcatgggtgacaaaaggagaccctgtctttaaataactaaagaaaaaagaaagtatacaattgagtggtttttagaatattcaaggagctgtgcatccatcaccacagtctttcttagaagtgattacccacttgtgagttacccacttatgagtgaga

SEQ ID NO: 647464 - DNA, 283 bp, Homo sapiens
caacttttgcaatgaatgcatgcttgaaaatttcttagaaaactctgccctttataaaagtttaatccattttttacttcaataaattttatcttaaaaagaaatttctgttctctacttatagtaaacttttctttttttttttctagtttgtattccaaattaacgtggtacctctgtaagtttcttccaaaggcatattgagggataccgaggtttgcagtacaattaaaccyatcacacaggttgtgagcataggacccaagaagtagtttttcaaccc

SEQ ID NO: 647465 - DNA, 594 bp, Homo sapiens
aaaggcaaagagcctgaggtgaggaagagccctgcagagttccactccatccagtttggtgctagarcaaagggcagagtgcagtaagcggtgagaaacaaggctgagtaacttgacaagaatcacattgacatgggtgtttttatttcatggtgaaaaatttggaacttttcctgagaacaagtgtaagccaatgacacagtaaatgacaggagatttaaaatgtcacctgtgaagtgactgcttatgaagggttattgctcagctaagtatttctgaatgagtcttaggtctgttggccttcaatctctactgaaaccctgagaacttgatgatgcttttgttttctgagaatcgtttcagtgtgctggctgacagttccatgaggatggcaaaacttaagaaagtgtagagccagtgaaaaagagatgcacagacttcttgggaactgtttaagctttggaacatgatgaatttatggtgcataagtacagtcttctctgtgaaagtttttgttttcacatctttcattagatgtgtgtaagaaaaaaaatattgatgtagtatctactaacccaagaatgaaaagtaatg

SEQ ID NO: 647466 - DNA, 594 bp, Homo sapiens
aaaggcaaagagcctgaggtgaggaagagccctgcagagttccactccatccagtttggtgctagaacaaagggcagagtgcagtaagcggtgagaaacaaggctgagtaacttgacaagaatcacattgacatgggtgtttttatttcatggtgaaaaatttggaacttttcctgagaacaagtgtaagccaatgacacagtaaatgacaggagatttaaaatgtcacctgtgaagtgactgcttatgaagggttattgctcagctaagtatttctgaatgagtcttaggtctgttggccttcaatctctactgaaaccctgagaacttgatgatgcwtttgttttctgagaatcgtttcagtgtgctggctgacagttccatgaggatggcaaaacttaagaaagtgtagagccagtgaaaaagagatgcacagacttcttgggaactgtttaagctttggaacatgatgaatttatggtgcataagtacagtcttctctgtgaaagtttttgttttcacatctttcattagatgtgtgtaagaaaaaaaatattgatgtagtatctactaacccaagaatgaaaagtaatg

SEQ ID NO: 647467 - DNA, 641 bp, Homo sapiens
tctaaatgtctgtccctcacacaggtttcccgaacaatgttacgaggttctgaatgtttgtccctaacgtaggattccagagcactcctgctgtgctctgaatgcttctccctcacataggattccagaacactgcyacgagggtctgaatgcttatccctcatataggattccagaacacttctgctgtggtctgaatgtttgctcctcacataggattccagaatactcctgccgtggtctgaatgtttgtccctcacataggattccagaacattcatgctggggtctcaatgtttcccttaacataggatttcagaacactgctcttggggtctgaatgtttgtcactcacataggattacagaacactgttgctggagtctgaatgtttgtcagtcacatagaattccagaacactgctacaagggtgtgaatatttctccctcacctagtattccagaacactgttgcaagggtctgaatgttggtccgtcatataggattccagaacactgatgctgtggtctgaatgtttgtccctcacatagaattccggaacactgctacaagggtctgaatgtttgtccttcacataccattccagaacactgctgccgtggtctgaatgtatgtccctc

SEQ ID NO: 647468 - DNA, 641 bp, Homo sapiens
tctaaatgtctgtccctcacacaggtttcccgaacaatgttacgaggttctgaatgtttgtccctaacgtaggattccagagcactcctgctgtgctctgaatgcttctccctcacataggattccagaacactgctacgagggtctgaatgcttatccctcatataggattccagaacacttctgctgtggtctgaatgtttgctcctcacataggattccagaatactcctgccgtggtctgaatgtttgtccctcacataggattccagaacattcatgctggggtctcaatgtttcccttaacataggatttcagaacactgctcttggggtctgaatgtttgtcactcacataggattacagaacactgttgctggagtctgaatgtttgtcagtcacatagaattccagaacactgctacaagggtgtgaatatttctccctcacctagtattccagaacactgttgcaagggtctgaatgttggtccgtcatataggattccagaacactgmtgctgtggtctgaatgtttgtccctcacatagaattccggaacactgctacaagggtctgaatgtttgtccttcacataccattccagaacactgctgccgtggtctgaatgtatgtccctc

SEQ ID NO: 647469 - DNA, 641 bp, Homo sapiens
tctaaatgtctgtccctcacacaggtttcccgaacaatgttacgaggttctgaatgtttgtccctaacgtaggattccagagcactcctgctgtgctctgaatgcttctccctcacataggattccagaacactgctacgagggtctgaatgcttatccctcatataggattccagaacacttctgctgtggtctgaatgtttgctcctcacataggattccagaatactcctgccgtggtctgaatgtttgtccctcacataggattccagaacattcatgctggggtctcaatgtttcccttaacataggatttcagaacactgctcttggggtctgaatgtttgtcactcacataggattacagaacactgttgctggagtctgaatgtttgtcagtcacatagaattccagaacactgctacaagggtgtgaatatttctccctcacctagtattccagaacactgttgcaagggtctgaatgttggtccgtcatataggattccagaacactgatgctgtggtctgaatgtttgtccctcacatrgaattccggaacactgctacaagggtctgaatgtttgtccttcacataccattccagaacactgctgccgtggtctgaatgtatgtccctc

SEQ ID NO: 647470 - DNA, 501 bp, Homo sapiens
gttcacttgctgcttcttttttctctttatcaattatttgatttagtcaaattttctattcaagaaaatctcatgtgtacagttacagcggggttttctaaatgtgtaattatgtgtcaaagtagattagtcctgctatctaaacaaaggttctggagaatgttctcataatgtttcttcattaatcaacctaagtctcactctcagtcttccaagtggcatatgagctgggaaactaattcagccatataccatgtgaccttctgaaccagatcaacataaagaaattgctaaagaaataagctttagattctagattcttttttctgtattcatttagagatgaattacatttatttratgatagaatgggaatacaatgagagggaagcaatgactgagatgagccacaaaaacacgtctagccttgagagttgcaatgaatattcccagccaaatgagtctgtttaatgtgttttcatgcacgccagtttatctgct

SEQ ID NO: 647471 - DNA, 428 bp, Homo sapiens
agggagtgaccttggtggctgctccactggctcctggcacacccttgcagaggtgggtggttgytctttgagccagcttggctttgcctggcatgcacaggcctcagtgcaacaaatgtgctgcaaatggagccacatagaggaaatgagcagcaggctcagaactggggtgtgtgccgcctttggggctccagtccaagcatcggggcttctacagcactgtgggcttctcgggtgccaagaggcagaccacaggccatcttgaggaggactctggtaagagcttccttgtgtatgtggatgatgtccagaatgttggcctggtgtccctgagacagcactaacaggtccatgactgggtccagatcctgcctgggttgatgggcaaagagctcactgacagtgtggaaggcatctatggtgaagtg

SEQ ID NO: 647472 - DNA, 428 bp, Homo sapiens
agggagtgaccttggtggctgctccactggctcctggcacacccttgcagaggtgggtggttgctctttgagccagcttggctttgcctggcatgcacaggcctcagtgcaacaaatgtgctgcaaatggagccacatagaggaaatgagcagcaggctcagaactggggtgtgtgcygcctttggggctccagtccaagcatcggggcttctacagcactgtgggcttctcgggtgccaagaggcagaccacaggccatcttgaggaggactctggtaagagcttccttgtgtatgtggatgatgtccagaatgttggcctggtgtccctgagacagcactaacaggtccatgactgggtccagatcctgcctgggttgatgggcaaagagctcactgacagtgtggaaggcatctatggtgaagtg

SEQ ID NO: 647473 - DNA, 428 bp, Homo sapiens
agggagtgaccttggtggctgctccactggctcctggcacacccttgcagaggtgggtggttgctctttgagccagcttggctttgcctggcatgcacaggcctcagtgcaacaaatgtgctgcaaatggagccacatagaggaaatgagcagcaggctcagaactggggtgtgtgccgcctttggggctccagtccaagcatcggggcttctacagcactgtgggcttctcgggtgccaagaggcagaccacargccatcttgaggaggactctggtaagagcttccttgtgtatgtggatgatgtccagaatgttggcctggtgtccctgagacagcactaacaggtccatgactgggtccagatcctgcctgggttgatgggcaaagagctcactgacagtgtggaaggcatctatggtgaagtg

SEQ ID NO: 647474 - DNA, 580 bp, Homo sapiens
gtgtatgtttttctctgaccagctttccattaccaccataaaacaatgayaggtaaaccactgctaaatttgaaaagtaaatactatgcaaaactacactcagagtgagaagattaattttacaagagaccactttaccttagtagcaacactcaagtcttcatcatccaatgtaggcaatgaatccacacacagttcatgcaaaatgcttgagagcaaaaatacacaatgaaaatgagcaagttgatttctttacaatttttttaactgccagtttatatccagcttccccctcaaaaaaaggaaaacataatctggggaaaggtcagtgatctatatattaaattatgattcttgatataattaaaatatatcctctgttctaaaaatagattttagttacctatttctgcctccacctgtctaaatctataaaatattcaatgaaaactaaccttgaggtttataacaaatagtgacagtcaatatattggcagagcctgacaataatgtgccctcacaaattatctgtcctgaagctgaacttaaaattcaattagtggatgacataaattttgtt

SEQ ID NO: 647475 - DNA, 589 bp, Homo sapiens
gccattacaacagagtatacactagtaccccttatccactatatgtgcagaaagacatacttgacacgtttttctctgctgtcacaccacagcaacaatcatcaacaaagaaggcttctgtgaccaaatgtgtggagagtttttccccaccaacaaacaagcaatcattcctgctgatgacacaattcaattctcacaccytatctacagataacatcagatttaatttaatttataaattaaactttgtcatagatatgtatgtatagggaaaaacagcttgtgattcagtactattcatggtttcatgcatgcactgggggtcttggaatgtatctcccacagttaaggtgtagttactgcacttattttgttataacgcaacacagtctctctagctcttcagttcaaactgtttagtttagaataaaacatgctatcaccagaaactaacaaaacataggaatcagaccagaaacaggaatccttgcaaagactttccagccaccagtggagaagatctcaagagagatcagtgtgttactctggctaatactcttctgggtaaggtgctgggtggtttccttag

SEQ ID NO: 647476 - DNA, 589 bp, Homo sapiens
gccattacaacagagtatacactagtaccccttatccactatatgtgcagaaagacatacttgacacgtttttctctgctgtcacaccacagcaacaatcatcaacaaagaaggcttctgtgaccaaatgtgtggagagtttttccccaccaacaaacaagcaatcattcctgctgatgacacaattcaattctcacaccctatctacagataacatcrgatttaatttaatttataaattaaactttgtcatagatatgtatgtatagggaaaaacagcttgtgattcagtactattcatggtttcatgcatgcactgggggtcttggaatgtatctcccacagttaaggtgtagttactgcacttattttgttataacgcaacacagtctctctagctcttcagttcaaactgtttagtttagaataaaacatgctatcaccagaaactaacaaaacataggaatcagaccagaaacaggaatccttgcaaagactttccagccaccagtggagaagatctcaagagagatcagtgtgttactctggctaatactcttctgggtaaggtgctgggtggtttccttag

SEQ ID NO: 647477 - DNA, 589 bp, Homo sapiens
gccattacaacagagtatacactagtaccccttatccactatatgtgcagaaagacatacttgacacgtttttctctgctgtcacaccacagcaacaatcatcaacaaagaaggcttctgtgaccaaatgtgtggagagtttttccccaccaacaaacaagcaatcattcctgctgatgacacaattcaattctcacaccctatctacagataacatcagatttaatttaatttataaattaaactttgtcatagatatgtatgtatagggaaaaacagcttgtgattcagtactatycatggtttcatgcatgcactgggggtcttggaatgtatctcccacagttaaggtgtagttactgcacttattttgttataacgcaacacagtctctctagctcttcagttcaaactgtttagtttagaataaaacatgctatcaccagaaactaacaaaacataggaatcagaccagaaacaggaatccttgcaaagactttccagccaccagtggagaagatctcaagagagatcagtgtgttactctggctaatactcttctgggtaaggtgctgggtggtttccttag

SEQ ID NO: 647478 - DNA, 636 bp, Homo sapiens
ttaataatcataaagcaacccaataaactattaccgtttaggttacatgccctgaattgaatgtgctttagaaacacccgaaggtacttggtaacaatggaatgtactgccttagataatagcaagtgtccactaagttgtctaactgaccacaatactaggagttggtaaactagtccacctagtaaagattgtttcagacaatatacaataattgaacaaataacagtattttcttctttaaactcaacatttattcatggaatataaactacttaagaaatatttataggaagagtgtttctcttgagagaattgtaaattataaggcatacacaaaattgtgctttttatgcattattgctgttaacaatatgatgagaatcatttgaggacatttggtcaaaaccacacagcagattttgcagattgggataattttgccttgcaaggagaatgagtagaaataatttaacatctcgaaaagatgactttctttatcaggtattcttagctaaataataccagaattgcagctttatagaatgaaaagaaatataacattttgacatacracataaaaggtaaaattttatagaacattctgctgtaatgcattactaaaattattagcag

SEQ ID NO: 647479 - DNA, 306 bp, Homo sapiens
caccacaccctgctaattatatatatatgtatatatgcacacacacacatatatatgtatatatgcatatgtatatgtgtgtgtatatatatgtgtgtgtttgtgtgtgtgtgtgtgtgtgtatgtgtgtgtgtgtaattttttttttttgtcaagacggggttttgccrtgttgtccaggctggtctcgaactcctgggctcagcctcccaacatgctgggattacaggcatgagtcaccacacctggctgagatatttgtctatctgatattctatctggatgtttattcatataccacatttt

SEQ ID NO: 647480 - DNA, 556 bp, Homo sapiens
gtttaatagtgctaaaagcctccgactcacagtagagacagaacagtgataaatatgtatccaccaaataacatagtaaccacctttcaaagataaatagtaagagattcaaggagaaataaagagacacacttgtaacaggaaatacttaacatgccacttaaagtacatgacagatttagtggacaaaaaataagtaaggatataaatgacctagtataatcattgggtagatttgagaaatatgtaagtttatacaataacaacagagaatgcacacataaaatatgatcaaatttggtcacaaagaaaccagaggtaagttccatcaaaatagaaattaataaaataaataaaaagattcttcaaactggaaattgagaagaactgttattaaacatccaattcagatgaaaggmaagccacactgaaaatacagaaatcctagaaataatgacaatggaagcattatatattaaactccatggaatacatttaaagcagtgttcggaggaaagagcttagccttaaacacttatggcaaataaaacaaaca

SEQ ID NO: 647481 - DNA, 546 bp, Homo sapiens
atggaagatcagatgaggagatgactcgagctggctctgtgtgttcaggaaagtttaattatataaaagctggagaccatttggtattttgtattttcttaatggatgccaaatactataatagagtaagataaagaaaacaaatcctgatgagtgccctcacatatcagaatayagaggtgggaaggcattataacatttttatagggattttaatactcaaagtatgtttgtatttattgacacatttggctctcacctgtgagagcctattcatacatatagttattatatactgtactaatatactatgttactactatgaaatttatattctgaaggtggaatgttgtactttaattggagttccaatgtttactgcttttcttttagtgggtacctcacttcttatcccttagactcagttttatcctttataaaatgtgaatagggatgactaaataaattcataaagttgtggaaggatcaagggaaacacaaaggtaagcaaacaaaatgccagtagaaaagcaggcaccaagaaaa

SEQ ID NO: 647482 - DNA, 574 bp, Homo sapiens
ctatcttagctcctgagaggctctctaagccagtggtttgaaaatgttcttgtacttctaaactacttaccgctcctgttaagcagattgctagtccacatccccagagtttctaattcagtgagtttggagcacgacctcaaaatttcctttactaacaaatttccaattaaagggaatgctgttggtcaagagatcatactttaaagaaacaccacccccaaaaaaaattttttttaagttttttgattgagtttttctccccaaactgctatctggtctgcactcttcatgagttctactggacaatttggctaccacaaatatccttaataagtcatgttaaaaatctagagcagaataggcttgcagcaactttcctttcctagaatcttgacctgaaaaattttacctttctagagctaaagatgcctcyaaaagccttcaacccactgggaatttttttgttcatcccacaaaacaagtctacctctcagcaacttctgggaaaatttgtgaataatgcattctatggagaatgtaatagccctgtggagtgtcaacttgcacaggc

SEQ ID NO: 647483 - DNA, 604 bp, Homo sapiens
cagcatcacaatcccagagaacgaggctggcacataaaagcaactgtacaagaaaagtcaagggttctgccactcttacctgtcatcccaataaaactattctcttgcagaatggagactgcaaagctcaggacagtttagaagctatgagaatgaagatatgatcaaacatgattttttttctttctgataaaccagaagataccagaaaaaggaaccaggtgatacgttccctcccttaaccatactctgccctcctgccaaagaagaattttaaggacgttatgtacaagtaactgaakagtagtaggcaacaaagtgggaaatgactgttccttttgcaggaacagtcttgtctagcaggagatgccaacaggatggtttacagtatcctctcattctcccctaattcacactcctatctgctgcagaaaaggagtcattctccagctccctgatcattccttgccctcccagctctcagccaagcactagcccagccctgtgggttcctttgtccaccctgtggcacaggccctgcccttgacccctgatccccaggcaggagagcaggcactctgttggggatgggggtttccaagct

SEQ ID NO: 647484 - DNA, 469 bp, Homo sapiens
aggaacccctgggtgactgtgggaccatcccacagtgaaacgagtctctggggggaggagcttgtggcacggggaagttctggctcttaccagcagaggaagccatcactcaggctctctcagcctcagtgtccttgtctgtaaaatgggtagagttccatagttcacagggtgaaatgagctaacccaggagagaatgctgtaaaaggtattatcaatggggacagtgagggtgggcctgggtgggaaagggaagagatggagtgagaagcctcaaagctcccctgggagggattagaaggggccaggaagccggggaggtgactcagtgctcaggcaggtggaatgggagtagaaggttagctgataccccacccactaacccccgactccaagacagrggcatgtccggactggaagcaaggtggggagtgggattctctagccctcctaggggcccagatcccaa

SEQ ID NO: 647485 - DNA, 384 bp, Homo sapiens
atttcatccctgacccaaccaatcagcatgtccctttctctaacccctgcccacaaaactatctataaaaactctagcctctgaatatttggrgaagcagttttgagtaataggaaaactctgctctctcctttagccagctctacatgtataaaattttctctacagcaattcccctatcttggtgaagtggctctatctgggcagcagccaacatgaacccattggccattaacaacccaactgctgaattttgtatgaagataacttgttttgatttcatgggctgacagaggagactttagctgtgggaactttctgttggtgctggaacaatctaagcctttgaacgataggaatgaaataaactttttgtaagtgaca

SEQ ID NO: 647486 - DNA, 384 bp, Homo sapiens
atttcatccctgacccaaccaatcagcatgtccctttctctaacccctgcccacaaaactatctataaaaactctagcctctgaatatttggagaagcagttttgagtaataggaaaactctgctctctcctttagccagctctacatgtataaaattttctctacagcaattcccctatcttggtraagtggctctatctgggcagcagccaacatgaacccattggccattaacaacccaactgctgaattttgtatgaagataacttgttttgatttcatgggctgacagaggagactttagctgtgggaactttctgttggtgctggaacaatctaagcctttgaacgataggaatgaaataaactttttgtaagtgaca

SEQ ID NO: 647487 - DNA, 384 bp, Homo sapiens
atttcatccctgacccaaccaatcagcatgtccctttctctaacccctgcccacaaaactatctataaaaactctagcctctgaatatttggagaagcagttttgagtaataggaaaactctgctctctcctttagccagctctacatgtataaaattttctctacagcaattcccctatcttggtgaagtggctctawctgggcagcagccaacatgaacccattggccattaacaacccaactgctgaattttgtatgaagataacttgttttgatttcatgggctgacagaggagactttagctgtgggaactttctgttggtgctggaacaatctaagcctttgaacgataggaatgaaataaactttttgtaagtgaca

SEQ ID NO: 647488 - DNA, 581 bp, Homo sapiens
gaagccaataaaggtttcttccttcattgattttccttaaaaaaatctccagtttcctttgcatcttaaaaatattttttctctgttcttcaccacatgaatgccccaggctatgcagtttgcatgaagtatagggttgctctttagacacagtgaaattaagttaagttgtaacccagtatactattttcctaaaaattacctttgcattttttctttttctcagtgttcacctcttgcttagctcctcagaaatgcaaatgtaaccttttccttccttcgtttccaccagtgaaacaacctgcaagtattgccagcttatctaagtatatgtttccttagaaattctaaggaccaaatgttgaaccaaagcaggcamcatccagaattctccctcacagggagactgtctcaagacaatagttaatccacattccgactctttcctcaatgacactggtcagactaacagatgaccccttagctaagttttacagcaagtcacatagaccccgcacctccatgttccttctgcataccctgcacaagaaagtttctcttcttaaaaccctgctttcttc

SEQ ID NO: 647489 - DNA, 581 bp, Homo sapiens
gaagccaataaaggtttcttccttcattgattttccttaaaaaaatctccagtttcctttgcatcttaaaaatattttttctctgttcttcaccacatgaatgccccaggctatgcagtttgcatgaagtatagggttgctctttagacacagtgaaattaagttaagttgtaacccagtatactattttcctaaaaattacctttgcattttttctttttctcagtgttcacctcttgcttagctcctcagaaatgcaaatgtaaccttttccttccttcgtttccaccagtgaaacaacctgcaagtattgccagcttatctaagtatatgtttccttagaaattctaaggaccaaatgttgaaccaaagcaggcaacatccagaattcyccctcacagggagactgtctcaagacaatagttaatccacattccgactctttcctcaatgacactggtcagactaacagatgaccccttagctaagttttacagcaagtcacatagaccccgcacctccatgttccttctgcataccctgcacaagaaagtttctcttcttaaaaccctgctttcttc

SEQ ID NO: 647490 - DNA, 591 bp, Homo sapiens
gggtacacaattaagcaaggaagtgccatttcaggaatrctaagaatcctcatctcagaatgaggaatgacttccatgaagctgaatgtctcttccaagtttctaggtcacaggagctcattttctcactgtcactattaccatggtgtagaaaatagaccccatgtttataaaccaaaaaacaagtcaacattatacatggccattggtgtgcagaatgaagtctgatgtctttgtgggtttttaggcatggtccctggaaacaaccctggtgctgtccagcagcgtgttgaacaggaagttgtgtgtgcggtgagtggagaatccttcctgctctgggattctctgtttagccagcacatatgcagaatcaccactcagcctctgtctatctcttagatcactgctggagggttgaggatatgttgtattttcttccttcctatccttccttcccttttttgcctctttccttctttctctctttcctctctctctctctctctctttctttcttgggtctgactttattgctcaggctgcagtgcagtcacacaatcacggctcactgcagccttgacctcttgggct

SEQ ID NO: 647491 - DNA, 582 bp, Homo sapiens
tggtcaaaccaatcccctgggccctgtgcacacatggcattcctctctgttccaagccctcctcccccctgcctctgtacagaggagctgttttcttttttctttcttccttctttcttgcccattaaacttttcactccttaaaaccacttcatgtgtgtccgtgtcattaatcccatcagcgcgagaccaaggaccctggtgttcctccagtcatcggagttgtatcaataggacgagtattctagtctaaaggaaacgccatgtgcaaatgccttgaggctggagaaaccaaagtgtagcatttaccagaaacgtacatggtaagttaaygggtgcaaaatgcaggctctttgttttcacacccactccccatttttccttcacagtctattaccttcatcaatttctcttggccttcacaccaacattcagtcaataacaggttttagttcggacatgttatcctgaatctgtccactcgtttctattcaccatcctagtccaacttattacaatgttttgcccggactacagctctagctccctaactggactgcccgcttccaaatgggcttcttc

SEQ ID NO: 647492 - DNA, 637 bp, Homo sapiens
gcctttaaaagaaaggaatcattttaggcaattattatgacctaaaaaatttttaaatcttaacgtatagattaattccttgacagctgaagtcatttacaatacattattaaatttcacattcagttttaaatccaaacatagatctcaacattaagaatatggattttagggaaagtaactagctgctcaaattcatttagctgaaaaactactgtcgaatcaccttgaaaacatacactaatgcttgcacattgctaagtggcttttgattctgctcttcattttcttacacagaatcaaccacacaatagaattaagaactcaggcccatggcaaagtgctcccatttagcagttaggacactggacatattcagcatatgtctactgctattgagaatcaaattatgaaaacaaactatattttataaaactaagaatttgttactcagatgagaataaaggtgcctaatgcyacagcagggggtaaaagtcccagtaagagagcaataattggtcattctgatgaggagctgtgccaaatttagaaatgaggcacaaatgacaaaaaaattgatcatcagtgtggacatgggtaggtcagtgtgcatatgggtaggttagtatctgctggc

SEQ ID NO: 647493 - DNA, 595 bp, Homo sapiens
tccagccagtgccctatgtcctagcaattcattctttgcgctcctggcattctcaaatgttttgtagatgccttcttgtagcagccagtctcgtcccttttcttgaagtcaatgagcatcaaatgtgttcaggattcatgaaataattctgacaataattagtattttttataggaattggaacatggtttattgcagtataccgcagtgtttgtcagctctagaacttacgaagaagaggaagaggagaacaagtttgactcctgtgaacgtttttccttttttctcagggcttgygtgggtcaaaggactctccagtggctaggattgcaggagtccatggtaggaaggtgggccactgggggctactcacctactctttcctcacattagggagcccctccagactccctgctaatcccagctgagcaggctacttcactttcctcttgtttttcatgctaggtgtcacttccgtgttgaattccagccttctctcttaggtgatctatttttattttacaagttagaaatataagtgcagagaagttaaaacagcaaatctgtggcttccaagagtggcaaagcagtttct

SEQ ID NO: 647494 - DNA, 587 bp, Homo sapiens
tttgaaattttgtttaacttcacagtgtaattagaagccacaagccattctaccttctttcagttcttcatgctcatcatactgtttggtgccagtggctactggatgcctcaaagctttgccttcactgggagttttatgattcttgatcaaatgcactaattttattaccattcagcctctaaacacggtgggctkctcgagtaacatctttttgtactattagctacaaccttactgaaagatttccattttctgttgcctcaatgtggcaccaaatactatatcagttttaatacttgccacaacactatacactctggttagtttaagaatacagattatttgttgaaggatatcccagaaatctgtgatacagtcaggagttcaaattcaaaagctgatttagtgagcacacaactgttgtttacacacaatacaatacattaacgtgttcagaagctttgcaactgctgcctttaaaaggcctccagtgttacatcatctaaagattgagacttttcagtgctttatttttcaagttgcttatttcttaattaaaatatcaccgactctatttgcttggc

SEQ ID NO: 647495 - DNA, 562 bp, Homo sapiens
ttagggtatctagcagaagaaatttctaagcagcaaagcattcaagaggtgacttggatgctgttaaaggcattcagttttatatgggaagcagggcataaaagttcagaaaatttgcagcctgaaaaggtgaaataaaagaaaattctattttctgatgagaaattcaagcaggttgcataaatttgcataagtaataagccaaatgtgaattcccaagacaatggggaatgtrtctccagggcgtgtcagagatcttcatggcagcccccaatcacagccctgaaggcctaggaggaaaatatggttttgtgggcagagcccagggtgcccatactgtgtgcaatctagggacttggtgccctgcaacccagccactccagctgtgactaaaaagggccaaggtacagttcaggccttggcttcagagggtgtaagccccaagccttggcagctccacttggtattgagcctgtgggtgcacagaagttaagaactgaggtttgggagcctctgcttagatttcagaggatgtatgaaaatgcctggatgtccaggcaga

SEQ ID NO: 647496 - DNA, 523 bp, Homo sapiens
acaaaattactaatcagatgtgtttttcattcatggaactctacaccaacgccccaagcatcatcctaagccttttttttttttttttttaatcattttattgcccttttccacccagtatgattactcctaaatatagaaggctttggtttcagcccccacaaaacacttaaacttccttaggcatgatattcaatctttttcatcttaaaaggtcttcttgtaatcactgttaagcaatcaagccattaccaaaccaaggctactgaaaaacttaaagagaagacaatagaaacccattcaccatgttttgagatagatatttaggcctattattagtcatgtaatttttccagatatatatctctgagaagagcctgatgaaaaccctgggttttagttcactttcctaattctaggccacctaatttgttattatttttcccagatgcttacrtagagctgtcttagtatgattaaattaaatttccctatattaaattacctgatgattttagaattc

SEQ ID NO: 647497 - DNA, 586 bp, Homo sapiens
ttatttatttctccacagcttatatttgtaacagcccatatggacttcttttgtaaatgaaaatagaaataattttttaagtgcagaatcttttagttcgagccattccacttaagaatacttagaattacttacatagggaaatactgcccttaaaacagacacagaggaaagataaaggaatctatatttttacaggataaaccagacacccattcctttagcaaacacatattgagtgattactatgtttatttttagctgccaaaaatttgatcaacaagccaaagtccctgcattcttcttgccacttacattttagttggggagaaaaacaaacacacatgtaaataaatgatttaaattatataagttcaagtttacaaatgatacgaagaaaaataaaattagaagcatgaagagtgaccagaggaggtaggggtgaagaggaaaagggttatcagcaatgcctcactgagaatgtcacatttggacagactctttggtaatgtaaggaaatgacaaatatgatgatctccaataggagtgttgcrgggaaaaaaaaactccacatgcaaaaaattat

SEQ ID NO: 647498 - DNA, 543 bp, Homo sapiens
gccagtgaaggtgacagaagcaatctggataggcctctcctcactcagagggcacctgtgggtgccagcagtcaccagtagggaagacctatcttcagggtcctacagtggtatacacagcaccagaggcagtgatatagggtagtttgatccccaggctcctggacaacacacacaggcactggcaggggttgcactaggcaaaattgagcctgtcctcagttactctggtcatgtgcatgggtacaggctgaatctggtaggatgggtcaatccccagacccccagacagtgcatttttgcctggggatagtggcgggtggggcagacctytccttagacccccagacaatcagcacgggtaactgtgggggcaggtatggtgggtcattccccaggcccccagatggtgcaagtaggtgcactgatggcagtgggcagggccaccctgtcctcaggtccccaggccatgcacatgggcacagcacaaaagtggtggtgggcagcagtggtgctggggagaacagtcctctagccagcccc

SEQ ID NO: 647499 - DNA, 410 bp, Homo sapiens
aaggtactaaggtagtactcaaattgctggtttttggaggacacaattatattgcccaatatggacaactcactatgtgagttgtcaccccctcctgagacacatggacagaaaatataatacactggcaagagtccagctttatggccactgcattcagacattaccagattccaagtttttcccatttgaagtagctggtgcagttcatttctttagacatgcctccatccacatcaagtmtgaaagcttctttaatgcttttaagattaagataaaacagctggtgaaggggtggaagcgtgtcagtggcaaaaactctaaaaggagaacacagagcttggctaaagacaaagcaacaggaagtcaagcacatgcaccgtccagaaataccctgaaatgttatttta

SEQ ID NO: 647500 - DNA, 634 bp, Homo sapiens
tactcaaatgtcaaaaggaaaacataatcaaagaaataaaggaatcagaaaaaaatattaaaaagcaggaatatcagcaaagagataacagaaattctggaatggaaaactacaatgataaaaatttcaaaatcaccagagggatttaagagtctatttgcacacacagaagaagccatgaacttgaagagaagataatggaaaatactgactctgagaaacagaaagaataaaaaataaacaatgagcagagactaatgaatctgtgggacatcatcaaatagaccaacattcatattctagaaggataaattatgttattaaaaagtttacccttctttcttttcacctttcttccttcctccttccccctcctctttacttttcttcctcttcctttgtcttcttctttctckccttcattatccctttcgctgtttctctttctccctttctcttttttcttttctttcaattttctcaattactaagagatgtttaagtacccttaccctgttagtagatacggttatttctccctttagttctcttttgagatttatagtcactctaagtaaagagataacccaaacataagcgtcaccaacaggctttcataccattcttaatttgg

SEQ ID NO: 647501 - DNA, 385 bp, Homo sapiens
atatttccctttgctgattgtccctcccttttgacagaagatggcccagggcattcactactaagtctcaacctcttacccaaagccctcagtctagtgttgctctttccttcatgctatttttgtttctttcttttcttgtaatcatcttggcaataaaataatcagttttttctttctacctattaaagatgttaccttagttaattacagtggtttccttcagaatgataagtggtctttcaaaatgatgtaaagagatctaaatccgtgtgctccagaagttgaawgaagctctgtctagcacgggtgccagtgactctcccagagtgctccatgcagctggacccacagagtccctctgtgctgtcataccacccactgc

SEQ ID NO: 647502 - DNA, 385 bp, Homo sapiens
atatttccctttgctgattgtccctcccttttgacagaagatggcccagggcattcactactaagtctcaacctcttacccaaagccctcagtctagtgttgctctttccttcatgctatttttgtttctttcttttcttgtaatcatcttggcaataaaataatcagttttttctttctacctattaaagatgttaccttagttaattacagtggtttccttcagaatgataagtggtctttcaaaatgatgtaaagagatctaaatccgtgtgctccagaagttgaatgaarctctgtctagcacgggtgccagtgactctcccagagtgctccatgcagctggacccacagagtccctctgtgctgtcataccacccactgc

SEQ ID NO: 647503 - DNA, 385 bp, Homo sapiens
atatttccctttgctgattgtccctcccttttgacagaagatggcccagggcattcactactaagtctcaacctcttacccaaagccctcagtctagtgttgctctttccttcatgctatttttgtttctttcttttcttgtaatcatcttggcaataaaataatcagttttttctttctacctattaaagatgttaccttagttaattacagtggtttccttcagaatgataagtggtctttcaaaatgatgtaaagagatctaaatccgtgtgctccagaagttgaatgaagctctgtctagcacgggtgccagtgactctcccagagtgctccatgcagctggacccacagartccctctgtgctgtcataccacccactgc

SEQ ID NO: 647504 - DNA, 326 bp, Homo sapiens
aaaacacaccccttccccttgcattggtttcctgttgctgctgtaacaaattaccacaactttactrctccacataacacaagtgtattatcttacatttctggaggtcagaagtctcaatgaagtaaaatcaaggagtaatagggctctattcattctaggcttcaagagagagaatccaatgtcgagcattccatctttctgatgttcccacattcctagcagcatggccccttcctccatcactccagtttccctgtccgttgtcccaggtcctctctggctgttaccttcctccctccctattgtaaggacccttgtgatta

SEQ ID NO: 647505 - DNA, 594 bp, Homo sapiens
tatattttgggttattgtcttatttttgatgcagtattctataaataatttattaaacctggcatccttgggtgagcatagatttttcaactttggtgttatattgtgtttgcttttaaaaactgcttctgaggccaggtatggtggctcttgcccatacccagcactttgggaggccaagatgggtggattacctcaggtcaggagttcaagaccagcctggtcaacatggcaaaaccatgtctctactaaaaacacaaaattagccaggcatggtggtgcrtgcttgtagtcctaaccactcgagaggctgaggcaagagaatcacctgaacctgggaggcaaaagttgctaggttgctgtgagccaaattcgcaccattgccctccagcctgggtgaaaagagcaaaactctgtctcaaaaaaaaaaaaaaaacccaccaaaaactgcttttgaatggagttgtacatataatttttatgaaaaaaattaacaagtgcataagttcataatagaaaaaccaataatactccaggcacaagttagtactaaaaaaattatgttgaatattctctaatacaacatgctttttc

SEQ ID NO: 647506 - DNA, 561 bp, Homo sapiens
ctaactgtattttaaaaaccccatttcacaaaattattaagttgtaactaaggctacattgagagtttgggaatgtgtgggttagctaaaagcagtaactacatgctaagcttcttgtcatatttgggctgggggtgaatagaaatgctgactaattctacattattttggaaagagaaacagaatgtataactttaaagcagtagagggaaaatagaacaaaaaatgtgcacagtgtatccaaatgctcaagggmagtaaagcaataatatggcaagagaaaaacataaattaagataataagaataaatgtaaaactatcaacactgaagtatataggatcacataccaactaaaggactttaaattcaataaacaggaataatacagcttttagtcaaagagacaaggaacaggtgcaaaagatggttatataccatgccacgaaggaaggcctcatcaagactgacattatataaaccatgttcactgtatgcagtaacataaaactaaaagttaaccatagagaaactaaatgatcagaatattttaggaaaatat

SEQ ID NO: 647507 - DNA, 561 bp, Homo sapiens
ctaactgtattttaaaaaccccatttcacaaaattattaagttgtaactaaggctacattgagagtttgggaatgtgtgggttagctaaaagcagtaactacatgctaagcttcttgtcatatttgggctgggggtgaatagaaatgctgactaattctacattattttggaaagagaaacagaatgtataactttaaagcagtagagggaaaatagaacaaaaaatgtgcacagtgtatccaaatgctcaagggcagtaaagcaataatatggcaagagaaaaacataaattaagataataagaataaatgtaaaactatcaacactgaagtatataggatcacataccaactaaaggacyttaaattcaataaacaggaataatacagcttttagtcaaagagacaaggaacaggtgcaaaagatggttatataccatgccacgaaggaaggcctcatcaagactgacattatataaaccatgttcactgtatgcagtaacataaaactaaaagttaaccatagagaaactaaatgatcagaatattttaggaaaatat

SEQ ID NO: 647508 - DNA, 621 bp, Homo sapiens
gttgattgggtatggagattttgaattcatagaccctggcacctgcagatatatgcacatttgcagatggtaattagagctactctcctgcgtttcccctcaccctcccatatcctccatttatcttgtttattttttgtttacctttgcartactcccagggaggaagaggctacagcactggcgcactcccaggtatgaatctaatgttttaaaacggctacactatgaggtcttgtatatttgctttagaaaggttggagtaggtttcatttcatccctaacccgaggatgttgcgaagatgtcaacccatgaatgagtaagctttgtggtctgggataagtcaatagtttataccagaaggagtagatccatgtcaacaggctaaggtctttgatgtcctttctcagtatcctcttttctgatttgccttttaatgatgctaatagaataacagctttaaatgatttattgaattttccatctaggagagatgttagggattactggatgtcatacctgtcattttatgaaaatggaggcacaaagaggtgacatgcttttcccaaagccacacaactggtagtggcaactggaaccagaaacaaagttcactgaca

SEQ ID NO: 647509 - DNA, 488 bp, Homo sapiens
cacctgctgtcaactgcagtctgaattttattatctcacatcatcacgagaagggtgagtatagtacaaaaagatatttagagagagaccacagtcatataatttttattgcagtatattattwcaatttttctatctcattgttgttaatctctttctgtgcctaatttataaattaaacttgatcataggtatgtatgtataggaaataacatagtatatatagggtttggtactatctgctgcttcaggcatccactgagggtgttgaaacatacccccagtagataaagaaggactattgtaccacaaactgagtggcttaaacaacagaaattattgactcccatgtggaggccagaagtcctaaataaaattgttgtcagaattgttttttctgaaggctgtgagaaaagaatctgctccaggcctcttgccaagcatctgctgatttgccagcaatatttagtgttcattgttttgcacct

SEQ ID NO: 647510 - DNA, 621 bp, Homo sapiens
actaaaactttgagaatatattttaaaattacacaccatgcgaaaatacagaaggtgatgcaaaagtacagtgaatggtgatcttgtttgattttttaaaaatcataatttaggcagggtcartgttccttttatggtaggctacttagctagcactttgtttctcctagggcaaaacaaaattctgtttagcaagttgaaatgaaagtggttttctggttgataaatagattgtttattttgttagaaactcattaaagaattatgtgtgattatgataatatttagtcactgtaatgctaaatttgaacttattcctgtggcttagttttgacgccacgggcattgttgccgttacttaatgcccttgacatcaaaatttctctcaaagagaaattaagagagatttaagggattaaatggatagattccatggtaaggatatgaagatgttaagtttggcctggggacatacaagaaatttagaattgcagctctctggttaatttgctacttcattgattgggctgctgaaagttgattaagtttctagaagtaggtttctgaagataatctagtaatgggaatctattccatagaatttgtgtgtgagattgtgtt

SEQ ID NO: 647511 - DNA, 615 bp, Homo sapiens
acaaggtggtttgctgaagcagttttcagcacacacacaakctggaagtagtctgaatgtctaagaatgaaggattgattaattaagtcttcatacaaccatgagatagaacacgaggctgtcattaaaaatgatgtcaggccaggaatggtggctcacgcctgtaatccctgcactttgggaggcccagggcggacggatcacctgaggtcaggagttcaagaccagcctggccaacatggtgaaaccccatctctactaaaaattcaaaaattagccaggcatggtggtgggcacctgtaatcccagctactcgagaggctgaggcaggagaatcgcttgaacctgggaggtggaggttgcagtgagccgagattgcaccaatgcactccagcctgggtaacagagtgagactctgtctcgaaaaaaattaaaaattacaaaaagccaaaagatgtcaatgcaaagttatcaatttcaaataacagccacaataaagactccaaagcgacaagggtatattacaaaatagtatgcataccatggccctgacttttgttaaaaattgaatagttatttttcaagtttgaaatgtcatatgccacagttaacaac

SEQ ID NO: 647512 - DNA, 615 bp, Homo sapiens
acaaggtggtttgctgaagcagttttcagcacacacacaatctggaagtagtctgaatgtctaagaatgaaggattgattaattaagtcttcatacaaccatgagatagaacacgaggctgtcattaaaaatgatgtcaggccaggaatggtggctcacgcctgtaatccctgcactttgggaggcccagggcggacggatcacctgaggtcaggagttcaagaccagcctggccaacatggtgaaaccccatctctactaaaaattcaaaaattagccaggcatggtggtgggcacctgtaatcccagctactcgagaggctgaggcaggagaatcgcttgaacctgggaggtggaggttgcagtgagccgagattgcaccaatgcactccagcctgggtaacagagtgagactctgtctcgaaaaaaattaaaaattacaaaaagcmaaaagatgtcaatgcaaagttatcaatttcaaataacagccacaataaagactccaaagcgacaagggtatattacaaaatagtatgcataccatggccctgacttttgttaaaaattgaatagttatttttcaagtttgaaatgtcatatgccacagttaacaac

SEQ ID NO: 647513 - DNA, 434 bp, Homo sapiens
tcagcagtcgggctcattgtgttgtaggcccaagaatgactgatccctctgaaagggcttccgaaatcttgcctcctttgtctaattggctgcatcagtaaattgctggtggagagttttagaggttacagaacaggaataggttgcagttttacagaaaggcaggtgtgaggcgattaaacactcactgtctcccagcacttttaatccctctgaccaattacctggaatataacttggagcaagtgacagaaaatgaggttcctactgagcccacgtgtgtgttttaaatacataygtgtaacatatactacagttgcttatgaagagtagtttatttctgttttctttttcctccttttttttttgatttatttgaaatgtttgtgatgactatacctaacgtcctaaaaagtcttctttcaataacttct

SEQ ID NO: 647514 - DNA, 547 bp, Homo sapiens
gatgtgtttcattgggggagggagggatgtgattcattggagggggagggatgtgattcactgggggagggaaggatgtgattcattgggggagggaaggatgtgattcattgggggagggaaacattaacatattcgtctatagcaatgtttctttctctttttttgatccaatctggtcacacagttggcctccacgtaaatggaataataaacaatggcttatctagagcatctaatgatagaaacaaaagtgtatttttaggcagatcatcacttcttatattcttggcacacatgattttatgtacatgtgttatttatacaccactcaaggagaactagaggctccttgcaatgaaaagcagattcayggttaagtattagaaatgctcaaaagccttgaaggctaaagctaattttcttgttttaattgaatattcaatttaaccttgagcttcctaggaatcaaggcaaaaagggagaaacatgataggttgtgtgctctttattacttactgagggaaagcacactgcttttaggagt

SEQ ID NO: 647515 - DNA, 510 bp, Homo sapiens
tgtatagaaaggaaggggttgcagagacctagktttttatcatgcagatgaagcctccaagtagcaagctttagagagaatagactgtatatgtttcctatcagacctagggtctgtgttgacattaatactagagaggtataaatgagacgtgtccaaccccaacataaatgaggcatgttcaacccccacttcccatcatggcctgaagcagtctttcaggttaaatgttagggtgccctagccaaggaggaagtccattcagatggttgcagggggccttcgaattttatttttggtttgcagtaagttacttgcataagttcaataaaaatctgttctctttgtaacaagttataactggaaacactggttataataccaaggcttttgaccggaaagtcatatttgaaaatgtacatagagctggatatggccagttttaaagaactaaggtttactttatgaagccatgaaagccccttggaaaaaactagtgtggtacgaggc

SEQ ID NO: 647516 - DNA, 567 bp, Homo sapiens
gaaacaccatcgaattgaaaygaatggaattatcatgaaattgaaatggatggattcatcaccgaatggattcgaatggaatcatcgaatgaaattgattgaaatcatcatcaaattgaatcgaatggaatcattgaatggaatcgaaaggaatcctcatcagatggaaatgaatggaatcatcatataatggaatcgaatggattcattgaatggaatcagatggaatcatcgaatggacttgaatggaatcattgaatggactcgaatggaatcattattgaatggaatagaatggaatcatcgaatggtattgaatggaatcattatccaatggaatcgaatggaatcaccgaatagaatcgaatggaacaatcatcgaatggactcaaaaggaattatcctcaactggaatcaaatggaattatcaaatgcaatcgaatggaattatcgaatgcaatcgagtagaatcatcgaatggactcgaatggtatcatcgaatggaacggaatggaatagtcaatgaactcgaatggaatcatcattgaatggaatcgaatggaatca

SEQ ID NO: 647517 - DNA, 492 bp, Homo sapiens
tctgtctggttactgtatttgattcactgtgttcttttaatacattattttattatcaaatgaaggaaattgaagtagttmaaattactacctcctatgaaaatcttgactataaatttcttggtatctacaaaatagcatttaatgcaaatgtataattcgttatttgtagttttgaattttttgtaatttattttataactggaaaatcggaaaaatattttaaaatttttggtaattcatttttggaaaatctaaactaatctgacatgaggttatttgtgtaaataatatattttactgcagaaatatcaatatatttgattatgaagtattaccccagaactcactagtactactatatgatatgtggtatatatatatatatttttttgttgttgttgttttttttttaagaaagagacaaggtcttgcagccttgacctcctggctttagggatcctcctgcctcagcctcctgagtagctgggg

SEQ ID NO: 647518 - DNA, 658 bp, Homo sapiens
tattttgcttcaaaacaagttgagctgactaaaactgactacatktcagacatttctaaatatgtgtaataattttcaaacactaattccaaattattgcactcacaaatgctgtcaaggtaacaagtaggaatctatactgtgttagcattggacagaatatattaaaagggactacaacctttaatctccataacatgaccaatctgtaactctgagtactcagaattttatttctgattatgaaaagattataaagcttgagtataagcacttagattttcactgagccaagtagagtaagactgataattcacatcaaacttctctaccctataggaattccagaggtgatttctctgaacaagataacctatatgcatataaaaagtgactactaaaataagtgatgacctgagttctataattaaacatttactaaaatcctatcttttactaaattttaaacttgcaatgacttgagaaaaaactaataatgatgtaaagaaacctgtagaaaatacttcaaaactgacgatgctatttttaatgtataaaatataaaagagaaaagacaagagaaaacagaaagctcccaaatggtgggatgagagcaaagttgaggaggatgggcctttgtgttgaaggctaacatgag

SEQ ID NO: 647519 - DNA, 475 bp, Homo sapiens
aagaaagcctgacatttatctttgaaaaaaataacccttacattctttgaatttgtattttattatgaaatatwtgtgttttctcattttataaatgtttgaatacaattgtgtgactccactgaatttacactcattagtagttaacagacatggaaattttatttcagattacatttcttcttactgattcttttctaaggactcatttcttccttaggaaaatgtttaattctcaggtttaactttctactctgtttttctgtctaagctctctctttattatctaatgtcatgattctctcctttgaaaaacaaaagtgctactctagtttgccttccatatcactgttttgatcaattgcagtgccaattctgctatattgtcttgaatattgggttttgtttttaatgatgcagtttgttttatttttcttatattgcaacagagtttaaggaactatgcttacatttt

SEQ ID NO: 647520 - DNA, 475 bp, Homo sapiens
aagaaagcctgacatttatctttgaaaaaaataacccttacattctttgaatttgtattttattatgaaatatttgtgttttctcattttataaatgtttgaatacaattgtgtgactccaytgaatttacactcattagtagttaacagacatggaaattttatttcagattacatttcttcttactgattcttttctaaggactcatttcttccttaggaaaatgtttaattctcaggtttaactttctactctgtttttctgtctaagctctctctttattatctaatgtcatgattctctcctttgaaaaacaaaagtgctactctagtttgccttccatatcactgttttgatcaattgcagtgccaattctgctatattgtcttgaatattgggttttgtttttaatgatgcagtttgttttatttttcttatattgcaacagagtttaaggaactatgcttacatttt

SEQ ID NO: 647521 - DNA, 475 bp, Homo sapiens
aagaaagcctgacatttatctttgaaaaaaataacccttacattctttgaatttgtattttattatgaaatatttgtgttttctcattttataaatgtttgaatacaattgtgtgactccactgaatttacactcattagtagttaacagacatggaaattttatttcagattacatttcttcttactgattcttttctaaggactcatttcttccttaggaaaatgtttaattctcaggtttaactttctactctgtttttctgtctragctctctctttattatctaatgtcatgattctctcctttgaaaaacaaaagtgctactctagtttgccttccatatcactgttttgatcaattgcagtgccaattctgctatattgtcttgaatattgggttttgtttttaatgatgcagtttgttttatttttcttatattgcaacagagtttaaggaactatgcttacatttt

SEQ ID NO: 647522 - DNA, 589 bp, Homo sapiens
caaaatcactgcctcactttgtgcagtctgatgggggtgagatgggccccacagaaagatgaacatgcacggaggaaaagcatccctggaagcacaggactccactagctaatctcatatctcagtgtatactttatatcattttttttctgtttttttctaagaaagaggacaatcaattgaaacatttggaaacaggctcagattaggctgatcaagaacagggtctgaagattcagaaaggtcaaatatgtaaatatccctgtgtctcccagtgtttagagagattctcagaagcagaagatacctatccacagagccctcattccctgtgttctctgtgtacctggatatttatccatgaatctgtgctccagttggtcacaattttcagtcgatgagataatgcagacaacttcaatctcaygtgccctggaagccagaaatccagcgcagaggacctgcagcttcacaaagtgaagctccctctgtgggtggcttggtctcagttctcaccaaggacaaactttcaactttaataaaacatttaaaaacctccattgaggtccaggtggggaaaagactgcag

SEQ ID NO: 647523 - DNA, 539 bp, Homo sapiens
gctctttcccacatgtaggatcacagaagacttagaataaaaggcatctgaaatggggttagaaaaacagccagaatataggaaaatgaaaacaaaaagcactggactaagtgaacatgaagtgaacattggtaccatagtagggatgattaataaaaaatgtgatatcttgcaggcacctacagtaatgtggcatacagaaagaaaaggggaatgaaaagaaagactactgagaaattacaggataaaggatcttacgtgcctcctcaaggagtttggactttatttaaagacaaagagagccaaatttaaatgtttaagcagagatgtaatattattacatttgtgttttagaaatctcactcataacagcaaagggagaacagtagcacctaattcaagtgagagataataaggttcaaaataaagccatcactgagacagtcaagggaaaaaaatagcttcccaagacactgagtcaatggaatcatcrtgactttgtctctggaaggagcagattcctggtgagaaagagtgac

SEQ ID NO: 647524 - DNA, 577 bp, Homo sapiens
gcagcaggtggaattaaagggaacactgcagtgtaacagatatgcagttgccctgggcttataacccactgaagcccgcggtaatggccgcaagattaattccagactctcaaatacttctggtgctaagcctagtgatcttgatcagccttggtccagacttgctcaggaacttcagagggctatggtcctagacctaaggcattgtggagtctcaccctgaagacttcgggagaaggcatgcgctgaaaactatggacctagacacattggaagaaagttaccaaaaaaaccatgtgttggctcagtatttggaagctcttaaaatgaaatgatctgccttgtaaaatggtgacctactgaggagtaataatcttttatgtttacaaaggkatttcatgtctgctaccaagtttcgtgtacattatcttaaatcaatcatgccttctcttgcccagcagtctcatattgttctggatcatttattgctagccatctagtgagtttatttacactgcggtagtaggttgttcacatataatcttctagagtcattagtgtttagaagaaaaggcca

SEQ ID NO: 647525 - DNA, 595 bp, Homo sapiens
cttaatttcaattcacacctcaaatattagaaaacattatttgtcctaatatcacaagagaaaaattaatattgtgctrcaaaatttctgcaagaaatcaatttctagcagtgttatctttcaggtacgagacttgcttttcctaagggggttgcatcataattttctctaatttattttgacatttaagctatgcagtgataaatgaaatcaagataaaatgttagtttggcctttagcccaaaagagaaatctaataagaggttcataaaaactcctaaactcataaaaatttagaataagctcagaataaacttatctatgtccatgttctgtaacaactcatgtaggtaagctcaacaattaatcttgacaattaagctcagttattatgaactgtatgattgtaacagactatggttgattgtttacaaaaacagccactattattgcctttattatttctatggcctttttatggtataattttgcagcttttctatcaagagatgtagtaggttacatttgataaaactattatatatcaagtgataagatcctttggaaactttaacatagtggaaacatattttct

SEQ ID NO: 647526 - DNA, 488 bp, Homo sapiens
gaattccttaggaaaaacttatgctgcttcaaagcagtgtttctcagtgcattatcagaagaattaaacatacttacaggtacttgttaaaaatttaacttaaaaatttcagttcaagaagtctaccacagaccttgaagttcactcatttgatcattacataatttcttttttatttttaaagagatggggtctcactatgttgccccagctggtctccaactcctgagctcaagtcattctcctgccttagcctcccaaagtgctaggattacaggcatgagccactgcactggcctgattattacataattttaagcagctattctgtgacagttttaggtcttagygtaaaaccaaacaaaacctgtgccctataaaggtcacaccagttactgctaattgccaataatgtgagtaatctcaatgaaggataacatatgctttgacaaaggcattatagggagcccagagaaggagcctagaat

SEQ ID NO: 647527 - DNA, 547 bp, Homo sapiens
caatagtagcctattagtccacgtgcagtggctcatgcctataatcctagtgctttgggaagctgaggcagtaagatcactcgatcctaggagtttgagactagcttgggcaacatagctaggccctgtttctacaaaaaatatgaaagaatcrgccgggtgtgggggcatgcacttgtagtcccaattacttgggaaggtgaggctagaggattgcttgagcccaggagttagaggttaaaatgagctacgattatgctgctgctgcactccagcctgggcgacagagcaagactgtctctcttaaaacaacaacaacaaacaacaacaacaacaaaaacagtatgctattgatagttaaggttttggggagtcaaaagttatatgtgaatttctttctgtgcagagggttggtactcctaaccccttagttgttcaagggtcaactgtctgtgtgtgtgggtgtatatatctacgtactcaatgcctacacaggggaagagtctgactgcaatctgcttttgagttctgacacacatccagccgc

SEQ ID NO: 647528 - DNA, 566 bp, Homo sapiens
tttcttctacactctcttaagaccacttactggacgcacaccatgtatttgagctaatctgaattactgtctttgagtttccacttctttgctttttctcagtctgtctacacctctgggaatgccataacatggtatgttatatttgttcgaaggcttgtatcatacctgctcctttttgatacctcyaagaaggggtctaatatggtttggctgtgtccccacccaaatctcatcttgaattgtagttcccataattcccacatgttgtggagggacctggtgtgaggtaattgaatcatgagggccgtttcccccatgggattctcatgatagtaagttctcacgagatctgatgcttttataaggggcttctccttcactcagttctcattcttgttttctttcctgctgccatctgaagaaagacatgtttgctttcgcttctgccatgattgtaagtttcctgaggcttccccagccatgctgaactgagtgaattcaacctctttcctttataaattatccggtcttggttatgtctttattaacagtatgaaaacgga

SEQ ID NO: 647529 - DNA, 695 bp, Homo sapiens
aacatggcacatgtatacctatgtgtcaaacctgcacattgtgcacatgtactctagaacttaaagtacaataaaataaaaaatraataaaaataaataaagggccagatagtaaaaaaaaaataaaaaaagtacatgattgatatttaaaagagttttcaaaaaggaatgtaagaaataaagcaagtctgcaatgaggcaaagaaaacggttaagagcttcttaccgccttcatgtgtatttgagggtcagaggagtgaacccacattttgtttcttctcttttacatttttttgctttcatttttgtttttaccaatcacatattagtcctgaatttaaactaagagcaataataatgtttcaatagatatctttatgtttaaaataaaatgttaagagtttcaagatacagtaagtaaaacaaaacaaaatgtccttcaatgggtgaataaacagtggaatatccacacataatactgctcagttaaaaaaaaaaaagattgataagcgttgatacatgaagcaactcaagggcagtatgctgagtaaaagaagtcagtctccaaaggttacaaactacatgatttcatgtttatgacattctcaaaaagacaaaaccatagtgagggagaacaaaccagtgattgccatgggaatggagggagatgttcagggagatgaaacttttctgta

SEQ ID NO: 647530 - DNA, 695 bp, Homo sapiens
aacatggcacatgtatacctatgtgtcaaacctgcacattgtgcacatgtactctagaacttaaagtacaataaaataaaaaatgaataaaaataaataaagggccagatagtaaaaaaaaaataaaaaaagtacatgattgatatttaaaagagttttcaaaaaggaatgtaagaaataaagcaagtctgcaatgaggcaaagaaaacggttaagagcttcttacygccttcatgtgtatttgagggtcagaggagtgaacccacattttgtttcttctcttttacatttttttgctttcatttttgtttttaccaatcacatattagtcctgaatttaaactaagagcaataataatgtttcaatagatatctttatgtttaaaataaaatgttaagagtttcaagatacagtaagtaaaacaaaacaaaatgtccttcaatgggtgaataaacagtggaatatccacacataatactgctcagttaaaaaaaaaaaagattgataagcgttgatacatgaagcaactcaagggcagtatgctgagtaaaagaagtcagtctccaaaggttacaaactacatgatttcatgtttatgacattctcaaaaagacaaaaccatagtgagggagaacaaaccagtgattgccatgggaatggagggagatgttcagggagatgaaacttttctgta

SEQ ID NO: 647531 - DNA, 552 bp, Homo sapiens
ataataataatgataataaatagctcacatctgtaatcccagtgctctgggaggctgaggtgggatgattgctagaggccaggagttctagaccagcctgggcaacaaagcgaggtgtggcctcaataaaaatattaatattagccagggatggtacatgggcctgtagatctagctagagtagagactgaggtgggaaaatcrcttgaacagcataaaacatatataataaaaaatatatatgtacatatatatatgtttaactaatagtcatagagtatctataagtgctggaccttgagaaagcctgtttcactcatgttatatcttactaatatttcatgcaagtaagttttgttacttggactttgttttgtgtggaaactgaggcacagagacttgtctaacaaagctaagatcccagcgatcataatgggagaggttggatttccacgacactatgctgcctctcccatggaacatgtccttgacataatcactattcagagctgcacttccccaacatggtagccactagtcacagacggttat

SEQ ID NO: 647532 - DNA, 636 bp, Homo sapiens
acgtgattgttttgctaacatctaaaactcaacaaatctcaatgtgaatgccatcttctgccacaaaccgttcctccttccctagttatttcttaactagttggcaggagctccttcccacagtgcccagacttccacccacctctcccgccctacttccataacttagaatgtagcaatagttgaggccctcatctgtaggtacagaatgtctgactggacctctctcctatcaggccctgctgtctctgcacatggctcctcctccagcaaacttaatccatctctctccctttgagcatcttttactgctttaagattatctccaactgtatctttagggtcccctgttccggaacactggtctacacccaccamgcccacccactcactgactcacacctctgttcattctgtttgctgtgcctgttagaaaagtattccctttttacagttggattcttctttcaaatcattagaggaaagaaagggattaaactcatgggctgttcaagtcacaaacctgagtgcaaatcccagctctactacttaatgcatatgtccatagaggaggagaaagggggtgtcagagagacagaaacagaaaagagactgagcaaagtgcttattcacaga

SEQ ID NO: 647533 - DNA, 610 bp, Homo sapiens
tatacactacttaacatggtccagtgtcagcataaggctgtaatttggcgattgcatttctttatttaataactgctgataaagctgaaataaagaatcagtaaaaaggtttcacttttgtaaagcacatccagggtttataggaaaggaaatatttcagcatttctgatatataaaagaacaaaggtgttatattaagaaaaaataatacataaaacaatatcagggacattgaattgatgaaagtaatcagtaacattttaaatccatgttggcttgcattgtgaaagaagggaataatttacagttcatgatatttgtatttagatgtttgtatttttattgtgtttagagaatcccaggaaaggaaagaatcctacaacccgtaggatgaaaaaagctttggatctcatgccaggacaagggcactgatgcccaaaaagataaaggccttcctcagaatcttatggsaaaagtcaaattatttaaaattagctccagggttcatgagtaagattaattggtagaagttaaatggctatatggttcacgtttaaaaataatttctaaaaattggataccccttatgagagaaaatataagtggcttt

SEQ ID NO: 647534 - DNA, 505 bp, Homo sapiens
cctcttccggctggggccactgaactaactggctgtgagcctggggttcctggtgcctatcgtgttatactgtaagagcaaaccttcccaagaatgaagaaacagggctgagggatgaagagagagagagaaccgtgacatccgatcagggtcctcactgatacaccgatggtagcaggtggcacctcgtatcacagtggagaagccggtgctgtgggagttctaggatggaaggcacttgtggcagggagatcatggaagaggcagggactgcaycaggccttgaaggatgagaaagttaacacaggaagatgagtgatcaggcattccagatggaaggcgaaggcaaggcttgcaggggctgaccttgaaaagaaggatttcacttccacccctctcccggagccacctggaagtcccatccctgctctagactccctcccccaatcatatacaaaacacaaaccacagaggctggcgagatgcagagtgatgtctgagcccc

SEQ ID NO: 647535 - DNA, 581 bp, Homo sapiens
agccccagttgtttctacagtggtagataagggaaagaagaagtttctttttccaatacccttcatgagcaccaaggctgcttgactgttggagtagagccacagacttttcccactcagcccatcactgcacctgtgcctctgctgaaagaaacttcccacaagtggaaagttcagggcctccaggcctgcagtctggtttcttttgtgccacagggcactcctttaatgttacgtgctcctccttcttgcaggaatagcagtccctgagggccagattactgtgaatcctgctgctcctctgggtctagctgcccaccgtggctgccacactccagggtggtgctggggaatatttgcaaagggatccagtggtgtgacctgtcctctagtctcatagaggcagtaccagctctgatggggtgaaaggagagtgatgtagactcggatttcctttgttataaatagcctgtgtgtgtyggctttcccaaatgccagctgtagtggtaatgagctggtcatgtggatagactcaggaccttctggttagccagggtgaagcaggcagtggtgatatctga

SEQ ID NO: 647536 - DNA, 622 bp, Homo sapiens
taatatgctagattagaaaaaaaatcaatacatttaatagaactggcatcatataatgatgtttttgaccacaatgaaagtaaatcagaattgaacaacagaaagaaatctggaaaatctgcaaatatttagaaattaaacaatatacttctaaataacccatggatcaataaaggaaaaacaagaaaaataagaaaaaaatttaactgcactaaaacaaaattatattaaaatttatggggtgcaactaagacagtagagggaaatttatagctttaaacacctatatcagaaagaaaggaagatctcaaatcaatattctaagcttccatgtgaatatagtagaaaaataagagcaaactaaaatcaaagtaagacataataaagattagagcaaaaatccatgaaatagaaaaccaaaaaaatcaacaaattgacatatttagattgaccgaccagtaataaaagacagaagacacaaattatgaaaattagaaatgaaagaagaaacattatcaccaayctacaaaaattaaaggggtcataagcacatgttatgggcaactttatggcccaaatgaggcaacttagatgagatgggggaaattactggaaatgcgca

SEQ ID NO: 647537 - DNA, 605 bp, Homo sapiens
tgattcatttctattttaaaatggctattctttttttttgagatggagtctccttctgtcatccaggctggagtgcagtggtatgatctgggctcactgcaacctccacctcctgggttcaagcaattctcctgcctcagcctcctgagtagctgggagtacaggcgcatgccaccatgccggactaattttttgtatttttagtagagtcggggtttcaccatgttagccaggatggtcttgatctcctggcctcatgatctgcctgcctcggcctcccaaagtgctgggattacaggcatgaacctctgtgcctggcccaaaatgactattcttatttgaagctttggaagctactgttggtaaaaatatgtgcatactttggtaactccagaaattatatatatgagtggtttaggagtggtgagttcatggaagggataagaaaggggacrtgaagctgtatatagttagtatgttttattagattgggggaaatatcaattatccatagcagtgaataaaaatggcatggaggaaaggatgagaaaggcaacaatggggcaggagcaagacttgaatctctttcctgccttcctgagtcc

SEQ ID NO: 647538 - DNA, 550 bp, Homo sapiens
tatttcttgctcgcacagaatgtgaagcaggttggatggccttcctccggcaagcagccttgccacttggagcatgcagcccccaaggcagatagccaaggcagagaaaaagatggagtaggcacactggctttgtaggggggcacacagatattggagcattggaatatctgctatgcttggtaacttggccatgcagagctggggagagatggccaaggaaattagatccagacatgtcagactccagagaaaaggttcaataattccctgcatcgggatcacrtggggcactttgtagaactctagatttcctaattccatctcagatttaccaaatgatcaggttgaaccatatgaaattgccatttaggaacttaaacactgtcatgtctggaccatttcataggattcaatctaagtagcctgtcttggggatgggaaccttgttattaagcctcccaggtaattcttatgctccatatagatggtgactccctaccttgaagtccaagttcttatgcactgtgtgccaccacctcttctggga

SEQ ID NO: 647539 - DNA, 621 bp, Homo sapiens
tttttttccgtttattacaaaaattatgtaatttagatcagcggtcccaaccattttggcataaggtaccggttttgtggaagacaatttttccacggatgggaatggagggaggggagatggttgcaggatgaaactgttccatctcaaatcatcagccattagtgcctgggtggtaatgctaactcacccacagctcaccacctgctgtgtggccctgttcctaacagagcacagactgataccgatccatggcccaggaattaggggcacctgttagatgatattcagatattattttcattttagttatatgcttttacaaactttttagttttactttgttaatccatatttatctatgtaattgccaaaaataggtctgtttaagtgattaaaagtctattattttaaaactayaattctctgtaattgccagttggtctcatcttttcacttcagataaacatgacaggaattttgtgagcattcaattgaaacacatacaaaataagctgctgtcaacagtatcaaaagatattactttttacatatttcaatatactcacaaagctatcacttgataaatggtgtttgtcactataaattcttttagtatat

SEQ ID NO: 647540 - DNA, 584 bp, Homo sapiens
ttggtatgtgcaagaccgggtcgccacctaaagaacaattgacttagcttaattcatttataatctgggatgtaataatcaacagtcttgaaagattagttggttrtataggttactacaatatagagagggtgcagagaagatggaaaaaacaaaacaaaaaaaaactagttaccaggcaactgcagtagtctgatggatgatggtagctgagaatagagtaatgtcaaggaatggagacaagttgattaattccaaagttatatagacagaggtctgaatttggtgacagacttaatatgggcacatgtaatatcaaggatgactctcattatttttggtaataggaaggattttggtgccagttaggaaaaaaaaagtacgctttctattttatcactttgctgacttcttgtggctggagacactgctaatattatttcttcttgaacagttttattttcctattactttagaagagtatagcattattaagggttagaagactatggtattctatttagacgtctcaatttgaggtaaatttgggaactccagtggaattgtcaagtacaaacttgcat

SEQ ID NO: 647541 - DNA, 423 bp, Homo sapiens
tttgaaaatagcctatgtaaagtagaatagcttctattattctgcattttaacatytttttccttcatgatactagttataatttttaatttttctgtttgcttctttttccatcccctaaactcccctctatatctcactcagactatataatacacgaatggagaaactgtgcttattttgctcactgttcattgtttaacatattatctagtacactgatatgttcaataattatttttgactaagtaccttaatgaatatttttaaaggagacattgtaaaattttaagcataaaaatatttggggggaaaagactatgcttaaaaagtgatctagcactagactatataaaggactaaaatatgaggttgaacataaatcatttagttgttattgcagtagtcacacatttgttaatg

SEQ ID NO: 647542 - DNA, 403 bp, Homo sapiens
aaataagaaagaatgactatatttaaatcaatgaattatcktggtttagctagacttcatttataaaccattttcctgataggaaagctcctgaaggcattgtccaaaccactgttgttactcattcccttcattttgtggttcaggcattttgaaaatgtgggggtaggagcagaagaaattaaatttcatacaaatatggaaagaatggatttttgttatctttgtttgaagtgatatgtttggctagttagtacagaattgaaaagattcaagagagtgagccaagtaacactgattttgacatttttaattcaaagcaattctttaagcattgtgctgtgaacaaccttaagaacagatatgcaccctctccctccttgttatttcagggcttagaatt

SEQ ID NO: 647543 - DNA, 403 bp, Homo sapiens
aaataagaaagaatgactatatttaaatcaatgaattatcttggtttagctagacttcatttataaaccattttcctgataggaaagctcctgaaggcattgtccaaaccactgttgttactcattcccttcattttgtggttcaggcattttgaaaatgtgggggtaggagcagaagaaattaaatttcatacaaatatggaaagaatggayttttgttatctttgtttgaagtgatatgtttggctagttagtacagaattgaaaagattcaagagagtgagccaagtaacactgattttgacatttttaattcaaagcaattctttaagcattgtgctgtgaacaaccttaagaacagatatgcaccctctccctccttgttatttcagggcttagaatt

SEQ ID NO: 647544 - DNA, 403 bp, Homo sapiens
aaataagaaagaatgactatatttaaatcaatgaattatcttggtttagctagacttcatttataaaccattttcctgataggaaagctcctgaaggcattgtccaaaccactgttgttactcattcccttcattttgtggttcaggcattttgaaaatgtgggggtaggagcagaagaaattaaatttcatacaaatatggaaagaatggatttttgttatctttgtttgaagtgatatgtttggctagttagtacagaattgaaaagattcaagagagtgagccaagtaacactgattttgrcatttttaattcaaagcaattctttaagcattgtgctgtgaacaaccttaagaacagatatgcaccctctccctccttgttatttcagggcttagaatt

SEQ ID NO: 647545 - DNA, 573 bp, Homo sapiens
gccagtgagctctggaaccatttctatgtactcaaatactcagtccacaagtgatcactggggataacttggggcaattatgtaaccttctctgtgcctcaacactatatttgtaaatggaaattataataatatatattataagattgccataaagtttaaatgtaataatgatcacaatgtacttaacttagaactgtgcgtgacacttaataaatgatctagataagttcgctatcaccatgagatccttgaacttaaatgtaaaaaggtaatcagctaggtttttactaaatttgacaaactggttgtttctattttcttagcagtcaagttgtttgttattctcataaaatgcctcagaaaatatctgagcttccttacactggatagttttgaacagaggctgtttgatcaattttcaggaatgttatagaagatattgggaaactgaacttaataatgttccaagtgatttctaagtttattagtcagagacattttawgtgacagagtaaaacagagaaatcactcagacaaaacaaacaaagtaacattcttagacagatacat

SEQ ID NO: 647546 - DNA, 538 bp, Homo sapiens
cagttcttggcaacctcgttgctataaaaataaagtcatgactttgaggttagtttggttctttcattgttgtcaggttaggaaccctattccatcccagatctccaaaacccagactttttggggggttgaaattttaggctttctctttgaattgtagttttatcttctttcagttaccatttgcatttycataatgattaatgagactaagctttttttgtgtagttgactgtacctttggatttttttcccaaatacctttttatttcttcttttctttatggttttagaaaacgtagtttacataattgcagcttgattcttttactcagttaatggcatgcttaatggagagaaaaaatattattttcctttttaattactgtgcttttttcttttttaaggaaatgtttcattatgttaaatttcagtgttattctacttagctattccttaaatattatagtatttcggatttcacatgtaaatttgtaacatatcttgagtttattatgtatagagtaaggctattttc

SEQ ID NO: 647547 - DNA, 573 bp, Homo sapiens
aggttaggaaccctattccatcccagatctccaaaacccagactttttggggggttgaaattttaggctttctctttgaattgtagttttatcttctttcagttaccatttgcattttcataatgattaatgagactaagctttttttgtgtagttgactgtacctttggatttttttcccaaatacctttttatttcttcttttctttatggttttagaaaaygtagtttacataattgcagcttgattcttttactcagttaatggcatgcttaatggagagaaaaaatattattttcctttttaattactgtgcttttttcttttttaaggaaatgtttcattatgttaaatttcagtgttattctacttagctattccttaaatattatagtatttcggatttcacatgtaaatttgtaacatatcttgagtttattatgtatagagtaaggctattttctctttttttaaggtaaaaatcacataatataaaattaataacaaccattttaaagcatacaatgcacttgcttttagtatattcacaatgttccagggcaatttcatca

SEQ ID NO: 647548 - DNA, 584 bp, Homo sapiens
ttatgtatttattttcgctatcacaagtagaaaaagcctataagttgctatgccaaaaacctgcctctagatggcaaacaaaccccacaatacacaaaagagagccaaattcttagaaaccctgggaaaggaagagggctactgtcccattaacaactkggagcccttaaggcaagaatgaggtggaacatctggaacatctgggaggagacaccagggtgcggagtagtggggaacctgctctgtgctctgagactgaaagcccagccttgcctctcaccgctgccttgactgtgtccccatctgctgtgaagtgaatggtgtcttctaaattcatgctgagccctaattgctgaaaagtgtaagacatgcaatggggggattatgtgcatcttcccgacaccaacatgatgctcaggaaggagacttcttgttttctcttaggattcttttactaaccaagattttgcctctactacatatttccctttgctgattgtccctcccttttgacagaagatggcccagggcattcactactaagtctcaacctcttacccaaagccctcagtctagtgttgctc

SEQ ID NO: 647549 - DNA, 498 bp, Homo sapiens
caaacaaaccccacaatacacaaaagagagccaaattcttagaaaccctgggaaaggaagagggctactgtcccattaacaacttggagcccttaaggcaagaatgaggtggaacatctggaacatctgggaggagacaccagggtgcggagtagtggggaacctgctctgtgctctgagactgaaagcccagccttgcctctcaccgctgccttgactgtgtccccatctgctgtgaagtgaatggtgtcttctaaattcatgctgagccctaattgctgaaaagtgtaagacatgcaatggggggattatgtgcatcttcccgacaccaacatgatgctcaggaaggagacttcttgttttctcttaggattcttttactaaccaagattttgcctctactrcatatttccctttgctgattgtccctcccttttgacagaagatggcccagggcattcactactaagtctcaacctcttacccaaagccctcagt

SEQ ID NO: 647550 - DNA, 562 bp, Homo sapiens
tcttgttgaaattgacagcaaacacaacaacacagaactatttgggagaacagaggacagtgatacactagggaagtaaaacacaccccttccccttgcattggtttcctgttgctgctgtaacaaattaccacaaccttactgctccacataacacaagtgtattatcttacatttctggaggtcagaagtctcaatgaagtaaaatcaaggagtaatagggctctattcattctaggcttcgagagagaatccaatatcgagcattccatctttctgatgttcccacattcctagcagcatggccccttcctccatcactccagtttccctgtccrttgtcccaggtcccctctggctgttaccttcctccttccctattataaggacccttgtgattatgatggtctcacccagataattcaggatactctcctgaccccaaaattctcaaccatgtctgccaagttatttttgacatattcataagtaatgatcatagattccaaatattacgacaatgatgtctttagtgggtgtattattcattccacaaacaacc

SEQ ID NO: 647551 - DNA, 490 bp, Homo sapiens
attttaatccaggctcctatagtccgcgagtgaaacagagattttgaaataatgagacctggtattactagtcagctctccatgctggagaaccataagaaattataccaaaggcaggaaagggratagaatatggggatcatcacgccaagaataaggtgcagcccatttagcccctgggtcttaaagagacccatagctctggataatggcagatatatgcgtgacacagtcatcatctttgtgcatcttcagagaattgtttttccttttactcctaggaacaatgtcttaagtttgttagtaaattctattgaatttattaaagatgcttctgataaattctttttatattcatttcaaaaaagaagcaatttcacactgacagagacattgttattatagcactaaatacttttacactcatcgaattcctttgagactaactgaaatttctgacagccccacactctataactttattgtaaat

SEQ ID NO: 647552 - DNA, 459 bp, Homo sapiens
aggatatatacatatatatatacatacrcacacacatatatatatgcacacacacacacacacatatatatatttatttacaaaggggagtttattaacttacaggatcataagttacacaatgggctgtctgcaaactgatgagaaaggagagccatggagtccaatgtttgagggcaggaagaaaccagcatgggagaaaaaagatgtaggctgggaggctaggccagtctctccttttcaaatttttctgcctgctttatatttgctggcagcagattagattgtgcccaccagattaagggtgggtctgccttccccagcccactgactcaaatgttaatctctttcggcaacactctcacagacacaccctggatcaatacttcatatccctcaatcctatcaagttgacagtcattattaaccatctcactccccttcatatatatatgtata

SEQ ID NO: 647553 - DNA, 566 bp, Homo sapiens
gctttaatttggagaagtactggtctagaaaacacaaattccaaggagactcaggttcttaagttgatttcttgagtaaaagttcttcaaatgcattctccaagattaatttttttttttttttactttttaaattgacaaagattatacatattcatggctatacggggatgtttcagtacatgtagatggtgatcagatcagggtaattagcatatctatcatctcaaacatttattatttctttgtgttgggaacattcaaactactcctaggtattttaaactacataatatagtattgttaactatagycatctacggtactatagaacactagaacttattactcctacctagctgtaattttgtatccattaacaaatctcttactattcctcctttctccctacccttttcagcctgcagtatcctctgttctactttttacttctataagatcaacttttttttttagcttctgcgtgagtgagaacatgtggtgttgaaatttctattcctggcttattttgcttaacataatatcctccagttccatccatgttg

SEQ ID NO: 647554 - DNA, 566 bp, Homo sapiens
gctttaatttggagaagtactggtctagaaaacacaaattccaaggagactcaggttcttaagttgatttcttgagtaaaagttcttcaaatgcattctccaagattaatttttttttttttttactttttaaattgacaaagattatacatattcatggctatacggggatgtttcagtacatgtagatggtgatcagatcagggtaattagcatatctatcatctcaaacatttattatttctttgtgttgggaacattcaaactactcctaggtattttaaactacataatatagtattgttaactatagtcatctacrgtactatagaacactagaacttattactcctacctagctgtaattttgtatccattaacaaatctcttactattcctcctttctccctacccttttcagcctgcagtatcctctgttctactttttacttctataagatcaacttttttttttagcttctgcgtgagtgagaacatgtggtgttgaaatttctattcctggcttattttgcttaacataatatcctccagttccatccatgttg

SEQ ID NO: 647555 - DNA, 566 bp, Homo sapiens
gctttaatttggagaagtactggtctagaaaacacaaattccaaggagactcaggttcttaagttgatttcttgagtaaaagttcttcaaatgcattctccaagattaatttttttttttttttactttttaaattgacaaagattatacatattcatggctatacggggatgtttcagtacatgtagatggtgatcagatcagggtaattagcatatctatcatctcaaacatttattatttctttgtgttgggaacattcaaactactcctaggtattttaaactacataatatagtattgttaactatagtcatctacggtactatagaacactagaacttattactcctacctagctgtaattttgtatccattaacaaatctcttactattcctcctttctccctacccttttcagcctgcagtatcctctgttctactttttacttctatragatcaacttttttttttagcttctgcgtgagtgagaacatgtggtgttgaaatttctattcctggcttattttgcttaacataatatcctccagttccatccatgttg

SEQ ID NO: 647556 - DNA, 594 bp, Homo sapiens
cttggatttatgtctctttaccttttccacttgtataaatcactggcttgagtagtacgtggtggtatagtttttgtttcagtcgtcaaatgtgattttaagaactgtggattgtctcgtgtatgtatccacatttctggtctttcctttgtccctcctcccatagtcccatattcatcccttctgcataagaactttctgtagccattttttattttgattttttgttttaattttttgtattgtggaaatgacagaacatatttctgtagccactttttagcatttctaaattgaccagtgacaaattcctatattctcttcctctgagaatgtctatatttctctcttcatttctgaagggtagtttcatggaatatagaatttgcagccaacagtttttttgtttggttggtttttttaagcacttgaaaatgttgtgccacttccttctggcctccatggcatttgarttggcgtgtccctacaggcattctgccatttttgctctttgtttttagttttgaaagtttaatcagtgttgctttcttttggtatactttgaggtttgctcagcttcttgaatctgtaagt

SEQ ID NO: 647557 - DNA, 594 bp, Homo sapiens
cttggatttatgtctctttaccttttccacttgtataaatcactggcttgagtagtacgtggtggtatagtttttgtttcagtcgtcaaatgtgattttaagaactgtggattgtctcgtgtatgtatccacatttctggtctttcctttgtccctcctcccatagtcccatattcatcccttctgcataagaactttctgtagccattttttattttgattttttgttttaattttttgtattgtggaaatgacagaacatatttctgtagccactttttagcatttctaaattgaccagtgacaaattcctatattctcttcctctgagaatgtctatatttctctcttcatttctgaagggtagtttcatggaatatagaatttgcagccaacagtttttttgtttggttggtttttttaagcacttgaaaatgttgtgccacttccttctggcctccatggcatttgagttggcgtgtccctacaggcattctgccatttttgstctttgtttttagttttgaaagtttaatcagtgttgctttcttttggtatactttgaggtttgctcagcttcttgaatctgtaagt

SEQ ID NO: 647558 - DNA, 219 bp, Homo sapiens
gtgacttgaatgcaaacatcacaaagaagtttctgggaatgctgctgyctgctttttatatgtaatcccgtttccaacgaaatcctcaaaggtagataaatatccacttgcagattccacaaaaagagtgtttcaaaactgctctctcaaaagaaaggttcaactctgttagctgagtagatacatcatgaaaaagtttctgacattgcttctatctag

SEQ ID NO: 647559 - DNA, 219 bp, Homo sapiens
gtgacttgaatgcaaacatcacaaagaagtttctgggaatgctgctgcctgctttttatatgtaatcccgtttccaacgaaatcctcaaaggtagataaatatccacttgcagattccacaaaaagagtgtttcaaaactgctctctcaaaagaaaggttcaactctkttagctgagtagatacatcatgaaaaagtttctgacattgcttctatctag

SEQ ID NO: 647560 - DNA, 550 bp, Homo sapiens
gtaactctgggactaccttgtaggtctctgtggcagacagcaaagagagctctgaaaatgactcaaaaactggcaattcaattttagacaaaaagcagcacaagccacttcggctgacggttcaycagccagaactggacaacagtcccacccaatcacagaatgtgagtaagtacaaccctaccatgagctcaggaggcagagagttagaaatacttggtgagcagcataatgacaatcccaccactgttaaaacaaatcgtccatgtcaacggttaaaaacattctatatataaaagtttagggaaaaaaactaaaattaagtctttagaaaacttggaaatattaataataaataattctttatggtggaaatatgcatactttatattttattttatatataatatatcccttatatataatatatataaatagcttcttcgtgtttgctaaatgttgttcaataagtatttttattattaggatgctcaatagggaacagaaaaaaaaaacactcaagactgagtaaaacaatatagaaatcact

SEQ ID NO: 647561 - DNA, 550 bp, Homo sapiens
gtaactctgggactaccttgtaggtctctgtggcagacagcaaagagagctctgaaaatgactcaaaaactggcaattcaattttagacaaaaagcagcacaagccacttcggctgacggttcatcagccagaactggacaacagtcccacccaatcacagaatgtgagtaagtacaaccctaccatgagctcaggaggcagagagttagaaatacttggtgagcagcataatgacaatcccaccactgttaaaacaaatcgtccatgtcaayggttaaaaacattctatatataaaagtttagggaaaaaaactaaaattaagtctttagaaaacttggaaatattaataataaataattctttatggtggaaatatgcatactttatattttattttatatataatatatcccttatatataatatatataaatagcttcttcgtgtttgctaaatgttgttcaataagtatttttattattaggatgctcaatagggaacagaaaaaaaaaacactcaagactgagtaaaacaatatagaaatcact

SEQ ID NO: 647562 - DNA, 588 bp, Homo sapiens
gatgttagagcactctaaaatgtaaggcacctaggttttatcctatcttttaactcaggaatgcatggcttcattctcccaaggtcatcttatagcccaacatggttgtcagagctccagccatcatctattttccaggaargaaaaaggaggaaaagcagcaagtcctccctttaagaatataaatcaagcatgctacttctgctatcaacactcatagccccctaacttcaaaggagactggaaaattaagtatttatttgtatataaacttataccagccatatatcagtgattataacatcataggagttttaaaaaattgatacaagtgtaacttctggttgcctccttgtctctaacatcaacttctttctctaatatttccccaggctgcaatctgaagtatcttccccaaatagcttattttaatggctcagaaaatagtctaaaattatctttgtagacatgtcccttattctccttgccttgtctagcaaagtataataaatatatatacacagtacaattatgacataacaaaaatataatgttcttgtcaataaaagctttgctctgcttttgcac

SEQ ID NO: 647563 - DNA, 588 bp, Homo sapiens
gatgttagagcactctaaaatgtaaggcacctaggttttatcctatcttttaactcaggaatgcatggcttcattctcccaaggtcatcttatagcccaacatggttgtcagagctccagccatcatctattttccaggaaggaaaaaggaggaaaagcagcaagtcctccctttaagaatataaatcaagcatgctacttctgctatcaacactcatagccccctaacttcaaaggagactggaaaattaagtatttatttgtatataaacttataccagccatatatcagtgattataacatcataggagttttaaaaaattgatacaagtgtaacttctggtygcctccttgtctctaacatcaacttctttctctaatatttccccaggctgcaatctgaagtatcttccccaaatagcttattttaatggctcagaaaatagtctaaaattatctttgtagacatgtcccttattctccttgccttgtctagcaaagtataataaatatatatacacagtacaattatgacataacaaaaatataatgttcttgtcaataaaagctttgctctgcttttgcac

SEQ ID NO: 647564 - DNA, 588 bp, Homo sapiens
gatgttagagcactctaaaatgtaaggcacctaggttttatcctatcttttaactcaggaatgcatggcttcattctcccaaggtcatcttatagcccaacatggttgtcagagctccagccatcatctattttccaggaaggaaaaaggaggaaaagcagcaagtcctccctttaagaatataaatcaagcatgctacttctgctatcaacactcatagccccctaacttcaaaggagactggaaaattaagtatttatttgtatataaacttataccagccatatatcagtgattataacatcataggagttttaaaaaattgatacaagtgtaacttctggttgcctccttgtctctaacatcaacttctttctctaatatttccccaggctgcaatctgaagtatcttccycaaatagcttattttaatggctcagaaaatagtctaaaattatctttgtagacatgtcccttattctccttgccttgtctagcaaagtataataaatatatatacacagtacaattatgacataacaaaaatataatgttcttgtcaataaaagctttgctctgcttttgcac

SEQ ID NO: 647565 - DNA, 586 bp, Homo sapiens
tgttataaggttatttttttgatgatgaggctctatatatgtagtttgaaaatgatactaatgattatattaacaaaaattaccgttatctagctcagagaaagagtttatattaagaagtctattaacatattgtcaatttttctcttaacaaatctgaaataagtgtttttatagttattctaattagtttacataatttagatttaattaggctagcatagattataataggacctatgcatttgtttaataaattaacattttagtcaataaattgatttttttaacagggtgtttgcttatatgagggtctctttatatcagtgattagaccartctaacattctaatggagatgtctgtttgctttccagctaatgtgataaacaccaacagttcagcatcaacaccttaattacatacactgaaggctaatgttagacaaattgtattctgttgactactttcggttcagtggacttcagcaattgaaataagctctttaaagacaagtaaatggtgcacctgcaaagtacatgaacactattattgccatagaatttgatagaggcttttcaaaaaat

SEQ ID NO: 647566 - DNA, 554 bp, Homo sapiens
ataacagagactgactggaaccccgtggctgcttgtgcgattatgtggtgcttgctttatagtgacattatgggacatggtagaaatgtagcatacggtagcaactccataaatatctcttcacagccacactagacgggcaactctatacttacagtttcctacctggttacttgatgatgctctcacttacttcttttactacagaacracacagagaaatttaagagtcatgcctctattttcttaatcgaattactgataatacatgtgtaaactattaaaaaattaatggtcttgggaacgccaaacagtcatccaaagacccagcttcaaatcttgttatgctggtttttatctgtgtgatttttagcatttgccttttatgatttgtctataaaatttttaagttggaataaatgacttctaagacattttcctactttcaaagtttctgcaatgcaaagtgatagccataactaataacttttaatgaatcacaaattaaaaatttgtagtataaatatgcaacattaaaattaaaataatttagt

SEQ ID NO: 647567 - DNA, 543 bp, Homo sapiens
agaagaggaggaaacaatgtaaaaagggcaaagaagaaatagctcattacggtaaaactgatatatattaatcaatgaatgttaatgttgaaggtcaaacagtatgtagactattttaatcattccattgtcagggacccactgggccaacttcaataagccatttgtcatttaaccattttaggctataagtttttcacttgaaaacaaaaatgtctgttctttactcattatatgtggccaagattgatcagaaaaactcttgaaagtrttttgaagttatggaaaaagacttttcggaagtacactatatgaattacttaaatgctccaactgatattcctagagcttatttttaaataactgtattatcaaaacaatccaccttatctttttgataaaaacaacgacaacaacctaatgacaattttaaccccacagaaaatgtacaggaagattttctttgtaaaatgtagttaatagcagctggttcacatttttcctaccaatgtttgctctgagaaatgctgtacatatatgaat

SEQ ID NO: 647568 - DNA, 628 bp, Homo sapiens
tatagctccatggcatcttatcacatgtaaatttttgtaatcatcatagtcaagatacagaattattctgttacctacaagatctctgttgttcaagccctgtacagtccacttccaccctctcatctycaccaaaagaagtttcatgtaacaatatgtactcttgtacatatgtatctatataagatatgtatctatataagatagttccatttattttctatttaaatctggtctagtctatttcattcctgtaaaatgctgtctctaccctttgaatcgatgtcatggcctattagtggatcctgatccttaattttaaagacaatgcagtaaatcaatctcaggtttttgttggtgcggggacctgacttatggtgaatgtgaataacatcacagttgttcatttttggtgatctcatgtttggtcccactcttccacagctttctctagggtccctccttcgctttccagattttaaactctcctcagattacttaacagtctccagatcctaattttttattccaacaaaaagaaaatcaatttgcaaaatataataccaatttattaattcactgagatttttaatgaaccaatagggttgtttcaatcacctcctactaa

SEQ ID NO: 647569 - DNA, 443 bp, Homo sapiens
actactagctttgactatttctcataggtgttttaattattctaatattttaagtgcttttctcattctaaktttaatattcccattggcccaaattgtttcacgttttatataatatattttgtttttaggaatatggtcataatgaacttaagttttattgaactttggccagaagatacagcatggacaaacttgttttgtttttggaaaagtgtttaagtattgagttgcaattttgaattgcatattttatagattcattaaaattatttgctctgcctttataagatacattagccacatacaatagtaatttattttctggattcttaaaacagctccaccattaattagctgtgtaatattgaacaaatcacattaatttttgaaatttatttctctcatgtatgtaatggagataattttagtacctacataac

SEQ ID NO: 647570 - DNA, 443 bp, Homo sapiens
actactagctttgactatttctcataggtgttttaattattctaatattttaagtgcttttctcattctaagtttaatattcccattggcccaaattgtttcacgttttatataatatattttgtttttaggaatatggtcataatgaacttaagttttattgaactttggccagaagatacagcatggacaaacttgttttgtttttggaaaagtgtttaagtattgagttgcaattttgaattgcatattttatagattcattaaaattatttgctctgcctttataagatacattagccacatacaatagtaatttattttctggattcttaaaayagctccaccattaattagctgtgtaatattgaacaaatcacattaatttttgaaatttatttctctcatgtatgtaatggagataattttagtacctacataac

SEQ ID NO: 647571 - DNA, 591 bp, Homo sapiens
ccatccccatgatccaatcgcctcccaccaaggtccctcccttgaacctggggattacaatttgagatgagatttgggtggggacacagagacaaaccgtatctatctatatctrtatctatatagatatacacatactacagtacattttattactcaaaacgtcttataagtatcagttcaaaatacaaattaggtggctttatctttattgatcctatgtatggatttatataggcccttctttccccactctttgttataaactgccaatattgtctaatgattgtgagtttatgctgcagacatagcatattatttgtggttgagttgaaggctaagatccattccataaacctattaaaattcatggattacattttagtcaattacatctttcccaaaaagacgttttttaagaaaccattgaactcacatgtctgttttttttttgtttttcatttaaaaaatatgtataaaaatggtgtttggaaataatctacattttgagggctaggaattaagttctgctcagcatgaagccataattaaagcataatattactccagtggattgaagaaactagaaaa

SEQ ID NO: 647572 - DNA, 538 bp, Homo sapiens
ggtaagcaatggagacaagaaatcaaccgcatctgttggactccagagctgattcttaatcaagtctgtgatgggaaaaatattgaccactgttcctaaagaaaggccactctaagctgggcatgatggctgtcacctttaatcccagtgctttgagaagcttagatgggaggatcacttgaacccaggagttcgagaccagccagcacaatgtagcaaaaccctgtctccacaaaaaaaaatttctaatgtagccaggagtgatggtgtgcacctgtagtcccagctactcaggaggctgaggcaggaggatcacttgagcccaggagtttgaggttacagtgagctctgattgcaccactgcactccagcctgggtgacagagcragaccctgtctctgaaaaaagttaaaaaattaaaaataaataaataaaggccactcccacttttgaatacaataatacttcatacttataaagtactttccatttacaaattacattcacatctgaaatctcattgaatcatcaaaagagc

SEQ ID NO: 647573 - DNA, 451 bp, Homo sapiens
tctctgccctcatggagcttacattctaatggaaattatgaaaaaatatggtggttgttttgcgtgtgtgcttgcacatgtgtttagtttattgcttctgtctgctacctactactctatttccygcacctacagtctttgactggctcattctcttagtgatagacatccaggctgcctctcacttgttgttaccacaaaggaggctgcaaagaacatccctatacccccttacaatcctattcaagcattcttgtgttttagactcaggaaggaatacccatggctaggttcagtgaacacagcagactaatccccagaagacccaccctagtctacactctctcaggagatttgatgtgccacgtgctgctgtctaatgtttgccagtatgagaaatgtaaagtcattttaatttgtgtttctctaattgctagtgaggctgaccact

SEQ ID NO: 647574 - DNA, 411 bp, Homo sapiens
aataaataactactcttacaaaagaaaaacaagttcaggcaagaggctgaagggactgaaaaaaatcaactgcctgggccaggtgcagtggctcacgcctgtaatccgagcactttgggaggccgaggcgggtggatcaagaratggagaccatcctggccaaacctggtgaaaccccatctctactaaaaatacaaaaattagccaggcgcctgtagtcccagctactcgctgaggcaggagaatggtgtgaacccgggaggcagagcttgcagtgagctgagatcgcgccactgcactaccgcctaggcgacagagactccatatcaaaaacaaacaatagtaacaaaaaaaactcaattgccttccaatacaccagtattaacttgctaagcaacaaaaacatcctaa

SEQ ID NO: 647575 - DNA, 656 bp, Homo sapiens
tccatctattgataactacatacaacttctaattttagttctattttttcaaactttagcgtataaagctttactgggtgcaccatttacttctcccaacttcttgggactcaggatctttggtctttcctcccatctttatcaaaacttgctccgaataaatctggttttatagtgacttttagtatcctttcactaggggactatttaacctaaattaataattttcaagcataagttacatgggawaaaggtcagtttttggttgcaggaacatcctaacacccattaaaaactctctgtgtaagcagttacttactggcccggcacagtggctcatgcctgtaatcccagaactttgggaggcctaagtaggcagatcacctgaggtcgggtgttggagaccagcctgaccaacatggagaaaccttgtctctactaaaaatacaaaattagctgggcatggtgtcacatgcctgtaatcccagctacccgagaggctgaggcaggagaatggctagaacctgggaggtagaggttgtagagagctgagatggcatcattgcactccagcctggacaacaagagcaaaactccatctcaaaacaaaaacaaaaacaaaaacaaaaaacagttacttactttacgtaaggcaa

SEQ ID NO: 647576 - DNA, 598 bp, Homo sapiens
  misc_feature 518: n = A,T,C or G
ttgatccatttactgacagcattaaacagatcattgaggcacaaaactaagaaattctgtacttaaactcagcacttgaccaattagacctagcaaaaatctacagaacacttcatccgtcaaccacagaatatacatttgcatatgagacatactccaagattgaccacatgcttagccataaagcatgtctcaataaattwaaaaaaatcaaaatcatactaaccatactctcaaaaaacaatggaataaaaataaaaatggataccaaaaaatctcttgaaaccacacaattacgtggaaattaaacaatttgctcctgaattacttttgttcaaacaacaaaatcaagatagaaataaaaaaattctttgaaagaaatgaaaacagagacacaacatgttaaaatatttgggatgcagcaaaagaagtttaagaggaagtttatagccctaaatgcctacctacctcaaaaattagaaaatctcaaaattaatgtccaaacatcacttcctaanatgggaatagtaaaaacaataacacactaaacccaaagctcaaacatcacacctagagaaattagaacaacaagagcaca

SEQ ID NO: 647577 - DNA, 643 bp, Homo sapiens
gaacttattctataaatgtgtatgttttgactattccactaactattcacctctctccttcttgagcttccttattccctgaaatacaacaatattaaagttaggctaattaataatcctataatagcctccaagtgttcaagtgaaaggaagagtcacatatktcttattttaaatcaaaagctagaaataattaagcttaatgaggaagaaatgtccaaacctgaggcaggccaaaagttaggcctcttgggccagttaaccaagttctgaatgcaaattgaaaactcttgaagtacattaaaagtgctactctagtgaacataagaattactagaaagcaaaacagccttattgctgctatgcagactttctccacagaaagaaaatgacatcttcttcaaatagcctttgattggaagacgtcatctaggactttcatagctcaagaggaaaaatcaatgcctgacttcaaagtttcaaagcacaagtagactcttttgttaggtgctaatgcagctgatgactttaagttaaagtcagtcctcatttaccattgcaaaactctagggcccttaagaattatgctaaatcaattccacctgtgctgtataaatggaagaacaaaacctggatgacagta

SEQ ID NO: 647578 - DNA, 643 bp, Homo sapiens
gaacttattctataaatgtgtatgttttgactattccactaactattcacctctctccttcttgagcttccttattccctgaaatacaacaatattaaagttaggctaattaataatcctataatagcctccaagtgttcaagtgaaaggaagagtcacatatgtcttattttaaatcaaaagctagaaataattaagcttaatgaggaagaaatgtccaaacctgaggcaggccaaaagttaggcctcttgggccagttaaccaagttctgaatgcaaattgaaaactcttgaagtacattaaaagtgctactctagtgaacataagaattacwagaaagcaaaacagccttattgctgctatgcagactttctccacagaaagaaaatgacatcttcttcaaatagcctttgattggaagacgtcatctaggactttcatagctcaagaggaaaaatcaatgcctgacttcaaagtttcaaagcacaagtagactcttttgttaggtgctaatgcagctgatgactttaagttaaagtcagtcctcatttaccattgcaaaactctagggcccttaagaattatgctaaatcaattccacctgtgctgtataaatggaagaacaaaacctggatgacagta

SEQ ID NO: 647579 - DNA, 628 bp, Homo sapiens
tgccatattctattgattaaaagaggattacgtaaaggtttgaatactaggagtcaggagtcatggaggccatctcagatttctggctactagagattctaaatcagaactacccacctaagctcttcctaaattccttacccatatgagataataaatatttgttttattaggtcactacattttggggtattttgttacacagcaataaataacgaacacaatgaggttatacttgcataaattacactcagggaaggagtatataatattatcactgtwttcttattggttcagaaagcccggttctgctaaaagtagttgttaaagagtaccgtattaagtaagggtataatctttgggtttcatgtgaagaacttacaggaaaaaaaaaaaacagcacaaagacagctagaaatgtcaaaatataatcccaatactcaacgattaaaataagaaattgatacagaacttggactaattcttacatacgagctgttcatttgaaagcactgaagctttagcataataccatttttggggtcaaagtagaaatttagaggcagaatcatcttatagcaaaatcaaaccaaaaaacatttcttgctaacttatcagtaattaaaat

SEQ ID NO: 647580 - DNA, 571 bp, Homo sapiens
tacaccagggaaattagcctttaatgacaaatgctgtgttattgaacatttagacatttcatgacacatccatatacaaaccattcaatcaagagtacagaaacaattttaaaaccagacaaatgcttttaaatataactctctgtaatcagaatgtagatwttttttaacagagttttcttttctttctttctttcttttattttttttttaaagagacagtctcactctattacccagggtagagtgcagtggctttatcatagttcactgcagcttcaaaggcctgggtataagcgatcctcccacctcagctttcctagtagctggaactacaggcatatgccaccactcctggatacattttaaaacatatttggtagaagcagggtcttgttacatttttcaggctggtcttgaactcctggcctcaagagattcttctgccttggcctcccaaatcttaggatcacaggcatgacccactgcatctggctaaattgagcttccaaactcaattggatatcaaaatttcatcccttcatttcccattttcgagaaagatgttgac

SEQ ID NO: 647581 - DNA, 589 bp, Homo sapiens
gttctcacaagatctgatggtttaataaggggtttcctccttcactcaactgtcattcttctctttcctgccaccatatgaagaaggatgtgtttgcttccccttctgccatgattgtaagtttcctgaggcctctctagccatgctgaattgggagtcaattaaacatctttcctttataaattatcccatctcaatatgtttattagcagtgtgagaacagactaatacagtgcaagaggcggcaatttttcttttactcaggaggagatgttcttacatacacttgacctctgaacctttaaatcctttactggtgttgcaggccccagaatcttcacaaggtatatctctcactatctgtcctacagatagacacactatttgtgtgcctttccaaatcctttaacttactagctacaactttctaatgttgtctaatcagtatgatgttattgayatcaatgtgaagttctgctggatgtccaaatctctgtggattttattatgacaaaaactaggagagttaacaaagcccaaaagcaaaattatgaatgattattgttgtcccttacatttaaatgtaagc

SEQ ID NO: 647582 - DNA, 603 bp, Homo sapiens
ttggggactgttgatttccattataacttttagmtgcatgcatttggaaagtttatatagcattttagaagctaacctcttagattaataggagttaattttgttagcatgctgaaatctgtgttctatagaatacaagaggaaatgagctaacgacaaattcgtcgagtgcctacttttgtgaaacattatgctaattactttgcggatgctactttgtttaatcctcatagtaaacttgtagggcaggtattgttgttttctattttgtagaagatgaaatgaaagctttagaaacttgctgtgatttcacaggtattaaatgatagagttgggatttagatctaaattttccaagtcctaaccccatgttctttcatttatacctcactaccagatagtcttaagacttgaaagcgatactgtggcattcccttgaggttaaaatgaaggagatgtgttttaggagaacacagaaatatttagtcctacttttataaacctcagcttctagagacactgttctttgagaataacacagtgttttaaaaaaatactaccttttctagctggaaacaactctagaaaaaaagattttgctgc

SEQ ID NO: 647583 - DNA, 607 bp, Homo sapiens
ttctgaattgtcagtaataaaaatgtattacttttgtaaggaaagttataaaattctaacaaaaaattaaaagtaaaatatagggtgtttagatctcaagtaagcaggagctttaagacatagttctgtttgaccccatgtctttaagtggtgatgcagggtggcctgggtggatgctgtgcatgcagtgggcatgcattacaatcgaggaacctcatgctttggaaacccaatcttttaaaggaactgctagcaaacttgtcctggagggagacattattttcctgacagcagagaaatctatcctcactccaaaaagggacagtatcttacaagatattttgctatacaaaaagccaagaaaagttagtccagaacaaaagctgtcaatgccttcactcagargatgggtagaaacattagagactcattgagacttgattcccaggaggcatacatgtctaaactaaataaagaccttctacatactaatatgaaaaagacagataatcagtagaaggatgggcagggaatatcagcagacaatttttgaaagaggaagtctaaatggtcaaaaagtgaaagaatacatgctcaacttcactaa

SEQ ID NO: 647584 - DNA, 597 bp, Homo sapiens
aaagctgtcaatgccttcactcagaagatgggtagaaacattagagactcattgagacttgattcccaggaggcatacatgtctaaactaaataaagaccttctacatactaatatgaaaaagacagataatcagtagaaggatgggcagggaatatcagcagacaatttttgaaagaggaagtctaaatggtcaaaaagtgaaagaatacatgctcaacttcactaataactagggaaatacacattaaagccatgataaaatatcactataaacccatcagaatggctaaaacttaaaaactaacaatattaagtgttggaaaggatatggaagaagggaacacttatacactgctggtgagactaagtgatccaatcactttagaaaactgtttggcattatttacaacacttgaagatacacatrtcctatgacctaccaattccaatcttaggtataaatccaataaaaatgcatgcatatgtgcaccaagaatgcttatagggacatgattcataacagctcttttatgggttgaattgtacccccccaaaaaagaaaatatgatgaaatcttattccctggtatttcaga

SEQ ID NO: 647585 - DNA, 520 bp, Homo sapiens
gaaaatactcaaaatcctctgaatcttacttgatcttcaatatgaggaccaccagttctagccagtgcagtttccaccaacagaatcctttaccacttaaggtaatgaccatctctcaacctttacattgtttcctgacaatacccttctttccctctattcaagaatgatctcttggctgggcatggtggctcacgcctgtaatcccaacactttgggaggctaaggtgagtgaatcacctgaggtcaggagttccagaccagcttggccaacatggtgaaaccctatctctactaaaaatacaaaaattagctgggcatggtggcaggcgactgtaatcccagctacttgggaggctgaggcaggagaatcgcttcaacattggaggcagaggttgcagtgagctgagatcatgctacggcactctagccggggggacagagcaagactctgtccaaaaaaaaaaaraaaagaagaagaagaagaagaatgatctctcaacgtgaagtctaaaataca

SEQ ID NO: 647586 - DNA, 572 bp, Homo sapiens
ctctgctataggaggatggtgcaggggatgaggctggagaagaggagcagaaaaaccttttaaaacatagatggtatttgtagaacaaggaccttgggtcttctcaaatctgaaactgatgacttgcgaatacctcataactaatcgtgactcactagcgtgaggcagctccaggaataagcactctaagctggtgaggccttccaggcaagagagatgccaactcagacactgactgtggcatcaaccatgcatatgcctgggggctccaagatctagcaccagagggtggtgctcttggcctgatgtcacggctcagtgagacaccgctcctcaggacttggaaggacagaagagaattgtgtcacaagggtacaagakcagtgaaggctggggcacaaagactcagtgctggcataattacaatagtaagaatgatcatccaagctatcatatatttaatatcttgtaagtgctagaaactttatatatattatctcatttaagacccacacaggtagatattaatttccccattatttaaatgaggaaatgaagtctaagagggaaaa

SEQ ID NO: 647587 - DNA, 525 bp, Homo sapiens
gatatagacactgtaatcagaatgaaaaccccagcaagtttttgttttggtggaaatttacaaggtgattctgaaatatgtgtggaaaatcaaaagccaagattatcacaaagaagaacaaagtcagatgattttcatgactggatatcaggagttataataaagccagaggaattaaaggagcacactttgatacaggaaaaaaaaaatagaccagtggaacagcataaagagctcagaatgaaacccctcacacatagagacactttattttattttatttttttttgaggcagggtcttgctctgttgcccaggctagagtgcagtggtgtgatcatggctcactgtagccttgacctcycaggctcaagtgatgctcctgcctcagcctcccaagtagctgggactacagggagacaccaccaagcctagctaattctttaattttttgtagagacggggtctccctatgttgcctagactggtctcgaacccctggcctcaaataatcctcctaccttgg

SEQ ID NO: 647588 - DNA, 600 bp, Homo sapiens
gtttgtaacacaaaggataaatgcttgaagggatggataccccattttccatgatgtgattattacacattggatgcctgtatcaaagcatctcatgtcccccatagatatatacacctactatgtaaccccgaaagttaaaaataattttttaaatataaagaatgtcacgaaattaaaagctccttcttgtgtgagataccccaagatcactctcctgtcatcacccactggctgtgtggccttgtgcatgtcattcaacttccctaagcctcagtttcctcagctgtaaaatggtaatacacatagagcacttaatgccatgtgtctgggatacrataaatgctcaataaaatgatactaaatttctttattactatcaccatcaacactccctcctctgaattccctaagcaccattttcctattgttcattccattaatttgctatttaccctagatggccttgctttgttaattaacattccatgtgtgcatatctctcttccttaactacattgcaaggtccctggggacaggaagtgcatcttatacttttatatcccacacagctgtgagagcagcgccaaacacatagta

SEQ ID NO: 647589 - DNA, 593 bp, Homo sapiens
gggaaacaaatccagctcactgggccccaccccgagtttctgattcagcaggtttgaggtgaggcttgaggatgtgccgttctaacaagttcccaggtgaggccaatgctgctggccctgggaccacactttgagatccaatgagcttagtcagtgctgctaattccatccccatttgcyagtgattgactgggcctaagccagtggaccaacgagatgcaaggcggggcttactctgggctgatgagggtgagcagctcctccttctccccagaggagacaaaggtgcctgagtgagtggtggcagccactttgtgaccatgaggggaatcagccttcacagaagctgatgctgtagactgagaaaacctagactcctaataacatataccatcaagcccacccaactttgggatttttttttttttttaattctggggaaacttttatttttatttccagaccaattgactatgggataggaaagaaagtgaggtgtcaaggataaagccaatatttgactcaaacaatgtagaggatgtttgtttttagcttacttgaggaaggctgtggtcggggagaagattgagaat

SEQ ID NO: 647590 - DNA, 639 bp, Homo sapiens
ctatgttatctgtgctcaaggccttttcagctcttgttgtacttttctttcacaccacttcctgtggataggtgggcagaaggaaatattttgcaggaaatagccacattttattcttttccctttccttgagcagtctttaacaatttgggggactgtttagtttttaagagttcatttagaatggaaagttcactgagaaaccccagcccacgttaatcccaggtagaataattaacaattcctatgtttaaagctccttgcactagtattctctgagccagttctccagtgcagagtatatgcaggtcagctcttactaacctcacagacattctggagggtggcttatccagcttttcagttctcttcttgtccaaagatttgctcaacaatgcttaggcattaagaccaaagaccagaatgttaattcagtttgggaaagttgatgacctcaacccctgagagtgggaggctgacggctctgagagatgtcatttgccttcagcatttcttaagctcatgaatctggtatttttgaagcattataatgcaattccctagttaaggtttacatrctccctcactagcaccagaaaagcactccccctcaccaaatcttaacttgctacttgcaat

SEQ ID NO: 647591 - DNA, 640 bp, Homo sapiens
tggtggggttgaggtgggatggagaaaggcgagatggttaaagggtacaaagttccagttagagagaatgaataagttctggagatctattgtgcagaatggtgaaaatagttcataataatgtaytgcacacttgagaattgctaagagagtagatcttaaatactctcaccacacagacacaaagataactatgggaggtgataaatatgtgaattagctggatggtagtaatcactacaaatatatacatataataaaacatcatatcatatactgtaaatatacacaattatttgtcaactacctccataaagctggaaaaagaaaagaaaaatttaaaaagtaaaagagaagaaatgccaaaataggggttaaaaaaaaaacaaaccagtatcttgcaactggaacatttccctaatttgctaattttaactccctgcttctcctttgtcactagcagtaaaaactcacagaaatcgcaaacggcaaaactgctgactggcagaggggtgggtgcaggaggtggtggtaggggaaggaagctttatcatgtcaccccagggactttagaaggaagaaataccaattggcataaggatagtagctgggaccagagggaagggagaaacaggcagaa

SEQ ID NO: 647592 - DNA, 609 bp, Homo sapiens
ttcccagacaaacaagacctgtgagagtttatcacaactaggcctgccttaaaagaaatacaatgagttctttacattgaaatgaaaggacactaacaatacaaaacatacataaaatttaagacttactatagaggtatactctagcaaatttggaattctctaatactataatggtggtatataaatcacttttagtataaaagttaaaagacaaaagtatcaaaattactaagtttcaataagttaatgaatatatggtatataaaagatgcacattgtgatattaataacataaaatstgaggagaggagaaattaaagtgcagagtttttgtatgtggtttaagttcttatcaacttaaaatagactgttactactgtaagatattttacttaagcttcatggtaaccacaaagataaaaaccacacaaaaaagataaaggaatgaaggcataactctgtaaaaattaatcaatcacaaaggaagaaagcaagagaggaagaatggaacaaaataactacacaatagtcaaaacaattaacaaaatggcagcagtaagtcctttcctattaataattactttaaatgtaaatgaactaaattct

SEQ ID NO: 647593 - DNA, 596 bp, Homo sapiens
tatatacacctatgtaagcatgaacccatacagatacagaacatttccaacatcccaggaagccctattaggtctcctcccagtcagtactccttcttcaaagttaattactcttctgatttcaatcaagaacaataacttttgctgcagaacatgtatgtttaagtttaaactgggggtggtggctaaaaaaaatgagggaagccttgggaggggtttctgggtacccagatgtgaattttagaaaaagaaaaaagaaataaaagataattattgcttacttctctacttcggagtgttatagctcaattaatagagatggaaacattttgcaaagatcacatagcatgcttgtgaaagatataagacatatccaatttgcacacaggttgtatcccaaaagctcatttrtaaattaatcacttgaaacttggaattaattccctatatgtcataaatgtcataaatgatggttaggatcccatgttacttatataagcctatattaagcagaatgtgtctgaaacactgcacatttataatgaaaaatgggttcaaacatacaacacataattaagcaaaacaaaatgaataat

SEQ ID NO: 647594 - DNA, 610 bp, Homo sapiens
acacagtttgcgttcacatctcttatttgaagaaataatttaaaaagaggaaaatctatcccctctacacctctggagtgtaaattttctgctctgtggagtcagaaggaaggaatcagtcagagaaacaatgaaaatgatgataactgtgtctgttctatggaagagaggaaaatgaattacttcatggcatcagggtgcatttggaaagtaagggctacaagaattccagaaagaaattttatttttgagcaatgtgtggatcctcccccatgccctacgattaggccaagaagtacctgctcattcgtagcagggatagacacacacacacacacctayttctgtctaagcttcaacattagcgtggaccctcaagttaccacttgtacaactagaagcatgagtgtttgcagctgggaaaatgaatttttcacacattgctggagtcctaaccctgagcagacacagcatcctcccagtatacaagttttctgagtgaaatcagtgctgctgacaggatccacgttttcaatctatattcatctacacagcatcatatcttcttgggaagggcattgtcatacagttgaagctaatgttctggcag

SEQ ID NO: 647595 - DNA, 610 bp, Homo sapiens
acacagtttgcgttcacatctcttatttgaagaaataatttaaaaagaggaaaatctatcccctctacacctctggagtgtaaattttctgctctgtggagtcagaaggaaggaatcagtcagagaaacaatgaaaatgatgataactgtgtctgttctatggaagagaggaaaatgaattacttcatggcatcagggtgcatttggaaagtaagggctacaagaattccagaaagaaattttatttttgagcaatgtgtggatcctcccccatgccctacgattaggccaagaagtacctgctcattcgtagcagggatagacacacacacacacacctatttctgtctaagcttcaacattagcgtggacccycaagttaccacttgtacaactagaagcatgagtgtttgcagctgggaaaatgaatttttcacacattgctggagtcctaaccctgagcagacacagcatcctcccagtatacaagttttctgagtgaaatcagtgctgctgacaggatccacgttttcaatctatattcatctacacagcatcatatcttcttgggaagggcattgtcatacagttgaagctaatgttctggcag

SEQ ID NO: 647596 - DNA, 620 bp, Homo sapiens
cgttacttcaggccctacctccctacagtgttgcactgggggttaaattttaacatgacttttggaagagacaaacattcaaaccacagcagttattgaactatgcagattccagacacctaaactttcctgctggagtagacttcctccttgcacctgcagctagacagatgaagcctgccactcccacggttccctttgtgtctttgtgagggagtcttcttgcagatcatcctggtagaccttgggggaaagtgcttggtttgggaggtgcaacatcccataattacccctgcaatgtctaaaccttcacagaacaaagaatcatcactaatgtttcacaatgcacaaggctcctttgtatgcactcaaggktcatgttttatcttattttacccctgctgtttggagagtgaggtcccatggggattttgaaagcaacacaagttgttcctgtctccaataagtgtttgaatgaagtaacaggtgtgcataaataaatatagttagaaaaagttaatatcttctcactgagacatgtgcttatgtttggttaaggtctctgttttcatcctcatcatctctttgtggctctaaacaattctcttgcatttgaaaac

SEQ ID NO: 647597 - DNA, 533 bp, Homo sapiens
ttaggttgtttccattttgtagctgttacaaataaaggttctatgagcatccacatgcagtcttcatgtaaacataggtttcattttggtttggcaaatacctaagaatgaaatggctgtgccatatggcagatggatgtttaacacttttcaaagtagtttactattttgtattctcaccagatgtgtattaaagttgcaatttctctaaaactattttgtgtggtcaactatttttattattcttagatactctgatttagcagcagctaaaatctctgttcatcattttcagccatctagctttttctttctgataagtttcttggagtccccctggtgcatatgtagttcagtggcagtttatatgacaatttagggattctctgcttttgaattcatccttttaagaaygttctcctcaattgtcaaccactctgaaagcctcaaactctatcctctaataccgaaaactagtaagactatggctttctgcttaagttctgcccaccccatgtcatagattaaccctt

SEQ ID NO: 647598 - DNA, 555 bp, Homo sapiens
attttccttctgtaggtcattaacaacacccaatctcttgtaagtgactagtcataaaaggaccagagcgtgatctaggggatggaaaacatttgaaaaaatcccatctcctcaaaccagggagaaatagatgtccctccttcattgctcttaattttgtttaagtttgttttgtgacrtggagaacaaatgcttttcaaaagcactttgagaagaattaccctccttctagattagatctggaaacacccatcaaagctacttcggtttatctcaattgcctcaattgtacattcagaaagagctcataagacaggaaaggttatctggtgtgtgataaacagcaattgcctaaggcttcaattgccagatcaagactgacttaaattttcacaattaaataaagcaaaaaagtaaactggtggcagaattcttttaaagaatagattctttccattcaaaaatatcccgggaagttagttcagtgactgctattatgtgttacaaatccagtgaggggacaaagaacaggctgagagggagcaagtgaaagtc

SEQ ID NO: 647599 - DNA, 555 bp, Homo sapiens
attttccttctgtaggtcattaacaacacccaatctcttgtaagtgactagtcataaaaggaccagagcgtgatctaggggatggaaaacatttgaaaaaatcccatctcctcaaaccagggagaaatagatgtccctccttcattgctcttaattttgtttaagtttgttttgtgacgtggagaacaaatgcttttcaaaagcactttgagaagaattaccctccttctagattagatctggaaacacccatcaaagctacttcggtttatctcaattgcctcaattgtacattcagaaagagctcataagacaggaaaggttatctggtgtgtgataaacagcaattgcctaaggcttcrattgccagatcaagactgacttaaattttcacaattaaataaagcaaaaaagtaaactggtggcagaattcttttaaagaatagattctttccattcaaaaatatcccgggaagttagttcagtgactgctattatgtgttacaaatccagtgaggggacaaagaacaggctgagagggagcaagtgaaagtc

SEQ ID NO: 647600 - DNA, 543 bp, Homo sapiens
aacactcaccacacactcaaatttccaaagagtaacagctagtaaaaacgtttcacattcaggtgatttataaaaggtttttgatgctattggctttgtgacaagcaatttcaacacacccagcttctagacaaatcttcgtagtattcattcaattatttgctcattcatcaaaagtatactgaattccttctatgtactaggaattgttctacatgctgttgatacagcagggaacaaaatagacaacagccgctgcctccatgaaatttctattttagtggagacagaaagagacaataaactaaggaagtgtagctcatagcatattagagaataagtcttaaataaaaaaataaagcactaaagtggaatctgggttgttgtctacacgtttcaatttcaagtggggtggtcagggaggagtccattagaagaagacttktgagcaaagccttgaaggaggtaaggaagcaagcaatatgaatatctggagggaaactgacccaggcacagagaacagcaagtataatagtccttgtt

SEQ ID NO: 647601 - DNA, 527 bp, Homo sapiens
tgaattcaagaccagcctgggccacataataagacttcccagcctccgccccacacacaaaatttaaaaattagttgggcatggtggcattacctgtagtcccaactactttgaggtgggaggatggcttgagcctaggagttagtaactgcagtgggctatgatccaccactgcactccagcctgggcaataaagtgagaccctgtctcaaaaaaaaaaaacaaatgtactttttttaaagaagagggccgggcgcagtggctcatgcctgtaatcccagcactctgggaggccggggagagtggatcacttgaggtcaggagttcgagaccagcctggccaacatggtgaaatsccgtctactaaaaataaaaaaattagccagagatctcttaaacccaggaggtggaggttgcagtgagccgagatcgtgccactgcactccagcctggccaagatagcaagactccatcacaaaataataataataataataataataataataaagaagaggaggaggaag

SEQ ID NO: 647602 - DNA, 622 bp, Homo sapiens
tatctatctcccggtctagagatagaggctcttggtggggaattagttaattagtaaggtattggccaatgtgtccaatgggctcataccatagctggagaagtgaagggtattcaaaaactcttctttcttctcttattcaagtagaagaagtaggaagaaagaagtggattggtcaactgaattagagctttctgagatctttcaagttctttagttgaccaatccactctttttttttttttgaaataggatctcactctgttgcccaggctggagtacagtggtgtgatcatggcttctctgtaaccttgaactcttgggctcaagtgatcctcctgccttagcctcccaagtagctaccatgtccggctaattttaattttttttttgtgtagaaatgggatctctgtatcttgcccaggctgatctcaaactcctggcctcaagtgatcctccmaacttagcctccaaagcactgggattacaggctagatcttctttatcatctgtcagctatcagttcaataaatattcaccaaagtaattttattgaagggacattgaggcccttaatttctaagacttgttttgaacagtttgaaacagttaccacctaatg

SEQ ID NO: 647603 - DNA, 610 bp, Homo sapiens
gtggcccacaccctatttgtacactcccttccctttgaaaatcactaataaaaacttgctggttttgtggcttgtggggcatcatggaacctactgacatgtgatgtctcccctggacgcccagctttaaaatttctctcttttgtactctgtccctttatttctcaacccagccaatgattagggaaaatagaaaagaacctacatgactatcgggggcaggttccctgatactaggtagagcaacagagttccaaggcactgaggcaggaatatgcttagctgtgatgggtggagtaaagtgaatgagaaagagaggagatcagagaatgaaggaacttacaggcatcatacagagccttayaggccactataaggatgttggcttttgcattaaatgaggttgagaccaatccagtgatgagagacagggagcggagagactggatgggagagagggaggaataaaggaaagaagaaaggaaggcaggcaggaaggaaagaaggaagaaaagtgatagatcggattttttttttcagacagggtctcactctgtcgcccaggctttagtgcagtagtgcaatcgcagctcactgcaacctttacctc

SEQ ID NO: 647604 - DNA, 577 bp, Homo sapiens
gtctgtctttttttaacttttaagttcaggagtacaggtagaggtttgttattaggtaaacccatrtcatgggggtttgttgcacagattattttgtcatccaggtattaggcctagtacccattagttatttttcctgatcctctccctcctcccactctccaccctttaaaaggcccctgtgttgttcccctgtatatgtccatgtgttcttatcatttagctctcatttataagtgagaatatgccatatttggttttctgttcctgtattaggttgctaagaataatggcctccagctccatccatgttcctgcaaaagacatgatctcattctttttttatggctgcatagtattccatggtgtatatgtaccacattttctttgtccagtctatcactgatgggcatttaggttgactccatgtccctgctattgtgaacagtgctgcaatgaacatacacatgcatgtgtctttatggtagaacaatttatattcctttgtgtatatacccaataatgaaattgctgggtcgaatggtagttctgtttttagctgttcaagaaattgcca

SEQ ID NO: 647605 - DNA, 602 bp, Homo sapiens
aagctttcccccactccatgctccacaagccacaatgctccaagcctcctcaaattcatccatgaagctctgtggggcctgcaggcaggcacattccaaaaaaagacctgaatattttattgacagtggaaccctaattaggtggtttctatagtcgccgatttctctagcacttgaaggcagaagtcagcgtttttgtccccttctaatttgccctctctacccctcacactccagacccagggctgctggcacccctgctgagaagaatagatggggaagaaatatttccgggattagtctcataaatctttcactggcttccctggaaattctctacccttgagcaacgggggtgtggggtgaggggrggagtcagatcactcctgactcattagcgtgtttccacgatgtgccagctagatcatctaaaaattattcagctgcccaggaggaaagcctttttgccaaactacaggcttattcgaagaacttaatgcaatcctcagccctggcatccaaccacaaagcccagcaagctcttcagagagccatttcctgaccccagaggcagtcagtgaccccctggagtggatttttac

SEQ ID NO: 647606 - DNA, 472 bp, Homo sapiens
gggaattctgggagatacaattcaaattgagatttcggtgaggacacagccaaaccatatcatatacaaggattttttattttttttacttttaatttttgtgggtacatagtacatgtatatatgaggtacatgaaatattttgatacaggcatgcaatgtgtaataattacatcatggcaaaggggtatctattccttcaagcatttatcctttgtattacaatcaatccaattattctcttttagttggtttagaaaattacaattaaattgttttggttatagtcaccctsttgtgctactaaatactaattaatatttattctttctatttttttaattttgtggatacataggtaggtgtatatatttatgcagtacttgagatgttttgatataggcatgcaatgtgaaataatcacatcatgaagagtggggtatcatctcctcaagcattttgtgctatcaaa

SEQ ID NO: 647607 - DNA, 451 bp, Homo sapiens
gaattctattagattctgctattgccatttgccttttagctgtcattacattgcatattaatcacttcctgttgaaggttaggtggatgctcaattgtatatttaagtgaatawttaaatagaaaaatttcctttgcagttgccttaaggttcagtaatgcagcttgaactatagtagaacttggaaaatacgttcactgcaagtttgtgcgggaatggagatcttgtttcttatcttgacagcatgggaaatatataaagccagcttgatattacttgtgatttaaacaacatttgttgccatcaaaatgaccttgtcacagtatgtttcacatgtaagtgctgttttgcctcataattgtaggttgaatttattagaaagcattattaagtttgcagcaaaagctaatttccaaagctattcagtgtttgaaaatagtttgagggtgat

SEQ ID NO: 647608 - DNA, 452 bp, Homo sapiens
agaattctattagattctgctattgccatttgccttttagctgtcattacattgcatattaatcacttcctgttgaaggttaggtggatgctcaattgtatatttaagtgaataattaaatagaaaaatttcctttgcasttgccttaaggttcagtaatgcagcttgaactatagtagaacttggaaaatacgttcactgcaagtttgtgcgggaatggagatcttgtttcttatcttgacagcatgggaaatatataaagccagcttgatattacttgtgatttaaacaacatttgttgccatcaaaatgaccttgtcacagtatgtttcacatgtaagtgctgttttgcctcataattgtaggttgaatttattagaaagcattattaagtttgcagcaaaagctaatttccaaagctattcagtgtttgaaaatagtttgagggtgat

SEQ ID NO: 647609 - DNA, 413 bp, Homo sapiens
ctagaattccaaaatcaaacttcagtttcaaaattgcctttcctaatgcctggctttctagatggatcagagggcccctgaatcatccagaaaagaggtaagcaggattatttgacctgtttaggtacgtgggattgccacaatgatgttcaatcttctttagttatatttttgtgactaatactaatatatattctaaaattgtatgggatttctaaaattctaatgtctaagtacatactaccagtcacgatatattatcatgctaaattattgtaaaccacagaaatgaccaaatttccttctcagtggtatgcacctaatttgcaaaaacaactggtatccaagaggatataagtctaatgttaattaagcatggagraacaggatggccaccttgtccttcctgagtc

SEQ ID NO: 647610 - DNA, 602 bp, Homo sapiens
tctttctcaacacctttcattaaaatatttggcttcaaattgcttcagatactatggtggcatatcattgctgtttcttgttcttattttatgtaaatagatggtttaaaaatggctttaattatttacattatatcttcttgcttccctcctgtgcattgaagcaataggacataattttcaagaaaaaaagaaccacagaaagggtcaagtatcacaggtgttcgaaagagatcttttgcccagcacatcacatagctgttctttggcactttttatgtgctaaacatttggctaacrttatcgctgaatcttcagaaatttcagggcaggtaagtttcatggtccccaattatagaaggagagaggtaaagaggttaaatgacatacttctaagcagaaagaagaatcggcctcaaagctaggggaagccctcagagtatcttaatcttaattatatattcattatattcagcagaaattaaatatcattaattaatgcctgtgaagtggtttaaattcagggagggatttagagagagtagactagaaggatgctatagggggagacatcttattttgtgctaactgtacaccaggct

SEQ ID NO: 647611 - DNA, 629 bp, Homo sapiens
cttcaaactcttaaaataattgcagtattgaactccatctgaaagaattattgggaaggtcatgcagtgtctcgatttgtcagccaactcacrttacttccaagtaattaactttgctgtttactaactcagaacaggggggaaaaaaagaaaaaaaaaaaaatatatatatatatatatatgtatatttaaactcctgaactcacaacctatggagggtactaaaagtatgaaagtgcttcaaagaacccaacaggttggcaatttcaagatagaaagctgaagatccttaaaattaagacatgtgcaaaaacaataaattaatcagcactgcaagttccccaaatttatgtcatttctaatatgatatacttactaataaaaaaaactgaaaacttgtcaataaaatcaaatctgttcttctgtataaagcaatgaggaaataacaatgaaacataaagaataaaagcactaacacatgccacaactaattgtgacaatctttataatatcaatcatttccagttttcaagtttgtctaaagctgtcattcttaacatattttttctttgatatacttgttagattcattgtttcaagtgcttttacgtaaaaccacatcacgtcta

SEQ ID NO: 647612 - DNA, 629 bp, Homo sapiens
cttcaaactcttaaaataattgcagtattgaactccatctgaaagaattattgggaaggtcatgcagtgtctcgatttgtcagccaactcacgttacttccaagtaattaactttgctgtttactaactcagaacaggggggaaaaaaagaaaaaaaaaaaaatatatatwtatatatatatgtatatttaaactcctgaactcacaacctatggagggtactaaaagtatgaaagtgcttcaaagaacccaacaggttggcaatttcaagatagaaagctgaagatccttaaaattaagacatgtgcaaaaacaataaattaatcagcactgcaagttccccaaatttatgtcatttctaatatgatatacttactaataaaaaaaactgaaaacttgtcaataaaatcaaatctgttcttctgtataaagcaatgaggaaataacaatgaaacataaagaataaaagcactaacacatgccacaactaattgtgacaatctttataatatcaatcatttccagttttcaagtttgtctaaagctgtcattcttaacatattttttctttgatatacttgttagattcattgtttcaagtgcttttacgtaaaaccacatcacgtcta

SEQ ID NO: 647613 - DNA, 582 bp, Homo sapiens
gaaaggcttagccaaatacatactcagacaaaatgatgtacaagaaacagcaattcctccaggaaggaagcttagaagaaaaaatacttgctagacacatacagatgctgatttaatttttgtaatcccatgtgggtattgcctattcaaaasaaataaatatttttaaaaatgtaatcatagaaacacaatagagttgacacacagagaggtagaaggtaggtaaggatgaagtgaggattaggagctaagaagaggtgaattttttcaatgcaaaagtaggcaggtgagagcgacatactgtaatagagtatgcgccactcgaaaccataagtgcccttttatttgtgattcggctcaattcccaaggacggcacaacccctagactcagaccaggaaaggcagtggtaacaaacagggagacctggacaggatgggggttgcaatagagtctgtgcctgagctcacctgggcacccaccccacatgttcctcaagggtcttgcttgcagggagctcagtgatataagcacagattgcaaaactaagccttccctttatcaccctcagtgttcccagtgc

SEQ ID NO: 647614 - DNA, 582 bp, Homo sapiens
gaaaggcttagccaaatacatactcagacaaaatgatgtacaagaaacagcaattcctccaggaaggaagcttagaagaaaaaatacttgctagacacatacagatgctgatttaatttttgtaatcccatgtgggtattgcctattcaaaacaaataaatatttttaaaaatgtaatcatagaaacacaatagagttgacacacagagaggtagaaggtaggtaaggatgaagtgaggattaggagctaagaagaggtgaattttttcaatgcaaaagtaggcaggtgagagcgacatactgtaatagagtatgcgccactcgaaaccataagtgcccttttatttgtgattcggctcaattcccaaggacggcacaacccctagactcagaccaggaaaggcagtggtaacaaacagggagacctggrcaggatgggggttgcaatagagtctgtgcctgagctcacctgggcacccaccccacatgttcctcaagggtcttgcttgcagggagctcagtgatataagcacagattgcaaaactaagccttccctttatcaccctcagtgttcccagtgc

SEQ ID NO: 647615 - DNA, 569 bp, Homo sapiens
ctttcacatctctagatgaggaaatattttcaagcttaaaggcaaagacatcaaccatagtaagaaagctctgcagaattgattatatcgaatagtactatatgcatgtgtgacataaacattcaaaaatttgtaacttawattaaaagtaaaatgacctcagtaatactcagattatttagcaagaaaaaaatcatattcatgtccaccaggcaatatatattataatgttcttagaaaaataacaacaacaacaaagtaagcacaatggaaaaattgtcatgcaattagagaaaaaatcacaataaaattattcatgcaatttcatgtagttattatatcatctgagggctgggcttggtagctcacatctgtaatcctagtgctttgggaggccaaagcgagaagattgcttgagttcaagagttggaggccagcctggacaagacagtgagtctccttctctacaaaaaaatacaatttaaaaattcttatcgtaacagctattatattgataggcacataattaagattgaataaatgcatacaggtatgtcccctacattgtt

SEQ ID NO: 647616 - DNA, 579 bp, Homo sapiens
tctttgaaataaaactttggagctaagacagattttaactgaaatggacagaaaataagaagaaatgtattcatatggcrtctgaacacaaagaagtttacatagatttttcttaaaacataaatattatagaagtaatatttaagattgtgaaaaattagaaaaaagaaagaatacaataagtgcatgtgtctgtatgtgtgtgtggcactttttgtacatgtgtctgtgtgtttgcatgcacacatgtactatatatatatataactatacgtgtgtgtatatatatatatatatatacacacacacacacatggagagagagagaaagagagagagagtacatattccctgtggaaaaaatatacccacaaacacagcaaaaattattcttacaaatacacggctcataaaggaattatgtagaatacaaaataaattagaagtcaaatatcagatgataaaaaaccacaattagatgaaagattaaaattcagagttaagaaaaacattaagaactaaagtagtattattacacaattgactaaaagagcaatgtcaagagaaaaatgttgacaa

SEQ ID NO: 647617 - DNA, 534 bp, Homo sapiens
caatttctgccctccaagttcaacctgaagaaatgtttaattaatccctgatcataaaatggtgtgagcagacacctgtcatgcttactcccaccttgttatcctcctgctctgggaaaggagccaggtcaccttttccaattgccttatgattatacaaaacctggtagctaacaatgactagtgggttrtgaatagatgtcctgtcacatttctggtctgaacatttaattccagcattggggctgtacagtacttattttctctgctgccgttgatccaggcagcaacaaattccagatgttgcaactataagaagttggagtctctattcacttgaatcattgcattgaggctggaaggtctgaatctgtgacatattgcctgggccaaagaagagtttgaatgtgccccaaacaaaccttccttgggttaagccactgagatctggggaatattttctttttataacatgatgtagcctgtgctgactcatacaagaggctgaaaaattcaaatattaatgcttataag

SEQ ID NO: 647618 - DNA, 437 bp, Homo sapiens
atcacttccctcttttggatctcctattacttgaatccctgtgctcctcactcttttcccctatgttggcggaacatatcctctagtagtttattaatacaagataaatgagaaatacctttttaagacataaagtgcatgaaatgtctttgtaccacccttatgtttgacatrtatttggctggctaaagaaatctatattggaaacatactttttctataattttgaatgcactactctggtgtcatctatattcagtgttaaaaagtccaatgctgtctgaatctcagtctcttttatgtgccctgctttttttcctttggaaattttggcgctactttattgctggtatttgaagctatggggaattttttatggaattattattattattactgttattttggtcctgaggatatgtccttcagtttgggga

SEQ ID NO: 647619 - DNA, 567 bp, Homo sapiens
tatgtcatgtgaaggtactgtgcttgcactgttggtggtggcattggcagcagtgccamtaatagtgcagagagggccaggcctggtggctcacgcttgtaaacccagcactttgggagcgcgaggcaggcagatcacctgaggtcaggagttcaagaccagcctggccaacatggtgaaaccccgtatctactaaaaatacaaaaaattagttgggtatgatggcaggcacctgtaatcccagctacttgggaggctgaggcatgagaattgcttgaacccaggcggcagaggttgcagtgagcgaagactgtgccattgtactccagccttggcaacaaaagcgaaattccgtctccaaaaaaaaaaaaaaaaacaacaacaacaacaacaaaaaacagtgcagagaaatagtcaagttctggatgagggtcagcatcacaagcctgtccaacttcaaaagtacacagctgagcttgaaattgaaggggaccagaacataacaccccaaaattcaccactttgatgtgttgattattctgacctgaaagtaactgagaaattgca

SEQ ID NO: 647620 - DNA, 567 bp, Homo sapiens
tatgtcatgtgaaggtactgtgcttgcactgttggtggtggcattggcagcagtgccaataatagtgcagagagggccaggcctggtggctcacgcttgtaaacccagcactttgggagcgcgaggcaggcagatcacctgaggtcaggagttcaagaccagcctggccaacatggtgaaaccccgtatctactaaaaatacaaaaaattagttgggtatgatggcaggcacctgtaatcccagctacttgggaggctgaggcatgagaattgcttgaacccaggcggcagaggttgcagtgagcraagactgtgccattgtactccagccttggcaacaaaagcgaaattccgtctccaaaaaaaaaaaaaaaaacaacaacaacaacaacaaaaaacagtgcagagaaatagtcaagttctggatgagggtcagcatcacaagcctgtccaacttcaaaagtacacagctgagcttgaaattgaaggggaccagaacataacaccccaaaattcaccactttgatgtgttgattattctgacctgaaagtaactgagaaattgca

SEQ ID NO: 647621 - DNA, 533 bp, Homo sapiens
tgcgggttaaattactaacacgtgcttttttggggacacattcaaaccatagcaggttcccttttctccacatccttgccaacacttatctttcaactttttggaaataaccaccctgacaggcrtgaagtgatgtttcattgtgattttgacttgcatttgtctgatgcttagtaatgttaagcatcttttcatatatctgttgaccacttgtgtatatatggtgttttatgtggcattttattagtatacattccttttataacattctttttagaatgagaacaatgcaattatctgaggaacatgaaattttgaaaccaaggattgtcagtgacaatagtattcttttattggtcttagcacccaatttacatctgaacttttatttcactcacatggaattatgaaaattcaagtttgcactgatacatggttgcatattgtgtttcattttgttttttaaacaactgccttgcaatctccaagatcttttcaataaaaccaaaatagcggggaaacttttattttta

SEQ ID NO: 647622 - DNA, 424 bp, Homo sapiens
cttgggtcacctccagattcattttcacagtctttcatgttttggtcatattacattgtattttgctgccatatgactgagctctttttgttaaatgtgagatacttgttaaaaaatatttagcaatgaattgaggcctagtggcatgttatcttgctgcagaagagatgggagtctacttctgggggatggtcacgggtcctccatacaggctgcaattgaggtcgtcggtgcaggctcagtccctacaaaggccagggtatttcctgtccacctytattctgatgcatgactcttctgggtctcaaccagagccagtggacttcagtacgggtcgctttcattggcagaccctcaatccacttgttttccatctaatcccacgcatgtgtgcaaaagctgctgtgcttctttacatctcagt

SEQ ID NO: 647623 - DNA, 554 bp, Homo sapiens
tataataatttggatggaaacctttataaaaaataggtaagatggagatttgcttggagtaatgtaaatctaaatcgactttagtaagcaaaataactacagtttgggcatccctaatctgaaaagtctgaaattccaaatgatctaaaatccaraactttttgagtgctgtcatgacaccacagtggaaaattttatacctgaactcatgtgaagtttctggatcaaattgcaagtgcaattattcagcgtccccaagggataaaaggccctcctagcccagttcagctgtgatatatcttttccatgcacagcatgatggtgatgccacacaatcacagattggccaaatggatggttgaggtagtgacacctttgcctcctgatgatttaatgcaggggttcccaaccctcgggcccaggaccagtgccagttcgcggcctgttaggagcccggcggcacaccaggaggtgagcagcagggagagcaaggattatcacctgagctccacctcatgtcagatcagcggaggcattagattctcataggtgcc

SEQ ID NO: 647624 - DNA, 588 bp, Homo sapiens
attttatcctagggacattgacttgtgctgcacagaggcatcctttatagggcttaagctttaggttttgtggaaatgctcctgaatctactctttgcagtaaatgctcccatgccctgaaaacacacagagagcaaaaggaawattactgaacctaaggattagctctgtgggtgaagggcaagaagagggtcaaaaagcatcaatttagagctgtatccctgtgtgtccagtactcaccctacctgaatgagatcagaaagccattcagtgacagccacccttttgaataatttagtcctgggaaggagaggacattgcaagatagttaagaagtgtgttttgcagaaagactatctatgctgtgaattacttaatagtaacagtgcctgtttccatgcctggaaaatggggatgctaatacccagctcatattgtcttgggaggacaaaatgttataatgtatgaaggggtagaacacaatgcctgtaatatagaaagtatttagtaagtggtatttatggctgtgtatttttatcattacattactattatttgttctgcattaacaacaagaaaaagtttgaa

SEQ ID NO: 647625 - DNA, 588 bp, Homo sapiens
attttatcctagggacattgacttgtgctgcacagaggcatcctttatagggcttaagctttaggttttgtggaaatgctcctgaatctactctttgcagtaaatgctcccatgccctgaaaacacacagagagcaaaaggaatattactgaacctaaggattagctctgtgggtgaagggcaagaagagggtcaaaaagcatcaatttagagctgtatccctgtgtgtccagtactcaccctacctgaatgagatcagaaagccattcagtgacagccacccttttgaataatttagtcctgggaaggagaggacattgcaagatagttaagaagtgtgttttgcagaaagactrtctatgctgtgaattacttaatagtaacagtgcctgtttccatgcctggaaaatggggatgctaatacccagctcatattgtcttgggaggacaaaatgttataatgtatgaaggggtagaacacaatgcctgtaatatagaaagtatttagtaagtggtatttatggctgtgtatttttatcattacattactattatttgttctgcattaacaacaagaaaaagtttgaa

SEQ ID NO: 647626 - DNA, 591 bp, Homo sapiens
tccacctcacactagagaagtcacaatatattgaaggtcgggtttcaagcaagattaaaaacaggtcctattagaaccgtcatgttaaaaaaaagtatgcaaaaaagtgtcaggtctttataatacgacaaagaaaaaatacaatagatggtccatagaatgccttttccttcactggttgttggttttctctgttgcactggcaaaaaaaatagtttccaaagaacaataaacaatctggtaacattcctcacccatgtgcttcccaggcaaaaactagataaaagaatgcctgagtctgaaaatacaaaatagagtggaacacaccataataatgaaaaattctttgtagatttagttaacaggaaactcatatataaactcatttaatatttacaacaactctgcagtaagtcctgttatgagtcctgtcaggagaaaactgaggtgcaaagaagttaaagaaacttgagcaagttgctcawgttggtggaatcaggtttaatcctaggctactcgtatgtgtcttgacctctgtaaagtattgcttctcatttaaaactcgtgatttgttgtaagcagcacatgaac

SEQ ID NO: 647627 - DNA, 614 bp, Homo sapiens
tatatgggcacatgttctcaagacctcttgagactgtgcctcaggaaaatacttttttaaaaatatgcatttattttggtctaagttaaataagtccagaagtaagaagtccagtcgctgaactcgtgcttatggcgtggtgacctgtgattgttgggaattcaggcttgctctcttgggtggctctgctattcaccactcttggcttccacattgtggtccrtgatgactgctcaagtcataacttccaaactccagccagcacagggggaggagatgatgatgcttccatttttaagaatgttttatgaagttgtgtatacactacttctgcttatatccacaagtcacatcacatcaccacatatgcaagggtgctcctagatggaagttagggctcgatttccaagaaggggagagtcaccagcagtgcctgccacagccctcaataaatatgtattgactggaggaatgatcttagtctgcacaacaaccctccaagataggtggtattattcccattttatagatgaatacactgaggatcagagaggttaaaacagcctgccaaagatagtaaatgggtggccctgcagccctggggcatctcaccc

SEQ ID NO: 647628 - DNA, 534 bp, Homo sapiens
gaaaatatgttatagaagaaatttacctaggtgcaaaaggtgctcttgagaaaatgatgatcgggcacagtctgaagacaggataagggttaacttygtgaagtggagtgagatttgagatgggtgtcattccaagcaaagctagagcttgtgcaaagtcactgtggcaaggagaagcataaaaggaaatataaatggttgtggcagaaaaacagaaaatcaaagggcaatctggagcaagatgcatcttagctggtggaagagtcagaccaagcagaaccagtaagtgaagactctttagcttgggagaaaaacaacttcccaaacacccagctgtcaagtggatggtccgggatttaaagctggacttaataccaaagtctgagctttttctaatgcaccatcttgtctttctattgatatcatctgaataaggttgccattgttctatttataagccacatgagggaaagtaagcaccaatattaagtgaaaaaaaaaaaagaaaaacaaatgttttggaagtaagagtaa

SEQ ID NO: 647629 - DNA, 469 bp, Homo sapiens
aggggcagcaggggactggaggagggtgaggagaaggtcagagaaaccttgattcaaagcactcagcatgccaaagcaccatactttgggacattgtttcctgagccccaataatacttacgcgtatttttgctcttttcaattttccttattcccagtgttccagtatttcttctttttatcatttctcwtccattttgataactttctgtagccatttctttagggtaggtctgccagtgacaaattctctgagtttcccttcgtctgagtatgtctcaattgccccttcatttctgaaggatattttcactgagaatcagattctgtcttgacagatcttttctttcagcacttgaaaatgttgcatcatttccttctggcttccgtggtttctggggaggaatctgctgtcattttaatttttattcttctttaggtgaggtgtccctttctgccctgctgcttt

SEQ ID NO: 647630 - DNA, 651 bp, Homo sapiens
ctatactaataaactaagcctagtatacttgaatattatattagttgagcaaattacttaactatttagagcctgttttcttatctgtaaaatatgaatactagcaatgtattaggctattcttgcattgctataaagaaatacctgagactgggtaatttataaagaraaggggatggtgctaaaccattaatgagaaatctgccctcataatccagtcacctcctaccaggccccacctccaacactaagggttacatttcagtgtgaaatctggggggacaaatatccaaattatatcattcctccctggctcctcagacctcatgttcttctcacattgaaaaatacaatcatgccttcccaacttcccaatagtcccccaaactcttaactaattccagcattaaatcaaaagtatcaagtccaaagtctcatctggagatgagttcctcccacctattaccctgtaaaataaaaaacaagttatttacttttaagatacaatggcatatagacattgggaagacattctcattccaaaaggaaggaattggcccaaaaaattgggtacagaccccacacaactctgaaatccatcagggtagttattaaattttaaagttccaaaataatcttttctgactccca

SEQ ID NO: 647631 - DNA, 566 bp, Homo sapiens
cctctgcactgtgcctcagttaaaaccccagttgctttgtttgacatgccatcrtttgtcctggtatgacattccaagcatgctttctactttcctccaggaaccttccggggcagcccaaactttttgccctcagcctccactgtcatccccaccccactcactggtgcatatgagctcatgcatttcctttgtccgcaatgaccttggctcatccatccatctatccagccgctcacccatcatgagcttcctaccagccatcaagtgctggtcagtatgtgctcatatccctgcacatccctgtccatacccccatctcacttctttctgggctcttttcatgtactaattcttgtttggtgattgtaccagcaatcccaaccagataacaagcacctcgggggaaggatgatgtcctgtgttcccttcctggcgctatctgatgaacaaaaacattaaggagacctctgggggacttgtggattgacaaagtcattttcaataagttttgttagttaaagtaaaggcaagctaactttctgaaggctatctaaaaatagaat

SEQ ID NO: 647632 - DNA, 592 bp, Homo sapiens
ggcatggaagctggtgatcatgtggactgtataaatgtttcagactgtcacatcatgcttcgaactctggcagragaacagttaaagaataattgctcttggttctgaagttcaagcaaaataataataatagtttcaattgaatgacatttccatcgtattatgcattatgagtgcagatacacaattgtcctagtcattcaaacttgaaatttattgctactggtaacaacagacatatgtctactaagtaaggatgcacaaaaatattacagggatcaaaaaaggaatcttgaatctgttatggggactcccttaaattgtcctctaggagaactctacaaataattattgtttattaagtgtaggtacaatatgtcatgcactacacaagacaatttaaatatattatcccacttaatccctaggaaaacactgaaatgttgacatttctattctcatgtcacagattgatactgaagcttacaaatattaagtaacttattattatcaaatagtattcagtacagccagaatttgagttcattttgtttaactcaaagtcaaaacacttattcaccaagccatacag

SEQ ID NO: 647633 - DNA, 593 bp, Homo sapiens
gcctcccaaagtgctgggattataggcatgagccaccatgcccaacctagtgttgtaaaatttccatatccatcaagttgccaaatggtggaggactttgctgtatcctctccctttccccactgtggtatgcttggctcagtgggaggaggggctggagttgggtgggaaagtacatgaggcactggaatcagataactctgggtctgtattccgcacatgccacctgtgagtggctgagctgggcttctggccagcactcaaaggccacattactagatatagatgttcctttcaccttgctgaagatggggagagcygcaccggaccacctctcagggtttcctaatgcaaatccttgaaccctgcagaagtgagcatccagagaggtgggagctacccgtatacacactgtctgtgccctgctcatctcccgttcctgcagcatgaaacacctgtaatgctttgttctgtttattgtctccctttctcattagacctgaactctgggatactgtgggcttaagtacttctgaaaatttctatggcatctgctgggtgaattttcctagggtgctgggctggttgttaag

SEQ ID NO: 647634 - DNA, 593 bp, Homo sapiens
gcctcccaaagtgctgggattataggcatgagccaccatgcccaacctagtgttgtaaaatttccatatccatcaagttgccaaatggtggaggactttgctgtatcctctccctttccccactgtggtatgcttggctcagtgggaggaggggctggagttgggtgggaaagtacatgaggcactggaatcagataactctgggtctgtattccgcacatgccacctgtgagtggctgagctgggcttctggccagcactcaaaggccacattactagatatagatgttcctttcaccttgctgaagatggggagagctgcaccggaccacctctcagggtttcctaatgcaaatccttgaaccctgcagaagtgagcatccagagaggtgggagctacccgtatacacactgtctgtgccctgctcatctcccgytcctgcagcatgaaacacctgtaatgctttgttctgtttattgtctccctttctcattagacctgaactctgggatactgtgggcttaagtacttctgaaaatttctatggcatctgctgggtgaattttcctagggtgctgggctggttgttaag

SEQ ID NO: 647635 - DNA, 559 bp, Homo sapiens
gccatctggccctgggcttttctttgatgggagactttttattacagattaaatctccttaactcgttattggtttgttcagattttctgtttcttcatgtttcagttttggtagactgtgtttgtccaggatttctctgttctttcttagttttcaaattcattggcgttaaccacctacatccaaaattagatcccaaaaataacccaacttaatattgcacctcaaggaatttgaaaaataacaacaaactaaacccaaaattaattaaaggaaagaaataataaagatccaagcagtaataaatgaaatttagactgaaaaaagaatgtaaaagttcatgaaacaaaaagttggttttttaaaaagataaaattgacaaayctttagcttagactatgaaaaaaagattaaaataaagtcagaaatgaaaaatgtgacataactgataccacagaaataaaaaggatcccataaacatgtgaggatatcaataaagcatagactttgatccagcaggtttggggtgaggcccacgattctgaatcccacaggttc

SEQ ID NO: 647636 - DNA, 591 bp, Homo sapiens
ctagtacatggattagtgaacacagtaggtgttcaagaaatgtattctgaacggcagactgaatgaagacataaatgaagtttgccacttacaggttcttgttccagaagaattaggctcaccacaaccacgtttatgtcacttccaatagtcccatctttaaataggccagaaacctgttggaacaatggaaatcaaacaaaatctcaaaattttcaaaaccttagggggaatcaatcagacatattgactgaagtacgcaggctttaattttaccaaatatatgtacatayaaatacaatttcctcaaaactcaacttaaaaaaataaaaccacatatgtagctattaaaagtaatggcagaaactgcaattacatttgcaccgacctaatacacctgctattcaacccatgcaagagaattccatgacatttattttctttggagagccagaaggtttgtgacacccccgcctaccatgttcattactgtgagaatgtatgtggtgacatttcccttgccatgcttttccaccattttcttgtctgccaccacgagggtttccacattgaggcccttttgtgattttc

SEQ ID NO: 647637 - DNA, 591 bp, Homo sapiens
ctagtacatggattagtgaacacagtaggtgttcaagaaatgtattctgaacggcagactgaatgaagacataaatgaagtttgccacttacaggttcttgttccagaagaattaggctcaccacaaccacgtttatgtcacttccaatagtcccatctttaaataggccagaaacctgttggaacaatggaaatcaaacaaaatctcaaaattttcaaaaccttagggggaatcaatcagacatattgactgaagtacgcaggctttaattttaccaaatatatgtacatacaaatacaatttcctcaaaactcaacttaaaaaaataaaaccacatatgtagctattaaaagtaatggcagaaactgcaattacatttgcaccgacctaatacacctgctattcaacccatgcaagagaattccatgacatttattttctttggagagccagaaggtttgtgacacccccgcytaccatgttcattactgtgagaatgtatgtggtgacatttcccttgccatgcttttccaccattttcttgtctgccaccacgagggtttccacattgaggcccttttgtgattttc

SEQ ID NO: 647638 - DNA, 592 bp, Homo sapiens
aacttgtgatccattacagttactctaaatgtttcccgtttttatatatccctatatttacacctttgcagattataatataaatttttaataaatttgtaggataatatttctgaataaagcactgtcatatttcaaaagcactgatgcacatcattgatgtgagttcacagataactctgccaatattcctaatcccattttcttgtaattaaaaaaaaattattgtaattttattgccttccaattctttgaaaaaaatatttgtaaatatttgcagtgattcaatggaactcttatatctggatttcaacaggtattactaactccaactcctcacttgggaataaactttctgcctrttgcatcctaatgatactacgtaccttctcaggaatatctctctctatttctctccctctctttttctcttatcatcctccctccattttttcctcctttactatcctttctgtctctttctctctcatctagtcaacttactcttattactggattcattccatcagtattaatatgttcaaactgtaactgaaaaacttttaaaagaaaactcaacactgattctttc

SEQ ID NO: 647639 - DNA, 573 bp, Homo sapiens
atgttttgttattattatatctgttatggtgatctgttatcagtgatcrttgatattactattgtcattgttttggggcatcacaagccatgctccaaaagacaatgagcttaattgatacatatgtgtattcgaatggttccatcgatctgcccttcctccatctcaccctctcctcaggtctgttttctgagacacagcaatattgaaattaggccaattaataactctataaaggcctctatgtgttcaagtgaaagtaagagtcacacatctcttattataaatctaaagtgagaaatgattaagctgagtgaggaaggtatgttaaaagccgagacaggccaaaaggcccaggctggtctcgaacgcctgacctcaagcaatccacctgccgcagccttccaggtagctgagattaaaggcatgagccaccatgtccagcttctatgcattattttaaatggagtattgaagactctgttactgtagaactatttctaacttcaattctgtcaatattttggtcacaggccttaatgtgattacacgctggtctgatgttcatggcca

SEQ ID NO: 647640 - DNA, 410 bp, Homo sapiens
tttatggtgcgttggtgttttatgggcctccatgtgcttggaaagttcccgagagttgtattcactatgtgctgcatctgtagagtgcacaggatcatctcggaagtttgttctatctctgagaacattatgtatccagggcaggggatctctccaaacattcatttttgtgctagtttggattggtttcaattccccctccatggttctgggcagtggctgcccttcgtccttgagagaagaggcctagaactgtcgacagtcctgggtcttcctgtcattccttgtcatgccactcattggataatrcattgctcacagttaggctgagcccctttttaattcacagaaatattagattctaacaattcaaaatctctggtcccattcagacctattgaatccgaatt

SEQ ID NO: 647641 - DNA, 527 bp, Homo sapiens
gacagactacaaatgggatagaactggcctaaaatatacyactgtcacttaaaaataggtactcggttacatagtgcctgtgttatctttacaacagcatttggttcctacactgtcttcttcctacaggcctgttatgactatgagagctatctgttccttcagtggaccaagtcttgctgccttgtggattctgcccagtcacagcttcccttctgcccttcaagggtgggctgcttgcatctaagtggtagggccatacctaattctgttctggatataacacagatgactgactgggcttggtggctgatgtctataatcccagtactttgggaagctgaggcaagaggatcacttgaggccagaaactcaagaccaggctgaccaacatagtgagatcctgtctgtacacaaaatgtaaaaatttaggagggcatgatggtgcattcctatagtcctaactactttagaagctgaggcaagaggatggcttgagcccaggagttggaggttacagtgagcta

SEQ ID NO: 647642 - DNA, 538 bp, Homo sapiens
tacaatacttgttctagcagggaggaggcattattgagtgtggtctattgggagaagggatgtctgccttcatgtgttgtcttctacatggtttccatgattcttatttattgtgcgctatttttcaactttttattatgaaaaatttcaaacatatggaaaagttaaaagataagtgcatcaaacactcaccatctagaattaacagttcctaacatttgctttatgtatttgtctctagttgttgatacagtttggctttattttactaaaccattccaaagtaacacaattacagatactatgattcttcacatctaaatatttcagtatatatgtcctaattataaggacattttcctacattatcatagtatcatcatcaaacctaagttatcaataattctccaacattctaatattccatctatattcatattttctcmgttgtcttttataactggtttcccccaaatcattcaaggatcatgcactgcatctagctggatttattttttgtttgtttttatccaatcaa

SEQ ID NO: 647643 - DNA, 624 bp, Homo sapiens
tcttttaagtatgtgcattaggaaactattatgtgattctgcgttaaaaaaaaaaaaaagaagaaaaaatagctcatagtcaaatcctggtggttctccaaagcagtgtctttactggcagtttcagaatcacccaacacttgctcataggatgcattcttgggcctcaacctagacctactaaatcagagtttakagggtaaagtccaggaatttgtggtttttaacagtctcctgagataatttggatgttccatcaggtctgagatagcacctttcacatttgcaagtttaaagccctgagaagtcttactttacatttttgtttattcttatttcttgtttatccattaatatctgttaatatctcatagaactgatgtttcttgaaatacaccttgggagttgctattctattgtatacataaaattttgaattacctttgttacaacctaggattagtttcgaggacacagaaaggatcatatttctttctagatcttcaaattgttacttccttttctcttacacacatgttgtttggaatcttcattataggttttgtatggaccgtgacatataaattgttagactctgatgtgactgaggactatttctgtttc

SEQ ID NO: 647644 - DNA, 567 bp, Homo sapiens
gtcttctcttttgaattatttcatatatagaggacaaaagaaaacttcctcttcaccctctgaaagttcactgaaaatcactgacaagaggcagattaatgggagaaaaggcaagcaaatttatttgatcatagttttacgtgacacgggagccttyagaatgaagatccacagatgcaggggaaacagttcaattgtatgcttaggttcaagaaagtatggacagctgttttaaaatatgattggacaaaagggttgtgatctaatttttttttttttttgagacatagtcttgctgtgtccaggctggagtgcagtgtgcggtggggcaatcttggcttactgcaaaatccgcctcccaaattcaagtgattctcatgcctcagcctcctgaatagctgggattacaggcatgcaccaccatgcctggataatttttgtatttttaatagagacgggattttgccatgttggccaggatagtcttaaacttctgacctcaagtgatccacccacctcggcttcccagagtactgggattataggcattagccactgtgcctagtc

SEQ ID NO: 647645 - DNA, 562 bp, Homo sapiens
caaaaccttgtctctacaaaaaatacaaaaattagccgcgcatagtggcacatgcctgtagtcccagctactcaggggtgctgaggtggaagaatcgcttgaactcaggaggcagaggttccagtgagtccagatcatgccactgcactgcagcctgggccacagagtgagactctgtctcaaaaaatatataaacaaatcaaataaaatctgtcatgcataygggcaaaacttccgggctctgggttgctggggatctgccagaggagcccactgctgagcagcctacttagaaaccttgaagacgcccatgtgcactccctcccaggctcacagtggggagaggaggaggcctgtaataggaatgaagagccagcaaatggagacataacgcctccttagcaggatttccaaaaactactggatttaattaagaatcatggaaatgctcctgctcacttgtgtaagaagatggagaaagttttatatatgctgggaaaaaaacaactagaaggttcaagaggcctgagaagaaagaaataggagaagacagtgagataaa

SEQ ID NO: 647646 - DNA, 562 bp, Homo sapiens
caaaaccttgtctctacaaaaaatacaaaaattagccgcgcatagtggcacatgcctgtagtcccagctactcaggggtgctgaggtggaagaatcgcttgaactcaggaggcagaggttccagtgagtccagatcatgccactgcactgcagcctgggccacagagtgagactctgtctcaaaaaatatataaacaaatcaaataaaatctgtcatgcatacgggcaaaacttcmgggctctgggttgctggggatctgccagaggagcccactgctgagcagcctacttagaaaccttgaagacgcccatgtgcactccctcccaggctcacagtggggagaggaggaggcctgtaataggaatgaagagccagcaaatggagacataacgcctccttagcaggatttccaaaaactactggatttaattaagaatcatggaaatgctcctgctcacttgtgtaagaagatggagaaagttttatatatgctgggaaaaaaacaactagaaggttcaagaggcctgagaagaaagaaataggagaagacagtgagataaa

SEQ ID NO: 647647 - DNA, 544 bp, Homo sapiens
aatccatacttgcttggggtccttataaatgtcagtatgggtaaaaaaggaaatgaraaatttaacctggattcagtcatttattcataaaggttaaaatttgtatttgcaattatcaaatgtagttaaaaatagagcaacaagcatttaaaaataacttttaaaagcaacatagtaagtggttacattttgatgatcacaaatatatgcctacatgacaatgaaaagccaaccacctaatgttggccaaataagtccttctggcctggcacagcagttcctgttatcacattgaacagggattcaaaaacagtgcttcccaaacaacttggaagtgagtcgaatgagcctaaaaagccatgttaggtgattcaaatagaagtcaagaaaaaatacatgtaaagtgtttgaataaaatcatttcaggaaacagagtggaaaaaataatattttaatattaagatgttattttaaatataaatgagtccctgtattaataaattaaatatctgttgacatttgaatatctcatctatatttctaa

SEQ ID NO: 647648 - DNA, 544 bp, Homo sapiens
aatccatacttgcttggggtccttataaatgtcagtatgggtaaaaaaggaaatgaaaaatttaacctggattcagtcatttattcataaaggttaaratttgtatttgcaattatcaaatgtagttaaaaatagagcaacaagcatttaaaaataacttttaaaagcaacatagtaagtggttacattttgatgatcacaaatatatgcctacatgacaatgaaaagccaaccacctaatgttggccaaataagtccttctggcctggcacagcagttcctgttatcacattgaacagggattcaaaaacagtgcttcccaaacaacttggaagtgagtcgaatgagcctaaaaagccatgttaggtgattcaaatagaagtcaagaaaaaatacatgtaaagtgtttgaataaaatcatttcaggaaacagagtggaaaaaataatattttaatattaagatgttattttaaatataaatgagtccctgtattaataaattaaatatctgttgacatttgaatatctcatctatatttctaa

SEQ ID NO: 647649 - DNA, 544 bp, Homo sapiens
aatccatacttgcttggggtccttataaatgtcagtatgggtaaaaaaggaaatgaaaaatttaacctggattcagtcatttattcataaaggttaaaatttgtatttgcaattatcaaatgtagttaaaaatagagcaacaagcatttaaaaataacttttaaaagcaacatagtaagtggttacattttgatgatcacaaatatatgcctacatgacaatgaraagccaaccacctaatgttggccaaataagtccttctggcctggcacagcagttcctgttatcacattgaacagggattcaaaaacagtgcttcccaaacaacttggaagtgagtcgaatgagcctaaaaagccatgttaggtgattcaaatagaagtcaagaaaaaatacatgtaaagtgtttgaataaaatcatttcaggaaacagagtggaaaaaataatattttaatattaagatgttattttaaatataaatgagtccctgtattaataaattaaatatctgttgacatttgaatatctcatctatatttctaa

SEQ ID NO: 647650 - DNA, 544 bp, Homo sapiens
aatccatacttgcttggggtccttataaatgtcagtatgggtaaaaaaggaaatgaaaaatttaacctggattcagtcatttattcataaaggttaaaatttgtatttgcaattatcaaatgtagttaaaaatagagcaacaagcatttaaaaataacttttaaaagcaacatagtaagtggttacattttgatgatcacaaatatatgcctacatgacaatgaaaagccaaccacctaatgttggccaaataagtccttctggcctggcacagcagttcctgttatcacattgaacagggattcaaaaacagtgcttcccaaacaacttggaagtgagtcgaatgagcctaraaagccatgttaggtgattcaaatagaagtcaagaaaaaatacatgtaaagtgtttgaataaaatcatttcaggaaacagagtggaaaaaataatattttaatattaagatgttattttaaatataaatgagtccctgtattaataaattaaatatctgttgacatttgaatatctcatctatatttctaa

SEQ ID NO: 647651 - DNA, 393 bp, Homo sapiens
gagattgaaataatttaaggtaatcaaacaaaaattctgaagctgaaaagtacagttggaatgctgaagaatgcatcagagccttctaagagcagaactgatgaagtggaagaaaaaaatagtgagcttgaagacaggctatttgaaaataaagtcagaggatacgaaagaaaaaagaataacaaacactgacgcattcctgcaggatacaggaagtascctcaaaagggcaaacctaagaattactggccttaaagaggaggtagagatagacataagggtagaaagtttattcaaatggataacagagcacttcccaaacctagaaaaaggtatcagtatccaggtataagaaggttatagaacaccaagcagatttaacccaaagaagac

SEQ ID NO: 647652 - DNA, 456 bp, Homo sapiens
  misc_feature 1: n = A,T,C or G
ngaattcttaaagagataatctgacagaatctgtaagaaaaggagtcagaaacattttacacagatttagcaattcttcctcggggtatgacctcaaattacaagtgctggatgtcatggcaaataagccttttaaagctcggcttgaaaaagcaatgctgagtggttcttttgtggagagcacgaatatacacacacccacagaatgaatacaaatcccgactgtgctcatgtcatgcaaatgggatggagaccttgtttccagcgacagcctcagatgtggaagcaaaaagtgctggatctcagggcagtcagatggaagagaggagaaaggtctgaaaaacgaaactgcacaatgcaaaatgtggctctgtggagcagacgctttaaaaatttccaaaawttttttattattttattttattttttagagatgaggtgtcaccctgtcgccca

SEQ ID NO: 647653 - DNA, 533 bp, Homo sapiens
ttcaactctgggagttgaatacaaacatcaccaaaaagttcctgagaatgcatctgtgtagtttttatgtgaagatgattccgtttccaacgaaatcttcaargaggtctacatgtccccttgcagatgccacagaaagagagtttcaaaactgcgctctcaaaaggagtgttcaactccgtgagttgaatgcagtcatcacagagaagcttctgaggatgcttctgtctagatgtcatgtgaagatatacccgtttcgatcgaaggacacagagtggtccaaatatccacttgtagatcctgcaaaaagagtgtttcaaacgtgaactttgaaaggaaagttcaactcggggatttgaatgcaaacatcacaaagaagattctgagactgcttctgtttagtcagctgaaattatcccgtttccaacgaattcctcacagaggtccaaatatgcacttgcagattctgcagaaagtgtgtttctaaactgctacatcgcaaggaatgctcagctctgtgagttcaactcaat

SEQ ID NO: 647654 - DNA, 416 bp, Homo sapiens
gtttctaaactgctacatcgcaaggaatgctcagctctgtgagttcmactcaatcatcccaaagaattttctgagaaagcttctgtcttctttttataggaagttatttcctttactacggtactcctcaaagagtgcaattatccccttgcagtttctacaaaaagagtgtttcaaacctgaactatcaaagaaaggttccacactgtgagttgaatgcagacatcacgaagaaggttctgagaatgcttctgtttagttctgtgcagtttatcccgtttccaacgaaatcctcagagaggaccaaatatccacttgcagtttctacaaaaagagtgtttcaaagctgaactatcaaataaaggttcagcactgtgagttgaatgcaaacatcacgaagagggttctgagaatgc

SEQ ID NO: 647655 - DNA, 424 bp, Homo sapiens
cacttgcagattctgcagaaagtgtgtttctaaactgctacatcgcaaggaatgctcagctctgtgagttcaactcaatcatcccaaagaattttctgagaaagcttctgtcttctttttataggaagttatttcctttactacggtactcctcaaagagtgcaattatccccttgcagtttctacaaaaagagtgtttcaaacctgaactatcaaagaaaggttccacactgtgagttgaatgcagacatcacgaagaaggttctgagaatgcttctgtttagttctgtgcrgtttatcccgtttccaacgaaatcctcagagaggaccaaatatccacttgcagtttctacaaaaagagtgtttcaaagctgaactatcaaataaaggttcagcactgtgagttgaatgcaaacatcacgaa

SEQ ID NO: 647656 - DNA, 416 bp, Homo sapiens
gtttctaaactgctacatcgcaaggaatgctcagctctgtgagttcaactcaatcatcccaaagaattttctgagaaagcttctgtcttctttttataggaagttatttcctttactacggtactcctcaaagagtgcaattatccccttgcagtttctacaaaaagagtgtttcaaacctgaactatcaaagaaaggttccacactgtgagttgaatgcagacatcacgaagaaggttctgagaatgcttctgtttagttctgtgcagtttatcccgtttccaacgaaatcstcagagaggaccaaatatccacttgcagtttctacaaaaagagtgtttcaaagctgaactatcaaataaaggttcagcactgtgagttgaatgcaaacatcacgaagagggttctgagaatgc

SEQ ID NO: 647657 - DNA, 280 bp, Homo sapiens
ttttctcatttatctcagtggcatagtctttatgaaatgttaaatggtgaatcaaggagggttataattttatatagaaacaagactagaactggttaggggaaggaaggtagagagaacaagggcaactgtaccataaacacttgaaaacttccttctaytgattggcttatctgcatctgtagaaatcatgacatcctgcttttgttgttgttgttcaatataaaatatgttctgttttgctatgaacagacattcctggtaactatgcacagaatct

SEQ ID NO: 647658 - DNA, 624 bp, Homo sapiens
taagagtttaaataatttcttggagatggggaaataatatttcatggtattacataagcattagcttctctctctggaggagtcccttcccacaaacactgttgtatcatttctttcagatcctgagactccagcaggatgtcttatcaacagcagcagtgcaagcagccctgccagccacctcctgtgtgccccacgccaaagtgcccagagccatgtccacccccgaagtgccctgagccctgcccatcaccaaagtgtccacagccctgcccacctcagcagtgccagcagaaatatcctcctgtgacaccttccccaccctgccagccaaagtgtccacccaagagcaagtaacagcttcaggattcatcaggagcatgagaggataaggataattggctcacctcgttccacagctccacttgcatcttctcaccaaagccttccatggatgcacagggagcttctttctccttaacctgtggcctgcctgtgatgatctgtgacagcaaaagattccctttctgaggctgccatactgccactgtccaggtggagctaagaaaaggaagtcctcagctgtgccagctcccagagcttcrgcagaaagagcagcagctc

SEQ ID NO: 647659 - DNA, 560 bp, Homo sapiens
gtagacaagcatctaatgtagttacaagaataaaaagatatctaagtgtcctcacacacrtccttgcttgtttctttatttgtaaaatggccaagttgaaatctatgacctctgaattttgtttctcatggaaagttgtctaaaatcaaatagattcttagtgcctctgaagatctaattatactgactgtgcctctaggatttatttaaatgtgaaaacaaaaggaggtgcctctatcagacttcatgatcatgagccaagttggcttccagccctccagcaataactctagagtggcactctcagaacatcagtatcttattatttccagatcagactcctatcctaaaagacatgtgtgcattgtcaggaagaaattttaaaatacccagaaacaaccagtcttctggaagatgaaaggcatttttttttccttgaaaattgtagcatacaaccctaaatcttgaaaacgcattattttggattggttgctataagcaccttcctttggcattcaaattgggcatctaacaactcctacagaacatcagcagcgata

SEQ ID NO: 647660 - DNA, 627 bp, Homo sapiens
tggctatgattatgagaaggtggtggcacttgcccaaaaagaattcagagccttgtaaaagtgtatgaacgtgaaacagataatttcagagtaacaagtgtaaagaaacactgtgtataccctgatcaagatttcaaagtccccctcgatgagcaaacacaaaaatacatagtacacacatgcacatgcacacacttgcacatayatgtaaatataaggaagaatggaaggaatattataacagagctttacacaaagaatcaaaaaggagtaaatcttattttttgtaatcataaatataagttaaggattcacaggaaacataattccacccaaaatggtttaagtgagagatacaatgaagggccaatttacagagttttcatttcctccaggaagttttttctgacccaggcccacattatttcctagccccatgacaccctattattatctataatggtaccaatattccattttagagattatcctttttatgtcctcagtagacttgagatctgagaaagcaaggaatacggccatctcatttcaacactgctaattccaaatatagtatgtgctcaataaatgtgtgacctctactgggaaagacagaactgtagataa

SEQ ID NO: 647661 - DNA, 531 bp, Homo sapiens
ctgccacaaccacatcaaatttcttcatttccctgatgtttcttccttctatgcctttgctcacattgcctcctttgcttgaagtggcttcctccaatgccttgctgtgttcacatattgtagaagctgcttggcttccactgactttccagtggcgtcgtctatgctattctcctttttctggggaattgattttcactccttccttacccagtttttgtttgtttgtttgtttgtttttttagatagagtttcgctcctgttgtcccagctggagtccattggcgccatctcggctcactggaaccttggcctcctgggttcaagtgattccccctcctcagctccctgaatagctgggattacaggtgcatgccaccacacctggctaattttgtattttcagtagagatggggtttcactatgttggccaggctggtcttgaactcctgacctcaggtgatccacccmcctcagcctcccaaagtgttgggattacaggcatgagccactgtgcccagcccttccct

SEQ ID NO: 647662 - DNA, 509 bp, Homo sapiens
atcataattctatgtgctcttttcctatactttatatagttcaattttatatgtatatgaaggaattaggcttcctgtattctcctataacttgtgtttctcggtcatagctaagattttaaacatgtttttgttggtgtgcgtagctgtaatgcattcattttcagtgttgtctcacattctagcctgtaaatacaggtggaacctttaggtcattcctctttcagtgctcagtaatgttcttcccaggtgtctctaatgtatgsccattgatattcttgagcaggactcttggagcatataaatagcaagaattcctctagggtgtattctcaggaatggaagtgttttgcatatcttcaaatttattatgtaatgtcattccaggcttgttgttctatattacattatcataagctatttgttcttctgaatgttccacatcttttctaataattgacattttcagattttaatattcttgcctatctagtatatgtgtgaaatga

SEQ ID NO: 647663 - DNA, 456 bp, Homo sapiens
atttcctgcttagactaaaggaataagtagatcaatctgagaacaattaataaaaaaaaaaagtttaaaagattgggcttcagatgtcccaaacttcaagtggttgtgtggagactgtagatagaggtgcaagtgtataggagttgcttgaggattagcgctctgaaatatgaagtccyacattgaggaggtaactattagacattagaataaaaatgaacccgaacaggaatctgtcattatgagaagaagatcgagatatttgtgggtgagtgacctgagtaggttaatttcaggaagtctcaaaaggcatactcagaagccgtatctttcgctacctcatggtacaagtgaaaacggatgccaagggtaccctaactcagtctctcgcccagtaaactaaacatccttaaaatacattttcaaaaagcataattccctaaaaatgagtgccag

SEQ ID NO: 647664 - DNA, 549 bp, Homo sapiens
aggcatgagccactgcacctggcctaaaccccagttttagctgggctcctggccacctgattacaaatcccctcactcagtttctcttaaagcaagatgtggccataggactaggttcaagccaatgggatgtaaaaagaaattataggcrtgatttcaactccctaaagacaagattgcttgccatggacttctatcttagaactggaacatggacatggaggtgtgccagcttcaatactccagtacagggtccttagcctggggttgacagatctgcagaacatccatgaacagaattcagagcgtccagaaacctagattggaaaaattctgtctttatttttagcaatctctcattgaagttcagcattttctttaattataaatgtaggcaacaaaccacaacagtaatcacaatatctgtggccttgtcactatcagaaattatagttattttcatatcatactacatgaaataatgatttatgctcatcactatttcgaaactatggtacctattagacacaccagtagatgtggtactta

SEQ ID NO: 647665 - DNA, 424 bp, Homo sapiens
ataggaggggctacctgttattctatggggatatcttcaccctctccccttttattaatttcctaggtctgtcgtaacacattaccacaaaccgggtaactgggtggctttaaatcacaaaaatttattctttcccaattctgaaggccagaagtttgaaaacaaggtgccagcagggccatgcttcctcccaaggctccagggaagaatcctttggtttaatttctgttttttttttttttttttccaggtgtttcrtgtcttgttgctacataaatccagtttgtgcctctatctttacatgtctattttttcttctctgtcttaaatctccctctgtttttctgttataaggacacttgtcttagattaaaggtctactttggtaatccaggatgatatggtttggctgtgtccctaccca

SEQ ID NO: 647666 - DNA, 569 bp, Homo sapiens
tatatagcaagacgatgcaaaagttgctgcaggacaagataccataaatgccaaatgagtgctctcatctctaagtgtgggatgagcggagtgagagtctgcaggctgggtggtcaggacacactttacarcagtgattgaagcttgtcctaagaggagagtaagaattagataagattcaagtttgccatgatgctacaacatcacattctctacttatcgaatgtgtgtcaaggtcatctcctcagctagacttcaactttttgaacacggaaaccctgtctcaagttctttttgaatcaacgtcttcttggggtgtatgccctctggcatgcactgaattgattcaaattgaattgaattaagtcacaccctgaggcatttgtgctgggcttgtccacataggagagaatttgaggtctgacgtcagctcaagtaaaatgccatctttgggcagcaaaagacacccagcctctcacaggaaatgcaaactttcctttctctgagcagctgcagcatggtcagaaattgtcccttctagcccacacctatctagtaagaccaaaagg

SEQ ID NO: 647667 - DNA, 569 bp, Homo sapiens
tatatagcaagacgatgcaaaagttgctgcaggacaagataccataaatgccaaatgagtgctctcatctctaagtgtgggatgagcggagtgagagtctgcaggctgggtggtcaggacacactttacaacagtgattgaagcttgtcctaagaggagagtaagaattagataagattcaagtttgccatgatgctacaacatcacattctctacttatcgaatgtgtgtcaaggtcatctcctcagctagacttcaactttttgaacacggaaaccctgtctcaagttctttttgaatcaacgtcttcttggggtgtatgccctctggcatgcactgaattgattcaaattgaattgaattaagtcacaccctgaggcatttgtgctgggcttgtccacataggagagaatttgaggtctgasgtcagctcaagtaaaatgccatctttgggcagcaaaagacacccagcctctcacaggaaatgcaaactttcctttctctgagcagctgcagcatggtcagaaattgtcccttctagcccacacctatctagtaagaccaaaagg

SEQ ID NO: 647668 - DNA, 567 bp, Homo sapiens
  misc_feature 208: n = A,T,C or G
gttgcagtgagaattaaatacgttagtacctatgcgcatggaaaggtcattccagagggaatagtatgcacagaggtgatggatgtccctggaatgtcaaaaaagagcaaacctctggtgtgaacaaaatacaaggtgtgtttgcgtaggaagattaaaggggtgattggaaacacagtttgtggcccacgtcctgaagggttttgtnagtcatactaagaaattggattctaggccataggcaatgagaactatcaatgatttcaaacgagggaatggtgtgatcatgtctatgttcttataacartccttctagaataaatagaaagtttggaccagaggaagaaagaaatgagaggcagagtccaaccagatggttacagcaataatccacgtcaaatgatttaaaatctggaataggatggtagtaattgggaaggctaagctgctaaatttaaggttttccaaacattttgattatgagactcttccttccttatataatttccaaaaattcttcaggactcagtttgggaaatgctggctcaaaatttactcattttgtgg

SEQ ID NO: 647669 - DNA, 593 bp, Homo sapiens
ttacatcccagctatttatttattttttttaattgcatttggttttgggttcttggtcatgaaattcttgcctaagccaatgtctagaatggtttttccaatgttatcttctagaatttttatagtttcaggtcttaggtttaagtccttaatccatcttgagtttatttttgtataaggtgagagatggggatccagttcattctcctacatgtggttagccaattcaccttttgttgaaaagggtgtccactccccattttatgtttttgtttgctttgttgaagattcattggctataagtattagggtttatttctgggttccctattttgttccattgtctgcatgcctacttttataccagtaacatgctgtttcagtgactatggccttatagtatagtttgaaattaggtcgtgtgatgcctccagatttgttcttgwtttggctatgtgggcttttttttggtttcatatgaattttagaattgttttttctaattccatgaagaatggtgatggtattctgatggggattgtgttgaatttatagattgcttttggcagttggttatttttacaatattgatt

SEQ ID NO: 647670 - DNA, 576 bp, Homo sapiens
ggtctggtctctgagtatgagaggctcttccatcttggccatcttggctcttccaatagatgatcgttgactgtgatcttgatattttggctattgagtcaggagattctgattactgtttatttaactcttgtttgtgaaaaatcatttttcttaggcttattatacaggtcctagcctattttggggagctgtgtttccaacagcaaccttagtttcagatgcagtgtaatactattttgatgtgcttgtgttatcktatgcttttgggctcctgttggtctcctagctcttgctggtgctgctcaggaagacagatatcacctccccaggcctgaaagcctgttgtgtctacattgaggaacagagtctccagaatgcagagagaaaaaaaggctgaaggccaggcacttgtggtgaggatgacacccagccttgggtcccctagactggggagggaactttaagcctggctaaggaaagatcttatggctgtccatttatttttagtggggcatacaattgctctcccttgtcaatactgctgtactttcctcatgtcatgggcttgactcc

SEQ ID NO: 647671 - DNA, 576 bp, Homo sapiens
ggtctggtctctgagtatgagaggctcttccatcttggccatcttggctcttccaatagatgatcgttgactgtgatcttgatattttggctattgagtcaggagattctgattactgtttatttaactcttgtttgtgaaaaatcatttttcttaggcttattatacaggtcctagcctattttggggagctgtgtttccaacagcaaccttagtttcagatgcagtgtaatactattttgatgtgcttgtgttatcttatgcttttgggctcctgttggtctcctagctcttgctggtgctgctcaggaagacagatatcacctccccaggcctgaaagcctgttgtgtctacattgaggaacagagtctccagaatgcagagagaaaaaaaggctgaaggccaggcacttgtggtgaggatgacacccagccttgggtcccctagactggggagggaactttaagcctggctaaggaaagatcttatggctgtccatttatttttagtggggcatayaattgctctcccttgtcaatactgctgtactttcctcatgtcatgggcttgactcc

SEQ ID NO: 647672 - DNA, 653 bp, Homo sapiens
ttctgcaaacatatagctcaatttaatcacaaaaaataagaaaacccaaatcaggtattctaacaaatacctaatcaacattcctcaatctatcactgtcttgataaacagggaaagattcagaaaatattgtagaccagaggacactggggaaacatgcaaactaagtgcagtttggcaccctggactggactctggaacagaaaaakgtcattaatgagaaaaacgttaaaacccaaataaagtctggagtttagatagcagtaacttatcaatgctagtttcttagtttttttcaaatgttccatgataatgtaatatattgacaacagaggaaactgagcaaagaatatgcagggattatatacaatctttataactttttaaaaattaaacttattccgaaataaaaaggatatcaaatagctttatgtgcaccaaagaggttttgtttatgtgcattgtatgtattgagaatttttgggggatggacaagacagccaattagaaacagctagtgtgcctggttcttatggagaggaaaaaaaaggtgtgagtaaatacagcacctttaactgaaacatccaggtacttgtcttgggactaatcaaagaaacaacttgacctatggaaaatgaagaaaaataagacag

SEQ ID NO: 647673 - DNA, 653 bp, Homo sapiens
ttctgcaaacatatagctcaatttaatcacaaaaaataagaaaacccaaatcaggtattctaacaaatacctaatcaacattcctcaatctatcactgtcttgataaacagggaaagattcagaaaatattgtagaccagaggacactggggaaacatgcaaactaagtgcagtttggcaccctggactggactctggaacagaaaaaggtcattaatgagaaaaacgttaaaacccaaataaagtctggagtttagatagcagtaacttatcaatgctagtttcttagtttttttcaaatgttccatgataatgtaatatattgacaacagaggaaactgagcaaagaatatgcagggattatatacaatctttataactttttaaaaattaaacttattccgaaataaaaaggatatyaaatagctttatgtgcaccaaagaggttttgtttatgtgcattgtatgtattgagaatttttgggggatggacaagacagccaattagaaacagctagtgtgcctggttcttatggagaggaaaaaaaaggtgtgagtaaatacagcacctttaactgaaacatccaggtacttgtcttgggactaatcaaagaaacaacttgacctatggaaaatgaagaaaaataagacag

SEQ ID NO: 647674 - DNA, 653 bp, Homo sapiens
ttctgcaaacatatagctcaatttaatcacaaaaaataagaaaacccaaatcaggtattctaacaaatacctaatcaacattcctcaatctatcactgtcttgataaacagggaaagattcagaaaatattgtagaccagaggacactggggaaacatgcaaactaagtgcagtttggcaccctggactggactctggaacagaaaaaggtcattaatgagaaaaacgttaaaacccaaataaagtctggagtttagatagcagtaacttatcaatgctagtttcttagtttttttcaaatgttccatgataatgtaatatattgacaacagaggaaactgagcaaagaatatgcagggattatatacaatctttataactttttaaaaattaaacttattccgaaataaaaaggatatcaaatagctttatgtgcaccaaagaggttttgtttatgtgcattgtatgtattgagaatttttgggggatggacaagacagccaaytagaaacagctagtgtgcctggttcttatggagaggaaaaaaaaggtgtgagtaaatacagcacctttaactgaaacatccaggtacttgtcttgggactaatcaaagaaacaacttgacctatggaaaatgaagaaaaataagacag

SEQ ID NO: 647675 - DNA, 513 bp, Homo sapiens
tacaattcagggtgggatttgggtgggaatacagaactaaaccatatcaacactcaatattaaccatcacactggtcttcatstttttctgcagagaataataacacttgctcttgtgccttcagtgaatcagaaagaattttgccttgatcattttacctctctattgtatagaggaagataactcaattggaaattagggagcatacattccaaacttgactatacaaactaattctagaaatttaaaaaagtcccttaccacataattattttcaaaaattgaaagaagatggactatgttatcacaaatacacctttcttgcccatgaatctattcttcattttctctctcccaaagggtaggcagattctcatgatcctgtatttaattcccatggtcacagctttttaaatgtctccttgtcgtgtctcaatttgtgaatttggattgtgatagctctagaacaaattatttttattactatttagactcctacccaagtgccacat

SEQ ID NO: 647676 - DNA, 513 bp, Homo sapiens
ctcccctcctctcctttcctcttctctcctctccttttctttccttctgatggagtctccctctgtcacccaggctggagtccagtggcacaatcttggctcactgcagcttctgtcttccaagttcaagcgattctcctgccttagcctcctgagtagctgggatcacaggtgctyaccaccacgcctggctaatttttgtgtttttagtagagacggggtttcaccatgttggccaagctggtctcaaactcctgacctcaggcaatccacccatcttggcctcccaaagtgctgggattataggagtgagtcactgcgcctggccaggaagtagtttcttttgaatatccctgattggcccatacttttcctcccagaggtttgttgttggtgaaatacaacccttgtgtgcactggtcacaagcccttttcattgtactttgaatggaatcctgcagttgactatgagaatgagcgtggaccatagttctcatttatgatttaagtcaa

SEQ ID NO: 647677 - DNA, 564 bp, Homo sapiens
ctcattgctctagcatgctcctccttcctgaaattattttagaacagtgaagtctagaattatttttgaaggaaatactaggccagaaggaaagtcattagaagacayctcttacatttttagaaaattgttatataaaagaaagctttgaggtggcctgtgtggctttgcagaagaagatattataaaatattcaaagcgactaagggatgtcttcatctgcttggctttccacagaataataccatagactgggtggtttaagtaacagaaatatattttcttacagttctggaggctggaaagtccaagatcagggttccagcaggattcagtttctggtgaggactctcttcctggcttgcagactgctacctgcttgttgtgttctgatacagcagaaagctctggtgtctttttcctttcttttctttttttttttttttttttgacagagtctcgctctgtcaccaggctggagtgcagtggcgtgatctcagctcactgcaacctctgccttcctggttcaagtgattctcctgactcagcctcctgagtagcttg

SEQ ID NO: 647678 - DNA, 564 bp, Homo sapiens
ctcattgctctagcatgctcctccttcctgaaattattttagaacagtgaagtctagaattatttttgaaggaaatactaggccagaaggaaagtcattagaagacacctcttamatttttagaaaattgttatataaaagaaagctttgaggtggcctgtgtggctttgcagaagaagatattataaaatattcaaagcgactaagggatgtcttcatctgcttggctttccacagaataataccatagactgggtggtttaagtaacagaaatatattttcttacagttctggaggctggaaagtccaagatcagggttccagcaggattcagtttctggtgaggactctcttcctggcttgcagactgctacctgcttgttgtgttctgatacagcagaaagctctggtgtctttttcctttcttttctttttttttttttttttttgacagagtctcgctctgtcaccaggctggagtgcagtggcgtgatctcagctcactgcaacctctgccttcctggttcaagtgattctcctgactcagcctcctgagtagcttg

SEQ ID NO: 647679 - DNA, 398 bp, Homo sapiens
aaaatactgggaacttagaaatggttgtttttgagatgacatgtaaactgttgagagagaagccttttcatgcagcagaaggaaacattcaaaaagcagagaaagagggtgccttctaccagtgagcaggagttaggagagggttaggagacagggcagagagaacaaacagcacattaccaacgtgtaccccttcatgcttcactgttgagcattctctgtcccagcatttctttgtgtgtgtttttgttgttggtggtgtttttctgtatcacccttcatggagtaatgtggttcctcaacttgaacataaaccaagtagggaggaaaaggagcagtaaaagacccacccttgtagttgttcaaagtgctytcattttccagagtcaaggaatgac

SEQ ID NO: 647680 - DNA, 619 bp, Homo sapiens
ttccagcactatatgactgacattgatgggagtgggcatccttgccttgttcttggtcttaggaggaaagcattaagcctttcaccgttagaaataatgttaggactgcaggctgtttttagatgtcctttatcaagttgaggaagtcccctaatattcttatwtttctgaatgtcattattatgaatgtgtcaagttttgtcacataccttttctgtattaattaatatatttgtatgatttttcttctttagcttgttaatatggtatattacattgattgatgttttttaatattgagccagtcttgcatttctttatagattttatatacaattgatttttaactttaactttattcttgagtaaattcaaatgtataccacaaagggatcccaccttattccttagctcagtttatttcatgtcagttttttgtttatcttcttaaagttatttgtacatagatgaacaaatatatttatatcaactttgataccaacagtagcaaaagttagtctagctttattgaggatgtacatatgctaaatattgagttactcactttatttaaattatttcaccaaattctgacaacactcctttgaaacagatatta

SEQ ID NO: 647681 - DNA, 619 bp, Homo sapiens
ttccagcactatatgactgacattgatgggagtgggcatccttgccttgttcttggtcttaggaggaaagcattaagcctttcaccgttagaaataatgttaggactgcaggctgtttttagatgtcctttatcaagttgaggaagtcccctaatattcttatttttctgaatgtcattattatgaatgtgtcaagttttgtcacataccttttctgtattaattaatatatttgtatgatttttcttctttagcttgttaatatggtatattacattgattgatgtttttkaatattgagccagtcttgcatttctttatagattttatatacaattgatttttaactttaactttattcttgagtaaattcaaatgtataccacaaagggatcccaccttattccttagctcagtttatttcatgtcagttttttgtttatcttcttaaagttatttgtacatagatgaacaaatatatttatatcaactttgataccaacagtagcaaaagttagtctagctttattgaggatgtacatatgctaaatattgagttactcactttatttaaattatttcaccaaattctgacaacactcctttgaaacagatatta

SEQ ID NO: 647682 - DNA, 507 bp, Homo sapiens
  misc_feature 1, 2, 3, 4, 5, 6, 7, 8, 9, 10, 11, 12, 13, 14: n = A,T,C or G
nnnnnnnnnnnnnntttcagaactaaaagaaacgtgtgctggattttggatgagctggacaatacagaaatatataaagaagtgaaactccctatgacaacctatgaagtgatcattatggataacatttttgagagaagatgtgactgtgtattcttggttgtctgtttattgacatgttgtctgagtgaaaagtgtaatttttaggtagttaaatagatttagcccacataacttcaagtatcayctttgaataaagcttctggctgattgctcgcttttttctctctcgcttttcatcgaaagcttttggtattgtgtagacccaatctttaactttctgcttatagattactgaaatgtccacatccttcaggcacaacactagcaaattcacaagtattggggcttaggaaaggatttgggttgtgaatttctattctgtttgttaaaaaaaaaaatcacgaatcaaagaaggcttaagggtcaacacagctgtctggccag

SEQ ID NO: 647683 - DNA, 540 bp, Homo sapiens
cttgtgggttttaataactaattttaaatcttcaaacaaccttacatttctgaaataaaacacrtttgctcatgatacatgactattttatatttttctaaatagttaatatttaatttaatttttttatttttacaagaaatgctatttcatagtttcctttctatgtttttatctcatttggtatcagggaaacatgggacttataaagtgagtagagaaacatttccaccttctccattttctgtaagagtctgtgtggacatgtataatttatttcttagaattttgatagaattcacatgttgaaaccatttgggcttgaacttgtttaggggaagatttttctttactaaatccgtttcttccattaatgtaagtttaataagactttcatttacctaaaaagttcacaaggattatttgtgtgttgctagaaatttgtgtacttcattgacataatgttattaataataataccatctaatctttttaattgttccaaaatctgtagtgaggaaacctctctcatttctgatt

SEQ ID NO: 647684 - DNA, 616 bp, Homo sapiens
caccaagaagttcaaaacctacttgaagtggcttacaagttttttaaggtagaaccaccaaaattaacataacaagagtctgtttgataataatggatatagatgtatcagaaacataaaacaagttagttagttagcttatgttcccaatattatagtgatgtgatctttttaaattagaaacctattgagarcactgatagctttaaataaaatttttaagcacataaagataattttttcacatggtccaaatcacttctgaggattattttatgtggcagatatttttacatagatatttgaacagttgtccagagtagataatagattattggagaaaaatgaatcaagtttcaaaattttattatgtcccatgtcccattcctctacctaccatacactgtccaatacacacacacacacacgtgcatgtacacacatacatcatggttgaaatatacttcttaattttcatgtctagcttttaatagctttaaaaagagaatatactttgcaaaattataatttaaaaatcaaaggatagcctgcaaagctttcagaaagtaaatatgagagaaatatctggctcctgtacttagctaagttgccaaat

SEQ ID NO: 647685 - DNA, 430 bp, Homo sapiens
tctttttctcaaattgggccagaaagactgatcagaccaaatcttcaaactgaattccaggaactacaaagtcttcagctcatcacacccactctgcttccccagaagtagagcctgaactgtgagtcagggctagcaaggatgagaacaggtaacccatatgctaagtatgggtgatttttctgatcacagaggagagctacaaaattttggaatttagccagtttccgcaaccacaatgattagaaaagagagaccatcactaccaaaatcaacagtcccctgcatttatgttgtgtcctttagacttgtggcggggcacaagtaggaagctttgaaaatgcayatcctctgtcttgggtctaagctggagaaatttagcaacagtatctacacttacaggtgaaaattttcagagtggttgacaatt

SEQ ID NO: 647686 - DNA, 556 bp, Homo sapiens
tgtctgtttttatgccatcaccatgctgtttgattactatagctttgtaatatattttgaaatcctgtagtcactcactgatattttgtgcatccaccaatgagatggctgtcatcattccttaccaccctracataagtccagcttacatgaaccttgcccaggcctctgagttttcagctatttcttaaatgcaggcagatggtcaaagatcacaagacaattgataaaagtctttgataaaagaaaatgaaaaaaaaaaaaacccacagagataatatagggaaaagaaaaaacttccaaagtaactaccacctcaattctaataaatattctcagaggactataataaagtattgcatctataaaacaagagcaagataccacaatgagcttgtggaaataaaaataatagctaaattttaaaaatggaagacaaaatcaaggaaatataaggcagaaaaaaagataaagagttgaaaaatatgagaatgatgaggagagacatgaagaataaagcctagaaattccacatctgaataataagtttccagac

SEQ ID NO: 647687 - DNA, 507 bp, Homo sapiens
ttgggggaggaggcctgggcattagtatttcctaaagattccccagatgattctaagaaggagccagggccgaaaaccactattttagagaataaatgatccttagctttgccacacccaacctcatctcctgctgaattctcccaggagctacctgcaaccatcacacaattcagttttcagacctctcatcattctagtcactgtccacttcatgtagtccatcaggttaatgcacttcggaaatgtgacttcctatactgaactggactgtctaggacaagaygatcacctcctttactcatggtattatacctctattaatatgaccacaaatcaaatgagctctttctgtctataccccactcttaacttacttaaggccaaccagcctcttcccttcaatagctccttctccattttcctactctgtttacaccaacataagaaagcctcctcaagtaggttgtaaggttaattccacaaacacatgcaattccaggaaaa

SEQ ID NO: 647688 - DNA, 539 bp, Homo sapiens
tctagttgtctaatgcattttaagctattaatttgagattttttttccttacttgcctgagttcagtagatgagataaataaaaaagaatactccaaacatttttattttattttagtacactaaaaacatgagacttcttgcatcagaaaacatacctcattccttggctgtcagagcttctgcacactgtggaaccagggactggcctaccaggcacatatcaccaccagcaatgctgtcwccatgaccagtggaaccactgtatgtgatgtgcaattccagggttgagaaccagcctgtcaggcagccccaacccccagaaaatccacatcactgcttccactaacaactgtagtctaggccactgaggcactcacagataccaatgacattgactatagcaaaaaaaaaaaaaaaatttggagactacactcctgcactcacccagattaaagccaaagtaccctacccaactgatgctataggacatacttacagaaaagagtctttccctacaaaagccactccataaaactg

SEQ ID NO: 647689 - DNA, 540 bp, Homo sapiens
ttactattgaaacaaatcttttggaaaaaaacactgcaacccattacaggtgcctaagactagaaagatgggtcagagctgctactgccagtgtgagaaagtggacaagttggagttcacctgggaataagatccttggatggaggagcaaactccagctagaggaccgaagccttgaaatcatttattctgcagatcagtgtttctcaaaacggggttcccctagccatcagcattagcgtcagctgagaaacatgtaaggcatgtaaattcttatgctccaacctaagcctactgaattggaaactctgggctggggtagtttcttattttaataagccttcctggtgactctgmtgcacactaaagtttgagacccattcctctaaattctgccgtctctcctcactgcatcacttttcagtggggctgcccttggacactggcagatattttgggttaaagaagaaagttatttggtcaaaatgagtgtgggcagcattgtattggtctatgttgaacaggttccttgactgaagg

SEQ ID NO: 647690 - DNA, 543 bp, Homo sapiens
ggggttgtacaatgtggcaagcactttttaagctattcgggtgcattatctcatttaatttttataataaccttatgaactaagtattatttttgttatcatttttatagatgaataaactgagggacaaagaggtgaagcaatttgcccaaggtcttatcctgattagtgatggatttaggactggaatcagaggttaggattgaaatctcagagccttgctcctactaaatattttctgycatgtctttgcaataaatgagggaatagaagaattaaattattttcaggataggacattcgtgttgttcaatttcttattatccagaccaacagaggggaggtgttttagttcatttgagctgctgtaacaaaaatacctagactgtgtggttgacacaaaaacactttttacagttctgaaaactgggcaatccaagatcaaggtgctaactgatgccatgcctggtgatggcctgctttctggttcatagatggcagtcctctgactgtgtcctcacctggcagaagaaacaagagggc

SEQ ID NO: 647691 - DNA, 543 bp, Homo sapiens
ggggttgtacaatgtggcaagcactttttaagctattcgggtgcattatctcatttaatttttataataaccttatgaactaagtattatttttgttatcatttttatagatgaataaactgagggacaaagaggtgaagcaatttgcccaaggtcttatcctgattagtgatggatttaggactggaatcagaggttaggattgaaatctcagagccttgctcctactaaatattttctgtcatgtctttgcaataaatgagggaatagaagaattaaattattttcaggataggacattcgtgttgttcaatttcttattatccagaccaacagaggggaggtgttttagttcatttgagctgctgtaacaaaaatacctagactgtgtggttgacacaaaaacactttttacagttctgaaaactgggcaatccaagatcaaggtgctractgatgccatgcctggtgatggcctgctttctggttcatagatggcagtcctctgactgtgtcctcacctggcagaagaaacaagagggc

SEQ ID NO: 647692 - DNA, 457 bp, Homo sapiens
aatctaacctctctctcttgaaactcacttcccagaaatcagatgctttgccatttactgtacaaggtaacaaagtttctctaggaacaagacactcaccgtaaacctccggcctattttcccaggggcctaaaaatactggccctgaaacttgtttctactttataatgtgggctgctatccattaggtcaactctgccattttgccaacatgctgaaatggccgtcttscacgcatggctggatctcctacacgccaaataccatcatctacttattgcctgtttccatattcccctaacattcaacctgcctgtccacatttcttcctcagacccactatcaggaacttctgagtcacctgaagtgttccaccaggtctaatcagaaactaaattaatccaccctttctagtatagcctacccaaactgaactctaggacaaatacctagaata

SEQ ID NO: 647693 - DNA, 552 bp, Homo sapiens
attaatttacaagcacattaagaaatagttccacagtttagactagcagttacaaagaaatctttaaatggaaactcctttatttagggtgtggccataggaacaaatgcattatttttttaaaataaaaaagtatactttatgtaaccagttaattggcaayccactctctagaaatgggcctgacaagctcaacgtggaggatgtatcaagtaatgtgttccgttggcaaaattataggttcatttaccaaaggttaacaactatattacaatgccaaaagttttgtttcaattaaaatagttgaatattattaattccataagttgtccacaagtaaaaatgatgtttaactgccagtgttgcctttactgaaaggaagataactctcaaagataattctcaaattttggtgcctgacactggttaaaattggcacgaagattttgacataaatattttttaccttttctggcttgtttctaatcctgatttgtcatttttcttagtggcttatcatttaatatttgtcagagttcagtgggtgttatt

SEQ ID NO: 647694 - DNA, 594 bp, Homo sapiens
cggcatccttgctctgggtagcaaagtctcagctcaaaatttctctgcaatggcaaagcttccccattttgctcccttctctgcatttttggcatgtggaataaaacccggccatacccatgagacacatgcccagcagtcctgtccctcttcagkgcttgtagtatcttaagcataccctcctgatgaaacaccatagttacagctttttaccttaaatcattatctgatgtatcctactcaccaaactcagaagatagttttgcttctgaaaaatattatattttgcattgcttttaattaaggctggcatagagattgccaaaaactgttgctctcaccctgctctgtggcacttaacaaataattggatgtgtaaattgcttcaatgctgatattctctttcctgtgaaccacaaatgattatcaaatgtgttgaggatactaatgaagaatgaatttttccttctcttcatggaaaatcgcattaggtgtaattggataaaaccaaggataaacaatcaatcattcctcatttgggatcaggttgacactgagatcattagacactgaacagggcatcacttctgcctc

SEQ ID NO: 647695 - DNA, 594 bp, Homo sapiens
cggcatccttgctctgggtagcaaagtctcagctcaaaatttctctgcaatggcaaagcttccccattttgctcccttctctgcatttttggcatgtggaataaaacccggccatacccatgagacacatgcccagcagtcctgtccctcttcagtgcttgtagtatcttaagcataccctcctgatgaaacaccatagttacagctttttaccttaaatcattatctgatgtatcctactcaccaaactcagaagatagttttgcttctgaaaaatattatattttgcattgyttttaattaaggctggcatagagattgccaaaaactgttgctctcaccctgctctgtggcacttaacaaataattggatgtgtaaattgcttcaatgctgatattctctttcctgtgaaccacaaatgattatcaaatgtgttgaggatactaatgaagaatgaatttttccttctcttcatggaaaatcgcattaggtgtaattggataaaaccaaggataaacaatcaatcattcctcatttgggatcaggttgacactgagatcattagacactgaacagggcatcacttctgcctc

SEQ ID NO: 647696 - DNA, 594 bp, Homo sapiens
cggcatccttgctctgggtagcaaagtctcagctcaaaatttctctgcaatggcaaagcttccccattttgctcccttctctgcatttttggcatgtggaataaaacccggccatacccatgagacacatgcccagcagtcctgtccctcttcagtgcttgtagtatcttaagcataccctcctgatgaaacaccatagttacagctttttaccttaaatcattatctgatgtatcctactcaccaaactcagaagatagttttgcttctgaaaaatattatattttgcattgcttttaattaaggctggcatagagattgccamaaactgttgctctcaccctgctctgtggcacttaacaaataattggatgtgtaaattgcttcaatgctgatattctctttcctgtgaaccacaaatgattatcaaatgtgttgaggatactaatgaagaatgaatttttccttctcttcatggaaaatcgcattaggtgtaattggataaaaccaaggataaacaatcaatcattcctcatttgggatcaggttgacactgagatcattagacactgaacagggcatcacttctgcctc

SEQ ID NO: 647697 - DNA, 581 bp, Homo sapiens
tactctttccttaattctgtacttcagttaattacaataaataatttttaatctgagaatgatgttggggattgataggaggtagtcctttttatataaaactttaggttatagagtaaccctaggttgtttmatgattctcatgttgcaggaagtgtgtcattatatttggcttgtttttattttcagccagaaataattttcttctcactttatcaaaagactgatgctgtgtgagtagaagtttttaaaaaactacatgataactgaaagcacgttgtaatgtggccaaatcactcagggtttctgtgtctagatctatttttcatttgttttgtgtgtgatgcaaaaagaaattaatgagatgttgattgaaatttggtcctttgactctagtatctatacagataaattaatttttataaagaaattatatacagcttattattcattaagatacaaaaattgcgcatattcaatttacagccaatttatatttttatttgccattttgttttaagatttatgctaaattctcctgaattttgttatttgaaactttcacaactaatacatgaagt

SEQ ID NO: 647698 - DNA, 581 bp, Homo sapiens
tactctttccttaattctgtacttcagttaattacaataaataatttttaatctgagaatgatgttggggattgataggaggtagtcctttttatataaaactttaggttatagagtaaccctaggttgtttcawgattctcatgttgcaggaagtgtgtcattatatttggcttgtttttattttcagccagaaataattttcttctcactttatcaaaagactgatgctgtgtgagtagaagtttttaaaaaactacatgataactgaaagcacgttgtaatgtggccaaatcactcagggtttctgtgtctagatctatttttcatttgttttgtgtgtgatgcaaaaagaaattaatgagatgttgattgaaatttggtcctttgactctagtatctatacagataaattaatttttataaagaaattatatacagcttattattcattaagatacaaaaattgcgcatattcaatttacagccaatttatatttttatttgccattttgttttaagatttatgctaaattctcctgaattttgttatttgaaactttcacaactaatacatgaagt

SEQ ID NO: 647699 - DNA, 581 bp, Homo sapiens
tactctttccttaattctgtacttcagttaattacaataaataatttttaatctgagaatgatgttggggattgataggaggtagtcctttttatataaaactttaggttatagagtaaccctaggttgtttcatgattctcatgttgcaggaagtgtgtcattatatttggcttgtttttattttcagccagaaataattttcttctcactttatcaaaagactgatgctgtgtgagtagaagtttttaaaaaactacatgataactgaaagcacgttgtaatgtggccaaatcactcagggtttctgtgtctagatctatttttcatttgttttgtgtgtgatgcaaaaagaaattaatgagatgttgattgaaatttggtcctttgactctagtatctatacagataaattaatttttataaagaaattatatacagcttattattcattaagatayaaaaattgcgcatattcaatttacagccaatttatatttttatttgccattttgttttaagatttatgctaaattctcctgaattttgttatttgaaactttcacaactaatacatgaagt

SEQ ID NO: 647700 - DNA, 624 bp, Homo sapiens
catattattatgaagttactgaggataagagtacatttctagtaagtaactaaattgggatttcaactgggtgaattcacttttagtttgtcttcttcctgtaataatttgttgtttcttttaaataatatcactgaaaatattctcccactgcaaggagtgtagtaatcagtgaactatccagagacgggattgggttatgcagttgatactctagacttctctctctctcttttattttccctcatcagactgcatcccttggtctcttatatgggacttcttcctcttaccatttaatcagattttctcaactagagtggttttctacatccacaaaagacaagaacaattttaatctaatcattcacagtcatgagttttcatagtattacagaatagaaaaatatctagttataattcgacaatattattgtcaccacattttatatttatgggagtatttkgataaacatatgcaagtgactatgtttggggctcaaaaatatgtgcaaggatacagcaaatgcaactaataggtgcatagcagaattcagtaatcaatgatagcaccctcattattattaaccttgtggtggtatcaagtagtaactagtaattgaa

SEQ ID NO: 647701 - DNA, 536 bp, Homo sapiens
attccactgaacattcatagctagtcggattctctgtatttcaytgttgttgtcctccaaactgagattttctccatacctccataccctccttagactcagcagtgaagcttccttctacacactgaacaagatcttacatgaattcctataacttccttacttcttactccaaatagctatgaactgtttcatttgttactctcttttattattttctccaaaatattataatctctcatctacttcactaagccagttaacacaaccttcctgaatctattctttctcactacctccagaatcatacttcaactgtgattttgtgttctgtcattctgctagtttctaatcctccacctacaaacatgcatgggtctcttctaacctgatctcactcccctaattcctcaaactattttcacttcttccctatgtctttcactaaaaaatttcttgaaaaaagagtctatgtccctggacaactttgccatccactcagacatcatacctcatgcacacgatcctctgccatc

SEQ ID NO: 647702 - DNA, 594 bp, Homo sapiens
aactctcaccaaaatttttatgattattttatttttattctatctatgactttttactgcttccaagaygatatatgtctcttaggtgtgaaataatttcaatttttaattacatattcttttttatattaataggaaatgcaacaaaaaagatgaggatttttggacaacatatttctagattacccaaaaaaaactttaagtgctggttcacaaaaatccattgatataaattttaaatgttaattattcacttttttaaaaaaataattatctcccaacacttttctgttatggaaaactacttaagacccacataatttttcttggcttagaaacgtaaagtaaataaaataagaataataagcaatcttctgtgaaagcttattaggattctgcagaatagtttgccaaagggaaggaagtctttgtaaaatggcttttcttctaatattttaaggtaatataaagttattacttcttaattgaggacagaaatttcatttcaacttgcacaacttccaattccaatattactatcctaatatttaattattgtattgttattatcattattactgtaattatttctcg

SEQ ID NO: 647703 - DNA, 594 bp, Homo sapiens
aactctcaccaaaatttttatgattattttatttttattctatctatgactttttactgcttccaagatgatatatgtctcttaggtgtgaaataatttcaatttttaattacatattcttttttrtattaataggaaatgcaacaaaaaagatgaggatttttggacaacatatttctagattacccaaaaaaaactttaagtgctggttcacaaaaatccattgatataaattttaaatgttaattattcacttttttaaaaaaataattatctcccaacacttttctgttatggaaaactacttaagacccacataatttttcttggcttagaaacgtaaagtaaataaaataagaataataagcaatcttctgtgaaagcttattaggattctgcagaatagtttgccaaagggaaggaagtctttgtaaaatggcttttcttctaatattttaaggtaatataaagttattacttcttaattgaggacagaaatttcatttcaacttgcacaacttccaattccaatattactatcctaatatttaattattgtattgttattatcattattactgtaattatttctcg

SEQ ID NO: 647704 - DNA, 238 bp, Homo sapiens
tttttgttggaagattttaaactgcaaattcaatttctttactaggtataagacaattcaagttatctgtytcttcttgagtgcattttggttgtttgtgtctttcaaagaatttgcccgttttatctacttcattgaattatggttagtttgtagtattctcttctaatttctatagggtatttagtgctagctcttcttcctgatattggtaattagtgccctctctctatttctc

SEQ ID NO: 647705 - DNA, 573 bp, Homo sapiens
ggctacaggaggtctttagaaaatatactcccctgtcacctgactcactcaagggtcaattaatcctaagagagaagtttattacctaatcagctgcagatatcaggagaaagctccaaaagcgagccctgggccctgaacaaaatgtggaggcattattaaacctcacaaacttggtgttctataatatggaccaagaggaacaggctgaaaagaaaaastgagatcagagaaaggctgcagccttagttatggccctcagacaaacaaaccttgttggttcagagaggacggaatatggagcagaccaatcacctgggagggcttgttatcagtgtggtttgcaaggacaccttaaaaaaagattgtccaacagaaacaagctgccccctcacccatgtccactatgctgatgcaatcactggaagtcacactgccccagaggacaaaggttctctgggccagaagccgccaaccagatgatccaacaacaagactgagggtgtctggggcaagcaccagctcatgtcatcaccctcactgagccctggataagtttaaccattgagggcc

SEQ ID NO: 647706 - DNA, 573 bp, Homo sapiens
ggctacaggaggtctttagaaaatatactcccctgtcacctgactcactcaagggtcaattaatcctaagagagaagtttattacctaatcagctgcagatatcaggagaaagctccaaaagcgagccctgggccctgaacaaaatgtggaggcattattaaacctcacaaacttggtgttctataatatggaccaagaggaacaggctgaaaagaaaaagtgagatcagagaaaggctgcagccttagttatggccctcagacaaacaaaccttgttggttcagagaggacrgaatatggagcagaccaatcacctgggagggcttgttatcagtgtggtttgcaaggacaccttaaaaaaagattgtccaacagaaacaagctgccccctcacccatgtccactatgctgatgcaatcactggaagtcacactgccccagaggacaaaggttctctgggccagaagccgccaaccagatgatccaacaacaagactgagggtgtctggggcaagcaccagctcatgtcatcaccctcactgagccctggataagtttaaccattgagggcc

SEQ ID NO: 647707 - DNA, 591 bp, Homo sapiens
agttctttttagcaacgtgacaacagtctaattcaggatcctttgtcatcaagcaaaattctcttcttactgcatttgttgggtactactgctggaaaatttggtctcttagtgttgttgcaaggcacttccatccaactgtatcccacccagtgtactgtatcctacatgataggatgaggacccttataaaagaaaccctggagagctgtcttgcttcttccacaatgtgaggacacattgagatgatgctgttctatgagccaggaagtgggccctcactaagcactgaatctgctgttgccttgatcttggatttcctagcttctagaactgtgaaataaatttatgttctttataagttatccagtttttgaaattttgttatagaagtctgaatggactaagacaacactggttgcatggaagagttaaggggtgctggaaactcaatttaattcatcccattttactctaacagtgtttatttccacaatcctgtcagaytcagtttaaaaatacttaacttcttaaggaaactctctgcctttcaaaaattgtatgaattaatatcatcttgatttaccttga

SEQ ID NO: 647708 - DNA, 558 bp, Homo sapiens
ttagtagccttgtagaaatttgagataaactgacaagaaccctggccttcattgacaagagctttagctgcattgtaagccactggttcaagctcatgcatttggaacttctcttgattgtatctacatctcttaggaaagaagtgaggaatagaaaaatacaaatgtttgagactaataaagaagtatgtaagatatgaaaattcatctaataactgagaaatcagaattgcaaaagatttttcatgagagttgagtcatttcctctaatttttagaattaggtttctttttttaaagctatagatcttgtaatacctgttctctatgaaattagagcatgaatatccaccaactattcattaaacaaatatgtattgatagtctgatattttgttggccttggacttaatcaaaaggcaagtaagagtggcatgatcagatcttgtgtcccaaagcaactgagaataaacttcaaaataaaatttgattttaaaaatactaaatttttgtttattgcttcttcactaygtaacgttgtgcgtttaataagcactgt

SEQ ID NO: 647709 - DNA, 618 bp, Homo sapiens
tggccggcattactgttaaaatagagatcgtaagacaggcagaacagacgctttgtggcaacagggtgccaaattataaacagggcccaaggccattccaggcaagggttaagtcacacatccgtaaacttaaagaatcaactacattttaactgccaggaggttactctttttctctagcagctaaacaagcactggccctgaaataagcaatatggaagcaattgcagctcagccacctccaaacactgactaagccctgctgctccaccagccataactatagctttaattggacaaaacactgatttcagtaactttctcyggtaagacgaccaccaactgtggactggatctgggcagtttacagtgggtgcacacttgcctgccttactgtcctgaaaagaccttttgacgtatagggcctaattgtaatacatttaaatgttaagtctccaccccaaactgaacatgggtcatatgttacacgcatgtttattcaatatacatgtgtcaggaccaccctcatgaatatttgtagttcttcctgtaacctgttgaatatgtatgtttagccagcctgttcagcataaagctcccaccccaaccctttctcct

SEQ ID NO: 647710 - DNA, 618 bp, Homo sapiens
tggccggcattactgttaaaatagagatcgtaagacaggcagaacagacgctttgtggcaacagggtgccaaattataaacagggcccaaggccattccaggcaagggttaagtcacacatccgtaaacttaaagaatcaactacattttaactgccaggaggttactctttttctctagcagctaaacaagcactggccctgaaataagcaatatggaagcaattgcagctcagccacctccaaacactgactaagccctgctgctccaccagccataactatagctttaattggacaaaacactgatttcagtaactttctccggtaagacgaccaccaactgtggactggatctgggcagtttacagtgggtgcacacttgcctgccttactgtcctgaaaagaccttttgacgtatagggcctaattgtaatacatttaaatgttaagtctccaccccaaactgaacatgggtcatatgttacacgcatgtttattcaatatacatgtgtcaggaccaccctcatgaatatttgtagttcttcctgtaacctgttgaatatgtatgtttagccagyctgttcagcataaagctcccaccccaaccctttctcct

SEQ ID NO: 647711 - DNA, 549 bp, Homo sapiens
aagtataaaacattgatgaaaaaaattgaagaggacacaaaaaatggaaagatatttcacattcatgaattggaataatcaatattattaaaatgtccatactaccgaaagcaatctatagattcaatgcaattcctatcaaaataccaatggcattcgtcacagaaatagaaaaggtcatcatgaaacttatatggaaccacagaagacccagaagagtcaaatctatctttagcaaaaagaataagactggaataatcacattacctgacttcaaattatattagagagctatagtaacaaaaccagcatggtactggcataaaaacagacatgtagaccaatggaacagaatggagaacctagaaacaaatccgtacatctacagtgaagtctttggacaatggtscccaaggatatacactgggtaggagacagtctcttcaataaatggtgcagggaaaactggctatccatatgcagaagaaaaactagatccctatctcttgccatataaaaaataaaataaatatggtttaaagacttaca

SEQ ID NO: 647712 - DNA, 539 bp, Homo sapiens
tcctccattccagtctttagtccctggcttgatagcccatcccaaccatattaacttccatagagggggccagcccacgttttctttctaggtttttcttaaagttaactttaaggcttccttatgtgacccatgtactttccactggtctttttctctcccttccagggtctcttttatcagtcccttgactygagtatgagttcaccccctttcagctgtttgtatggctctcttggtggtcaggagcacttgatagggaccttcccagctgggttggagcttgttttctttccaagtcttaatcagcaccaagtcaccgggctggaagtggtgagcttcaaactcaagaggtggggtttgagtcagaagtccttttaactaagggatgacaaggtagaggatatggccagtgtaatttctcgaaaattggtccttggtttccgtagtaggaagatctgtagtactgcccaaatatgggagtccatataataactcaaagggggacagcctcaagtttttttcttggggctgtccta

SEQ ID NO: 647713 - DNA, 539 bp, Homo sapiens
tcctccattccagtctttagtccctggcttgatagcccatcccaaccatattaacttccatagagggggccagcccacgttttctttctaggtttttcttaaagttaactttaaggcttccttatgtgacccatgtactttccactggtctttttctctcccttccagggtctcttttatcagtcccttgactcgagtatgagttcaccccctttcagctgtttgtatggctstcttggtggtcaggagcacttgatagggaccttcccagctgggttggagcttgttttctttccaagtcttaatcagcaccaagtcaccgggctggaagtggtgagcttcaaactcaagaggtggggtttgagtcagaagtccttttaactaagggatgacaaggtagaggatatggccagtgtaatttctcgaaaattggtccttggtttccgtagtaggaagatctgtagtactgcccaaatatgggagtccatataataactcaaagggggacagcctcaagtttttttcttggggctgtccta

SEQ ID NO: 647714 - DNA, 638 bp, Homo sapiens
gtcttctttattctggaggatccctgaggaactcatgtaaaaaggtagttttaaaagtagggaaaatggaaacaaactgataattatgtatgttatttgaagtttctgaataacatgtgatttaaaaaattagatctgaaaaattctctacaaaatattttctgcttttatatattaatttattaagttattgattcaagcatttattcaacaaatgtgcagatggtatgcagttctcttctcagggcaacactgtttcagactcacaatccctgggcacccaaactcatcacaaaacatcttacagagtcatatgtgaataaatagataagttattcacagattgcatacacatacatttagaaattctgatgcaaaaattttgtaaataattaacatcttagtgtcaacatttacatattctgtaaagataaataattatttccatatataactttggctctaaaattttcaaaaggaaatctcartaccatgggttttaatctttttcaacatgtttcttgtaagaatttaagcttgatcacatttaccaatgtgtctatctctgctgctgctgacagggtagatcgtgttgagactgtgatttacaggattttattaagctgttcaaggttctc

SEQ ID NO: 647715 - DNA, 409 bp, Homo sapiens
tgaattcttacatcaacagttcaaggaaattgcatacattagaatggtcctttctcctgaaaactcatggtatatttactataaagaaaataatgtcatcattcgaactattgctaaattttttacaagattacaagtacattataattaacaaaaaatttgaraaatcctttataaaaatataaaatttttttaaaaatgtacaggttgcattagtaattaacatttatggataattacttgaaacataatttatatttgacaaatcatggtgctgtaactcagagacacacatttttgggaaggaaaacaaaacataagaaaatatcataaatatcatctggaatgcagagccccctcagctccgccactagctaataatacctgctttccttaagtacctctcaga

SEQ ID NO: 647716 - DNA, 547 bp, Homo sapiens
tcttgtgactggcagtgaggtaacagatttcagtaaggagccttccctggaagcagacatgagatcttaaggacctcagaattaactaagaacctctaagaatgacacctaagcttctgcctaccaactatgttattgaaaagatacaaaatagtacaattttaattaaagacaaaataaatttygtttcgaattttatcaagtaatttcaagacactccttgataactggagacactcttactaattcaaatactagggtttaaacatgctataccttgcattccacaaataaatatgtgaatggtcctttaccccaatgacttatcctctttatataaatacacacacatattattaagacctctccagtgcacagatgaatagactaaaattcatatcaaaccataccaatagtcagttgttcaaaccttccatcagaacagctttgatcagaaatgcatgcctaatcctagtattttaataaacaacagtgcagtgagtcacagataaccctacagaagcacaagaattaaactggataaatt

SEQ ID NO: 647717 - DNA, 460 bp, Homo sapiens
tccgtggtttcttaatcaatcattccctgtagtgtgtgagtatagggctgggggctcagagggaagcagggagaagtgaagtgctaaagtgctacctccagagccactgacagttctgcccartgcaatcaggcaaaacaagaaaaataaaataaaaggattcatattgggaaggaagaaggaaaaccatctttacttgcaaggttaaaagctttatacataattacacctcaataaagttgacttttaaaaagccacaaaaagataatgtacttcaattaaaataaaatacagaaactctaggataaagataatatcaagttattaatgcaagtttaaacattaaaaaatagttgctacccacccatcatagacatgagcagcaagctcattaaggattactgtgagcattcattggaataatggaagactcaaggttccaaaggcactgagaccctat

SEQ ID NO: 647718 - DNA, 503 bp, Homo sapiens
tctaaactttccccccctaagtagaatttcctcttcttacattcaagcacatcaaataatctgtcagtttctttctttctttctttcttccttcctggatatcatctttctggaacggttgatccaggctgcttcccgccccaggtgccctgaagtcacacggtgatttcccttcatgttacctttgtttttctccttttgggawcttctgcgtcttgtattcaatgattttatacttaaaaaaataattcagtcccttgtactgggagcatcttctcaagtatattttaagatcaatttttcaggcaaatatttttctgagagtgaaaatctcacactgaaaccaataatctatctgaatatagaattacaaattagcaataatttgaaaaaaatttgaggcatttttcttattcctgactcaatcctagttgtccatcctttatgttaattttgttttctttgtgcatgccttaacgttccttatcatcattgctctgaaa

SEQ ID NO: 647719 - DNA, 503 bp, Homo sapiens
tctaaactttccccccctaagtagaatttcctcttcttacattcaagcacatcaaataatctgtcagtttctttctttctttctttcttccttcctggatatcatctttctggaacggttgatccaggctgcttcccgccccaggtgccctgaagtcacacggtgatttcccttcatgttacctttgtttttctccttttgggaacttctgcgtcttgtattcaatgattttatacttaaaaaaataattcagtcccttgtactgggagcatcttctcaagtatattttaagatcaatttttcaggcaaatatttttctgagagtgaaaatctcacactgaaaccartaatctatctgaatatagaattacaaattagcaataatttgaaaaaaatttgaggcatttttcttattcctgactcaatcctagttgtccatcctttatgttaattttgttttctttgtgcatgccttaacgttccttatcatcattgctctgaaa

SEQ ID NO: 647720 - DNA, 559 bp, Homo sapiens
gggtacaatttcattctttcacatgatacatacagtcttcttaataaatttaaaaggccatataccatgatgaagtaggatttatccctgggatgtcaaggatggttctaacatatgcaaagcaattaaagtaatacaggacatttaaaaaggattcaaaatacatgatcatcccaaaagatgtagaaaacgcatttaacaaaattaaaatcctttcatgaaaaaaaagaaccctcaacaaactaggtgtagaaggaatttaccttaacwtaataaaggctgtatattaaaagctcacagtgatgtcagactcaatggtaaattaacaaaagcttttcctgtaagatcagcaaggcaaggatgctcactctcaacatagcactgaaagtatttctaggcaacattgtacaggaagtcgtagccaggccagaaaaagaaataaaagtcatccaaatcagacaggaagaaataaaattacctctttacagatggcatgatcttatgtgtagaaagccatgaagactccacaaaaacctattagaactaataaatgaattca

SEQ ID NO: 647721 - DNA, 559 bp, Homo sapiens
gggtacaatttcattctttcacatgatacatacagtcttcttaataaatttaaaaggccatataccatgatgaagtaggatttatccctgggatgtcaaggatggttctaacatatgcaaagcaattaaagtaatacaggacatttaaaaaggattcaaaatacatgatcatcccaaaagatgtagaaaacgcatttaacaaaattaaaatcctttcatgaaaaaaaagaaccctcaacaaactaggtgtagaaggaatttaccttaacttaataaaggctgtatattaaaagctcacagtgatgtcagactcaatggtaaawtaacaaaagcttttcctgtaagatcagcaaggcaaggatgctcactctcaacatagcactgaaagtatttctaggcaacattgtacaggaagtcgtagccaggccagaaaaagaaataaaagtcatccaaatcagacaggaagaaataaaattacctctttacagatggcatgatcttatgtgtagaaagccatgaagactccacaaaaacctattagaactaataaatgaattca

SEQ ID NO: 647722 - DNA, 623 bp, Homo sapiens
aggtgtaggcaaggccaaaggaagcaaagtcaggtcttggattctaattgccacatggtagttccacagtttttaattggctgatcgctagatggctgtcrgtatcttcatctgtaaaaatggaagtggcaaatgcattctatgggtgtgaagaggcgatacaatttgttgcagcataaacaagaattatgtaaataatgcatttgaataggtgcacatccagacaatgaaaggcagctctggcgagtcctgtaaaaatgtcctgattgcttttccaactgtgagaacttttagcatctaaagttcaggaggataatgaactagactgctcacagctgggatgtgtgcatgtgcctattgttatgactatacacaatgctgagagctctgtgagttttggttcagacagataatttaaatcacaccattatggtttcctttcaacttgaccataaacttcttccagcccttcatggggctgctgctttcgctgtctacacccagtctttcactccagtccactctcaggcaatggctgaataacttatcagttttataagagcaagatccttcatttcattttttcacttaatttttatttcacttttagaatcaaagatact

SEQ ID NO: 647723 - DNA, 600 bp, Homo sapiens
tgattatctctaaacaaaaccttaaataaaacacttgagtaaatgggcagaagatacagagaataaaatattcagaaggatttcctaatgtttggaaaactgtgtggcaggctagagtagaaataatttcattccccatcttaggcctgtcgttttggttcctctctgatgcaagtgattgaaaatcctgctcaaaactatgtaaatctaaaaggagatgtagtggctgagaagtggtgggcttaatcaagctttagttttgcagaagctacatgcagggctctgatgatgcccacaaaattcacttcccctcctttcttgtggtttcattctgacagcagcttggtttcatgatagccagatggctacagccctctagatttcccaccctgtatctyacgtctaaggaaaaacctcccttataaacggtataatgaaaattccaaacctgatttgccttacccataattagcttcctttcccactcctgaggcaattactgtggtcagctgggtatgggatagttgtttcattacaaaagtcagtcagggcctacccttcccccaattgaaaatagggtcaaactcaggcaaattgcct

SEQ ID NO: 647724 - DNA, 586 bp, Homo sapiens
ctataaactgaaaagcatcttgagactggcctgtatagatctgaagccctgcaggaagtgtgttttaaggtcagcctttgtcttcatactataagggtggcaagaatacayttctcttcaccaccactttgaagctgatccttttccatttttttctcacgtaaatactctcagggccttttaagagagcataataggcatgtatctgtggttttcggcaggacaagagtgcagtcaactattggtttcttattttgttcctggtacaaatagtctgcaagctaaacataatctcatcatacaattcagcatttgtgcttgtaggtatttatctaactgatttgaaaacttatgtccacacaaaaaccttcatgtgaatgtttataacagctttattataatctctaagaactggaagcaaccaagatgtccttcaataagtgaatgaataaacaaactgtaattagatccatacagttattcaatgatttttttttaaaaaatgagtgatcaagccatgaaaagacatagcaaagccttaaatgcatattggtaggtgaaagaagtcaatctgaaaaggctgtat

SEQ ID NO: 647725 - DNA, 439 bp, Homo sapiens
agaattcttccagatcttatccaagaccactgacatggtaactctttgagtttgctagtgtcacagtgttatyaggtttgagatgacccccaatgaagatgtgaccaaagctttagatcacagcagtcaactctcttttgatacctggaaggccttcctaagaaggatgggtgcaaataagcccagactgaagactataaaaaatacctaagtcttcaatgcccagacatcaacagacattcacaagcatcaatattgtccatgaaaccatgaccttatcaaatcaatattgtctatgaaaccatgacctcatcaaatgaactaaggaaccactgacaatcccagagtgacagagatgtgtgacctacagacagagaatttaaaatagctgttttgacaaagctcaacaaaattcaagataacacagagaaggaattaa

SEQ ID NO: 647726 - DNA, 575 bp, Homo sapiens
ggaattctgggagatacaattcaaattgagatttcggtgaggacacagccaaaccatatcatatacaaggattttttattttttttacttttaatttttgtgggtacatagtacatgtatatatgaggtacatgaaatattttgatacaggcatgcaatgtgtaataattacatcatggcaaaggggtatctattccttcaagcatttatcctttgtattacaatcaatccaattattctcttttagttggtttagaaaattacaattaaattgttttggttatagtcaccctcttgtgctactaaatactaattaatatttattctttctatttttttaattttgtggatacataggtaggtgtatatatttatgsagtacttgagatgttttgatataggcatgcaatgtgaaataatcacatcatgaagagtggggtatccatctcctcaagcattttgtgctatcaaatagtaggtcttattcattcttcttttttttttaacccattagcaatccccacctcccatctagccctgcactacccttcccagcctctagtaacaatccttct

SEQ ID NO: 647727 - DNA, 483 bp, Homo sapiens
taaatattttgttccattctttgggttgacttttcactttcgtgatggtgtcctttgatgcacaaaaaggtttacatcttgatgaatcttaaatttagctgattaaaaaacaatttaaaaacagtctcrgcatggtggttcatccctgtaatcctagcactttgggaggtcaaggcaggaggatctcttgagcccaggagttcaagtccagcctgtacaacatagaaagaccctgtctctaaaaagaaaataatttaaaaaattaaaaaaattttaaaaggtttatattttgataaagtcaaacatctgttttttttctttggttgctcatgattttggtgtcataactaagaatcatctcctgtatatacccaaaggaatataaatcatggtgctataaagacacatgcacacgtatgtttattgcggcactacccacaatagcaaagacttggaaccaacccaaatgtccatcaatgatag

SEQ ID NO: 647728 - DNA, 483 bp, Homo sapiens
taaatattttgttccattctttgggttgacttttcactttcgtgatggtgtcctttgatgcacaaaaaggtttacatcttgatgaatcttaaatttagctgattaaaaaacaatttaaaaacagtctcagcatggtggttcatccctgtaatcctagcactttgggaggtcaaggcaggaggatctcttgagcccaggagttcaagtccagcctgtacaacatagaaagaccctgtctctaaaaagaaaataattwaaaaaattaaaaaaattttaaaaggtttatattttgataaagtcaaacatctgttttttttctttggttgctcatgattttggtgtcataactaagaatcatctcctgtatatacccaaaggaatataaatcatggtgctataaagacacatgcacacgtatgtttattgcggcactacccacaatagcaaagacttggaaccaacccaaatgtccatcaatgatag

SEQ ID NO: 647729 - DNA, 483 bp, Homo sapiens
taaatattttgttccattctttgggttgacttttcactttcgtgatggtgtcctttgatgcacaaaaaggtttacatcttgatgaatcttaaatttagctgattaaaaaacaatttaaaaacagtctcagcatggtggttcatccctgtaatcctagcactttgggaggtcaaggcaggaggatctcttgagcccaggagttcaagtccagcctgtacaacatagaaagaccctgtctctaaaaagaaaataatttaaaaaattaaaaaaattttaaaaggtttatattttgataaagtcaaacatctgttttttttctttggttgctcatgattttggtgtcataactaagaatcatctcctgtatatacccaaaggaatataaatcatggtgctataaagacacatgcacacgtatgtttattgcrgcactacccacaatagcaaagacttggaaccaacccaaatgtccatcaatgatag

SEQ ID NO: 647730 - DNA, 596 bp, Homo sapiens
catgtgaattacatgatctttaagggcccttccatttttaatattttgattcaaatagctattaaaaatycaagtaggtatgaattattctttattttacagaataattcagaatgcagaaggtccactgaaataaatcatttatttctctcctagaacagatgtaagttattcaaagacagtgacttgttacttgacttgtactttccagctcaaagcctggcacataatgaatgtctgttcaacaaatggacaagtgtctttccaatatcacacagtgtaacttcaactttctataaaattctatggaagtttaaaagaaattatttgagatggcttaacatgtggattaaaatatgtttagagtcagtgtattcaaaaagtaaaatcgtaaaataaaatggcttaagtcaacaattagctttctgttgaagtaatacatttaggtctcatgttcagtgatgatatttttaaaacaagtaaagatgcatatcattgcaagccagatgaaattctctctcacacatataaagtcctatagggcttttagcttttcacagatactctgtattacaactatttatattcatgcttta

SEQ ID NO: 647731 - DNA, 596 bp, Homo sapiens
catgtgaattacatgatctttaagggcccttccatttttaatattttgattcaaatagctattaaaaattcaartaggtatgaattattctttattttacagaataattcagaatgcagaaggtccactgaaataaatcatttatttctctcctagaacagatgtaagttattcaaagacagtgacttgttacttgacttgtactttccagctcaaagcctggcacataatgaatgtctgttcaacaaatggacaagtgtctttccaatatcacacagtgtaacttcaactttctataaaattctatggaagtttaaaagaaattatttgagatggcttaacatgtggattaaaatatgtttagagtcagtgtattcaaaaagtaaaatcgtaaaataaaatggcttaagtcaacaattagctttctgttgaagtaatacatttaggtctcatgttcagtgatgatatttttaaaacaagtaaagatgcatatcattgcaagccagatgaaattctctctcacacatataaagtcctatagggcttttagcttttcacagatactctgtattacaactatttatattcatgcttta

SEQ ID NO: 647732 - DNA, 596 bp, Homo sapiens
catgtgaattacatgatctttaagggcccttccatttttaatattttgattcaaatagctattaaaaattcaagtaggtatgaattattctttattttacagaataattcagaatgcagaaggtccactgaaataaatcatttatttctctcctagaacagatgtaagttattcaaagacagtgacttgttacttgacttgtactttccagctcaaagcctggcacataatgaatgtctgttcaacaaatggacaagtgtctttccaatatcacacagtrtaacttcaactttctataaaattctatggaagtttaaaagaaattatttgagatggcttaacatgtggattaaaatatgtttagagtcagtgtattcaaaaagtaaaatcgtaaaataaaatggcttaagtcaacaattagctttctgttgaagtaatacatttaggtctcatgttcagtgatgatatttttaaaacaagtaaagatgcatatcattgcaagccagatgaaattctctctcacacatataaagtcctatagggcttttagcttttcacagatactctgtattacaactatttatattcatgcttta

SEQ ID NO: 647733 - DNA, 571 bp, Homo sapiens
ctaggttgtgctttctaagccatatgagacaataacttgccattactcaaaatatgcagttggcatggatatgcaggcataagtgacttctctcttctttccataaatatattctaacaacaatgtttgttttcaaaccttttctaccaactcatattaacctgtgaagaagaatctggttcattattttgtttgtttgtttgtttgtcttgagatggagtctctctctgtcccccaggctggagtgmggtggcgcgatctcggccactgcaacctccacttcccaggttcaagtgattctcctgcctcagcctgccgagtagctgggattacaggtgtgtgccaccacacttggctaattttttgtatttttaatagcggcgaggtttcaccatgttagccaggatggtctccatctcctgaccttgtgatttgcccgcctcagcctcccaaagtgctgggattacaggcgtgagccacagtgcccggcctcattatgtttttatatgtatttgtgaaagcttctaacagaattgtatcctaatacacttctctcaaactgtcagcatcc

SEQ ID NO: 647734 - DNA, 546 bp, Homo sapiens
tcatgcaaatattgaatcaaggaattgggtgacttaaacacgcatttagaatgcaagacatgagatatctgagactgtagackaacatacacagagaagagaaactaaggaaaaagctaaaatttaggggaaaaagagggccagaaatttctatttgaatgaagatcaaatttaatgacaccaagtatggaaaaataataaccagtataactatatttgaaagaagtgatttggagtgtgtactccagaattgaccagtttcagtctatgacacaccccagaacctacatgtagaaaactgaatttaagggaaatgacttaagattaatgtggaagcaacatgtgtggaataagaggtaagggaattttgttgggaatattattagaaaaaattggactattgtccctaaaatgttaatggggcacacagcgaagtgggggagaatatggtctttcaaagtgaacaaagacttaactaatcatgaaatggtaaatatatttgaaaaccacctattaggaatataggatgcaggtggtatggataat

SEQ ID NO: 647735 - DNA, 534 bp, Homo sapiens
tctcattaatcaatttttacttttgttgctgttgtttttggtgtctttattatgaaatacttgtcagtttctatgtctataatggtattgccttgttgtcttccagggtttttatagttttgagttttgcatttaagtcttcaatctatcttgagttgatttaaatatatatgtatgtatgtgtatatatatataatgaaagagagggrtccagtttccattttttgcatatggctagccagttacccatttattgaatagtcctttccctattgcttatttttgtcatttttatcaaggatgagatggttgtaggtgtgcagacttatttctggggtctgtattgtgttccattggtctacgtgtctgtttttataccagtaccacactgttttgatttctgtagcgctatagtgcagtttcaagttggttagatatgcctctatctttgtcctttttgcttaggattgccttaggctttgtttatttgtttgtttctaatgaattttaaaagagttttcttttctagttctg

SEQ ID NO: 647736 - DNA, 534 bp, Homo sapiens
tctcattaatcaatttttacttttgttgctgttgtttttggtgtctttattatgaaatacttgtcagtttctatgtctataatggtattgccttgttgtcttccagggtttttatagttttgagttttgcatttaagtcttcaatctatcttgagttgatttaaatatatatgtatgtatgtgtatatatatataatgaaagagaggggtccagtttccattttttgcatatggctagccagttacccatttattgaatagtcctttccctattgcttatttttgtcatttttatcaaggatgagatggttgtaggtgtgcagacttatttctggggtctgtattgtgttccattggtctacgtgtctgtttttataccagtaccacactgttttgatttctgtagcrctatagtgcagtttcaagttggttagatatgcctctatctttgtcctttttgcttaggattgccttaggctttgtttatttgtttgtttctaatgaattttaaaagagttttcttttctagttctg

SEQ ID NO: 647737 - DNA, 545 bp, Homo sapiens
tttcagttctcacttggatggacacagcagcatgtggagattcacactgtgaacttttgctccaagaactaccactgaaacataccaggaaagccaagagaatccacagaccctttgaaggaagcagcttaacactgcaggctccctgagacaaccaaaaaactgtgattgttcaaagtgtgggaggggaactgtccacccttgaacacacatcctcactggtgaacctgaacattgagacctgggagatgaatttgaccatacctgaagctgagaagaatttagggagctgagcaaaatataggggtagaggaaacagtgggaagagccttgtgggcactctcagtccccagggtagccatttctgactgtggctcagaggagttcytgggaagggctgtcagtggaattggtgagaccacagggagaaaaaaatgtcagctgaactttgtaacaatttacaccaaacgtgaagtttcctggacagactatgggggaggaggtgaatggggagtgcagatacaagcacagaagccatggcaggc

SEQ ID NO: 647738 - DNA, 593 bp, Homo sapiens
attcatttcaccgtctagcctcctttgagttctgcagaaaagcagaggttgttatatcaaatacatcagatgtcaattgcaaatgtaaatttttaatcgtgtttcctttaggtgctgtgatgcatttgatgcagaaacagttgagctctactctaaatgcagagtacaagggacaggggagaaagaaaaatgagccatgcacagtmcctccccttccaggcagctatatgaacatgtaagctataaaccacggtatatattccataacgatttccattttctttgctcctgttctgttttccaggactgaaagttgcctctagaagatgccacagtctgctgtcagttattttcttccacccattaaaatgcaaattggtatttctatgtaacatgtgacaggtttggataaaccgtgggattctctcctctcaattctttactgattgaattttaatctggattgcctatcaaaactcagcctattccttgaagttcagataaagtgtcacatccacaattaaaggtctcactgttacccccttacaatgcactttttatacctgagaaatgtgattacatttatttaactt

SEQ ID NO: 647739 - DNA, 600 bp, Homo sapiens
gctgggattacaggtgtgagccactgtgccctgcaggaaatcatgaaactcattttaaatcataaaactcattttttaaatttcatgcagtaattatgctcaagttttttcttgccttgaaattgagctattaaatagccagttgttcttgcaaactaattcaaagatactatattgtaaacagtctatttccaactttttaagtgtataaatatgcagtttttataagtaatgttttacttccagtaacaaaaataattttcaaacatttacttttagatgcttctgtagcatgcttgagctgttattttctccctcactattaaattactacctttaccttgaagcaacaggctgtgtgtctctcttttataaaatatttgctagatgacatactactgtcagctaatttgtcctcactgaagaggtcagaagatttgtaaactttgctttttgatcttatttttatgtatgattcctatttcaataaatgtgcttttgccataaggtgaacctttgtgtgacaaaaaaggtttttatggtcactccccatcatttccacataatccactcatstgagtgtgcagaagatgctctagg

SEQ ID NO: 647740 - DNA, 660 bp, Homo sapiens
gggatttgggatcattgtgaatttactgtgaatatacgtgacaacttattatactgagcacctttcacatgcttgttggtcacttacgtgttttcttttgtgaaatgactatttaaatagttcactcatttttattaggatatgtatcttgttacaacattttttattattgttcatttgcatacatttatgtatatctatgtagatacatatgtattacacaaatttrtacattgcataaatatatatgtatatgtctatatgtagtgttatacaaatatatgtgtatatatattaataaatatgtatgtagaaattctggatacaaccctttggtcatacatatgtgttgtgaccatttctcccaggctgtagattgatttttttatgtccttaataacatcttttgaagattttctttttgagacagggccttgctctatcagcaaatttggggtgcagtggagccattatagcccactgtcacccgggctcaagcaatcctccctccttcctcctcagcctcccaagtagctgggactacaggcatgcgccaccaggcctggctgtcttttgaagaccttaacattttaaaattgaaggcatccagtttattattttgttgtatagctatataaccaaaccaactttcccatgtta

SEQ ID NO: 647741 - DNA, 660 bp, Homo sapiens
gggatttgggatcattgtgaatttactgtgaatatacgtgacaacttattatactgagcacctttcacatgcttgttggtcacttacgtgttttcttttgtgaaatgactatttaaatagttcactcatttttattaggatatgtatcttgttacaacattttttattattgttcatttgcatacatttatgtatatctatgtagatacatatgtattacacaaatttgtacattgcataaatatatatgtatatgtctatatgtagtgttatacaaatatatgtgtatatatattaataaatatgtatgtagaaattctggatacaaccctttggtcatacatatgtgttgtgaccatttctcccaggctgtagattgatttttttatgtccttaataacatcttttgaagattttytttttgagacagggccttgctctatcagcaaatttggggtgcagtggagccattatagcccactgtcacccgggctcaagcaatcctccctccttcctcctcagcctcccaagtagctgggactacaggcatgcgccaccaggcctggctgtcttttgaagaccttaacattttaaaattgaaggcatccagtttattattttgttgtatagctatataaccaaaccaactttcccatgtta

SEQ ID NO: 647742 - DNA, 559 bp, Homo sapiens
atatgtggcattatttaattagagctctgaaacaatagaatggaaagaacaatagatcgaacactcctacattcctggaaatacatgggagtctaaactagcttattcatctcttatgggaaacattgcagtggtttctaggcagctgccatgaacttttaacgctttctggctggcaagaagccccctccacctactgtactgaaacaaagacctagggccatattgtacttctaaagctgttaggaaacatgagrctaaacaggtgtaagtgttgcttgttttctgaatgcactcagaagcccagtgctcccctgtgccaagggtgggagactatttattggtatggaaaagtacagaggaaagaaaaagagatgaggattccgaatcaggtagttgtgtagccacctctggtatatattatcacagttctcagagagatgccctactgacctctattcttgtcctcactttataacttgttcaagagcctatgcatattcttcactaaacaaatatatgtatagatataagcacaattattttaaagaattagcta

SEQ ID NO: 647743 - DNA, 516 bp, Homo sapiens
tttcacatctgctataaaatcacatccttaatttgtggtcacatgaataagatacgaagtgctggcactgggaaggggatcaatgagtttgtagaatcattttataaaaccttctctgcaaacacctcatcaccttgggaatcttccagcaaatttcactccaaaagaagggaattagcaagtgtagtttctccccattccttaaagtgcccatattttttttttattaaacaggtattctttgcttaataaggggcactgttttggtcaaaggaatttattggctcaggaatatttaatgcattaaacttttatttttctagcctccttcagttaggagaggttgtccattactttaaatatttacattttttatgttctcacatatttattttatctgtactctttatagaagcaataaatgtttccaaattctttttggcttggtctggactatggtaagyggcaagcattggctccttctcagctctcttggggctccacccctgtgtggca

SEQ ID NO: 647744 - DNA, 569 bp, Homo sapiens
tggcttcctgcactgatggcagttacctgggagggtattctgaggccaatgtggaggggattggtaggcttgcagaaaagccaatagttgagcctgcctcttgttcctgcatttatcctttttcttagccctgtcctcatcctgatcttgattataaaagactgaggaggctaatttgaggatttcctgcataaggacactaaattctaaggctgacttttataattttatcccagttaatttttaggccagacagtattacaaaggagcctaggttttgttttaagattttggggatcaaacttttcccagttcttcaggatgcacccaaggggaatgtcctatggtagggagacatgattatccatctgcaaaaaagagaacagaggagaaaaaaaggaaaaaggaaaaagatgacatcacctcttactttcctattaccctgaacagggcatcccccattcatccttagggttacagaaygaactgctcttaccatgtacccttaacctaggtcccatctcatcacaattacccacctgagaacagaataggtactggagtgaaca

SEQ ID NO: 647745 - DNA, 583 bp, Homo sapiens
ttttgccttctggaaaaagttccactgccttatctcagcacaggatgtctccatattctgaattttatgctcttctacagcccctctgcttggaccctgcaaatttctgtagatattgtactctctgctactgattcatgcctctgtgctgccactttcactgttctcatgacctggaatttccctaagacgcaactctagcaccacctgctatggggagccctctctgatctccccacatggrgctctgtgcatgatttctctgctaggttatgagatgaccttgtctcattcatctctataaacccaaccatccccttaaggcttacatgtgccagatccttgtctaagcaccaggcatacaaatatgaataagcagttattgcctcctgtctcaaaatttgctggtcccctgaaagatcatttaaataaatgtggcaaacgtggtgatggataggttaggaaaggcattttttagggtctgatatcttgagtgacaaacagaagttattcaggttcagagagatgaaagagggggaagagcctaaggctgaggctcagggagacagggtgtgcttggatt

SEQ ID NO: 647746 - DNA, 583 bp, Homo sapiens
ttttgccttctggaaaaagttccactgccttatctcagcacaggatgtctccatattctgaattttatgctcttctacagcccctctgcttggaccctgcaaatttctgtagatattgtactctctgctactgattcatgcctctgtgctgccactttcactgttctcatgacctggaatttccctaagacgcaactctagcaccacctgctatggggagccctctctgatctccccacatggagctctgtgcatgatttctctgctaggttatgagatgaccttgtctcattcatctctataaacccaaccatccccttaaggcttacatgtgccagatccttgtctaagcaccaggcatacaaatatgaataagcagttattgcctcctgtctcaaaatttgctggtcccctgaaagatcatttaaataaatgtggcaaacgtggtgatggataggttaggaaaggcattttktagggtctgatatcttgagtgacaaacagaagttattcaggttcagagagatgaaagagggggaagagcctaaggctgaggctcagggagacagggtgtgcttggatt

SEQ ID NO: 647747 - DNA, 587 bp, Homo sapiens
caaaactacagtaatcaaaacagtgtagttctggcataaagacagacatatgggccaatggagaatayagaagccagaaataaaccctcacatatatggttaattgattttgacaagggtgccaagactattcaataatgaaaggacagtcttttcaatacatggtgctgggaaaacttaatatcaacatacaaaagagtaaagttgaaccctcactttacaccatatacaaaaattaactcaaaatgtattaaagacacagtaagagcttaaactataaagctctttaaaaaaaatatagaggtaaaactttgtgacactggatttggcaatgatttcttggacatgacaccaaaagcacaggcaacaaaggcaaaagtagaaaaaattcagtacataaaactgaaaaacttttgtgcatcaaagaaaacaatcaacagagtgcaaatgcaacccagggaatgaaagaaaatatttgcaaattacatatctgataaggagttaatatctagaacatagaggtaactcctacaacacacacacacacacacacaaacacacaaatacaaaaatgggcaaagaatttg

SEQ ID NO: 647748 - DNA, 587 bp, Homo sapiens
caaaactacagtaatcaaaacagtgtagttctggcataaagacagacatatgggccaatggagaatacagaagccagaaataaaccctcacatatatggttaattgattttgacaagggtgccaagactattcaataatgaaaggacagtcttttcaatacatggtgctgggaaaacttaatatcaacatacaaaagagtaaagytgaaccctcactttacaccatatacaaaaattaactcaaaatgtattaaagacacagtaagagcttaaactataaagctctttaaaaaaaatatagaggtaaaactttgtgacactggatttggcaatgatttcttggacatgacaccaaaagcacaggcaacaaaggcaaaagtagaaaaaattcagtacataaaactgaaaaacttttgtgcatcaaagaaaacaatcaacagagtgcaaatgcaacccagggaatgaaagaaaatatttgcaaattacatatctgataaggagttaatatctagaacatagaggtaactcctacaacacacacacacacacacacaaacacacaaatacaaaaatgggcaaagaatttg

SEQ ID NO: 647749 - DNA, 587 bp, Homo sapiens
caaaactacagtaatcaaaacagtgtagttctggcataaagacagacatatgggccaatggagaatacagaagccagaaataaaccctcacatatatggttaattgattttgacaagggtgccaagactattcaataatgaaaggacagtcttttcaatacatggtgctgggaaaacttaatatcaacatacaaaagagtaaagttgaaccctcactttacaccatatacaaaaattaactcaaaatgtattaaagacacagtaagagcttaaactataaagctctttaaaaaaaatatagaggtaaaactttgtgacactgsatttggcaatgatttcttggacatgacaccaaaagcacaggcaacaaaggcaaaagtagaaaaaattcagtacataaaactgaaaaacttttgtgcatcaaagaaaacaatcaacagagtgcaaatgcaacccagggaatgaaagaaaatatttgcaaattacatatctgataaggagttaatatctagaacatagaggtaactcctacaacacacacacacacacacacaaacacacaaatacaaaaatgggcaaagaatttg

SEQ ID NO: 647750 - DNA, 520 bp, Homo sapiens
tggccatcatggtgaaacccatctctactaaaaatacaaaaattagttgagtgtggtggtgcatgcctgtaatcccgaggctgaggcatgagaatctcttgaatccacgaggtggaggttgcagtgagccgagactgcgctactgcactctagcctgggtgacagagcagaaactctgtctcaaataaataaataaaaataaaataaaataaataaaagtaatatggaagagaacctcgagaaactgtggaagcaaaaatcaatggcatatttgagaaaacaactttctttcttatacactttgctgagtttcagttttaaattgtaaggatacgaatttaaagggtttactgctttccaggaaaaaaaaaatcaatggcaagaagcacctacatcatagcagaagttttgagttttaaaagtgaagaaaaatttcacaagcctttggaaaagtttggatgaaagttgtgtttsgtagttgatcttctcctctgcaactctaagtaccagaagacaactt

SEQ ID NO: 647751 - DNA, 656 bp, Homo sapiens
  misc_feature 510: n = A,T,C or G
tggacctggggggcagagcttgcagtgagctgagatcaggccatgcagtccaacctgggcaacagagtgagactccgtctctaaaaaaaaaaaaaaaaaaaaatacatttacactatactgtagtctattaagtgtgcaataccattatgcctaaaatgaatgtatattaattaaaaaatttttttactggaaaaatgccagtaatcaccttagtcttcagcaaatgatcatctttttggctagtaaagggtctkgccttgatgttgatggctgctgactgattagtatggtggttgctgaaagttgaggtggctgtggcaatttcttaaaataagacaatagtgaagttagccacattgattgacttctttcacaaaagatttctctgtaacaggtgatgatgtttgatacattttacccacagtagaacttccttcaaaattgaagtcagtcttcttcaaccctgccactgctttattaaatatggttattgaatattctaagtcctntgttttcatttcaacagtgttcacagcatcttcattgggagtagtttccatctcaagaaaccactttctttgcctacctaggagtaactacttacctactcaaattttaccatgagattgcagcaattcagtcccagcttcacagt

SEQ ID NO: 647752 - DNA, 555 bp, Homo sapiens
ttcgttaattgatgggttggttccacgattttgcagttgtgaattgtgctgctgtaaacatgcatgtgcaagtatcttttttgtagaatgacttmttttcttctgggtagatacccagtagtgggattgctggatcaaatggtagttctactttttaaaggaatcttcacactgttttccatagtggctgttctagtttacattcccaccagcagtgtggaagtgttccttgatcactgcatccatgccaacatctactgttttttgatttttcgattatggccattcttgcaggagtaagttgttgtcgcgttgtggttttgatttgcatttccctgatcattagtgatgttgagcatttttttcatatgcttgttggctacttgtatatcttcttttgagaattgcctattcatatgcttagcccacttttggatgggattgtttgtttttttcttactgatttgtttgagttcgttgtgattctggatattagttctttgtcagatgtatagattgtgaagatttttctcccactctgtgggttgtttgttc

SEQ ID NO: 647753 - DNA, 434 bp, Homo sapiens
actgtgctaccctgcccagatactatacttttcgcacggtttttggaatctgtagatcaggagatttcctcatgtgcctacacaatcagggccccaggtttcaagcacaaaactgggtggctgtttgggcagacactgagatagctgtaggagttttttttttcttttgtaccccagtggtgcctggaaccccagcgacagaaccgttcactcccatgaaaagggggatgaagccagggagccaagtggtcttgctcartgggtcccactcccatggagctcagcaagctaagaaccactggcttaaattctcactgccagcacagcagtctgaagttgacgtgggacgaaccagcttggaggcgggaggggcacccaccgttactgaagctttagtaggcggttttcccctgacagtgctaaggaggctggga

SEQ ID NO: 647754 - DNA, 620 bp, Homo sapiens
ctggggtacttgctgctgctctggttttatttatactggttgccatcaaagcaaagggtgaaaaatggtttaggcaatttggttgaaagagggggagtaggaggaagagagggtagaaagagtaatgatagagagaaaagaaattaaaactgtattaaataagacagggaaactctacaaataaccaatttaattgaggggagtaaagaactgagaagagtgactcgaagttagattctaaacaggccaggtttgtccttggtgcccttttccaaaggctctatttggmgttattgtccgtggaatttgctaagcaaggcagaaagatggagggctgtaaggatgtgtgatcacaggtcactgaagatggcatcaatctctctgacatccacacacctgaaaccaggctgcaaatacaaaaacagccttcttgaaacacagaagaggtgcactgtgggctctgtgggcttctagcataataaccgcctttctcctccaaactacgaaaggggctggctggacccaagctcagagcccacctggttcgtgctgacctcattttcaggtattccctaggaagcgatggatgtgggaaacccagcaggctgggaggcaccagc

SEQ ID NO: 647755 - DNA, 620 bp, Homo sapiens
ctggggtacttgctgctgctctggttttatttatactggttgccatcaaagcaaagggtgaaaaatggtttaggcaatttggttgaaagagggggagtaggaggaagagagggtagaaagagtaatgatagagagaaaagaaattaaaactgtattaaataagacagggaaactctacaaataaccaatttaattgaggggagtaaagaactgagaagagtgactcgaagttagattctaaacaggccaggtttgtccttggtgcccttttccaaaggctctatttggcgttatygtccgtggaatttgctaagcaaggcagaaagatggagggctgtaaggatgtgtgatcacaggtcactgaagatggcatcaatctctctgacatccacacacctgaaaccaggctgcaaatacaaaaacagccttcttgaaacacagaagaggtgcactgtgggctctgtgggcttctagcataataaccgcctttctcctccaaactacgaaaggggctggctggacccaagctcagagcccacctggttcgtgctgacctcattttcaggtattccctaggaagcgatggatgtgggaaacccagcaggctgggaggcaccagc

SEQ ID NO: 647756 - DNA, 668 bp, Homo sapiens
agggacttgaattctgctaagatgtaggcatagtttctataatcccttactgctcaagagtcaggtagctggagatgacaagattcgtgacttccacagttgctcctatagataatatcactattgtggaagctaagattcatcttttgagattttttttgcacacttttgtgttctggcaaccaagttaatccatctggacttctgattcatgactcaaccagtcctgtggccccccactgagaggtggactcaatgcatgaggaccatttttcacactcctattatggcaactccaactgttagcggtggcaaatatccaggttgccagtgctgaatctgtatgggtctgcagcaacttcaattcttgcytctccagaagaaagaattctactgaggtgcataaggcagaaaaagagactggggcaagtttcagagtgggagtggaagtttattgaaaagctttagagcaggaaagaaaggaaaatacacttggaagggatccaagtgggcatcttggaaatcaagcaccttgtttaaccttgaacctcagattttatatgccggtctacttctagcatcttgcatccctttcctttcattcttccctaaaggtgagtcacccgcatgcatggtgccctccttgcactcgggaggtgaacacgcac

SEQ ID NO: 647757 - DNA, 613 bp, Homo sapiens
ttattttttaactgccaaagagaacaatttaagggccatttctcaattacctttctctagtaccgacaccctcagggaggtgagattatgtcttgccaatttcacaaaagtctgggtatttacagaaaattataatacattatatttttatatattaacttaaaaaagtaatgacaaggtatttgcttaggaaatattctaaatacttttaaatatgtatgcattmtttaattgatttaaaacagatgacatcatattatatacttctctatatattgtttttgttttttttccctaaatgtggattaaagatctttccataattgcatataagaaaattcacacatcagggtctgttagggagtcgggggcgaggggagggaacttagaggacaggtcaataggtgcagcaaacaaccatggctcatgcgtacctatgtaataaacctgcacgttctgcacatctatctcatttttcttagaataaattaaaaaaaagaaaattctcaaatgtttgaatggctatagagtatgccattgcatggatgtagcttaattaatttgcttagtcttttttggacatttagacatattccaagtatcttattttatt

SEQ ID NO: 647758 - DNA, 613 bp, Homo sapiens
ttattttttaactgccaaagagaacaatttaagggccatttctcaattacctttctctagtaccgacaccctcagggaggtgagattatgtcttgccaatttcacaaaagtctgggtatttacagaaaattataatacattatatttttatatattaacttaaaaaagtaatgacaaggtatttgcttaggaaatattctaaatacttttaaatatgtatgcattatttaattgatttaaaacagatgacatcatattatatacttctctatatattgtttttgttttttttccctaaatgtggattaaagatctttccataattgcatataagaaaattcacacatcagggtctgttagggagkcgggggcgaggggagggaacttagaggacaggtcaataggtgcagcaaacaaccatggctcatgcgtacctatgtaataaacctgcacgttctgcacatctatctcatttttcttagaataaattaaaaaaaagaaaattctcaaatgtttgaatggctatagagtatgccattgcatggatgtagcttaattaatttgcttagtcttttttggacatttagacatattccaagtatcttattttatt

SEQ ID NO: 647759 - DNA, 613 bp, Homo sapiens
ttattttttaactgccaaagagaacaatttaagggccatttctcaattacctttctctagtaccgacaccctcagggaggtgagattatgtcttgccaatttcacaaaagtctgggtatttacagaaaattataatacattatatttttatatattaacttaaaaaagtaatgacaaggtatttgcttaggaaatattctaaatacttttaaatatgtatgcattatttaattgatttaaaacagatgacatcatattatatacttctctatatattgtttttgttttttttccctaaatgtggattaaagatctttccataattgcatataagaaaattcacacatcagggtctgttagggagtcgggggcgaggggagggaacttagaggacaggtcaataggtgcagcaaacaaccatggctcatgcrtacctatgtaataaacctgcacgttctgcacatctatctcatttttcttagaataaattaaaaaaaagaaaattctcaaatgtttgaatggctatagagtatgccattgcatggatgtagcttaattaatttgcttagtcttttttggacatttagacatattccaagtatcttattttatt

SEQ ID NO: 647760 - DNA, 613 bp, Homo sapiens
ttattttttaactgccaaagagaacaatttaagggccatttctcaattacctttctctagtaccgacaccctcagggaggtgagattatgtcttgccaatttcacaaaagtctgggtatttacagaaaattataatacattatatttttatatattaacttaaaaaagtaatgacaaggtatttgcttaggaaatattctaaatacttttaaatatgtatgcattatttaattgatttaaaacagatgacatcatattatatacttctctatatattgtttttgttttttttccctaaatgtggattaaagatctttccataattgcatataagaaaattcacacatcagggtctgttagggagtcgggggcgaggggagggaacttagaggacaggtcaataggtgcagcaaacaaccatggctcatgcgtacctatgtaataaacctgcacgttctgcacatctatctcatttttcttagaatwaattaaaaaaaagaaaattctcaaatgtttgaatggctatagagtatgccattgcatggatgtagcttaattaatttgcttagtcttttttggacatttagacatattccaagtatcttattttatt

SEQ ID NO: 647761 - DNA, 591 bp, Homo sapiens
ttagctaggaagctgtcttggcagtttagatgtgaagtcacaaagaagacataaaagagttgagaatgggaggatagccagggattcaaagatactgtgaaagaaaaagcaatggcatatgggaatttattagatgaggaagatatttctaattagatgggacaggaaggctccacagattctaaagtacaataatgtttgagaagaaagcaataaatgattggcacagatagaacttagttattaatacaagaggagtgcaactagaggggaaaaaaggcaactaagtgcacagtatctttctcagtagtgaaaggtataaaagawaaaggacaatagcttcacagggtatgacagctaggagcataatgattaagaacactgaactctgaaatcagaccttttgagtccaaattctggctatagcacgtactagctgtgtgactgctagctagttacttaaactctccaatcctttcttctctctctagtaaatgagagaacctaacaatgagacgcataacaatagtgcttactacatgacttgaacagctggcattcattataaatgctatgtaagtttttgcactt

SEQ ID NO: 647762 - DNA, 578 bp, Homo sapiens
aaacatacagggttaatgaataagattcttagaaacaagacccatatcttgttcttttcaaaatgtgtttgatttgtgttttggtctccactttctctagcacagtatgaaaaacacagaagcaagaaataaaaacatcaattgcttatgtcaaatttttcaacaaatgtaattttttatatgtatagacttgaggatgatattttatttgattcctggcaacttaagatactataaaaattatggtgataaaatagttgtatgtctcaaactgtacactgaggaacactggcatcccaaagtatattattgagttttatgtgaccatggaaattcatattgaataaatttaaatattaaagtaatgaagactctgagaagtcttgcaaaaaggaaagcactatatttaacaccaatttcctaaactttttctttaaaaaartcattcatactctaaaactaggctgtttcagagtaaagtataggaggtgaaactagtaattattcaaactgcaaatgacatataaaatcatttttaaggaaactaaaccaaacccttaattgcaatgttaaggagg

SEQ ID NO: 647763 - DNA, 552 bp, Homo sapiens
ttttgtcacccatcccccaaccccaggcagcacatcattgagaaagatatcctccatttaggggtaaaaggggagtgaacacagcactttgccttgattcccagtactgttccaaccacagcattgggaatgcccccaaatccatagactccaggctggtacctgtgcgctaagcctccagactcaccctggtgccaggctggatccctgaagctcctggtttgagacctgcacagcagagttaatctctggtccacaccactgccaggctcattttagccacatcaggctcgaaacagttctcagtgacgacaggcttggaccagctggtcctggactttcggctgccccattgctaggccagtcctcgcaccacgccaacctcagctgccaccactggcccgacagtcacatggctttaaaccaggctggcctacattagtagacccaatcagcagatccaccgaagtggatccaagttccagaggtctgctcrcctgttgaatcagacacgaggccagagagcccgaggattccagcagcaagccagct

SEQ ID NO: 647764 - DNA, 632 bp, Homo sapiens
accatattattagagtaattttgctacctgtcttattgttagtgtattatgttattgttactttgaaactattacatatagaagcaaaaacgtacacctttttttcaacatcactaaggaccaaaatcttgcttgtaagacaaggatactgaaatatcaagtcaaataagttatgcaagaaatcttttaatatttaatttgatttgtagtttttctgaaaaataaaaattccccatttgtgtactagtaaggcctaggaaaaaaaacgaaaatacttaatgataatgaaaatgtttagcatcccaactgtgttctttaacaaaatttctaccaaaataaaccagrgttccatgaaaaaaatgaatctctaggtttaatgtctcactcttctaattcatactctatatagtagtcaggtaaattatgatcatagtagttaagtatttaaaatctttgatggattcctgacatgcaagagtcatggacaggatccttatttgaaaatcaagaccttaaagaatgtagataaatctcctttgtcagcacacttgtccacttctaccccatatagaacccatgctaacgcaaaatggacagctccttcctgaacatgacttacatttttttcacct

SEQ ID NO: 647765 - DNA, 632 bp, Homo sapiens
accatattattagagtaattttgctacctgtcttattgttagtgtattatgttattgttactttgaaactattacatatagaagcaaaaacgtacacctttttttcaacatcactaaggaccaaaatcttgcttgtaagacaaggatactgaaatatcaagtcaaataagttatgcaagaaatcttttaatatttaatttgatttgtagtttttctgaaaaataaaaattccccatttgtgtactagtaaggcctaggaaaaaaaacgaaaatacttaatgataatgaaaatgtttagcatcccaactgtgttctttaacaaaatttctaccaaaataaaccagggttccatgaaaaaaaygaatctctaggtttaatgtctcactcttctaattcatactctatatagtagtcaggtaaattatgatcatagtagttaagtatttaaaatctttgatggattcctgacatgcaagagtcatggacaggatccttatttgaaaatcaagaccttaaagaatgtagataaatctcctttgtcagcacacttgtccacttctaccccatatagaacccatgctaacgcaaaatggacagctccttcctgaacatgacttacatttttttcacct

SEQ ID NO: 647766 - DNA, 528 bp, Homo sapiens
gtggaagggagggagggaaatactgctcattatgttttgagttaaacaggttcctttccagcaggctttttcaaattatttaatgtgcctacaatcaytctaagtttccaaaacttattatttccaaagcgattgaacagtgaaaccacttttaactcagcatttctcaggactaacatcccatggaatgtgatttgatatatgttgccatggttttcctcagctccctcaagactttgttaaagtagcaccctcttagggaggactacctatgtcacctgatttaaaacagaaacatcaccttgcccgcagcccagtcctcacctactttcctgctttattcttttcccccatagcccttaacaccttctaatacacttcataatttactcatttattttgtttactgtctcgtcttctatgtctgtaagctctatgagggcagggcattcttcagctatttgtttttacatggtgatatttccagaacagagaaaagtgcctggcacagagtaggtgttcaataaa

SEQ ID NO: 647767 - DNA, 609 bp, Homo sapiens
acaggacaaataatctttctagatattattcaacattctaatgcaaaggttatatcaataaaataaaaggctttcacttccagctaagatcaaacatgtgataaggcaaccagaacttgaagagacatcatcctggagagaagaaaagctcactgatataaattcgtcatctgcctgcttcttcttttcttcttagggagtttgccaactctaggcccagaaagaggacaagaagtcaggtagaagatccactgcttggtaccagagaaaccagcagaacttttggcaatttcatgggactagggagaaaacaactgggatcataaagggctatatctcagaaaaaagggactaccaaaaaaattagctcagcactttgcactgggtttgcacccagagtctctaaaagtttttacatgaaatgttcagcatttcatcaaaaattaatgagcatgctragaaataaaatgaagaaggaagaaaaacagacaataaaaatagacccataggtaactcaaatgttaacaaacaagaatttttaagtaactgtgattaatttgtcaggaaagtagataacaaaatagaaattatgaccaagaactagaacct

SEQ ID NO: 647768 - DNA, 604 bp, Homo sapiens
tgggctttatgggacctgtcatgatgtttctaggaagctagttctgcgttggcttcataagacatccttttcctacagtcatgactcactcctccttctcctcactcacccccacttgttctggggtggaagaatgcccaaatgctccagagacagatgcgtaggcggatgtccagtccactaacgagaacacacttctaggcattgtggaagtgggacaaagggttttgctgggcatattcagagccaacaatgtgatggttatatgtttatcacacatggagagactcatttctttggcaaccaaccctagcctactcactaatccacccaacccctcccatccctccctcctttcttcctttcaggaaagcgtgtgcaagttctccgcaaaatgatgaatctctgctcctcaggggaatgtacgartcagaaaagcttttaaaaaggaaagaggaaccaaagcctttgcataagtaggccagctgcagagccttaagagagaagggaggggagaaatctccttgcggccatggccccaaacctcccggctgccacttgtctccattgtcttcccacaaccccaaacaagtcagcccacacc

SEQ ID NO: 647769 - DNA, 524 bp, Homo sapiens
ttttattttgagataacatgcaattggaagaaataataccaagagatcctgtatacctttcacctagtttcttcatcttgcataaccatagtacaatatcacaaccaggaagttcacattgatagagtctgcagactttattcagagttccccagttttacctctatgtgtgtgtgtttgtgtgtgtgtgtctgtatgtatttagctctatgcaattttatcatgagtagattggtaaggccgccactatagtcaagayacaaaagatacaagatgcaaaacctatcacaaggttccctcacgctacactttttatagctctctccctgcctacccaccaccccaacccatggcaaccactaatctgttctccatctctataattttgtcattttaggaatgttataggcatgaaataaaccttacttccatttaggtcctttgtcttccccacttgaaaaatataattgtcttaagtatttcctgtacatatattgagcaccacatcagatggtattacagtc

SEQ ID NO: 647770 - DNA, 572 bp, Homo sapiens
atttttataatagctgctttaaagtcttttttagaaaatttcaatacctgtgtcatcttggcattgtctttttttaaattacctttttccacataaattccaagtttcctggtgagtgatttcgaattgtatcttcaacatttttaatgttatgttattagatactggctcttgtttatatcctatagacaatactgataattttgttttagcaggcaatccacccaattttgctcaggccacaagttttgactaactttctgtggatttgggcttygatggcaatgcctttgcagtgctatttgaatattccctatgtggtccccatcactagccaatctgggacatgggcagtggtctatcctatagtttagttctcagaatctgtgtatgtcaggttcatgcaagtgcagctcagagtggagcctaggagtttataaacaactttgttatgtagatttcgtgcattccttcctctccacattcatgccattactttatcattttctcgagatcctctttttagtcttctgaacagaaagatggaagttttgtttcctcactctgctgct

SEQ ID NO: 647771 - DNA, 483 bp, Homo sapiens
gcctataatcccagctacttgggaggctgaggcaggagagtcatttgmacctgggaggcagaggttgcagtgagtgagattatgctgctaaactggacagcctgggtgacagattgagaccctgtctccaaaaaaacatctaaaacaaacaaacaaaaaatcaattgcctgtaactgtgtgtatttatttctgagctttctatgctgctcctttggtctacatgtctgtcttcatgccaatgccatgctgttttgattacaatagttttgtattatattttgaaatcaagaagtataatgcctccagctttgtgtttttcacctgagactgctttcgattcattaacagaatgaaggataaaaattatatgattgtctcagtgaatacagaaaaagcatttagcaatattcaacatcttctcatgataaaaacttacaataaattaggtatagaaggaatgtacctcaacacaataaaagcta

SEQ ID NO: 647772 - DNA, 483 bp, Homo sapiens
gcctataatcccagctacttgggaggctgaggcaggagagtcatttgcacctgggaggcagaggttgcagtgagtgagattatgctgctaaactggacagcctgggtgacagattgagaccctgtctccaaaaaaacatctaaaacaaacaaacaaaaaatcaattgcctgtaactgtgtgtatttatttctgagctttctatgctgytcctttggtctacatgtctgtcttcatgccaatgccatgctgttttgattacaatagttttgtattatattttgaaatcaagaagtataatgcctccagctttgtgtttttcacctgagactgctttcgattcattaacagaatgaaggataaaaattatatgattgtctcagtgaatacagaaaaagcatttagcaatattcaacatcttctcatgataaaaacttacaataaattaggtatagaaggaatgtacctcaacacaataaaagcta

SEQ ID NO: 647773 - DNA, 483 bp, Homo sapiens
gcctataatcccagctacttgggaggctgaggcaggagagtcatttgcacctgggaggcagaggttgcagtgagtgagattatgctgctaaactggacagcctgggtgacagattgagaccctgtctccaaaaaaacatctaaaacaaacaaacaaaaaatcaattgcctgtaactgtgtgtatttatttctgagctttctatgctgctcctttggtctacatgtctgtcttcatgccaatgccatgctgttttgattacaatagttttgtattatattttgaaatcaagaagtataatgcctccagctttgtgtttttcacctgagactgctttsgattcattaacagaatgaaggataaaaattatatgattgtctcagtgaatacagaaaaagcatttagcaatattcaacatcttctcatgataaaaacttacaataaattaggtatagaaggaatgtacctcaacacaataaaagcta

SEQ ID NO: 647774 - DNA, 580 bp, Homo sapiens
gttattaaagatgaagtttcctctaacaaaaacttcagatcaagttattgggagccaaaatttaacytttaagtttaaacttttaggttcaacagggagatcatccaggtgcctggtctagtgcttctgtacattcattttctaattattattttctcatgtactcatgacctagtcacataccacttgataaattttttaactcatcacatatttatcaaatttctaccatctttctacaaattgatagatagttttgtacaatagatagatttgtagaatagttactacaaagtgttataacttcttaatgggcaggtctcaatatgacactgaaaatagatactgtagaaaaaaattctatgattttttttgaatcatgcatattttgtgaggcatttaaattgattcttttttaaaaaacgtcaatatcatatgttttgtcagtggctgaagccttatttcagtccatgaattataggtttataatggttatattacaaaagggctagtctcaggatctcaccactataagatccaattatgcagatactacctctaaatgttttattcaaaagca

SEQ ID NO: 647775 - DNA, 533 bp, Homo sapiens
aagacattctgagtaaaaagaattaaaccgagggaatcacattactgacttcaaattatactagagctacagtaaccaaaacagcatggtactggcataaaaacatacatatagaccaatgccacaaaatagagaacccagaaacaaatccatacatctacagtgaactcatyttcaatgaagtttccaagaacatacattggaaaggaaaggatagtctcttcagtaaatggtgcttggaaaactggatatccatatgcagaagtgtgaaactagactcctgtctcttgacatctacaaaaatgaaatacaaatacattcagaacttaaatctaagacctcaaactatgaaattactataagaaaacatcatggaaactctccaggacattggagtggtcaaagattttttgaatagtactccagaagtacagccaatcaaagtaaaaaaggacaaatgggatcacatcaagttcaaggactttcatacagaaaaaaaagacaaggagccattgtggctctggccggttgcg

SEQ ID NO: 647776 - DNA, 530 bp, Homo sapiens
taaaatttggggcaggggttatgagtagaaatttcactccacattgtatattgtttggacactttgctggccatattcattgtcctatttttattattaccaaaacactagaaggtactataataatgaagttacgcagatgtgaaaaacatgacttagttgtagtaaattaacttgtcctggagagatatatggataagtcagtatccaaactgtaccatacaaccttttagttttctggaaccagggagaaagtgggaagagaaatagaagaaattacatatgacatgatagatagttcctcttcaacaaagtttgctgtgctacaatctaccaaagctgataatttaatgggccgctcaatgttgcctagagcacaktaagtgtgacattttcttaatttatcattggtatatatgctggtaaattttgtttacatagtgatgaattgccttagtttaacatcttatatcagaattgaatgaggttaattgaggttccagagcacaggtaacgttagaagcttaaac

SEQ ID NO: 647777 - DNA, 530 bp, Homo sapiens
taaaatttggggcaggggttatgagtagaaatttcactccacattgtatattgtttggacactttgctggccatattcattgtcctatttttattattaccaaaacactagaaggtactataataatgaagttacgcagatgtgaaaaacatgacttagttgtagtaaattaacttgtcctggagagatatatggataagtcagtatccaaactgtaccatacaaccttttagttttctggaaccagggagaaagtgggaagagaaatagaagaaattacatatgacatgatagatagttcctcttcaacaaagtttgctgtgctacaatctaccaaagctgataatttaatgggccgctcaatgttgcctagagcacagtaagtgtgacattttcttaatttatcattggtatatatgctggtaaattttgtttacatagtgatgaattgccttagtttaacatcttatatcrgaattgaatgaggttaattgaggttccagagcacaggtaacgttagaagcttaaac

SEQ ID NO: 647778 - DNA, 417 bp, Homo sapiens
aaatacagattaacattagcagagagctttgactgcacacagaccataatcaatcaattgcttgcagactcatatcaaaaccctacaatgagtggcaagtgacaagctgcatctggtcataggctttatggtggcaagtgagttgatgtacttcaactgtgcagctgcatctggtagcagggtttaagtcagaatctgacacatattttagtccatgcrtggccagcccattattttatttaccactgccacttgtgcctctttcccatgctgtgcgtttgtctcagtcacagttttggtttagctcacaagctaaccctagccaaaatgagaaaaaaacaaacatccttggatagcttctttgaaaagggggaaagacgcaatgatgagacagcagaaaactctgagacggccaac

SEQ ID NO: 647779 - DNA, 555 bp, Homo sapiens
tcttctgtgcttttctcacatgtgcccatccctccttttctttcagtgcctttcyctccctttaaccaccagggcgactgcccttttattagtttcttagcgttagttctaaagagtctgatggcctcttgtaacgtacatattgagcttccatagcaaagaatacaaatcatcacaaatcacaatagtccaataagaaagaatattgatctttccaaagtaatttcagtcatatatgactgagctcaattttaaatatgtatttcagtgtcgacttacccaacacactgaacctgcttctctgatctggtattagacttgtactctgcctacagaccagtgcctaggttagttcatccataaagggaccaaaagcagtgaccactcctcctggggtgaagttcagtgtttctttttttcccatttacttagttaagcagtcagttttaactttactatccagctgattttgtgtataaatggattcatttgtagtttatcttgtttttgctaggctgtgggctaggaaggaccaaatggatttacgtagtttat

SEQ ID NO: 647780 - DNA, 561 bp, Homo sapiens
agtgttttaaccaccatggtatggtatccttcctaaaatttaagtaacacmctgcaaggaattttcttcttgggtttagtctactagcatatactgtatcttcctatggttaatatctaaatactgtgaggagtggtgggggtggggggcaagactgaagatgagaattgagaagtggcttcctctggaaaagcgatttactcaggtaagagagagacagtgtctttaagaaggtagcacagcctcaccaggacagggtagagagggctgatccatttgtctgaggaggttcatagggagttggagtcttggtgtagtccaaatcttctaaattctgtcccactcctttgtgaccaatgctataactgtcatgtaagaaatcatgaaactgtgacctcagaccttggaagaaattcaatctccaattatcttagctttagtgctaaataataatagaaagcctttagttcatcatggttcagagaatttaagcatttgagcttttgtctgtttaactttctggttttgttagaagttgctactccgcaatattgaattcct

SEQ ID NO: 647781 - DNA, 549 bp, Homo sapiens
gtgagctgtgattgtgccactgtactccagcctgggtgaaagagtgagatcctgtgcagaaacaaaagaagaaaaaaagagatrtgaaagcctatatattgaagactaccaagtactgcttagagcagttaaagacctttggaatagaaaatgtttcttcttgcatttcaagattgcttttgttttggggggacacactattttttaggaatatgaagttcttcttaggcattcctgtaaaaaaggccacttcttgataggattgtattgaatctgtgggttgctttgagttgtatttttatcttaaccatgttacaacttccaacccatggacacaagatgtctgtccattgatttaggtcttcctgaatctcctcgagcaatgttctgtagttgtctgtgtacaagtactgcaccttcttgaacaaatttattcccaggcatattattcttacaagtgctattataaatgaaatcattgtgtcaattttcttctcagattgttcattgctaacacaactgattgtttactgaaagtttgctgaattc

SEQ ID NO: 647782 - DNA, 550 bp, Homo sapiens
agtgagctgtgattgtgccactgtactccagcctgggtgaaagagtgagatcctgtgcagaaacaaaagaagaaaaaaagagatgtgaaagcctatatattgaagactaccaagtactgcttagagcagttaaagacctttggaatagaaaatgtttcttcttgcatttcaagattgcttttgttttggggggacacactattttttaggaatatgaagttcttsttaggcattcctgtaaaaaaggccacttcttgataggattgtattgaatctgtgggttgctttgagttgtatttttatcttaaccatgttacaacttccaacccatggacacaagatgtctgtccattgatttaggtcttcctgaatctcctcgagcaatgttctgtagttgtctgtgtacaagtactgcaccttcttgaacaaatttattcccaggcatattattcttacaagtgctattataaatgaaatcattgtgtcaattttcttctcagattgttcattgctaacacaactgattgtttactgaaagtttgctgaattc

SEQ ID NO: 647783 - DNA, 550 bp, Homo sapiens
agtgagctgtgattgtgccactgtactccagcctgggtgaaagagtgagatcctgtgcagaaacaaaagaagaaaaaaagagatgtgaaagcctatatattgaagactaccaagtactgcttagagcagttaaagacctttggaatagaaaatgtttcttcttgcatttcaagattgcttttgttttggggggacacactattttttaggaatatgaagttcttcttaggcattcctgtaaaaaaggccacttcttgataggattgtattgaatctgtgggttgctttgagttgtatttttatcttaaccatgttacaacttccaacccatggacacaagatgtctgtccattgatttaggtcttcctgaatctcctcgagcaatgttctgtagttgtctgtgtacaagtactgcaccttcttgaacaaatttattcccaggcatattattcttacmagtgctattataaatgaaatcattgtgtcaattttcttctcagattgttcattgctaacacaactgattgtttactgaaagtttgctgaattc

SEQ ID NO: 647784 - DNA, 546 bp, Homo sapiens
gtttaatccactgccttcttccatttcagactgtaaatcatactttttatctacagaatttgatatttaaaaaatcttcaacctccccatttaattaaaatacaattatactaactgctctaatgtccttttcttctatgtccaacatgtctgtcaatttcaactagattattagattcttcattatgtgtcatgttttcctgcttctttggctgcttgatattcttttattttttttttttttttttttgcggggggatagagttttgctctcgttgcccaggctggagtgcaatggtgtgatctcagctcactgcaacctccacctcccaggtacacaagcgattctcctgtctcagcctcccaagtagctcagattacaggcatgcaccatcatrcctggctaatttttttgtatttagtagagatggggtttcaccatgttagtcaggctggtcgtgaactcctgacctcaggtgatccatctggctgcttgatattctaagatttgatgctggaactttggtgtcaatgctcaaaatgccc

SEQ ID NO: 647785 - DNA, 574 bp, Homo sapiens
atcagtcgtgtttcatgtatagatgcctctaaacatttaatgtccatgttacctggtgatataagtccgtatcgcagcaacactcttagaaaattgtttgaccaatttttggagatttttttggggaaaaaattttgtttaactttgactcaggcagggaatatggcattatggtctacacgtagagggagattttggcctgtgggtctggaaagcagggtcatctaattctcaccaaagttaatctaggrcaccctagaatattcctgtcagaatccttattcttgcactgagaatagttatgtccttggctatgactggacagtgatttgttcatatgtgaagtatgaattgcttaatgtgacctgcttctctgaatttatttacagaaaatgaaagtgatgatgaggaagaggaagaaaaagggccagtgtctcccaggtaatgttgtggaattgttggctgttaattcagtagtgacatctggagattgtagatttagggaaaatgaggaagtgatgaatagaactatttcttccattcacccagctacaaattgtgctgatttacaatg

SEQ ID NO: 647786 - DNA, 662 bp, Homo sapiens
ggggcaataaaaccaatggctgcccctgagatacttaatattgtcgggaaagatggcacacaaacaggtaattttaacaggatgtggtaactgctgtaacatagggatgcatcaggttatgaggcagcccagacaagtggtatgtaatgacatcccttatcactgccatttttttgtcacagctcatcacaggtgtctgttcctgggcttcagatgggttactgggatcctctttagggaaggagccatgctgaagattcagtgaaatggagaatacagggattctgagagaatcaatgggacagaatgtgaggggagatgagtggtctctttttgaccactgagaaaacatttcctgagagctcctctgtagacttgattggtgctgtgctgtgtgctgtggatacagatatgaagaaaacattatcccagcgctccaggagctccatctggaaagcaagtcactgccaaatggcatgagaagtgctgtgacagacttgagtamagtccacagggttcagaaggggcggtggtcgtcactgcatgggggtgacctcagactgtcctgatccctgtattggcccctttcacagttggataaccagtcccagcctcgtgaccctgggcctcagtcagcgtttagcctaccagggtccacccag

SEQ ID NO: 647787 - DNA, 543 bp, Homo sapiens
aggcccaccatgccccaggtaactgagcaattgtgaacakctacttctgtgttgacatctggagactcctggttcagggaaaacagagcgggctgacattatcgattacatcttttcaagcaagcctgaattattcctactaacattgctgttggttttcattgcagtagatatttaggtttccatttcttcctccccttatcatttactaacctactgtaggtggaccagacttcaaaaactgtattctcatggcgactgcatggaaacttgagcacattttatggaaaattattgagcacagtcttttcatgatccctgtatgctgtgtgtcctgagggcactaactcagagtgtcctgttactccctcatcagtgtgtcacctggacaattcactgagctcgttctctctctctctctctctctctgtgtgtgtgtgtgtgtgtgtgtgtgtgtgtgtgtgtgtgtgtgtgtgtctatctgtctttctctttcattcttttccatttggccctgttctgtcccaacatgaaggcaataat

SEQ ID NO: 647788 - DNA, 543 bp, Homo sapiens
aggcccaccatgccccaggtaactgagcaattgtgaacatctacttctgtgttgacatctggagactcctggttcagggaaaacagagcgggctgacattatcgattacatcttttcmagcaagcctgaattattcctactaacattgctgttggttttcattgcagtagatatttaggtttccatttcttcctccccttatcatttactaacctactgtaggtggaccagacttcaaaaactgtattctcatggcgactgcatggaaacttgagcacattttatggaaaattattgagcacagtcttttcatgatccctgtatgctgtgtgtcctgagggcactaactcagagtgtcctgttactccctcatcagtgtgtcacctggacaattcactgagctcgttctctctctctctctctctctctgtgtgtgtgtgtgtgtgtgtgtgtgtgtgtgtgtgtgtgtgtgtgtgtctatctgtctttctctttcattcttttccatttggccctgttctgtcccaacatgaaggcaataat

SEQ ID NO: 647789 - DNA, 618 bp, Homo sapiens
tgacattatcgattacatcttttcaascaagcctgaattattcctactaacattgctgttggttttcattgcagtagatatttaggtttccatttcttcctccccttatcatttactaacctactgtaggtggaccagacttcaaaaactgtattctcatggcgactgcatggaaacttgagcacattttatggaaaattattgagcacagtcttttcatgatccctgtatgctgtgtgtcctgagggcactaactcagagtgtcctgttactccctcatcagtgtgtcacctggacaattcactgagctcgttctctctctctctctctctctctgtgtgtgtgtgtgtgtgtgtgtgtgtgtgtgtgtgtgtgtgtgtgtgtctatctgtctttctctttcattcttttccatttggccctgttctgtcccaacatgaaggcaataatttgttacctcattaatggatctatccttttagttttttaaccacttccctatgctacccatgaaacctagttggggctctgttgtgtctgatttcccctggcttattctttactttttcctccttttccaggctcagcagggagctgctggaggtagtagagcctgaa

SEQ ID NO: 647790 - DNA, 597 bp, Homo sapiens
atggtaaacaaatagcagtcagtcattatattatcatgtcaaacaaggttgtaatgactttttagaaaaatttgtaaccatcattactgtaaaagtttttaaataagatgtttatgggtttaatatacattcactcaagtgttaagtgatacaaacaaattaatgagtcaagtgctcaaatcaagaaaaraattgtgtgtttatatgtgtttcacagagataagacaataaagctggactcaacaagacagggaattctagaggagaaactgcttttataaataaccacagtcccagggctgtctctgaaaattcctctctcctttgatactgtaagtggcctgaattagtaattaagactcacctggattgaaatccttgttgcttaatctctctaagcctcagttttctcatcaataaaatagaaataataattatagtactaacattctcaaagagtcattggagagttaaattagataatatatgtaaagtgctaagcacaatgtctgacatatgaagtactcattaaatgtcaaccaattttacaatcattattccttctcttcacaccctttctgctttcctggctcacac

SEQ ID NO: 647791 - DNA, 588 bp, Homo sapiens
tgtcatggatgtcacacatagtactgcagtgatcatctgtcacaagtcttttggtaagcatatggacatgggcaacacattggtcagaaaaattgtttgcaaaatcactgaagctttccgtgctaactcagggtcatcatatgaagtctagctttatcccgggaggtagtagaatgatatccccagggatttgtggagatggtggttcagcttagcattttaagttaccgtgtggagtgtttgtccttgccrtcaggctgccaaatgacattttactattctcagtacttccttccttcctgggtcttttgtctgttgaagttttggaaaacaaattatcagatacattagaattgtgttttaaaagcactgtttgaatgtagattatttctaaaccaagcaggggtgtctcagaggctgtttttctttttttttctgactttccaacctccttttggattcttcttagtcagatacctgagtttcagatagctggagtgctgccatcattttgaaattataatattatttgtagttttactcctgttccatttttattcatacattaactcctttttcaattttgtt

SEQ ID NO: 647792 - DNA, 455 bp, Homo sapiens
tcaatctctgatagcctttcttccactygatcgattgggctattgatacttgtgtatgcttcacaaaattcttgtgctgtgtttttcaactccatcagttcatttatgttcttctctaaactggttattctagttaggaattcatctaacctctttggaaggttcttaactctcttgcattgggttagaacatgctcctttagctcagaggagtttgttattatccaccttctgaagcctccttctgtcaattcatcaaactcattctttgtccagttttgttcccttgccggtgaggagttgtgatcctttggaggagaaaaggcgttctggcttttggaattttcagcctttttgtgctggattttcctcatcttcatggatttatctccatttggtctttgatgttggtgacctttggatggggttcctgtgtggacatcctttttgttgat

SEQ ID NO: 647793 - DNA, 411 bp, Homo sapiens
atgtaatggtcttcttctaattgaggattaccatgaactttacactagaggttctcaaaatatgacctatgtgttccttggggtccctaatacccttttagggcatccacaaagtcataataagactaagaaggccaggcgtggtggctcacgcctataatcccagcactttgggaggccaaggtgggcggatcacctggggtcgggagttcgaggccagcctgaccaacacrgtgaaaccctgtctttactgaaaacacacaattacccgggcatggtggtgcatgcctgtaatcccagttacttgggaggctgaggcaggagaatcgcttgaacctgggaggtgggggttgtggtgagccaagatcatgccattgcactccagcctgggtgacaagagcataactcctt

SEQ ID NO: 647794 - DNA, 653 bp, Homo sapiens
ttcttctaactattctttgttcccttcctcccacaatgtgatagattctctttctaattactaatacttgcctgtcacatttttctttatggcatcccaatttttttttcaaggaatcctcttccccactatttcccacattattagtcatcatcttggtgaaagctagaatctgcttcttcagcctcccattcattctttgggcccacaatattcttctaataaattctctctccccaagatggtcagagttggttttcatgattataatgaagaatactggcagatatagttatatctttatttaaatgaaagaaacaataaaatgtatgttttaacattagaattccatattacaaagactgttgtacatttactttagaaagataattaacatgctttatgcagttttatatgaaatgaacctcatgagctttaatcctgttacattgtcaacaaatactatcaaaaagttcaaaaagtattatgaaatagtttgataaaatggtccctggtaagctccctaagctgagttttctttgctcagactrtgtaagcaaagttgggttcatgagcttagttgtctctacaaagacaggtctgagggggattttgcatgaaatcatagctcaatgaccattggcatatattca

SEQ ID NO: 647795 - DNA, 573 bp, Homo sapiens
tttttaattctatttatgtaacaaatcatgttattgatttgtgtatgctgtactaaccttgcaccccaggaaaaaagtctacttgatcatgatgaattaactttttgatgtgttactatatttagttttcttagttttttgtgaggatttttgcatctatgttcatcgggaatattgaccataagtttgttttttcactgtgtctatgccaaattttggtatcaggctgatgctggcttcatagaaygagttagggagaagcctctactcttcaatttcttggaatagtttcagtaggattggtaggaatttttcattgtatatcaggtagaatacaattgtgaattcatctgacccaggtctttttttgtttggtaagtgtttttgttactgattcaatttaaaaacttgtttttggtctgttaatgttttcactttctttttgtttcaatcttgagtgattgcatgtttccaggaatttatcaatttcttccaggttttctaatttgtgtgtgtaagtgtgttcataatagcttctaaggaccttttgaatttctgtggaattggttgtaa

SEQ ID NO: 647796 - DNA, 573 bp, Homo sapiens
tttttaattctatttatgtaacaaatcatgttattgatttgtgtatgctgtactaaccttgcaccccaggaaaaaagtctacttgatcatgatgaattaactttttgatgtgttactatatttagttttcttagttttttgtgaggatttttgcatctatgttcatcgggaatattgaccataagtttgttttttcactgtgtctatgccaaattttggtatcaggctgatgctggcttcatagaatgagttagggagaagcctctactcttcaatttcttggaatagtttcagtaggattggtaggaatttttcattgtatatcaggtagaatacaattgtgaattcatctgacccaggtctttttttgtttggtaagtgtttttgttactgattcaatttaaaaacttgtttttggtctgttaatgttttcactttctttttgtttcaatcttgagtgattgcatgtttccaggaatttatcartttcttccaggttttctaatttgtgtgtgtaagtgtgttcataatagcttctaaggaccttttgaatttctgtggaattggttgtaa

SEQ ID NO: 647797 - DNA, 541 bp, Homo sapiens
catattattagacaggacccccctaataatgcaggataatctcaccatatcaaggcctttaattttacttacgtctacgaagtcccttttactatgtaagataatacatcctcargttccaagaattaggatgtggatattttggggggagggggatattgttccttctaccacatgggttttctagttcttttccttttaggcacctgagcacataaacagaccattggtcactgtctagaaatctatatgcattctcatcttgggccaccttttcttcatccaatatggatgactaggtgtagtgctgtagttttgtccactgggaaaatttttgatctccactatctttcaaggctacttctaatgtggccacaatgcagctgctatccatttttggtttccacacatgctctgagacaatctgtctgtaagccatagtcagattgtgtttttctcctccttcaactggtcgtaaggatctctccccacaatatgaccgcaagcacagtgtgggtacctggtcatgaagcttacccac

SEQ ID NO: 647798 - DNA, 594 bp, Homo sapiens
ttaagttccagcatatgaattttggagggacacatacatccaaaccataatacttatttattataaaggatattacaaaggatacagatgaacagccagatggaagggatgcacagtgcaaagtatgtgggcaggcatgtggagcttccatgccctctccaggcacctccacatgctcagcattccagaagttctccaaatcccatccttttgagtttttatggaggcttcattatttaggcatgattgatgacatcattggccattggggatagactcaacctcagtacctytccccttccaggaagtcacggagtgaggctgaaagttccaaccctccaatcacattgttggttcccctagcgaccagcctccaccaactgttacctcattagaacagaagatgctcctatcgcccaagaaattccaagggattttggacctctgtgccagaagctcctaccactcaggaaattacagaggtcttaggagatctgtgtcaggaactgtggtagagaccaaatattagctccagaaatggggacagagaccaaatatatatttcttcttgtatcacaatattacacttcctct

SEQ ID NO: 647799 - DNA, 619 bp, Homo sapiens
ccatagctctcagcaaaatatattgcccacaggcttcagtgattatgggattacaytgagtttcaatttgaaagggttattggaaaaccagaaatggggtattagaatgccttattaacttgtctttttatccctacattcacttttcagaagagtctgttaacttcaaattcaacaagatcaaaatccaacactttaccttccctgaaaaagactatttttcctactaatttttcttgtcttgaaaaaatgtctcaccatgtactcaatatttcaagcttaggatcatgtcatatccataaggtaaggactgacataaaacctcatctcttttccaattatcagttaattctttataaagacaactaaaaacatgtccgtattaccttatctctgtttcgaatgctctaattcacactcatcaacttttttgcagtaacttactctctgatatgcttactccagtttacctccagtgcaatcaattttccacatagtcaccaggatcatcccttgaaactatagatttaatcggtttttgttttctggctgcaaacaccatagcctacatttgtgataggactgtacaattcattcatactacagttacatgtgccaa

SEQ ID NO: 647800 - DNA, 619 bp, Homo sapiens
ccatagctctcagcaaaatatattgcccacaggcttcagtgattatgggattacactgagtttcaatttgaaagggttattggaaaaccagaaatggggtattagaatgccttattaacttgtctttttatccctacattcacttttcagaagagtctgttaacttcaaattcaacaagatcaaaatccaacactttaccttccctgaaaaagactatttttcctactaatttttcttgtcttgaaaaaatgtctcaccatgtactcaatatttcaagcttaggatcatgtcatatccataaggtaaggactgacataaaacctcatctcttttccaattatcagttaattctttataaagacaactaaaaacatgtccgtattaccttatctctgtttcgaatgctctaattcacactcatcaacttttttgcagtaacttactctctgatatgcttactccagtttamctccagtgcaatcaattttccacatagtcaccaggatcatcccttgaaactatagatttaatcggtttttgttttctggctgcaaacaccatagcctacatttgtgataggactgtacaattcattcatactacagttacatgtgccaa

SEQ ID NO: 647801 - DNA, 619 bp, Homo sapiens
ccatagctctcagcaaaatatattgcccacaggcttcagtgattatgggattacactgagtttcaatttgaaagggttattggaaaaccagaaatggggtattagaatgccttattaacttgtctttttatccctacattcacttttcagaagagtctgttaacttcaaattcaacaagatcaaaatccaacactttaccttccctgaaaaagactatttttcctactaatttttcttgtcttgaaaaaatgtctcaccatgtactcaatatttcaagcttaggatcatgtcatatccataaggtaaggactgacataaaacctcatctcttttccaattatcagttaattctttataaagacaactaaaaacatgtccgtattaccttatctctgtttcgaatgctctaattcacactcatcaacttttttgcagtaacttactctctgatatgcttactccagtttacctccagtgcaatcaattttccacatrgtcaccaggatcatcccttgaaactatagatttaatcggtttttgttttctggctgcaaacaccatagcctacatttgtgataggactgtacaattcattcatactacagttacatgtgccaa

SEQ ID NO: 647802 - DNA, 522 bp, Homo sapiens
aatcctgttaatgtcagtgagcctctgtctctttttttaaaaaccaacctaggtcttcattaatgggcccatgtgaaaaatgaccgtggagaaatcattacaacaactcaygaaagaaaaaccatgccccaagaaaggagaaaacaaagctaactccaccgcctataacatcttggctaatcagaggtcctgagtctgtccacatgacacctttattgcaagcacaaaaaacaatcgagaaaaccagtgcactaaacaaaactacaaccaaggaccttcacagaatccactgcattcccctgctacctccaccagaacaggtgctggattccatggctgagaggccttaagacaagtcatattataggactctttagagatgctccccagtaccagcctgaagcctggtagttccactgggtagctaggcccagaagagaaataataatctctacagtccagctttcaggaagccccatccctaggggaagcaggagagcaccacatcaagggaacacccca

SEQ ID NO: 647803 - DNA, 522 bp, Homo sapiens
aatcctgttaatgtcagtgagcctctgtctctttttttaaaaaccaacctaggtcttcattaatgggcccatgtgaaaaatgaccgtggagaaatcattacaacaactcacgaaagaaaaaccatgccccaagaaaggagaaaacaaagctaactccaccgcctataacatcttggctaatcagaggtcctgagtctgtccacatgacacctttattgcaagcacaaaaaacaatcgagaaaaccagtgcactaaacaaaactacaaccaaggaccttcacagaatccactgcattcccctgctacctccaccagaacaggtgctggattccatggctgagaggccttaagacaagtcatattataggactctttagagatgctccscagtaccagcctgaagcctggtagttccactgggtagctaggcccagaagagaaataataatctctacagtccagctttcaggaagccccatccctaggggaagcaggagagcaccacatcaagggaacacccca

SEQ ID NO: 647804 - DNA, 480 bp, Homo sapiens
tgtaatgatgggacccatccttcctagagaaggcaataagaaggctcgttgtttgtagaatatttaaaacaataataatactaaaagttggtctgctttttaagttattaccatttcccagcaattctgaacaatgtcagagataaaatatttctcacctcaaagaacttttgttggtctaaacaggccctgcagtgattgttgagtttaaattatgtgtgtgtgtatacacacaaacacacacactatacatatttctttatttatatatatcacaaattgtcacaactattattttttgtttacgtacagtaaaattgactttttcatagtacatttctaaaaggttgaccgtatgtatatatttrtctaaccaccatcacaatcaggattcagaacagctctgtcaccccagaaagcttccctgtgctgcccctttataatcaaatcctcccccctacccctaatctctggaaacca

SEQ ID NO: 647805 - DNA, 480 bp, Homo sapiens
tgtaatgatgggacccatccttcctagagaaggcaataagaaggctcgttgtttgtagaatatttaaaacaataataatactaaaagttggtctgctttttaagttattaccatttcccagcaattctgaacaatgtcagagataaaatatttctcacctcaaagaacttttgttggtctaaacaggccctgcagtgattgttgagtttaaattatgtgtgtgtgtatacacacaaacacacacactatacatatttctttatttatatatatcacaaattgtcacaactattattttttgtttacgtacagtaaaattgactttttcatagtacatttctaaaaggttgaccgtatgtatatatttatctaacyaccatcacaatcaggattcagaacagctctgtcaccccagaaagcttccctgtgctgcccctttataatcaaatcctcccccctacccctaatctctggaaacca

SEQ ID NO: 647806 - DNA, 639 bp, Homo sapiens
aagtgaagtcgtttaatctgagaagcattctgggacccccatcagggtctcctcccttttccagtggtttccaaggtatcgactgctgcatcacatttgagtcaccatgggactggggaaactgtcacagaagcagatctggcttatggacaggaaacacaagggagagataagcaaccactttccaggataaaaagcataaggaaaggatctccatggcagtgtcggaacttgtttgtttgtttagttttgatgtttttctttrctgacccagagatgatctttccaagacacactgatttctggttggatatttaaacaacggtgtgtggcatttcagaatcagcatttccaggctgcttctgctctgtctgcatggcatcactggcctccatctgaacaattgcgacttcttcattatctctcttttgttgttgtttggaaatatttttattttgtctctgctctctaaaaaatgttttattatggaaaattcaaacttatacaacaatagagagaataacatgatgaacccaatgtacctgtcagcgagtttcaacagttatcagcccgtggccaatcttgtttcacctgctgctgctcactattctcatcctaacctgcctccaggttgttttg

SEQ ID NO: 647807 - DNA, 639 bp, Homo sapiens
aagtgaagtcgtttaatctgagaagcattctgggacccccatcagggtctcctcccttttccagtggtttccaaggtatcgactgctgcatcacatttgagtcaccatgggactggggaaactgtcacagaagcagatctggcttatggacaggaaacacaagggagagataagcaaccactttccaggataaaaagcataaggaaaggatctccatggcagtgtcggaacttgtttgtttgtttagttttgatgtttttctttgctgacccagagatgatctttccaagacacactgatttctggttggatatttaaacaacggtgtgtggcatttcagaatcagcatttccaggctgcttctgctctgtctkcatggcatcactggcctccatctgaacaattgcgacttcttcattatctctcttttgttgttgtttggaaatatttttattttgtctctgctctctaaaaaatgttttattatggaaaattcaaacttatacaacaatagagagaataacatgatgaacccaatgtacctgtcagcgagtttcaacagttatcagcccgtggccaatcttgtttcacctgctgctgctcactattctcatcctaacctgcctccaggttgttttg

SEQ ID NO: 647808 - DNA, 445 bp, Homo sapiens
gtcacatgatgtttgtagaaccgaaaaatgaattaaagatggacgaaatagcaagtcaaaagggcaaccctggaagaaaagtgcagcgaggtagagagtgaaaacagaagacaaatttgaagcaatgtctgttttgtagatcttgttttctggaaacttcattctcacttaagcaatgatggtttctctctcattatcctgattagagcaaggagaataattcatgagattctgcaatttaagctggacacacacacacacacacacacacacacacacacacacacacmcacacacaggcttgctagacttacacatattctgctagctgctgaggatagatatttctaagtgaaaaatgcttcataaatagtaagatgtaactgtgctaatggccatgtgacagggtataaatctacagctaggatctattcacagatgtcca

SEQ ID NO: 647809 - DNA, 593 bp, Homo sapiens
aagaataacaatccgctgttattcacgtaaaaagctgggaatagccatttgggagacacagaatccagagagataggstcagtgttccaaaattcaaagttaatttcttgcttgtataggcagaaaacaaatacatctcacaggattatgacattttcaatacaaagctagtttaagagcaacaacaaattaactacagtttgtatttcctgtacagcttattttctcttctttacagtaatttttcatttccttttctatttaaaagtcttaaattattattccatcttaaaataatatgatagccacgcacagtctgtgtgagaaaggcaacaaaaaagttaatctataatgaagatcaattgtcaatagtaaaaatgtcttctctggcacctttcagtaatttaacacatctataaaacaactcaggtaaggactaaggctaatctataatcagagaaataaaggttacagttgcttaggttacagctgcctattgttgactcaggctctgtattcacattgctttgaggctcaaaataaatttcaacagcttagattttgaatcacttaacttcatataagttaaggaa

SEQ ID NO: 647810 - DNA, 593 bp, Homo sapiens
aagaataacaatccgctgttattcacgtaaaaagctgggaatagccatttgggagacacagaatccagagagatagggtcagtgttccaaaattcaaagttaatttcttgcttgtataggcagaaaacaaatacatctcacaggattatgacattttcaatacaaagctagtttaagagcaacaacaaattaactacagtttgtatttcctgtacagcttattttctcttctttacagtaatttttcatttccttttctatttaaaagtcttaaattattattccatcttaaaataatatgatagccacgcacagtctgtgtgagaaaggcaacaaaaaagttaatctataatgaagatcaattgtcaatagtaaaaatgtcttctctggcacctttcagtaatttaacacatctataaaacaactcaggtaaggactaaggctaatctataatcagagaaataaaggttacagttgcttaggttacagmtgcctattgttgactcaggctctgtattcacattgctttgaggctcaaaataaatttcaacagcttagattttgaatcacttaacttcatataagttaaggaa

SEQ ID NO: 647811 - DNA, 599 bp, Homo sapiens
taacagacactgtgtcaagtttctgctcactgctggcacaccagaaaagtcgtattttttttattctatcttttgcccatccaccgctgatggaaagatcccagtgatctgacttacacagctactattaaaggagagtaaaaaaagattcgaggtattatttaaggcgttaagtagcttgaaggaggaagatcaggaccaaaaaccaggacagcagtctcccattaaggcagttactgtccaatcctttgaatgcgaggacttttttgctcacctatggcagtggatatcacgaaaattaggcatggaccttatttttagctcatcagctattgtgttagtgttagtattttatgtgtggtccaagacaatttttyttccactttgtcccagggaagccaaaaggttagacactcatggtgaaaaaaaaaaaaaaaaaaaaaaagacaatttcataaaatgaagaaagaaattaatgacatacaagaagatattggtaagtgaaggctcaaaacactaaaaatatttgtttgaaaaacaaaaactaaaaccattgtacttgaatttaaaacttcactagaggaacaccaaaatagagt

SEQ ID NO: 647812 - DNA, 603 bp, Homo sapiens
agggacagtgattaggcattggcctcaaagaaacgagcaaaatctttttgtccacgtttccttccttcaagcccactcgagagccttggcaacagcatgagggagaagaagttggcagtttggaggtttccaagaagaattcatgccctgtggttaattagattttagtgggyggtgaaatcagggtgaacccctctttggaaatccagtgaggagggaggaatgagcattttgaatcccaccacccagcaacatcataaactgtgggagaacatgtgacccaactcagatcaattcttgcagcattatgctaggtcagctcagtgctaaagcaacagggatggagaagagggaagcagagtccctgctctcaaggaggccagaacaagaattgttgttcacatatctggtgccgaaggagcagaaggaagaagttgtggagaaggtgggcaaacagagaagaggaagagccttccaccagagaccagtatgagcaaaggcgtgcaggtgcacagtgtgtttcaagagctgtacataatccagtgtgcctgggataacagggtgaattgaggcacatgactgcagaggaggctggaaagatac

SEQ ID NO: 647813 - DNA, 546 bp, Homo sapiens
tcaaaagataatgcagcttccaaagtcagaaacataatctaaaccagaataatattcaaatgctgtgtaaaaaggctcattaagaatatttttacagtataattttggaagtgcagaagacattagtatttagagaaacatttataaataaacttttagacagttttttgacctgactttcacactccagtaggatggcattcaggtggtccacaattccctgaatctgcacagcaaatatcatctgtagatgagtatgtgcatatttctgcaggtgagcacataacttttattgaattttcaaaatagatcaygagtccaaaagcattaggaacttcctaagaaaagaaaatgatctacatcagaaaacttgtcacacaagtagaatattttacatcaggaaacttctgaaataaagattcagaaacaccttggaataatagaaacacaatggaccaggaaccaagagtttgcattctactagtcttgcttctattaataataagttttttgataatggacaagcctcctcatttattgggcatc

SEQ ID NO: 647814 - DNA, 380 bp, Homo sapiens
cctaccaaagtcccctagcagagccaggactcagaagcaggtctgcctgaccccaaagcatgtgctcttgacctttcaactctcctgcttccaggtcctgctctttttctagaagacataacttgaaaaattaattacaaatccaataaaggaaatgctatttggaaattaaaacaaaataaaacaaaaagcacagaactcttcagtcagcaaagaactcacggctgaatttacaaagttttcatacagtagtaaccatgaaatctacataygttttaacaaaagaggaaaactcaacagaaagataagcgaaggatataaataggaaactcaagaaaaggagttacataaatggctcaaaatatatggaaaaaaagtca

SEQ ID NO: 647815 - DNA, 624 bp, Homo sapiens
ccaaattacagtggacccagctggtccatggacctgctttgcagttattccccaggttctgaatgtataattgaaatagacacacttagcaactggaagaattcctatgggatgagggccactggaacttcccttttctaccaaggtagtaaatctggggaatttcagagactaataccaccgtaacagtcttgaaagaagcaaagatggtacctatcacacactcatttaactcaccaatttaacctatgcagacattcatggattayagagaatgactgtggattatcgcagtcttaggtagtggcaactgcagctactgacctacatgtagtatctttgctagagcaagcaaacatggctatgggcacatgacatgtaactaatgccttttgcgtcatactaatttgcaaagacccccagaagtagtttgtttgtaccttacaggggaaatagtcttccttcagggctatatcaattctgctgctctctgccatgtataatctgcagagaccttgattgtctttatgctacattgacaacattatgctgatgggctctaatgagcaggatggagcaagtacttaacatcttagtaagacatataaaagacaaacccaacta

SEQ ID NO: 647816 - DNA, 564 bp, Homo sapiens
tcagacctcaacattcctttccactgacctctagattttagatgaagttttatttcctgaatcaattrcaaatcaaaaaatctttaaatccacctatgatttgtaagttcttgcttcaagatatctcatctttggggggccaaaccaatgtataacttccatgtattgatttataattttgcctgtaagttctgatttcctaaaattgactcctgcctttaaaaattcttacttgtaaaccatcagagaggttgggtcttaagtgtgagctggccaattctccttgcttggtgccctacaaataaactcccttctttctctcacttccaaacatggtgtagatgtttggctttcctgcaccgactgagtgggtccaggttcagtttgctaacaatttagtggtgacccagatgggatgaaaatcctgagtggacatctcacccaaggcacattggcccctggccacagccacccttggatcccattagcagctgccgtagccattctactcagggaaagatccatgtgtttggctgccatccctggcccatgatgctttcacct

SEQ ID NO: 647817 - DNA, 564 bp, Homo sapiens
tcagacctcaacattcctttccactgacctctagattttagatgaagttttatttcctgaatcaattacaaatcaaaaaatctttaaatccacctatgatttgtaagttcttgcttcaagatatctcatctttggggggccaaaccaatgtataacttccatgtattgatttataattttgcctgtaagttctgatttcctaaaattgactcctgcctttaaaaattcttacttgtaaaccatcagagaggttgggtcttaagtgtgagctggccaattctccttgcttggtgccctacaaataaactcccttctttctctcacttccaaacatggtgtagatgtttggctttcctgcaccractgagtgggtccaggttcagtttgctaacaatttagtggtgacccagatgggatgaaaatcctgagtggacatctcacccaaggcacattggcccctggccacagccacccttggatcccattagcagctgccgtagccattctactcagggaaagatccatgtgtttggctgccatccctggcccatgatgctttcacct

SEQ ID NO: 647818 - DNA, 417 bp, Homo sapiens
atgtttataccacaaaatgtacttgaatgtttttctatatcagtttgaattattttggatgcaagttatggaatccagactgaaagtgacctaaacaatggtgacatttatcttacatacaaagaaattcagtagtgggaatttccaccgttggytagctcagcagctcgtgatgtcagggttctgagtatgcttctctgaaattctctttactttctcctcatggtcacaaaataaatcctgtagcttcaagcatcacatcctcacagaaggaggtctaaaggcaaggaggaaaaaggatttctcctcatctgcttgactttttttttttcttttgagaaaaggtcttgctatgtttcacagtcaggtcttaaactcctaggctcaagcaattctcccacctcaacttcctgagta

SEQ ID NO: 647819 - DNA, 479 bp, Homo sapiens
cacaggcttctgcagtcctcttcataaagcctttgccaattctccgagcctaaattaactgcatcctaatttatgctcctctacagtttaggtatacttttagtggagtgtttattttattcagccttgttgcttacttattactttcttgggggcaataagttacttgagggtaggtgtggatctaagtcattgttgtatcccatccaattaactaayataactcaataaaacttattattcactgttatttctccaaagcatcaggtacagttattttcaaatactaaacatgcaaataaatatatttaatgaatatttcatcttttttcttttgaattcctgaaaattgtaataattttctaaatgaagcaatgcctcagaaatctctcagggtattaggttggtgcagaagtaattgcggtttcaccactgaaagtaatggcaagaaccgcaattacttttgcaccaaactaata

SEQ ID NO: 647820 - DNA, 479 bp, Homo sapiens
cacaggcttctgcagtcctcttcataaagcctttgccaattctccgagcctaaattaactgcatcctaatttatgctcctctacagtttaggtatacttttagtggagtgtttattttattcagccttgttgcttacttattactttcttgggggcaataagttacttgagggtaggtgtggatctaagtcattgttgtatcccatccaattaactaatataactcaataaaacttattattcactgttatttctccaaagcatcaggtacagttattttcaaatactaaacatgcaaataaatatatttaatgaatatttcatcttttttcttttgaattcctgaaaattgtaataattttctaaatgaagcaatgcctcagaaatctctcakggtattaggttggtgcagaagtaattgcggtttcaccactgaaagtaatggcaagaaccgcaattacttttgcaccaaactaata

SEQ ID NO: 647821 - DNA, 592 bp, Homo sapiens
tgagggcatgtgtagcctccagaaaaacaagttaatcagaacttccacaaagacgatgatcataatagagttgaagactgaaatcatgacacctgcacaattcctaataacataaccccagaaaagaagaaattcgatatagtagatattggacctaaggaatctctacctgtagaagttggcagagtcaagacaatagaaatatgatccagaatgagagctgggcactgtagcccatggctgaaatcccagctactcgggaggctgaggagggaggattgcttgaggccaggagcttgagaaatataatccagaatgagtaaaaataaatccataatttataaatttgcaaacacctctgaaatggaacttgagggcatctcgggacaaagctttactttttggagtcagatcatggaggacaattgctctgctatctttaaamatacagcttggtgtcaatgtgagaaagaaaacattgagatataggaaataatggttgacccaatacaccaatcccttcattatgagttaaatgaaatagaaaataactgtgttgaaagtgtttcaggcaaatagcagcaaatttgca

SEQ ID NO: 647822 - DNA, 655 bp, Homo sapiens
atagcattaaatgcctatataaaaaagagagaaagatctaaaattaacagcctaatgtcacaacttaagaaactagaagaagaataaaaaatcaaacccaaagctagcagaagaaaaaaaagataacaaacatcagagcagaactaaataaaattgagaaaaaataataatacaaatggtcaataaaacaaaaagttggggctgggcacrgtggctcacacctgtaatcccagcactttgaaaggctaaggcaggtggatcacgaggtcaggagttcaagaccagcctggccaacatggtgaaacctcgtctctactaaaaatacaaaaaatatctgagtgttgtggtgggtgcctgtaatcccagctacttgggaggctgaggcaggagaatcatttgaacccaggagatggaggttgcagtgagccaagatggtgccattgcactccagcctgggtgacagggtgagactctgtctcaaaaaacaaaaacaagaaaaattggtttttgaatctataaaattaaaaatttttaaacattaaaaataaaaaattaaaattattttttaaaatttaataaagatacaaagaaatatttctgcacagctgtaaaatgtttttgtgttttaagataagtgttacataggagttaaaaa

SEQ ID NO: 647823 - DNA, 597 bp, Homo sapiens
cactctgtttgtagaatctatgaaggggcatttctgagctttytgaggcctatagtgaaaaactgaatatccccgattaaaactagaaacaagctatctgtaaaatgctttgagatgtgtggattcatctcacagaatggaacttgtgttttaattcaccaggttggaaacattctttttgcagaatctacaaagggacatatctgagtccttttaggccaatagtgaaaaacggaatataaccgataaaagctagaaacaatatacctgtgaaaatgctttgtgatgtgtggatttatctcacagaatgcaaactgtgttttaatttaccaggatgcacacactgttttgtataatctacaaaggacatttctgagccgaatgtggcctatagtgacaatccgaatataccacaattaaaaccagaaacaggctatctttgtaaatgctttgtgatatttggattcatttcacagacttaaacctgtgttttgattcaccatgttagaaagactttttttgtagaatctatgaagggacatttctgagccctatgaagattatagtaaaaaccaaatatcacacgataataactag

SEQ ID NO: 647824 - DNA, 463 bp, Homo sapiens
tttttcattcagttgttagattttttttgctactgagttgtttgagcctcttacatattcaggttatgatccccttgtcaaatgcatagtttgcaaatattttctcccattctgtggactgtctctttacttcattgattgttactttgctatgcagaaacttttaagcttgatatgatcccctttgtccatttttgctgaggatgcctgtgcttgtgggttattacacaaaaaaactttgccaagtccagtgttctagggagtttctccaatgttttcttgtagtagtttcatagtttcaggtcttagatttaagtctttaatccattttgattttactttttgcatatgttgagagataggggtctaggttcattcttctgcatatgcrtatctattttttctcagcaccatttattgaaaggactgccctttccccagtttatgtttattttatggaaaa

SEQ ID NO: 647825 - DNA, 605 bp, Homo sapiens
tctcctgctgacagcagagagcagctccttgattctccctaacctgtctcacttctaattccctgccattgcaagggagagggtatcctctgaggcttcagtgccatcaccctaggggttggctccttcctccagttcagtaagaaaacatacatgtgaaaraagagaaatgatgagtccgaggccacatacaggttctgagcttctgctggggaggctgttttctgcactggttcatgggagtgcttgagtcagactcaccatttatcagctctgtgattttaggcaacttacttaacctctctgagtctcacttttcctcaactatggaagggggatgataattgtccctacttcataggcccttggtaaagactcaatgagacagaccatgtaaacagccttaaatagccacagatcttagctactgagtagcaaatctaattgctcaataaggattggatttggctgttgctgctgtgatgatgatgaatacaggccagcacttcatgtccttgacaaagaagagtctcctcacctccaaggacctcttaagaatttagtctttagcatcataaaaaaaatgagaataaaagtagtgaatc

SEQ ID NO: 647826 - DNA, 590 bp, Homo sapiens
gaatagacagtttttggctttgattttggaatcactaacccttgctttgcagcacgatatcaaggggcttggtttatgaattacacaacttcttacagcagcagacacataattctttttaatatagcttcagattatatgctgtcggttgaacatactgctcaatttctgtttgacaaatacacagttaaagattcaacaatcagaccagaaactacacaaaaatagcaatgggaagacagatttccttgggagagcttgtggttctgaggcatccgttaagggcctgggggtttcttgtggcaaaattcatgataaataatgagaacttttgccctaatgttatttttaccatggaccattttcagtatacaattcagtactatacatgtatatgttcayattgttgtgaaacacatctccagacctttttcatttatactcatcaaacaacaattcccttttccccctccactattattattattattattatttttaagagacagggtcttgctgtgttgcccaggctggagtgcagtagtgtgatcatagctctctgcagcctccaactcctaaactcaagtgat

SEQ ID NO: 647827 - DNA, 590 bp, Homo sapiens
gaatagacagtttttggctttgattttggaatcactaacccttgctttgcagcacgatatcaaggggcttggtttatgaattacacaacttcttacagcagcagacacataattctttttaatatagcttcagattatatgctgtcggttgaacatactgctcaatttctgtttgacaaatacacagttaaagattcaacaatcagaccagaaactacacaaaaatagcaatgggaagacagatttccttgggagagcttgtggttctgaggcatccgttaagggcctgggggtttcttgtggcaaaattcatgataaataatgagaacttttgccctaatgttatttttaccatggaccattttcagtatacaattcagtactatacatgtatatgttcacrttgttgtgaaacacatctccagacctttttcatttatactcatcaaacaacaattcccttttccccctccactattattattattattattatttttaagagacagggtcttgctgtgttgcccaggctggagtgcagtagtgtgatcatagctctctgcagcctccaactcctaaactcaagtgat

SEQ ID NO: 647828 - DNA, 614 bp, Homo sapiens
ttggtttcacctcaacttgccaagacattggcaaatggcaattactactgccattacttgatgggtgcttcacctaaatcaaaactactgattgctcatacttcaccatgtcttgccacctttaattatttaaacagaataatgartacatgtgtgaatataatatagtttgaaatactaaataaattttcaaagagaacaagagatatattggtacttgttctaaaccatcttctctgacattctgcattacaaagattaacctttgctttgaacttgcatttccctttctgttatacagtatgtaataggaaataccagtatgtagctaaggaggaagctggagtgagagatgctttctatatttattggaatattcttaatgtattgtcagtccatggaaatagacctgccttaccataataatatactccagaaaaagttttatgtaaaaatggaatgtcttaatttttcaaaaactgaaactatatcctaaggcagaaaagcatagtttcatttcttaccaaccgtagttaaagggtgggatttttatgtattgttggcactacacataattgctatatataattatagtatggccaacaatgccttct

SEQ ID NO: 647829 - DNA, 535 bp, Homo sapiens
gtatgtgttacttgttctttataatagttccacagtagtacaatcccagttttacagatgggaaaattgaggcttaaataatttgaacagcttgtcaaaatcgtgggatctgaattcatatctatagttatctgactccaaagttttgatattcctgctatgtcacactgcctctgcccttttctaactggatttacaagatagcttcctggcctctgaaatacatagtcattctgmgtgataatactagcaattaattgctctaccttacatttgtatggtgttttatacttttcaaattgatgttatgaccatttgctcatgtgttctaccttattaccttgtgaggtaatcagggtaaatattattatccatattttacagatgggtaaaataaacacaaggaagataagtgattttgcccaatgtcaaataacttataagtgacagaaccagaacagtcttgttgccctcaatttagtgctcttgtgcaacctctgacacctctttgagggaggccaggttggagagtaga

SEQ ID NO: 647830 - DNA, 552 bp, Homo sapiens
taagtactgaatatacttaactattatatgtatttattactattaacatgtgttattttttctaataaattctttatatagtttacctgcatagagtacataaattactggttgcttaaagaaaaaagttacatgtttgcctaaaatgtcaaaataggtacttcacctgaactttttaatgaatgggcaactaaaaataccccaaatcagccataatgtgatataaaaattcttaaaccttattttcactaaatcaagatgtcgatttattgtaacacaaattttatttcataacacatagtccagggggctatgaaccttgtatgtcttagaggagattaacatttttttatttcatctataggtttaaaatatatayattaaaattctcactagagactaaactgagataactaaactcattttagtgatgggtttagtccgttttagtgattgggccaaggtttgtcaaggtgaactacaaatgcattaatatccacagtgctgccaaatgctgaattattaacactgtcagctcctcggtttcagttc

SEQ ID NO: 647831 - DNA, 539 bp, Homo sapiens
aacaaatctgggaatttgttctttgaaagaataaataaaattaatataccactagctagactagtaaagaaaaaagagagaagatctaaataagcacaaccagaaatgacataggggacattaccaccgacctcacagaaacacaaatatccctcagatactattacaaatacttttatgtacacaaactagaaaacctagaagaaatggatacattcttagaaatttataatattccaagattgaaccaggaagaaattgcaaccctgaatgtaccaataatgaatccaaaactgaatcagtaataaaaagcctaccaaagagaaaaagcccaggatgagtcaaattcatagctgaattctaccagctgtaaaaagaagagctggtaccattcctmctgaaactattccaaaaaactgaggaggagggaagcctccctaactgattctatgaggtgagcatcatcctgataccaaaacctggcaaggacacgacaataaaagaaaacttcaggccaatatccttgatgaacatagatt

SEQ ID NO: 647832 - DNA, 563 bp, Homo sapiens
actgaccatcccctttttctgtttccattgtattgcttaattacaacaaaatgtrgtcatttattcccaaaagttttaaactgtttatgttgtgccctcactaaaaacacctataatgttttaatttgaacaaggtgtatatgtacatgtataaaagttaaatccatacatgtgtaaacacaagtatctttgacctcaaatgagacagaatcatgaaatttaatcattccttactcaaactgcgcaaatatattcctttgaagtatacttaataacatttagaaaagtctttaactcctaaccttacccacaaaatatataatcctcaaagagtgcttaagtttgagaaaaaaacaaaagagaatgtcactccaaaagttgctttggcaacgttaactccacattttcagttctgagcacacacagattactcttctgccatttccaatacctcccttttcacctcgagttcttcatgagctccatagaagtgagtgaatttacataaatggtattgttcattatttttttaaattcatgtatttactactatgacataatca

SEQ ID NO: 647833 - DNA, 563 bp, Homo sapiens
actgaccatcccctttttctgtttccattgtattgcttaattacaacaaaatgtagtcatttattcccaaaagttttaaactgtttatgttgtgccctcactaaaaacacctataatgttttaatttgaacaaggtgtatatgtacatgtataaaagttaaatccrtacatgtgtaaacacaagtatctttgacctcaaatgagacagaatcatgaaatttaatcattccttactcaaactgcgcaaatatattcctttgaagtatacttaataacatttagaaaagtctttaactcctaaccttacccacaaaatatataatcctcaaagagtgcttaagtttgagaaaaaaacaaaagagaatgtcactccaaaagttgctttggcaacgttaactccacattttcagttctgagcacacacagattactcttctgccatttccaatacctcccttttcacctcgagttcttcatgagctccatagaagtgagtgaatttacataaatggtattgttcattatttttttaaattcatgtatttactactatgacataatca

SEQ ID NO: 647834 - DNA, 585 bp, Homo sapiens
gctttaagtgtccttctgcattgcaatgaaaaaatctaggagcaagggggagtggacaaaaaaaaaaccaaacacaataagaaaaaacaaatcaaagcccataatgggaggggggcaggaaaagggggattgtttttctctactttgactcatttatgagttgcagtgtcttaagtgagagctaggcacccagaagaagctgtgccagttcacacagcacttgttttcaacgaggattcaatttcatttgcaaatgcttattgtcaaggcagggagtgccagtacagatgaaagcaccccaatccgtctcctccagttctttaggtttaatcacatctctccaatcgccgagggaactggagatttaaacaaacatacgtgaactggtgtgaagctgtaaaagggaccattatgtttccgattcagaatatatattcttctctcactttctaagaattaaacayaagcttttctcccttattgattagttgctgaagtaaaggaaccctgcagccttcccatgctatctgttgacatggaaaacaaggaaaatggctctgtcggtgtaaaaaagtaagtgaagct

SEQ ID NO: 647835 - DNA, 580 bp, Homo sapiens
tattgacagaatgaaggataaaaatcatttgatcatttcgattgatgctgaaaaagcattcgctaaattcaacatcccctcatgaaaaacaccctgttaggaagagaaaaaaatggccacactaaccattttaaaatatgcctccatctataagaggcaggggcaccaaaggtgaaaaggtaaacaccttgtgtaagatttcactaaaagcccagaaattacttcaagtcctggaacatgtcccgggacactgctcccagaatgataaagtccgggagggggtcccagaacattgctcccataatgattgtttcagtgttgcttgcttgggaaggggcctcctgagcaaacaaaagagggtgcccaaagtaacaactggacttaataaagggagtttacacaaaggaggattgaaggctgttgtgtgctggggaacagcaccaackccaattgcaggatcccaggtgtctgccttcccactctgatgatgactcttcctgtggtctggtgagctatggttacatgttgtcttcttttgctggttcgtttatacctacttaatgctgcttttgctgtgata

SEQ ID NO: 647836 - DNA, 643 bp, Homo sapiens
tgtagccattttggaaaacattctggcaattcatgaaagtgttaaacatagagttacaataaaacccatcaattttactcctcgatatgagcccaagataaatgaaaacatatgtccacacaaaaattgtacacaaatgcttacagtggcctacccataatagccaaaaggtagatacaacccaaatgcccattaactgactaatggataaacaaaacgtttaaccatagaaaagaacattatttgaacataaaaaggaatgaagtattaatacatgttacaacttgaagaaactttgaaaacattatgctaagtaaaagaagctagttacaaaagaccacatattacatgattccattatataaaatgtcaagaagatggaaatctatacagacacataatagrttagtggttatctaatcttggggcttgggggatggaagaataaaggtttgatagctaaagggtatgggatttctttatcaggtgataaaaatgttctaaaactgattgtggtaatggttgcacatatctgtgatatactaaataccattgaattgtacattgtaaatgggtgatttttatgatatgtgaattatacatcaataaagctattataaaaagtaatagcacaaatagctgc

SEQ ID NO: 647837 - DNA, 643 bp, Homo sapiens
tgtagccattttggaaaacattctggcaattcatgaaagtgttaaacatagagttacaataaaacccatcaattttactcctcgatatgagcccaagataaatgaaaacatatgtccacacaaaaattgtacacaaatgcttacagtggcctacccataatagccaaaaggtagatacaacccaaatgcccattaactgactaatggataaacaaaacgtttaaccatagaaaagaacattatttgaacataaaaaggaatgaagtattaatacatgttacaacttgaagaaactttgaaaacattatgctaagtaaaagaagctagttacaaaagaccacatattacatgattccattatataaaatgtcaagaagatggaaatctatacagacacataataggttagtggttatctaatcttggggcttgggggatggaagaataaaggtttgatagctaaagggtatgggatttytttatcaggtgataaaaatgttctaaaactgattgtggtaatggttgcacatatctgtgatatactaaataccattgaattgtacattgtaaatgggtgatttttatgatatgtgaattatacatcaataaagctattataaaaagtaatagcacaaatagctgc

SEQ ID NO: 647838 - DNA, 643 bp, Homo sapiens
tgtagccattttggaaaacattctggcaattcatgaaagtgttaaacatagagttacaataaaacccatcaattttactcctcgatatgagcccaagataaatgaaaacatatgtccacacaaaaattgtacacaaatgcttacagtggcctacccataatagccaaaaggtagatacaacccaaatgcccattaactgactaatggataaacaaaacgtttaaccatagaaaagaacattatttgaacataaaaaggaatgaagtattaatacatgttacaacttgaagaaactttgaaaacattatgctaagtaaaagaagctagttacaaaagaccacatattacatgattccattatataaaatgtcaagaagatggaaatctatacagacacataataggttagtggttatctaatcttggggcttgggggatggaagaataaaggtttgatagctaaagggtatgggatttctttatcaggtgataaaaatgttctaaaactgatkgtggtaatggttgcacatatctgtgatatactaaataccattgaattgtacattgtaaatgggtgatttttatgatatgtgaattatacatcaataaagctattataaaaagtaatagcacaaatagctgc

SEQ ID NO: 647839 - DNA, 648 bp, Homo sapiens
cagccccgtgtcctgggtgcttgggcctgggacacaatggagacagaacctgatttgggggtactgccaggaacrtctgtaaacagccatcccacaaggagtgaagcctcgactgaacaacagcaagaagcaaagggctgcaaacataatcagtgcagcccggagggcaagaaccttgacctcatttggtgaccaagaaaacagaggcttagagatgggaggtgatacatgtggggttgcaagatcattctgctagtaggtgacagagtccagatgagaccaggctgacccagctctgaaatcagctgtgtttttaaattttaagacaataatccatgaaggaagtcgaggaggtccctggggcgtcagctgggcaggaggaaggaagccagttttcctcatatcacttactgaatgtgacagtgaccactgctgggcttgatgcccctccacaggatgtactgtaagacaaagagttgacgtctggcttctctgcactggtggagctgcctccagtctcctggagggcaaccaaactctgaaatgttctcttacccagaaagccctgtccactctctttattaagaccataaatctctgagctccccatcactgactggggtgcggggtggtgagggaagtggcacc

SEQ ID NO: 647840 - DNA, 625 bp, Homo sapiens
tgtggttttatgtaggaagacaatattttgaagtcagatccactcgattataaattcagtgcaatgccactcaactaaacaccaatcaatatttcattgtagatttttttgtacttgaaatacaatcatgggctgtataatgacattttggtccaggatggactgcctctgccacagtagttccataagcttataatagtgcggccaggcatggtsgctcatgcctgtaatcctagcactttgggaggctgaggcgggcagattgcctgagctcaggagttcaagaccagcctgggcaacatggtgaaaccccgtctctactaacatacaaaaaattagctgggcttggcggcgtgtgcctgtagtcccagctactggggaggctgaggcaggagaactgcttgaacctgggaggtggaggttgcagtgagccgagattgagccactgcactccagcctgggcaacacagtgagactccatctccaaaaaacaaaacaaaaaaaattagaatagtgtatctttactgtaccttttctatgtttagatatgctgagatacacaaataccactgtgtggcaattgcctacagcattcagtacagtcacatgatgcacagctttgtag

SEQ ID NO: 647841 - DNA, 575 bp, Homo sapiens
ggtgaataaaaacaagcatagtcctaaatcttagaactccaatctgayaaggagatgtgtacacgaagcaaatagttataacgctgatgaacatctcaaaggaaagcctgaagtgctatgtgtatatggaatatagcaactgggcttttttgggggatgtcagggaatgctttgaggaaattacattgaagctgtgccttgaaggttgtgaaggaatcagggagctatagttagctatgggagtgctacttctaaaatggagacagccagggacatgtagaggaagaaatgaacaggatgcattctaaagggcagaggataaaatcatagtaagatagataaaaaattaatggcagaaataacagcaatatgtaagatatttggagccaatgcaatgaatcaggttgttgaatcgaacaagattcagagagcttacccagttttaagtgttactaataaatccaaagataaaagcattaaggaggcactccacgagacaaataccagataaaataggtgtccttgcaataaactaattttgtaacactctcatcaaggaggagatctgaactatc

SEQ ID NO: 647842 - DNA, 575 bp, Homo sapiens
ggtgaataaaaacaagcatagtcctaaatcttagaactccaatctgacaaggagatgtgtacacgaagcaaatagttataacgctgatgaacatctcaaaggaaagcctgaagtgctatgtgtatatggaatatagcaactgggcttttttgggggatgtcagggaatgctttgaggaaattacattgaagctgtgccttgaaggttgtgaaggaatcagggagctrtagttagctatgggagtgctacttctaaaatggagacagccagggacatgtagaggaagaaatgaacaggatgcattctaaagggcagaggataaaatcatagtaagatagataaaaaattaatggcagaaataacagcaatatgtaagatatttggagccaatgcaatgaatcaggttgttgaatcgaacaagattcagagagcttacccagttttaagtgttactaataaatccaaagataaaagcattaaggaggcactccacgagacaaataccagataaaataggtgtccttgcaataaactaattttgtaacactctcatcaaggaggagatctgaactatc

SEQ ID NO: 647843 - DNA, 542 bp, Homo sapiens
cttggtacttggaatatattctgcttgttaatgagagtgggaagagtaaattattcttcctaatgaaaatttaaaatgaaagtaatcatcattctggatccccattttgcccttggtaataaatgcatgggaagagaaaagaaggatcttgtatttgtctacagctactgtattttttttctttccaattcttccttttaaaaaacctctgttaaaataataatggtctttttacagctatttagtatgttcacagaagtttttgaattatattaaatgttgttaaagcaatttaacacctttattttgaaaacaaaatttgagagggtgtattactgccattttaaatagttttaattaaagacattatttaaagcttattgccatttttcttaaatcatgctaatatatgggcttgtartattacccgcttttattgcatcatgataataaaattgactaatcataattaactaatgtaattgtcaatttttcccttaaagaacttacttttcatcaaacgagaaataatgtttgttttc

SEQ ID NO: 647844 - DNA, 458 bp, Homo sapiens
ttaaaggtactccacatgtcttctgaattctggtctgtttcagatggcactcaatgcacagtctasgttcaaagattttttttctctggctgcacttggtgcaagctgtcaggtctatttttgggggtatcctttagaaacacaacataaaactgtataaccatgaaaaagaaaattcaggaaaaagctgccatttcaaatatttttatgttttttatcatagtggtgggagctctacctttacaaggcaaactgcagcatgatcctggcaacctcccgtgtaaatgcaagcaaatccctagacaactgacatttcttgggcagcaaagatttcaatttctacaccctggtttttggaaattctgttctggctagttgtatttgaggttttgacagccaaataaatctgctgcaaagaatgttgcacatttcattaaaaatgctccatctagacacac

SEQ ID NO: 647845 - DNA, 562 bp, Homo sapiens
gctgttttgctttcttatcattcacatgttcactgaagtagcattttaattttcttcaagaacttttcctttgcattcacaacttggctaacttgcacaagaggcctagcttttggtctatctccactttcaacacaccttcctcattaaggttaatcatttccagcttttgatttaaaatgagagatgtgccactcttcctttcacttgaattcttagaggttattgtggggttactatttggcctaattttgatattgttccatctcagggagtagggaggcctaaggagaaggaaagagacagaaatcattggccagtagagcagtcagaacacacaatattggtcaattaagttcattgccttatatgggtgcagttcatgatgccccaaaacaattagaataataacattagtgaccactgatcgcagatcaccatagcaaatgtaataataataaacaatttgaaatattgcartggtggattcgtggctcttgccaatgttcaggctctaaggatataacaatgataataatataatataataacgataattata

SEQ ID NO: 647846 - DNA, 646 bp, Homo sapiens
taatttgtgcatctcaacaacaacaacaacaacaaagaggtagcctcccatcatccaggtacaatatcatcctgtctgtatggcatagcacaaggcagctttgagcccgcactcaatgttctgcagttgtcacagaaacatggtggacattctctgattgttgtactgggaggaaaattagtctctggcaytgtaatccgagcctgatacttgtttttctgcaacttctcaactgatgtatgtgtccaaggggaagtcaacttccacaaatataaatatcctctctcatcaggaaaacagtgccacttccctcacgggccatcttcagagatggttcacccaaaggcacagatttaaaaaaaacaaaactatatttttttgttaggggcaggcaagaggatggatcatcaaatacagacagcaatatctagcactgcttcttatgacccattgctgatgaaggtcatccataactgacagacacagatgccaggacagataggaccactgataagttccccttctaagcattcaaataagaagagaaagatgccaaaggactgactggaggcttcttattaaacaggagactctgaatggcactgtgctaactcccagatgactcaaagtctaggagagttttcac

SEQ ID NO: 647847 - DNA, 538 bp, Homo sapiens
ctccacagccaccatcatattgtaggcattcatagcaattcaaccaaggtggttgttaaaacagaaaacacaaaacacgtttaatctgcaggtaacattgaaatttaaacttcccattttctttgtgtatgttcagaactttaaaactcagcctgaaataagaaaatatatgtcagcaagagcatgaaatatcttggcaaccacttctgggcagtcaccctcaactttaatgtaaggggcttcaccagctcagtctgccatcgctcaaagtacccagcaacaaacaaggttagccaagaaaaataacttctttgagacagagtctcattctgttgcccaggcyggagtacagtggcattgtgttggctcactgcaacctccatctcctgggttcaagcaattctcctgcctcagcctcccaagtagctgggattacaggtgcccaccaccatgcctggataatttttttatatttttagtagagatagggtttcaccatgttggccaggctggtctcgaactcctgacctcaggtgat

SEQ ID NO: 647848 - DNA, 600 bp, Homo sapiens
aaagaaatggtatttgagtataattctattttcaaagcctattatagcacatactttaccacgttgcattagccaatttaccatgttaataaaaacacttcatgtataattgagtttctttgtcatagtttcttgactgtgcttgggcatttaagctcattttaattttttattttgtaaagaattctctgtgttaaactttacccctgttttagaaatatgcagtattagaattactgattcaaaggatatgtattttttaaattattgcctagaatcattatacagtttactctccagtgacaatatatgagaacatctgttccactgcaccctcgccagcttaagtttttggttgaaacaacatgactggggtgaatcagcccaaggcattagttacatcaccgtcctaaaagagttagtttgacatttgttcttttcttgcagttgagacatggaacttaattatkgacagaatctggaagattgttcattctttagtgattgcttctttgttctggaaaagaataaacaaatctgagacttcagaaaactgggagtagaaatgagctcaaataaacttcctctgaaatgtcaaaa

SEQ ID NO: 647849 - DNA, 606 bp, Homo sapiens
ccatgcctgactaattttgtatttctagtagagaagggctttatccatgttggtcaggctggtctcgaactcctgaccwcaagtgatccacccgtcttggcctcccaaagtgctgggattgcaggcgtgagccactgtgcctggccttcatttttatttttattcaaaatggaacaagtgatgttctattttagttaatccttcattagtagctagttctatcaatgctcctgtaaagtatggttaaattttgattatcttttgataagataaatagattctgaatttatatactttaggttaaaattagcaaactaatcttaaaatagcacacatttaataataccctcttactcatgacttgtatgcagcttttaccaaatgtttctcaccttatggatttgacagtaacagaaatctgtaccctgttcaaaaacacaagtccactgatcttgcgcttggatgtctcagcattgtcaaattgctagaaaagttcctaaacttctgtgcttatgtctttacagactagcaacaaatagtgggccaactatactttgagtagcactactctacaaaaagattgtgaattcagtcatccttagaaaa

SEQ ID NO: 647850 - DNA, 520 bp, Homo sapiens
tgacttgaaagcagtcctgacattggaggcaactgtgaatggatggtctgtaataacgtcctgttgtgcatttgacaaaaactgatatgcaaataaagcctgtagtcattaccctttcattcatccaaaaatactgagtttctctcatgcgttgggatacagatgaaaataaaatagacaattccctggcatttataagcttactctgtaatttggcaagcaggcaataaacaagatacttaataaatataatatcaggtagtgatagccaacataaagaaagaactggcaaagaaaagcagtgaaacaacttagagagatatggaaggtgggagatttctatttgaagtaggttggtcaggaaagcttagtgtgaaacagaagacagtaaataaaataggtgaagaaccaagtcgaatggcaaggarggtaagaatgcacatcatgaagggcctcgtatgatgtagtaaagagtttgaaatttattcaaatactgtatttttttaagtagagaagcaat

SEQ ID NO: 647851 - DNA, 559 bp, Homo sapiens
  misc_feature 512: n = A,T,C or G
tactatgcacatgtgttgagatgcatgtgtggacataagcttaacttgattttatttttagtaaattactcctaatgaagacatgctgggaaaacctattaattcaaaaattattagtagtaatattaccattttgaattgttccacacttcgtaagacaytaaaaattcattcctaaaaaataaaatgcttctcaaagtagaaatgctataaatagtacaggatttcgccacaaaaaagatttgctaagtggcttgaaagctggtgcttacagatgaaattaacacatattctttagaactgtagctgctgctttaatatcccgatgaactttttcactttgtgatcatcacagtaatcatcagaatgtttgacacaaccataagatgcattgtatcttgtagagaattagggtacatgtttaactctttagggaacatttaagtatcacctagggaggcagaaaggaagacagaaattaaatgaataaatcactcaaggtcacagagcanagttgagtcaggaactcacatatattttcacacaaaaaatgtatgta

SEQ ID NO: 647852 - DNA, 603 bp, Homo sapiens
agacaactataacgtattagagagagtctggctatggtggttcatgcctgtaatcccagcatttygggaggctgaggaatgaggatcacttgagcctaagagtttgagaccagtctgggcaacataggaagacctcgtctctacaaaaattacaaatattagctgggtgtggtggtgcatgcctgtagtcccagctacttgggaggctgaggtgggggggatcacatgagcccaggaggctgaggcggtagtaagacatgattgtaccactgcactccagcctaggtgacagagcaagaccctgtctcaaaaaaaaaaaaaaaaaaaaaaaaaagattagaggggaaaaaacctagaaatagattccgtattcagattctagagcaaatgcctttaagttctggtccacttcaacaacaacaacaacaaaaattgaaaaaattgtaggtgatgcaatatgggtgtagctgataatgcaagtaaaatggttagaaacctgatcagaaaagctgtatgaaataaagatcttcatttcaggttgtaacccatgaaagtactacttggagtgtaagaaatagtagaatattcacactttcatatgct

SEQ ID NO: 647853 - DNA, 507 bp, Homo sapiens
ttcatattttataaatcctaatttttatatgtactcatttttcttgaattgggggtaattctacaaacaataaacaaggtaaatgatttttttttgccagtttgtactaagagaacatgttattttgtttcgggtgaatgtatgtatcttaatacactgtactacattagacatcaatagggaggaatgtaacgcatttttcttttgtatggaaatctgttgaaacctatcttaaagagttttgagcagaaattgaaggatgagcytgaggttttctgattagttggagaatattgttttcagtagacaacagtaagaataaaagtggaaaaattgtatttaaaattgatgttttataactttcagaagttgatgtctccattttacacattatacttataaaagtacagtaatcaactctgctttataactgttttgtgaagattatttaaaggtcaagggagggtagtagaggcacagaaaaacagaataaaattggaatcctag

SEQ ID NO: 647854 - DNA, 552 bp, Homo sapiens
aagttcatgtactctgcttggagcatgaagtaatgctatagtctcaccactatagctcttcatccatttaaaaaatttctttattattgcatgacaagaacccagatgtgaatttcagatattctctttcttaaagaagcaaatatattttttatcttcgtagtatgtctttggataacatggaagaaagggcttaatatcattgctaaaattgaagggctgagcgtggatgattttccgatgacttactgggatcctcacactcagtgcatgccaggtagtcctkcaaggcataccatatacacactgcacaccttcctggagcatctcatttccttaatgataagaaatgtgttttgtattcaaataggcacaaatgcattaggaatatactgaacaacttccctgcattttaagataaacaaaacataggactttaaagaaatttcacatttatgctggactgctttggcagaggtgggcctccaggttcccagggtaagtacactcagctttcaattaaggatattttgaaaggaagatttgaagact

SEQ ID NO: 647855 - DNA, 542 bp, Homo sapiens
ctctggagaacccagactaatacacaaagtcattgggcatggtggctcttgcctgtaatcccagcactttgggcatccaaggctggaggattgcttgagcccagttcaaaactagcctggcaacaaaataagaccctatctttgccaaaaaaaaaaaaaaaaaaaagaatagctgcgtgtggtagcacgyacctgtggacccagtcactcaggaggctgaggtgggaggattgcttgaacctgggaggttgtggctgtagtgagctgcgattgtgccactgcattccagtctgggtgacagagcgagaccctgtcttcaaaacaaaacaaaactaaggtggttacaatgatgtataatgccgtgcatcttcaggccttattattccctgttcattcctttagtccaggggtctacaaactatggcccataggcatacagcctgattttgtaaataaagtttgattggagcagtctcgcccattcatttacgtattgtcctgctgctttcataccccactggtagagctgagttgttgtgatg

SEQ ID NO: 647856 - DNA, 568 bp, Homo sapiens
gaattcgctgtcactttggttctacctggggctggctgcgtttccccacaggagaacggctctgagtttcaggatggtgccagatgacagctagagtgtctgctagaactctgggaacatatgtgacttccctatttggaggtacagaaaagactggagctcagactgtttaaaaacagttccttttctttcagcaggacatgtgtgcagtgctcattttccaaagaggaggagaagagcagggtatttaggtcaacagcaggggatccatgagtctgccatgggactcactaatgcaggagtagagagagaaccagtgagagctcttttggttgcaagtgacaggaaatccaacccaaacttttttggttaaagcaaaaagtggacttattcgctcataaagcagacaagcctaagcgtacagtcaatcttcaggggcagcttcatcraagaatcaagtctctacttcccctctctgctctactccacactagtttcactttcctgtcattgcaagatggtggccatagctccaaaccttacgctctctcgggaaaaggtaagtaca

SEQ ID NO: 647857 - DNA, 384 bp, Homo sapiens
gctttctgccctgcccaactactgacctatgtaattccaatggcatctatcatctctatctargcactaggcactcacacctcacaaacacaaacatccacatatggaaagtgaggagcttggagcagagatttcctacaatgaacatttttataaaacaagaaccaggcaacttgccacattcatgttccttcaacttatagtaatgggtaactggatggggcaatttgaactagaatttaaagtaaaaaggaaacacaaacagcctccatttgtttatatattacaattttgaaaatgtttactgaatacccaaatgctatctactttgtgaggtatcacaaatgcttttacagagtcaacatgcatagagactcagcaata

SEQ ID NO: 647858 - DNA, 384 bp, Homo sapiens
gctttctgccctgcccaactactgacctatgtaattccaatggcatctatcatctctatctaggcactargcactcacacctcacaaacacaaacatccacatatggaaagtgaggagcttggagcagagatttcctacaatgaacatttttataaaacaagaaccaggcaacttgccacattcatgttccttcaacttatagtaatgggtaactggatggggcaatttgaactagaatttaaagtaaaaaggaaacacaaacagcctccatttgtttatatattacaattttgaaaatgtttactgaatacccaaatgctatctactttgtgaggtatcacaaatgcttttacagagtcaacatgcatagagactcagcaata

SEQ ID NO: 647859 - DNA, 500 bp, Homo sapiens
aataaatcagcaccctttgtagtgtcagtaggttatacattaatcagtacatcaacaatttgaggaactcatgataagattgttttttttttttaacttagagacagtatgttgccatgaatcacaagaccttatcaaggcaacccaatttggaagcctgttttctcttaaagaaaactgtcaaatgtgaactgtaggtcatcaaatgtaattcacaataactgtwtcatattaaaagcattagaaaatgacaaaattcaaatcaattaattcagaaaaccataaatagaaagagaatatcttcaatatgtatgaaagacatacacagctaaaaaaaaaatacatacctggccaggcgcggtggcttatgcctataatcccaccactttgggaggccgaggcgggcagatcacgaggtcaggagatcgagaccatcctggctaacacggtgaaagctttctctactaaaaatacaaaaaattagccgggcatggtggcag

SEQ ID NO: 647860 - DNA, 598 bp, Homo sapiens
aagtggcaacaaaaactgaatatttacccaacctcacaatatcgagtaatactttttgacctgttagtctttttttattcaggtaatasaaaatataaaatggaaagtaaaaaattcaatgttctcaatagatagataattaggtagataaagatataaatatagatagtttctatgagtttccctcatcttcctctagcatatatgagactatatatctgtgtgtatatatgtatatatctataactatgtggagagatatcaggtacataaagaaatctctgaactctgaaaaggcatttaaagtaagagtgttctattttatcaagatcatatgcatattatttggtttgaatttttgatgacaatattaatgcaaaaaaatttaatcattagtgtagttttaaatatctaatagttttatatccacccagataattttgctgtattctaattacagatatgaagatgaatattcaatcattttcctgaagtatacttttaacctttataaaggtaatgaaaacttgcttcagtcatctgtgagaagatacctttgtatttctccacatttctgaagagatgattaagacactat

SEQ ID NO: 647861 - DNA, 598 bp, Homo sapiens
aagtggcaacaaaaactgaatatttacccaacctcacaatatcgagtaatactttttgacctgttagtctttttttattcaggtaatagaaaatataaaatggaaagtaaaaaattcaatgttctcaatagatagataattaggtagataaagatataaatatagatagtttctatgagtttccctcatcttcctctagcatatatgagactatatatctgtgtgtatatatgtatatatctataactatgtggagagatatcaggtacataaagaaatctctgaactctgaaaaggcatttaaagtaagagtgttctattttatcaagatcatatgcatattatttggtttgaatttttgatgacaatattaatgcaaaamaatttaatcattagtgtagttttaaatatctaatagttttatatccacccagataattttgctgtattctaattacagatatgaagatgaatattcaatcattttcctgaagtatacttttaacctttataaaggtaatgaaaacttgcttcagtcatctgtgagaagatacctttgtatttctccacatttctgaagagatgattaagacactat

SEQ ID NO: 647862 - DNA, 539 bp, Homo sapiens
aatattgattattatagaactgcctttcattttttaggataaagactttggaattaacgtttagaccatgggcatccaccagtgatatctgagcaagaaagagacataattgaaaaatgacaattgagaatgatttatctgtaatatttcatagaggatgagaagccataggaaacactattagaaaaagtaaataatgggtgatgagtgaacacacagaatccgattgtcaaatcagaaccccatgaatcataaattttacacagtaccaagcttaaaaaataatatcaaagatacaagcaatcaaagagmccagaggaaagagggagccatctgggatgtcaaggggaactattcatgtccttccctctgtcctggaataggtgaggtctttatgtgaggggcacatgatcatctcacatgctagcagcatttaattacaaaacacctccgttttatactccagagagttatgttgtctacctgatatctccagaaagccatattcatagatctgcggttccacttgctatagataa

SEQ ID NO: 647863 - DNA, 539 bp, Homo sapiens
aatattgattattatagaactgcctttcattttttaggataaagactttggaattaacgtttagaccatgggcatccaccagtgatatctgagcaagaaagagacataattgaaaaatgacaattgagaatgatttatctgtaatatttcatagaggatgagaagccataggaaacactattagaaaaagtaaataatgggtgatgagtgaacacacagaatccgattgtcaaatcagaaccccatgaatcataaattttacacagtaccaagcttaaaaaataatatcaaagatacaagcaatcaaagagcccagaggaaagagggagccatctgggatgtcaaggggaactattcatgtccttccctctgtcctggaataggtgaggtcttyatgtgaggggcacatgatcatctcacatgctagcagcatttaattacaaaacacctccgttttatactccagagagttatgttgtctacctgatatctccagaaagccatattcatagatctgcggttccacttgctatagataa

SEQ ID NO: 647864 - DNA, 537 bp, Homo sapiens
taagccaatattctcagggggcataaaaatgaataacataattctcactattattataaacatacattaatagtaatcttttcattttataaaaacaaaatgtattagcaatatattagtgaggaaaaaaggttctstatctctagtaaataaaattaactgatttaacaaaatttcctttttcatctcatctgtttaaagattctatttcttatcatatatatatgtatacactaagatatataatactgctatgtacacatatctttatttctatttatttctatgcacacacatatgcacatataaacacatataatgcaaacttaacatctttttttttttttttcgagatggagtcttgctctgtctcccaggctggagtgcagtggcgcaatctgggctcactgcaacctctgcctcccgggctcaactgattctcctgcctcagctttccaagtagctggactacaggtgtgcaccacgataccaggatatttctttctttctttcactttctttttttatttttgtaaa

SEQ ID NO: 647865 - DNA, 537 bp, Homo sapiens
taagccaatattctcagggggcataaaaatgaataacataattctcactattattataaacatacattaatagtaatcttttcattttataaaaacaaaatgtattagcaatatattagtgaggaaaaaaggttctgtatctctagtaaataaaattaactgatttaacaaaatttcctttttcatctcatctgtttaaagattctatttcttatcatatatatatgtatacactaagatatataatactgctatgtacacatatctttmtttctatttatttctatgcacacacatatgcacatataaacacatataatgcaaacttaacatctttttttttttttttcgagatggagtcttgctctgtctcccaggctggagtgcagtggcgcaatctgggctcactgcaacctctgcctcccgggctcaactgattctcctgcctcagctttccaagtagctggactacaggtgtgcaccacgataccaggatatttctttctttctttcactttctttttttatttttgtaaa

SEQ ID NO: 647866 - DNA, 537 bp, Homo sapiens
taagccaatattctcagggggcataaaaatgaataacataattctcactattattataaacatacattaatagtaatcttttcattttataaaaacaaaatgtattagcaatatattagtgaggaaaaaaggttctgtatctctagtaaataaaattaactgatttaacaaaatttcctttttcatctcatctgtttaaagattctatttcttatcatatatatatgtatacactaagatatataatactgctatgtacacatatctttatttctatttatttctatgcacacacatakgcacatataaacacatataatgcaaacttaacatctttttttttttttttcgagatggagtcttgctctgtctcccaggctggagtgcagtggcgcaatctgggctcactgcaacctctgcctcccgggctcaactgattctcctgcctcagctttccaagtagctggactacaggtgtgcaccacgataccaggatatttctttctttctttcactttctttttttatttttgtaaa

SEQ ID NO: 647867 - DNA, 421 bp, Homo sapiens
gcaaaattagatgaattgagtatacattttcttttctaaaggctatgaaaaatatttaataacaaaaaagtaacattaattatataaaataagaatgttacatatgctttttaaatttaattataagctataaagggatatagtagttatacatactacttcacataataccatgattctgagtgcatagcaracaacaacataaatgtatgctcatgatctatgtggatttctaaaattatttgataaataacattcaagaattctccaatttagctctcagaggtacatggtcaccgaagttaaaaatacgtactcagacattcaaagccaattcagattatgtgattgagaaagttgaacattttaatttttatgtttcccgttctagacacattctcctgcatttcattctggccaa

SEQ ID NO: 647868 - DNA, 429 bp, Homo sapiens
ggaagggtttggagagatcagaagaagacaggaagatgaggrcaagttttgaacttactagagtcttgttacattgttgtgaccaagctactgatagagacacacaatgaagtccaggctgaggaggtctcagatggagataaggaacttaatgggaactggagcaaaggtcactttagttaggcattagcaaaaaggttggctgcactgtgcgcctgccctagggatctgtggaattttgaacttgagagtatctcaagttctggtgggtatctggtggaaaaaatttctaagcagcaaagcattcaggaggtaatctcactacttctaacaaactattttgatgtgtgtgagcaaagaaatgacctcaaactgaaacttatatttagaagggaagcagagtgtagaaacttgaaaaatttgcagcct

SEQ ID NO: 647869 - DNA, 517 bp, Homo sapiens
caattaaactgcttttctttataaattacccagtctcaggtatttctttagagcaatgtaagaaaggactaatatagaaaattggtagaggaatatgatattgttgtaaacataccggaaaatgtgaaagtggctttgaaactggatagtgggcagagattggaagggtttggagagatcagaagaagacaggaagatgagggcaagttttgaacttactagagtcttgttacattgttgtgaccaagctactgatagagacacacaatgaagtccaggctgaggaggtctcagatggagataaggaacttaatgggaactggagcaaagktcactttagttaggcattagcaaaaaggttggctgcactgtgcgcctgccctagggatctgtggaattttgaacttgagagtatctcaagttctggtgggtatctggtggaaaaaatttctaagcagcaaagcattcaggaggtaatctcactacttctaacaaactattttgatgtgtgtgagca

SEQ ID NO: 647870 - DNA, 426 bp, Homo sapiens
ttccatttgtttatatcatctctaatttatttcagcagtttttgtagctctccttatggagatctttcacttatttggttaagtgtatttcaattttttttctgctgctattgtaaaagaaattgagttcttgatttgattctcagcttgatcattgttggtgctatgcagtagtactaatttgtgtacattcattttgtaacctaagattttatgaattcattcatcaaatagaagagtcttttggtggaattcttaggcttatctaagtatatgcttaaatcatcagcaaacagagataatttgacttcctcttttccagytcggatgccctttatttcttcctcttgcttgattgctctgggtaggacttccagtactatgttaagtagaagtggtgaaaatgggcatccttaacttgttcta

SEQ ID NO: 647871 - DNA, 624 bp, Homo sapiens
tctgctgtgtgcgtaaaactgtgcatgatgatattatagaaggtactgtgaaaaggcttaaagcagtatatttaaccactgcctaccagaatagtacatagagaagcaaacctaatctataagcaacaatgagagcgtgctacagataacttttaatattgtaaatatatatgatacagattataaaatctttatgaaataatctatagaagaggtgaaatgggtctctgccaggagaatgcaaaggcagtaaaaaattaaaaaccaaaatattgagaattattttgaggaaagtgttagtagaatttaataatacatttaatagmaacataagattaaaaatgcaaagatgaattcaaagttgcttacattcaaaaataactcattaaatgtacagtattttaagcacacttttgatctatgaagagtataaatatgaataagacatagttctttaggctagacatagagaatattttttgtacagaaataaaatctagagtatgtaatattaggggaaagaaaatgcctcatagatgtcaataaactttgttccctctatttttttttactagtttcatttcctgtaataattgtggtaacagtaatgctgaaaaaattaaa

SEQ ID NO: 647872 - DNA, 624 bp, Homo sapiens
tctgctgtgtgcgtaaaactgtgcatgatgatattatagaaggtactgtgaaaaggcttaaagcagtatatttaaccactgcctaccagaatagtacatagagaagcaaacctaatctataagcaacaatgagagcgtgctacagataacttttaatattgtaaatatatatgatacagattataaaatctttatgaaataatctatagaagaggtgaaatgggtctctgccaggagaatgcaaaggcagtaaaaaattaaaaaccaaaatattgagaattattttgaggaaagtgttagtagaatttaataatacatttaatagaaacataagattaaaaatgcaaagatgaattcaaagttgcttacattcaaaaataactcattaaatgtacagtattttaagcacacttttgatctatgaagagtataaatatgaataagacatagttctttaggctagacatagagaatatwttttgtacagaaataaaatctagagtatgtaatattaggggaaagaaaatgcctcatagatgtcaataaactttgttccctctatttttttttactagtttcatttcctgtaataattgtggtaacagtaatgctgaaaaaattaaa

SEQ ID NO: 647873 - DNA, 317 bp, Homo sapiens
cttatgagtatttttctgtgctgtagttattcattcttatagatatgtaacataattcctttttcaaaggtaaaaattgagctatctcttgttgaggatttgttgatctctgtctaaagtttcaaaaataaagaactttaaaagcaaaatgtaaattcctttcaagttttagtaaaattacttcaaacttagtagcttaaacaatacagatttattatgttacagttctgtaagacagaaatctgacttgatcmcaccatgttaaaacgaagatactgccagggttggttttttcttgggggtggtctgtgggaaga

SEQ ID NO: 647874 - DNA, 415 bp, Homo sapiens
ggcttccttgctcctgcaggttgcagacggcctatcataggacttcaccctgtgattgtgtgagtccattttccataatgaactccccttcatatatacatgcatcctaatagttctgtccctttagagaaccctgactaatacagttggtttcctgaggaaggaactcacgaaacaaacgtaagttccaagttttaaaactaggaaggtcaatttctatgcttattcacaaataagtaaatagtataaatagtatttttatggggaaattcagctggttttatatatctatatatacacacacacacgtatatatgtgtgtatacatgtasgtatatatatgtgtgtgtacatgcatatgtatatgtaaatttatatgtatatgtgtgtgcatatatatatgccacgtgtgtat

SEQ ID NO: 647875 - DNA, 442 bp, Homo sapiens
tcttcacatggctacaagaaggaaaagtgccaagcaaagggagaaaagccccttataaaaccatcagatctcatgagaactaactcactatcacaaaaacagcaagagggtaatggcctccctgattcaattaccttccaccaggtccctcccacaacatgtggggattatgggaactacagttcaagatgagatttgggtggggaaacagttaaattktatcatatgtccataccctttttagaatattttaacaaaaaaaaatcacagattcatgtgggactccatggcaaatgtttctggggcactattttccaacttgttgcaagtacctatacagatactttttctgttattcatttttttctctaggacaaaacaaagtgaaactcagtaagattaaggtcattgtgggtgctgaatttcactttaaatcaatact

SEQ ID NO: 647876 - DNA, 608 bp, Homo sapiens
taactcaagacaggatagttttgctcttcattgcacatgagtactctgatcctgcaccttggtggaaacgggatattcttacatgagtttagttcaacttagtgccagtccgccctgtagtatggatgagaaaaacagagatcttgagctatgagcctaaagatatggttggactgtgtttgtatgatcacccttctactggctaaaaccggaggaatgttacaaattatgtttggctaatgtctgcctgyccatgtgagataagcttttttgttgttcttgttgaagaaaatattttaacataatatatcagtatactcaaggtagagaaagatttataatataaaagtcattctttttttcacctgtattatctattaaagctgctaaatatattcatgatccaaagggaaggaaaaaatagacagatgtcagaatcctaagaaggcttttgcccttaattcatatgtagtttttgggttctcagaatctttttagagattcaatatttcttcttttttgtccttgtatggctgcctgagagatagaggagttgtagctaaaacaaacatttaaaaatacactagatgatggcacaacttataaat

SEQ ID NO: 647877 - DNA, 536 bp, Homo sapiens
acacaagctcactggctggtagcctgagtacaaggcaggggcagcatcatcatatacttcctcatcactgagagcaggagttagccgtccctagccatttctgtctcagagcccaagcacattttatttatcagcaaagcccttcttgctgtccttgaaagaaaacrttagttatgctgcttctggaaagcaccaggttattgctggtcatctttctgatttaaccacatgttaacatcagaaatctatcgactgcgtgtacatttcaaagactattaaacaagaacagagtagaaaaatggaggtcaaattcattctggcttattttagtgcaaccattattaaaaatatcttattaaagaagtaaagccaagacaaagcttaaccagactggatgtcaggacaacaggtgtaaatcaggactgtacttgcaacatagatatatggtcattttaatcatggatcattgacagagagagacctcattttcctttctgaaatggctatggttttatggagttaagtggtttatttct

SEQ ID NO: 647878 - DNA, 614 bp, Homo sapiens
tgtcaagcttcaatctctaagttttcctttgctcaaacatcttcttcaacccactcaaatgcttatctcatcagggtccccatatgccctgctgagctgcagaatctaggaatgtggattttgctgtatttcttmttgaaaatgtaggctgcagcttaagtgaaacgcacaacttccccagctcttcgttatttcaacctgaacaacgtaaagaaagcaagctatctccaaggccagagcaacagcaatttctctgagggcggacatcatttccaaaccttcaatttaggtataatgtagccagaagatggggactgtaaaccagaatagagttagaagagaggagaaatctgtaaagatcccctgaatcaattgaaacacaagtggaaggtaacaggaagttaccttacctgtgtgactttgggcaaattctggacttctcagacttatcacctataaagggtgcatcataagacctattgtgtaggtttcttgcgagactggaaatagcacatagcccagtgcctagcatataggtggaactcatttaatagcagttattgttattattctttgctttgcagagaccagggcttgtaaatgaattaagaaat

SEQ ID NO: 647879 - DNA, 560 bp, Homo sapiens
ttgagggtcactgataaagactcaaagaatcttgaaaatggaaasgttctcagaagacacagaggccaacctccatttaaatgctatagccatttattgatggttatagcatctggcttccaccattggtaaactcaccacttcatacagcaccaattacacatgcttacaagcaagagactcaaaacaaaacaataaataaaagaaacatgggggaggcaacttcttaactgaactttcatttttctgtaacattatattatataaaccttctgtagcacctacagaaatctaaaaatagagattagaatctattgtggcagaaaataagtttgtcactacatcaaccagccacatgggagttaatctcattaacttttatattgtaggatgatgcataccttggagagatgagttcagtggtaaatgacatgaatcttggaatttctttacattaatatctacttcttctgaaacttcagtttttgaatggaattaaaccaacaagttctagttgtgtatagaagaaaatttgcataagtctatagaagtctatataa

SEQ ID NO: 647880 - DNA, 455 bp, Homo sapiens
tttcattgccagttttacacctcatcattttattccccaacaaaaacaagttgtargttttaaaaattaaatttgattttaagttttagaccaaaaccctttgaacaaagtctcagctacttcatatggaagacattaggccaggtaaggccctgtagtagctctcctgtgactaagtgcatgagtttacattagtggaagcattatcagaatatctgtgtgaccgcatcaaattcaaaccacatcttccacctttatctctaccatagacgatattttgagcttgactcttacctgactcttaaatcttcaacccagtaggctctgggcttagatgggaagagaaggaatgggatgttattcactatcctttaaaacatccatgtttattaatagctagatgtttccaaaaactgaattagccataaatacaaagaagtccttttttttgaact

SEQ ID NO: 647881 - DNA, 515 bp, Homo sapiens
aggctcccctaaactcaaacctagtgaataagcaggagtcagttcaggaaaaaaaaaaaaatgaagagcaacagaaaaggatttcgggctggattaagagtccagtggttcttaaagtagggtctctggaccagcaagactggcatcacctgggaacctgttttaaatgcagagtcttgggtcctaccctagayttactgaatctgacactttgagatgagactcagaaatgaaggctttatcaagccctcccagtgattcgggtccagccggagtttgacaaccactggtacaggcgatgatgaactacagaatatctggagggtaaacagggatggggaaggggggtggttaggcagagatgttgctggagggatgcatagaaggcatatgcagaaaaactttgtatattatgagaaaagttttggatcttatctggagaataatgaagagccattacattattatattatgaatacgaaacacacaaaataactatttaaaaatatatgtga

SEQ ID NO: 647882 - DNA, 525 bp, Homo sapiens
cctgcattattccagtatctgtggaggaattttgcattaggtacacatgacagtgagaatttcccctcctagcgggggaaatcaaaataaagatccggacagaaactaattatactcattggcagtttgtccaaggatagctacaaaagaatatctttttatgtgactaaaatactgattgtagcctcctctttacctcaataattatgtctgcagaatctcaccatcaagtggccatcctgacatagacacatttattcctgggcaagaaatgagaagcacaaactacttcatttctatrgcagtaaagcattgcaattggcacagatatttataaatagatttgatttctcaaatggccacattgccaatagcccagggttcttcctactagcccatgctggcacatcatcctgaaaagttgctctgatcaactatccttaatagagaatgtaccacatgctgagctctgtgataagttaaatatgtaccaagtcatttcatcttcaagtgatttataatgca

SEQ ID NO: 647883 - DNA, 603 bp, Homo sapiens
taccttaagcttgaacgactaagaaaaacatctgattccttttaaaacagaactttaaaacgagttctctttttatagtattcaaagtactttcatgccagttatcttgttgggttcctacaaaaattctgggagatataaataacatattttgtgggaatgaggctgcaagaaatagaataccttacaaacacttgcttaaacaaacaggggtttattattctcacttaaagaagagtccggggcagagtytcaggggtgtcatcaaagatccagtctcctatctcttccctctccttttttttttttttttttttttttttgagatggagtctcgctctgttgcccaggctggagtgcagtggtgtgatctcggcttactgcaagctccacctcccgggttcacgccattctcctgcctcagcctcccccaagtagctgggactacaggcgcccgccaccatgcccagctaattttttatatttttaatagagacggggtttcaccgtgttaaacaggatggtctcaatctcccgacctcgtgatccgcccacctgggcctcccaaagtgctgggattacaggcgtgaggcaccgcgcccg

SEQ ID NO: 647884 - DNA, 595 bp, Homo sapiens
taaccctcttctatgggatgaaattgaagcaaagtgaggttaagtgttttgcccattgttaaattctaacctccatcaaagtggagatcacaacccaaattcctgattaatatggctcttataattataccatgttatggacccacaacatggaaggaaaaacaaagcaagtggccagctatttgttcatgagattggttcagccacttcccagtctgaaaggattatatatttaaaccagccttgtcaattatatgtaragatggatagaggatgacaggaaagccctggtcttcttcaaaaagctgtccagaaaaaacctgaaatattcttaattctcatttaaacatgtttccgtagtgtattagctggttttcactaggttatgcaaaaataaattactccaacattaaaattaaatgttaaaaaatttttatttcttgcttgccttgcattttgatgatgattttgttgttgctctgttcatcccagggtgcagctgaaggaattagaccctatgagacattctggcctattagctaatggaaaagaatgagggcatagccatgcaatggcttcctgcaaagaagaattt

SEQ ID NO: 647885 - DNA, 595 bp, Homo sapiens
taaccctcttctatgggatgaaattgaagcaaagtgaggttaagtgttttgcccattgttaaattctaacctccatcaaagtggagatcacaacccaaattcctgattaatatggctcttataattataccatgttatggacccacaacatggaaggaaaaacaaagcaagtggccagctatttgttcatgagattggttcagccacttcccagtctgaaaggattatatatttaaaccagccttgtcaattatatgtaaagatggatagaggatgacaggaaagccctggtcttcttcaaaaagctgtccagaaaaaacctgaaatattcttaattctcatttaaacatgtttccgtagtgtattagctggttttcactaggttatgcaaaaataaattactccaacattaaaattaaatgttaaaaaawttttatttcttgcttgccttgcattttgatgatgattttgttgttgctctgttcatcccagggtgcagctgaaggaattagaccctatgagacattctggcctattagctaatggaaaagaatgagggcatagccatgcaatggcttcctgcaaagaagaattt

SEQ ID NO: 647886 - DNA, 601 bp, Homo sapiens
tgtaagaagcacattggtttggtctggaaaggttgaataacttgaagcaaaggcaggaagactcaaagcagggaggggactttcaggtcacagataggtgggagacaaacagttgcattgttttgagtttctgattagcttttccaaaggaggcaatcacatatgcatctgtctcagtcagcagagggatgactttgaatagaatgggagtcagatttgccctgagcaatttctagttggaaggggcccaagatatttttctttcacaagtgtgtacaaggataagtgaaaatctacacaatgagctctgggagtcctttcctcttscagctcccaggatgtcagcagccagtacacaaaacaaccttattgattttccactaccatgcacatatcataagagatggtggattgttttcgtaagaaaagagatgatctatgtactgcatgatagctcacaaattaagccaaaaaatatacaagcaatgcccacacatttggagattccaagtaactatttttcaaatttcctcttctttaaacataagtgtcaggcctctgagcccaagcctgccagtatacatccagatggcctgagaca

SEQ ID NO: 647887 - DNA, 600 bp, Homo sapiens
tgggttctccctaaacagggaacccactactgctataggaagttacatctctatttattctgtcctaataattggggctgcatagaatcacaagttagaattggcaatggaattttcatgcccagagtgaggacagcagataaaaagcggcactttagatattcatattatggacttttaatattcatctgtttcagtgtaataagtgtaccacatctttaataactgttgacagattcaatttcatttttaaccttatttatcattatttaatgaaaaatattaccaattgaaattattttctcctgtcaaatataaatttaaaataaattcaattaaataacatgttttttaatgtgctcacttcattttgttttctgtgatgtaatgtttccagtgttcacactagtgtcccaaagttgacatgtcatacacgagaaaggycatatatttaatagacaatggaaatgtaatgattccattattaacttatctaatatccttcactacaacaacaaatgtacatacacacacacacacacacacacacacacatatgcacacacataccatataaaatcttttatgttgatttgcatt

SEQ ID NO: 647888 - DNA, 596 bp, Homo sapiens
gactgaattattggttccaatccatcatcctctttaatagtattatgtatctatacctgggcaagggtttgtggtgcatggagtatatttctcctcctcttgactttggatttgatattgccatttgctttggcccatggaatattagcagacatgatgtgtgcagaagcttgaaatgtgctctgtggttgggcatgccttcttgcacttttrccactgtcagaagatcatgccctgcagctgctgttccccaaacctggatcctggaatgaatggcacagagtatacctaaaccttgtctacaggctggagctaagctcagctgagatcagcagactccagctaactggaagcctgaagcaaagtccagttaactccagttaacccggacatttctgtgtgtgtgtgaagtgtttatggttgtatgccatggaatttgagggtaatttgttatgcaccattgtcatggtaatcactgactgataagagattactctgagcttacaaagaaagttcctgaaatacacagaactgccttgccatggagctaggctgccctggaggctggccatctagggaagaaacaatgcagacag

SEQ ID NO: 647889 - DNA, 575 bp, Homo sapiens
tgtgacagccaccacctcgacttagagagtccaggaaggaactttaatggaaaaatatttctatctaatatggaaacaaggaagttgcatgacttcactctgtctctgggttgagactagtggggaaagaaagaacaatgtcagtggaaggagagataaggaggagagcatatggcacaagccaggagaaagaaaattgcattaacaaaaacaccaacctgcacccttgtttagttctttctcactgtttcaaacagaaacctgtggattctggtcagttgcccacaggcaaagtatccgttctgtgacctgtgttgaggtcacagtgttcactcatctagattttagctccagtaataaactgttagcatgtgacataaacagatcacataaagatgtacatctgtcgctgggcaggaggctgtcccatagtgctatgtccacagtgaggaaagttcacaagaggatacaagtgagcccgatacaagccctgcagtctggaagcaggctttctgttttacctctgcagcactcccacctacctgmaactctgtcccagtatctggccagaaacc

SEQ ID NO: 647890 - DNA, 621 bp, Homo sapiens
aagtggtgatgatgaagaaacaaaggctttgtgaaatatgcaagactgggtaaaacaaggagagaaaaatagtatagcaatagttattagaatgatggaaccgagtgaactcgttgaattgcttagaggtcattgcwgccatcaagtgtgggttgcattttactagtatggcaaaatgacctaataattgaaccaaaaattgaagttaatttgtaagaattatgtgactacttagtagaagaaaaaggatgtgatattgggaaaggaaagcttaataataaattgtcattaagacacaaagtcaactatcatttattgttactatattccaatttctgtgctaggcacttacacttaccatcgcaagttgctctcaggttattcatttatccaacatgcaataagtttctgggagttataaggtgttttgccagggatatgataattaatatcataaccttgttggaggcttagtttgcaaaacatatttataagatgattatcaaaaaaagaatgattaatgacttgatagaagagtacaaatagtggtgaattataggaaaaagaaatacactccgtttagcttgtattttagtttcctagctagaaaatgaaagagct

SEQ ID NO: 647891 - DNA, 585 bp, Homo sapiens
cctcatgtatgagaagtgaaagaatgtccccaaagcactcagcttggagcctgccacatgcaatagatgttgcttacatcatcatcatcatcatcagaggaatgctcatgaatttggaaagggcgcttagccacaattttgggcaggggagtggaaaacagggctggtccattgattcataggagaaggatggtaaccctgactttcactttcctggtctgggctttgtggaaatggggaggaagtggcagaacaactatatgagaaaggaagtcagggaagatgggtgttaggaaaaaagagaaaccgaacttctccaaggcctggctagtgccagagtctgggctagaaacacaagatacttcatttagtcttccccagagcccagccaggcaggtaaggtttctgtcattttgcagaagaggaaactgaaggttagtgatcataagagacatgccccaagtcccttggctggttaggagattatgytgagacctgaacccagctctggctgaccttgtcaatgtgaacagcaatttcacaccaccggtggagagaaaagctacctcctagacataaacatca

SEQ ID NO: 647892 - DNA, 433 bp, Homo sapiens
tggattttagtatatttttaaaatcaaaaattgagttaattttttttttgcaaaaaattaaaagtcaccttatgtttatctctggaatccagtttggactgattttttaaaaagattctaaagcatttctaatataaaacttttctgctccagtttccagtggaaatttattatttgagggcagacttttaaatatgtcaccctctgccagcatgcctcagggtaaaagtataataaataaagcatatattgaaatagaatatttcaaataaccggcagcatcattaaaacrtcaaattaaatgaaaagaaaacagattctagtttccttatataatcagatattcttcattaagggctctcaagtggattgtaataccagcaatgccagctgtagcttcccagttaagtacttgtcttactgctccccacca

SEQ ID NO: 647893 - DNA, 378 bp, Homo sapiens
ttcaaaactgctctatcaaaagaaaggttcaactttgttagttgagtagatacagcataaacaagtttctgagaatgcttctgtccagtttttatgggaagatatttcctttttcaccttagccctgaaagcgctccaaaagtccagttccagatactacaaaaggagtgtttcaggactgctctatgaaagggagtgttcaacttttgacttgaatgcaaacatcagaaagcagtttctcasaacgctgctgtgtgctttttatatgtattcccgcttccagcgaaatccccaaagctagccaaatatccacttgcagattccagaaaaagagtgtttcaaaactgctccttcaaaacggtggttcaattctcttag

SEQ ID NO: 647894 - DNA, 459 bp, Homo sapiens
gaaagcgctccaaaagtccagttccagatactacaaaaggagtgtttcargactgctctatgaaagggagtgttcaacttttgacttgaatgcaaacatcagaaagcagtttctcacaacgctgctgtgtgatttttatatgtattcccgcttccagcgaaatccccaaagctagccaaatatccacttgcagattccagaaaaagagtgtttcaaaactgctccttcaaaacggtggttcaattctcttagttgagtacacacatctcaaataagtttctgagaatgcttctgtctagttgttatgggaagatatttccttttccaacataggcctgaaagcgctccaaatgtccacttccagatactacaaaaggagtgattcaaacctgctctatgatagggaatgttcaactctgtgtcctgaatacaaacatcacaaagatgtttctcagaacg

SEQ ID NO: 647895 - DNA, 529 bp, Homo sapiens
ttctgtgctattacttctgtgcttctccatttcttcttcaaccttgagtgagagtttgatgttcaggatgattgttattgctttattcaatacaaagaacttttttctgtttgcattgatttcatcatcacttgactcagtttaattataatttcagtcattaaaatatttggtgcttactttaattttatcacatctggaactatcatcatataattataattattataattttatcatcaacatttttgtaaagtcagcttcatttctgtttcaatgaatgagacagaattttccaaaatttcaagcagggcccttcttaattttgtgcttttattcccaaccaccctttactatgtattatgaatttttacctcatttgactggcacaaacatggaaataagaagataaagacacaaagcttgtcttcttctgtctttgccacttgactttcatattaaacagccagaytgagaggatacaacactgtggggtttcaggaaaagaaaggaagctttcccttttctg

SEQ ID NO: 647896 - DNA, 560 bp, Homo sapiens
tggcaatggccatggggcagcaggtgtttcctagggtgctcatcagcacgcaattcaccagctgaggggaatgaggaaggaggagttgatggggtgtgaggagaagcaggctgggagaaggaggatttcaggtctgacgaggacatcgttctcaaggcagataccactcccttccaccctccaatgtagaaactgtgtgcagatgtgggggagcccatgggtagagttaagattcaagcgtgggagtcttcgggttaaaatacctgaaaaggtagagtggwgttaaaagaaaggcatggactttgcagacagacagaactgagtttgagctccagccgtgccacttactatctgcatgattttacgcaagttactgaaactctgaattctgggggttgtcaaattccaaaatgggcctgaccacacccacctcacagggttgcaagggcaacctcgtaaaataacctctgtagaatgcctccatggtgtcagtcagcacgtgtggacactcccccatcctgtgtcccacctcccacttccatagagcgtggaggtcttcc

SEQ ID NO: 647897 - DNA, 577 bp, Homo sapiens
gtaaggaccagttccctggcccaccccatcagagcagacagcatctctctcatttgatcttttcctgagtatcaatcctcagtgctaaygggtcacttctcccacccctgctgagggacagccatcaactcctagaactcctggggactcagccccagcaacgtgcaggtgggctgcctgtcccttgcacccaatccccaaggcctcagccaccaagatgcttatgttctttcttgtactgagtcaggctgaaagaaaaaaaaaaacagagaggaaattagatgtgagtctgagagcccccccccgccaagaggcccccagccctgaccccaggctcccccactcactgggcatcctcgccctccagcaggcggtggtaggtggtgatctccagctccagccgcatcttcatgtccaggaggatcttgtactcctggttctgctgctccatctcgcagagaagctgggccagccgctcctccacactgccgatcagcccctggatctgggacagctgcatgcagtagcggttctctgtctccgccaggttgccctccagggatgctttctgcaggag

SEQ ID NO: 647898 - DNA, 577 bp, Homo sapiens
gtaaggaccagttccctggcccaccccatcagagcagacagcatctctctcatttgatcttttcctgagtatcaatcctcagtgctaatgggtcacttctcccacccctgctgagggacagccatcaactcctagaactcctggggactcagccccagcaacgtgcaggtgggctgcctgtcccwtgcacccaatccccaaggcctcagccaccaagatgcttatgttctttcttgtactgagtcaggctgaaagaaaaaaaaaaacagagaggaaattagatgtgagtctgagagcccccccccgccaagaggcccccagccctgaccccaggctcccccactcactgggcatcctcgccctccagcaggcggtggtaggtggtgatctccagctccagccgcatcttcatgtccaggaggatcttgtactcctggttctgctgctccatctcgcagagaagctgggccagccgctcctccacactgccgatcagcccctggatctgggacagctgcatgcagtagcggttctctgtctccgccaggttgccctccagggatgctttctgcaggag

SEQ ID NO: 647899 - DNA, 317 bp, Homo sapiens
cagagtctcactctgttgccctggctggagttcagtggcatgatctcagcttactgcaacctctgcctcccaggttcaagcaattcttgtgcctcagcctcctgagtagctgggacyacaggcatgagccaccatgcctggctaattttgtatatttttagtagagacagggttttgccaaattgcccaggctggtcttgaactcctgagctcaagcaatccccccaccttggcctctcaaagtgctaggattacagggatgaaccactgcacctggcccctctttttcagttttaaaggatagctttgctaggtat

SEQ ID NO: 647900 - DNA, 317 bp, Homo sapiens
cagagtctcactctgttgccctggctggagttcagtggcatgatctcagcttactgcaacctctgcctcccaggttcaagcaattcttgtgcctcagcctcctgagtagctgggaccacaggcatgagccaccatgcctggctaattttgtatatttttmgtagagacagggttttgccaaattgcccaggctggtcttgaactcctgagctcaagcaatccccccaccttggcctctcaaagtgctaggattacagggatgaaccactgcacctggcccctctttttcagttttaaaggatagctttgctaggtat

SEQ ID NO: 647901 - DNA, 317 bp, Homo sapiens
cagagtctcactctgttgccctggctggagttcagtggcatgatctcagcttactgcaacctctgcctcccaggttcaagcaattcttgtgcctcagcctcctgagtagctgggaccacaggcatgagccaccatgcctggctaattttgtatatttttagtagagacagggttttgccaaattgcccaggctggtcttgaactcctgagctcaagcaatcccccmaccttggcctctcaaagtgctaggattacagggatgaaccactgcacctggcccctctttttcagttttaaaggatagctttgctaggtat

SEQ ID NO: 647902 - DNA, 317 bp, Homo sapiens
cagagtctcactctgttgccctggctggagttcagtggcatgatctcagcttactgcaacctctgcctcccaggttcaagcaattcttgtgcctcagcctcctgagtagctgggaccacaggcatgagccaccatgcctggctaattttgtatatttttagtagagacagggttttgccaaattgcccaggctggtcttgaactcctgagctcaagcaatccccccaccttggcctcycaaagtgctaggattacagggatgaaccactgcacctggcccctctttttcagttttaaaggatagctttgctaggtat

SEQ ID NO: 647903 - DNA, 467 bp, Homo sapiens
aaaaaaaaaaaaaaatccagcacataagtctaggagcattgaacaagggtcagattgcatggattcagattccagctccattactaactggctgtgtgaccttggacaactcaattgacctctctggccctcagtttccttatcagtaagacggaaactccaatcrtatctattgcacgggatagttgtagaaattaatagatacataagtgcttagtgcaacatgtggcactcaaaatatgtgtggtatgattgttattgacacaatggttgacccatgaatgactgtgatgccaaccccctcacagttggaaatccacctataacttttgactcccccaaaacgtagctactaataacctattgttgaccagaagtcttaccaataacacaaacaatatacacatatgttgtattttatatgattatacactgtatttttacaataaaataagctagagaaaaca

SEQ ID NO: 647904 - DNA, 467 bp, Homo sapiens
aaaaaaaaaaaaaaatccagcacataagtctaggagcattgaacaagggtcagattgcatggattcagattccagctccattactaactggctgtgtgaccttggacaactcaattgacctctctggccctcagtttccttatcagtaagacggaaactccaatcgtatctattgcacgggatagttgtagaaattaatagatacataagtgcttagtgcaacatgtggcactcaaaatatgtgtggtatgattgttattgacacaatggttgacccatgaatgactgtgatgccaaccccctcacagttggaaatccacctataacttttgactcccccaaaacgtagctactaatarcctattgttgaccagaagtcttaccaataacacaaacaatatacacatatgttgtattttatatgattatacactgtatttttacaataaaataagctagagaaaaca

SEQ ID NO: 647905 - DNA, 562 bp, Homo sapiens
acatattgtctttgtcatcacagccaccctccaaaggcagggttgagtagttttggcagagactgtatagccttcaaagccccaaatatttactrtctggccttttatgggaaaagtttgccaaaccttgatttatcaaatgcattggcctagaggaacgtctagaaaaaagcaagctgcaggatcatatgtgtattaattgtagagtagtgtgcagccagatacatatagtcatcccaaatacattcagtgttttaataacaaaactaggatgacactctgaattttgctctgtaacttgcttttcacataatatatcttggacatctttccatttacttaaatacaggtctagctcattctgtttttcttttttttcttgagatggcatctcgctctgttgccaggctacagtgcaatggcacaatcttggctcactgcaacctccgcctcccgggttcaagtgattctcctgcctcagcctcccaagtagctgggactacaggcatgtgccaccatgcccggctaattttttgtatttttagtacagacagggtttcat

SEQ ID NO: 647906 - DNA, 390 bp, Homo sapiens
agaattctcaaagtataaactgcacagaaaggcggacacagattctgagcccttattttggcattacacagggtgaaggctaaattagacttgaataattgtcttcccacttacatttcccagttacatctggcccccaggactatccttttgtagcagaatatttctgtcttggcagattccgaacctcagctgagcagcccttttagccatagactgtctctggctctttcttcctgacgtcaggtacaggacgatggatcagggaaacctctcactctttatgaatctctattcaagctccttgaaatctactttccctaaaaagcttcagactaagtcctcccacccagcctytcctgttaccccattccctgaagttactaactc

SEQ ID NO: 647907 - DNA, 393 bp, Homo sapiens
ggtgatgcttgtaaacatgtctatttcctagtatcttttatgtgtaattttaggttgggaagaggcaagaaaatgaatgaatgagaactgtattagtaagagatttcctttgttgaaataaagtagcattagtgaattgtgtgaatttaaaaaatattctttgtcgaaagaacytcatactggggtattcctactcaacaattatttaaaaaaacacatagtgctatgtcggatataattattatgtatacaatctatttactagttgagaaaaataaccatcaggctttttattttttgagactgagtctcactctgtcgcccaggctggagtgcagtggtgggatgacctcggctcactgcaacctctgcctcctggattcaagtgattct

SEQ ID NO: 647908 - DNA, 528 bp, Homo sapiens
acacattggggcctattgaaaggtggagggtgggaggggagaggggatcaggaaaaatagctaatggatactaggcttaatacctggaagatgaaatagtctgtataacaaagccttgtgacactagtttacctatacctatataacgaacctgcccatgagtccctgaacttaacataaagttttaaaaacagacacacacacacacacacacacacacacacacacacacacacacaaacctgacagtaatcctttctctcacagttctggagtccagaagttcaacctcagcttcactgcaccaaaatcagggtgtagccaggaccatgctccctccgaaggctctaggggagaatttgttcttccttcctccctctgccaggrtgtgggcattccttggcttgtggccacatcactccaatctgcctcagaggctgcatggcctccccctcttctacacatcaatctccctctgtccctttcttgtaagcaggcacgtgatgtctcctagggcctgtgttagtt

SEQ ID NO: 647909 - DNA, 615 bp, Homo sapiens
tatttcacagattggttgcaacatggagatacaaaattcatacacatatgcgaggtaaagaattctgtgccatctcaatttgtaaytgtctatattatatatggttaatctatgattaagcaagaagaaatttagaaaatgctggctcaatgccagcttgaattatagactccaagttaagacagagtttaaaactcaaagtgtcttggacccatcgttccactcattagttgagtatttctgcatatttcctcaaaatctatactctaagtcttcagaatctggcaccagaatttgaatctatgatggtttccttttatgtaccagctgaaattcttaaaactaacagtctcaattataacctgaggcaatgaataaacacttgacttcatttatatttacataatggtaccctatagttaaccatgtaattaatcagtcttacagaacagtacattcaaaaggaagaaaatggaacagttttccacatttgtttcataccctacctaccacacagacaatgtcctcctttgatacagcagtcatgctgccaacagagagtagtttgaggaggaaggcatgccgtcctctttaggataaactatgtcgaatgaa

SEQ ID NO: 647910 - DNA, 379 bp, Homo sapiens
aagggagacaggaagctcagctcagaggctcttgcaataatgtaaataaataaattatgagtcagctgggatggggatagaaacagaaattcaggaaaattcaaacaccactaaattgcatggcagtataatctccacttctgaaaaattacagtattkcccaaatattccagatctgcttctacgtgatagttctattggcaaacctcagaaagtcgggtttataaaaccatgatggtaactagattaaagaatcaattaaaaatttgtggactttgtgcctagatatgatttcaaaaggacagttaaggcagaagtgaagtgttcatttagaagagggcacacaggatggctataacagagaaaactttaatagtga

SEQ ID NO: 647911 - DNA, 575 bp, Homo sapiens
ttatcatagaactgttggatttgatttatcaggagaccctggttgtgcctctgtgactatgagccgtggccaaatcagagaagcctgatagatgtggtcggagtgattaatagcaacctgtctccagagataaaagagtggcgagtgagacgcattgccctgactccacttctaattctgtgttgttatatgcggctgtttggccaagcggaggcaccacacccacagcaccgtatctggctgcaagccctggatttcctgggtcaccaagataagattctttcagtggaaaagaaaatgatctggggcagtggtatttacccagagcagggtgtgagcacagggtgcatgtgcagctgcacttccatccctgactgatttcatcactggacaaagtgtaagctggagaaggcacaggaaaggcgtgttggtgcaggtttcacccctgttcctgcaatgccattatctggtgctctcccagtgagaaattcatcagtaggacaggatgcccaggaatgtgagakctgagtccagggaagtggtgtctgtttttagacactgtagttgctaagctt

SEQ ID NO: 647912 - DNA, 566 bp, Homo sapiens
atactatttacttggcagatttgagaagcaattaagccgatgcttgacatctataagatgctcaacaagcattaggtgttctgacaagcaggaattgattggcttacactacatataattttttttggyccttctagcagcttatcactttttgtatactaccttagaatccatagctaatgattgtttcaagtataagagctatgctaaagaagccatgccaactaaatagaaagagatgatgaaatgagtgccactttcagtttttcatatttaatttgtggtgactgagtacagtgatgaccccgatttttccatgtctccctgtatccatgacttttataatagcctcccacaatgactgagattaggcacataacttattttggtcaaggatagagtagcaaatatgatgaaaacagaggcttaaaaaaacatggggcatagctgcctccatcaccccagttgaaagccagacagcatccaaagcaaagccacctaacagaccaagaagccaaccaaagatgcaagagtgagcccagagctaggcctagtccaaactgcta

SEQ ID NO: 647913 - DNA, 600 bp, Homo sapiens
cctcaaaattagaaccacctcatcggattatagctaagactgaaaacattaaatgtgatagatatcagaatactcacaatctctggggaagggaattgattaagaggagtaataagagaattttctcgggtgatagaaatgttccctctcctgtttgaatattgttcccaaagatgttcagatttgtaaaactcattgggctatgtagctaatatctgtttgttttactagaagtaaattattcctcaatagatgtacatacatatatacatatctacatgaaagcatgcaaagtgcttagaaaaatgcatgctgtttagctatttttatcatacttgtttctagaaactttgatttaaaawatatgtaaaatgaccaaaaacgagatgagcatttcctttcctaccacaggtttcattgcaagcatttgagagcgcaggtaatagctaaagattcttgccaaacacaattgtcaagggagaatctactggatcaattctaattttatgaaactattgaatcactatagaaggatgtgcctaatttgttgtagctgcttttcatgatgctgtaaaaatttataggttttagagacatatc

SEQ ID NO: 647914 - DNA, 502 bp, Homo sapiens
tatgttttttaatcagctttgtaccttttccacacattcattctgtctcatttcttcctttcaatattcttaattggaaaagttctgagactgtgctagatttttcatcttgcctgggaggagcaaggtggacttttgttgggtgaagagctgtattcaggaaggagttgcagggactgtttctgagccatattctcccaacttgtaaaatatacagttggatcagatgatacataaggtccaacaccctcaaataatttttgtttttctgtgagacagagtctgactgtgttgcctargctggagtgcaatggtgtgatcccagctcactccaaagtccgcctcccaggttcaagcgattgttgtgcctcagcctcctgagtagctgggattacaggcatgtgccaccacgcctggctaatttttgtatttttaatagggatggggtttcgccatgctggccaggctggtcttgaattcctgaactcaagtgatttgcctg

SEQ ID NO: 647915 - DNA, 574 bp, Homo sapiens
cttatttacatacaagatagtccttgtactaaataaagtcaaacgagttgaagaagcaacaactaacatatctgtaatggttattgttctctgagttctgctgtgttcactaaacactcctaccycaaacccatatcatctctcttctgtaacacaccaagttttaacagaatactcgtgcagaaagttgaagtggcttgcctgactcccaaagcaaatgtaattcatattaggactccggtctccatagagcatatttccgtatactgcacagcttcctgagtaattgaagaagatggttaaaaggaattgcctgaatatatgtatttcccaccctcttttgtattggtatatccataggatttttaaaattttaccactacacagatcaactctaagtcagatccagaaaatctatcaggttatgttggttacatttttttgtgtattgtttttaacagctttccaaaattataactgagcattagaaatctaatgcattaaagctttttgtaaattgttttgaagaatttttgaaaatcaaatggaacttcccatccttcccataaatgct

SEQ ID NO: 647916 - DNA, 546 bp, Homo sapiens
aattcaaattaagaggagatgggtaattgttgggtggagatagaaaactttaccttgagttttttctttacttcttaccttattcttcagattgcaattacttaatttgttctsaaatgcccatgaatcttagtgatacataagttatagaaacatttttattctatagattcaactcaaaatctttatctggattcctggtttgatgtagaatactcttggaagactagatgactatgtggtattgaatatagcaagtcttgtcccaggggttccctgagctctgggagtggatccctgatatggattcctggtttgatgtagaatactcttgaaagaatagacgactatgtagtattgaatgcagtaagtcttatgccagggattccctgagctcagggaggaaatccctgatacagatggcctctgtgcgggtgtaccttcttttcaatatcattggtcgcaagttgatattgattaaaaggaagaatgcaggaaacaaagcattcagtattttcccacctggcctttggataatgtgtttta

SEQ ID NO: 647917 - DNA, 617 bp, Homo sapiens
caggtactccggagatggccactccctcactagcatcaccagagggtgatgataagagaaggctacagggagaggaggttgatgatcacacacatcacctctaaggtggtggaggtaattcatcagtataacaggcactcacaaaatacttcttgaaagaatgaatgaactgcccacctaagaaatcctctgataaatgttcttttttttctcctcgtttaaaccaagagtactccaccacagcattgctgacctttgggaccagattattctctgttgctgggggctgccctgtgcactgtaggacrttcaccagcatccttggcctctgcacattcgacacgaatagcacacacacaagggcaagttgtgacaactaaaccatctctagacattgccagatgtcccctgagggcaaaatcacttccagtaaaaaccaatggttcagactataggaaagcaaaaaaatatatttttgaggctaaaaataacttaactttttactatgtccctgaatccaaagctgttttgaaggcttagcaaataatatagctataacttagcatagcaagtccttagagcaatttacaactgactggagaatattaaccgcctaa

SEQ ID NO: 647918 - DNA, 548 bp, Homo sapiens
atacatggaatcgtaaaatgtgtggcctattgtgcctgatttctttcacttatcatgttttcaaggcttatagcatgttatagcatccacattatagcatatgtcagcactttattccttttactggctgaataacacttcattgtagcatctaccacattttcttcatctgttctccatgtattagttgatggacattcagatcatttctactttttagactattatcaatagtgctgctatgaatgttcatgtacaagttttatgtgaacagatattttctttctcttagatayagacataggagtgggattgctgggttattgaaattcattttttatagagaggtaactatcttagcactatcttacatttgaaatgaagcacacatttttcaaagttaaaaaatgtggcgttttctttgatgatgatggtacaatatttttgcaaattatcaggatactcaaaacagtcagtctttataccattggtagcacaggcttgcacagtggtttccgattcagacacatgtgaattcaagtcctggc

SEQ ID NO: 647919 - DNA, 604 bp, Homo sapiens
gtggaaatatattgtatatgaattgaatttgattgctctgtaggtgtcaatacttatcctatattttaaaacaatgaggctggtgtgattttaaaatgcccctcgttaacctcataaactatctcctcatagcccatttccyccagtcatctttaatctctaaaatatagttttttttttgtggtatttggggccctctgctgtgtgtgattaaaggcacaaatcagcgttaccagcattgaggctctaagaattcacagagtgctgtccagtgggttctatgagagagacagtaggctacagccttggcctgggcctgaaaaggaacacgatttggaagagcagaaggaaggcatgagggcaacaaagccacagggggaagccaaggtgcaacatcagcagagacagttctgcatcatcacctgggcatggccgggatgttcatattacaactgacggagaatgggtcaagctccaacttcatagctggttttagcactgttggcctgtcttcctaagagcctgaagagagaagctactttcttgtttcttgtcttctctatttcctgtatgttgatggcaatggcaccaccagaaattaatg

SEQ ID NO: 647920 - DNA, 604 bp, Homo sapiens
gtggaaatatattgtatatgaattgaatttgattgctctgtaggtgtcaatacttatcctatattttaaaacaatgaggctggtgtgattttaaaatgcccctcgttaacctcataaactatctcctcatagcccatttcctccagtcatctttaatctctaaaatatagttttttttttgtggtatttggggccctctgctgtgtgtgattaaaggcacaaatcagcgttaccagcattgaggctctaagaattcacagagtgctgtccagtgggttctatgagagagacagtaggctacagccttggcctgggcctgaaaaggaacacgatttggaagagcagaaggaaggcatgagggcaacaaagccacagggggaagccaaggtgyaacatcagcagagacagttctgcatcatcacctgggcatggccgggatgttcatattacaactgacggagaatgggtcaagctccaacttcatagctggttttagcactgttggcctgtcttcctaagagcctgaagagagaagctactttcttgtttcttgtcttctctatttcctgtatgttgatggcaatggcaccaccagaaattaatg

SEQ ID NO: 647921 - DNA, 604 bp, Homo sapiens
gtggaaatatattgtatatgaattgaatttgattgctctgtaggtgtcaatacttatcctatattttaaaacaatgaggctggtgtgattttaaaatgcccctcgttaacctcataaactatctcctcatagcccatttcctccagtcatctttaatctctaaaatatagttttttttttgtggtatttggggccctctgctgtgtgtgattaaaggcacaaatcagcgttaccagcattgaggctctaagaattcacagagtgctgtccagtgggttctatgagagagacagtaggctacagccttggcctgggcctgaaaaggaacacgatttggaagagcagaaggaaggcatgagggcaacaaagccacagggggaagccaaggtgcaacatcagcagagacagttctgcatcatcacctgggcatggccgggatgttcatattacaactgacggagaatgggtcaagctccaacttcatagctggttttagcactgttggcctgtcttcctaagagcctgaagagagaagctactttctygtttcttgtcttctctatttcctgtatgttgatggcaatggcaccaccagaaattaatg

SEQ ID NO: 647922 - DNA, 597 bp, Homo sapiens
aataaaacatatgaagtagaaggactggaacctccagaaaaaatactttaagttacctgcaagtgatcctagtcaggtatgttacagtcttaatggcttttcagaaatttgacagaaaattactattaatctcactgggtgtttacatgaattttaagcctttgcttttcttttaactttgtttttttacaggtatgaattgataagaaatgcctgcaccttacctccttcctatctttcccttgcctacagaaaattaaaagcaaagacaatggacatctacatattcttcattcagatcaaccagtggctagcatttgccacctttgcattttctttctctttccataagtactttcttctctgaatcatttgaaagtaagttgcagagagcaagatgttttaccccaacacttcagcgtttatctcttgtgaataatgacatatttctacataatcacagttctaccmtctaactgtaatacagtaatttgatgtacagcccatattcagatttacctaattgtctccaaaatgttctttatttttgttaaatccacagattaatcaaagattaacctcgcctttggttatcat

SEQ ID NO: 647923 - DNA, 469 bp, Homo sapiens
aaacaccatgaggaagctatctgagaaaccgctttgtgatgtgtgcaytcatctggcagagtaaaaactttcttttcattcagcagtttggaaacactgtttttgtccattctgcaaatggacatttgggagctgataatgaccaatagcaaaaaagcaaatatcccaggataaaaactagaaggaagctatatgggaaactgctttgtgatgtgtacattcatgtctcatagataaacctttcttttgactcagcagtttacatacactgtttttgtccttcctgtggatggacatttgggagctcattgtggccaatttcaataaagcaaatatcccaggataaaaactacaaagaagctatctgagaaaccactttgtgatgtctgcattcaatttgcagagttaaaccttcattttcattcagcagttaggaaacaccatttttgtacaatctgcaaagcgatat

SEQ ID NO: 647924 - DNA, 469 bp, Homo sapiens
aaacaccatgaggaagctatctgagaaaccgctttgtgatgtgtgcattcatctggcagagtaaaaactttcttttcattcagcagtttggaaacactgtttttgtccattctgcaaatggacatttgggagctgataatgaccaatagcaaaaaagcaaatatcccaggataaaaactagaaggaagctatatgggaaacygctttgtgatgtgtacattcatgtctcatagataaacctttcttttgactcagcagtttacatacactgtttttgtccttcctgtggatggacatttgggagctcattgtggccaatttcaataaagcaaatatcccaggataaaaactacaaagaagctatctgagaaaccactttgtgatgtctgcattcaatttgcagagttaaaccttcattttcattcagcagttaggaaacaccatttttgtacaatctgcaaagcgatat

SEQ ID NO: 647925 - DNA, 469 bp, Homo sapiens
aaacaccatgaggaagctatctgagaaaccgctttgtgatgtgtgcattcatctggcagagtaaaaactttcttttcattcagcagtttggaaacactgtttttgtccattctgcaaatggacatttgggagctgataatgaccaatagcaaaaaagcaaatatcccaggataaaaactagaaggaagctatatgggaaactgctttgtgatgtgtacattcatgtctcatagataaacctttcttttgactcagcagtttacatacactgtttttgtccttcctgtggatggacatttgggagctcattgtggccaatttcaataaagcaaatatcccaggataaaaactacaaagaagctatctgagaaaccactttgtgatgtctgcattcaatttgcagagttaaaccttcattttcattcagcagttaggaaacacmatttttgtacaatctgcaaagcgatat

SEQ ID NO: 647926 - DNA, 469 bp, Homo sapiens
aaacaccatgaggaagctatctgagaaaccgctttgtgatgtgtgcattcatctggcagagtaaaaactttcttttcattcagcagtttggaaacactgtttttgtccattctgcaaatggacatttgggagctgataatgaccaatagcaaaaaagcaaatatcccaggataaaaactagaaggaagctatatgggaaactgctttgtgatgtgtacattcatgtctcatagataaacctttcttttgactcagcagtttacatacactgtttttgtccttcctgtggatggacatttgggagctcattgtggccaatttcaataaagcaaatatcccaggataaaaactacaaagaagctatctgagaaaccactttgtgatgtctgcattcaatttgcagagttaaaccttcattttcattcagcagttaggaaacaccrtttttgtacaatctgcaaagcgatat

SEQ ID NO: 647927 - DNA, 608 bp, Homo sapiens
aagaatgtggggaatgattagactgtatctaaggcatttatatgtgggtataaaacttttaatttattatattgattttttttgctatcaaagatattgcastcatgataactttgccttcttttccaagaaattttagcaagatgactttattttatggtgtattcataatgactgcatgaatcagaatgccttattatattttttaccatttttgttaaagccaccaacaatgattaaaaaatctcattgtctacattaagaaaaaacaaacatttagtaaagagaagtatccattatgcaataagaatatatagatatcaacactcagttttattttatttattttgtaaaattgatttcttagtctgggttatttgttaaaggtaatcattaacagttcagaattgttaggaatttgactgaattatattagatggttgtattagtcccttctcacattgctataaagaactacctaagactgggtaatttatacagaaaagagctttaattgactcacagttccgtaggctgtacaggaagcatggctgggtaggcctcaggaaatttgcactcatggcaggtgaagaagaaacaggcatgtc

SEQ ID NO: 647928 - DNA, 608 bp, Homo sapiens
aagaatgtggggaatgattagactgtatctaaggcatttatatgtgggtataaaacttttaatttattatattgattttttttgctatcaaagatattgcagtcatgataactttgccttcttttccaagaaattttagcaagatgactttattttatggtgtattcataatgactgcatgaatcagaatgccttatwatattttttaccatttttgttaaagccaccaacaatgattaaaaaatctcattgtctacattaagaaaaaacaaacatttagtaaagagaagtatccattatgcaataagaatatatagatatcaacactcagttttattttatttattttgtaaaattgatttcttagtctgggttatttgttaaaggtaatcattaacagttcagaattgttaggaatttgactgaattatattagatggttgtattagtcccttctcacattgctataaagaactacctaagactgggtaatttatacagaaaagagctttaattgactcacagttccgtaggctgtacaggaagcatggctgggtaggcctcaggaaatttgcactcatggcaggtgaagaagaaacaggcatgtc

SEQ ID NO: 647929 - DNA, 608 bp, Homo sapiens
aagaatgtggggaatgattagactgtatctaaggcatttatatgtgggtataaaacttttaatttattatattgattttttttgctatcaaagatattgcagtcatgataactttgccttcttttccaagaaattttagcaagatgactttattttatggtgtattcataatgactgcatgaatcagaatgccttattatattttttaccatttttgttaaagccaccaacaatgattaaaaaatctcattgtctacattaagaaaaaacaaacatttartaaagagaagtatccattatgcaataagaatatatagatatcaacactcagttttattttatttattttgtaaaattgatttcttagtctgggttatttgttaaaggtaatcattaacagttcagaattgttaggaatttgactgaattatattagatggttgtattagtcccttctcacattgctataaagaactacctaagactgggtaatttatacagaaaagagctttaattgactcacagttccgtaggctgtacaggaagcatggctgggtaggcctcaggaaatttgcactcatggcaggtgaagaagaaacaggcatgtc

SEQ ID NO: 647930 - DNA, 608 bp, Homo sapiens
aagaatgtggggaatgattagactgtatctaaggcatttatatgtgggtataaaacttttaatttattatattgattttttttgctatcaaagatattgcagtcatgataactttgccttcttttccaagaaattttagcaagatgactttattttatggtgtattcataatgactgcatgaatcagaatgccttattatattttttaccatttttgttaaagccaccaacaatgattaaaaaatctcattgtctacattaagaaaaaacaaacatttagtaaagagaagtatccattatgcaataagaatatatagatatcaacactcagttttattttatttattttgtaaaattgatttcttagtctgggttatttgttaaaggtaatcattaacagttcagaattgttaggaatttgactgaattatattagatggttgtattagtcccttctcacattgctataaagaactacctaagactgggtaatttatacagaaaagagctttaattgactcacagttcygtaggctgtacaggaagcatggctgggtaggcctcaggaaatttgcactcatggcaggtgaagaagaaacaggcatgtc

SEQ ID NO: 647931 - DNA, 495 bp, Homo sapiens
gtcattttaaaattagcaatactacatagttgataattgaaagatataattaatcatggaataattatgagatgcattttctctctaggaatgtctctataacaaatcaattagaaggaatcaaatcaatctgttctatatttataaaatggtacgtgacctgatgcattcatctctagtgtaaggaaagaatattttttaaatctcatggcacaagaccccctctatttcagaaaatatttttgaaggcattgccaaaatgcgtgttttgtataatgttattatataaaatataaaaactatgcatttaataatcctgccccycagtaacataaatgtaaattattctattataaatggtccaaggaatgaacaggttattcattctatttattctattaaacatgaagtaaagagaaccattaaacattggagaaaatgcttaaattgattagtatttcagaagatggaaaatcacagagtacattaccgtaa

SEQ ID NO: 647932 - DNA, 452 bp, Homo sapiens
tttcttttttgcctagtcagatatagtttgataccattctctattattttttcaaagatctggttttctttgaggcagctggtaggtagcttttactaaatttaaatgtacgcttctgcgtaaaccatattacactataagcttagacgtcctacattcttgacttcccagaatatttgaattatgtataataaacacatttttatgtttttgagtaattatctcttctttaggctaggarggtctgtaagatttgaaaaggatcagagtgaagatggtgcagagtaggagactggggaagtagagaacagattttccaattcacgtacaaaagccaagcatttaacaaacttaggaaaatgaaataagaatatttcacagcattttcaacagttaggtattttatcctctgtttcctttacttaagtctatttttttcctcttctaggata

SEQ ID NO: 647933 - DNA, 502 bp, Homo sapiens
agtagacagcagctaatgtcatcaaatacctggacacctgaggtagtaccaagtgctgacttcttagaattaagcacagaaaatttcacattactcaaaagcaacatttccaaattacaatcaacctaatttacacaacttctacttaaaaatgagtgacactgtttggagcttttctactctttctgcttctggggaactagttgcttcttgatcagaattccatgcaggttaggggttacgaagtagggtttttctgtrgatccatcatttctttccagatcttcacctgtatatgcagcagccaaagcaggcaaaagcagaagcagcagaacaattatacacatttttataaattggagggtcgaacagggaaaaatcagaaaaatcagtgttagaaagtcaaatataagacaaattagtgcagtttacttgctgattctgggcaaggtaagaaacctcaacctctgccaggaaacactgaaacttcctaaatccctcc

SEQ ID NO: 647934 - DNA, 582 bp, Homo sapiens
agactagaactttttgtatgtcaatgaattatctggtgaaattcgtaataattgttccttctttttaatttgcttataaaaagaaaagtttatatatttagtattacctaaaaagatctaggccctagttcttattagcaaagaacaacatgaacataatyagttgcttattagaatttcaaaagtaacaatgattaaaaagaaaccacaaacttttctctttctgctttataattgtatttacttaagtaatttgggcttgcctttgactaaactgttttatgttcattttttattgtctgctacccgataaatcctggtgaggcacatttcctccaggaaagacaacaatcaataataggaaggcttttggaagacaataattaattttttatatgtgacactgacttagttattccattagcaagtgttaaatattttctatacctgtatttactcacccacaagtcctaaaacaatgtagccaataatacacagtaggaagatcatacagcacagaacatctgtacaactcctaaagacaaaaaaagaaataaataattaaaagaggtcccaaatgac

SEQ ID NO: 647935 - DNA, 610 bp, Homo sapiens
tggcttgttggaatgaaaatctttttaaaatttaccttttattaccaatatattttttaaaacatattattttagcgtaactattttagggtcaatatttttgtttattatttggaaagtaaactgtttatcatttgatgcgcagttctaactgagacagtggacggtatttttcgttattgttgttaaaattctatgatacagttttgtttaggtaaaccaagtttgaatttttaaaagatcattatagattcagattattttctttgatttttgttaatgtaactaaaaagtagtctttaatgagaggttttgaaaacaaataaaatgcatgaaaatattattttgcaaatagcatatgaaattatctaatacttttagggtattcagaaccttgaaatttttttaaaaatctaatttttactaaaaatagggaattataactgtatatttaatttttaattatgttgaaactgacattcctataaatagttttgtacacaagtaataattcatacactggggttttgaaatattgttaagcacattataaatgctaaaatacttcataaaccacttttrtaaacaggatgaattgagagctgtgaaa

SEQ ID NO: 647936 - DNA, 596 bp, Homo sapiens
ttacaccagcaatttcaaaagaagcaatgctttttatctttagacctgacttccaaatctgtttacagacagagagtgaggtgagctattgttcttgaaaaccaacactgccattatgaagtatttctgagaccaacagaccctttcatggtagctttcatttacagaaagagaagcaaaaaaggtaattgaagagaaagtaggtaaaaatctgttgaagtttccaagtggcttttaccaacttaagttgggtttggaaatacttatatatctgctggttytttttttcttttcctttgttttattttcaggaggcccctattagctatatattaaatacagatactcgtgttaggcttatgagtgctacaatgttaaataaggcccaagtccctgtcctgagggaacaatgtaagagggcacatgtgaccttgatatttaatttaaattgcatattttaagattattgtctattatatctattagagttgtcttgaatagttttacaataaaatgtgaccagtcagtatttaaataatacaagttatattttcaacttcaactatttatgctatctatacttcatagtacataaa

SEQ ID NO: 647937 - DNA, 596 bp, Homo sapiens
ttacaccagcaatttcaaaagaagcaatgctttttatctttagacctgacttccaaatctgtttacagacagagagtgaggtgagctattgttcttgaaaaccaacactgccattatgaagtatttctgagaccaacagaccctttcatggtagctttcatttacagaaagagaagcaaaaaaggtaattgaagagaaagtaggtaaaaatctgttgaagtttccaagtggcttttaccaacttaagttgggtttggaaatacttatatatctgctggttctttttttcttttcctttgttttattttcaggaggcccctattagctatatattaaatacaratactcgtgttaggcttatgagtgctacaatgttaaataaggcccaagtccctgtcctgagggaacaatgtaagagggcacatgtgaccttgatatttaatttaaattgcatattttaagattattgtctattatatctattagagttgtcttgaatagttttacaataaaatgtgaccagtcagtatttaaataatacaagttatattttcaacttcaactatttatgctatctatacttcatagtacataaa

SEQ ID NO: 647938 - DNA, 580 bp, Homo sapiens
acatgatgtaaagtcctgatcaattacattgggtcagacagggctataatcccagtgggtgactaagaaatttacaggtagtttttactayagctgagataatgtgctaaggattaaataaaagctgtggcttgagggaagccattggaaggttttgagcagtagtgagacagtctgaataatgttactaaaatgtcatccttttaggggaagaagttattaaaacagggaagatcgtttgccccatttctctactgtaaagttactattttccctctttctatgcataagtctttgtaagtgggtcacacagtccagctcacattcacgggaagggagagcgtctatctatctatctatctatctatctatctatctatctatctatctcatttggaattatttgggcactgtttaaaaaattttattgttagtatagtttagaaacgagatttcactatgttgttcaggctagagtacagtggctgttccataggcacaattccattacttatgagcacaggagttttgagggcactgttttaaaatgctttatgcatgttatatatttaaaacttat

SEQ ID NO: 647939 - DNA, 580 bp, Homo sapiens
gtggtcctccagttgactggttgtgggctgcatggtagctcttttccaggattctacagcctggagtaacaagtcgtgccatgctctttctctctgctatattctgaagtctggcaccctgtgggtcggcccccgagggtcatccagcttccatctcccaatactaagttcacttcatgtctctcacgacagggaggaaacttagcattccttggagacctgaacggatgcagtgagcttaagaattttcaagagcttatcaatcagtcagcccttgttcatccccgaggggatgtgtggtggtattgtggtggacctttactggacgctctgatgaatatctgaagtggcacttgtgttttagtccaattggctatccctttcaccctggcatttcatcaaccagaggaaggaaaaataagacatcgtaaagtgagagaagccccttatgggtcttttgactctcacatctatttaaatgcaattggagtctagcagggaatrccagatcaatttaaagcctaaaatcaaatagctgcaggatttgagtcaatattttgttgagagacaattaataaaa

SEQ ID NO: 647940 - DNA, 638 bp, Homo sapiens
acaaatctcagaaaagatagcataaatacctacatatactttaaraaatttgtcatagacttctgtttcagaaatgggacagtataaagtgacaaatttgtcttctcactcctggaaaaacagccatttttatttataattatactaaaatccttcttttttggagctccatgggccctaaatacttactatcaaatgtctgagaaacctccaaagctgcttccatttggtaattttttttggatccaagaaaagaaaaataaattttcattttcctctctcttcccgcttttttcagctcatttaatctttgttgcctttcaaattccacaaacatgttattgagaaacctcttgtgaaatgcatgttttttttcactgagcatttcttaagtacctgcaatttactggtaacaagttctggacagaaatgtttgtcagaaaattttgataatggatttcattagctcccctttattggggtggaataaaactcaggcacagcttaagtaatttactgtcatgaagacagtaagcaaaagacccaggggaacactctagacatttctaacacagcttagtgtgctcttctaactttctatttagagaaaaaaacaaaatagaccagcaaacaaacaa

SEQ ID NO: 647941 - DNA, 638 bp, Homo sapiens
acaaatctcagaaaagatagcataaatacctacatatactttaagaaatttgtcatagacttctgtttcagaaatgggacagtataaagtgacaaatttgtcttctcactcctggaaaaacagccatttttatttataattatactaaaatccttcttttttggagctcyatgggccctaaatacttactatcaaatgtctgagaaacctccaaagctgcttccatttggtaattttttttggatccaagaaaagaaaaataaattttcattttcctctctcttcccgcttttttcagctcatttaatctttgttgcctttcaaattccacaaacatgttattgagaaacctcttgtgaaatgcatgttttttttcactgagcatttcttaagtacctgcaatttactggtaacaagttctggacagaaatgtttgtcagaaaattttgataatggatttcattagctcccctttattggggtggaataaaactcaggcacagcttaagtaatttactgtcatgaagacagtaagcaaaagacccaggggaacactctagacatttctaacacagcttagtgtgctcttctaactttctatttagagaaaaaaacaaaatagaccagcaaacaaacaa

SEQ ID NO: 647942 - DNA, 572 bp, Homo sapiens
gaatctaggaaaagcctacagtatggaaagctggagtcagcaaatttatagtaaagaaacctgacaagcactgcttcagcagatgattaaggtaaacaattatacgatcaacaatcataagtcatgttgatagtatgtacccttgatatcatttgatgaaaattgcactttatttctgtgatcctgtgtaccaaaatccataatctccatctaataatgacaaaaacattggaaagattttaatataagggcatcctccaaaatattaatacctgaccagtactcctcaagactgtcaagstcattgaaaacaagggaagcctaagaaactgtcacagcctgtaggagactaaaaagacataacaactaaatgtactatgatatctcagatgggatcctgggacagaaaatagataatacataaaacctaaagaaatcgagaaaaattatggatatcaattaatagcaacatatcaatattgattcaatatctgtaccaaatgtactgtactaatataatactaggggaaattgtgcaggaggagagtggtttatgttaagtcttggtatta

SEQ ID NO: 647943 - DNA, 586 bp, Homo sapiens
tgactttacgtagcatgaaaagtccacacctcaacacatacaataaagacggcctgtcaaacagtgaccttcctccttcctcaccttccaaactattacctcccccaactcccacactgagagttaactgggcctagttctataggcaaaagtaagccccacattgataataactggtgaacttcagggttgagatgaccgtagccttccccctattcctgatctcacctatacagatgagtaggccaaagaaaaactcctgaggttgtgtcaggcaaacttgaggacataccgtgatgctgtcagagttctggcccagagcgttttatacatacacagggagagaatttttttcactttgaacagaatttccagttgtttcaatatgaatattttctaatcattttactagctagttcaatatattggtttttcttcttctaacagaaagatacaaaaggctccaaagaatagaaactctaaaattggaaactgaaaaaacaaaatagccayatgttctatgcctgagcagaatgctttggcaccaatggacgcaatgtgacctcaaccttttattatatttttc

SEQ ID NO: 647944 - DNA, 547 bp, Homo sapiens
gaagtatcatgtgaggagtatttaagaacaagggataggccaggcgcggtggytcatgcctgtaatcccaggactttgggatgctgaggcaggcagatcacgaggtcaggagttcgagaccagcctgaccaacatggtgaaaccccaccactactaaaaatacaaaaattagccgggcgtggtggtgtgcacccataatcccagctactcaggaggctgaggcaggaaaatcgcttgaacctgggaggcagaggttgcagtgagccgagatcacactattgcactccagcctgggtgacagagcgagactctgtccccaaccccccccccaccccgcacaaaaaaaaaatagaacaagggagggcgattgcgaaggtggaacatcatacaagtctgacccagagttcactgactgagagaggacactggcaagacaggaaggtggataaacaaagcagttcttatcatctgaggctttctctaccacaagaaaagtgtggacttcaagttaaaaacaatgagtgctgtggtgggtcgaatagtgtct

SEQ ID NO: 647945 - DNA, 587 bp, Homo sapiens
aattagtaaaagtaaatcagctagtatactgtaatgaaagaaatcacagatgtgaaatatgttgctaagtgagtagagaagaaaggtttggttaacattgtgcttgtgtgtgttgggcgttggtgggcactgagtatgtgcaatatagcaagagttaaagaccaatgaatgaagagataacagaggagttgcttgagaagtgaattaaaatttacttttaccatcctataattttatcttgtaacattttatacagtctgtcattttatcagtatgcacttgtggatttaatgcctaartatcccactgaagtgtaagttccattaggttatgtctcttttgcctactattttttaaaaataaattttatattgtattgaagttacaagatatataacatcatgttggatacaaaataaaatttatttaaataaagtgcttattatagtggaacacatttaatacatagatcaattcacatagttacccattttacccctgtggcaagagcagctataatctactcatttagcaaaaattttgagtatactattattagtgatagtcctcatgttgtacattagatc

SEQ ID NO: 647946 - DNA, 535 bp, Homo sapiens
cactgaatatccttttggattacaggtaaaatgggattcatacctcacaccatgcatgaaaacaaattccaaatggataaggtatgtgtattarggttctccagaaaaaacagaaccaactgaatatgtatatacaaatatagagaggtttgttttaaggaattggatcatgcaattgtggaggcttaccaagtccaaaatctgatgaggtagtctggccggttggagcctcaggaagagtttcagtttgagttaaaaggcaacctgctggtagaattctttcttgctaaggggaggtcagtttttgctctattaaggccttcaaatgattgcatgaagcccatttatatcatggtgggtaacctgctttactcaaagtctattgatttaaatgttaacctcacctaaaaaacaccttcacagaaacttccagaaaaacgtttgacctaatatctggacacaatggctcagccaaattgatgcataaaattaatcatcacaatatataagtgtaccaaaaaactgaaatcacata

SEQ ID NO: 647947 - DNA, 620 bp, Homo sapiens
tcctctttcccctacagcccactctttctcctttaaatattgaagtcttcaaaactctctttgggaagatcacaatgttcctttttggacacattctcaatcttggcaaaataaacctctaaaataattatgactcccctcagtcattttccttgatttatattcttttggctttgtacctcctggaatgtaggaattctgtctctcatccttggtaatctaccattcaccttctttactgcacaaatattagtcaataaacatttgatatataaatgaatgaacacatatgcaaaaataaattgagttcaaaataaaagccatcgtggatgccattcaagagcttttaataattaaagtatagattctaagttggttttaccattaaagtatttaactcttatgatatgaagcctgaagtgatttggtgttcgtttcttcatagaaggaamaataacttgggtgattatcttcatcacaattatttttctaactataacccagatttctcagtgtctcctgcttgatcatctttctgctaccaacaactaaatttgatttatccgagcctcagtcctcacgctgtcttctccagttccatggctttattttatttttga

SEQ ID NO: 647948 - DNA, 245 bp, Homo sapiens
accccaaacctccaatagacatggacacamagctccaaagaaaacctgtccctttagccaagagacatgaaaaaagattgcctgacagcagattttttttttttgcaatatcctccctagtccagctaaacaccaataaaaaacctcattcatcccaaggaagtagggaagaaattttcactccccaataagatggtgttggagtataaagcacagtctgacagaaccagatggtgccctgattc

SEQ ID NO: 647949 - DNA, 621 bp, Homo sapiens
gttttgttgagttaactttttaagcacagttctttcaaactggaagccagtgttggccaagaaaatgcagcttcaaaatggcaacaggataaggatacattcttatatgaggcggtggcagatcaagctgaacaacaaagtcatcccaacaatgactatggraatgaaaccttcactctgcctttattaagcttgtgcacttgtgcacaagcacctcagcttgtaggccacagcaagtcagctggagagaaaaagaaaaggttatacagcctcaaataatagagaatgctctctcccacttacccatacttcacttttccttcgcttttcttcctatactcttctcttgcaacttcaaaaatgtgattcttgctttaaatgtgggaatagtagattatagggagtggggggctacatgtgaactaagaataagaaagcttatatgtttctttcatcaagaaaaacgaagttattatgtttttccaacactcattctacttgtggcgttgaccttgaacaaagttgaattataaacataatacatttggaggataaaattaaacagtgaaattatatgcaagtgttcaaataaaaattttactacaaaagaaatgtttgact

SEQ ID NO: 647950 - DNA, 529 bp, Homo sapiens
tgtgcacaacttgcagttttaatgtttaacaattaagcctagcttaaatggctggaaaggtatgataatatctggtagacctctatggaaattaggaggcagtaaatcatgatggttaaargcacaggcatttttggctttgaatacaagctctacttcctagttttctgaatcactgaatctttctaaggcacaatgtctatatcgtgagtatactccagtaacacagggataataatagtactgacactatatattgttgagacgattaaatgttaattattactatactaaagcttacagtaggatgtgatatttactatataatgctacttattccatcaaaaatttcaaaactggccacaacatcacatggtacttaagatcctggtgaatgtcttaagccagctaggcttatataaaaggttttacaaaagttatttttttgtgtcagagaaatgtgataaaacctctatgtttttccctgaatgaaaatctcccttaaaaatactttatattacaaatttaa

SEQ ID NO: 647951 - DNA, 564 bp, Homo sapiens
caggcagcctttagaagctgaaaaaatcaaggaaatacattttcccctagagcctttaaaagaaatgtagctctgctgacccattttgaatttttctgacttccagagttataataaacttagtctattttaagccattaagtttgtsgtaatttgttacagcagcattgggaaaccaatacaaggccttatttaaaactctttctagaatcataaagaaccccagaggacagaagtactcttattccataagggtccccaagccagtagaatgcaagctgggagctcctgatggtaattcttgccaccacattaggaaaacccatctgtgaataaaatcaaccacgagaaaaacaggacacttagataagtaaacacagatttcttttcattgtgttaaggacatttaaaatgagatctatcctcttaacacattcttaagtgtacaatacattattgttgcctaaaggtacaatgtcacatagcagatctctagtgctcatttatcttgcttgactgaaattttatgtcagttgattagtaatgccccatttccgcttctgc

SEQ ID NO: 647952 - DNA, 535 bp, Homo sapiens
ggctcctccccctgtggtgtgtaaattattatgctaagtagaaagactaaatgatgaatcaatcaaaaataataactacaacatttcaagaccacctgaatattgaaaaagtcagtaaacaagaagtttaaaagctagaggacaaagttaagccatgtaggttttatgaatttgctttttgcttgttaatgtgtttatgcaaacagtgttaagttgttgaaaggttaaaataatgggatataaaatagtatttgcaagtctcrtggtaaccttaaaccaaaaaaacttactagggagacacaaaaaataaaaaaacaagaaactaaatcatgtcattaaagacaatcactttcgttagaggaagactggtaggaaagaaggaagagaagtccacaaaacaaccaaaaaccaaataccaaaatggcaggagtatgtccttactcatcactaataacatgacatgtaaatggactaatctgtttaattaaaagacatagactggctgaatggatgaaaaaaacaagactcattgatc

SEQ ID NO: 647953 - DNA, 535 bp, Homo sapiens
ggctcctccccctgtggtgtgtaaattattatgctaagtagaaagactaaatgatgaatcaatcaaaaataataactacaacatttcaagaccacctgaatattgaaaaagtcagtaaacaagaagtttaaaagctagaggacaaagttaagccatgtaggttttatgaatttgctttttgcttgttaatgtgtttatgcaaacagtgttaagttgttgaaaggttaaaataatgggatataaaatagtatttgcaagtctcgtggtaaccttaaaccaaaaaaacttactagggagacacaaaaaataaaaaaacaagaaactaaatcatrtcattaaagacaatcactttcgttagaggaagactggtaggaaagaaggaagagaagtccacaaaacaaccaaaaaccaaataccaaaatggcaggagtatgtccttactcatcactaataacatgacatgtaaatggactaatctgtttaattaaaagacatagactggctgaatggatgaaaaaaacaagactcattgatc

SEQ ID NO: 647954 - DNA, 600 bp, Homo sapiens
tttgggatccattccaatctttgaagataaggtagtcaagtttgtgttttttcttttccttctttttctaaatttgtataagtgtaaggggtaaaaatgcagttttgttacatggatatactgcatagtggtaaagtctgggcttttagcgtggccatcacctaaataatgtttcctattctaatttagaggagtgttggatagctgtatcttgggatctttgttcattggatttctggcttaattccatagtttcttgcttcccatgtcattctacatttggggtgtttcaccctaggcttattgaagtacatctttatgtaacttccttaaaaatggttctgggatgtaaattctctgagactttgtkgcatttaaaaatgtctcatacttaattgccagaacagctggaaagggaatttgagatgcagaattattcttcctgtaacttctaaatgcatagttccattatcttatgacatctggaattattaagaaaaaaatctaaaacttgtatgatcttttttctgagtatagctttgtaggtataagcttcctcttgttttaagatctacacaattttagtaacctcatgtatta

SEQ ID NO: 647955 - DNA, 564 bp, Homo sapiens
atagcctcatcctggtagattcattattttgtcttatagcaagaacaccataaatattggatggatggatggatggatggatggatggatggatggatggatggatagatgggtagatggttgaatggatacattttggcaattaatgggttctgaaattctcccaggttcttgttgtcccaagagaacaaattctagactgttactgcagaaccttgccctcatctctacccaccttgctcaaaagaacaaacaagcaaacaattrccacccaacagttattctgtgttgttctgtggcacatttctagggctgcgggctgtgggttgtacctgctcaattattttgtgtcctcttctgtgggaaggaaagaggttgaataaaaactttcaggccagagtgatgatggtacaaagccaccatcataaacagggagccggaagtgggtgtcttcaccttttgattcacctcttcctgttttcttcccctttcaagccaagggttaaacagtttattaattgctaatgactaaatgtactgtgctaatacattgtaacaacagtg

SEQ ID NO: 647956 - DNA, 564 bp, Homo sapiens
atagcctcatcctggtagattcattattttgtcttatagcaagaacaccataaatattggatggatggatggatggatggatggatggatggatggatggatggatagatgggtagatggttgaatggatacattttggcaattaatgggttctgaaattctcccaggttcttgttgtcccaagagaacaaattctagactgttactgcagaaccttgccctcatctctacccaccttgctcaaaagaacaaacaagcaaacaattaccacccaacagttattctgtgttgttctgtggcacatttctagggctgcgggctgtgggttgtacctgctcaattattttgtgtcctcttctgtgggaaggaaagaggttgaataaaaactttcaggccagagtgatgatggtacaaagccaccatcataaacagggagccggaagtgggtgtcttcaccttttgattcacctcttcctgttttcttcccctttcaagccaagggttaaacartttattaattgctaatgactaaatgtactgtgctaatacattgtaacaacagtg

SEQ ID NO: 647957 - DNA, 467 bp, Homo sapiens
cctcacttaatcctccgatatgctgattcccataaacacaacaaactttcaccacaaaaaagtttggatgtcttaatttatagaccttattgctctctgccttttcctccttacctatctttaggaaaaacactcctatttcatttgtttcatagattgatacttagttgaacattctacaaatgctgttgcttagcaacctattcacagcaccccatctaagtcttcatctattaaccttttcatctgtccattaagcttggtccttgtactccagtgaatamacaaaactttgctagattatcattcctttttttttgtcagtttttaaaaacttctgtgacttttctgattcaactatctaatctgtctctcattgcagattactgaacaagtgtcagggagcaaaatgtatgaacgagtttccagttctgcattgctcatgaaaaatttgaactgtatgttat

SEQ ID NO: 647958 - DNA, 638 bp, Homo sapiens
tttatttatttcaaatttatttatttatgctctgatctttactattttccttttactaattttgaatttgatttccttttgctttcctagttcttcaagatacatcattactttatttgtttggagattttctttttttttgatgtatgaagttatagctataaacttcccttttattactgatttcactgtatgctattggttttggtatattgtgtttccattaccatctatttcaagaaatatttcaattgtcttcttaatttcttcattgacccactggtgattcaggagcatattgtttaatttccatatgttcatatattttccaaaattcctattattggttyctagttttattgctttctgtttagagaatatgtttgatattgtttcaattttctttgaatgttttaagacttgtttttgtggcctatcatatggtctgttcttcggaacgatccatgtgctgaagaatatatattttgcacattctttgaataaagaatgatgcttgaataaagtgatctgtaaatatccattggggccatttgttttataatgcagataatgtctagtgtttctttgctgattttcggtctggaagatctgtccgtgggtgcttcagtgttgcatgc

SEQ ID NO: 647959 - DNA, 557 bp, Homo sapiens
gagagataggaaaaaaataaagagacttttccccctacactcactcatactgtcaacccaacacttctgacaccaaatgtgtgggagctttaccttacgcaccaactaagcaattctgcagcagacaccagctggctgtcttctaatttaattcaattatgacacttcctacctggtgtaaaccaaaaataaaattctaagccccctgactgactaaatagaccacatctcatggccaaggggataccaaagacacctgaaaaaggaattcaggtcatgatgggaagggggagtcaaacatacctcattataccctcctctctttggagttcaggcataaaaytgaccaccattaacattaaaacagagatctgaagactgacaaaataggctctttgtagcaataagataccacattccaacctggatctagtatagcatcacatgacatatgggggctctgaaagtaatcaaaataaagtattttaccccaatatatttctttgaaatattttgaaatggctctgcaaagctgtctcttgtggggaaaaattaca

SEQ ID NO: 647960 - DNA, 593 bp, Homo sapiens
gtaggcactcagaaccaccaaggtctaaagcatcattgtgggaaaatggccatctttattcccccaaatgtttttatttttcttgtcatactgtacctacttttctgctcatccttccaccagcaatatcatttaggataggacatactatgagaaaaacagcaattttgtcagattatggatttttaaaacatatagctactcatgttcaayctgtccaaagaaaacacagttccataaaatcaactgtacctcctctacagagaaaatacaattaaactactatggaaataactgcaagtagctaaagaatggtaaaaatctttggagaacaaattttaggatcaacctttgcaagaaattgtacatccctgtagagtctcctaggaagaaactaatcttactacagtcatagctagaagaaaggacagacctcacttcctacagcatgggggaaaactatctagtatcacagtgaatttaaatagggctggtgtagaactgggaatatgttttaaccaattctccaggttctaatgggaatggctattgaaccactctctataaaacacaatgttaatcacatctcagcc

SEQ ID NO: 647961 - DNA, 400 bp, Homo sapiens
gaattaattttataactatctaagtcaatgaaatggactaattcccattagctagatttctaatgcaattatttttaaatagcattaattccacaattcttttaaccttgccatatagctttccctaatgcctgttcctccaaccccaagtccttttatttttaaacctctacaagtctttccctctttaaatttaggaacatcccctgatcaatttatattacttttcaaattgctttttaattgaagtatatgtacttttaagtggaaaattcagagtgtgtgtgtgtctgtgtgtgggcacacatgcacatgcaagagactgctatggttcttctcaaacatttttctgsaaaatgtcttataatataacatactgctctaatgagattgctttttc

SEQ ID NO: 647962 - DNA, 437 bp, Homo sapiens
tctggtcatctttcccaaaagtcatttgctctcccctaagtttcctacattcttcctcctgccttccctataagctcctaaatctcactgggtttttttcttggtggtgttttgtttgttttgttttgtttttgattccacttttctttcctgtgattcccccatgcgtgtaataaatgtgtayacattttcttcttttgacatgcctgttatccatttattcaatagactcagttatcacaccttcagagggtagagggaaagttctccaactccaacagttccaaaagaaaatagctagtaactgcaaatgcaaaagtcatataaactttgagacaaagttagcttcttatacgatatgttcagaaagaagaggtgtgttgcacaccaagggacatttccctggtcttagctcctaagtttctctgagaagaagc

SEQ ID NO: 647963 - DNA, 559 bp, Homo sapiens
cttttatggaaaatagataaaatagcaattttttaattataaatttaaagtcaaaatggagataattaagtatctccattaattaagtaaagattaattttttttaaaatagcatttactatattctaatcaatcaattgattgactatttttatccctggctcaatgtaactctctttgacatactcttgtcttaattctartttaagtcaacaatgtgtaatcatagatgactccttgccattttgatctctcagttctatgaacacctttgatctaacaataatgttttccaacagaattatttctactcaaacttctgagatcaaatttgtggattcagtctcaccccaatcaattcttcaactctcaggacaccaaatggtgtcctacaattcaattcaatcctgagtctatctatctggagatagcatagatcccaaaagttcagggctcaggcccacaagactgcccccacaccattagagaggagttgtgggcctcccatactcctgaccaactgtctataaattaggacctccatggattccttcctcag

SEQ ID NO: 647964 - DNA, 559 bp, Homo sapiens
cttttatggaaaatagataaaatagcaattttttaattataaatttaaagtcaaaatggagataattaagtatctccattaattaagtaaagattaattttttttaaaatagcatttactatattctaatcaatcaattgattgactatttttatccctggctcaatgtaactctctttgacatactcttgtcttaattctaatttaagtcaacaatgtgtaatcatagatgactccttgccattttgatctctcagttctatgaacacctttgatctaacaataatgttttccaacagaattatttctactcaaayttctgagatcaaatttgtggattcagtctcaccccaatcaattcttcaactctcaggacaccaaatggtgtcctacaattcaattcaatcctgagtctatctatctggagatagcatagatcccaaaagttcagggctcaggcccacaagactgcccccacaccattagagaggagttgtgggcctcccatactcctgaccaactgtctataaattaggacctccatggattccttcctcag

SEQ ID NO: 647965 - DNA, 535 bp, Homo sapiens
agacagacatcgtaagaaccttcaacataatgtagtggtaaaaaatgtggtaaataactgaagaatacctctgatggcttattagtagactggactcagctgagtaaagaatctctgagcttgaggatttatcatcagaaacttcaaaaactaaagaaaagaaacactgaaaagaacagaagatgatatccaagactgtgggacaactacaaaaggtgcaacagagtaatgagaataccaggaggagaaraaatagaagaaagttctgcaacaaccatgtctgagaacttccagtattaatgtcagacaccaaaccaaagatccaggaagctcagagaccaccaggcagaataaatgccaacaacctacacttggacatataattttcaaactatatgaaataaaagataaaggaaaactctgaaagaaaccagaggtggggcagaaaacaccttacctacagagacacaaagataagaactgcattcaacattgcagaaactgtgaaagcaagaagacagtgaaatgaaaaatt

SEQ ID NO: 647966 - DNA, 617 bp, Homo sapiens
ttgtgtctccactgcctcacatttgatttcaggtcattccatcaattgtcaaagacgcatccaacattaactttccaactactggtttggattgtgtcaacattgtcattctgggccacaacaacacaaaaggctaactcagtgaggtaacatagacactgatcagtgagattttgctgatggatggtaccattttttaccaagatcaagggtattcataccttcaggcatctagataacattgaaaagggyaggttcatagataaaaagggaaagaggaagggtttttgcactatacatgagctaccgtgtctcctgtttaacctgagtctgaagagattcaaagtgcaggtgccatgaatgcctctttaatagctccatgtcgattgattttctgggctacacttcccagcattcaaattgctaaatgcatataaactactagtgaatatttattacctggatttgtgcttttgagtgatcttatctatagttatgtgcttcagtgatccaacttggggtgcactccaaactttgataaattaaagaccctgcttattccttgagtaatgctacactgacaactgatttagtgaatgccactgtgaaaataataa

SEQ ID NO: 647967 - DNA, 561 bp, Homo sapiens
agatggcggcggtgaggggcggtggtctcaccatgttgcccaggctggtcttkaactccccttgaagtgcccccctcctcacctggcccccctcaccttgcctcctccccctcactcctatgccagtccctgccattccctaccccctctgctgaccgcaagactcaacaagtgacttgctgagcaaaccctgctgagaagaggtctgtttagggacacaggaggccaagtacacaaaaaagcaaaagaactagcatgactttttcaatggatgtctattttacagggctggcttcagattattgttatagctttaaataaaaggaccgttttgtcatctcggcccatggcctacattatttctttactgtccattgccctgggcgcttgactaataatttaacagcaatttttttttaaaattttaaatcatgattcatcgcattgctgtaagagtaattagaggtaaattagggcttgaaactgcctgtagtgggttactttctgagatcttagcataattatcaggtgagagggtgaagttttaattagcgctaagtg

SEQ ID NO: 647968 - DNA, 610 bp, Homo sapiens
cacactgatctctcttgagatcttctccactggtggctggaaagtatttgcaaggattcctgtttctggtctgattcctatgttttgttggtttctggcgatagcatgttttattctaaactaaacagtttgawctgaagagctagagaggctgtgtggtgttataacaaaataagtgcagtaactacaccttaactgtgggagatacatttcaagacccccagtgcatgcatgaaaccatgaatattactgaatcacaagctgtttttccctatacatacatatctatgacaaagtttaatttataaattaaattaaatctgatgttatctgtagatagggtgtgagaattgaattgtgtcatcagcaggaatgattgcttgtttgttggtggggaaaaactctccacacatttggttacagaagccttctttgttgatgattgttgctgtggtgtgacagcagagaaaaacgtgtcaagtatgtctttctgcgcatatagtggataaggggtactagtgtatactctgttgtaatggcccctcatattttggtccagaaatcatgctctttgacactgttgactcatcacacctgttctgctaacaat

SEQ ID NO: 647969 - DNA, 610 bp, Homo sapiens
cacactgatctctcttgagatcttctccactggtggctggaaagtatttgcaaggattcctgtttctggtctgattcctatgttttgttggtttctggcgatagcatgttttattctaaactaaacagtttgatctgaagagctagagaggctgtgtggtgttataacaaaataagtgcagtaactacamcttaactgtgggagatacatttcaagacccccagtgcatgcatgaaaccatgaatattactgaatcacaagctgtttttccctatacatacatatctatgacaaagtttaatttataaattaaattaaatctgatgttatctgtagatagggtgtgagaattgaattgtgtcatcagcaggaatgattgcttgtttgttggtggggaaaaactctccacacatttggttacagaagccttctttgttgatgattgttgctgtggtgtgacagcagagaaaaacgtgtcaagtatgtctttctgcgcatatagtggataaggggtactagtgtatactctgttgtaatggcccctcatattttggtccagaaatcatgctctttgacactgttgactcatcacacctgttctgctaacaat

SEQ ID NO: 647970 - DNA, 184 bp, Homo sapiens
cacccctttttcccttccacatccacccccacccatccatgattaaatcactccctcccwctccctgtcataatctaatccctccaaacccttccaatccttgtttgctacccactactgagcctgcttctactttttcagatatctgtatagcaggttggctatgtagcaagaacaaaaatcc

SEQ ID NO: 647971 - DNA, 626 bp, Homo sapiens
aaacatcacctgagtgctcatgagaaatgcagactccaatacctgctgagtcagaatgtgcactttccagaagctcctcaacgtattcatgacaatttgaatgccttgttctacactggtgtgcttccatattggtttaccctaattggcctttttggcctagcctcaacttctttcctattatgtccctgaatttaatactacgttataagccataatgtttctaatgaacttttaatcaggcaaagcttctctaattaatttcttcccaataaatcacccaacactattcttttcaattatgttaatatgatactatcctatgaagttacaacattttctatgaaaacaaattacagtcatacatggctgaccatttatggtgatrttcatctatggtagataaaacacaggtctgcatggtaaagtacctcaatccttaatgcctccccagtagcgagaatgacagcaagagaaggaaaatgttactgtaattatatgacacattttggtactggaagctcactttatcttccttcctatttctaacaccctgttcttccttcttctacagatcaatttgactttactaccctccattacatacatccacttttttttattta

SEQ ID NO: 647972 - DNA, 626 bp, Homo sapiens
aaacatcacctgagtgctcatgagaaatgcagactccaatacctgctgagtcagaatgtgcactttccagaagctcctcaacgtattcatgacaatttgaatgccttgttctacactggtgtgcttccatattggtttaccctaattggcctttttggcctagcctcaacttctttcctattatgtccctgaatttaatactacgttataagccataatgtttctaatgaacttttaatcaggcaaagcttctctaattaatttcttcccaataaatcacccaacactattcttttcaattatgttaatatgatactatcctatgaagttacaacattttctatgaaaacaaattacagtcatacatggctgaccatttatggtgatgttcatctatggtagataaaacacaggtctgcatggtaaagtacctcaatccttaatgcctccccagtagcgagaatgacagcaagagaaggaaaatgttactgtaattatatgacacattttggtactggaagctcactttatcttccttcctatttctaacascctgttcttccttcttctacagatcaatttgactttactaccctccattacatacatccacttttttttattta

SEQ ID NO: 647973 - DNA, 572 bp, Homo sapiens
ttttttaaagcctcatgttattctcacaactcaggaatgtgtttctcaaagacctgagaaccatcctgatctggttaggctttgtgtycccagtgaaatcttatcttaaattgtaatccccatagtcctcaagggagagaccagatgtacggaactgaatcatggggggtggttcccccatgctgtttcatgatagtgagtgaattctcatgagatctgaaggctttataagggacttcccccttaactcaggagttctccttcctgctgccctaggtagagccattggtgtcatacatgcaaaaaacctgaaaatatatctcaaaagcccaaagtacaatggtgatgttatctgcaggagtaattggggaagttgcatatctggtgtcctgtagaataatgcttggaaatccataccttagcagaattcagactcctttcctcttccttagcctggtggtctcttattaggtttaccaaggtgtttacatttttggggaaggccttttatcagataaaactatacattaaatatcttccaaatttagcttggcctaagctcaggaataatt

SEQ ID NO: 647974 - DNA, 591 bp, Homo sapiens
gtgactctttctggtgctatattggaagagtcacttcactgcaagaattctgagttgtttccatcttaagacactgacagcatctcaataacataagttatcacctaactgacacttccacctggagtgcttgctctatttcagatcttcatatgaccaggctcttttcaccacttagattctctctttagagatctaaacacatagtcactccttgaacacacagtcaatttttaccactttgctttaatttattttattcatgacactagtgacagtacgtaataaatttgttgattaggttatttttacttatttgtgttcatttttttctactaaactataagccatataacagtatggatattgtctatcttgtttgttgctaaaacaaaagaaaataaagtctagaacagagcctggtaagtagtaagagatttaggcataattgcggctgaatatataagtgaattagttattgttttcatccaattaaattttactacaattctcatgatcagtttcttcaaacycaaatgaataaggttctttatttcatcagaatttgtacttcatacttttgatgaccaa

SEQ ID NO: 647975 - DNA, 604 bp, Homo sapiens
ctgatttattgcaagagcctcgatactcatctcccactttcactctgtatctggatgtggtgcttctattttctaygtagtggccagagtcgtcctgttaaaacataagttaattttaccattttccttctaaaaactatccaatggcttcccatctcactcagagcaaagaccatggtcctcaccacggctaaaggctctgcaagcttggcccccagcaagctctctgccttcttcttgaacctttgtcactgctctaaccacattggcttcctggtcatttcctcaccacatggagcactgtctccccacgtgaccttcgtatttgctgtttctcctgcctggaatgctcttgccccactatctacgtggctcaatggatcagttcctccagaatctctgctcacatggccacttatcagacaaggcttctgtgaccactgtatgaaagagatggtatgctcaacgccatctgtatttcttcccttcctttctctaattcttctgcatagaagttgtcatgcctgatattcctctcttgatttatttattgccaggctctcccagcctctaaacatatgtatgagggcagatactttgtata

SEQ ID NO: 647976 - DNA, 604 bp, Homo sapiens
ctgatttattgcaagagcctcgatactcatctcccactttcactctgtatctggatgtggtgcttctattttctacgtagtggccagagycgtcctgttaaaacataagttaattttaccattttccttctaaaaactatccaatggcttcccatctcactcagagcaaagaccatggtcctcaccacggctaaaggctctgcaagcttggcccccagcaagctctctgccttcttcttgaacctttgtcactgctctaaccacattggcttcctggtcatttcctcaccacatggagcactgtctccccacgtgaccttcgtatttgctgtttctcctgcctggaatgctcttgccccactatctacgtggctcaatggatcagttcctccagaatctctgctcacatggccacttatcagacaaggcttctgtgaccactgtatgaaagagatggtatgctcaacgccatctgtatttcttcccttcctttctctaattcttctgcatagaagttgtcatgcctgatattcctctcttgatttatttattgccaggctctcccagcctctaaacatatgtatgagggcagatactttgtata

SEQ ID NO: 647977 - DNA, 204 bp, Homo sapiens
ctttgtcctgtcagaatctctgagcaggatctcccaggtccatccaaataagtgctttgtccacttytgactaggcccttgggcatcactgggctatcccagctgtccacagggccttcaataatgcacattgcacctggcttatccaagcagtgctcagcagcccacattgaccaggtccctgctgaccagaccccacacatc

SEQ ID NO: 647978 - DNA, 591 bp, Homo sapiens
ctggccttcactgtccatgtttttgtcagcattcttgtcacagccatttaaccagtctctaagatgatccaaaaatgttctcatctgtctgtcttctttggagccctccaaactcttccaacctctacccattacccagttccgaagttgcttccacattttcaggtatctttatagcaatgctccagtcctcatttgccatttttggtaagatttattttgaaaaagaggtttaattggctcatggttctgcagagtggacaggaagcttagtgcttctgcttctgggggggctcagaaatctttcaatcattgtgcaaggtaatgaaagagtgaattgtctcacatggcaaraggaaatcacggagagtacagagtgatatagagttttcagtggccagatctcacgagaagtcactcatgattgtgaggacagtaccaaggggatggtgctgaaccactcatgagaaatttgccttcatgattcagtcaccttataccaggatccacctccaacattaggaagcataactcaacatgagatttggtggggatacatattcgaattgcctcatcagtctttgagtataa

SEQ ID NO: 647979 - DNA, 605 bp, Homo sapiens
acagatagcaatattaaatagagtggtcagggttggcctcctaagtgaaaattgagcaaagacttgaaggaggggaaggagctgaccaaggtactgagggaagagcattataggcagaaacaacagaataaagatgctaagagggaactccgtggtgtgtctgaagctcaggaaagaggtctgtggagtagagagagggagagaagtagggaaggaggccagggagttgttggactcagatcagtacagattgtgtaagccctgggaggctactgctggggctttggtttttattctgtctgagatgggagatgaggaagggttctgagcagagaggtgacrcgaactgtctactgatttaaaagcatcccatggcagctgagttgagaaagattgtgggaagatttgggtagaagcagggaggccatgctgtggcaacctccaggtgggagatgatagtggttctgaccagggccctggcaatggtgagagatggttgattcttgttgaaatactaagtaattaaaaaaaaaccactactgtttttcccaattatatgaagtatgggatgctagattacagaaatcttaagtcgggccaggtga

SEQ ID NO: 647980 - DNA, 437 bp, Homo sapiens
ttcagcgcggaactctcttgtggttcttgaagatgccatttctttttctttttttttttttttttgagacagcatcttcctctgtcaccaggctcgagtgcagtggcacaatctcaattcacagcaacttctgcctcccagttcagggttcaagcatttcttttgcctcagcctctgaagtagctgggactacagggaygtgtcaccatgcccagctaagctttgtattttctgtagttacggggtttcagcatgttggacaggctggtcttgaactcctgaccttgtgatccactggccttggactcctaaagtgctgggattacaggtgtgagccaccgtgcctggcctcttttttcagtctttaataaactgctgccatcatttcagaccacttgctattttaggcacttagaaatttttcactggaattcatg

SEQ ID NO: 647981 - DNA, 364 bp, Homo sapiens
ctgccatcatttcagaccacttgctattttaggcacttagaaatttttcactggaattcatgtaaagaaagaccatgggtgtttgtactggatttagtattcatccttcgactgcatgactcacccctagtgccataattttactaatgaatttttcagatactactcagctggccactgaacctaaccagcaacccaccctcaaccattcagtggtmttttgttcttctctgttcctcctgaatgttgattactctcagaaggtgataaaaacttggatttcttttttttttctttctagagacagagttttgttctgtcacccaggctgcagtgcggtggcatgatcatggttcactgcagc

SEQ ID NO: 647982 - DNA, 412 bp, Homo sapiens
gatgtcaacttagccaagtgatcaaagttaacattactaataataagataaatgaacttcatgtaatttcttatatgatgcactgagtaggacaaaacatcaattctatggtattcttagacaaaatgtataactttagtcctaaccgtgagaaaacatcagactaactgaaattgaggagggacattctacaaaataactgccagtattcatcaaaagyattttagaaagactgaggaattctccagagacaaggaggcatgttatctaagtgcaatggagaacatgcattgtatcatgaaccagagatggacaacagtaggatatgtacaataacaccccaacatttgaacattaaacaaaatacttcagaaaaacccattggccaagaaaagtttcacacacacaaaaa

SEQ ID NO: 647983 - DNA, 453 bp, Homo sapiens
gcaacaaggatacagctggaatccactctcctaagcaaaccaacacagaaatagaaaccaaatatctcatgttttcactcacgtgggagctacacatkgggtgcacattgtcataaacacgggaataatagacactggaaaataagaacggggagggacagagtgggccagggttgaaaaactacttcttgggtcctatgctcactacctgtgtgatgagttcaattgtgctgcaaacctcggcacccctaaatatgcctttgaaagaaacctacagaggtaccacgttaatttagaatacaaactagaaaaaaaagagaaaagtttactataaatagagaacagaaatttctttttaagataaaatttattgaagtaaaaaatgggttaaactttcataaagggcagagttttctaagaatttcaaagcaatccattcattgcaaaagatgg

SEQ ID NO: 647984 - DNA, 453 bp, Homo sapiens
gcaacaaggatacagctggaatccactctcctaagcaaaccaacacagaaatagaaaccaaatatctcatgttttcactcacgtgggagctacacattgggtgcacattgtcataaacacgggaataatagacactggaaaataagaacggggagggacagagtgggccagggttgaaaaactacttcttgggtcctatgctcactacctgtgtgatgagttcaattgtgctgcaaacctcggcayccctaaatatgcctttgaaagaaacctacagaggtaccacgttaatttagaatacaaactagaaaaaaaagagaaaagtttactataaatagagaacagaaatttctttttaagataaaatttattgaagtaaaaaatgggttaaactttcataaagggcagagttttctaagaatttcaaagcaatccattcattgcaaaagatgg

SEQ ID NO: 647985 - DNA, 529 bp, Homo sapiens
tgtctcatctgccaaacgtccctcccttcctcacactctgacactcaggaatagggtagatggtgtgtccaggcagtgtcaggccacctcactttctcctttgagacgggcccagagggcctttggggtgagtgtggagctgggaacctggagcctgaggccaactgtctctccctgtgtcttggaggaaaggccatgtctcaaaaaaamccccagggcctgacctctgggtacacatgcagggagggagggtctatgagctgagggggacattgtaatgagactttgagccccgttgctcatgggcctggtcagtggaccatggtcagagatgacctggtcatcaggacctagtcatttgggacctgatcagcaggggcctggttagtggcggcctcctcagtaaagtcctcatcagtggggacctggtgacctaatcattggaagcctggtcagtggggggacctagtcagtggtggccttattagtggggcctgatcagttggaacataaacaatgaaaaactggt

SEQ ID NO: 647986 - DNA, 529 bp, Homo sapiens
tgtctcatctgccaaacgtccctcccttcctcacactctgacactcaggaatagggtagatggtgtgtccaggcagtgtcaggccacctcactttctcctttgagacgggcccagagggcctttggggtgagtgtggagctgggaacctggagcctgaggccaactgtctctccctgtgtcttggaggaaaggccatgtctcaaaaaaaaccccagggcctgacctctgggtacacatgcagggagggagggtctatgagctgagggggacattgtaatgagactttgagccccgttgctcatgggcctggtcagtggaccatggtcagagatgacctggtcatcaggacctagtcatktgggacctgatcagcaggggcctggttagtggcggcctcctcagtaaagtcctcatcagtggggacctggtgacctaatcattggaagcctggtcagtggggggacctagtcagtggtggccttattagtggggcctgatcagttggaacataaacaatgaaaaactggt

SEQ ID NO: 647987 - DNA, 612 bp, Homo sapiens
gcccttcgttttgacttcaaaacattcactggctctcatggatttgtactatttaacacccagataaaggtaagctgccttttttaataacgatggattacattttctcgttacatgctcttattcaattggattttttcaatttaagcacatctattctagggaaaaatgtaagtctgagaataattgtagttattagaaaagtaaacaygatgaaacacaaagtaacataaactgaaattatctgattaaattactataaaaaagacatgtatttccatggaaaaatgatgcagctatgtgctctgtattttctctctccattctttgttataggactatgtcattacttgtactttcttataaacaaacatatgtggaggatgggagatattttaagtagaaatacaagtttgggccacgtgcaatcaaagaaatgtgatggcattttatgtgtggagactgatctaatagtctctacgctaacaaatgtgtcaatgtttttaccgaagttcttcttgaatatcaattccagacctccagagcgtgaggttttcaaatgtgctaatcctaatattctgataatatggctaaatctattaaatttatttt

SEQ ID NO: 647988 - DNA, 612 bp, Homo sapiens
gcccttcgttttgacttcaaaacattcactggctctcatggatttgtactatttaacacccagataaaggtaagctgccttttttaataacgatggattacattttctcgttacatgctcttattcaattggattttttcaatttaagcacatctattctagggaaaaatgtaagtctgagaataattgtagttattagaaaagtaaacatgatgaaacacaaagtaacataaactgaaattatctgattaaattactataaaaaagacatgtatttccatggaaaaatgatgcagctatgtgctctgtattttctctctccattctttgttataggactatgtcattacttgtactttcttataaacaaacatatgtggaggatgggrgatattttaagtagaaatacaagtttgggccacgtgcaatcaaagaaatgtgatggcattttatgtgtggagactgatctaatagtctctacgctaacaaatgtgtcaatgtttttaccgaagttcttcttgaatatcaattccagacctccagagcgtgaggttttcaaatgtgctaatcctaatattctgataatatggctaaatctattaaatttatttt

SEQ ID NO: 647989 - DNA, 596 bp, Homo sapiens
ttcattgtgggaagcattaatgagtttattgaattcaaagttttataaagcagagggaggcagtaatatggcttatgtgactgtcagtttaacaaagatgagtggtcattagacagaattccaagaccaacactgtggtttattatataaaatactaaccatgaaagtttttgagaaagtcttcttttaccatttgacctgtctttttttttccctgcctttctttaagtgttgctattccccattccagggctttatctcttcttcctctataccctctccctatataattttaatcaggaccagggcttcagtcatttatatttcaataacttccaaatctttgcttgtactgtggactactatttgtaaatacatgggtgtgttcaaagaatcttaaactaaatatggcctaggttgaactctttacctccacatcagcttctgctctgaatctcaatcttagttagtctcaccacatcatattagttaagttaaccctagcttctgggtaaatccccaagacttagtggctcaacacggtagatgtttgtttcttacaaaygtgaagtccagtcaataagaccgggatatgg

SEQ ID NO: 647990 - DNA, 597 bp, Homo sapiens
gaagaacactgagaccctgctgaggccagcaaatatttatctatggaggtgtcaggtggcatggtcatatgaaatcagggtacagatgagaatgccactaaaccagtgggatcctgatatagtttggatctgtgtgccctccaaatctcatgttgagttgtcatccccagtgttggaggtggggtctgcagggaggcattttgttcaagggggcggatggatccctcatggcctggtattgtcctcaaggtggtgagtgagttttcaggagatctggttatttaaaagtgtgcrgcacctccccaactctcttgctcctgcttttgccatgtgatgtgcctgcttctgtttcaccttctgccatgaataaaatctctctgaggcctccccagaagctcagcagatgctggcatgatgcttgtacagtctgcagaactgtgagccaattaaacctcttttctttacaaattaccacccagcctcaggtatttctttataacaatgcaagaacagtgtaacacagatccaatttggggagagaaggaagtttagccaagagggacgctctaacaaagtaagaaaaataaaagtcattct

SEQ ID NO: 647991 - DNA, 354 bp, Homo sapiens
ggcattttcattattttaagcttctagcacaatgaaagaatttctctttttcatgaacaggatcatacatgaaaaggaggaagagtgtcctatatcatakttattgttcaacaaaacactgctccacggcttaaattcagtttaaaaaagagaatttgttgaacatctaacacatacataaaaggcagtaaagacacatgagaagagggcaggatattgaagtatacagacttcaatgctgagttttatatcttaggaagttactccacctgacagaagctcaatttcccctgatttaggaaggcgatgctaatgggtattgcataggtgtaagtataaaaatgttgtatttaa

SEQ ID NO: 647992 - DNA, 393 bp, Homo sapiens
tagctacagaattacgacaaacccaatttagagaaaaccatggaaagaagtatggatatgaagggaaaaaaaggtgtggagtgaagggttgyaagatatggatcttggaggaatttaagaactaatacacaccacaccagaggaattaacaaaagatgacttcatggagatgagtgcttcctaaccagtgccagataatgaggaagaagacataggaacagcagtgccagaaaacaaattggcattcaacaatctggcaaaagaactttgattattcaagactacttttgacttcttttatgacatagaccgttccatgatacaggaactgaaactgaagcaaatggtggaagacggataggtactacactgaaatgtttttagagaaatgaa

SEQ ID NO: 647993 - DNA, 509 bp, Homo sapiens
ggaattccctgatcactaatgaagttaagcatcaatattattcctttaatatgcaaatgctgaaaatacatttaactataatagatgtcaaaaatctgtaaatcaggctaggtgtggtaggcactcacctgtattcccagccactgggagacttgagtccaggagttccagactgtagtatgcaatgatcaagcctgtgaatagccactgcactccagcatggacaacatagcaagaccccatctttttttaaagaaaagagtctataagacaaaggtcctcataaattaagagaagccaagacagtcactgtgactgcagaatattttaatttttttttattatactttaagttctagggtacatgtgaacaacgtgcwggtttgttacatatgtatacatgtgccatgttggtgtgctgcacccattaactcatcttttacattaggtatatctcctaatgctatccctcccccagccccccaccacagagcaggccccagtgtgtg

SEQ ID NO: 647994 - DNA, 588 bp, Homo sapiens
tagaaaaagaaatgcaatggccaggagtaacagaagatgttcaacatcaatccaatcaaattaatgcgtctttaaaatgcaatagcagtcaatgttagcaagagtgtaggtattagacattctcataggaatataaactarggccatgttttaggatcatattagatcgcagcaattaaaaaatgttaaattcatatgttgtatagcaacttctcaggttggaatttatcacatggagaatcttgtaaaatacataaaccaagatatgttattaatgttattggtagcctattgttttaataaaaaatatatttatacaatacagttgttaaaagttaagaatatcttgaaggtaaattattaaacaaaaatagaaagcctaggccaggcaagacttcatctcatgcttataatcccaacacttttggagactgaggcgggaggattgcttgagcccaggagtttgagaccaacctgggcaacacagtgagacctcatctctagaaaaaaaaaaatacaaagcctagttctgaacatccttttgtgtaatactaaaagataaaattttattttctatcttgtttaaga

SEQ ID NO: 647995 - DNA, 588 bp, Homo sapiens
tagaaaaagaaatgcaatggccaggagtaacagaagatgttcaacatcaatccaatcaaattaatgcgtctttaaaatgcaatagcagtcaatgttagcaagagtgtaggtattagacattctcataggaatataaactaaggccatgttttaggatcatattagatcgcagcaattaaaaaatgttaaattcatatgttgtatagcaacttctcaggttggaatttatcacatggagaatcttgtaaaatacataaaccaagatatgttattaatgttattggtagcctattgttttaataaaaaatatatttatacaatacagttgttaaaagttaagaatatcttgaaggtaaattattaaacaaaaatagaawgcctaggccaggcaagacttcatctcatgcttataatcccaacacttttggagactgaggcgggaggattgcttgagcccaggagtttgagaccaacctgggcaacacagtgagacctcatctctagaaaaaaaaaaatacaaagcctagttctgaacatccttttgtgtaatactaaaagataaaattttattttctatcttgtttaaga

SEQ ID NO: 647996 - DNA, 588 bp, Homo sapiens
tagaaaaagaaatgcaatggccaggagtaacagaagatgttcaacatcaatccaatcaaattaatgcgtctttaaaatgcaatagcagtcaatgttagcaagagtgtaggtattagacattctcataggaatataaactaaggccatgttttaggatcatattagatcgcagcaattaaaaaatgttaaattcatatgttgtatagcaacttctcaggttggaatttatcacatggagaatcttgtaaaatacataaaccaagatatgttattaatgttattggtagcctattgttttaataaaaaatatatttatacaatacagttgttaaaagttaagaatatcttgaaggtaaattattaaacaaaaatagaaagcctaggccaggcaagacttcatctcatgcttataatcccaacacttttggagactgaggygggaggattgcttgagcccaggagtttgagaccaacctgggcaacacagtgagacctcatctctagaaaaaaaaaaatacaaagcctagttctgaacatccttttgtgtaatactaaaagataaaattttattttctatcttgtttaaga

SEQ ID NO: 647997 - DNA, 541 bp, Homo sapiens
aaatattttattttattgaattcactttttgcctctcctacaatgatgatttgcttttcctcctttaacttgttaatgtgatgaattatacatagtttttttttctattgttagaaatccttgcattcatggaacaaacacaattttcatactatattttttatagacttctaaacttaatttgctaacttttaatttaaaatgtttgccgttaggttcatgaggaaagttggcatgtaattttcctgtcttacacatttctcatataacattggtatcaaggttgtactggcctcataaaatgaaygaacaaatggacctttttttattctggagttgtttttataaaatggaaataatccatttcttgaaaacatttgatagaactcaccagtaaaaatgtctgggcctgctggttctcttcttctaagaagaatttggaacttataattaaagctcctttaatgtgttagaaaactttccaggtttccttgaacattaataaattccaatgacgaaaagccctcagatattaaatata

SEQ ID NO: 647998 - DNA, 547 bp, Homo sapiens
cagctggctagacagtgctgctgggagagtactgcctctcaaaacccgtctctctgtatcagctgcccagtgtttctgtttctgcctacttggaggaacaaaagcaatcctgctcctctccccagagacaggtaattatgccgcattttctttcctgtttcttacatgacaagcactcaaaacttgtcactcttttggttctctccagtgccctccaaacagtccatgttcaagccaaagaggaatcacttctgcttaccatgttaacttttaaaatagttaactgcagcctgcattatgaggatagcatgccagcataaggaagttagcatcatctagagtgaccacagaagctgcatctgtccgtgtgactggacactgtatatgtccagatctctgcaaggaagagtcatgtcgtactttagagtatgactgagtcacactcagagggaagtgattcccacaagcagctcccagccagtaactgagcttggcakggatactgaggcaggccccttcctgggagaaatgggactccagaagtcct

SEQ ID NO: 647999 - DNA, 444 bp, Homo sapiens
aatgtatcagaatttgggctcacctgcggtagctgctgttgacccagagggaccactgggatcctcacatctcagggcagcacatcgtttgcagcaatggttggttctacgcaaccttttatgaaattaggtgaggcccttgcttagaattttttaaaagcttaatatgagtttatatctctttaaatatcagtttctaatatttttttaaaggcctatgtttacaacaaatttrggagatacctttatgcactactaactagtgttcttttgtggtgctttagaaattctggcttacttgtatttttgctggccttctaatgatttcactcatcaatcagaagatatttgtgtccacctccctgcttcctctccggtgatcttgtctattcttggccattttagagttgacttagcagccttcacaaaactgattggaatttc

SEQ ID NO: 648000 - DNA, 505 bp, Homo sapiens
gattggaatttccactgggattaaattgataggtcatttttgggagaactttgcaatattgaactttccaatccatgaactttacttatctgcccatttattatgtttgtttttggtagattacawaattatatgatcactccaaaaattaccttaccctttatagtaaaaccttccattgtaaacttctggcaataactgatctgtgttcctctggcattgcttttttttcagaattttatacaaatggaatcgttcaggatgtagccttttgagtctggctactttcatatactgtatcaacagttattccttttaattgccaaatagtaatccattgtataaatactacatggtttgcttattggtttgtcattggaggaatatggactattttcactttttgataaattataagtggattggaattcacaaagtgctttttgtctgagcataggttttcatttcacttgtgcaaatgcctaagggtaggattgccgagtca

SEQ ID NO: 648001 - DNA, 505 bp, Homo sapiens
gattggaatttccactgggattaaattgataggtcatttttgggagaactttgcaatattgaactttccaatccatgaactttacttatctgcccatttattatgtttgtttttggtagattacaaaattatatgatcactccaaaaattaccttaccctttatagtaaaaccttccattgtaaacttctggcaataactgatctgtgttcctctggcattgcttttttttcagaattttatacaaatggaatcgttcaggatgtagccttttgagtctggctactttcatatactgtatcaacagttattccttttaattgccaaatagtaatccattgtataaatactacatggtttgcttattggtttgtcattggaggaatatggactattttcactttttgrtaaattataagtggattggaattcacaaagtgctttttgtctgagcataggttttcatttcacttgtgcaaatgcctaagggtaggattgccgagtca

SEQ ID NO: 648002 - DNA, 432 bp, Homo sapiens
gcttcttcttaaaaaaattaagtttttaaaatgtatttcataggatttttgttctctctctccctctttttgtgcatatgtgtgtgtgtctgattagtctttactatcttaaaatggttagtcctgatagacctgtttcttcaaaatttctctcagttctttggcagtttgctcttagcttataattaaagatcaatttctgacttgtcttgttctagaaaacctcaatggaaattacagcaagctgaataggatattaattaaaaacataaacctggtgaaacccgaacatagaggctccagttcaaagatgcttccaatagttgacatggccmttcattccttaaaaccagctatttttcttttgaattacattacctttaattctgtaaattggatgttatatagtaccatgaaaactgctgtgagtaa

SEQ ID NO: 648003 - DNA, 579 bp, Homo sapiens
tttggctgatactgaaatttggatgttattcaaaataatattctaaagcggtgctaatagaaatataatgagaaccacatatgcaatttaaaacttcctagtagccacattaaaaagttacagtgagctgggtgcagtggatcatttgaggtcaggagttaagagaccagcctgaccaatatggtgaaaccccrtctctactaaaaatacagaaattagctgggcatggtggtggacaactgtaatcccagctacttgggaggctgagtcagggagaacagcttgaaccaggaggcagaggttgcaacgagccgagatcgcgccattacactccagcctggtcaacaagagtgaaactcctctcgaaacaaaataaaggttatagtgaacaggcgaaattaattttaatgccttccattttgaccgatatatctaaaatattaccatttcaacatgtaatatgtaattatgtgctgtattttatgtttgcaggacatctcagttcagactaactacattgcagatcccaagtgtgtgtcattaaaatagtgatagatttgtggtgtacatacctataat

SEQ ID NO: 648004 - DNA, 413 bp, Homo sapiens
aaatcacatttttgaacctcgatgcttgaagtgtagcttgggtaacagatgggctttaagccaattttggcatgcaaggggttgagtttattaggcatcagcaccgctgaaaatcgtggggatgcaggcttaatttcaacactattctaaatacttgaaagatattatataagtctttaataaactcctgtgtctacaaatggttcacattaactcaatatccatgatgaaacatctayaaaatcaaggcactgttatttagtggagacttgctggctattctatgagaggaggtattgttattgtaatctcatcatctcataaaattgtatcatattactcataaccagcccttcatattctattcctattttggtattttaaaataagatatctttgaaattcttgaattc

SEQ ID NO: 648005 - DNA, 545 bp, Homo sapiens
ttttggggcaacaccatattgtaaacaactgtcatacttctacatgaacatttgcaatggctgcratgtgatccactcatagatgtatcctaatctatttatttttggaaaagttttttcaaagccagcgtgaatactcttctttgaaaaacacagaaagaaactcctcacaaaaaatatagattgattcctttaaaaaataattactgagtacctttagtatagcagacattctggggaaatctccatgaaaagacactcaagtaccaaaaatttagggagaagggtaagcaaacaagccagcaattacaacagtatgtggtcagtcaccctcgtaaactaaggtaacattttttctaaaagttaatatgggtaaatatgtcagaagttctaagactgtaaatatctcttgcgcagacaaatcccctgcttaaaatttattattaggatgtaatgggacaaggtacaaagatggtggtacaagacatttattgtagtttgttaaataaagcaagagagagggagcaaagtaaatatccatgaaa

SEQ ID NO: 648006 - DNA, 545 bp, Homo sapiens
ttttggggcaacaccatattgtaaacaactgtcatacttctacatgaacatttgcaatggctgcaatgtgatccactcatagatgtatcctaatctatttatttttggaaaagttttttcaaagccagcgtgaatactcttctttgaaaaacacagaaagaaactcctcacaaaaaatatagattgattcctttaaaaaataattactgagtacctttagtatagcagacattctggggaaatctccatgaaaasacactcaagtaccaaaaatttagggagaagggtaagcaaacaagccagcaattacaacagtatgtggtcagtcaccctcgtaaactaaggtaacattttttctaaaagttaatatgggtaaatatgtcagaagttctaagactgtaaatatctcttgcgcagacaaatcccctgcttaaaatttattattaggatgtaatgggacaaggtacaaagatggtggtacaagacatttattgtagtttgttaaataaagcaagagagagggagcaaagtaaatatccatgaaa

SEQ ID NO: 648007 - DNA, 597 bp, Homo sapiens
atttccattattttacttgaaaaattatatcatgttaacagtagtaatatagtttggaaatcatactagcctgggggcattttgtaacagaaaggaaaataacaacattagaagctttggaattctcttctgtccattgtttctcatgtcccctgtttttctgctcttagttccgttgactgtgctctttgggagcattcaatccctagcaatatataataaattatttaaatgaaattgaaaacaatcaagcacatacacttggccttcaactttttttttttctttttttttgagactgaatcttactctgtcacccaggcctgagtgcagtggtgcaatctcggctcactgcaacctctgcctcctgggttcaagcaattctcctgcctcagcctccaagtagctgggattatgggcacgcaccaccacacctggctaatttttttttttttttttgtatttttagtagagatggggttcaccatgttggccakactaggtctcgaactcctgacctcaattgatccacctgcctcggactctcaaagtgctgggattacaagggtgagccactgcgcctggcagccttcaact

SEQ ID NO: 648008 - DNA, 644 bp, Homo sapiens
aagtagatgagtttgaattgagcccacaacttcaggtctagggaaaaagccaaatccaattataagattgctgcaacttttaaggaagcttacattctccttgtcatcttttttttttttttttcctgtggggttctgcttcccacactgtgtctcatattatgttactcccaaatgtgatctgcagctcatttgatttccacaaaagaagcaatttataccaaaccatgtttgtacaataggcttcacagaacatttggtgggaagagtggggcagtaaaaagagagacatacgttctgcaacacagtcaactgcaaatgaagcatgaaagcattctgaaaataccctgaaaycaacacagcatagagaggagccccagtggcccttcactctacttagtctcttcttctccctatcttggggtcttttctttccctcctttctcttctctctttctgatttatttatttttggtaccaattagaagaggctagattattgctgcagtaataggcaatctcccgaattgtattggtttaaaataacaaagggttatttcttgctcacattacaagtctattgttgattattgggggctctgtttcgtatcatccctgtacatcaaaagcaaaagaaatgcttg

SEQ ID NO: 648009 - DNA, 644 bp, Homo sapiens
aagtagatgagtttgaattgagcccacaacttcaggtctagggaaaaagccaaatccaattataagattgctgcaacttttaaggaagcttacattctccttgtcatcttttttttttttttttcctgtggggttctgcttcccacactgtgtctcatattatgttactcccaaatgtgatctgcagctcatttgatttccacaaaagaagcaatttataccaaaccatgtttgtacaataggcttcacagaacatttggtgggaagagtggggcagtaaaaagagagacatacgttctgcaacacagtcaactgcaaatgaagcatgaaagcattctgaaaataccctgaaatcaacacagcatagagaggagccccagtggcccttcactctacttagtctcttcttctccctatcttggggtcttttctttccctcctttctcttctctctttctgatttatttatttttggtaccaattagaagaggctagattattgctgcagtaataggcaatctcccgaatygtattggtttaaaataacaaagggttatttcttgctcacattacaagtctattgttgattattgggggctctgtttcgtatcatccctgtacatcaaaagcaaaagaaatgcttg

SEQ ID NO: 648010 - DNA, 587 bp, Homo sapiens
ctttagtgtctcaggtcgtgtattgtgaaggaaaaggtgccacacgcttgacactggtcttggtgcaacctcaawcgcaacatgtgaatcccaagggagtttcttcctctccaaaagcctctgcttccccatctttttttttttttttttctgagacagagtctcgctgtgtcacccaggctggagtgcagtggcgcaatctcgtcttgctgcaacctccatctcctaggttcaagtgattctcctgcctcagcctcctgagtagatggggttacaggtgcgtgccaccatgcccagctaatttttgtatttttagtagacacggggtttcaccatgttagtcaggctggtctcgaactcctgaccttgtgatccacctgcctcggcctcccaaagtgctaggattacaggcgtgaaccactgtgcccagacttctctatctttaaatgagccaattgaggatgatccctgggatttatccaaacctacacgttttgggggttgatgagagtgagggtggaatgtctgtccctcctggacagaatcctaacaactcttcagcaaatcagtgaacttgaatccatgca

SEQ ID NO: 648011 - DNA, 585 bp, Homo sapiens
agatagctttgggcaatatggatccatatatgatttcaatagatgtttgaatataatactgagataataatgaaggaagatatttattgtcatgaaatatggtatatccattcaggataccatatttrgctctcatgccttcacatagccttcttgtctgtgacagtttctcagacttgtttttgatgaccttcacagttttgaagagtaccaatcaggtgttttatagaatgttcctcaactgatatttgtcatttttcttattattagactgaggtatagggtttctcattattagactgaggctcagggtttctgggagggagaccgcaagagtaaagtgccatatctcgaaatattgtggatacatactgtcaacgttaaccttgatcactgggctgaagtagtgtttgtcaatgtaaagtaagtcttcatactcctctgcccactcttgtacttatcattctgtactctttggaagaaagtccctatgcacagctcatatctaaggaaagaaaagttatgcttcatttccttaagggaggagtatttattgtatatgtataaaataaaataaaatttaga

SEQ ID NO: 648012 - DNA, 493 bp, Homo sapiens
gaacagtaaaatgttttttcttttttgtaaaagtttataagaaggtatggaaatgttaactttggcctagggttaaaggattgttttaaattaggaaaaagctgaaggttcaaagaagtggtagaagaattctagaaattaatcttgcaaaagaggttctctgtgtgaacatattgactaaattcctaaaaggatattatatggtttttctgtaaatttaacattgaaataaaagaataataaggttttcctaaggggctaatctgttctttggcaaaatttctaaagggttataaaagctttttgcttctttaaaatttctgagtcattttggcaaaataaataacttatggtaacctggaattctatttcataacatcaagtgttttaaaccccgaacatatatagcagcctccmaaaatcaaacttcagtttcaaaattgtcttccctggcacctggctttttgaatatttcagagggcccctgaagtgt

SEQ ID NO: 648013 - DNA, 559 bp, Homo sapiens
attaggctgtatagctctctctagttcatccatacacttgctttttctgagaaggatgggtgaatccaaaagctttgtgccagattatattcactgtgcaaactttctgccctgtttgaactggccaaatataaagagatctaactyttgagaacagataatgaaagaaggatcgtattaaatcctgtacaatggtgcaaaaatcaaagctttataaaagtttccttactcaagaaaatatatgatgctttcacaaaagaacaaaaatattagatcgaaatcacaaaaagaaaagctgtcgttataaaaagagtctttaatttaaaccatattaataaattcaccatgaactcccaaaaacggaaaggtgtcagtcacttgaagcctgttcttcttttcatattttaggctcctgggccagtgttcaagtggttgtgaaattttagttgttgatgacagttattgctcaccttcctaaaactggcctttaaaatgacttttgtgctttaatgcagatggaaaaatccttcattctggtgatcagtttcacagcctcaga

SEQ ID NO: 648014 - DNA, 566 bp, Homo sapiens
gggttcccatggtcttgggcagctccacccctgtggctttgcagagcatagcccccctcctggctggaggatggtggccctcttctcacacatctgctaggcagtgctctagtagggactctgtgtgggrgctccaatcccacatttcccttttgcactgccctagccaaagttctccatgagggccccacccctgcagcacacctctgcctgggcatccagatgtttccatacatcctctgaaatctaggcagaggttcccaaaactcaattattgactactatgaactcgcaggcttaccaccacatggaagctgccaaggcttggggcttgcaccctctgaaaccatggcccaagctctatgttttcccctttcagccatggtggagcagctgagacatggtacaaaatccctagcctgcacacagcatggggactctggacccaacccatgaaatcatgttttcctcctaggcctatgggcctgtgatggaggggctgccatgaagacctctgacatgccctggagaccttttctccattgtctgggggattaacttttgat

SEQ ID NO: 648015 - DNA, 566 bp, Homo sapiens
gggttcccatggtcttgggcagctccacccctgtggctttgcagagcatagcccccctcctggctggaggatggtggccctcttctcacacatctgctaggcagtgctctagtagggactctgtgtgggagctccaatcccacatttcccttttgcactgccctagccaaagttctccatgasggccccacccctgcagcacacctctgcctgggcatccagatgtttccatacatcctctgaaatctaggcagaggttcccaaaactcaattattgactactatgaactcgcaggcttaccaccacatggaagctgccaaggcttggggcttgcaccctctgaaaccatggcccaagctctatgttttcccctttcagccatggtggagcagctgagacatggtacaaaatccctagcctgcacacagcatggggactctggacccaacccatgaaatcatgttttcctcctaggcctatgggcctgtgatggaggggctgccatgaagacctctgacatgccctggagaccttttctccattgtctgggggattaacttttgat

SEQ ID NO: 648016 - DNA, 599 bp, Homo sapiens
tgactagtgccgctgtgaatcatcatgtataagaatttttctagacacttttgtctagtgcaaaggatacatgaatagtggatggataaatggattcctgggtcataaggtggggcatgttttaatttattagaaatagccagagtatttttcaaaatgatttcaccattaattcccataagcaaaaggtaggaatcctggttgctctatatcctggggaatattcaggatttcaagtatttcatttgatcaattctactaggtatrtgatatcacacagtgaaattaatatctgtgtatttaatgactattgatattgagcacttttcaaatattatcttcttgtgaagtgccttttcaagtcttttgtcccttttttggtgaaatcatttgtctttttattattgagttagaggctttctttatatatgtatttgaaataactttgtcaactataaatgtttggaactgtttctcccactgtcagttgtgagagaaatatttctaaatttttaaaatattcagattctaaaagctgtcttttgaaaaagagatttttttacttttataaagtctgattaataaactttttcacttat

SEQ ID NO: 648017 - DNA, 243 bp, Homo sapiens
aagttgttgtcaatttaaaatagattattataactataagaygttttcatgtaattctacagtaaccacaaagaaaagacctacagaagatacacaaataaaaatgagaaaggaaccaaagcacgtccctaccaaaaaaagaaatcggtgaaacataaagggaggcagaaagagaggaaaagtggaaaaaaatacctgcaagacatgtataaaacagtgaacaaaatgacaatagtaagcccc

SEQ ID NO: 648018 - DNA, 160 bp, Homo sapiens
cagttttgttcttagatactttatgtttttaattgatgttgtggattaaattctctttgatcacttattcctggggaagccagctgccatgtcctgaggcagccctgtggagaaaaccccwttggaaaaaactgaagcctgcaatggctacatgagtaaa

SEQ ID NO: 648019 - DNA, 517 bp, Homo sapiens
tgacacaatctcagctcactgcaacctctactccctgggctcaggtgatcctcccatgtcagcctcctgagtagctgggacaacaagcgtgcaccaccatgcctggctaattttttgtagagatggggtttcaccatgttgcccaggctggtctggaattcctgagctcaggtgagccatacttaaaagcaattggtgagtcctaaggaaagactggttgtaaggcttcatttaaggtttggtggcatgtcatttattgtctgcttattcagacaatgggggacatggggcagctgattccagacttcaatgggagaccctccagagctagaagttgccaatataccatcgtttgcaaagcatatcatatggaatatattaaacccacgcccaccaactaaaatgacaactcctttggcttctgattataattttaaattgcttagggctttcttaygtagattttgccatcactttcttactttcctgacactgaatctttcaggtcagtgatcaa

SEQ ID NO: 648020 - DNA, 571 bp, Homo sapiens
gatgaagtttcagttctctgaattggcagccccatgcagcctggccttcctcacagtatgatggctgttaagtcccatcccaagagaaagagacaaatggaaactggatcacactttatagcctagcctcagaattatacatcatcacttctgcctcattctattcactggggcagtaacaaagcccccatccaatttcaagggaagtgaaaaagtagagtaaaaaagttctggaaggacagataggattagaagtgttacagaaacattttttaaagagaagatatccattttttaaaaatttgaataaaygttgcacaaaaaaatattttaacaaaatatagcgtggtggcataaggaaaagagagagagagagagcatccaaagatgtttagaacttttttttaatgcgaaatatctcataatccagtgatatagtttggctgtgtccccacccaaatctcatcttgaattgtaactccaacaattcccacacgtctttggaggaacccagtgagaggcaattgaattatgggggcaggtctttcctgcgctattctcatgatagcga

SEQ ID NO: 648021 - DNA, 465 bp, Homo sapiens
aatggtaaatataatataaaattatattataattgtaatgctgccacactctgcagaatttcaggaagacccaaagtgattatgctcctaaacagctatgatagtgtccctgtgacagtgatgtaaactagatcttgtaaaaataatgatattcctagcaacaattcaggtagttacaataggaaaagatggaaagatataaaagtgtgctaattaaaaaaaactttgtggtatggaatcaatgaatttattgtagttgacaaactaagaaaaagatggaaaagtgcattatttaaaattaaattttggaagtgaagttgctaagagagcagggaagtcgtgttggtacctgaagaccaggcattaattaatcttacawaaggatgacaaatcaagaaacatgtatgcaagtattttatttaaatatatatatgttttaattgcataacattccattaaaaaaat

SEQ ID NO: 648022 - DNA, 547 bp, Homo sapiens
tcaatgggtcatagttaagttggcagaagtattctagttatctctccaaatataataattttaaatattgttcacacaaggaaaaaacctaacatctttctccatatccttaaaactccagatatgaatttgatcatgcagtgcttgtctttctgtgcctggcttatttcacttaacaaagtgtcctccaacttcatccacattgctaaaaataacagcattttatggctgaatattgttctggaggggtggatagatagatgataaatagatagatgatagatagatagatagatagatagatagatagatagatagatagatatacatttatacaccacattttctttatccatttgttgttagatgagcatttaggcagattccatatcacggctattttgaatgatgcttcaatatccctgggtgcagatgtctctttgacatactaatttcattttttttgattacgtacccagtagtgggattgctgggtaatatartagttctcttttttattttttgtggaaactccatactgcttttc

SEQ ID NO: 648023 - DNA, 418 bp, Homo sapiens
ttgaaaatttttttcatactctgagattcaggctaaattgcttttaaaattttaaagctttgtgtttcaaatttatattcttgatgagatgtatagagtgagaatgagatacattgtctttttattataaacaatcttgctttagtagctactgaagtttacttttgaaattgtatttcttaaatatttctgttaattatagaaaattgattttgtattctattttatatccattaactttgctcatttagtaattctaataatcctaggcattctycacaatgcattgtaagataatgtatacatttcataggatgacaatttttaggtacacttaatggtatgggactatagattattggaattttctttggtttaaaattggcaaactatttttaaggggaagttgttaacaatc

SEQ ID NO: 648024 - DNA, 418 bp, Homo sapiens
ttgaaaatttttttcatactctgagattcaggctaaattgcttttaaaattttaaagctttgtgtttcaaatttatattcttgatgagatgtatagagtgagaatgagatacattgtctttttattataaacaatcttgctttagtagctactgaagtttacttttgaaattgtatttcttaaatatttctgttaattatagaaaattgattttgtattctattttatatccattaactttgctcatttagtaattctaataatcctaggcattctccacaatgcattgtaagataatgtatacatttcataggatgacaatttttaggtacacttaatggtatgggactatagattattggrattttctttggtttaaaattggcaaactatttttaaggggaagttgttaacaatc

SEQ ID NO: 648025 - DNA, 352 bp, Homo sapiens
aatgactgtcatgtgttcttatacacataaagccctagaaacagragccacagcacatcatgcactggggccatatggggaagtaccagagtcagtgaaggcaaaaggagcaagactaaagcatgagccagagcctttaatatggttttccttggaaggaatgagtgagacagtgtaagcagctgagcaggtttaagactgggtagtgtgagtactttttgtgtaatttagtccctagtgttccagcacctgattctggggtgacgaaagcagagggataatgtcccagaccacaggagccatataataagagtcaagtgagggtgtggattctggattggttggtttgcat

SEQ ID NO: 648026 - DNA, 372 bp, Homo sapiens
ctccatttaattatggagagacttgcagagacagaaatgactgtcatgtgttcttatacacataaagccctagaaacaggagccacagcacatcatgyactggggccatatggggaagtaccagagtcagtgaaggcaaaaggagcaagactaaagcatgagccagagcctttaatatggttttccttggaaggaatgagtgagacagtgtaagcagctgagcaggtttaagactgggtagtgtgagtactttttgtgtaatttagtccctagtgttccagcacctgattctggggtgacgaaagcagagggataatgtcccagaccacaggagccatataataagagtcaagtgagggtgtggattctgga

SEQ ID NO: 648027 - DNA, 407 bp, Homo sapiens
tccatttaattatggagagacttgcagagacagaaatgactgtcatgtgttcttatacacataaagccctagaaacaggagccacagcacatcatgcactggggccatatggggaagtaccagagtcagtgaaggcaaaaggagcaaractaaagcatgagccagagcctttaatatggttttccttggaaggaatgagtgagacagtgtaagcagctgagcaggtttaagactgggtagtgtgagtactttttgtgtaatttagtccctagtgttccagcacctgattctggggtgacgaaagcagagggataatgtcccagaccacaggagccatataataagagtcaagtgagggtgtggattctggattggttggtttgcatataaataacatgatcataggc

SEQ ID NO: 648028 - DNA, 393 bp, Homo sapiens
tgcagagacagaaatgactgtcatgtgttcttatacacataaagccctagaaacaggagccacagcacatcatgcactggggccatatggggaagtaccagagtcagtgaaggcaaaaggagcaagactaaagcatgagccagagcmtttaatatggttttccttggaaggaatgagtgagacagtgtaagcagctgagcaggtttaagactgggtagtgtgagtactttttgtgtaatttagtccctagtgttccagcacctgattctggggtgacgaaagcagagggataatgtcccagaccacaggagccatataataagagtcaagtgagggtgtggattctggattggttggtttgcatataaataacatgatcataggcaagttgtt

SEQ ID NO: 648029 - DNA, 415 bp, Homo sapiens
tttttgtctccatttaattatggagagacttgcagagacagaaatgactgtcatgtgttcttatacacataaagccctagaaacaggagccacagcacatcatgcactggggccatatggggaagtaccagagtcagtgaaggcaaaaggagcaagactaaagcatgagccagagcctttaatatggttttccttggaaggaatgagtgagacagtgtaagcagctgagcaggtttaagactgggtagtgtgagtactttttgtgtaatttagtccctagtgttccagcacctgattctggggtgacgaaagcagagggataatgtcccagaccacaggagccatataataagagtcaagtgagggtgtggattctggattgrttggtttgcatataaataacatgatcataggc

SEQ ID NO: 648030 - DNA, 509 bp, Homo sapiens
tttatgtttaacatagatgatgaactgattttctatgaagacaaaggacaatagaaaacacatatttttacaacatatctgaaacaactagataaatttatgaaaatcaaattaatttttttatttctaactttttctgttgcccaggctggagtggtgcaatcatagctcactgcagcctcgaactcctgggctcaagaaatcctccttcttcagtctcctaatgcactggggttacaaatgtgagtcatcatgcttagcctaacgtcaatgtttatcccatatcatttacaaatttgygatgaatccaatttgagatgctcataaacataaatatgaaacataaatataaaaactaatactataaagcatataagagaacaatcttgcatcttagggaggcaaaatattacatctttagggaggcaaaaatatttcagacaaaacaaacagaaaatgtagccataaaggaaaaaattatataaatagggcttcctcaaaataagatt

SEQ ID NO: 648031 - DNA, 621 bp, Homo sapiens
actgtctaattacaacaactattgcggattttatgtattttcttatcattttatttatttataattgataggtgagtattaaaattagcctgacattattttatgattaataatttatttaaaatatattatatgattaagtgtctatttaaaattaagcctgttaaaaataaaactattgatctttcctatcctctaatcccaaatttgctcctcccaaatttaaacccaggtgagtaattccaactctgttcctcccatagttcaggccaaaacattgccaatatcatggacttttgcctctaatatacagggttcaaatatatmttgtttgcatagaacaatttcaatttataatttacatagtttatagtttacaacagcttcaggaatagtttacacgatagtttcctcactaatttccctgttttctcttttgctatgctatggtctattttcacagatcagtcaaactgttactgctaattctttaaagaggcgattgcttttctgtttaaaacccttcatggctgccaattaaataaacaaaagttcttaccattttctaagaagctttatgtgaccatctccccatggagtgtgacctcatctcctctgctg

SEQ ID NO: 648032 - DNA, 513 bp, Homo sapiens
ttatattatcaacagttttgaatgttaatactttttgcattataaacatcttattttttctcctattagcactttcctatttgtaattgcatattttgaagaatggtgttttacacttgtcatcaacttaatatttttattcaagtttagctcttctttaatcatgtttatatcatttgttagcctaagctgataaatattctactggattaccttctagaagtttttaagcatttattttctatctarttttttcagatatcaaataatccctcatatattatacatttcccatgaagtttttatttacactggatgaatttgtagttctttaaccatgtgaaacatttcattatgaaatatttcaataaaaatatgatgtataacttttatcaatatgtttttgttcattcttgcatatattagtttttttggctattaaattttctaagtggaaactttttggtaagatttttctttctggtttaactggctatctgatcgaaaaacaac

SEQ ID NO: 648033 - DNA, 349 bp, Homo sapiens
agtagatccatatgttatcaaatagcttaaaactaacttttgaaaaaaaaagtcaatgtgactacttaaaaattttgttcagataattgcagggataccagtttgaaataatctaacttaaaatcatacatttatgtacataaaaataaatttggtatcaatgaaaacactaaatctagaaaacaatctaacttctgaaattattctaaaatagtataagaatatattttatacatgcttgtaatgtaggaagggctctttaaaagtgtgacacaattcataaaggaaaaaatgtttaaagataaatactgattaattcaytattaagccagattcaggtaaccctact

SEQ ID NO: 648034 - DNA, 620 bp, Homo sapiens
tgtccctggttctctggtttttggccctagcgtgattaggacagaagcacagtggcctggagtgtgacagccctatagagtatttgtttgggaattggttagtttgtatttgtaaagcccatcttcatgcggagttcaggggagacttcgtagccagaagctgaggcagggtgactccagcatactatccatcttcaagaacaagatgtgtctgaattgctgtatgttataaagtttcgatgtctaatagagcaaatctttcatcctgttggttctctttgatttaatttgcttttttttctctctaagtactgttctcggaataagccaatctgatatgtgtgtcactattccaakgaatgagtagatcacactttatttttctgcttcttgtgaacattaattagttcagttttctgaaattttcaatgctattgtgattttttaaaattaacaatgctactttgcttattgtgtacttgtcaccagaaatgcaagagctaagatgtctctggaaatggaattcctgggtcacagggttggcacatgatcaacattattagataatgttaaattgttgtacaatgtaatcacattaatttgtatgccaatagtagtat

SEQ ID NO: 648035 - DNA, 369 bp, Homo sapiens
cacatattactccaactgcctgaagaaatgtttascgatccatacagaattactctcaattagatttagagaaaacattctctctttgaagaacactagaattgaggaaaatatggtagagcatataggttattttgcctttgttactttgtagaccttaaatcatggagtgagttagaacacagtatatttgtgacaaccatgacagttcagagaaatgcagtgaggtcatttactctgaaactgaaagacactaatctctgctctgagacccacaaagtcagattatctgttttacctgtgtgatttctattcctctcattttgttgttctttttataaaacatctttgctaaataataaagttatt

SEQ ID NO: 648036 - DNA, 369 bp, Homo sapiens
cacatattactccaactgcctgaagaaatgtttagcgatccatacagaattactctcaattagatttagagaaaacattctctctttgaagaacactagaattgaggaaaatatggtagagcatataggttattttgcctttgttactttgtagaccttaaatcatggagtgwgttagaacacagtatatttgtgacaaccatgacagttcagagaaatgcagtgaggtcatttactctgaaactgaaagacactaatctctgctctgagacccacaaagtcagattatctgttttacctgtgtgatttctattcctctcattttgttgttctttttataaaacatctttgctaaataataaagttatt

SEQ ID NO: 648037 - DNA, 369 bp, Homo sapiens
cacatattactccaactgcctgaagaaatgtttagcgatccatacagaattactctcaattagatttagagaaaacattctctctttgaagaacactagaattgaggaaaatatggtagagcatataggttattttgcctttgttactttgtagaccttaaatcatggagtgagttagaacacagtatatttgtgacaaccatgacagttcagagaaatgcagtgaggtcatttactctgaaactgaaagacactaatctctgctctgagacccacaaartcagattatctgttttacctgtgtgatttctattcctctcattttgttgttctttttataaaacatctttgctaaataataaagttatt

SEQ ID NO: 648038 - DNA, 369 bp, Homo sapiens
cacatattactccaactgcctgaagaaatgtttagcgatccatacagaattactctcaattagatttagagaaaacattctctctttgaagaacactagaattgaggaaaatatggtagagcatataggttattttgcctttgttactttgtagaccttaaatcatggagtgagttagaacacagtatatttgtgacaaccatgacagttcagagaaatgcagtgaggtcatttactctgaaactgaaagacactaatctctgctctgagacccacaaagtcagattatctgttttacctgygtgatttctattcctctcattttgttgttctttttataaaacatctttgctaaataataaagttatt

SEQ ID NO: 648039 - DNA, 552 bp, Homo sapiens
aaggaattcaagacaagactagagtatgttaagataccacaaaaagaaaaaaatatatatatagcaagagctttcttgagtaagcaaattttatacatataaaaataatttacatgcaaatgaccaagaggaaaggttaagtgactctggtgtaaataattagtttactgattctgccagagcatattaagaaaaattcactttggmaaaataatatggatttaaagaagtaacaagtgggtttctctaaagcacagtttggctttttactagaatatcaagtcacctttttgggtgaggagagtacaatgggagtgggcagctggtgcaaataaacatttaaaattacttaaaacttcaacaaatgggatctgtatttaaatctgttttggtctgtcttccctttgttttttctaatccattccaacaatgcaaacctcagccactgtcaagggcaatctcagactggaggttgctgcctagggtgaggttctagcaagactgacaagcagagctcagggaaaagtctgcatgggaaaacagagccagact

SEQ ID NO: 648040 - DNA, 310 bp, Homo sapiens
agttaatttttaaagggctccagctctttctctttctcagggggaactgggttttctcacatacaactgagtttctgcttacacattctttaatttcttttaattcctgttccacttggaccagggccagggcatcactgtcctgtaccacccccaggagggtgttccttgcatcctggcccttctagctccagccttggttcaaagggctgcagatagagctcaggtcatggcttcagwgggtgcaaactataagccttggtggcttccatgtggtgttaagcctgcaggtgagcaaagtgcaagagtg

SEQ ID NO: 648041 - DNA, 565 bp, Homo sapiens
atgtaaagtgatgacttaaatatggaaaaggaaccatttgattaamaagccaaactatgaagcttcaaagacaggatgttaccttgtgcaaaaccctgacttggggaaaaactgtgtttcaagagtggaaagagccctgtctcattaggagtgagggtcttgaatggtgcctgtggttgtagacagcagagcagagctttagcatcctggagatttgtaattgtactccacaagtaactaaaggatttaaggcagaggagggaaagaatcttgcttacattacaaaaaataaaaaagaaaaagaagaaataaaaaaatagaaaaaaatgtaatatatattattattattacattggtttatagtaattggtttatatctaatttgtttccctgtgtttataatacatatatatctctgcctcttaaaccaagaataatttttacagggacaagaataaacacaaggaaatgaattagaaaactattaaagtgaaaggacaagaaggtggagaccttgttcaaaataatgaaatacatatttaatatatgtgcaagtttgaagaaa

SEQ ID NO: 648042 - DNA, 565 bp, Homo sapiens
atgtaaagtgatgacttaaatatggaaaaggaaccatttgattaaaaagccaaactatgaagcttcaaagacaggatgttaccttgtgcaaaaccctgacttggggaaaaactgtgtttcaagagtggaaagagccctgtctcattaggagtgagggtcttgaatggtgcctgtggytgtagacagcagagcagagctttagcatcctggagatttgtaattgtactccacaagtaactaaaggatttaaggcagaggagggaaagaatcttgcttacattacaaaaaataaaaaagaaaaagaagaaataaaaaaatagaaaaaaatgtaatatatattattattattacattggtttatagtaattggtttatatctaatttgtttccctgtgtttataatacatatatatctctgcctcttaaaccaagaataatttttacagggacaagaataaacacaaggaaatgaattagaaaactattaaagtgaaaggacaagaaggtggagaccttgttcaaaataatgaaatacatatttaatatatgtgcaagtttgaagaaa

SEQ ID NO: 648043 - DNA, 565 bp, Homo sapiens
atgtaaagtgatgacttaaatatggaaaaggaaccatttgattaaaaagccaaactatgaagcttcaaagacaggatgttaccttgtgcaaaaccctgacttggggaaaaactgtgtttcaagagtggaaagagccctgtctcattaggagtgagggtcttgaatggtgcctgtggttgtagacagcagagcagagctttagcatcctgragatttgtaattgtactccacaagtaactaaaggatttaaggcagaggagggaaagaatcttgcttacattacaaaaaataaaaaagaaaaagaagaaataaaaaaatagaaaaaaatgtaatatatattattattattacattggtttatagtaattggtttatatctaatttgtttccctgtgtttataatacatatatatctctgcctcttaaaccaagaataatttttacagggacaagaataaacacaaggaaatgaattagaaaactattaaagtgaaaggacaagaaggtggagaccttgttcaaaataatgaaatacatatttaatatatgtgcaagtttgaagaaa

SEQ ID NO: 648044 - DNA, 565 bp, Homo sapiens
atgtaaagtgatgacttaaatatggaaaaggaaccatttgattaaaaagccaaactatgaagcttcaaagacaggatgttaccttgtgcaaaaccctgacttggggaaaaactgtgtttcaagagtggaaagagccctgtctcattaggagtgagggtcttgaatggtgcctgtggttgtagacagcagagcagagctttagcatcctggagatttgtaattgtactccacaagyaactaaaggatttaaggcagaggagggaaagaatcttgcttacattacaaaaaataaaaaagaaaaagaagaaataaaaaaatagaaaaaaatgtaatatatattattattattacattggtttatagtaattggtttatatctaatttgtttccctgtgtttataatacatatatatctctgcctcttaaaccaagaataatttttacagggacaagaataaacacaaggaaatgaattagaaaactattaaagtgaaaggacaagaaggtggagaccttgttcaaaataatgaaatacatatttaatatatgtgcaagtttgaagaaa

SEQ ID NO: 648045 - DNA, 580 bp, Homo sapiens
tcaaattgtttaattgaattgtttaattattttgccagtgggcgtcaatccatcagaacgactccagatgcagcattggagcatgatggaggccccttcctgtgacacacagtaaarttactggatggagaggtgactgggcctcccaaggaagggacagggacaggagcagggggggatttggagaatggtgcatcagcaatttactggtatgaaagtattgtaagaattttgctttgagtctgctgtactgtacaaaccagctgaatttcagctctgagtacttacatagtaaaagaaatccctcagcccagtcctaagaggggcattcaatgagtcccagaggtgatagacagttagaggtataattaatcagttattgacaaataaatgcctaaatctgaatcttactcatttaggtagtcatttcctaggtgctttgagatataagagttgtcccccaaaccatgttatcagggaagctttatggcaaccactgtccttggagttatatttttggtctttgttcctaaatttttagttaactgtgatatcatttttgcctcagagaagatggaat

SEQ ID NO: 648046 - DNA, 580 bp, Homo sapiens
tcaaattgtttaattgaattgtttaattattttgccagtgggcgtcaatccatcagaacgactccagatgcagcattggagcatgatggaggccccttcctgtgacacacagtaaagttactggatggagaggtgactgggcctcccaaggaagggacagggacaggagcagggggggatttggagaatggtgcatcagcaatttactggtatgaaagtattgtaagaattttgctttgagtctgctgtactgtacaaaccagctgaatttcagctctgagtacttacayagtaaaagaaatccctcagcccagtcctaagaggggcattcaatgagtcccagaggtgatagacagttagaggtataattaatcagttattgacaaataaatgcctaaatctgaatcttactcatttaggtagtcatttcctaggtgctttgagatataagagttgtcccccaaaccatgttatcagggaagctttatggcaaccactgtccttggagttatatttttggtctttgttcctaaatttttagttaactgtgatatcatttttgcctcagagaagatggaat

SEQ ID NO: 648047 - DNA, 563 bp, Homo sapiens
ttttcctttgattacaactaaatattttatcctgtataaaatcatcaccagttacaaaaatcacctcaaagaaagtacaatttagtgttcacatttttacttcatcttcaagttttctcaagttctgcttggtgagcccagagttgagtctgaaatacacagctacaccagcactcagctggctcctcccttgtcttcttagaatttggttccacaagtcttttttccttgcattgtgaagcgatttaaagtatttrtacaacggggtagagcatgagctagctgacgcatacattgtgagacacacagtttccctgggtcaaaacaatggcccaaaagatgtagaagaatattaatgaaacatctaatgtcatgcattctatacaacaaatcaaatgttattttataattataaaatatattaggtgttaaaaattaaatgtgatacatacacacacagagacacacacatattacattatatacaccctctgactatgacaataaattactggtgtttaaaagccagagaggaagcactttgtcttgggaactggtaacaa

SEQ ID NO: 648048 - DNA, 563 bp, Homo sapiens
ttttcctttgattacaactaaatattttatcctgtataaaatcatcaccagttacaaaaatcacctcaaagaaagtacaatttagtgttcacatttttacttcatcttcaagttttctcaagttctgcttggtgagcccagagttgagtctgaaatacacagctacaccagcactcagctggctcctcccttgtcttcttagaatttggttccacaagtcttttttccttgcattgtgaagcgatttaaagtatttatacaacggggtagagcatgagctagctgacgcatacattgtgagacacacagtttccctgggtcaaaacaatggcccaaaagatgtagaagaatattaatgaaacatctaatgtcatgcattctatacaacaaatcaaatgttrttttataattataaaatatattaggtgttaaaaattaaatgtgatacatacacacacagagacacacacatattacattatatacaccctctgactatgacaataaattactggtgtttaaaagccagagaggaagcactttgtcttgggaactggtaacaa

SEQ ID NO: 648049 - DNA, 586 bp, Homo sapiens
cctggagctgacctttggaccagaagaggatgcctgaacacctttgggccttagttgtccggttccaaaactgacatcataacccatcacctgctactagtcagacactgactcagatgtcctcttgaccttctttccagctcctaactctggaattccatgattcatcaataacatctgatcagatttcagcagcgagggtcttgctcacttgccattcagaattaatgaaatgcagtgatgcagccaacacgaacaaaaggagagcccctctctcccttaggaaactcacgcagatcacatgaccctacctggtgatctgtgagaactatatccccatgtgagatggtacctaccatttcctccctctcccccaacccttatttcctccagtgcctttgtttttttgtgtggtaaatgccttgtaatgtgcaccattctatgtactgtttgaagaaatctgrtatctgtgggaaggaaacaaaactctatttgctatgcttcagtcaccaaaaaaaggtactaaaatagctaaaaatgtcagttcacaagtagaaatattcaaatagatatttttcttttagat

SEQ ID NO: 648050 - DNA, 567 bp, Homo sapiens
accatctccggcagattgggaaatgtttcattattcagtttatctacaccttgaacaccatacctgtgccttcccagatttcacagcctcttcccagagttagawacaaagttagccatctttgtaagcttgtgctatcctcatagctgcatgagcaatttcagtctaaaacctttaacttccaacacagtgattctcaaactttactatgcatggaatcatctggagggtttattaaaacttagagtgccttaccccagaatttctgattcgttgtctgaagtggaacccaagaattcacatctccaacacgttcccagataatgctgatgttgacgctgctgttatatactttgagagccactggtctaagatgacgttgaagacccatttctcccccacactgaaggtgttcttcctcatttgacttacctggcacgtagctgctgtcagtaagtggcggctcttgtttgtattgtggcaatcagctgctgttgtgcctttaggtgaaatcactctgcactgtgatgagtagcctgaggtttacatagttgctacttcagctgt

SEQ ID NO: 648051 - DNA, 607 bp, Homo sapiens
cagtaaatgaataactggagtctcattattgacattaaaaagttatttgatagtcatttgtttctccttactgatggactctggaggtctgtttctgaggattgaaggaagtcatacattattttattatctcctgacatagagtccttcaaagtgaacacctgggttgttttcattaatgaacatattcacatgacagggattgtgcctgacatgaacaactgtgtctttagttactgtgttccaactcactgaaaacagaatatatggcgtccatcatgatacactcctcctgaaaaccttccacacccacccacatattcattcgctgctgttagtgtgttgttcaagaaagtgctttatatgtgtgtgtgtgtgtgtgtgtrtatatatatatatatgtgtatgtgtacattacagtatatatatactttctctatatatactcttcattgatctaagaataccctggtcacagggctgaattcatgaagtcacatttgggggacagtacatgctataaaagttatgtttgatgagaattatagctggaggaggagaagaaaaattttcaagaaataacaaaatctggctgttttcatcaagt

SEQ ID NO: 648052 - DNA, 616 bp, Homo sapiens
gtcttacctttgaaagaatggatgcaatattagaaacaaccatcttcatctccattattatgctgtacagtttaaggaagatactctgatgggaaagaaacaattctggactattcattagactgtgaaactattttccatgcactaggaatgttatgttgtagaaaagggtggtgccagaaaacaaaaatgataagacagttaagggagtgtgatgacctatgtctgacaaaagcagaaagtatccagaatatttcgaaacaaatcttaaagcaaactactaggaatagcaacacttaacagctgggaaatgccaatagcagacctttagcagaaactaagaatgaaaccaaaaggttttgccaaccattagattaaataacagtgaagaaatttaactataaaaggaaatgtttgggccaggtacagtgactcatgcctrtaatctcagcactttaggaggttgaggagggagaattgtgtgaggccagaagttcaagaccctgtctctacaaaaaggaaaaaaaaaatagtggggtgtggtggcacatgcctgtagtcccagctactcaggaggctgaggcaggaggatcgcttgagccaaggagtttaaggt

SEQ ID NO: 648053 - DNA, 583 bp, Homo sapiens
cataaattgtgttgcactcattttcatgtgacataaaactaaatacgaccccaaaccctcctccttagtccacgaacagcttgcttgctggtcagaggcttagcctcatcattttaaaaatgtattttacaaagtaacttgatattttaacaagaaacagcaacaaggaggaggaatgtctgttttccatcaaagttcagattgctctgtgaaccagaccaaattaattaactattcatcatttattgtctactgcatgcctcatgctcttgcccattctttaatgtgacacttctctctctcwcacaaatcactttgggtttcttttctttttccttttggtttttcctaggcatttcgattgcctggatgtttgttagttctgtctatgtttatgttgtaatcctctccagagatttgtggaaatagcccttgtaaccatactcctaattcactgccatatttgctgcaaggttgattattgtctgtgctgatatggtagagttagggagcttggtcccatgagtaaatttagtgagttgtgcaagattgttcagcttaataagtggtagagcagcattcc

SEQ ID NO: 648054 - DNA, 631 bp, Homo sapiens
gcatggtgtgggcagacaaagagctcagaccttgctcacaactatggtggcaggggtactgtacaagaagacaatccccttgggctctacagattgaaatgcccccgactcaagtgggcacctttttcttttatttatttatttatttatttatttatttattttgagacagagtctcactctctcactctgttgtccaggcaggagtattgtggtgtgatcttagctcaccataacctctgcctcccgggttcaagcgattctcatgcctcagcctctgaggtagctgggattataggcgcccgccacaacaccagctaatttttgtattttagtagagatggggtttctccatgttggccaggctggtcttgaactcctgaattcaagtgatccacccaccttaacctcccaaagtgttgggattacaggcatgagccattgcgyccagcccagtaagcacctttccatgacatctcctagggattccgacgcaagccagctaacaaaaatcaaatgaaaacttggtggtgatggtggtttttcccctctaaattatgtccatgatagggtacatttgttctcatatctttgaatgcactgaaatatccgggggaaacaataaaaatat

SEQ ID NO: 648055 - DNA, 590 bp, Homo sapiens
tggtcaagggactaagaggttgagaattgggtggacaacctatatagatgttcaagtcaccaaaaatattgatgggaggagggactgtgggccagatgctaaaatctccaaagaatgaggcaaggtgactcagaggactgtagacgagtggtcctctaccctggctgcacattagaatcacatggagaacttacccaccaatgcccaggccccatcccaaaccaactacmtcagaacctccaggtgattccaatgtgcagctaggtccaggaacagtgcagaagaaacccatcctgcaaagcgccacttaaacatgacctccttcatgacaatttcccttccaggtctctttgtttcctgcactccactatcactaccaattctgctttacttagagctgacctaggaaatcactagaaaaacattcaaggctctaaaactaagtggctggcactccagcctgggtgatagagcgagaccctgtctctaaaaataaacaaaacaaattaaaactaagtggctgaaaacagaataaacgttcacctgctaaaaaattttagaactaggagatcagtgagaaggaaagcttt

SEQ ID NO: 648056 - DNA, 583 bp, Homo sapiens
ccaaaagtttgggttctttttttttttttttgagacagagtctcactttgtcggccaggctggagtacagtggtgccatctcagctcactgcaaactctgcctcccaggttcaagagattctcctgcctcagactcccaagtagctgggattacaggcacgtgccaccacacccagctaatttttgtatcattagtagagatggggtttcaccatgttggccaggctggtcttgaactcctracctcaggtgatcctcccatcttggcctctgaaagtgctaggattacaggcatgagccactgtgtgtggccttgaagttggggttctttcccaccacatggcacccctccaaggagatgatggcagggcctgagacacccctgggaccacagcagaacttctggaacctttcccaccactgaccaaggtgctaggtgccatcctaattgttgacacaaccctctgggtaggcaccaatacaattccactatgaagatggggaaactgaggcacagagcagcctgctctcacctggggtgggatagccagggctgcggcccagcagtctgaagtcagaacct

SEQ ID NO: 648057 - DNA, 607 bp, Homo sapiens
tgtgtggtgttatttctgaggtgtctattctgctccattggtctgtatgtctgttttggtaccagtactatgctgttttggttactgtagccttgtagtataggttggagtcacgtagcrtgatgcctccagctttgttctttttgcttaggattgtcttggcaaaaattgatactttaagtaagcccagaggaagcttatcaaatgtattaagagcacacttagggcagtaggggaaactccacactccagattctttctctaaaaacttttatgagtagagaagttggcagaagccaggaagcatcatttgcttccagtgaggaccctggctatactacaaaggattcccctcacccaacctctctggcctccagagtaggggctccatttcacacaccttttagattaatgtgtgactattcaaaagctggtgattctcaaggctgtgtctgttgggtataataactgattggacagtatttggccaacaaaatcttgatcatcattattttcaaagagccaggattttcctccctaaagtttgtttgtatgacatgtgtttcaatttagttttataaacagtagctataaccaatatattaag

SEQ ID NO: 648058 - DNA, 607 bp, Homo sapiens
tgtgtggtgttatttctgaggtgtctattctgctccattggtctgtatgtctgttttggtaccagtactatgctgttttggttactgtagccttgtagtataggttggagtcacgtagcatgatgcctccagctttgttctttttgcttaggattgtcttggcaaaaattgatactttaagtaagcccagaggaagcttatcaaatgtattaagagcacacttagggcagtaggggaaactccacactccrgattctttctctaaaaacttttatgagtagagaagttggcagaagccaggaagcatcatttgcttccagtgaggaccctggctatactacaaaggattcccctcacccaacctctctggcctccagagtaggggctccatttcacacaccttttagattaatgtgtgactattcaaaagctggtgattctcaaggctgtgtctgttgggtataataactgattggacagtatttggccaacaaaatcttgatcatcattattttcaaagagccaggattttcctccctaaagtttgtttgtatgacatgtgtttcaatttagttttataaacagtagctataaccaatatattaag

SEQ ID NO: 648059 - DNA, 591 bp, Homo sapiens
ttttgaccacttgtctttgtcccttttcaataaaaaggaaaaaaaaaaccctaaatgcactacttttacaatatcttttggtaagttactaggccaggcactgatttagagacttaggatacaatggtgaataaaagaggctgcctctcctcttagtgcttaygatttgtcacatcaaggcaggtacacacacacagatgaacatggcctgctagtggctacagaatccccacaagatatgtatcgagatgacagtgggtatagagattgcttttccagattggccctcaagatccaaatggattaggaataaacatacttgtttcctttaaagcagcagctcacaacctcagcaatacattgaaatcaccctggagagctttaaaaactatagatgcctttgtccccctcccagagattctgatttaattggtctggggtgcagcctagattgggagtttttaaagctccccaggtatggtcacggttgggcaacactggcttagagcagctcagaatttcctaaataaccaccctgtcctacaaaagtctcctcacctgggagaacagaataattgcagaagcccaagg

SEQ ID NO: 648060 - DNA, 518 bp, Homo sapiens
tgacttagtttgcatttttatggatgtaaaatataaatatataaaatatatacacattttgaataaatcacattttatgttataattgttcaggtcattattgccaatagaacaaaattctgtgaaaatcttgattatagtaacatagtgattttgctgagaactcaaaggaataaataatttttatggaataaatacaaaataatttgtaaataatatgcatctttattttatgactaacccagtatctctgtttactaatagcacatccagaaccatgcagtaacaattacatttggccaccttttatatttggatgtctttcagtcatataartatcatagctttacacattttctttctttctttttcttcttcttttttttttttttttttgagacggagtctcgctctgtcaccaggctggagtacagtggcgggatctcggctcactgcaacctccgccttccgggttcaagagggtctcctgcctcagcctcctaaatagctgcaactac

SEQ ID NO: 648061 - DNA, 518 bp, Homo sapiens
tgacttagtttgcatttttatggatgtaaaatataaatatataaaatatatacacattttgaataaatcacattttatgttataattgttcaggtcattattgccaatagaacaaaattctgtgaaaatcttgattatagtaacatagtgattttgctgagaactcaaaggaataaataatttttatggaataaatacaaaataatttgtaaataatatgcatctttattttatgactaacccagtatctctgtttactaatagcacatccagaaccatgcagtaacaattacatttggccaccttttatatttggatgtctttcagtcatataaatatcatagctttacmcattttctttctttctttttcttcttcttttttttttttttttttgagacggagtctcgctctgtcaccaggctggagtacagtggcgggatctcggctcactgcaacctccgccttccgggttcaagagggtctcctgcctcagcctcctaaatagctgcaactac

SEQ ID NO: 648062 - DNA, 518 bp, Homo sapiens
tgacttagtttgcatttttatggatgtaaaatataaatatataaaatatatacacattttgaataaatcacattttatgttataattgttcaggtcattattgccaatagaacaaaattctgtgaaaatcttgattatagtaacatagtgattttgctgagaactcaaaggaataaataatttttatggaataaatacaaaataatttgtaaataatatgcatctttattttatgactaacccagtatctctgtttactaatagcacatccagaaccatgcagtaacaattacatttggccaccttttatatttggatgtctttcagtcatataaatatcatagctttacacattttctktctttctttttcttcttcttttttttttttttttttgagacggagtctcgctctgtcaccaggctggagtacagtggcgggatctcggctcactgcaacctccgccttccgggttcaagagggtctcctgcctcagcctcctaaatagctgcaactac

SEQ ID NO: 648063 - DNA, 552 bp, Homo sapiens
attttgctgtgtatttcccatggtaaagataaagtgagataaaaactctcaatacactgcaattattactcaaaaaataaataaacatgtactgtgtaggagttcttgtcctctcttgcatgttttttaacttcaggtttgaaccctgaatcacattttcttgctacttaggaggacccatcagccaatttaagaatgatccaatttctctcaattggcaatatctctagatataacacataccacgcagtctttgaattccatgaacacagaatcaatgctgaccatttttctgctatactgccccacattttttytcatctataaaatatgagttaaaatttatcttaaaataatagttggaataaatgagcaagtgaaaaacactttgaaaatatatagcacaaaacaactgcaccactagctattattactattcctcaaaatatgtagtatttctagtcctgttgtctatacttctttcacctttctaagaggtgttgggaaatttattcttaacactgagattattaaggcacagctattattccc

SEQ ID NO: 648064 - DNA, 552 bp, Homo sapiens
attttgctgtgtatttcccatggtaaagataaagtgagataaaaactctcaatacactgcaattattactcaaaaaataaataaacatgtactgtgtaggagttcttgtcctctcttgcatgttttttaacttcaggtttgaaccctgaatcacattttcttgctacttaggaggacccatcagccaatttaagaatgatccaatttctctcaattggcaatatctctagatataacacataccacgcagtctttgaattccatgaacacagaatcaatgctgaccatttttctgctatactgccccacattttttctcatctataaaatatgagttaaaatttatcttaaaataatagttggaataaatgagcaagtgaaaarcactttgaaaatatatagcacaaaacaactgcaccactagctattattactattcctcaaaatatgtagtatttctagtcctgttgtctatacttctttcacctttctaagaggtgttgggaaatttattcttaacactgagattattaaggcacagctattattccc

SEQ ID NO: 648065 - DNA, 593 bp, Homo sapiens
aaattatataacattactgttctgatgaatctcactttaaatttatggcttctcatttgaaatcagttcttaatacttctctataattctacagtgttattttacccactttactactattctaaaagatacttttggtacctttgattatttcatttaacctcaaagacttctttcttctttctcaacctaagctaatgaacatacttcccaattcactgagaataaaaacaatcagaagagaacttccacaaacgtcccccacaatcacaactactgccacatttgtcagtgtgcctgcactgtgtccctattatctaaaytgtattcagatatttcagatgaatattgcaaactattatatatggtcacctattcaagaattataagtagtttttctcattctctcctgcatcatgaataccttctccttactggattatttctatctgcatacaaacatattggattaactcccatctttaaaacaaaatagagcaaaacaaaatcaaactttctcttcaccgttatatcttcctactgctaatacctatgccactgctcctgcttacagaatatttttttttcaatga

SEQ ID NO: 648066 - DNA, 551 bp, Homo sapiens
tttcctttcttgtttgtcaaatgtgggatacgtttgtagaatttgtagtgacatttccacaggtttcctctagcagtaccaggtaggagaaagagcagtagcatgatagggccatgggctggaaatgagaaataaatacatcatggacgaacctttttttttttttctctttttattctttgtgggccattgagagggaccatctgtgaaagtttttgactgtacaatctccaatgttccttcttgctggaataccagttttatgatgtgttatctcactggttactgaggaaataagaaagccaagggaggagaaggttctagacatctccacagacaacagaagcacaaacaaacaacaatacctcagcaggctggcctcccagcactgataagtgtttgggtccactgcaatgactctcttcaaagcctccttccaggctcatttttcctggtgccttgtggagcacarcccatttctgttggctagagtcctgcatacactcctgtgctttaaaaggaaggaattacaagtactaggagatggtcaa

SEQ ID NO: 648067 - DNA, 469 bp, Homo sapiens
agaattcttttgcatgaaccatatggtagttgatctgttgccgccacaaacctgtgattgagaaggttgatcttttctacactggttcagtgctgcatcttgatatattagtgagtaaagactcttgactttgagtcaatgtggtgtaatacaaatgatatatttgatcttgtccctgattcctgggactcctaaaaataacccttgggatttcttgagtgataggaacattttttgttactcataatgagctcctttagaccatacctgagtttgtgctaatgtgatccttggactcttggtgggcccccaggtagctwcgggatggggactagttgccggaggaaccaaccatgtgattacagggttagaacttttagctgcaatccctgatctctgggaagggaaaggggctggagattgggttcactcaacaacagccagtgattttatcagtcaaacctgtgtg

SEQ ID NO: 648068 - DNA, 549 bp, Homo sapiens
acttagatctcaggccaaacgcatttttttagtacagatatttcagttgaaaaaaattgctaatagttgactccaagtgactaaatgtgcaggtaagcatcatctacgatcaacacattgacttgcataaaatgtttcttaaagtggctgggagtgcttcagaagttagcagaccacttaggtgtggtttgtataacctgatacatatgagaaacttacaaatttagtaaatctataaatgaatgacttattgttctattagttaacagggaaaggatttaccatgaaaaacagatgtcagcttgtctgtgtttgtcaccaactccaaaatagaggatttaaaaatgcatgaggtttaatctagagaaaaaaaatgaaacaagaccagaaagcaattaatttctacrttttcgtcataaagcctggttgtgtgaaaagcagtgcccttgatgaagagttaagtccaagtccaggaaaggaggctatatcctgtgctgcagtagtgactgtgctctatctgctgcatggttgcacacagacgaccaaacc

SEQ ID NO: 648069 - DNA, 417 bp, Homo sapiens
attcattcagacacataaatatcaagtcaaatctcactatttccttagcatttatcttcagtttagcttagaaaatctattcctattttaaaacatatacagttatttcagtgtggtrgcacatgcctgtaatcccagctacttggaaggctgaggcaggagtatcacttgaacctgggaaactgaggttgcagtcagtcaaaatcaccccactacactccagcctggatgacagagtgagactccatctcaaaaaacaaaacaaaacaaggttttctccagatcatttttacatttaattattcagtctgttttgactataccttaatgtaaagaattcggtaaatataacttcaatcctacacactattagtcaatgtacctaacacgatttattgaataaaccagtccattccc

SEQ ID NO: 648070 - DNA, 417 bp, Homo sapiens
attcattcagacacataaatatcaagtcaaatctcactatttccttagcatttatcttcagtttagcttagaaaatctattcctattttaaaacatatacagttatttcagtgtggtggcacatgcctgtaatcccagctacttggaaggctgaggcaggagtatcacttgaacctgggaaactgaggttgcagtcagtcaaaatcaccccactacactccagcctggatgacagagtgagactccatctcaaaaaacaaaacaaaacaaggttttctccagatcatttttacatttaattattcagtctgttttgactataccttaatgtaaagaattcrgtaaatataacttcaatcctacacactattagtcaatgtacctaacacgatttattgaataaaccagtccattccc

SEQ ID NO: 648071 - DNA, 544 bp, Homo sapiens
caggtgcatgccaccacgcccagctaatttttgtatttttagtagagacagggtttcaccatgttggccaggatggtctccatcttttgaccttgtgatccacccgcctcagcctcccaaagttttatgattataggygtgagccactgtgtccacccaagactgaagatttttaatttaggcctttttgagggtttaggaatcccttgaaattagatggagaattattgtcttcctctatgctgtttcttatgaagggtttctgaatcttttaatagattataaaaaatatctaacactttctgttctccttaaaccactttctcttaaagctctagatactagatatctaggtattagatagcaccttctgccctccctacgtaattatgtggaatttcaaaatcaagaatgtttccttgctttcattggtatattgttgtactctttagaagttaagcagtgaacatatattgatagtattattttatcagtagtacagtattcttgggactctggctactaattatctgttccattgcaa

SEQ ID NO: 648072 - DNA, 603 bp, Homo sapiens
actccaaattagttaaatctgaatttctaaggaataggacctaagcttcactttttaaaaaaaattgaatgtgttagaatgtatatagccacaattgaaaaacaccattggtctacactatcattaggcatgtttgaaaattatctgccttgatcctgccctgatcttgcctttgctacaatattaaatggctcttattaacaatgaatatatctaattattctctagatcttttattagcttgaattattcttagatattctgccacataaaagtatttgaatgtrtagtctttgtggttgatggtctaatcagctaaactcaaacctcactgcagctgtgactagaaagtcctcattgatggagaatcctagaggtcctttcagagaagaaaaaataattcagtgggccaagctgtaatattttgcctctgattctcagattccttgttggcaaaatgggaatgcaaaataaataaagagtctatagtcagtacctaataagtatttgttgaatgaataaattagtggaatacaaaattaaaatacttgtctcatcaaacatctagagaaaaaggagacagatatagagctaacccatgcc

SEQ ID NO: 648073 - DNA, 600 bp, Homo sapiens
tctgtccctctctcccctgctattctggtaaaatgatttgacatttcagacaacaaggaatgaacatcagaccaggaagaaaagggcttggttatgagtcccagttgtgtgattttaagtacatgattaaacgtttattaatttggttctctcatctctaataatgaaaccatcactcttacatcttgagtgtaaaaaatgctcatttactagaactcaccctgtatcagatgccacattaggatttgtgcggagtgatctcattaattcctttttttttttttgagatggaatttcactcttgtcacccaggctggagtgcagtggtgcaatcttggctcactgcaacctctctctgccacccggttttggtttcaagcgattctcctgcctcagcctcccgagtagctgggattacaggcrcccaccaccatgcccggctaattttttgtattattagtagagacggggtttcaccatgttggtcaggctggtctcgaactcctgacttcaggtgatccacccacctcggcctcaagtgctaggattgcaggtgggagccaccatgcccagcctcgttaattctttatagcagccttg

SEQ ID NO: 648074 - DNA, 584 bp, Homo sapiens
agtgttccaagaatcatggattctagagatgaatcacatagcagctctgctgtctgctctcaagggtgccctcactacagagtgtggtcactgcaatgacaaaggtggccccaggacaacttaacctctcctgaactattttaattctcacaatttccttgtaaccccagtatcactatccctattttatagacaaataaactgggactcagagaggttcagtaattttcttttgtccccatggctagaaaatggctaagcctagtaccaaatccttgtgtgattgttccagggttctgttctttgcatgacaactctggactsaagtatgtaggcagagacattagaattgagacagagactgaccaaaactctcatatcttggcaggagcccaagtctgcatatgtatgaacctcatccatatatatgcaagctgtggctgagacatctgtaacctagactttcatagctgggctactaacttcaatcatctgaaggaagattcaagttataaactgccaccaattcagttaattatccataaacttgtttctatattgccctatgatgctcagttcaagcc

SEQ ID NO: 648075 - DNA, 550 bp, Homo sapiens
tttattttttttttgcagtttcagaggctgggaagtctaagatcaaggcatctgcagattcagtgtcttggtgagggcttgctctctgctttaagatggtaccttcttgctatgtcctcatgtggtggaaggggtcatttgttcatcttcatttcttttataaggtcattaatcccattcagaagggctctgtccaaatgccttaatcagctcctaaatgccccacctcttaaaactatcaccttgattaagtttccacatatgaaatttggagagacacagacattcagaccatggtagtccccatcctctgatgtggaccrgcagcacactcacagtcttacataaatgactctgcaagtgcagctttctgagcttcattccaattgtccctctccccacctccatagcagttttggtgaagccctatgtaatttcatgatctacaggtagatttgatagatggtgttatggtaccaggagtggggagcagccaaaacacaaaccctaaaatatgtggctctagggccagatggcagtcagcaagaga

SEQ ID NO: 648076 - DNA, 607 bp, Homo sapiens
ctttggcttgaacatggactgtttggagggcactggagagaaccaaaagagtgacaagttttgagtgcttgtcatgtaagaaacaggaaagaaaatgcggcataattacctgtctctggggagaggagcaggattgcttttgttcctccaagtaggcagaaacagaaacactgggcagctggtacagagagacgggttttgagaggcagtactctcccagcagcactgtctagccagctgtctgcccgagtctgggggtgctagtgccttctgcaggattaccctataggaggcatttccagggtgctgatgtggactcatgccagaggtgacagtgtcagccatccatggtggaaacacaaaaataaggacacttartgagcttggcccaagctattacattttcatctctgaggttatatttcccacacctttaccgttgaatgtccttttatcacaatagtagtcattgtttaagtgatatctctatgttaaaccttacatttttttctttttaattttattgatttgtgaaatcctaaagtcttgaaactcctaagctagctgacttttcagatctgggatctcttttatctctaaatgatta

SEQ ID NO: 648077 - DNA, 607 bp, Homo sapiens
ctttggcttgaacatggactgtttggagggcactggagagaaccaaaagagtgacaagttttgagtgcttgtcatgtaagaaacaggaaagaaaatgcggcataattacctgtctctggggagaggagcaggattgcttttgttcctccaagtaggcagaaacagaaacactgggcagctggtacagagagacgggttttgagaggcagtactctcccagcagcactgtctagccagctgtctgcccgagtctgggggtgctagtgccttctgcaggattaccctataggaggcatttccagggtgctgatgtggactcatgccagaggtgacagtgtcagccatccatggtggaaacacaaaaataaggacacttaatgagcttggcccaagctattacattttcatctctgaggttatatttcccacacctttaccgttgaatgtccttttatcamaatagtagtcattgtttaagtgatatctctatgttaaaccttacatttttttctttttaattttattgatttgtgaaatcctaaagtcttgaaactcctaagctagctgacttttcagatctgggatctcttttatctctaaatgatta

SEQ ID NO: 648078 - DNA, 543 bp, Homo sapiens
tcttgaaactcctaagctagctgacttttcagatctgggatctcttttatctctaaatgattatgattcctgacttttttttgatataaacactcaactgccatttagagtgctcatgatagggaatagatgctgcatttgttcatgttgaaatactgaggctcaagtacctgtcagaaggagtttattatattttctaggctctctgaaattacatcagaaaaatgtgaattagaatataacccataaataatatctggccacatgcaaagtaattgaagatcaattgaaatagctattggattaagaaatagagactgaggtaaatttacagggtcagggaggatctaaggaggaagcattgacactggagcccagggacctgggattacagaacagattctaccagtgctaacttactgctccagagaaaatatcaattctgctcatccgcaggtactattcatcaagaaagggattacaagttcacaaatgtgttcaaaatgtacccatacttcgayatattaatgaagtaatcacatt

SEQ ID NO: 648079 - DNA, 592 bp, Homo sapiens
taaatgagaaggaaccaggagaccaaccctggtaatctgacaaaacaagactcttcaacaacccccaaataatcacaccagttcatcaccaatggatccaaacaaagaagraatcactgatttatctgaaaaagaattcaggttagttattaagctaatcagggaggggccagagaaaggtgaagcccaatgcaagaaaatccaaaaaatgatacaataagcaaagggagaaacagtcaaggaaatagcttaaataaataataataataataataaaaaatcaggaaactttggacgcatttttagaaatgtgaaattctctggaaagtctcagcaatagaattgaacaagtagaagaaagaaattcagaattcgaagacaaggtctttgatttaacccaatccaataaagacaaagaaaaaagaacaagaaaatatgagcaaagcctccaaggagtctggcattctgttaaacaatgaaacctaagattaattggtgtacctgaggaagaagtgaattctaaaagccaggaaaatgtatttgggggaataatcaaggaaaacttccgtggccttgtgagagacctagacat

SEQ ID NO: 648080 - DNA, 592 bp, Homo sapiens
taaatgagaaggaaccaggagaccaaccctggtaatctgacaaaacaagactcttcaacaacccccaaataatcacaccagttcatcaccaatggatccaaacaaagaaggaatcactgatttatctgaaaaagaattcaggttagttattaagctaatcagggaggggccagagaaaggtgaagcccaatgcaagaaaatccaaaaaatgatacaataagyaaagggagaaacagtcaaggaaatagcttaaataaataataataataataataaaaaatcaggaaactttggacgcatttttagaaatgtgaaattctctggaaagtctcagcaatagaattgaacaagtagaagaaagaaattcagaattcgaagacaaggtctttgatttaacccaatccaataaagacaaagaaaaaagaacaagaaaatatgagcaaagcctccaaggagtctggcattctgttaaacaatgaaacctaagattaattggtgtacctgaggaagaagtgaattctaaaagccaggaaaatgtatttgggggaataatcaaggaaaacttccgtggccttgtgagagacctagacat

SEQ ID NO: 648081 - DNA, 592 bp, Homo sapiens
taaatgagaaggaaccaggagaccaaccctggtaatctgacaaaacaagactcttcaacaacccccaaataatcacaccagttcatcaccaatggatccaaacaaagaaggaatcactgatttatctgaaaaagaattcaggttagttattaagctaatcagggaggggccagagaaaggtgaagcccaatgcaagaaaatccaaaaaatgatacaataagcaaagggagaaacagtcaaggaaatagcttaaataaawaataataataataataaaaaatcaggaaactttggacgcatttttagaaatgtgaaattctctggaaagtctcagcaatagaattgaacaagtagaagaaagaaattcagaattcgaagacaaggtctttgatttaacccaatccaataaagacaaagaaaaaagaacaagaaaatatgagcaaagcctccaaggagtctggcattctgttaaacaatgaaacctaagattaattggtgtacctgaggaagaagtgaattctaaaagccaggaaaatgtatttgggggaataatcaaggaaaacttccgtggccttgtgagagacctagacat

SEQ ID NO: 648082 - DNA, 592 bp, Homo sapiens
taaatgagaaggaaccaggagaccaaccctggtaatctgacaaaacaagactcttcaacaacccccaaataatcacaccagttcatcaccaatggatccaaacaaagaaggaatcactgatttatctgaaaaagaattcaggttagttattaagctaatcagggaggggccagagaaaggtgaagcccaatgcaagaaaatccaaaaaatgatacaataagcaaagggagaaacagtcaaggaaatagcttaaataaataataataataataataaaaaatcaggaaactttggacgcatttttagaaatgtgaaattctctggaaagtctcagcaatagaattgaacaagtagaagaaagaaattcagaattcgaagacaaggtctttgatttaacccaatccaataaagacaaagaaaaaagaacaagaaaatatgagcaaagcctccaaggagtctggcattctgttaaacratgaaacctaagattaattggtgtacctgaggaagaagtgaattctaaaagccaggaaaatgtatttgggggaataatcaaggaaaacttccgtggccttgtgagagacctagacat

SEQ ID NO: 648083 - DNA, 528 bp, Homo sapiens
gaattcttgttctcagaccatgtgactgaatagaagtttagtcacaggattccagtttaacatatgcagttactatagcaattgaggtttccttagtaacagttgcaaaaataatccggccccaattaataatacattttaaagctctttctactccatgctgaacaatccagttttttttggccaagaaccagataattcaggtggtgtcatttgcactgatatagatatcatttgcatgcggtgaattgggttggaaargaatgaaaagggagccggttgtttcaagtattataggaatccaatctgaaaagtcggctggcaagcgaatgcaaatctagcttccagagcttgggagttaatggtaaaccctgtcctggattcctagtgtgccctagaggactttctgcatttgaagaagggagaaggcagaagattggacttgctaacaaaaaagatgaacccgggagggtggggccgtggcacacaggatttctctctaagtggtgcctggtgtgttcttgatgg

SEQ ID NO: 648084 - DNA, 528 bp, Homo sapiens
gaattcttgttctcagaccatgtgactgaatagaagtttagtcacaggattccagtttaacatatgcagttactatagcaattgaggtttccttagtaacagttgcaaaaataatccggccccaattaataatacattttaaagctctttctactccatgctgaacaatccagttttttttggccaagaaccagataattcaggtggtgtcatttgcactgatatagatatcatttgcatgcggtgaattgggttggaaaagaatgaaaagggagccggttgtttcaagtattataggaatccaatctgaaaagtcgrctggcaagcgaatgcaaatctagcttccagagcttgggagttaatggtaaaccctgtcctggattcctagtgtgccctagaggactttctgcatttgaagaagggagaaggcagaagattggacttgctaacaaaaaagatgaacccgggagggtggggccgtggcacacaggatttctctctaagtggtgcctggtgtgttcttgatgg

SEQ ID NO: 648085 - DNA, 574 bp, Homo sapiens
attagatctctatatatgctccattataatcttacaggatcactgttgcacatgtgtttcctcattgactgaaatgttattcagtgcatgactgtacatatagtaaaaatgttatgcaccatattttaacatactgatattactaatgagttgtcctcatggtgactttaaatatcataattaatgccatcaaccagaatatatcaaataaattcagataccacttgttctgtttatttccttcccctgccaattttttatttttcctgattctgctgaagccaagatggggttctgtgtaagattttgtttgtgaggaaaggttctgcatgaattaaagttttgcaagccatgggcatttcattgtatgggcygttttgaggtctgccatcttgcagattagattagcttacactgaggcacagtcacctgctgggctgggcagagagctgcactccactagtatttgagctgtcccggctgttcaccagctggatccacttcagataggcatagccagggcagccgccattcccatttgtgggggaaaagggaagctatcacaagaatgggc

SEQ ID NO: 648086 - DNA, 574 bp, Homo sapiens
attagatctctatatatgctccattataatcttacaggatcactgttgcacatgtgtttcctcattgactgaaatgttattcagtgcatgactgtacatatagtaaaaatgttatgcaccatattttaacatactgatattactaatgagttgtcctcatggtgactttaaatatcataattaatgccatcaaccagaatatatcaaataaattcagataccacttgttctgtttatttccttcccctgccaattttttatttttcctgattctgctgaagccaagatggggttctgtgtaagattttgtttgtgaggaaaggttctgcatgaattaaagttttgcaagccatgggcatttcattgtatgggctgttttgaggtctgycatcttgcagattagattagcttacactgaggcacagtcacctgctgggctgggcagagagctgcactccactagtatttgagctgtcccggctgttcaccagctggatccacttcagataggcatagccagggcagccgccattcccatttgtgggggaaaagggaagctatcacaagaatgggc

SEQ ID NO: 648087 - DNA, 616 bp, Homo sapiens
cattgacttgattttatcaaacttcagacagtcttgtctcctctcctcaggcccctggaccttggctcaccacctaagactgaacaagcactaaaggaccgaccagcccgctaacagctcactccaaaaatgagcgggactcccagagaaactatttttattggagcatcctggttttgccacctgctcaccccactgcctgtccttctctccaaggaggcttctgccagccctgcttgtccttccctagaaaaggaaagccttttcctgtctgatcctgagacacctgtagattgagtttggaatattctccctattgcaatagtattkttgaataagttttatttttccctacctctggttgatttttaattaataccagtaagcttggatgaaagcctgcacaccttaggtgtgtgtgtgtgtgtgtgtatgtatgtactttagcattatcatgaaagtaataacagtaaaatcaaacaaacacagatggataagcaatatgttggactagtatgaaaatggcattgccagcagtgatatgattttttttcaaaatggtacactttttgaagtataatcttattttaacctaaaatcttactatcagaaaatg

SEQ ID NO: 648088 - DNA, 486 bp, Homo sapiens
tttctccttttaagtagagtgatagttgttagaagaaaaataacgccccaatactttcttctagtgttaattcttaaagtgtgatttacttttatttactttttggtgcagtaattgcagttcatgagtcaatgttgatgtcatataaaccttaatttttaatgtttcattgtagtgatgtctctgtagcagcaaacatttaagttatttgttatacttaaatgtttaartcactgttagtgattagcttattttgccttccttgaagcaatttgtcctaaatttccatatgtttgcatttgtttttgctgttctaaaattccttagttgctggctttgaccttttatgttgctgagttttacacatctattttctcaactgccatatcctaggaggcttggagtacccataatacagtgagcccaccttcctggtccccagacatttcaggaggtcgggaaatttttaaacccaggcagcttcct

SEQ ID NO: 648089 - DNA, 511 bp, Homo sapiens
ctttttaaatctaaaaattttaatgtaaagaaataatatgcttgcatttaaaaatcaagtatacatttttaatacctctttttatggttaattccttttgttgtgattactaccggttttatgagggagaagtccttgacatgtagaccaaaaggtaattaaggaccttttcattcatgatatcataaaactttgttgcttagaaaaaagcaaaagaaaaaactccattaatttattatgttcttatggagaagaaataccaaaattgtggcagatttcattgtctgtttaataccttaaaatgacaaggctttttyccccatgacattggttgatggctgtgccagtccttgaagtgagttaagtagtgtgatgcattttgaagagaaaaaaattaatttgaaaaagtattaactcaaaagttaaaatacttcattgactggagatgaaagtttttcttcatattctatatttaatattctggaatatggctgtttaattcagactaatc

SEQ ID NO: 648090 - DNA, 613 bp, Homo sapiens
cctggtcaacaagagtgaaactcctctcgaaacaaaataaaggttatagtgaacaggcgaaattaattttaatgccttccattttgaccgatatatctaaaatattaccatttcaacatgtaatatgtaattatgtgctgtattttatgtttgcaggacatctcagttcagactaactacattgcagatcccaagtgtgtgtcattaaaatagtgatagatttgtgtgtgtacatacctataatattatcatttatagtttcttgattagaattctgcataatcaagtcttactaagacagstttattatattttctcattacttcttggtctaaaggaattctacctctaaagagagaatgagttgaataataaaatgtcatgactccattttgctgtagtatcttagcattaatatttggaattgttattctagaccttagcaaaaatatatgttttgattatgaattttctgaagctttccagttaagtgtaaaacaagtgaaaaatataacttcgtattttgtgtattttgctttttataggtgtctactgcagatatttcatcaaataaggatgatgaagaaaactctgtgctcgatatggttgtgtt

SEQ ID NO: 648091 - DNA, 484 bp, Homo sapiens
gtagcttgttttcttattttgagttaagagttcatcgtatatgaatatcttatcagatgtgtgttttgcaaacgctttcttccagtctgtagcttgtcttyttattctcatgacatggtcattcacagagcataaatttcagatgtttataataaagtgcagtttatcaattttttttcatagattgtgcttctggtgttgtagctagaaatttatcaccatgccaagggtcatctaagttttctcttatgttagcttctaggagttttatagttttgcattttacatttagtttgtaatccattttgagttagttttataatgagtgtaatgtctatgtctagattaattttgtttagcatatggatatccagttgctccagcattacttgttgaaaatactatatttgttttactgtactgcctttgctcttttgttaaagaacagttggtctatttctgtgctttctattctgttttgaga

SEQ ID NO: 648092 - DNA, 536 bp, Homo sapiens
atctatatacatatatatagatatatatagctacccagaactcaccccaaagcttttgattaaaatttcaaaaggatgaagtgccagtccctgcattttaaccccacttccaaggtaattcttctgctcaacaaaggataagaatcactgaggtgaaaggaaccatttagtccagagaaagcaaatgccttgcacacttatgagtacggttttttcctgmatagcagcagacatcactaattcatctgcattctttcccatgaacctcagaattgctcaccacaactaccatttgaagacatttggcttaggaggtaaacctatttgttggcccaggagataaaacttatgcatatattattccagtcttttggaaatccataaacctacatctcactggcctatcacaaacataaatctgccgctatagccatattttagaaagatgccattcctttcaactctcactgccatcaacctagtccaagctaccatcattacctgccaagatggtaacaataccatctacctggtct

SEQ ID NO: 648093 - DNA, 536 bp, Homo sapiens
atctatatacatatatatagatatatatagctacccagaactcaccccaaagcttttgattaaaatttcaaaaggatgaagtgccagtccctgcattttaaccccacttccaaggtaattcttctgctcaacaaaggataagaatcactgaggtgaaaggaaccatttagtccagagaaagcaaatgccttgcacacttatgagtacggttttttcctgaatagcagcagacatcactaattcatctgcattctttcccatgaacctcagaattgctcaccacaactaccatttgaagacakttggcttaggaggtaaacctatttgttggcccaggagataaaacttatgcatatattattccagtcttttggaaatccataaacctacatctcactggcctatcacaaacataaatctgccgctatagccatattttagaaagatgccattcctttcaactctcactgccatcaacctagtccaagctaccatcattacctgccaagatggtaacaataccatctacctggtct

SEQ ID NO: 648094 - DNA, 536 bp, Homo sapiens
atctatatacatatatatagatatatatagctacccagaactcaccccaaagcttttgattaaaatttcaaaaggatgaagtgccagtccctgcattttaaccccacttccaaggtaattcttctgctcaacaaaggataagaatcactgaggtgaaaggaaccatttagtccagagaaagcaaatgccttgcacacttatgagtacggttttttcctgaatagcagcagacatcactaattcatctgcattctttcccatgaacctcagaattgctcaccacaactaccatttgaagacatttggcttaggaggtaaacctatttgttggcccaggagataaaacttatgcatatattattccagtcttttggaaatccataarcctacatctcactggcctatcacaaacataaatctgccgctatagccatattttagaaagatgccattcctttcaactctcactgccatcaacctagtccaagctaccatcattacctgccaagatggtaacaataccatctacctggtct

SEQ ID NO: 648095 - DNA, 536 bp, Homo sapiens
atctatatacatatatatagatatatatagctacccagaactcaccccaaagcttttgattaaaatttcaaaaggatgaagtgccagtccctgcattttaaccccacttccaaggtaattcttctgctcaacaaaggataagaatcactgaggtgaaaggaaccatttagtccagagaaagcaaatgccttgcacacttatgagtacggttttttcctgaatagcagcagacatcactaattcatctgcattctttcccatgaacctcagaattgctcaccacaactaccatttgaagacatttggcttaggaggtaaacctatttgttggcccaggagataaaacttatgcatatattattccagtcttttggaaatccataaacctacatctcactggcctatcacaaacataaatctgccgctatagccatattttagaaagatgccattcctttcaactctcactgccatcaacctagtccaagctaccaycattacctgccaagatggtaacaataccatctacctggtct

SEQ ID NO: 648096 - DNA, 582 bp, Homo sapiens
aaaactattgcttctgaggcttttattttggggtgttgttttctgagtcctaacatcatcttcccagaatctttgccttcctttcattctttgtctcttgtcattcaktcttctcagaacagccagtgtgatgtcttaacaaataaataaaataaggtttatgttattttcttgcttagcttttccagtagtttcttcgcactttagaccaaaataaataaatgagcatgtttttcaaaaacccaatcatcattccataagctataaaaccatccttgatctagcccttatctacttttcaaacctcacttattttacttctttctgtttaaacatgctaagtttgctcctggctcggaaactatgcagttatttctttgggcaaatgttttcctgctttgagagaggaaaaaaaaattatctaccatcttaggttttgaaattgtagtcatggattaaatcgacagaagacaaattaagagaaaagtcatacacatttaattgcttttattttacacacatggggactacacagaaagaaagacaaaacccaaagaagcagttggactgggagcttatata

SEQ ID NO: 648097 - DNA, 582 bp, Homo sapiens
aaaactattgcttctgaggcttttattttggggtgttgttttctgagtcctaacatcatcttcccagaatctttgccttcctttcattctttgtctcttgtcattcagtcttctcagaacagccagtgtgatgtcttaacaaataaataaaataaggtttatgttattttcttgcttagcttttccagtagtttcttcgcactttagaccaaaataaataaatgagcatgtttttcaaaaacccaatcatcattccataagctataaaaccatccttgatctagcccttatctacttttcaaacctcacttattttacttctttctgtttaaacatgctaagtttgctcctggctcggaaactatgcagttatttctttgggcaaatgttttcctgctttgagagaggaaaaaaaaattmtctaccatcttaggttttgaaattgtagtcatggattaaatcgacagaagacaaattaagagaaaagtcatacacatttaattgcttttattttacacacatggggactacacagaaagaaagacaaaacccaaagaagcagttggactgggagcttatata

SEQ ID NO: 648098 - DNA, 446 bp, Homo sapiens
cccccctcttatccctctcctccgggatcagctccccaccccactgctgcattctcaggttgctatggagctgccatgctgggcccccaagtaggggtggctctgccaagcccatttccccacggggggagcagtgagctgtcatgctgggtaggtgcttcagggctgggtgggactggccacygaactgggaaggcctggatcacccccctggtagaggagaaagagccagagacttggagtcaaacccagatccttcactggcaaccccacatggcttaggacacgtttctgctcctccttgagcctcagtttccttctctgtaaagtagaactcacaatcccaatcctgtaagactgtcttgggacttaatggcattttctgggcactgctgtgtggcagtcctgtgatgggcattggaatgaaacatgaacaagccatagtc

SEQ ID NO: 648099 - DNA, 606 bp, Homo sapiens
aagcttaaataagaaagatcacgtgtgtaaaatgctttgaacaatacaggcatgtagtgagtatcagccgagatgattattacaccaacgccttgacaccgtacaaacctcactagcttgtataacccaaatgccagctgggtgcctccatgttcttgcatttgagtgatgacttgggggaactttccaatctctatgtcttggagaagtcccactccctccctgggattgctatgagatctgggagacttgaggtctctggttcacatccctttcctctgagtccacctgggttgaagaattcagctgctacttcattggtttttacaacaaatccgatctcaccaagcattcaggatgtgcccacacttgagtggtggtgggagtggggtgtcgtgggggggtcctcagcgcacagtkctctctcactgctccttcccccattgtctcccctcctgctttccaacccttccccatctgttcccctcctccctcagctaagcagaagaacgtctccctgagccacaccagtagctgccatttatcaagcacttgttatgggccaggagctgttctaggtactttatagaatcaccacgtttaaac

SEQ ID NO: 648100 - DNA, 552 bp, Homo sapiens
atacaccctttgcaaacctcccaccttttctgtgcagcaggtgggaaattggctgtccacaacaaatcagactgattgtgggatgagtatttgtttgcatagacgcataactttgtaacttcaccctagcctctgattggttgccttttgcaaccaatcatatgtttgcacgagaatgtgacctttgtaacttcacttcaggctctggttggctgctttttgcaaacaatcagactgactgtgggctaycactttatttacatgaggtgagcatgatgtagccaatgggaaacttctagggggtatttggacccaagaagattctgtatccgggcccttgagccactgcttggcctgttcccatactgtggagtgtacttttgttttcaataaatccctgctttcattcttttgttgcttcattccttctttgccttgctgggcattttgtccaattctttgttcaaaatgcgaagaacctagacaacttgcattcacgaccctctaccagtgacaacgatgtctgagtattttaaacttcactaagtattg

SEQ ID NO: 648101 - DNA, 497 bp, Homo sapiens
caggggtccccaacctctgggctgtggaccaataccagtccatgccctgttaggaactgggccacacagcagaaggtgagtggccagcagtgagcattaccgcctgmgccccatctcctgtcagatcagaggcggcattagattctcataggagcacaaaccctgctgtgaattacgcatgtgagggacctagtctgtgctccttatgagaatctaactaatgcctgatgatctgaggtggtgcggtttcattctccgcacccaccccattcataggaaaactgtcttccatgaaaccagtcccttgtgccagaaagattggggaatgctgctttctactgtccaacttgtagagtatagagtggactaatgtttcacttggtctgaatactatatggctactgaattaaactgcctaggttctttgaacttgactcctaagttaggtcgatcaatcttgtatcagtacagttgattttaggaacaaaagtgccaga

SEQ ID NO: 648102 - DNA, 534 bp, Homo sapiens
ccccaacctctgggctgtggaccaataccagtccatgccctgttaggaactgggccacacagcagaaggtgagtggccagcagtgagcattaccgcctgcgccccatctcctgtcagatcagaggcggcattagattctcataggagcacaaaccctgctgtgaattacgcatgtgagggacctagkctgtgctccttatgagaatctaactaatgcctgatgatctgaggtggtgcggtttcattctccgcacccaccccattcataggaaaactgtcttccatgaaaccagtcccttgtgccagaaagattggggaatgctgctttctactgtccaacttgtagagtatagagtggactaatgtttcacttggtctgaatactatatggctactgaattaaactgcctaggttctttgaacttgactcctaagttaggtcgatcaatcttgtatcagtacagttgattttaggaacaaaagtgccagacttcctaaatatgttcctggaaatattaacttgttgttatattt

SEQ ID NO: 648103 - DNA, 571 bp, Homo sapiens
ttctcatttcctccagctgtatcagttacatacagcatacttgattttcatgtttgtcttaatataaccacttaatttttcaaacttgcttttgccttattttagggtttttttttttttttaaataatcctatcagagagtaccttacatgcctaacagcatagcctgtttctctcccagttgataaatgacaaactattctgatagtgctgttaacctgttgaatcttagtacctgtctgtcactgtcctgcagcaaagctttgactgttttgtgtgtygttttttatttccccactgtgggtttttttccttttggcatattgtgtgaaattttggtttttgttgtggtgtttctgactctttgtgcctttccttttgtgtttgttttccctccttttctcagtttgcagcggggcctcgacctccccatcatcaggtactgtacccttgccccttcactatcacccttaactaatagatgggggctttagtagctgctgactcttagaatgctgccatcccatagaactactcaaattactcatttcaagagtagcttttatctgat

SEQ ID NO: 648104 - DNA, 638 bp, Homo sapiens
ggctcaagcaatcctactgcctcctagccttctgagtagctggaactacaggcatgcaccaccatgcctggctaattttttttgtttgttcttttatagagatagggtcttgctctgtcattcaggctggagtacagtggtacaatcatggcttatggctggagtacagtggtacaatcatggcttattgcagcctcaaactcctgggctcaagtgatcctccatcctcagcctcctgagtagctgggactacaagcatgcaccaccatgcctggctaattttgtttgtttattttgtagagatgggatctcactaggttgcacaggccagtctcaaacccacaactcaggcaatcctcttgcactaggaggcctcccaaagtgctaggattacagacatgagccaccaggccagcctcaggtttttttttaattaaaaggtacatttaaatcaatcaatatrtagttgttgagtaactgttaagtgcctccccacaccctgaaaaaaaactctcatttttctttgtattgaaaaacccatgtttgatatataccaccatgatatctctttctgacaagttatatacaaagttatgaagatcccaagccactgtcccgaaaggctggcaggacaagca

SEQ ID NO: 648105 - DNA, 579 bp, Homo sapiens
ttgaaacattcatgtatcatcatagtacattgtagataccagtgttctaaagtttgaggcaataaacatacagaagattggatacataaatagattagatgggtccattaacatgggttaatatatacatacacattttctaggcctgttagcttagagattctagaaacactgacagtacattaacaacacacacacccaacatcataattttgtgtgttaatataattctttaatatcaaggaccggcaatccttggagaaataactgattctatgtgtagaaaagataatagagataatgagcttagtatttcttgtaacaccaggaaatagggaagtgatcaaaaacaaaaggatggggcatgctgtaaaaatacagaatccaaactaaatgagctcacagaacctaaaaaaaagctgtggtgatttgagcgataaaataaataatgtagcaccagmtcttctccatagtaaaaaataaacattcatgagccaacaccaacattaacagattattgaataaagaaaattagaaaaaaggcaccttccattcagaagaattctaaacatcttaata

SEQ ID NO: 648106 - DNA, 579 bp, Homo sapiens
ttgaaacattcatgtatcatcatagtacattgtagataccagtgttctaaagtttgaggcaataaacatacagaagattggatacataaatagattagatgggtccattaacatgggttaatatatacatacacattttctaggcctgttagcttagagattctagaaacactgacagtacattaacaacacacacacccaacatcataattttgtgtgttaatataattctttaatatcaaggaccggcaatccttggagaaataactgattctatgtgtagaaaagataatagagataatgagcttagtatttcttgtaacaccaggaaatagggaagtgatcaaaaacaaaaggatggggcatgctgtaaaaatacagaatccaaactaaatgagctcacagaacctaaaaaaaagctgtggtgatttgagcgataaaataaataatgtagcaccagctcttctccatagtaaaaaataaacattcatgagccaacaccracattaacagattattgaataaagaaaattagaaaaaaggcaccttccattcagaagaattctaaacatcttaata

SEQ ID NO: 648107 - DNA, 557 bp, Homo sapiens
tgtttacatcctaccgattgctagccaggcttctggccaaatgactctcctggtttattggtgacagtatcagactcaggcacttggcacttctctcacccaccaaaacacacccacctgtagtagcaggacataatccagcatctactaaggtgccaggcacagtcagaraggtttttagaggcccgtaaatggttacccaaagagtaatggacgtgaggttatgcatacctgagagttacgctactcaccgtctatttgcctgagccccacccaactgagtggtcacatgactgttattttgtgcctctaaaggctaattaggccaggtgcagtagctcatgcctataatcccagcactttgggaggctaaggtgggaggatcgctttgaggccaatagttcaggaccagccggagcaacatagcaagactctgtcgctactaaataaataaactgctaattagaaaatcaaaagagcactaacagtccacaaaaatggtctgggcaaaaaatgaggcagttgatgaaatagagtttaagcaacatctgatggat

SEQ ID NO: 648108 - DNA, 537 bp, Homo sapiens
ttttactagctcttggtattatatgtgattgtgtcctggatattttacatattatgagattcagaattttagtttatcttctgttattgtaggcagttactttgttgaggtataggagaaggaccaggtttgtttgcatattcagcttcccacttggctctgccaataccaccctgtcaaaagtggactactgacttatgattccagattgaaaaggagtaaggtgaaagttcagctacctattcaaccacatttgacacttccctagcaaagtgaaacattaatttgtgcagtcttactgccttggaatatgagtgtaagcttagctccccactgggctctgctgaaatcagaggtggtatagggtggaatttcaactgccctgcctgacatcatttcattctgccttgttgatgcctggtacatatagaggtgcagatttccattgggcctagctgacatgggagaaagtgttaagacaaattggaaaccrttgtagcccctgctcaaacagttttgttcagtcttactgattcc

SEQ ID NO: 648109 - DNA, 640 bp, Homo sapiens
gtggaatagttaaggcaaagataatgaaagctatttcccagaaaaagatgggagaaactaaatgatacattttagctttatcccaaaattaatttagaatttctcattttatagtccaatcattcaagtattaaaaaatccttctatamaaaatttgttatgaaatgtttcattcagcccaggagtgaaatttttcctgtgttcaagaaaaagtgaaaagaaaaacaacagatgttgaattataggaataaaaatttcagatggtttattttctttggaattcatgtaattttaggacagatccatttatttaaattacattttgcagatgggttatctgagaagagattattcttaggagaggagaaaaatacaataaaaaaaggaaatgtgacttctcttctgctgactcctcatgtttttgggcaagagcttcctcatgaatggattgttttctttagctacacttgtaccaaacatgtcaaggccttacctccactaaaaagcacacacacctgcctctcgaacacccggttgaatcaaatccttctacttttgacaatcaagttttcttttatgcaggtttgtacgctgtcattctctgtatgagctgcttcttccgtgacagtaaagttcaatt

SEQ ID NO: 648110 - DNA, 576 bp, Homo sapiens
tccctctgttgtgctatcaattactaggtctttctattttgttgtatctattaaccgtccccatttcctcccaaacccccactaatcttctcagcctctgaaaacaatccttctgttctctatatgcatgggttcatttgtttccctctttacatcacataaataagtgagaacatgtgatgtttgtctttctgtgcctggcttatttgatttaaaataataatcaccagttccactcacattgttgcaaatgaaaagatctcatttatctttatggttgaatagtactccattctgtatattttcattatccattcatctattgatggacacttaggttacttccaatttgtggctattttcaacagtgctgcaacaaacacgggggagcagatatattttcaatayactgatttcctttcttttggtatatacccagcagtgggactactggcttgtatggtagctttatttttagtttttttgagaaaacttccaactgttctccatagtggttgctctaatttatatggccaccaatagtatatgagggttctctcctctccacaacctcac

SEQ ID NO: 648111 - DNA, 611 bp, Homo sapiens
ctctgttcttggttattttccttcttttgctaagtatgggtttggtttattcttgtttttctagttccttgaggtgtgaccttagattgtctgtgctctttcagtctttttgatgtaggcttttagggatataaattttcctcttagcaccaccttagctgtatcccagaggctttgataggttgtgtyactattgtccttcagcacaaagaaatttttaatttccatcttgattttatttttgacccaatgatcattcaggagcaggttatttaatttccatgtatttgcatggttttgaaggttccttttggggtttatttccagttttattccactgtggtctgagagagtgcttgatacaatttcaattttcttacatttattgaggcttgttgtgaggcctatcatattgtctatcttggagaaatttccgtgcactattcagtagaatgtatgctctgtgattgttggatggaatgttctatttctatctgttaaatccatttgttccaaggtatagttcaaatctattgtttctttgttgactttctatcttgatggcctctctaaaggtttcagtggagtattgaagtcccccagtattattg

SEQ ID NO: 648112 - DNA, 450 bp, Homo sapiens
ttttttttttttgagatgaggtttcgctcttgttgcccaggctggagtgcaatggtgcaatctcagctcactgcaacctccacctcccatgttcaggtgattctcctgcctcccaagtagctgggattacaggcatgagctaccatgcctggctaattttgtatttttttttttttttttttttttttttagtagaaatggggtttcaccatgttggtcaggctggtcttgaactcctgacctcatgtgattcacccacctcggccgcctacagtgctgggattacaggcatgagccaccgcaccggcctagaatttcaactactaatttacattaagcttttaattatgtttaaagtgcttttcctatcaragtttagcctcttagatgtagtatgtgctagacacttgaagttttgtttgttacagccctttcttagctatcctgctt

SEQ ID NO: 648113 - DNA, 595 bp, Homo sapiens
tgatttataagtgttgttcttgtgtgatttgatttaaagacatcaaatgccctcctgccccacacatttctctccctagcattgccaataaaatgtccatattatccattccttctagttaaggcacctgaagtccttgttagttgcaaatggtatctgagaggcatggccccagttaagccgttagcagccattaactcctttatgccattcatgaaagtatcctctgtggctattcagtccttttgaaactggtcataggatagataagttttcaaaaaaggcaagggttgtctaagttagtgtctggagccatttctgatacattcaaataaaagtaatttgctggtgaacataaaacatacaagcatctggaaagattctgtattgtgaaattattctgcatgycatttttttgatgaagaattaaaaagttattgatatcagtaaaaaaagaaaaaagagagaagaaggaggtggccagtggccagtgtaaatagccatttaggatccaaaatttcaaaataatttagccagtttcatttgataagattagcataatagagcaccaattaaatccccccaaaactaaatt

SEQ ID NO: 648114 - DNA, 565 bp, Homo sapiens
ttgggttattattcatgtctccagtgggcctacgcagactttattattgatccttcaacagcaggaaagtaaaagcagcagaagtgttaaatgtatagaaaaattatctttcatgaattatgaagaatattcccgtaaataacatyacgatatgatctgccagaagaaaagcaagaaagtcagattttcttggagtgatttttctaagacaatcattagtttgatgtttaaatgttttgaatttctgatttccatttcttctgaatgcagtggaaattacagattattcctttactgccttttaaaatgtaaagtcagtctgtagtctataaattgggtttcctttgaatccacaactacactagagtgaaaggtatattaccactttgatttctgttcaagaaagaaatatattcagtattataaagagaaattgaagcaggctgctggatagtatatctgatctgtgactttcttggatttggtgacaacagagatgaatatttcactcttagttttttaaaaaagctgttgaagttgcattggctattatttctacgataat

SEQ ID NO: 648115 - DNA, 622 bp, Homo sapiens
ggcaccccctgaagaaagcagtaagtttccagggctttggatcattctgtttaatatccaaaagctaggtctaatgcacagttcacacgttagcagctgccccaatacttgctgggagtctgagtattgcaggttgtattaatcactcttctgggattttayaattttccttaactgtgatatgaagatgaaatgagaatgggagatgaaacatggaatttttgagtaaagtggatctatgagaccatttattttcattcctttcctcctcagctgagaatgttgaatatcgaagaaccaatttgccagggtgatggggagtatcctgtttcattgatctttccaccacactctgctgctttcctgctagagaatgttttcgtgtcttataacaatctattgctggcatctggacagtctgaaataaatgctagttcatatgtatgcttccactccttcatcagtacatagtaaaacatgtattacaatccctcctcaatctcgattttgccttccattcttttattcaaaaatatttctcatgcaccaaatatttgccagatattatgctggaatgtttcctggtcccatagagcacgtgatctaccagtgagtgaatgga

SEQ ID NO: 648116 - DNA, 569 bp, Homo sapiens
agtatagcgagtccaacgtcctcctcccatctccaaaatgacccaaccggttgtggargtagaaaacttaaggcaaacaatagctctagagacaggatatcaagatgcaaatgcttggctggaatggattaaatattccatccgcactttaaacaaaagtgaatgttacgcttgtgcgcatagtagaccagaggcccagattgtcccctttccacttggatggtcttccagccaaccaggcatgagctgtatggtagctctcttccaaaactcctcagcctggggcaacaaatcatgccaagctccttctctgctgtaccctgaagttcgacaccctgcgggtcagcccccgagggccattcagtgtccatctcccaatgccagttttactttgtgtctctcatgatggggagaaaacttggggttcctgggagccttaacaggatgcagtgagcttaagcccttccaagagcttacgcatgtctgcccttagccgtccttgagcagatgtgtggtggtattttggtggaccaatactggacactctgccaagtaactggagtggaatt

SEQ ID NO: 648117 - DNA, 521 bp, Homo sapiens
ctcttgcagttgagatggaggaaggccactgtctcctgcttgcccctgggaactgaatgtctcggtataaaacctgattgtacatttgttcaattctgagataggagaaaagctgccctgtggtgggaggtgagacatgtttgcagtaatgctgccttgttattctttactccgctgagatgtttgggtggagagaaacaaatctggcctacgtgcacatccaggcgtartaccttcccttgaacttaattatgatatagattcttttgctgacatgttttttgctgaccttctccttattatcaccctgctctcctactacattcctttttgctgaaataatgaaaataataatcaataaaaagtaagggaactcagaggctggtgccgccggtgcaggtccttggtatgctgagcgccggtcccctgggcccactgttgtttctctatactttgtctctgtgtcttatttcttttctcagtctctcgtcccacccgactataaatacccacaggtgtgg

SEQ ID NO: 648118 - DNA, 521 bp, Homo sapiens
ctcttgcagttgagatggaggaaggccactgtctcctgcttgcccctgggaactgaatgtctcggtataaaacctgattgtacatttgttcaattctgagataggagaaaagctgccctgtggtgggaggtgagacatgtttgcagtaatgctgccttgttattctttactccgctgagatgtttgggtggagagaaacaaatctggcctacgtgcacatccaggcgtagtaccttcccttgaacttaattatgatatagattcttttgctsacatgttttttgctgaccttctccttattatcaccctgctctcctactacattcctttttgctgaaataatgaaaataataatcaataaaaagtaagggaactcagaggctggtgccgccggtgcaggtccttggtatgctgagcgccggtcccctgggcccactgttgtttctctatactttgtctctgtgtcttatttcttttctcagtctctcgtcccacccgactataaatacccacaggtgtgg

SEQ ID NO: 648119 - DNA, 569 bp, Homo sapiens
cttgggtgagactttgagacatgctggcttcaggtactagctcagtcacagtggattaaagcaccaagtgtgctctcgaggtccccaatacaagcctacactcttggacagcatttctggacctgccctggaccagaggggagcccactgccctaaagggtgagtcccagaccttgtagcatttaccacaagctgactaaagagcccttgggtcttaaatgaacattggcagtggcctggcagaactctccacaagctgatggtggtgatggacctggggagaggctcctctgcctatggaaagaggtagggaagaatgggaaggactttgtcttgtggtttgagtgccagcttagccacagtagaatagaacatcaggtagatttctaacgttttttacttcaatccctggcttccagacagcatctccatctgggcctgcgcagaactttccacccggaagggaaggacayaaacatggctgcctttgccactggctgactgtagagccctaggtccttgagggaacataggcagtagccaggtagtagttacagtgggctttgagc

SEQ ID NO: 648120 - DNA, 573 bp, Homo sapiens
aaaaatagaactaacatacaatccagcaatcccactgcaaggtatatacccaaaggaatggaaatcaggatgttaaagtgttaacttcactttatagtaggcagcattatttatagtaggcaagatttggaagcaacttcagtgtccatcatcaaatgagtggataaagaaaatgtagtacatatacacaatggagtactattcagtcataaaaatgaataagatcctgtcatttgcaacaacatggatggaactgggaggtcattatgttaagtgaaatgagtcagaaatagaaagaaatgagtcaggaatagaaagataaacttcacatgttctcacttatttatgagagctaaaaattaaatcaattgaattcgtggagatagagggtagaagaatagttaccagaagctgggaagggtagttggggacttagggggaagtgaggatagttaatgggtacaaaaaatagaaagaatgagtgaataagacctagtatttgatagcatgacagagtaactataatcaataataaygtacttgtccattttaaaataactacaagagtacaca

SEQ ID NO: 648121 - DNA, 555 bp, Homo sapiens
agtgaaaactaatgtccaaaaaaattttcaaacaagccacatggctatacacactttcctaaagtaaccactactgggccaaaacctctactgattggtttctaaaaatcacatggcttctcctattacttggacctttattccttgttactcttcttttaatctttggtctctgcctttttaatgctctcattaagtttatatcatccaggttacgattccacctacagatgactatgcaatcccaatatcggcctgcaacagcaacttccatttacatggggcctcttaatggaatygtttcttctccccatgaacaagtttttcatgatcctcattcccttcatgacaacagagagaaaaggaaaaatacaacttatccactcactatcccctttcagcaggaagtaaccagacagacctggggcccctcttcactgtgctattttctgtttcttgagactgtaataggcagcaggtagacatgagcatgggggaacacaaagggtcaaagatttgaccaagatattttcaggaagaaaataaggagaggaa

SEQ ID NO: 648122 - DNA, 411 bp, Homo sapiens
acaaagcattgttagtaccttgacctcaaagttatttgattgtaattgtggagatacggcaaatacattaataaatgcaaataatggaaaaacactaataccgatttaccaacagaagtagctattaaaggatatatacaatacaataatcatagtgggagcatggcaagagaagtacaatattttaacttacttcttcttccctcaaaaataatttcattttttatcaacatccatactttaatttcctctttttacataagcattttgaggcatgtggtaagggaatttgtawaacctttcttaaatcactacaacctacaatcaacactagactttagaatatctggaatcttaaagaaatactgccagcagtgtttataataaatgatacttttaaaaatccctata

SEQ ID NO: 648123 - DNA, 411 bp, Homo sapiens
acaaagcattgttagtaccttgacctcaaagttatttgattgtaattgtggagatacggcaaatacattaataaatgcaaataatggaaaaacactaataccgatttaccaacagaagtagctattaaaggatatatacaatacaataatcatagtgggagcatggcaagagaagtacaatattttaacttacttcttcttccctcaaaaataatttcattttttatcaacatccatactttaatttcctctttttacataagcattttgaggcatgtggtaagggaatttgtataacctttcttaaatcactayaacctacaatcaacactagactttagaatatctggaatcttaaagaaatactgccagcagtgtttataataaatgatacttttaaaaatccctata

SEQ ID NO: 648124 - DNA, 541 bp, Homo sapiens
cccttttagttatattgaaccagttttatcctaatacatggaatgtaatcaggcaaaataattaatgatgtagtttactaaacttaattttaaaaagtattgaaataacttagtacaattttcaaggattaaaatgttaagagagtaattatattttcgcctcaattataaattgggcatccacatgaaagtgacaccttaggcttctgacatgtattaaaaccttgtaaatgaactcagtttacagcagatctagaaatgtttatgagtaatttaaccacagcttcccaacaattcattggaatagttattaagcattttaaagaaatgagtttatggatgggtagagttagatcaggaaataatagttcccaaattatcaccctcaagcaattccatttctagtaaatagtccccaaattaycatcctcaaagaaattccatttctaataaagaagatgcttttctatgcacacataagtttacagattcatgtcaaaataaaatttaaaccacagctactgattgaagtgaaacaatg

SEQ ID NO: 648125 - DNA, 594 bp, Homo sapiens
ctaataggtacagtataccaaaacaaaattattaaatttctggagttatcctatcagccaaattatttttctatcaagtccacttctattgacattttctgggtattctacatatctctcatattccaaatagtgaatctgcctctagaaatatggctaataaagatggcttcaaatcaaatagttaacctgcctctagaaatayggttaatgagggtgggttcaatgggaaattcctgggaaagtctgagcaatgagaagtggtcaaagagaaattttgggatttgagaatttagattgctctaactttgcttcatgtttttggtctacttaacatgccttctgaattttcacttcacctcatctcatcctcttcaatctaattctacagagaattttctaactgttcccaaaaaaaaaaaatgtctttttaagaaggatagagatgaacttgggaatcttcttggttcaatagttactgtggggaaaccaggagagataatataatcataataaaataaatatagccaaacatagtggtgcagtatgatgaatatgacatctattatcaagtctgattttgtggaattttaa

SEQ ID NO: 648126 - DNA, 357 bp, Homo sapiens
gaattcatctccaagtatttaagaatatacaatgtaggattctgacagatttgggtacctggcactaacaagttgtgtgagcatgagcaagtaatcccacctagcttgaaaaagaagataaaaatatgcggtgtgttggattcttgttaaatgaggtaatgtaggcaaagctactttattgaattttgtatgcttggtgcttagaacaataatcagttcataattggtgtgcaagaaaagatttcttttcctcgttaccagacatcgtcatcaccatcaccattattaccatcaccatcatcatcatcatcatcmtcatcatcaccaccaccaccaccatctttgcttttatcttct

SEQ ID NO: 648127 - DNA, 549 bp, Homo sapiens
actttgcccagtggggcaacctgggtgaagcatatactgaaattctctgtactaattttgcaacttttctacaactctaaaattatcctcaaattttaaagttgattaaataaaagccctaagaatcattctttctctctcattcttttctttctgttactcckcacatcaaatccatcagcaagtacagagcagtccactttccaagcacatccccaaactggtcagtttcaccacctccaccagtacctcctcacccaagtaaccatcctgtcctgtctccacctggattattgtaatatcctcctaactggcctccctggtgccccctatcccctcctcactccagaactcctactatccatgcagcatccagagtagtattttttaaagacataaataaagttaggtcaatcctttgttcagacccctccagtggttttccatcacagttgaaataaaacccaaactgctcttttaaaaagtttaattgtgtttaattgaacaaagaatgattcaagaattgtagagatctcgaaccagaacagg

SEQ ID NO: 648128 - DNA, 576 bp, Homo sapiens
catcagatgtctgtaataagctaatcatgtatttcttggattgtacttctctggttagctgttattaatcacaaatattattcatgtcatttgaaatattcctgttggcgratgttttcatccttgaagaattccagctaaaagtctttagctacggatgcagacccttccccccactccagccccacccaaccgtgagaggcaagattcaatcgtgtcttgttgaacagggttaaccttcaggggaaacagcattaagggaagtaattatccattcacactgagctggctacaaataaagtgagaaaatcaccttctcagaactcacatgaaaaacataatgtagttaatattaaataaagggattgggtaacctggcctctttttacagtgtgtgcttatgtgtccttgatcaggggctgttttgtttatgattaatgaatgactcaccttgggctgtgttccgttcaatgcatacctcattatgaatttgaagaggtcatttctttcttggatttaaaataagaatctctttgtacattcagaaagttaagagtttgatattggtgaaaaatt

SEQ ID NO: 648129 - DNA, 611 bp, Homo sapiens
agaaactctctcctcaattgggtgtggtggttcatgcctgtaatcccagcactttaggagtgtgaggcaggtggattacctgaggtcaggagttcaagaccagcctggccaacacagtgaaaccctgtccctactaaaaaaaaaaatacaaaaattagccaggcatggtggtgcggaccayaatctcagctatctggatgctgaggcaggagaatcgcttgaacctgggaggtggaggttgaagtgagctgagatcgcaccactgcactccagcctgggtgacagagcaagactcagtctaaaaataaaaaaattttttaaaaaaactctctcctacacactgagtacttggagcagtagataaaaatgacgtggttcctaaccacatctaggtcatagtctcatgtcagtgacagacaagaaacttaagaaaataaatgatggtaacagacagcaggttagtggttaccaacagctagagatgggaagaagaaatgggatgtggctgctaaaaggtacaaggttactttgggggtgatgaaaatgttccaaaatatgctatagtgctcattgcacaactctgtgaatatatgagaagccactgaattgta

SEQ ID NO: 648130 - DNA, 611 bp, Homo sapiens
agaaactctctcctcaattgggtgtggtggttcatgcctgtaatcccagcactttaggagtgtgaggcaggtggattacctgaggtcaggagttcaagaccagcctggccaacacagtgaaaccctgtccctactaaaaaaaaaaatacaaaaattagccaggcatggtggtgcggaccataatctcagctatctggatgctgaggcaggagaatcgcttgaacctgggaggtggaggttgaagtgagctgagatcgcaccactgcactccagcctgggtgacagagcaagactcagtctaaaaataaaaaaatttttwaaaaaaactctctcctacacactgagtacttggagcagtagataaaaatgacgtggttcctaaccacatctaggtcatagtctcatgtcagtgacagacaagaaacttaagaaaataaatgatggtaacagacagcaggttagtggttaccaacagctagagatgggaagaagaaatgggatgtggctgctaaaaggtacaaggttactttgggggtgatgaaaatgttccaaaatatgctatagtgctcattgcacaactctgtgaatatatgagaagccactgaattgta

SEQ ID NO: 648131 - DNA, 611 bp, Homo sapiens
agaaactctctcctcaattgggtgtggtggttcatgcctgtaatcccagcactttaggagtgtgaggcaggtggattacctgaggtcaggagttcaagaccagcctggccaacacagtgaaaccctgtccctactaaaaaaaaaaatacaaaaattagccaggcatggtggtgcggaccataatctcagctatctggatgctgaggcaggagaatcgcttgaacctgggaggtggaggttgaagtgagctgagatcgcaccactgcactccagcctgggtgacagagcaagactcagtctaaaaataaaaaaattttttaaaaaaactctctcctayacactgagtacttggagcagtagataaaaatgacgtggttcctaaccacatctaggtcatagtctcatgtcagtgacagacaagaaacttaagaaaataaatgatggtaacagacagcaggttagtggttaccaacagctagagatgggaagaagaaatgggatgtggctgctaaaaggtacaaggttactttgggggtgatgaaaatgttccaaaatatgctatagtgctcattgcacaactctgtgaatatatgagaagccactgaattgta

SEQ ID NO: 648132 - DNA, 544 bp, Homo sapiens
cattccttccttgttatataaatccctggttttagtaggtcagagagatggatttgagactgagttcccacctcctctgctgcagcaccggattaaagcttcttccttggcaatacttgctgtctcagtcattggctttctgtgcagcaagcagcaggacctagactgagcacctggtgtttcagtaccaaaaccactattgtaaaaatggccgtattgctcaaagcactttacagattcaatgctatacctatcaaattaccaacgtcattcttcacagkattagaacatttactttagaaaatttactaaaattagaaaattactctaaaatttgtattgaaccaaaaagagcctgaacagccaaagaaagcctaagcaaaaagaacaatgccagaggcatcactctttccaacctcatactatactataaagccacagtaaccaaaacagcatggtgctgttacagaaacagacacatagaccaatgcaaaagaatagaaaacaaacaaataaagctacataccaacaaccatctgatctt

SEQ ID NO: 648133 - DNA, 531 bp, Homo sapiens
atcatcctcttaatctggtggcctttcattagttgtataaaagtggtttagttttggggaagggctattatcatttaaagtataggcttaattttctcccacgttagcttggcccaagcccaggaatgaccaaaggcaatctggaggttaaaggcaagttgggggttggttagatcagatctctttcactgtaataatcttctacaattrtaatttttgtaaagatgttttcagtccaaggttctataactctcccactgccagaggcagataacttgacttctgtatttctcatgttgcattcttcaatattgttctcaaactcttcacacaatgcttgaacatcacataaagttaccagcctttggagcaatttcctacctgtttactccttcaatttttttctctcttgaaattattactgtcttttcttcttcactcacttatttttctacccagtaggattacgtgcttagagcttccttatattacaacataaaataggagtttgatgaaaatagtcaaagaatt

SEQ ID NO: 648134 - DNA, 396 bp, Homo sapiens
agccacatgtaataatctgccccatgcccacacctgtgtagaaagaggaactgtcagtctctggaagctagggataattgaagaaccaataggtcacagtcttagctggctgctcagctcacctttgcaagactttcctgggtcctccaggactccttgtccaattttattcttcatttggttgctctaaacccttatctrttcctaaaatcttataccttacatccacccacttaccagagaagctgactgaacattttaacaacaataaaaaaaaaaaaactcacaaagactattagtagtagtttctgtctgtgtccctttttcctatctccacacacctatatccatagtcattcttttctctccaaaggacatggatatccctcttttatg

SEQ ID NO: 648135 - DNA, 579 bp, Homo sapiens
gaaggagaaataaatgctttctctgaccaacagaaaytgagggaatttattgccagtaacttgccttgcaggaaatgttacaagacattctttagagagaaataaaataatacagatcagaaacttggatctacataaagaagacaaaagcatcaaagacggaataagtgcaggtaaaatgaaacttttaattttttaattcttaactaatctatcatataagagcttgttcaaaataataatggcaccaatgtatttaattatactttcacaaacaaaatctgtattaatctcttcccatataatgaatgacaccaaaatttagtacttaaggcaacaaacatttattacctcacagtttctgtggttcagaaatgcaagctttgctgggttactgtgacttaagttctcttatgaagctgtggtcaaactcccaggactgtatctaactgagagctacgcaccagaggatcggggggtatttgcctagaaactcactcatgggtttgacaagattccgttgtttccaggttgttggctagaagtctctttctgttgcttgccatgtgagcctcacca

SEQ ID NO: 648136 - DNA, 475 bp, Homo sapiens
tgcttgccatcagagcaactggtgaggatgtgccaaatctagattaaacttgaaaatatgcttgaccattgtgtttcctggtcctttcagatcagcttgctgcaattttgattcatggagccctcaaatatagctgtgaaattaagttagaggtataacaatgccttaaaatgtgccaggttatgaggtaattaggttggttgtctccagagttaaactgccaggaatagatgttactcttatactgtaaaacactatgaaatcagattactttcaaatgatgtatcacaaagtcatgggattggggggaagcagttgtgagtrtggaaacccagggcttacatcacagcactgtcttggttttttaagagacaaggtctcactccattgcctaggccagagtgcaggggcatgatcatatcccagcttgtcttatactaaatatgagaacaatgtttccactctcgcctgtaaa

SEQ ID NO: 648137 - DNA, 566 bp, Homo sapiens
agggagattccagccttcttttccttatgtttcctctacctggttaagtgaccaaccagcctagggttctgactacaaacaaatcaggattctgcacctccaaaggttttgctatcctggccctgtgcccatgctgaaggcagattatcaggccacttctgaggctctggaggcctatgccagggatggcctttgttcggggttttgtcctgcttttctgcccattatggttgtttctctaatgtaaattatgaaggctttgatgttttcttgcagtagcattcaaacaaaacaaagcaaaaatgcagcagctgttgcctgtattaatctctgagattttgacctggaaagaaaaagaatcattttttttttcttgaaacctaagagtcccaagggaagcagagcagtctgctctaaatttttttaaataaaatgtcatcatgctctaaaaatgatggcayaaattaattctctgggaatttatccttgtccaaaatgagacccagtgcaaccaagagatgcctgtacttaaccattccctcagtgaatggggtaaattgtgaatg

SEQ ID NO: 648138 - DNA, 369 bp, Homo sapiens
tgctattttttttttatctaggccctgtccctttgatgttaagtggtggagggagttggcgggatttgcctctggcttgcggtatatctagtggattgtatcaaatccagaattcaagttctttccatgtcttgaaaacaggcaggatttatcagaacttttataaatgttgtgaaaaatgaaggtgaataaacacctgtttttccagcatctagtatacatcttaaaatctgagaagtgaacttctctgttttgattrtaaaaggaaagagaacggtaacacagaaactttgtgtcccaaatagagcacagataacttgtctattactcatagtaatcctcccttaaatttgtataacatgcgaagtt

SEQ ID NO: 648139 - DNA, 585 bp, Homo sapiens
tcagctcagtaagggccacttgcagtaggaatatgaccctaaccagaagactcagtggatccttatcaccttcatagaaaggtactcaccatccatgtcaacagccaagccaacacgctgttgctccaatacgtaaaaggcacttctgtagggctggcatgagtcagtcagttcaagacaacctgaaggagttgaataacatctatccagtgagtcctgcaagacttcaggcyctttctcatccagcagctccctgctgagcctggaaaagtgggaaaaagtaaagaataagccagggggaatcagaaaccacacagccccagctagatttcatggctaacataaggaagagtttgaaaagaaaaaggacagatccattaatgaggtaacaaattattgcctttatgttgggatagactagggccaggtagaaaaggatgaaagagaaagacacacacacacacacacacagacacagacacacacacacacagagcgagctgagtgaattggtcaggtgacacactgatgagggagtcaaaggacactctgtatttgtgctctcaggacacacagtgaacagtg

SEQ ID NO: 648140 - DNA, 585 bp, Homo sapiens
tcagctcagtaagggccacttgcagtaggaatatgaccctaaccagaagactcagtggatccttatcaccttcatagaaaggtactcaccatccatgtcaacagccaagccaacacgctgttgctccaatacgtaaaaggcacttctgtagggctggcatgagtcagtcagttcaagacaacctgaaggagttgaataacatctatccagtgagtcctgcaagacttcaggccctttctcatccagcagctccctgctgagcctggaaaagtgggaaaaagtaaagaataagccagggggaatcagaaaccacacagccccagctagattwcatggctaacataaggaagagtttgaaaagaaaaaggacagatccattaatgaggtaacaaattattgcctttatgttgggatagactagggccaggtagaaaaggatgaaagagaaagacacacacacacacacacacagacacagacacacacacacacagagcgagctgagtgaattggtcaggtgacacactgatgagggagtcaaaggacactctgtatttgtgctctcaggacacacagtgaacagtg

SEQ ID NO: 648141 - DNA, 604 bp, Homo sapiens
aaatatttttcacattactccaattatggccttatatgacaaaaaagaaaaaaaaatccctaagagaaccactaacatccactggttttgtagaaacaggatacccttagtgcacttaaagttggaaaaatggctctgcctttagggccatgcaatgaaacagactgtgtggtagttgacacaggaagagcagagcagagtttataacaatggccacaagacagttaagraaatgctttggggcttttaagcagcagataaggtgactcagaggaatgttagacaatcgcagaaaagcaacttcagcaaagtttttgattcagtgggcactgcatacttagtccatgctctgcatctgttctttcacagtctgtcccttcatcgacttgggcctacaatgacttttctgggaggggacagggatcaacacaacagcatgcacacacctgaaataaagaatgaatttctgattttcagattttagtctctgacataaccaaagaagtgactaccatagatgttaactttttttttttattattatactttaagttttagggtacatgtgcacaacgtgcaggtttgttacatatgtatacctgtg

SEQ ID NO: 648142 - DNA, 604 bp, Homo sapiens
aaatatttttcacattactccaattatggccttatatgacaaaaaagaaaaaaaaatccctaagagaaccactaacatccactggttttgtagaaacaggatacccttagtgcacttaaagttggaaaaatggctctgcctttagggccatgcaatgaaacagactgtgtggtagttgacacaggaagagcagagcagagtttataacaatggccacaagacagttaagaaaatgctttggggcttttaagcagcagataaggtgactcagaggaatgttagacaatcgcagaaaagcaacttcagcaaagtttttgattcagtgggcactgcatacttagtccatgctctgcatctgttctttcacagtctgtcccttcatcgacttgggcctacaatgacttttctgggaggggasagggatcaacacaacagcatgcacacacctgaaataaagaatgaatttctgattttcagattttagtctctgacataaccaaagaagtgactaccatagatgttaactttttttttttattattatactttaagttttagggtacatgtgcacaacgtgcaggtttgttacatatgtatacctgtg

SEQ ID NO: 648143 - DNA, 604 bp, Homo sapiens
aaatatttttcacattactccaattatggccttatatgacaaaaaagaaaaaaaaatccctaagagaaccactaacatccactggttttgtagaaacaggatacccttagtgcacttaaagttggaaaaatggctctgcctttagggccatgcaatgaaacagactgtgtggtagttgacacaggaagagcagagcagagtttataacaatggccacaagacagttaagaaaatgctttggggcttttaagcagcagataaggtgactcagaggaatgttagacaatcgcagaaaagcaacttcagcaaagtttttgattcagtgggcactgcatacttagtccatgctctgcatctgttctttcacagtctgtcccttcatcgacttgggcctacaatgacttttctgggaggggacagggatcaacacaacagcatgcacacacctgaaataaagaatgaatttctgattttcagattttagtctctgacataaccaaagaagtgactaccatagatgttaactttttttttttattattatactttaagtwttagggtacatgtgcacaacgtgcaggtttgttacatatgtatacctgtg

SEQ ID NO: 648144 - DNA, 469 bp, Homo sapiens
tactctcctatcctcaacacctccctccacaatccattattctgttttagatctcaaacatgctttctttattattcatttgcacccttcatcccagcctctctttgctttcacttggactgaccctgacacccatcaggctcagcaaattacctaggctgtattgccgcaagtcttcacagacagcccccattacttcagtcaagcccaaatgtcttcctcatctgttacctatctcggcataattctcataaaaacacatgtgctctccctgctgatcctgtctsgctaatctcccaaaccccaatcccttctacaaaacaactcctttcctttctaggcatggttagtaaggtcagaattcttaacaagagccaggaccgcaccctgtaggctttctgcccaaacaacttgacctttctgttttagcctaggcctcatgtctgcgtgcagtggctgccactgcttt

SEQ ID NO: 648145 - DNA, 612 bp, Homo sapiens
atatctcattttggttttagtttgtatttccctgatgattagagatgttgagcatttattcctatatctgttgttcatttgcatgtcttcttttgagaaatgtctattcaggtcttttgcccattttaaaatcaggttatttgtacttttgttgttgggttgtttgagttccttatatattttggatattaacccttcagcaaatgtatgatttcttataggaagaaagataaaatgtggaygggggagagggtaaaaagagaatgcaaatagtggggccgtaaccttctcacaaccataacgtaatcatacctggcacagcacagggcacaaagtaggctctctttttataggttgtctctttggtttattgattgtttcctttgttgtgcagaagctttttagtttgatgtaattccatttgtctacattggattttgttgcttgtgcttttcaggttttatcccaaaactttctgcctagaagcttttcccctatgtttttttctaccagttttgcagtttcaggtctcacacctttaatccattttgaattggtttttgtatatggtgagagataaggatctaatttttttcttctgcttatgtttgt

SEQ ID NO: 648146 - DNA, 602 bp, Homo sapiens
aaccacacaatgaagactgcataataaccagctaacaacatgatgacaggatcaaacctgcacatrttgatattaaccttgaatgtaaatgggctaaatgcaccaattaaaaggcacagagtggcaagttggatgaagaagcaagatccaactgtatgctatctaaaagagacccatcttacatgcaatgacaaccacaggctcaaagtaaagagatggagataaatttatcaagcaaatgaaaaacagaaaaaggcagggattcaaattctaattccagataaaacttgactttaaaccaacaattatgaaaacagggaaagaaggggattacataatggtaaagggttcaaatcaacaagaatacttaactattttaaatattatgcgcccaacacaggagcacccatatttataaagcaagctcttagagacatacacggagacttagataagcactcagtaatagtgggagacttcaatattacactgacagtattagatcattgaggcagaaaactaacaaagatatttgagacctgaactcaacatttaaccaaatgggtctaacaaacatctatggaaatatccacacaaaacca

SEQ ID NO: 648147 - DNA, 602 bp, Homo sapiens
aaccacacaatgaagactgcataataaccagctaacaacatgatgacaggatcaaacctgcacatattgatattaaccttgaatgtaaatgggctaaatgcaccaattaaaaggcacagagtggcaagttggatgaagaagcaagatccaactgyatgctatctaaaagagacccatcttacatgcaatgacaaccacaggctcaaagtaaagagatggagataaatttatcaagcaaatgaaaaacagaaaaaggcagggattcaaattctaattccagataaaacttgactttaaaccaacaattatgaaaacagggaaagaaggggattacataatggtaaagggttcaaatcaacaagaatacttaactattttaaatattatgcgcccaacacaggagcacccatatttataaagcaagctcttagagacatacacggagacttagataagcactcagtaatagtgggagacttcaatattacactgacagtattagatcattgaggcagaaaactaacaaagatatttgagacctgaactcaacatttaaccaaatgggtctaacaaacatctatggaaatatccacacaaaacca

SEQ ID NO: 648148 - DNA, 602 bp, Homo sapiens
aaccacacaatgaagactgcataataaccagctaacaacatgatgacaggatcaaacctgcacatattgatattaaccttgaatgtaaatgggctaaatgcaccaattaaaaggcacagagtggcaagttggatgaagaagcaagatccaactgtatgctatctaaaagagacccatcttacatgcaatgacaaccacaggctcaaagtaaagagatggagataaatttatcaagcaaatgaaaaacagaaaaaggcagggattcaaattctaattccagataaaacttgactttaaaccaacaattatgaaaacagggaaagaaggggattacataatggtaaagggttcaaatcaacaagaatacttaactattttaaatattatgcrcccaacacaggagcacccatatttataaagcaagctcttagagacatacacggagacttagataagcactcagtaatagtgggagacttcaatattacactgacagtattagatcattgaggcagaaaactaacaaagatatttgagacctgaactcaacatttaaccaaatgggtctaacaaacatctatggaaatatccacacaaaacca

SEQ ID NO: 648149 - DNA, 611 bp, Homo sapiens
ctcttcaactatgacaattaattatcaacatattggtcataaaattgaatcactggacatataatattaagcaaatagttatggaagccatttactttcttcagaaaaagtcagtctgatcagatgagcattaatctcttctgtaaattcaaaaatagtcattcagtattggcaggtgaagcagtaatattcagcagatatttacttagtctctgctataagcaaagcaggaacacaaagtatgtataactcagtaattgctcagaaaaakcttatatttcataatgaagataaaggaagtacatttataactatttaatatatcttgtagtaaagtaggataaatgctgcagagagatgcaaagtaagtgtatgggctagagatgttcaaaggttaaaaaaatagtattttttgatggagtctctatgaaaggtcacttaaagctgagctattcagaataagatcttgtggacaaagttagttatgacctaggctctaagaatgggtaagattttgacaggtgagaggagtaggtgagttttttttatgatagcataatagctatcatttattgagttccttgagaaagatgctctaccagtctctttac

SEQ ID NO: 648150 - DNA, 569 bp, Homo sapiens
tttccctcttgtgtttttgaattggaatgatcctttcccatcaatccattttccstctcctcctttgaaactcaatgtacattttaggtgtacctggccatgctgcagattaaactgtatgaaattatgaaattgtaggttaaaaaactgtcacatattggaaagtacatatgatttaacctggattcatctctttattttatgtgcaatcagcatagatatataaaaattttacaataaagaaaaataaagcacattaggtcacagtgcttgttactggtgaggctagtattttaaccctgatgtgtctaatttgaaatcgtgtactatttttactgcaataatgaatgaatatttgttaagtggaatatgtgtatggtatgctctatagacaccaagaacaatgccatatcacagagtgctcagtaacaattgaatgaatgaacagatgaatgaatgaatatgtgttcaaccatatcacaaatgagcatttattattccacagttgattgttaaagtaagtgaagaagacaacataaaacattatatggagaagtaaagaagtagtg

SEQ ID NO: 648151 - DNA, 503 bp, Homo sapiens
tttcctaggactcagagtctaaagcttccaaccagcactaaattcacattaaaaattgattgtgccataatttttaagtacagccagacctgatggcgtatgttagcatttccttgaggtgagataaagctgtgtggagtcagtctctcagctgattggcaggacaaggtggggaggaggaagccaacagggagagggagcaggcactcctcttctccgcagacatctaccttttttatagcctttgggtctcaatgtgggagaagacacagtcttctattgccatggcaacataagtgcatcacagtgggattaaggggttgaaaggcaagaaacaccaagcttggaggagttggggcaattgagagaggatggacttttgctagaaataaacacaataaggtggcagggcaatagaagagagtggatttatggyttatgacattcctaaaatatctttatttaataatgaaaacttcattatccgggcctgggttgaagtg

SEQ ID NO: 648152 - DNA, 576 bp, Homo sapiens
cttttttctgtattttttattgcttgcgccctcagatttcctgacttttatccaaatttcaccttatcagagtggacttccatatctaaattcatacacattattatgtttagtagctttttccctccgttagaatgaaaatgaaattacattagtctatttcattcactcttgtatcttaatcacctagagaacktctagaaactagcaagtgcccacagtatttgttgaaggagtgggctttgttacacagtactgtctagaatgtactgtctagaatgtatgtatcaataatgttcacactgagaactgcacactgatgggcagaaatccatgttttgcctttgttttcttgtctttagttacagtctctcatattttcttaacttttcattattctgttttctctcttactaattcttcctttctttctccttccttctctttttcttttctgtgttttgattctctctgtgctactttccaatctcttttcctttctctttcttttgggtgttttttttttctttgtgaatatcgcaaatgttttaaaacatataactcattagtaagtta

SEQ ID NO: 648153 - DNA, 540 bp, Homo sapiens
aaaaccaggtgaggcctaatagtacctgatttatctttgtattgctcaaaacggctctgaagagatataaaaaacaggcttgaatcactgacaccatcccttctccacccctggcagtggccacatggtgcagaaagtgtctctggacactgagaacacagcaattgtgaggcaatgaattcagtgtatcctgttagagcagaaaggaacactggatcaaactcagctgatgcctgtccatggagggagaatttaaaccagccccagacagaggggaatttccaatcccagygatctgaacttgctgcaaatctcatcactgtgggctacagtgctctgtgtccctgaaggaactttaaaggcagtctaggtcataaggactctaactcttaaatgagtcccagtgctgaactaggctgaaagacagtggactgtaggggcaggtgacataatgagacaccaaccagggcagctaagagagtgctggcatcacctctcccctaacctaaggctgtacagctcacagctccaaaaaagacc

SEQ ID NO: 648154 - DNA, 666 bp, Homo sapiens
aaccaccaccaccacaaccaccaagtacaacagcataaatcaaaccagaaaatgttcctaggttttagtagggaagttttgatcctcaggtagaaaagtagggctatgctatctactttccccttgagatttatttttcattgggtgcatttcactttgactttcacagtcataaacttgccctgaaccaaggagcacaaacttgaagaaaggagcacaaacttggacaaaatccctctcccgaacaggctgggatttaaaaaagtaactgtactgagtatcatggctgaaccaaaaggaagtaattatttaaagcaatcataaaataattttttagattaagttttttcatatttagattacctttctggtcctctgaaaactgagctttagccacatagacagagcagctttcttttacacagaatccttcatccttgtctttagttaggcatctactgagcgtaagccagaattctcgcccccgaatgagcacaaaaggcccacttttgaaaagtacgtattttctttttctttcttctttyttttctttctttctttctttctttctttctttctttctttctttctttctttctttctttctttctttctttctttctttctttcctctctttctctctttctttctttcctctttcttta

SEQ ID NO: 648155 - DNA, 666 bp, Homo sapiens
aaccaccaccaccacaaccaccaagtacaacagcataaatcaaaccagaaaatgttcctaggttttagtagggaagttttgatcctcaggtagaaaagtagggctatgctatctactttccccttgagatttatttttcattgggtgcatttcactttgactttcacagtcataaacttgccctgaaccaaggagcacaaacttgaagaaaggagcacaaacttggacaaaatccctctcccgaacaggctgggatttaaaaaagtaactgtactgagtatcatggctgaaccaaaaggaagtaattatttaaagcaatcataaaataattttttagattaagttttttcatatttagattacctttctggtcctctgaaaactgagctttagccacatagacagagcagctttcttttacacagaatccttcatccttgtctttagttaggcatctactgagcgtaagccagaattctcgcccccgaatgagcacaaaaggcccacttttgaaaagtacgtattttctttttctttcttctttcytttctttctttctttctttctttctttctttctttctttctttctttctttctttctttctttctttctttctttctttctttcctctctttctctctttctttctttcctctttcttta

SEQ ID NO: 648156 - DNA, 596 bp, Homo sapiens
aactttgtgaaaccccctctctccaaaaaatacactcattagctgggtatggcggtgcatccctgtggttccagctacttggaggctatggtgggagtatcgcttgaacctggaacgctggggttgcagtgagctgtgatcatgccactgcattccgcactggacaacagagcgagaacctgtctcaaaaaaaaaaaaaaggaatctgctgtctttctcagcgrccactggcctcagaaacatcttatttcaaaacctccatgaaaatattcttgggtctgttatcaccaataccacttacaaactaaggtggaaatacgactctttacttttgttattgtcattgttattacaggttagggagaaatacgatagaaacaatgttctttgagactctaccatataagaagcattctggtattcataataattaacctacacaataatgccataattttgtgtattattatacctatttttaaatatactgagaaattaggtgatgtgttcaagagttggagccaggaatgaaaccaagtcagactgattttaaatttgcactttctcgattatgcaatactctctgcatgaacaat

SEQ ID NO: 648157 - DNA, 596 bp, Homo sapiens
aactttgtgaaaccccctctctccaaaaaatacactcattagctgggtatggcggtgcatccctgtggttccagctacttggaggctatggtgggagtatcgcttgaacctggaacgctggggttgcagtgagctgtgatcatgccactgcattccgcactggacaacagagcgagaacctgtctcaaaaaaaaaaaaaaggaatctgctgtctttctcagcggccactggcctcagaaacatcttatttcaaaacctccatgaaaatattcttgggtctgttatcaccaataccacttacaaactaaggtggaaataygactctttacttttgttattgtcattgttattacaggttagggagaaatacgatagaaacaatgttctttgagactctaccatataagaagcattctggtattcataataattaacctacacaataatgccataattttgtgtattattatacctatttttaaatatactgagaaattaggtgatgtgttcaagagttggagccaggaatgaaaccaagtcagactgattttaaatttgcactttctcgattatgcaatactctctgcatgaacaat

SEQ ID NO: 648158 - DNA, 560 bp, Homo sapiens
aaaaagacagggagaacccagagccatgagaactggctgggttgaggaggcagagccgaaagtcaggaaagatagcttgaaccttcaggagagagtaccacggaggaaaacggctgaacaggaagaaaactctaaatgtttgcaaaggattcaccccaagcattcaggtagttaccagtcagtgtacacatacgagaaaatgactggaggtcaaggagagaactacctgaaaggattaatggtaacagtgcctattgcctacacaaggactgaaatagtgcatagaaccaccaaccaggttggaaaatcttatgattcatgggcattggatagagtatacagaaggctcttgactcattagtggggactaataagcactagacaaactgctgctccagtcttgtctgaacacgtccgaaatgcaagaaactgttttcttgcaggaaaataattaaactgttttcaatgactgtaatgcatttcagaacaaagctcaagaatattgacagaaatayaaaaatatgcaatgtccaaccagataaaattcagaatgtctaagt

SEQ ID NO: 648159 - DNA, 200 bp, Homo sapiens
gtgcggggtctggtcagcagggacctggtcaatgtgggctgctgagcactgcttggataagccaggtgcaatgtgcattattgaaggccctgtggacagctgggatagcccagtgatgcccaagggcctagtcraaagtggacaaagcacatgtttggatggacctgggagatcctgctcagagattctgagaggacaaa

SEQ ID NO: 648160 - DNA, 365 bp, Homo sapiens
cccctctgaccaggccctcattgaccaggctccaagccactaaggccccacattgaccagggaccaggcctctggtatactgtatatgcctcaccaaccagtttttcattgtttatgttccaactgatcaggccccactaataaggccaccactgactaggtccccccactgaccaggcttccaatgattaggtcaccaggtccccactgatgaggcctttactgaggaggccgccactaaccaggcccctgctgatcaggtcccacatgactaggtcctgatgaccaggtcatctctgaccatggtccrctgaccaggcccatgagcaacggggctcaaagtctcattacaatgtccccctcag

SEQ ID NO: 648161 - DNA, 611 bp, Homo sapiens
caaaacttgggggaaaaaaaaagaggcagagagaaaacaggttatatcagccctatctcacaatccacaagttcatcctgttagaggagtaactatgtaaaacaaattttatctgttgaatgtcctatttagttaatcgcaaaactgtacgagaacacacttgtgacttatttagcagcttgtttgttcgctttccactggcttcacaaatgtcctttggaaatagaatgtacatttggaaccttgtacaccttttctttctccagtaccctcttgtcacttccatcactaaggtgacagaagcaactaggggcaatgcatatgtagcacacctgggtcagaggtatcctccaggggaaggatcagacctgcttgaaagcatgtcgttggaattgggaggcttctagtagctataacataagcactgatgtttactcttccctgccctccactttgatcactctgggaaacgttttttttcttaaaaaatcaattgtattgaaacataatttacataaaataaatactattttaaagtgcacagtttgctgagttttgccagrtgtaaccatccaggtgaataaaattgattaaactgatctttcaaataa

SEQ ID NO: 648162 - DNA, 611 bp, Homo sapiens
caaaacttgggggaaaaaaaaagaggcagagagaaaacaggttatatcagccctatctcacaatccacaagttcatcctgttagaggagtaactatgtaaaacaaattttatctgttgaatgtcctatttagttaatcgcaaaactgtacgagaacacacttgtgacttatttagcagcttgtttgttcgctttccactggcttcacaaatgtcctttggaaatagaatgtacatttggaaccttgtacaccttttctttctccagtaccctcttgtcacttccatcactaaggtgacagaagcaactaggggcaatgcatatgtagcacacctgggtcagaggtatcctccaggggaaggatcagacctgcttgaaagcatgtcgttggaattgggaggcttctagtagctataacataagcactgatgtttactcttccctgccctccactttgatcactctgggaaacgttttttttcttaaaaaatcaattgtattgaaacataatttacataaaataaatactattttaaagtgcacagtttgctgagttttgccagatgtaaccatccaggtgaatraaattgattaaactgatctttcaaataa

SEQ ID NO: 648163 - DNA, 543 bp, Homo sapiens
gttcacagtttattatccattctatgtactgctacattcaattggttattatgttttaaggacttttgagtctatgtttatgagggataaacatcaaagttgtataatgcctttgtctcgatttggaatcggcaatactgggttcataaaataagataggaaatgtccctttaaattttctttcttttttttttttttttttgagacggagattcactcttgttgcccaggctggagtgcaatggcacaatttcggctctccacaatctctgcctcccagattcaagctattctcctgcctctgtctcccraggagctgggattacaggtaagcgccaccatgccctgctaattatgtacttttagtagagatgggggtttctccatgctggtcaggttggtctcaaactcctgaccccaggtgatctgcccgtcttggcctcccaaagtgctgggattacaggtgtgagccactgtgtccatcccttaaattctatttcttaaaaagattccgttcaagattgatattatagatactcctca

SEQ ID NO: 648164 - DNA, 543 bp, Homo sapiens
gttcacagtttattatccattctatgtactgctacattcaattggttattatgttttaaggacttttgagtctatgtttatgagggataaacatcaaagttgtataatgcctttgtctcgatttggaatcggcaatactgggttcataaaataagataggaaatgtccctttaaattttctttcttttttttttttttttttgagacggagattcactcttgttgcccaggctggagtgcaatggcacaatttcggctctccacaatctctgcctcccagattcaagctattctcctgcctctgtctcccgaggagctgggattacaggtaagygccaccatgccctgctaattatgtacttttagtagagatgggggtttctccatgctggtcaggttggtctcaaactcctgaccccaggtgatctgcccgtcttggcctcccaaagtgctgggattacaggtgtgagccactgtgtccatcccttaaattctatttcttaaaaagattccgttcaagattgatattatagatactcctca

SEQ ID NO: 648165 - DNA, 543 bp, Homo sapiens
gttcacagtttattatccattctatgtactgctacattcaattggttattatgttttaaggacttttgagtctatgtttatgagggataaacatcaaagttgtataatgcctttgtctcgatttggaatcggcaatactgggttcataaaataagataggaaatgtccctttaaattttctttcttttttttttttttttttgagacggagattcactcttgttgcccaggctggagtgcaatggcacaatttcggctctccacaatctctgcctcccagattcaagctattctcctgcctctgtctcccgaggagctgggattacaggtaagcgccaccatgccctgctaattatgtacttttagtagagatgggggtttctccatgctggtcaggttggtctcaaactcctgaccccaggtgatctgcccgtcttggcctcycaaagtgctgggattacaggtgtgagccactgtgtccatcccttaaattctatttcttaaaaagattccgttcaagattgatattatagatactcctca

SEQ ID NO: 648166 - DNA, 610 bp, Homo sapiens
  misc_feature 1, 2, 3, 4, 5, 6, 7, 8, 9, 10, 11, 12, 13, 14, 15, 16: n = A,T,C or G
nnnnnnnnnnnnnnnncatgataaactccagcaccgtgagcaaatacggtatgtctcattgtcargtatggctagacagcagcggtgtaatatagacctttcaagccctggtgtagccccctgcctttgaaatctgtgtgagatgacaaaactgactttcatttcccttggactttctcaaggtatccttattaagaaaaaaaaaaaaaaagcctaaaacccataaatttaatctactgcctgccaatcacaatggtttctgctgtcagacattcatgatacataaccacaaaatttaaatgttattgtttcatacaagaagaaaatgttgctcacgactaccctcaaatagtcatgtgacaactcagtgcgtttcctttgtttccctcctccaccactgaacaatagcaccagcaggaaatatgtaactgatgttccacatgtggaaggagctacacaataataaactctaaagtgggtcattgttcctacctatcgtataagagacaattgcagatgagcaaaagtttgtttcccaacatgtatttcatttcagattaatagtgatgcttactttattctcaaataacttccaatttaaaaaaaaaaa

SEQ ID NO: 648167 - DNA, 480 bp, Homo sapiens
gacagtccccgtacccaagagtccatgaaatcattcaaaccagccaatcctaagcctgtttaccctgccttccttcccatggaaactayaatactggcccttgctcatagtttcttctctccctctgcctcctaactggatgtagtgcttccccatgtaaccccccatggtgtggcgtgccacttctcttggaatctatgagtatagcaaactatcttttcaatagcagtcacctcctggtgtgttgctttatcatgcctaaataataataaaacctatgttgaaacagctgtgtgaccttggaaatggggcagaacttctgccttcatgtcttcctcaggaaaaagaggacaatatttcctgtctaatagggctcctgtgaagatcaactacaataatatatggcatgtacttagtatatagtaagtgctcaataaatactgatgccccaagttaacagacaaggaaagcaggattttg

SEQ ID NO: 648168 - DNA, 480 bp, Homo sapiens
gacagtccccgtacccaagagtccatgaaatcattcaaaccagccaatcctaagcctgtttaccctgccttccttcccatggaaactataatactggcccttgctcatagtttcttctctccctctgcctcctaactggatgtagtgcttccccatgtaaccccccatggtgtggcgtgccacttctcttggaatctatgagtatagcaaactatcttttcaatagcagtcacmtcctggtgtgttgctttatcatgcctaaataataataaaacctatgttgaaacagctgtgtgaccttggaaatggggcagaacttctgccttcatgtcttcctcaggaaaaagaggacaatatttcctgtctaatagggctcctgtgaagatcaactacaataatatatggcatgtacttagtatatagtaagtgctcaataaatactgatgccccaagttaacagacaaggaaagcaggattttg

SEQ ID NO: 648169 - DNA, 612 bp, Homo sapiens
ccatctgtgtcacaagtcatatctatatgtctatatatctatacctatatccatgtctatagatgtctgtttctggattctctgttacagggataggcaaactaaatcctgctgcctggtttaataaattaagttttattgaaacacagccatgcccattcatttgtgtattgtgtatgggtactttcatgccacagcagcacttgagttcttgtgacagagaccagttgacctgcaaaacctaaagtattcagtatctggcctttttgagagaaggtttatgacccttgaattctgttcctttttctttttaaaaaattatacttgcactgatgctatactgtcttcattgctgtagctttacaatcaatcttgatttttggtagagcaagcmtttcaatattgttcttcaggattgtctgggctagtttggggtctttgtatttccatacaaattctattcagatatattttgattataaaatttttttttacaaatcacataattttagcaacttgttttataaatgacttaatatgtagtggaaatctttccataatattaaatattcttctacaatattatttttaatggcttcataatattcaatt

SEQ ID NO: 648170 - DNA, 588 bp, Homo sapiens
gaatttcccttctccctctgtctccccaccatcctcagtgcatcccaggtgaccctgtgrcatggtgtgctccctcctcttagaaacagtatgtcataaactgtattttctatggtaatcatctcctcatctgttggccttcttatacctcaaattttctattaataaaatagattttaagtcaggcacacaatccatggaacttcccactttcaagggaccatgcatataaccacaagtggcatatcagctgtgaccagtattgttccttccagaatgttctgaactatataagaccctagagtaagggaaagaggggctggcttgtggagaaagagtcagacttagtataaatttaagaaataaaataacatgatgcttctttttctgagtgtggtgattacaaactactaccatctacatgtaagttttggtttttgaggaatctgtgataatccaaataagtagttattcctattcatttgctgctttaaatttttgaagtaacttgcaaagatttatttttaatcatctctagcccttaccatctccccctttgatctcatgacacatttaaacactgggatg

SEQ ID NO: 648171 - DNA, 589 bp, Homo sapiens
tcttccagacagaaaatcaacaaagaaatattgaacttaatcttcactatagacaaaatgtgcctaataaatatttacagaacattttatccagtggctgcagaatacatattattctcctttgcacacagatcattctcaaggatagaccatattttaggccacaaaaccagtttttaaaaattcaaaaaaaaaatgaaattatgtcaagtatctcctctgatcacaattgaatgaaaataggaattagtagcaagaggaattttggaaactatacaaacacatggaaattaaacaatatgcccctgaatgactactgggtcaatgataaaatcaagaaggaaatggaaacatttcttgaaacaaatgatggtgaaaatacagcrtaccaaaaccaatatgatacattgaatacagtactaagagaaatgtttatcatgttgtgtctaaatcaaaaagtagagaaacttcaaataaacaacctaatgatgcatcttaactagaaaagcaagagcaaacccaagccaaaattagtagaaaaaaataaagatcagaacagaaataaatgaaattaaaatgaagaaaacaa

SEQ ID NO: 648172 - DNA, 626 bp, Homo sapiens
aaactcactcactatcatgtgaatagcatgggggtaactgcccccatgatctaatcaccttccaccagctccctcccttgacacatggagattacaatttgacatgagatttgggtgaggacacagagccaaaccacatcattctaccctggcccctctcaaatgtcatgtctttttacattgataaatgcaattttcccctctcaacagtcctccaaagacttaactcattccagcattaatgcaaaagtccaagtccaaggtctcatgtgagacaaggtgagtctcttctgtctatgagcctgtaaaataaaaaacaagttagttacttccatgatacagtgggagtgcrggcattgggtaaatgttcctgttccacattggagaaattggacaaaacaaaggggctacagactccatgcaagtctgaaacccagcggagcagtcattaaatcttaaagccccaaaataaatctcctttgactccaggtctcacatccaagacacactgatgcaaggggctggctcttaaggtcttgggcagctctggccctgtggctttgcagggtccacctcccacagctgctttcatgggctggcattgggtgccttcagcttctccaggt

SEQ ID NO: 648173 - DNA, 573 bp, Homo sapiens
ttaaaaattgaaatcatattaagtatcttctcagaccacaataaaataaaattagaaatcaatactagaaactttggaaactgtacaaatacatggaaattaaacaacatctcttgagtgaccattgggtcaatgaagaaactaagaagaaaataaaaaaattctcaaaacaaataaaagtagaaatacaacataccaaaacgtataagatacagcaaatgctgtactaagaggaaagtttagagcaataaatgcctacatcagataagtagagagattttaaataaataatctaatgatgcacctcagggaactagaaaaacaagaatgagccaaaccaaaaatcagtagaagaaaagaaataagaaagatcagaagaaaactaaacaaatagaggctgaaaaaacaatgcaacagataacaaggccaggcccagtggctcatgcctgtaagcccaacaatttgggaggccgaggagggcagatcacttgaggtcaggagtttgagaccagcctggccaacatggagaaacccratttctactaaaaatacaaaaattagccgggcatagta

SEQ ID NO: 648174 - DNA, 499 bp, Homo sapiens
ttctgctttcacttcaaatgccactttttcagagaaagcttcttcaaaactaaaattatattaactctctcatttatataccccaagacaccccttttactgtttcttcatattagtttgtaattacacatttactgattatttgattaatgcctccctcccaaccaggatgatgttaagtcgctgctagcaagggttatatttattgtgatgtttctgttacccctcatgcttggcacaatgcttggcacttagagcacatgcaataaagaaacatgttgwatacgtttataaattgctggcacttttatgattacaccaaagcttaattcaaacagcctggctttaaactatgctttctggactgaaattactactgcaagattgatattcgtaaatatttaacagtgaaaataaaagtattagaaaatgtacaaaacaagtcatattcatagttcagttttcaactgaattatttttatttataacaaggcatatt

SEQ ID NO: 648175 - DNA, 599 bp, Homo sapiens
ctagaacacaccattgcagattttctggccatattccaggaagatgacaacactgagactcatactgaggtcacataacactcccactcccacctccactgagcctcccttgctatggtaccacagttacatcaaggtgactatgactaaccaagccctttaggcctcaagttctttcccttcagcatcagtctgaarcataaagccctcaatctcctttatgcatgttcccacattgttctgaaacctttcatttttaatctcggcacctaattccatgataagtagtcttcttaaatcttcagcctctccattgaaccatctaactacctcctgctttcataaagacttatagattccataagggtaaagtctttatagttattttgtttgtttgtacagcaatatatgttctgctccatccaacaaccatggttaaatgtctggaagtgaggtaagcattcttctatcccttttttgccatctttttagcagtattcttctaccgtatgggggaaagtctttatcctttgtgattactaccatatgtctatgccacacccattctttctgattgcaatcactagatgacatcttag

SEQ ID NO: 648176 - DNA, 600 bp, Homo sapiens
catgatttatttttacaattatttgatgagaattagcattttatcagaaaaacactgctgtaatgttgataaagcattgttctgaaagagagggagcttccctgaaaaatttaacagggtagtcattcagctctttcaattctcaacaatctctctatgtgactccatctatgtcaacgtttttacaccatacaatagctcagattgttaacttgataaatccagaatagagttctctcttgttctacaaacccatacatctatatatcccttcctatttgatatttactcctgaacatccttcaggaacttcagatccactgaacatatcttcatcatcttcactgtaatttgtggtccctttgagaagtgtcgcaattactgctgcatttggaaacagctcatcttgactttccccataaagactcaaaatctccttgcactaagagacataaattgccaatgatttttagtctgtktttctcacagtgggttttgttcttgcagcaaagaatagtataatcttctataactgctatagatattaatgaataaaatgttaccaactcttctcatcttgttggcaaaaattctaccggt

SEQ ID NO: 648177 - DNA, 626 bp, Homo sapiens
tttcctgaattggaaccaaagggacaaatgtagcaccaaagaggaaaagaaaaataaatacagtaatgaaggtagttcatgaattgacagtcttgtcaggtacacttgcatctgtcatgagaaatgactagagttttacctgatatctaaatggaaagaatatctctcatatatatatacgtatatatacgtatatatgtgtgtgtgtgtatatatatatatatatataaataaatttttagaagtctattctttaaatcttttcaacaagcttaaagcaagtattattgttatggaacagaactggggtgcacttgcctggtgcggtaagaccagatatctataycaaggtttgcagcagtagtaaggatttattttcagggtgccaagcaaagagaatcgggctgttaatgcttaaatcccaacttctctgatggcttataggtgagggcttttaaaagcaggggtaaattttaggaaagcagaagttacaggcaaattatgaagaaatttgcatggagattatacattgattttggtataaatgggcaggatctcttgaagcagggagttacagatcataggaagactcaaagactttttgattctcaattggttaaggaaaa

SEQ ID NO: 648178 - DNA, 572 bp, Homo sapiens
tacaaacttataatagactaagtcctacgagaacccaatattttcttcaaatattcatcacagtgtctaattttctagtttatacattgactagctgttttctttttctatttccacaaccagactttraactctgaggacagagacctcatctcttgtttactagtgacactttcaggatatagctcaatactgccacattgcaagtgtttagcaaaattgttcagtgaaatgtgaattgtgagtgaaatatgtcacaaagttgacaaaaactgggaaaatattctcagataatgtgatctaacatattagaaaatttatagaagtattttgtgctaagtatatagttaatgtagctcaaatataaaataaataggagccatgaataagagagaactttgactcaaaaatgtagctgtgtaatttttttttttaggaaagaaagtctgattatgaggaagctaattcacatttgtatttttttcaacaatataatttataactgattttatgagcacttattgtatgttctcaaaagaatcagaaagtatacaaaggacaaagaaaagaag

SEQ ID NO: 648179 - DNA, 578 bp, Homo sapiens
tttggttccgaggcccctagcaggcctgccattccgctcccagctccttctgtctctgcacaccctccccctgcaaatcttacaagtcatctcttaccacaactgtccaggcccctggagtggcctcccactgcctttcagattaactccaggcctctaaacccagggccagggcccagaagacggcttccagccagcacatctgccttctcccgtcagatgcctctcccagctttccaagtccggactgctccctcctcattccctgcctgagccctctcctccttcagtcaaatgctggccctcacacaaggccccactcagacccgactctctgggaagcctttcccaccggagcagggagccacggtcctgggcctccagatgcctcatttgtcattcacacccaccttgctttcttctctgttctcaccctaccctgaagggacagacacctggtctcctgattaagacaggaaggcctacgggagcacgatttccacctggctacccatcagggtggagcacctagcatttcctaarcctaactgcttgagagttgaaggccagatgtgaaa

SEQ ID NO: 648180 - DNA, 191 bp, Homo sapiens
tgtagccaggcatgagaattcagctcgatagtaacactgcatgaatgtttggttggccctgtcatacttacatataattgatgacatatcccytttgctttgtagggcctcctgcaaaacatccttccttgaaggtaattaattatgtatattttttgaatcactaactccacattgtataaaatatatat

SEQ ID NO: 648181 - DNA, 541 bp, Homo sapiens
cacccagctgaacagtggtggagttcaactttgaccatgggaagtctggccccaaggtggatgcttgtttgtatcccatgagactcctcccytaccagggtcaaatgaatgaatggaggatgttaaaagtagagtctctgatgcctctgccagtgaaaccccaggctcatggctggcacctatgttctcactcttacctcattaggagtataatgaaaaacatgctcagtgctgaccgcgtgcctgggggtgttgtaggcactctgcttactttaattcatttaatttttacaataaccttgtttttacttctagttgttagattaaaaaacagtggcaaagagcaatacagagagttgccaaaattcacaccgctggtccaggtttgaagcaagcaatctgtacctgcagtccttgtctgtaaccatggcaccctggcttctcacacatctcatcgtggagttccaccatgtgtcaggcatggcactgagcaccttcttttaagaatataatttgtaattatgtagattcttaattctac

SEQ ID NO: 648182 - DNA, 620 bp, Homo sapiens
cactaccttcataaaaaaaaattgtgcacacttgtgtgtatgttttagatcctgtttttgttgttgktggtggtggtggtggttttgttttggtttgttttttaaaagcataagactgatgctttgttacaaagaattcctttgggagaatgcctgggaccttattagaattaacattaattttacctattggtaggtaattaatgcagtaagaactcttccctttgtatttattagatgcaaagaagaataaatttattaaaatttggtatctacaagtgaactgcagtatacaagtcatcctagccaaaccctatgagactgagtaaaaatgttattgttagcagaacaggtgtgatgagtcaacagtgtcaaagagcatgatttctggaccaaaatatgaggagcagttagaggatacagtagtaccccttatccactatatgtgcagaaagacatacttgacatgtttttctctgctctcacgccacagcaacaatcatcaacaaagaaggcttctgtgaccaaatgtgtggagagtttttccccaccaacaagcaagcaatcattcctgctgatggcacaattcaattctcccaccctatcttcagattacatca

SEQ ID NO: 648183 - DNA, 620 bp, Homo sapiens
cactaccttcataaaaaaaaattgtgcacacttgtgtgtatgttttagatcctgtttttgttgttggtggtggtggtggtggttttgttttggtttgttttttaaaagcataagactgatgctttgttacaaagaattcctttgggagaatgcctgggaccttattagaattaacattaattttacctattggtaggtaattaatgcagtaagaactcttccctttgtatttattagatgcaaagaagaataaatttattaaaatttggtatctacaagtgaactgcagtatacaagtcatcctagccaaaccctatgagactgagtaaaaatgttattgttagcagaacaggtgtgatgagtcaacagtgtcaaagagcatgatttctggaccaaaatatgaggagcagttagaggatacagtagtaccccttatccactatatgtgcagaaagacatacttgacatgtttttctctgctctcaygccacagcaacaatcatcaacaaagaaggcttctgtgaccaaatgtgtggagagtttttccccaccaacaagcaagcaatcattcctgctgatggcacaattcaattctcccaccctatcttcagattacatca

SEQ ID NO: 648184 - DNA, 577 bp, Homo sapiens
ttttctacattctattttagaagcaaatgggtagaaaaaatgtcatacctttcctcactcatcataaaggtcactcatagccaacacttgtagaaaaaaagacagattaacagaagaaaagcataacaaatttatttagtcaaagttttatgtgatatgggaagcttcagaaatgaagatccaaaaaaatgcagggaaaactctatttttatgcacagattggatgaagaatgggcagccatgtagatatgtgcttggacaaagggtttgacctaatggtaatgagcttagcggaggaaacctagctaagcctgyttgtttaaattcctcttggcctctttgtacagcattccttcctctgggtatagaggaggacccctatggaatgagggttttatgacctaccatcagacaaggtaggggagaaaatttctttatgttcagctcctctacaggaaagggtggaggggtggaataatatttataggctttatggcttgctttgagagagagggcttataatttctctgacctaccttgtggaagacaaattctagtttctatgactcatgcaagg

SEQ ID NO: 648185 - DNA, 550 bp, Homo sapiens
aagccatcctgggccacacgcagcccatatgccgcaggttggacaagcttggcctagaggaatgcagtcactttctaagtatcatatgtgaatctactctagtttttgcagtttgatctgttttcaatacttcagcctgcccaaatgcaaaccaaatcctatcacttttctgcttaaaatactcttaaactttcccattgtgtttaacacaaaccagaatccttaccaaaaccatgtagaggcatggtttgctcactacttacttctctaattcattttcactgtagcgtccttttcactcttttatgctccatcccatgggccatttttcatgtctttgaaaagtgccaggtttccttgtctcagggtcttccaagatactattttccctacctgcaattttccttccctctcctagctaatgctcattcaatctgcagatctcaactaaattatcacttgaaaaarccttctctgacacttttcagattaggtaaaagtcttctatgtaagctcccaaagcaccttcctgttatttatcattagatta

SEQ ID NO: 648186 - DNA, 585 bp, Homo sapiens
ttatttgatggacagaaaaaaaaacactcactgattcttgatggagaaaccctcttagaattctactgacatttgaaattctcatttgatgctgacatcttcacctgtggacccactgttcttggagaaaagaaaaaagctactggmggctcatttctgggaataggcccagattggctgaaaaacattgagtcggtgcttacaggggcctattttttctaccctgaaatatcaaagactatgtccagatcatcaagcttcttggtggattcccatgggttcatctcatcttgctgttggataattaaatttgggaggtggtggaactaggaaagaggatgcctcttagccagctggggttataaaccacttaaatctgccttgagcctaggaagtgaagccactcccagaagtccaggattgagggtttgtgagaccatgtatgggtttggggacaaatcttaaggtgtaatagtgaattccttagcctaatagtaattctctctcttctcctccctccctttctttctctcaactagcattgggaaggcaggcattgagaaattcacattataaatcaaaatc

SEQ ID NO: 648187 - DNA, 670 bp, Homo sapiens
ttggcatttcctaaattctattaaaaataaaccaagtagcacaactttcagattaaattataaataactgtactaataattgaccagaaatgtaaattccccaacctggagttatggactgctggaacaatcctcttcaagtacatttacctctaatgcaaattttccttgttctgctttgccaacaggagtgtaaacacagacacacacaccatcttttgaccttgtttctacaaagtcatattcacccacaacaaatgccaccagatatgtagatgtaacaggtgtgcgggcaaacttcacttccactaaattttcatcatcagggtatggtttccggtcaattacattctttaagaaagaaaaaraagaaaaatttaaataggtttacattaataccatagagcaaataccagccaaaaactgtaggctttattgcatctctttccccctttctattctagcatggcttatttctctaccccaattcatccagtgcttttatgctgtctttaagaaggaaagtggtctgataaaacactcatactaagaagctggaggctgaagtgttaaaactaccaaggacctgtgagagaaaagaggaatggacttttctcgaatacttattataagccaggcattgggatgatttaagtaagggcttcatact

SEQ ID NO: 648188 - DNA, 539 bp, Homo sapiens
acatgcagtatttggttttctgttcctgcattaatttgcttagtataatggcttccagctgcatctgtgttgttgcaaagaacatggtttcattctttttaatggctgtgtagtattccatggtgtatatgcaccacattttctttatccaatccaccattgatggacacttaggttgattccatgtcttcgctattgtgaatagcatggtgataaatatacaagttcatatgtcttttggtagaatgatttattttcttttggatatatatacctaagtaatggggttgcaggatcagattatgcattttcttttggatatatacctagtaatgggattgctgggtcagatggtagttctgttttaagttttttgagaactcttcaaactgctttccacagtgggtgaaacaatttacattcccaccaacagtgtataagatttcccttttctccacagccttgcaagcatctgttgttttttgagtttttcataatrgccattctgacaggtatgggatggtatctcatcatggttt

SEQ ID NO: 648189 - DNA, 573 bp, Homo sapiens
cactcagtaagacttcattctagacctgagaatatgatttgcttctcagtaggctctggtggtaacaaaactttactcatttctctgctttatttgtttaagacacagagcaaacatgcagtaagtgatagctctgttcaaacgccactgtgtgaaacaagtgagcgagtctcatgacccccatctcatcatggtgaaggggaatgatggcaagaacagcacaagactaaaaactacatgaaggaatttgtatctcttgaattccttcaaaatattttagaacaatttattctgttttctggggamaccatgaatgtagaagctctttctttttgattttaataagaagcagaggttaatgttgtgtatgattaggtactgagattattaaattatataagatctcttttgctttgttgtttgttttcatctttattttaagattaccttaatgaatcatattttgctgagaaattatttgcagtattcaccaaatggttcccatgaagaaaatgatgattttcttcactactgaaaatatcaagaatattattgttttctctagatgagtga

SEQ ID NO: 648190 - DNA, 598 bp, Homo sapiens
ggcacaataatgcctttttgtaagacaaataagacacaacratgctaacagcacatgcttggaagaaaaacagctttgagttctacttctccctaaaactttgagaggttaggtaagttcactatcctgaacctcaatttcttcacatttgaaatggtagtaatacatttaccacagagagtactttccttttgtggtaaatacaatccatattcaaataatgggaaataattcctgttaccaaccagatattttaatactgagtggatttacatgctctttagtagtttctatgtccagaatatttttaggtggtctgtagattctttttgaagtatataatttaaaattaaaaacattctggctcttctgaatgtccatgctgactgaaccatattttggctgtgactttccaaaggaagtgtattagtccattttcacgctacagataaagacatacctgagactgggcaatttacaaaagaaagaggtataattggacttacatttccacgtggttggggaagtttcacaatcatggcagaaggcaaggaagagaaagtcctgtcttacatggatggcagcaggcaaaaagaag

SEQ ID NO: 648191 - DNA, 539 bp, Homo sapiens
gaattctttttctcctttaggtaagggtttgtttctctcttgttggtttcagtatttttttaaatttcatcttcaaaagtgtatcaaagtataatgttcaaagttcaaacgttttctaaagtatgttgtgttttagtgtggatttgtttagattttttctgtttgagatttgctcagcttcttgaatatttaggtttatawcttttgccatatatgggaagtccagtcattatttctttttctttcttttttatttatttatgtatgtatttatttattttgagacaggatctcactctgtcgcccaggctggagtgcagtggtgaaatctcagctcactgcaacctctgactcctggaatcaagggatctgcccacctcagcctcctgagatgggcaaccaccatacctggctaatttttttgaattttttgtagacatggggtttcactatgttgctcaggctggtctcaaactcctgggctcaagcaatctgcctgcctggccacccaaactgctgggattacaggcatgaaccac

SEQ ID NO: 648192 - DNA, 508 bp, Homo sapiens
aggcccccctgctgttgacttaatgacccagctgcacttcagtgcttgagaatctgcataaatgtcagaggcggcttgtcacatgtgacccacacatccccagagtccactcacctgggcgtacaaatgaggccacatgaatatccaaattatgctgtcctggtcatcccaccacctgaatgcaagatttcaccccagtgaaagtgcgccttcccatgctctgtgctccagcccgtgggcactaaggacttctggggatggggaggctttcttgggtttgaagcgaagcytaactcgcgaccacggagtgtccagggtatctgctgagggcccacccttaccctggggcagtatggcctccaccagccctcttggggtccccttcctcaaactgtccaccctgtccaggtgtttatttatttatttttgagaccgagtctcgctctgtcacccaggctgcagtgcaaaggcatgatcttggctcactgcaacctctgcctcccaggtt

SEQ ID NO: 648193 - DNA, 619 bp, Homo sapiens
actcttggctccacctctctggtatttaaattagtctgcataaaatacttaagtcacttatcttccaggctttgctcagtctccttagcaacctccttagcaacagatttctttagaaaagaatctcaaaaaaagttgcacaggaccatattccttgcaattgtactaaaaattggaataaaaaaaaaaaaaacctctcataacaacttatattgacttccctctcatttgtttattcaacaaccctttgatatgttgacctgcctggtattgttcattcttcacattgctgtcagagtgagctccaaacacaaatcagtttgtatcattttcctactaaaatctctctttgcagtggtttctgctcccaccctgatgatacaacccaaattttgatgagcgcctacaaagccaactccagctgtccctcagacwtcactgtctctgccctccttttctccaactattctgtcttgctgttactcatttctctgttcaaggccttcacatttgctattttctctctgcctgggctgctctacccccagatttttacatgattcatactttctcatactcagtaaggcaccttctcatactcacggactaccttaattaa

SEQ ID NO: 648194 - DNA, 411 bp, Homo sapiens
ctaaaagcagatctaccatttgatccagcaatcccwctactaggtatctacccagaggaaaagaaaacattgtacaaaaaagatacttgcacacgcatgtttatagcagcacaatttgcaattgcaaaaatatggaaccagcccaaatgcccatcaatcaatgagtggataaagaaaacgtggtgtatatatataccatggaataatattcagccataaaaaaatattgaaataatggcatttagagcaacatggttggaattggaaactattcttctaaatgaaatatctcaagaatggaaaaccaaacattgtaggttcccacttataattgagagctaagttataaggacgcaaaagcacaagaatgattcaatggactttggggactcggagggaaggtggggaggg

SEQ ID NO: 648195 - DNA, 596 bp, Homo sapiens
taagaaattataaaagtattaatttaggaactgataaatgtccatattaaaatgaaatcttcacaatttatgttcctctgccgyagctccagccagtccctccttttggggtccctgacttcccccaacatctcttgtaaggcaaatctgatgttaataaatttccttaacatttacttgtctaaaaaggatcttatttctttttcacataagaagcttagtttggctgtataggaaattcttgcttggaatttcttttcattaaggatgctcaatataggccctaaatctcttctggcttgtagggtttctgctgaaaggtctgctgtttgcctaatggggtttcctttgcaggtgacctgccccttctctctagaagcctttaatatttttttctttcatattgactttggacagtctgatactatgtgtcttgggaatggtcttcttgtatagtattttgcaggggttctctgaatttcctgaatttaaatgccaacctctctagcgaggttggggaaattttcatgtgcaatatcctcaaatatgttttccaagtttcttggtctctctccctgtctttcagggaccccagg

SEQ ID NO: 648196 - DNA, 594 bp, Homo sapiens
taagaaattataaaagtattaatttaggaactgataaatgtccatattaaaatgaaatcttcacaatttatgttcctctgccgcagctccagccagtccctccttttggggtccctgacttcccccaacatctcttgtaaggcaaatctgatgttaataaatttccttaacatttacttgtctaaaaaggatcttatttctttttcacataagaagcttagtttggctgtataggaaattcttgcttggaatttcttttcattaaggatgctcaatataggccctaaatctcttcyggcttgtagggtttctgctgaaaggtctgctgtttgcctaatggggtttcctttgcaggtgacctgccccttctctctagaagcctttaatatttttttctttcatattgactttggacagtctgatactatgtgtcttgggaatggtcttcttgtatagtattttgcaggggttctctgaatttcctgaatttaaatgccaacctctctagcgaggttggggaaattttcatgtgcaatatcctcaaatatgttttccaagtttcttggtctctctccctgtctttcagggacccca

SEQ ID NO: 648197 - DNA, 572 bp, Homo sapiens
tgcttttgtgcctggttgtctgttcggggcatataacacaatatagggaacaacacccatttatagaataaaatatccatctctatarttagtcctgacattgggttgctgtttcatagataatgctggttaaaaaaagattgttatgttgaaatagataatatttcaatgatatttctaacctgaaacaattggcatattgttttagttgccttagctgccttccctaaagaaaacatatttattttcagggctagctgctgttggcataataataaattgttcttaatattaagttgagaagaaatttaatcagtaagactgttttaaatttggcaattttaggatttctagtttctacctcctgcttctttagcaaaaattgaacagagaattcagttttctgttcatgagatactttactcaagcattgcctaaaaaaaattttttttagataagatttaaccagaagatgatcaaaagtagtttttctcttggccatgtctcatccttggttgggcattgcttttaaccttgatgaaagtagtattaagtctgtattttgcttttaa

SEQ ID NO: 648198 - DNA, 508 bp, Homo sapiens
ttccatttaagtgtatagcaccaaggggcaaatagaattgtacagagaaggctggagactttgaaaacaaatttctcctttttcatagtttttgcataaaagcaatcctgaattgtaattttacattgacactccctcataataactgttttctccacaggaagstgatctcaaaaacatatttttcctgtctatttaaagacgtgatcattgctgcctctcccacttagtcagcacacaccatttattcttagtattagagcttgggagggagcccaaaacccactctgctaacctcaggctgactttgtgcttttactccaaattaaaccaccacatctacttattgcacaaaggcataatcagctatggctgctgcgtctccaataacaatgtcatggttataatgaaattcctaccttcctttgccttcagctgttcccattgtttgcatttacaggttctttttcagttgttcacacaaagtgctgttttggcataatgccat

SEQ ID NO: 648199 - DNA, 408 bp, Homo sapiens
aagaacaccccaattcctccaygatccaaccatgtgatcttgggcaaattacttcccctgcctgtgcgtcagtttccccacttgtaaaattggcactcatacacacacacacacacacacacacacacacagaactagcactcggatcattcatttgttgggattaaatgagaaaatgcaaggcaagcacttagcacggagcctgagctgtgatcagtgcccagctaaggttagcattcctgctcctcttgctagcagcaggggttcctgatggggcattaatggagggactcttagggagaaagggaatagctgggctttgggggagcactgctgcatgaagctgaaagcccagagcagataggagagaaaatgagtctgcttctaaagtgcccacttcaatcacag

SEQ ID NO: 648200 - DNA, 583 bp, Homo sapiens
ttttttagttaaacatgaccacatcagtggtccctcatgtttctttggagttttgaactgaggttattccacagtcacatcacctctgttcgtctcctccatcctggagaccactgactggtgccaactgtgccagtaagaagacattgtttctgtattgttgggccttctgaagaccgagagaaaactagactcatctttccatctgccatctatctagactttttgagcacctgttaattcttggtcctgagttagaagttgtggataaagaataaatcaaaaagagtttctgctctcagagagtttacaatctagtgtttcaatggagcaaagtagcaggacytgtgagagcacagatgaagaaatgactaacttggcacagtgtactgggaaaaggaaggtatttgcatagaccttgaaatgaggtctgcctaccagaaaggtgggtgatgtattctaggcagagcatatcctgtgaaaatgcccagcagaatgagaaagaacatatttgttagatgaagtgatccatgaaacagacatatttaagaatcattagtttaattaaatgtattctgttttg

SEQ ID NO: 648201 - DNA, 597 bp, Homo sapiens
caggttcccctagccctttgttaattcagacagttcttaaaaatgtaggatttaggttcaggggttttagatttttttagattgtttatttggttttgcttggatcattttggttagtacctttattctcctctcaactttccaatgtaaaatcaatttagttgtgcccaagagatcccctagcaagatgtggaaaggaatactattcatgccagttattacaggcactgccagagagaaggagctgtgctgagatcctttaatcctgtttttatattctgaaatttggttttgtttaagtcagaggtagtttcaaggcaaaatgagtcaagggcacttacaagtgatcctggaaatctatcatctctctggctcagcagtctccaccggcagagttctgctctgcaaacaccatatatgtgtgagaatattcatccatctcatttcatcmttgagttgcccatgcaaattaaggcagaaagtttgtcattttgatcatgtttgatgactcagccaagttcttttgttatgtatcatggaaaattactttaagattcttcaaatacgtaaacactaaagatgaaaaactataaataa

SEQ ID NO: 648202 - DNA, 520 bp, Homo sapiens
ccgataagtctaatgtcacaatcaaatcagtttttcctatctcaagaaatcatgtccatataatggaattaatccagaaactcygaaaagttttaatattctggggtcagggtagatgagaaggagtctccgtatgacttataaacatgtaaggagaaatagtaaaattgttgtaaaattaaaagaagaacagaaattcataaaataagctataacaatcaggttaaacaacaaaaacaaaaagcaaagcatctatcagtaacatgattgaatagaagagccgagagagagttgtcagtggtaaaggaataaatattatctcatttgatagagtgattgtattagtccattttaacactgctgataaagacatacccacgaccagacaacttacaaaagaaaaaggtttattggacatacagttccgcatggctggggaggactcacaatcatggcaaaaaggagcaagacacatcttatgtgggtggcagcaggcaaaaaaagagcttgtgcagagaca

SEQ ID NO: 648203 - DNA, 523 bp, Homo sapiens
tgtcacaatcaaatcagtttttcctatctcaagaaatcatgtccatataatggaattaatccagaaactctgaaaagttttaatattctggggtcagggtagatgagaaggagtctccgtatgacttataaacatgtaaggagaaatagtaaaattgttgtaaaattaaaagaagaacagaaattcataaaataagctataacaatcaggttaaacaacaaaaacaaaaagcaaagcatctatcagtaacatgattgaatagaagagccgagagagagttgtcagtggtaaaggaataaatattatctcatttgatagagtgattgtattagtccattttaacactgctgataaagacatacccacgacyagacaacttacaaaagaaaaaggtttattggacatacagttccgcatggctggggaggactcacaatcatggcaaaaaggagcaagacacatcttatgtgggtggcagcaggcaaaaaaagagcttgtgcagagacaatcctgtttttaacac

SEQ ID NO: 648204 - DNA, 523 bp, Homo sapiens
tgtcacaatcaaatcagtttttcctatctcaagaaatcatgtccatataatggaattaatccagaaactctgaaaagttttaatattctggggtcagggtagatgagaaggagtctccgtatgacttataaacatgtaaggagaaatagtaaaattgttgtaaaattaaaagaagaacagaaattcataaaataagctataacaatcaggttaaacaacaaaaacaaaaagcaaagcatctatcagtaacatgattgaatagaagagccgagagagagttgtcagtggtaaaggaataaatattatctcatttgatagagtgattgtattagtccattttaacactgctgataaagacatacccacgaccagacaacttacaaaagaaaaaggtttattggacatacagttccrcatggctggggaggactcacaatcatggcaaaaaggagcaagacacatcttatgtgggtggcagcaggcaaaaaaagagcttgtgcagagacaatcctgtttttaacac

SEQ ID NO: 648205 - DNA, 305 bp, Homo sapiens
cctgtccttcattaaattttaatgaataatcagtcaattttaaaactcctgaaaaattcatattaaaaaagaaacatttatattattaaaaaaaataattacaaaatgcccatataaatattatttagggccaggcacactggctcacacctgtaatcccagaactttgggaggctgaggtgggcaaatcactkgagcccagggtttgagaccagcctgggcaacatgacaaaaccctgtctctacaaaaattttaaatattaatcagatgtggtggtgtgcgcctataatcccagctactcagg

SEQ ID NO: 648206 - DNA, 305 bp, Homo sapiens
cctgtccttcattaaattttaatgaataatcagtcaattttaaaactcctgaaaaattcatattaaaaaagaaacatttatattattaaaaaaaataattacaaaatgcccatataaatattatttagggccaggcacactggctcacacctgtaatcccagaactttgggaggctgaggtgggcaaatcactggagcccagggtttgagaccagcctgggcaacatgacaaaaccctgtctctacaaaaawtttaaatattaatcagatgtggtggtgtgcgcctataatcccagctactcagg

SEQ ID NO: 648207 - DNA, 569 bp, Homo sapiens
taaactgcaactaaatcctgtaaattagtgcagatcaacttaggacattccttaaactgtgagaagtaatttatctttcataggacccaycaataagcaataaactcagagactgtcaagactgttctaagaatcttgtctacccatactcacaaaataactggaaagagttcagaacgtgaatacagcattgtagtactttcctagggctgctggaacaaattaccacaaactgggtagcttaaaacaactgaaatttattatttcacagttctggaggctagaagtctgaagccaaggagtcaatagggtcacgcttccttgaaaagccacagaaaaaaatcttttcttgcccctgcctaggttctactctctcttacaaatttttggagctttattacttatagatttattactccaatttctgctttcattttcaatctcttctccatgggtcctctcttcttataaaaacacctccagtcattggaattaggaccctccttaatctagtaggagctcatcttaactaattatatgtgcaaatttctaaagaaggtcaccttctg

SEQ ID NO: 648208 - DNA, 569 bp, Homo sapiens
taaactgcaactaaatcctgtaaattagtgcagatcaacttaggacattccttaaactgtgagaagtaatttatctttcataggacccatcaataagcaataaactcagagactgtcaagactgttctaagaatcttgtctacccatactcacaaaataactggaaagagttcagaacgtgaatacagcattgtagtactttcctagggctgctggaacaaattaccacaractgggtagcttaaaacaactgaaatttattatttcacagttctggaggctagaagtctgaagccaaggagtcaatagggtcacgcttccttgaaaagccacagaaaaaaatcttttcttgcccctgcctaggttctactctctcttacaaatttttggagctttattacttatagatttattactccaatttctgctttcattttcaatctcttctccatgggtcctctcttcttataaaaacacctccagtcattggaattaggaccctccttaatctagtaggagctcatcttaactaattatatgtgcaaatttctaaagaaggtcaccttctg

SEQ ID NO: 648209 - DNA, 568 bp, Homo sapiens
cataaaatcattcagtaaaatccagctttgctttatgataaaaaccctaaacaaactagacatagaataaacatatctcaaaataataaaagctatatatgacaaacccatggccaacatcatattgaatggggaaaagttgaaagtattcccactgagggctagaacaagttaaggatgcccattttcaccacttctacttaacatagtactggaagtcctacccagagcaatcaagcaagaggaagaaataaagggcatccraactggaaaagaggaagtcaaattatctctgtttgctgatgatgtaagcatatacttagttaagcctaagaattccaccaaaagactcttccatttgatgaatgaattcataaaatcttaggttacaaaatgaatgtacacgaattagtactactgcatagcaccaacaatgatcaggctgagaatcaaatcaagaactcaatttcttttacaatcacagcagaaaaaaaattgaaatacacttaaccaaataagtgaaagatctccataaggagagctacaaaaactgctgaaataaattaga

SEQ ID NO: 648210 - DNA, 568 bp, Homo sapiens
cataaaatcattcagtaaaatccagctttgctttatgataaaaaccctaaacaaactagacatagaataaacatatctcaaaataataaaagctatatatgacaaacccatggccaacatcatattgaatggggaaaagttgaaagtattcccactgagggctagaacaagttaaggatgcccattttcaccacttctacttaacatagtactggaagtcctacccagagcaatcaagcaagaggaagaaataaagggcatccaaactggaaaagaggaagtcaaattatctctgtttgctgatgatktaagcatatacttagttaagcctaagaattccaccaaaagactcttccatttgatgaatgaattcataaaatcttaggttacaaaatgaatgtacacgaattagtactactgcatagcaccaacaatgatcaggctgagaatcaaatcaagaactcaatttcttttacaatcacagcagaaaaaaaattgaaatacacttaaccaaataagtgaaagatctccataaggagagctacaaaaactgctgaaataaattaga

SEQ ID NO: 648211 - DNA, 568 bp, Homo sapiens
cataaaatcattcagtaaaatccagctttgctttatgataaaaaccctaaacaaactagacatagaataaacatatctcaaaataataaaagctatatatgacaaacccatggccaacatcatattgaatggggaaaagttgaaagtattcccactgagggctagaacaagttaaggatgcccattttcaccacttctacttaacatagtactggaagtcctacccagagcaatcaagcaagaggaagaaataaagggcatccaaactggaaaagaggaagtcaaattatctctgtttgctgatgatgtaagcatatacttagttaagcctaagaattccaccaaaagactcttccatttgatgaatgaattcataaaatcttaggttacaaaatgaatgtacacraattagtactactgcatagcaccaacaatgatcaggctgagaatcaaatcaagaactcaatttcttttacaatcacagcagaaaaaaaattgaaatacacttaaccaaataagtgaaagatctccataaggagagctacaaaaactgctgaaataaattaga

SEQ ID NO: 648212 - DNA, 394 bp, Homo sapiens
ctatgagcatgttatttatatgcaaaccaaccaatccagaatccacaccctcacttgactcttattatatggctcctgtggtctgggacattatccctctgctttcatcacctcagaatcaggtgctggaacactagggactaaattacacaaaaagcactcacactacccagtcttaaacctgctcagctgcttacactgtctcactcattccttccaaggaaaaccatattaaaggctctggctcatgctttagtcttgctccttttgccttcactgactcyggtacttccccatatggccccagtgcatgatgtgctgtggctcctgtttccagggctttatgtgtataagaacacgtgacagtcatttctgtctctgcacgtctctccat

SEQ ID NO: 648213 - DNA, 397 bp, Homo sapiens
gctgtttttctttctctagaaatgttctaagaataaattagctgwtatactaagaaaggttcacaaaatgagtccttcacctatacagcacctcttctaaataacagagagattacaaatccaatgtattcaaactctgagttgtctatatgtgtagtgttaaaaaatgtagctgtcagttttaacagcttttctcctgagatttcagtggctagctaatgatctcttttaaggattaggacaatttctagatagtgaaatggcaggaaaacatatcaaatacatatttttccattattagtattctgaggactgtaaagtcttactcaatgtatatcacttttaatttttaggatacatagaaatatttgctagtagaaataaatggcaagtgttt

SEQ ID NO: 648214 - DNA, 412 bp, Homo sapiens
catccctaataacagttgcattttttacaggctcctgctcctttacataggcccactgtggttccarcttcccccagatatccctccctgcagctccagtagtacagcctcctatccctgttctccaagggaaggtgatagtagcctcccattgttgctaaattgtaggttgcctcactgtcccctggctgggtttaatttttttaaagttatttttaccatcaattacctgtatcaattccctttgttttaaattctcaatgatttcaattttcctggctagtttctgattgcttcagatacctaatggaaatctcaaagtaagtatgactcaagagaaattgctgatttccatctcccagccactaccaaacctgtttatgcttatccatttcatttgatggcaagtcct

SEQ ID NO: 648215 - DNA, 429 bp, Homo sapiens
gaaaagtaaaaaaaaaaaaaaaagaaagaaactttaaagtagaatgataaaatctagtgttwttagatacagaagtgagaagttgaatacgggtaaagcatgatggactatgggaagaacggaatttcttgtgtgtgactgctcattcaataagctatattttttaaagacctgaacaggttatagctattggttatctacaagtggaattctcaaacacgaaaatgaaagcctgacaaataagatgctaatgccattttcacttaaaaaatagaacaagcgaaagagagaaataaaagcactagcccagtaagaacatcctctatttgccttactcataagccagttcagggccatatctgcaaaactaggaagaaactgctaagtgctaaaacgttttaaccaatcactttaagaaaggcagagaaa

SEQ ID NO: 648216 - DNA, 493 bp, Homo sapiens
atactattgtgcttattcaaacttctcttctcttcttcagaggcaaacctgtataatttctttggtttgtttgtttgttttaagacgtagtcttactctgttacccaggctagagtgcagtggtacaatgtgagctcactgcaacctccgcctcccgggttcaagcgattctccggcttcagcatcccaaataactcrgattaaacccttataatttctatcatgattgattttgttcatcttcaaattccaataattagaattcctacaggatgtgtgtgtgagtgtgtatctggtttattttctttagcataaataaatatttgagatttagccaaatatttgtgtgtatcatttatttttcctcatatttctgagttgcctatgtatttgtcagagtttgcttattcattagtctgttagtgaatattcagattgctttcagaattagcttttacaaataaaggacttaggtgcattctcaaacaggttt

SEQ ID NO: 648217 - DNA, 355 bp, Homo sapiens
aactagagggtatccctccccycagttcagtcttaccagagtcattattttcagcttctattttggtctatgtggaaatattctttgggcaatgccttaggtttgtttgccctccacatttcaggggtctctgcagaccaaatttggagcatggcttctggctctgccatttactaaccccatgatcttggccatggttgcttcagctaataaaagaggggggctccaattgtacctgcttcagataggttaaatgagacaatgcatgtaaagcaccagtgcctggcgcatggagagaactccacatatgcaggtgactcttagtattgccactgtctccagtagcagcagccac

SEQ ID NO: 648218 - DNA, 579 bp, Homo sapiens
tcgaatgagcacaaagaacagacagtggcttgggacaaagttctgagctctggaggaggtggtgagaggttgaggggcagaacttcgctatgaacaaaggttgtcttattatgctaatagagtctcccaggtaatctctcagaagaattgatgataagtctgcctgggtgtggtgacaacttttagacttttctcttgtccagcagttagtctttcctggttatttgatgagattcccagggaggggatcttaagacaattacatttctttttctttatttatttattaacagagtcttgttctgtcacccaggctggcgtgcagtggcatgatcacagctctctgcagcctcagcctcaacctcccaagctcaagcgatcctcccaccttagcctcccaagtagctgggactacaggcatgagccaccacacccagctaatttttgtattttttgtagagatgaggttttgccatgttgcccaggctggtctcaaacccctgagctcaagtgayccacctgcctcagcctccaaagtgttgggattacagttgtaatccaccatggccagcctattgc

SEQ ID NO: 648219 - DNA, 565 bp, Homo sapiens
gtctctgccctcctggagcttataggcaagagagtgagtgacagtaaacatttgaagtcacaaattagaaagagttcttgcacattacagagtgtggaaaggtgtctctgaggtatccagcatttttctgtgatagaaagctatcatttgatttcctaccacaacaaagaaacaacaaatagcacaagccaaatcaaaaggcctttctttttacttctctcatcccttcttctaacactgtcctgtagaagtcaacagtagaacagctgatgggaaaggaaatcaaataatgagagcaaatgagaaaaaaaaatttccagggcctgccttttgctctccctgttgagtccagggccacaagtaaaggctgagttgtcattctcttttcctttaaagcccttttcaatatgaagttctatgattctatgattcccagtgattatggggaagaaacactgaagtaggygagagagtaggttttaactcagattagtttatacgttgtggtacatttttaaactggacaattctaattgaattctaatgttaatagccccatattacc

SEQ ID NO: 648220 - DNA, 615 bp, Homo sapiens
tctttcagtctccgctgcagttaagtacagcacgggatgaagttctgtgagacaatgaaatgcatgccacttctaagtctggcatataaatcttccacaagcactcctccaagctctgtttatttaactgattagaacaactttgtaaagggttaatcttagaagtcacacattaaaaattccaagtaaccattagtctgagtatgagaatagttgtataaagaagacttccttgctgtaaattaacctgccccggatgtacttatgaaagagataaatgtcttgctctactaccattgaaacagaaatagatgacattgttactggattttttagtgtgaacattatcagaataatcatgaagtcatttgtcttaacaaacaaacaaaaactcttctgacaaatagagctaggtaaggktataaaaagggttcccaagcttgtatgcctgataacaaaaccatcacaaaaaacattgcagaaaccacaaccttgcacaaaggccattacaacgttaaaaaaaatgctgggaggacatctgcccagcaactgcctgtctaacctcagacttgtgtcactcttattgatttgtgtagccaaggataatcatttcaa

SEQ ID NO: 648221 - DNA, 546 bp, Homo sapiens
gtgcatccattcgcctaaaccgtggttgcagacccaggcctcgtgttccatggagcaggcaggagctccaaccccaactccagctgcagccacacaaaccaggctatggacccaggcatccctgcactcttggggcatgagaaggcccccctgccctcacaggtttggaaatgcctgctcctgttgcctggcttctcccttctgtcagcccccactccaatcttggagcaaagtcagagctgagtgagcctgggtgctgtcatggcctggccaggtgtgcacacacttggggcagtgctgacacaccagcccctgctgctttggccccctccggattttgagtgctgrtgagcatacataggaagctgatggagggctgagggcagcttggtgctggcctacaagcatcccttagcacccccagcctgggtgccataaatggcagcagaaggcagacaggttcctgggtgaaagaaggcaggtccctagtaaggttccaccttcagtccagggaggtcctgaaggcagggggctgggctgtcagtc

SEQ ID NO: 648222 - DNA, 532 bp, Homo sapiens
agagattccttggaaattgcctttgctgagcaaaaccatctaggagtgccaactctaccttgtctggttctctctcttttttcttttctttttttttttttgccttcctattccttttcaacttttctcaattacttaacttatccacttttgttaaygataattgtgaagatttgaagaaataatggcccatagaacaaactaattatcttatctcaacaaagaagaatctttgtaagtcaaacaatatttattgtacttattaaagtaagtatcctattgcttgccatgcaggggatacatttaatgtcacattagtagtaataaatcacatttttatggtttattgtctccatccctagaaaagaccttattccatgatcacatgtataatttttttggcacacatgggatgctccatttcatagactgttatagataagccacttctctttgacactgctgctggtgccgacaatacctggtaccaatacacttggtactaacaatacaaaagttacatggatatttg

SEQ ID NO: 648223 - DNA, 573 bp, Homo sapiens
ttaatactcattctctaaattccttgaatatcctctatctgtttacttgactatagttttggtttataccgaatttcaaataaatgacattatayggtgtaattgaaatgacttcactgaagaaagtagaaaatgaagttgctagtctaattaactttgaaaatgaggaaattctgtatgtttaaaatgtaaagaaactacacatagcactctattctagtagataaacatatttccaatgagctttacatttctgataccgctatgcatgtgtcctaaaattgtgcaaccaggtaataataaggcaattggtgggataggattcctcactttaaagtggatggttatggacagtcaaggaaggaaggctagaaaggtccacgtggtagcatagttgggtcaggagaccagtgtgttctcatttttaatataataaagttacagaagattaggtacataagtagttttgatgcgtccataaacatgggttcatataaacatgcacgtctgctaggccagtaggttgagaggtcctagaagtaattatacacggtatcacaatttttttatttt

SEQ ID NO: 648224 - DNA, 593 bp, Homo sapiens
ggatgtcacatctgtgggtgctgcgtactccctcgatgtgaatatggaaaagttaattacctcttgaggcrtctgttgagattagtgctggtctctaaggaacacccaaaatggctcaatagagccagaaagcagactggctcagggcttttgtgatggtttcgtggtgggtcagagtgaggcttcccactcacaggaaggggattgcacagtgtgaaacacccactggtgtcaaatgaggaagctcctgcgattcctaactagattcacattgtgtgataaaagacacacaatagacataacttcatggtcggatatcacaaaatgctgttaaaagatgtggtaaaaaggcaactttaaatttttagtcattggagtgtgtataacacaaaaatcattttcaatattttgtaacacatgcatgcaataggacaaaggtatgtgatgagggtaaaatctcgaaagtgtgaatcttccagctaccaagtcatagggtaataactgatgtgtgctgagggaggaaaccatcatgccatagtgctaatggtataacccttggtgaagagagttcaatattttattgaagttttcat

SEQ ID NO: 648225 - DNA, 593 bp, Homo sapiens
ggatgtcacatctgtgggtgctgcgtactccctcgatgtgaatatggaaaagttaattacctcttgaggcatctgttgagattagtgctggtctctaaggaacacccaaaatggctcratagagccagaaagcagactggctcagggcttttgtgatggtttcgtggtgggtcagagtgaggcttcccactcacaggaaggggattgcacagtgtgaaacacccactggtgtcaaatgaggaagctcctgcgattcctaactagattcacattgtgtgataaaagacacacaatagacataacttcatggtcggatatcacaaaatgctgttaaaagatgtggtaaaaaggcaactttaaatttttagtcattggagtgtgtataacacaaaaatcattttcaatattttgtaacacatgcatgcaataggacaaaggtatgtgatgagggtaaaatctcgaaagtgtgaatcttccagctaccaagtcatagggtaataactgatgtgtgctgagggaggaaaccatcatgccatagtgctaatggtataacccttggtgaagagagttcaatattttattgaagttttcat

SEQ ID NO: 648226 - DNA, 376 bp, Homo sapiens
tctcccagacagacactttgggaaaggaagattttgtgactgccccttttttggggaaagggattcaagaggatagaaaagctcttcagtatgtggtcccttagaatttcaaactacaacaagctaaccatattcaatttcaagcaatcccatatatatttgtatttttatctttaacagcctatatttcataygccagactctgccttaggtaatctcatatgctggctttgttactctctacaagaacttgcttcttgttaaatttaagattttttttaacttcagttatcctaagcattcagaaatttgcaaaatttcatcttgactgtttatctgttattgttgatgtagttgtaagaaaaaaagaaaatat

SEQ ID NO: 648227 - DNA, 599 bp, Homo sapiens
aatctgagtctctgccaccaatatattctgaaggaatgaaaaataaaactcagatttacacaaaaaaggaaacttgattcaatgaatagatggcagtacttatacataaagccaaatgactttctttaaataggaaatctcgcttttcaaagcaagtatattgaagtatttatttagcatatattatctgaagaaacaaaacaaaataaatgatgctagacacaaatatttgctaatggacctcaacttccctcttgcaatgtaaaggcagggacagtccaacatatggccaaaggctccagagcaaagtaaaagcagttggttctaactggaaagtggattgatgtttcctgcttaacattgatcttcatacaaattttgcatactggaacataatatatttattttaatataaaataatgttttcagttacttaaasatcagataaaacacacaaaaaatttccattttgaggaacaatatataaattcgaaaaggcaaatataaggtaatacacatggcagaaaggtaattattatgtattttgatgactgacaaatttctgatctttgaggcaatcacacagaagtagactaaca

SEQ ID NO: 648228 - DNA, 572 bp, Homo sapiens
gaaatgtgcacgaaagaataatagagaaattctaaggcttttatgttttttgcaaattgaggtaagacttttgttattcaatttgcattcaactcaggtcaagaaatatcagtattctcttagtgcataatttgataattaccaacatgggatgaatcaactctaaaaaataaatttatatttatattttggatatactttgaaratttcaagcaatagagaaatgctgttaattaatggctaccatattaaaagtacttgctatttcaccataattctaatttgtatttcatatgcattaaaacatttaatattcccccaaaaaaacatgaaataggtattcagttgctctctatttactgaagacttccaatgccatattttaagtttattttagatgagaaaaaatatgcttaagaggttcagcacttgcttaagatcacatggtaaataagtaatacagccaggattttagaataagactttttgcttccagtactatgtaattttcacaacatagcaacactgtcttccactaccatctggtatttggatagagaaaatatctaaaa

SEQ ID NO: 648229 - DNA, 469 bp, Homo sapiens
ctgggcaagaaggaaacctgctgtcttaaagggaagggcccaaccctggattcatcacctactaacttaagagcccttgggccctgaataatcagcactgatagccaggcagtacttcctgcaaccttgggtgagactcagaaccatgctgcccttaggagtaacccagcatattcctagmtatggtagctatggagagataccctatctgtttgaggagaggagaggaaaaattaaaggaactttgtcttgcagcttgggtaccagcttagtcacaggttggtcaccaagcaggctccaggggttcccaattccaggccatggacaacatttctggacttgccctgggccagagggggcccattgtcctgaggggagagactcaggactggcagcattcaccgtgagttgactgaggagtcattgggccttgcatgaacattggtggtagccaggaagcacttgccac

SEQ ID NO: 648230 - DNA, 456 bp, Homo sapiens
aaacctgctgtcttaaagggaagggcccaaccctggattcatcacctactaacttaagagcccttgggccctgaataatcagcactgatagccaggcagtacttcctgcaaccttgggtgagactcagaaccatgctgcccttaggagtaacccagcatattcctagctatggtagctatggagagataccctatctgtttgaggagaggagaggaaaaattaaaggaactttgtcttgcagcttgggtaccagcttagtcacaggttggtcaccaagcaggctccaggggttcccaattccaggccatggacarcatttctggacttgccctgggccagagggggcccattgtcctgaggggagagactcaggactggcagcattcaccgtgagttgactgaggagtcattgggccttgcatgaacattggtggtagccaggaagcacttgccac

SEQ ID NO: 648231 - DNA, 632 bp, Homo sapiens
ctacacagcagaaatttgtgactctagggcccaggttaccaatgtggcccggagttcaagaagaggtcattttccctacctctgcatggcatctgatgttctgagttgagtaggtttgggagcctctggagacaataaatttgtcatggctattgatattctagtggtgggcagaagcagttcccaaataccttgagggaattcataagaagtgggtatcagagtccaaggaaaagaaaaatgcagttacttcctaaagactcatctggttataggcacatattagatgttgctagatatccctgggcagattctgcaaataactgggcaacactttgggagctaattttcaatagataagctggttgggtttcctgctattagaatccacatataggaaggaaatgtgamctactttgttgtcacaggctgtgacaggcatctaatacaatacttttcctaaaacaaatactcaacaaatggtaatagcactaataatagttcccatttcttaagtccttaatatgggacaggtgtttttcaagcacttcacatattgattcatttaataacccaaaaaagcctataaggtaaatgttactacttgccttagttaaaactaaaagacaaaa

SEQ ID NO: 648232 - DNA, 632 bp, Homo sapiens
ctacacagcagaaatttgtgactctagggcccaggttaccaatgtggcccggagttcaagaagaggtcattttccctacctctgcatggcatctgatgttctgagttgagtaggtttgggagcctctggagacaataaatttgtcatggctattgatattctagtggtgggcagaagcagttcccaaataccttgagggaattcataagaagtgggtatcagagtccaaggaaaagaaaaatgcagttacttcctaaagactcatctggttataggcacatattagatgttgctagatatccctgggcagattctgcaaataactgggcaacactttgggagctaattttcaatagataagctggttgggtttcctgctattagaatccacatataggaaggaaatgtgaactactttgttgtcacaggctgtgacaggcatctaatacaatacttttcctaaaacaaatactcaacaaatggtaatagcactaataatagttcccatttcttragtccttaatatgggacaggtgtttttcaagcacttcacatattgattcatttaataacccaaaaaagcctataaggtaaatgttactacttgccttagttaaaactaaaagacaaaa

SEQ ID NO: 648233 - DNA, 632 bp, Homo sapiens
ctacacagcagaaatttgtgactctagggcccaggttaccaatgtggcccggagttcaagaagaggtcattttccctacctctgcatggcatctgatgttctgagttgagtaggtttgggagcctctggagacaataaatttgtcatggctattgatattctagtggtgggcagaagcagttcccaaataccttgagggaattcataagaagtgggtatcagagtccaaggaaaagaaaaatgcagttacttcctaaagactcatctggttataggcacatattagatgttgctagatatccctgggcagattctgcaaataactgggcaacactttgggagctaattttcaatagataagctggttgggtttcctgctattagaatccacatataggaaggaaatgtgaactactttgttgtcacaggctgtgacaggcatctaatacaatacttttcctaaaacaaatactcaacaaatggtaatagcactaataatagttcccatttcttaagtccttaatatgggacaggtgtttttcaagcacttcacatattgattcatttaataacycaaaaaagcctataaggtaaatgttactacttgccttagttaaaactaaaagacaaaa

SEQ ID NO: 648234 - DNA, 549 bp, Homo sapiens
atgggttatggggaacaacagtttgtattaggtcccttaattgagcctgagaaactgaggctccactagctttaagaagctgtttgaacacttttatatactgtttctgttgagctgataactgttgtcccatgatgaaaccctagcttgaaaattccctcraacttggaaatcccgagtgggcaccagtgacttatggactgcgcagtctcttctccttcatttttgaggattctgtcatgatttattgcagtgttcctcacacagggcaccagctgccgggtccatcccacagaccctggctgagtgatggatgaaaggagtactcagacacaagcatccagtgaaagagtgggctaggggactgccagcactaggggccaaagagagttagcagtcccaatgagctggggccacttttatttattcagtactggtataatgtcaaagacctggagccaacacaatctgtgggtaattaacattgtcatcccccccttgcaggtagcagtcttatgcacggatgaccaaaggttggtctctggatga

SEQ ID NO: 648235 - DNA, 587 bp, Homo sapiens
caaaatgaaagaaaaaatgttgaaggcagctagggcaaaagggcaggtcacttacaaagggaaccccatcaggttaacagcagacctctcagcagaaactctacaagaaagaagagattgggagcatatattcaacattcttaaagaaaaaaaaatcttcaaccaagaatttmatatccagccaaattaagcttcctcagtgaaagagaaatgagatcatttttcagctaagcaaatgctgagggagttcattaccaccagacctgccttataaaaaatcctgaaaagagcactaaatatgaaaagggaagattgttagcagccaataaaaaaacacacacatcattacacagaccagtgacactataaagcaatcacacaaacaagctggcataataaattgctaacaaaaaatgagaatcatatcgacacatatcaatattaaccttgaatgtaaatgggcccccatttaaaaagcagagaatggcaagctgtataaaaaaagcaagccagatgatatgctgtcttcaaaagacccatctgacatgcaatgatatccataggctcaaaataaagaaatggaggaa

SEQ ID NO: 648236 - DNA, 570 bp, Homo sapiens
tctttattagttctaatatttttttgaatgcatatcttagaattttctatatacaatatcatgtcacttatgaataagatctacttctttccaatatggatgtcttttatatcttgtcaaatttcttgagcacttttattatgaaagggttttggattgtattaaatcactttttgcctctagtgagataattatgtaatcttttttttgtaaatattattttacatttattgattttcgtatgttatacctaccttgcattcttgggataaatcccacttggtcatrctgcataatctttcttatatgctgctggattctgtatgctaacattgtgttaaagatttttgtgtctgtataaacaatatcgttctatagtatccttgtgatatctctgtctggttttggtatcagagtaacagcagcttcatagaacaatttgggaagtattccttcctttactaatttttggaagagtttatgaagtgttgatgtttctgcctttatttttctttacttcttttcttctctgatctttccttctatttgcttattctggttttagtttgt

SEQ ID NO: 648237 - DNA, 620 bp, Homo sapiens
tatgtctgaccttccattaaaagttgcttagaaactgcttagcaaatagtcagggtgctcctcactgacatcttccttttgtgacctgtcagctattctgttggtccattccctctccataagcgtttttaggcttctttttatctcctttcaacaaacaagactaaagctcaacattttccctccattgaaaggaaacatccactrcctctaaagctttgctgcatgcaagcagccttcatacacctgccagttaagaggagagtagattggcaaagcttccatgggcttttgatttttattaatggttttgcacagtgtgctaagcaagccataagttaaaaaaaaaaaaacgctcaaaatacaaattccatgatgctcactgaaatcaactagagttggaggacatgaaataagaggtcatgggcttcctttcacacaaaaaacagtgcataatccacactatcctgtgaatataaggcactttaggatgttaaaatagaattctaccgtacccaaggaaaggctctccccagaattacagtttacactgtaaatacaatttgcacaacaacaaatccctcctctgtgtttctcagtatttctcctgatgtaactga

SEQ ID NO: 648238 - DNA, 568 bp, Homo sapiens
ctcaccatgcctgccactgggcagttgcatttatgaatacaaaataatagaaaaaaactcctttagtggtttttggaaaaatatttttttcacagagttttacatttgtagaataaaatacaaggatttcgtttaaaaaaaaattaggtgaaacaaatttggaataggctaatcttatgactaaattaataaaaccacaatcagtaagttgttactgaagcacatcgaattgattgattctgtagtattcagcayaacagtgcatcaacccagtcatgatgttcctgctttggaggtctgtgttttcattctgatgctctcagtcctaccgggaacagcctcagacctttgtgaagttcaaggaataaggagatgaagtttgaaaagaaaagaattagtcaaaccaaccaagtgtggatgtcatgaatgatggaatcaagaattgtttgcgaatttagcaaaaatattgttttaatagttaacataaaacatttttctccccgtattaatgcatggtattatagtgacataaaatggctgtcacattggtacctacctgtctgctgca

SEQ ID NO: 648239 - DNA, 515 bp, Homo sapiens
ggttgtataatattccatggggtggaaatgccataatttacataactattcttacattattagacattaaaattgtttccagctttcattaatataaagaacactgcaatggatatcttaatattcaaagagttttatttttaggttattactttgggatatatatgcaaaagtaaatttgtgtgcaatcgaactatgaaagatttaggaaagtagttgaaaatgacytgagaactggtttctcacagtgagaagttgtatgtgtaggccctggcagacctactgcaggaagaaatagaagctggaagcagacagactgctgacgggatcctcccttagcttagcagcatggtataaaatgcagtgaggtctgtgacctagctggttcttggctctatgaagatgatatatgaccaccaaacttcagtcttgcttgtgtgaaaaactctaaagacaagaaatctgcatacactcactcacttgtatcatcaactgataatctttgcaccattgtt

SEQ ID NO: 648240 - DNA, 577 bp, Homo sapiens
gggaaagcgggagccttgaaatcagtcatagcaaaagggatgctaagacaattgcttaaataaaatgatcttcagtagtctttgtgtcttaaaaaaatgagattgtctctctcatctttctttcccatttttaaaggctttccaagaaaagtaggaattgcctttgcatttttcccctagacagagaaaagcagtgatgcacacactttaccgagtctctcaatctctctttctctcttttggtcccttcagagatgaatagacgagcattatagcttctcataattacaaaataccaaaagactattttcatctgctacaaaacatyttcacagacttatattaaaaactattggtatttacatttgcaaggaataaaaattctttatgtctctgcagtatttttaaccataacactttagtggattctcttagtaaaatatctgataccatttattttttaattttactagcattgatgggtaatcactaactgtctgttggtgagattgccaaagaccttcacttagaaatcaatcactccaccacagggctgtgaagacacaacacacggcct

SEQ ID NO: 648241 - DNA, 417 bp, Homo sapiens
gaattcttttcccacaaaatacaaaattcccccttatccatgtttttgctctctgcattttcatttacctgtggtcaaccacggtctgaagtattaaatggaaaattctagaaataaacaactcataagtattaaatcgtgagccattctcagtagcatgatgaaatctcaagccatccttgttccattcctccagggatatgatcatctctttgtccagagtatccacactgtacacactacccacccttagtcactgagtaaccgcctgttatcatatcaaaaaacgcagtatatataggagttagyactatccaaagtttcagcatccactggaggatcttggaacataacccctacaggtaacagataacaggcgactactgaatctttttaaatgaggcagaacaagttgtc

SEQ ID NO: 648242 - DNA, 417 bp, Homo sapiens
gaattcttttcccacaaaatacaaaattcccccttatccatgtttttgctctctgcattttcatttacctgtggtcaaccacggtctgaagtattaaatggaaaattctagaaataaacaactcataagtattaaatcgtgagccattctcagtagcatgatgaaatctcaagccatccttgttccattcctccagggatatgatcatctctttgtccagagtatccacactgtacacactacccacccttagtcactgagtaaccgcctgttatcatatcaaaaaacgcagtatatataggagttagcactatccaaagtttcagcatccacyggaggatcttggaacataacccctacaggtaacagataacaggcgactactgaatctttttaaatgaggcagaacaagttgtc

SEQ ID NO: 648243 - DNA, 595 bp, Homo sapiens
cttcactcccctgatacctccatcagagcaggtgctggtatgcacagctgggaaacctgaagatggatcacatcacaggaatcaggtatttctcagcaccagcctggagcctggtagctgcactgggtggctggacccagaagagcaataataatcattcagttcagctcccagaaagccacrtccctagggaaagggagagcataccacatcaagggatcaccctataggacaaaagaatctgaacagcggccttgagttccagctttttccactgaaacagtctacccaaatgagaaggaatcagaaaagtaattctggtaatatgacaaaacaaggttctataacaccccacaaaaccacactagctccctagcaatggattcaaaccaagaaaaacatgtctgaactgccacatgaagaattcagaaggttgattattaaggctactcaaggagataccagagaaaagtgaaaaccaacgtaaagaaatttaaaaaacaatacaagacatggatgaacaattttccagagaaacagacatcataaagaaaaaacaatcacaacttctggaaatcaaagacacacttagaaa

SEQ ID NO: 648244 - DNA, 595 bp, Homo sapiens
cttcactcccctgatacctccatcagagcaggtgctggtatgcacagctgggaaacctgaagatggatcacatcacaggaatcaggtatttctcagcaccagcctggagcctggtagctgcactgggtggctggacccagaagagcaataataatcattcagttcagctcccagaaagccacgtccctagggaaagggagagcataccacatcaagggatcaccctataggacaaaagaatctgaacagcggccttgagttccagctttttccactgaaacagtctacccaaatgagaaggaatcagaaaagtaattctggtaatatgacaaaacaaggttctataacaccccacaaaaccacactagctccctagcaatggattcaaaccaagaaaaacatgtctgaactgccacatgaagaattcrgaaggttgattattaaggctactcaaggagataccagagaaaagtgaaaaccaacgtaaagaaatttaaaaaacaatacaagacatggatgaacaattttccagagaaacagacatcataaagaaaaaacaatcacaacttctggaaatcaaagacacacttagaaa

SEQ ID NO: 648245 - DNA, 588 bp, Homo sapiens
ttcataatttcaatcattgagtgatgacacaatacattttacaaaacgtaacacggagccttatgaaaataaaattctagcttcaataatttcataacttttctctaattatcttttcaaaaagactttggtaatgtgctctaaacataggaaatgtgaattttgaaagctatagkctgcttaaaaatgaaagtaatggaagtaaaaacatatatcactaagaaaaaataaaagggacttaacagttttgtaattattttattaacaaaagacgttaagcaaattcacatgtgacagtggcttgtgaacaaaccagaagttctttcttcaaagtgaaaaaggaaacagtttaggaaatactgaagagtgaaatcaaaagaacaagttacacatatactactttttttttctcttggctgcattaattgtagtatttgatctttagttcacatatacagggaaagagagtccagttaatttatagatgttaattacaatcctctgatatgaatttcagttttggtagtgatggaagctcctttaattggaggctttctgtaattgcatggcgagtctctaagtgtggaa

SEQ ID NO: 648246 - DNA, 508 bp, Homo sapiens
ttcctcctgacacagagcacaaactgacctaaagggaagatgattaattgtcatctcaatcataattttcaggagcatcttccagtaggatcatggcagcatcttagctctgaatcatccttcttcctctttagcaaaccatacagagaaacacaaacaaaaacaaacacacacaattcaaaaactacaaatttagggaaaattgaagagaaagaaaaactacaaattgcaggacacatatttgtgtgacccagagcacctaagaccagtagaacctgaatgggcagagctatggtctgaatgtttatgcccctccaatatttatacagtaaaatctaatccccaaggtattaagaggttgtgcatttgagaggtgattatttcttgagggatctgccctcataaaygggatcagtgcccttacaaaagaggtttgagggagtcctttcatccttcaaaggacacagtgagaaggcgttatctttgaaacagagagcaagccctcata

SEQ ID NO: 648247 - DNA, 619 bp, Homo sapiens
tggtaacctacacttgacttcactccttggagtactgtttaacattttgaacctgaataacaacctccacccattggaaggttgttcttatattttttagttttaaatcgggggtaagggttcaagttcttgtcattgatattcagaaagtatctatgtggacaaaattaccacacatttcatcatgatagctgatgaagcctgcttttgctatactatataaatctaagtcacgctatagccctcctattagcttttaaaaatatgtgtgtagttgaatttatcttcatgtacagagagcccttcattgatttagaaattaagctatgtaattacctaatgggtaatttttggtactaacatatttctgcagagatcctctatcatttgttgacatgagaagctaaatttttcctcctgagttatatttgcctcagatgtttgaaataaaatcaactgagtcctgattataaacatataatcataggatcatacagagggtcacagkattatggcattttagacacactttttaattaggctaggtttcctaaagagaaaaacacaaaagtttaaataatcaatttatttattcaagcaatatttattgagtgcctgc

SEQ ID NO: 648248 - DNA, 569 bp, Homo sapiens
gactagaattttgcctggctggaatttccgaatcctagcaagcctgggggcactgtgggagaccagggcatatttcatcccttatcaaaaactgcataagacagacacttccagagaggccattttagagacttccccctgggaatgcattctttcccagggctgtttcttgctgagaaaaaggattcagcgatatttctcctatttgcttttgcaagaagagaaatatgactctgttctgcctggccctgyaggcagtcaggccttatggttatctcccttgtttcctgaacatcactgttatcctgttcttttcaaggtgcccagatttcatattattcaaacacatatgctttacaaacaatttgtgcaggtaatgcaatcatcacagggtcctgagacaacatacatcctcagtttatgaagatgatgggtttaagagattaaagacaggcatgggaaattataacagtattgattggggatgtgataaatgtccatgaaatcttcacaatttatgttcagagattgcagtaaagacaggtgtaggaaattataaaagtattaat

SEQ ID NO: 648249 - DNA, 548 bp, Homo sapiens
tatggggaacaacagtttgtattaggtcccttaattgagcctgagaaactgaggctccactagctttaagaagctgtttgaacacttttatatactgtttctgttgagctgataactgttgtcccatgwtgaaaccctagcttgaaaattccctcgaacttggaaatcccgagtgggcaccagtgacttatggactgcgcagtctcttctccttcatttttgaggattctgtcatgatttattgcagtgttcctcacacagggcaccagctgccgggtccatcccacagaccctggctgagtgatggatgaaaggagtactcagacacaagcatccagtgaaagagtgggctaggggactgccagcactaggggccaaagagagttagcagtcccaatgagctggggccacttttatttattcagtactggtataatgtcaaagacctggagccaacacaatctgtgggtaattaacattgtcatcccccccttgcaggtagcagtcttatgcacggatgaccaaaggttggtctctggatgacatca

SEQ ID NO: 648250 - DNA, 548 bp, Homo sapiens
tatggggaacaacagtttgtattaggtcccttaattgagcctgagaaactgaggctccactagctttaagaagctgtttgaacacttttatatactgtttctgttgagctgataactgttgtcccatgatgaaaccctagcttgaaaattccctcgaacttggaaatcccgagtgggcaccagtgacttatggactgcgcagtctcttctccttcatttttgaggattctgtcatgatttattgcagtgttcctcacacagggcaccagctgccgggtccatcccacagaccctggctgagygatggatgaaaggagtactcagacacaagcatccagtgaaagagtgggctaggggactgccagcactaggggccaaagagagttagcagtcccaatgagctggggccacttttatttattcagtactggtataatgtcaaagacctggagccaacacaatctgtgggtaattaacattgtcatcccccccttgcaggtagcagtcttatgcacggatgaccaaaggttggtctctggatgacatca

SEQ ID NO: 648251 - DNA, 601 bp, Homo sapiens
ataggacgactggcacttgtcctaaagccccagccacacctgctgtttatcctgcattcacgcagtgatgactctcccctagagttcatggcatttcctttgacacatcaaagtgaaactcctagaagacagaaacaacatgtctattgttagaggaggagtaaataccccatttcaaggtgaaaaccacaccaccatgttgatttttttttgaagtcctaataccttagttggctagatttcagggttaggaaccagtgaatggacattggtgaaagtgcaagctgtcattctggtaaagtcacccccttggaaaggagtgttataaaaatatttcaaagaggagaacagaccaactaaattcacraaatctttcccaaaggaattacttgtctccacatccaactggtcactaggttccctgaaccctggattttccattaagcgtaacctcttcttttcctccctacaaccttaattctggcacgttcatttcccatctggaccttccctcctaactcatttctagtgccttctcttttccaatctgtcttctctccaaacttccttcctctcagccttatccatgtaaatgcacact

SEQ ID NO: 648252 - DNA, 600 bp, Homo sapiens
tgaaagaacagacaaagagaccaatgtaagtgaacagaaatcccagaaatatacccatgttaatatattcaactgatcattcacaaaggaaaaaaacggcaattcaagggagaaaatatagtcatttaaaaaatgatgcttgaccaactggatatccacatgcaaataaatctagacttatacctttcaccaaaattaacttcataatataatcacagacatctttgtaaaatacacaaaactggaaagctggaaacaaagaaaattaaagtgaccttgggtttgttaatgactttttacatacaaatttgcatgtaaaaatgtgtgtgtctatactttgctcaatttttctgtaaaaattgtaaaaactgctctaaaaatagtcaatgtaaaaaaaacccacacaacatagaaaatgtgcagcaaaaaggcaaaagtaagtcctcccttatcagtaataatttcaaatataagtggtttaatttaaaggcaccaattaaaaggcagaagtggacataatggataaaaatgcaggatctaactattgtctgcaagagattcaccttaggtgcaaaaacaraaaaataggttaaaagtaaa

SEQ ID NO: 648253 - DNA, 430 bp, Homo sapiens
gtttcttgctgcccaggagtgacttggtacccagagaaacattggctgggcctccagggtgcacttccagtttggctgacatagggaggatggttcaacccgggccaggagggtcagacaggagagaacagatctgaagcatcttctggtgacaatgagcttcccccagcccccggcccttcaggctgacctgcactgctgtggacctgagaagttctaaactatccagatgtttttcctcatgtgcatgtgaatcyggaaaccatcccggtcctttggctggaggagcacagatagattcacatctgggcagcaggcgagagattgacgaagaccagagctcagagtcagaaaaactggggtcaagtctcggccatgaccttttttcttggtgtgtctttggccagccctgtgaccttcctgggtctcg

SEQ ID NO: 648254 - DNA, 422 bp, Homo sapiens
cccacagcatcctgataagggctcaaatatgtccccaaaaaagttatgttgaaatccttgccctcagtatcttgagatgtgactgtatttggaaataaggttgatgcagatgtgattagttaaaatgaagtcatactggagtagggtgtacccttaatccaatataactgatagctttataagaagagaaaagaccgggagacacaagagagaacaccatgtcatgaaaaaaggcagagattgtaatgctacagctgcaagtgaaggaatgctaaggattgctggtaaactaccagaaattaggacaggcaaggaaggattctccccaacagctttcaaagggtgcattcccctgcaaacattttgastttggacttccagcctccaaaactgtgagacaatacatttctgtggttttaagc

SEQ ID NO: 648255 - DNA, 595 bp, Homo sapiens
gaatgatggctttctgatcccaamgtcattcgttctgaaaacaatatttttcataaatttgaaagtgagaagttttgatcttgccactcccaagtaactctcttaataagaggcatcagcatgcttcagtgacagctgtcactttccagtgctgagagtcgtctttgagttctccatttcactccctacactccaatttagctgcagttctcttggccagtcctatgaaatacatccatggcctaacgacttctcaccactactaccactcatcctgacagcattctcacctaagtcactaccttttttctctggattagagtagcctcccaatttatttgctcacaaaacctatttattctacacggtgcaccagatacacccctttgaaatgcaaacacaatcatgttattctctggttaaattatctcatatattcctatcgcatttaaaattaattcagaataatcccctgattatcaaaaccctacatgctcttccacaacatggtttacttccaagatatctcttcaacttttttttcactgtactgaattggtgactaaaaatcatatttttatttttgctcaaaaag

SEQ ID NO: 648256 - DNA, 595 bp, Homo sapiens
gaatgatggctttctgatcccaaagtcattcgttctgaaaacaatatttttcataaatttgaaagtgagaagttttgatcttgccactcccaagtaactctcttaataagaggcatcagcatgcttcagtgacagctgtcactttccagtgctgagagtcgtctttgagttctccatttcactccctacactccartttagctgcagttctcttggccagtcctatgaaatacatccatggcctaacgacttctcaccactactaccactcatcctgacagcattctcacctaagtcactaccttttttctctggattagagtagcctcccaatttatttgctcacaaaacctatttattctacacggtgcaccagatacacccctttgaaatgcaaacacaatcatgttattctctggttaaattatctcatatattcctatcgcatttaaaattaattcagaataatcccctgattatcaaaaccctacatgctcttccacaacatggtttacttccaagatatctcttcaacttttttttcactgtactgaattggtgactaaaaatcatatttttatttttgctcaaaaag

SEQ ID NO: 648257 - DNA, 595 bp, Homo sapiens
gaatgatggctttctgatcccaaagtcattcgttctgaaaacaatatttttcataaatttgaaagtgagaagttttgatcttgccactcccaagtaactctcttaataagaggcatcagcatgcttcagtgacagctgtcactttccagtgctgagagtcgtctttgagttctccatttcactccctacactccaatttagctgcagttctcttggccagtcctatgaaatacatccatggcctaacgacttctcaccactactaccactcatcctgacagcattctcacctaagtcactaccttttttctctggattagagtagcctcccaatttatttgctcacaaaacctatttattctacacggtgcaccagatacacccctttgaaatgcaaacacaatcatgttattctctggttaaattatctcatatattcctatcgcatttaaaattaattcagaataatcccctgattatcaaaaccctacatgctcttccacaayatggtttacttccaagatatctcttcaacttttttttcactgtactgaattggtgactaaaaatcatatttttatttttgctcaaaaag

SEQ ID NO: 648258 - DNA, 575 bp, Homo sapiens
ttgttgtcaggttaggaaccctattccatcccagatctccaaaacccagactttttggggggttgaaattttaggctttctctttgaattgtagttttatcttctttcagttaccatttgcatttccataatgattaatgagactaagctttttttgtgtagttgactgtacctttggatttttttcccaaatacctttttatttcttcttttctttatggttttagaaaaygtagtttacataattgcagcttgattttatactcagttaatggcatgcttaatggagagaaaaaatattattttcctttttaattactgtgctttttttcttttttaaggaaatgtttcattatgttaaatttcagtgttattctacttagctattccttaaatattatagtatttcggatttcacatgtaaatttgtaacatatcttgagtttattatgtatagagtaaggctattttctctttttttaaggtaaaaatcacataatagaaaattaataacaaccattttaaagcatacaatgcacttgcttttagtatattcacaatgttccagggcaatt

SEQ ID NO: 648259 - DNA, 553 bp, Homo sapiens
ggagagctcaattaacacccaggaacagactaattattaataaaccagaatcttcagtattaggcttcaatcattggcaattttttttttttgacacacagtctcccactgtcgcccaggctgaagtcctgaggccagaatgagaytaggacatggttcctttgcctaagtaaagtgaggcagacaatggaatacttcagacttcaaattagtacggtaagtgctatgaagagtatgattagagttcattatttacccagaaaagggtcactcagcccagcctgggagttagagaaggtttcctgaagtcttgacatgtgagtcatgaaaggacataaggagttaaccacgtgacaaaataagctaagggaattctcaacaaaagacaaaatattggcaaaggcttttaggcatatactagcttagtattattgggagaatgtaattattttctgtatttcaaaagtgtaaaatacaaagtgggccatggtatgagataaaccagtaaatatgttctgggaacagatcatagaagggcgtgtatgctgtccta

SEQ ID NO: 648260 - DNA, 553 bp, Homo sapiens
ggagagctcaattaacacccaggaacagactaattattaataaaccagaatcttcagtattaggcttcaatcattggcaattttttttttttgacacacagtctcccactgtcgcccaggctgaagtcctgaggccagaatgagattaggacatggttcctttgcctaagtaaagtgaggcagacaatggartacttcagacttcaaattagtacggtaagtgctatgaagagtatgattagagttcattatttacccagaaaagggtcactcagcccagcctgggagttagagaaggtttcctgaagtcttgacatgtgagtcatgaaaggacataaggagttaaccacgtgacaaaataagctaagggaattctcaacaaaagacaaaatattggcaaaggcttttaggcatatactagcttagtattattgggagaatgtaattattttctgtatttcaaaagtgtaaaatacaaagtgggccatggtatgagataaaccagtaaatatgttctgggaacagatcatagaagggcgtgtatgctgtccta

SEQ ID NO: 648261 - DNA, 553 bp, Homo sapiens
ggagagctcaattaacacccaggaacagactaattattaataaaccagaatcttcagtattaggcttcaatcattggcaattttttttttttgacacacagtctcccactgtcgcccaggctgaagtcctgaggccagaatgagattaggacatggttcctttgcctaagtaaagtgaggcagacaatggaatacttcagacttcaaattagtayggtaagtgctatgaagagtatgattagagttcattatttacccagaaaagggtcactcagcccagcctgggagttagagaaggtttcctgaagtcttgacatgtgagtcatgaaaggacataaggagttaaccacgtgacaaaataagctaagggaattctcaacaaaagacaaaatattggcaaaggcttttaggcatatactagcttagtattattgggagaatgtaattattttctgtatttcaaaagtgtaaaatacaaagtgggccatggtatgagataaaccagtaaatatgttctgggaacagatcatagaagggcgtgtatgctgtccta

SEQ ID NO: 648262 - DNA, 553 bp, Homo sapiens
ggagagctcaattaacacccaggaacagactaattattaataaaccagaatcttcagtattaggcttcaatcattggcaattttttttttttgacacacagtctcccactgtcgcccaggctgaagtcctgaggccagaatgagattaggacatggttcctttgcctaagtaaagtgaggcagacaatggaatacttcagacttcaaattagtacggtaagtgctatgaagagtatgattagagttcattatttacccagaaaagggtcactcagcccagcctgggagttagagaaggtttcctgaagtcttgacatgtgagtcatgaaaggacataaggagttaaccacgtgacaaaataagctaagggaattctcaacaaaagacaaaatattggcaaaggcttttaggcatatactagcttagtattattgggagaatgtaatkattttctgtatttcaaaagtgtaaaatacaaagtgggccatggtatgagataaaccagtaaatatgttctgggaacagatcatagaagggcgtgtatgctgtccta

SEQ ID NO: 648263 - DNA, 568 bp, Homo sapiens
gtggtctgctcacctgggcctcccaaagtgctgggattacaggcgtgagccaccacgttaaaaagggaaacttcctatttgccctctaaaggtttgcagaaaatgaatggacaaaacataaattaatagaagaaagaggcaaaaaaaaattctgtaaaatgtaggcgaaaaatcacagggtctcactcagttacccagcatgaagtgcagtggtgtgatcatggctcmttgcaaccttgaattctcaagcacaagtgattctgccccctaagcctatggagtagctgggatcacaggggcatgccaccatgcccacatacatgggtatttgctggagaggagatggagactctctgtcctggatgtgagacaggtggctggcatctgggtaaggatgacattccctcattgctaaagagtaaaagaggaaagtgtcatggatagtgcaagcagggacatgccctgacctagtgaggtccagaggcttatattgtccttcataggagagtgggaagaagcgagtgtatgcaacccaggggaaataaatgacctaaaataaaagaaatag

SEQ ID NO: 648264 - DNA, 565 bp, Homo sapiens
aagtttcatttgtactttaaaccacttcatttatttactttgaatatcaagatagtatttacttacataacaaaagtgtaactttttgttgtcttctctactcagctgctgatgcctacctgttcttcctccataacccctgaagtggcactcagagatcttccaaatgttgtacttaaatatattacagggatgctgattctcccgacaatcatattaaggaattatgtggaaactaattctctcaccaccttaaataggaagaagctgggctgcaaataaaaatgtgcactttttatacaaaataagttagtggttggtctgaaaaaggagcccagggaattcacctcctgtgttagcatatcagtcaataaaytaatttttattttcatttaaaataggattgaaaaaacgttcagaaagcaattctgaaagataaaattcagaaatctatcaatgctatatcagagggaaggttaatttcacaaatgtttatataagaattctttgtgatatgattccacaatttgttaaaaaaaataagttagattctaagaactgtaac

SEQ ID NO: 648265 - DNA, 653 bp, Homo sapiens
atattggaaggtgccttttgaataggaactcaacttgagtgaataatcctgcactttataggcacaatttttcagctcttatttaataaaaatttcaaaaattagacaattggtaagatattttcattaaatctaaatgggctcagaaaactatcaaaggcataagcttagtctatcagattgagcagtttctaaatggccacctcatctgatgctaagcttcaaatagatgaatgtaattgttttaaatgttgctacttgtaaattaaaacacaaaagtagtatctatattaaatggttaatatgaattatcaagggtatatatttaatttagatttactattacaggcatattttcctgtgttatattatcacatttcacaaaatttgttttccaatcaattgcttgatactatagcgtgyttctaacgtatgcaagagtctgtgagtttgaatttatattgtcaaaataaccatctctatcccttggaggtatgggtttaggtcacaaatttgaggaccacaattatcatttgtttttcccactgttaaagtagagagataagtgattttgagaaattaagcggttccgcacaattgctttaaatatgaacatttttatttgcttcataccccatccatgtttaagagaa

SEQ ID NO: 648266 - DNA, 584 bp, Homo sapiens
aaaaacgaaatcaagatggaaattaaaaattattccaactgaatgatgataatgacacaacctatcaaaacctctgggatacagctaaggtgatgctatgaggaaagttcatagccctgaacgcctgcatcaaagagtctgaaagagcacaaacacacaatctaagatcatacctcaaggaactagagaaacaagaacaaaccgaacccagcagaagaaaggaaataaccaagatcagatcagaactaaatgaaattgaaacaaaaaacactacaaaagataaatgaaagaaaaagctctttctttgaaaacataaacaaaattgatagaccattagcaagattaaccatgaaaagaagagaggaaatacaaataacctcaaaggagataaaacctcaaaaaggagacataaagatcattcaaggctactatgaacacctttacacacataaactagaaaaactagaagttatggataaattcctggaaaaatacgaccctcctagcttaaatcaggaagartcagagaccctgaacagaccaataacaagcagcaagattaaaaaattaccagcaaaacaaag

SEQ ID NO: 648267 - DNA, 584 bp, Homo sapiens
aaaaacgaaatcaagatggaaattaaaaattattccaactgaatgatgataatgacacaacctatcaaaacctctgggatacagctaaggtgatgctatgaggaaagttcatagccctgaacgcctgcatcaaagagtctgaaagagcacaaacacacaatctaagatcatacctcaaggaactagagaaacaagaacaaaccgaacccagcagaagaaaggaaataaccaagatcagatcagaactaaatgaaattgaaacaaaaaacactacaaaagataaatgaaagaaaaagctctttctttgaaaacataaacaaaattgatagaccattagcaagattaaccatgaaaagaagagaggaaatacaaataacctcaaaggagataaaacctcaaaaaggagacataaagatcattcaaggctactatgaacacctttacacacataaactagaaaaactagaagttatggataaattcctggaaaaatacgaccctcctagcttaaatcaggaagaatyagagaccctgaacagaccaataacaagcagcaagattaaaaaattaccagcaaaacaaag

SEQ ID NO: 648268 - DNA, 520 bp, Homo sapiens
caaagagtcaatttggctagaaagtttacctttttcaccggtctttcaaatagtaactatctgactcaataacaataagtacatataattttttgctatatctagatgttctacaaactttcataatgattcaaaatgtattagtccattctcacattgctttaaaaaaatacctgaaatragtaatttgtaagaaaagaggtttaattgagtcacggttctgcaggttgtacaggaagcatagcagcttctgcttctagggaggcctaaggaagcttccaatcatggcagaaaggaaaaggggaacaagtacatcacatggtaaaagtaagagcaagagagtgagggaggaggtgttacatatgcttgtaaacaatcagatatcatgggaactcaatgactcgcttggggacggcaccacaggggatgccttcatctggcattcatttcttaggaatgccaaaccattcataagaaatctgccaccctgatccaatcacctcccaccggaccccacctc

SEQ ID NO: 648269 - DNA, 520 bp, Homo sapiens
caaagagtcaatttggctagaaagtttacctttttcaccggtctttcaaatagtaactatctgactcaataacaataagtacatataattttttgctatatctagatgttctacaaactttcataatgattcaaaatgtattagtccattctcacattgctttaaaaaaatacctgaaataagtaatttgtaagaaaagaggtttaattgagtcacggttctgcaggttgtacaggaagcatagcagcttctgcttctagggaggcctaaggaagcttccaatcatggcagaaaggaaaaggggaacaagtacatcacatggtaaaagtaagagcaagagagtgagggaggaggtgttacatatgcttgtaaacaaycagatatcatgggaactcaatgactcgcttggggacggcaccacaggggatgccttcatctggcattcatttcttaggaatgccaaaccattcataagaaatctgccaccctgatccaatcacctcccaccggaccccacctc

SEQ ID NO: 648270 - DNA, 576 bp, Homo sapiens
tgcatttcactgacggttagtgatattgagcattttattttatgtttcttgtcctcttgtatatcttcttttgagaaatgtctgttcctatcttttccccacttgttaatgagattattttttcttgttgagtttagttccttgtagattctggattttagtcctttgttagatgcatagtaacaggcattcctgagggagaaaaagaagamaaattaaaatatctggaaaacattctggataggataattcaggaaaacttctctagtctatctagaagcatacttctttaaatatgtttcttaccaagaaggtgaaaagctttgttgcaaacagtgttatttcagggagtggatgtatcatatgtaatgaacttgtcttgagatgcataacagctctgtgtaaagggcaagcccatttatgcaattcacaatacatacccccagtgctttggaacaaggctcttctttgtagcataaaccacaaggttaggtgactgcacctgttctcataagctcagatctctcagatacaccatatcacaaggtgagacaggtacagcatcaatctatcaca

SEQ ID NO: 648271 - DNA, 568 bp, Homo sapiens
aatcattctatgagccagcatcagcctgtaccaaaatctggcagagacacaatgaacaaagaaaacttcaggcccgtatctttgataaatatatacacaatagacacgaaaatcttcaataaaatattagcaaaccaagttcagcagcacatcaaaaagtgaattcgctacaatcaagtaggctttattcctggtatgcaagcctatttcatcatagacaaatcagtaaatgtggtacatcacataaacagaattacaagtaaaaaccataygattatctcaatagatgcagaaaacgatttcaataaaaataaatttccttcatgataaaggctctcatcagactaggcactgaaggaacatacctcaaataataagaaccatctatgacaaacccacagccaacatctacggaatgggcaaaagctctaactactccctttgagaactgaaacaagacatgcatgcccactcacaccactcctattaatagtactggaatacctagtcagagcaatcaggcaagagaaacaaattttaaaaaatccaaataggaaaagaataaatt

SEQ ID NO: 648272 - DNA, 624 bp, Homo sapiens
tgtgggtgttttatagctaatgtattttccttcttcagaagttattttttgtttagactcttgatgtttctccctatgggtatgcagattggaatatccaaatactacaggggaagctatacagatttcttggcatggcttctttcgtacactgctctgcaaattctagttactctggtccctcaaaactctgatctctgtctcctcagcacagtgattcttctgggctctgtttggcttcgtcttctgctgtggtcctaaaattacctccagatataaagccagagtacatgtagtgctcacttcctatgttttcttgtcttgaggattagtcacccattgctttctgtccagtatataaaatttattgttttatacatttcatgcacycctgtagttgtttatggttgagattaactttgaaatctacaagatacttttaaataaaggacatcaaactccaattcaaaacacgtgtgttctgtctctatccacaatcacagatatatttctaaaatacgtgtttctaaacatctacatcctacttgttggcttctgtgtgccatcctcaggaggccttttctcatatcatgggctgggcctgcctctctgccatatacattt

SEQ ID NO: 648273 - DNA, 612 bp, Homo sapiens
cttactcatgttgctaagtgaaactttatatctattgattagtagctctccatttccccctcctccactagtccctggtraccactattctagtcattgattttatgaatttgactattttagatacttcatacaaaaggaaccatgcagtatttatctttctgtgtctggcttattacatttagcataatttcctcaaggtctatccatatggtcacacagtacagaatttccttcattttaaaggctgaatagtattccattgtgtaaatacatcacattttaaaaaatccagtcacctgtcaatggacatttaagtagtttccttgtcctagctattgtgattagtgctgcagtgaacacaagaatgctaataatatcccttaaagatcctcatttcaattcttctggatatatacccacaagtggtattgctggatcctacagtggttgtatttttaaattttcgaggaacttccatgctgttttccatagcagctgcatcattttgcattcttgcaaacatgtataagggttccaatttcctcacatcctcaccaacacttgttgtcttttttttttttgataatagccatcctaataggtgtaagg

SEQ ID NO: 648274 - DNA, 564 bp, Homo sapiens
ggtcacacgggagcaggtctatttctggagaataccttttttagactcaacaaaatcccagggatgaacacagttttgatataatagaatttgtatacactaaacccctttattgcaatatgtctccaatcgtttgatgccctagatgcaattattgctttagaagctaaagtaagcaaattctcttttcaaaaggaatatgaattcttgggcttgkgcctccacttcctgatctaacttctctggaccctgaggcatgggcattgtagaactgagttatcagattttaagagcatgtagggggtctgttttgtgacttaatgttatcttcagaaaatcaactaaaatctgtttaaatatcatgtctgaaataagtgtaaagactaaacggatgtggttacaatcttgaaactagaagctatagccagaaaataggtcaagaaaaaaatagacacaaattgcctggatcttggccataaaggtcaagtactgctggtcacaaaacaaggaggattcttcagagaaactgagggactcacataatagttctagtaacaattacaa

SEQ ID NO: 648275 - DNA, 564 bp, Homo sapiens
ggtcacacgggagcaggtctatttctggagaataccttttttagactcaacaaaatcccagggatgaacacagttttgatataatagaatttgtatacactaaacccctttattgcaatatgtctccaatcgtttgatgccctagatgcaattattgctttagaagctaaagtaagcaaattctcttttcaaaaggaatatgaattcttgggcttgtgcctccacttcctgatctaacttctctggaccctgaggcatgggcattgtagaactgagttatcagattttaagagcatgtagggggtctgttttgtgacttaatgttatcttcagaaaatcaactaaaatctgtttaaatatcatgtctgaaataagtgtaaagactaaacggatgtggttacaatcttgaaactagaagctatagccagaaaataggtcaagaaaaaaatagacacaaattgcctggatcttggccrtaaaggtcaagtactgctggtcacaaaacaaggaggattcttcagagaaactgagggactcacataatagttctagtaacaattacaa

SEQ ID NO: 648276 - DNA, 582 bp, Homo sapiens
cctgcttccaccttcacttcactgcagtatatattctcaacatagtagccaaaatgattctttccaaaagtaagccagatcctgatgagagaggaggaaggaagaaaccactcagtcaggcagttagggcaggtcctcggtagaactccttcaaaccaagaacagcctgaaaatcaagctgtaggccccagataagaaaaagcccacatccctatatggaaacacccactctgtgagcccagatgaagaaaattgactacttttctgggcacatttctctccttttggtgcctttgtcccgttttgtactcttcttcctgattatctcatacctttcatctgttttacatatacctatctttctgtgattggccayaggcaaagtcttaatttgcataaagtgaaatgtcactaaagctctcaattggttgcgggccaagccttcacttctgcctccaattggttctttacactgtcctgtgtcttcctgagacttgtggtttcaaaaatggctcatagaccagtcaacccactcctcctcattctcagtccataaaaaccccaaacctagccccacagccg

SEQ ID NO: 648277 - DNA, 604 bp, Homo sapiens
gacttttacaaatctttggcttttcagattttttttaacatgaaggacgctcatcaaaattattttcgatgcttttaagcaaactctgatgcmgttagagtcattgttatttgcaagcattgagggaatatcacttgcatctatatgtattttagcggccacaccttaaggatattaataccacataggtaatatcacctaataccataagggtattaatatgacatttaatcttattttgggcttttaagtttagtttattggcattttttaaagttataattcaaaatgggggtggagcaagatggcctatcccatgcccctggacaggaacaccaaatttaacaactatctatatcttgtgaaggtgttttttttttctgcatagaaaccaaaaatcaggtgtgcactcacagtacctggttttaacttcatgtgtctgaaagcagcactgaagaggttagaaaagaccatcttgatctgaggatgccacccctctcccatctcccagcagcagccacgtggcatggagagaatctgtgtgctagggagagggacagcacagtgattgtgagatactgctttgaactcagtgctgccctgt

SEQ ID NO: 648278 - DNA, 627 bp, Homo sapiens
tggtactggcataaaaacagacacatagaccagtggaacagaatatagaaaacataaataaatccagacatctacagtgaactcatttttgacaaaggtgtcaagaacatacattagggaaaggacagtctcttcaatcaatgttgcagggaaaactggatattcatatgcagaagaatgaagctagacgcctatcatttgccatatacaaaatcaaatcaaaatgtattaaagacttaaatctaagatctcaaaccatgagactactgaaagaaagcaatggagaaactccccaggatattggagttgtcaaagatttcttgcgcaatatcccacaagcacaggagaccaaagcaaaaatggacaaagaagatcatatcaagttaaaaagcttctgcagagcaaaggaaataattaacaaagtgaagaggtaaactacagaatgggagaaattattggcaaactacccatctgackagattaataaccagaatatgtaaggaactcaaacaactaaataaaataaactaataatctgatttaaaaatgggcaaaagatctgtatagacacttctcaaaagaagacatacaaatggcaaacaggaatatgaaaaggtgctcaatacc

SEQ ID NO: 648279 - DNA, 508 bp, Homo sapiens
cacatgtttggttgagacgggactgagtagaagtagtccaactttactgccagtgaggtgaacatgtactctgtactgtttgctaattatgttttaagaacttccttgggccaggtgccatggctcatgtccgtaatcccagaactttgggaggccaagatgggtagatcatttgagcctaggagtttgagaacaacctaggcaacatagcgagacccccatccctacaaaaaagaaaaaaaagagttaactgggcatagtggcacatacctgtagtctcagctacttggaaagctgaggcaggaggatcacttgaaaccaggagatgaaggctrcaatgtgccgtgattgtgtcactgcacaccatcctgggtgacagagcaaaaccctgcctctcaaaaaaaacaaaaaacaaaaaacaatcctcatctaccctgcctaactcctaaggtataaaaaatgtgattcattgacagacatatttgcctaagatcataaatgaagctag

SEQ ID NO: 648280 - DNA, 508 bp, Homo sapiens
cacatgtttggttgagacgggactgagtagaagtagtccaactttactgccagtgaggtgaacatgtactctgtactgtttgctaattatgttttaagaacttccttgggccaggtgccatggctcatgtccgtaatcccagaactttgggaggccaagatgggtagatcatttgagcctaggagtttgagaacaacctaggcaacatagcgagacccccatccctacaaaaaagaaaaaaaagagttaactgggcatagtggcacatacctgtagtctcagctacttggaaagctgaggcaggaggatcacttgaaaccaggagatgaaggctgcaatgtgccgtgattgtgtcactgcacaccatcctgggtgacagagcaaaaccctgcctctcaraaaaaacaaaaaacaaaaaacaatcctcatctaccctgcctaactcctaaggtataaaaaatgtgattcattgacagacatatttgcctaagatcataaatgaagctag

SEQ ID NO: 648281 - DNA, 611 bp, Homo sapiens
gctggtccatgacccttgttggccataattagaggatgcctaggacagcctcctttcagagaagcagagcactttggaggatgaagagttgaaggcaacgtaggccattagtactctgcagattccttggaggctgcagaggattattaagagtctagttaatggggcaacacatgagtgaggaaatgccagggattccttggctcatcagacaatgcagacacactaaaaattacagaagtgttttggctcaggagctggaggagtgctgccaagttctagagacattccccagatttcccataaacactgggcaggcagcgggaccacagccacccctccaggaaactggctcctttcatcattaaatcgaaaggggggaaatgacacccttggctaagaaacactaaagttccctttttccacaaatggagaataagtacagatagaagagaaaggccactttcaaagagrcaataaatctgccagcattttggcctaacacaatttctgcttattttgaatgcatactcagaaaaatgccggccgaaaatccagatgtttgctgaacgtagtcatgatatggatctaaagggaaaaaaaggtagatt

SEQ ID NO: 648282 - DNA, 573 bp, Homo sapiens
atgaaacttgagcaagttattaaacttcttctaagttttagkttctttaatgtggggtcctatccaaatagttttgtctagaattaaacacatgtaaaacacatagtaaacacccaataatagttcattactgggacaaactataagtatcttctgtaacttgctaagtgctattggaaaacagtttaaaaagacaaaaagacttttggtaaaggcagtttttgcttatctaatcaacatgcagagtgcactgcttacaaagtttacctctatatactagactgcaagctcttgtaagagagggacaattttctcagtggtactgagtcaggccgtgtgtgggattgcaaaggctcataaaatagtaatactctatctagtagtacatgacttcttctttatttaacaaacatttattcaacaaacattgaataaatgtttgctaaataaacaaaaaaaaaacatgagttgaattttaccgttatttgtaacattatcttctcaacccctgcacacacacacaatctcctttaaataatagtctcctatcattgcttaaagttacatttgttg

SEQ ID NO: 648283 - DNA, 491 bp, Homo sapiens
ttattctcagtactgtttcttttacagatgaccttagctgtctttggcttcactgctttcacgattttgaatttcatctgataaacttcattctagcccagtggttcctccacttagaacttaagcactctrtgatacctggctgttttggaatcttagctgaactatctgtccttgtttgtctcatggttctacattgctttgtgtcatttcttatttttctatttctagtcctagctctagtccatgcttggatttctctataggagtacaagcttttacctattaagaaacaataggtaaaatcttgagagagagagagagagagagagagagagagctctcaatggagatcagggaactagccccaatcccatctttgttccctaaaagagaaggaactgtggcctctttgactggaaatttcccacttcttgatacaagtgttaaaatgatgcagacagcaccctatccccacttccccagctttt

SEQ ID NO: 648284 - DNA, 487 bp, Homo sapiens
agaattcaaaatggaaactgcataaagcaacatataaaaacttctctccttttccccttgagaaaaatgtttcttagtttttgaaagatttggacaaaatagggtccaaagtctacttatgtcataaatttttccttcctgaaaaaatgatttgactttgaagtataccaaagtattgtgatgataatggatctttctgtatataattaagtcagatgttatagcagaagtttattgacgagaggcatagatgttgtaaaagttctgattcagttttctcacaaagctgacgcaagtgatttttttttttgtttgttttttgaccaagtcttgctcggtcacccaagctggaatgcagtggcatgatcycagttcactgcaacctctgcctcctgggctcaagcgattctcctgcctcagcctcctgagtagctgggattataggcatgcaccaccatgcctgctatttttgtatttttattagata

SEQ ID NO: 648285 - DNA, 542 bp, Homo sapiens
cttattaaatacacatgcaggtcgggcacagtggctcaygcctgtaatcccagcactttgggaggccgaggtgggtggaccacctgaggtcaggagttcgagaccaggctggccaacatagtgaaaccccgtctctactaaaaatacaaaaaaaaaaaataaaaaagaaaaaaattaactgggcgtggtggcaggcacctgtaatcccagctacttgggaggctgaggcaggagaaatgcttgagcccaggaagcggaggttgcagtgagtcgagatcacaccattgtactccagcctgggcgatagagcgagactctgtctcaaaaaaaaaaaaaagttcattgattactgtttttccccaaggttttttgttcacctgtaaagtaatatgtagttgataagaggatgggggggatatttaagatctttattctgacaacactttctgttgtcctaaactgatgtggcagataggatagatttgagtcaaagaaagggatatggatttggtgaattattgtgccttattcattgaatattg

SEQ ID NO: 648286 - DNA, 542 bp, Homo sapiens
cttattaaatacacatgcaggtcgggcacagtggctcatgcctgtaatcccagcactttgggaggccgaggtgggtggaccacctgaggtcaggagttcgagaccaggctggccaacatagtgaaaccccgtctctactaaaaatacaaaaaaaaaaaataaaaaagaaaaaaattaactgggcgtggtggcaggcacctgtaatcccagctacttgggaggctgaggcaggagaaatgcttgagcccaggaagcggaggttgcagtgagtcgagatcacaccattgtactccagcctgggcgatagagcgagactctgtctcaaaaaaaaaaaaaagttcattgattactgtttttccccaaggttttttgttcacctgtaaagtartatgtagttgataagaggatgggggggatatttaagatctttattctgacaacactttctgttgtcctaaactgatgtggcagataggatagatttgagtcaaagaaagggatatggatttggtgaattattgtgccttattcattgaatattg

SEQ ID NO: 648287 - DNA, 597 bp, Homo sapiens
tgggtgtccaggtacctggttccagtaacatggcctgtctgcccttgcagtgcagcactgtggaccagagcctggacattaatctgatgaagagggacttgcaggatgttcagaagttcattctgatgcgtgaggtggtgcagccagtgaatacagtgccctccttcatgaaagacaatagtcacatttcccatctggccattgatattgtgcagagcagagacatgcttgtccacaccrtccgtttggccacaagtgggagttctgccctcatccgaggagtcttctaccatcttttgatttggggcttttgattctaaatgagcaatttcagtttcaagcttttcatctgccacctctccttgcaaccagcaaaacccacaatactcactcatctttgtcatcttctatgcatcttgtttacagtttgaatttttatcttttctcatactttggtcatattttaattggaaagacaatactttgtgccctcaccattgcttcttaacttttcaaaatagccatttcccagcaaaaccatttagtttaagtaatttaagataatacagcactttgatattgtgctttaaaaaaaaa

SEQ ID NO: 648288 - DNA, 573 bp, Homo sapiens
gagaaataaagtggaactaaaatggtatttaatgaaataawgccgaaaaacatcataaacctgttaaaagacataccaccacagattcaagaagtaaagaaaatccaaattatagcaaacacacaaaaaaatctacatcaagacacatcataatttgcttctgaaaaataagtcaaaaaatactgaaagcagccagagggaaataacactttatctacagaggtactcttactggaatagcagtggattttgtacatgaacccatgagattcagaaggaactggggcaacatttttcaagtactgaaagaaaagttctccttttcagtctgagggtgattcctgtattcctgggtgtattcatccattttcacactgctgataaagacatacccaagactgagcagtttaccaaagaaagaggttttttggacttacagttccacattactggggaggcctcacaatcatggtggaaggcaaacaggagcaagtcacatcttacatggatgcagcaggcaaacaaacagagaacttgttcagaggaactcctcttttgtttttttttcaagaa

SEQ ID NO: 648289 - DNA, 464 bp, Homo sapiens
gtgaataaactcaagaggaaaaaaggccttttatgtgatgggattcaggacatgccaccccaaaatatgaccagaatrtgccaccctcaaatatgcttctttggcataaggattatttgaagtggttcttttgacaactgcagatacagcagtagctctgaaaagttgtctttttgtaagagaaatttacatttacaaaagaaattcccatttttaagggtgcctccctctctgcaccaggaggagaaagattactaaattatcagaaactcttcatcagtggagaaggcatccacttaaatctgcatagaaaatcttacccttggtttatggtgcttttcctggccattgcatcttaatagggccttttcctatacactcctttttttgtttcagagaaacaaaatatttaagcctaaagtctaatttgagatctacaggaggtgtgtgtgttattaaacatt

SEQ ID NO: 648290 - DNA, 621 bp, Homo sapiens
ggctggaaagtctactctagcaatatttattatatccacataytgagaattatagaatcaccaaatgttataacatgcttctatagagtgttgggtttttgaatctttgcactgccactttactatttgtatgatagtgtgttgcttagtctctctaaggcttctgtttctttattataaaaatgggactaatatttacatacaagaattaaatgagatcatgcatatgatgtgcatagttcattacttgcattgggattagcactcatatatggtaatttccttcccttctgagttttacaggtgaagaagtttatatttctcaaaattaaccagctggctgaaagttggacattcatcgagcttggaacatccagacctcatttattacactccttactatacaactatctttgggcaagtcacttaggctcattgaggttgtttctccatctgaagactgagataataatatttacctctcggagtcattgtgtggaccaaatatataaagtatttgaagcaccaatatctggcaaagagtttgcactcaacaaaatggcagctgttattataatccaggctaatttcccctttctccatagctctatgctgtctttg

SEQ ID NO: 648291 - DNA, 621 bp, Homo sapiens
ggctggaaagtctactctagcaatatttattatatccacatattgagaattatagaatcaccaaatgttataacatgcttctatagagtgttgggtttttgaatctttgcactgccactttactatttgtatgatagtgtgttgcttagtctctctaaggcttctgtttctttattataaaaatgggactaatatttacatacaagaattaaatgagatcatgcatatgatgtgcatagttcattacttgcattgggattagcactcatatatggyaatttccttcccttctgagttttacaggtgaagaagtttatatttctcaaaattaaccagctggctgaaagttggacattcatcgagcttggaacatccagacctcatttattacactccttactatacaactatctttgggcaagtcacttaggctcattgaggttgtttctccatctgaagactgagataataatatttacctctcggagtcattgtgtggaccaaatatataaagtatttgaagcaccaatatctggcaaagagtttgcactcaacaaaatggcagctgttattataatccaggctaatttcccctttctccatagctctatgctgtctttg

SEQ ID NO: 648292 - DNA, 571 bp, Homo sapiens
acactttttgtatccccatcaaatgcaatagcttagcatacatatggcttctagcctgcttgaagatgagcatcttgtatagtttaaatgatcctgagctgggaactgttgtttctcatcaccatcatcagtggagatggtggcagtaggttctccctgccttttggcagttcttaatcttatttttgtgtcacggatccctttggcagacagtgatatctatggaccatttctcagaatgttatttttaattttataaaataaaacctgtaagytgagaaaggaaaccaattatactgaaatacgcttatcataatattgtgacagtaatacatgtgcccaactgttaacacatcaagcaagatctagtagcatgtctaagagctactgttatcttgaagaagtgatgaacataagtaaaactttgacatctacggcaactcgagtgggatccctcgaccaaagttactgggatcaggtaactttggtccaagtgtgggtatgacagaagatgagcctataaaggttagagatggctatgatgaaccttcactgatataccagagggatg

SEQ ID NO: 648293 - DNA, 563 bp, Homo sapiens
atccaacatgacatctccccctccgtctccccaagctctttctctaagtccaggctctatagttccagctgttctataagaacccaaaccaaaactgaataaaacaaaagcctccccacaaaaccacaggctgtggaaataaggttctttggaacttaatggctagattgatagttattacaaggcaaaatctttgacataaatcacagactcttagaaatcaacatgtatttgaamtgactgaataaatcatcctatgggtaacaggaatagtgtcagattttgagtcaacaagataaaactttcaacagtatgctacttccaatggggaaggaatggtcatgttttctgagtcagttcctaaaaactgtaaagagttttcatttgttttttgttttaaaacttaatgaagctttggatcctatagtcaatttacttaaaattactcattttggcctctagactatactgtaccaaagttcattgtgtgtgtctcctacagcagctcttgcattgttaagagtaagcccctttcactgttgtacaatgcgaaacacaatgct

SEQ ID NO: 648294 - DNA, 638 bp, Homo sapiens
  misc_feature 28: n = A,T,C or G
ttcctggtctttctgtagaacctatggnctgagaagacagtagaattgacatgttcttaggagagttgaggagctaaaccttttgagcagatgttactttatgtaarggcttcataatttagtggcataaaacagttggctttcaaaaagtgggatagactatgccctgaatagaatcagaagagaagattgtctacagatctgatggaggtcaactcattgtcaaaaatttaagtatgcaatttagagttgtctttgacctattctgggtcctggaaatgctactacttatattaaacagtaagacagggagaggtaaggttatgccatggtacacatggctgccataaacaacatgctcttgggtcaaaaaccttcagccagccaggcttgagctatgaggagcatctcctatgtagaagatggaaaagaagtgagtggggaaaagtcaacagtcaacaacatctttatgagattccttctttatgggtgctctggagaaaccattagaacaataaacaggttattaaacatccatacctcttggcaccaagtaaaatgatttttggtattatatagaaacaaacattttggcctctctaaagcatttaccagaattaattaaaatagttcatatg

SEQ ID NO: 648295 - DNA, 240 bp, Homo sapiens
ctgtctttattttaatctcttaatcctgttatattcataagcygaggatgtacatcacctcaggaccactgtgataattgtgttaactgtacaaattgattgtaaaacatgtgtgtttcaacaatatgaaatcagtgcaccttgaaaaagaagagaataacagcaatttttagggaacaagggaaaacaaccataaagtctgacttactgcagggttgggcaaaaggagccatatgtttc

SEQ ID NO: 648296 - DNA, 240 bp, Homo sapiens
ctgtctttattttaatctcttaatcctgttatattcataagctgaggatgtacatcacctcaggaccactgtgataattgtgttaactgtacaaattsattgtaaaacatgtgtgtttcaacaatatgaaatcagtgcaccttgaaaaagaagagaataacagcaatttttagggaacaagggaaaacaaccataaagtctgacttactgcagggttgggcaaaaggagccatatgtttc

SEQ ID NO: 648297 - DNA, 240 bp, Homo sapiens
ctgtctttattttaatctcttaatcctgttatattcataagctgaggatgtacatcacctcaggaccactgtgataattgtgttaactgtacaaattgattgtaaaacatgtgtgtttcaacaatatgaaatcagtgcaccttgaaaaagaagagaataacagcaatttttagggaacaagggaaracaaccataaagtctgacttactgcagggttgggcaaaaggagccatatgtttc

SEQ ID NO: 648298 - DNA, 622 bp, Homo sapiens
ggctagtagtaacagtgacagagcaarttgttataagaagaacttccaattatgaagcatccaaaaatggaaatttctgcctcttcaagcaggaagtaaatcaaatttgaaaatattagggaaaaaaagcctgggagtcttcaaatgagatacatactttggatgagggatttgccaagatggccattgtgattctagagcgttaaacaaattgtaccttaaaattgtataatgtagacagtcgtgtgtgggccaagtaacttaatgaaagacaaatagagtttcctttttctttgtgtcattgagaaaaatatatatattttaaatttacttctaggaatatttactaattgaaaataattcataaatggagtcaaatagagttgacaatgaatgaataaccaagagtagatggaaagagattagtaaagataagcaattgtggaataatcttatagtacttttgagtgctttttattttgtgaattaaattatgtgaaatgataaatgatttatagcataatcgaaagaagaatgacaccacagcgaaggcccatattgagcagcaagtcaactgctagggctacgcgaggcaaagttggttggcaaccaggttcctcaa

SEQ ID NO: 648299 - DNA, 531 bp, Homo sapiens
accaaacactttatcattcaaactgggatgcctttgaaaatgaaagggctagagttaataactatagcaagacagtgattgcaaattggccaggccatagaatcccctggtgacaatgacattttctgcagaaaagagactactctatggattcttagatatcaatagtgtgtgtgctaaagtgaggtggaccaatttcccccaaaatccttacaaagagtcaagaaagccaaaatttgaggataaacaagttgataaaccactaactaaattaacaaagaaaaatggagagaagatccaagtaagcacaatcagaaatgacaaaggtgaaattacaaccaatcccacagaaatacaaaagagcctcagagactattatgaacatctctatgcacacaaartagaaaatctagaggaaatgggtaaattcctggaaacatgcaaactcccaagattgaatcaggaaaacatagaaaccctgaacagaccaatatcgagtttcaaaattgaagcagtaatttttaaaaaagc

SEQ ID NO: 648300 - DNA, 582 bp, Homo sapiens
caaatatgcatattttgagaagttaatgaaatatttcttattctataccaatttttaatgctaacaagattaccaatgttattcacagttgttcatatatgaaagccgcatttctagataactaataggaaaaacttgtctatccaaccccaaggcaacaattacacaaattagtttgctttgcttttaagcaacaagcagactatcaaaatattaatctgataaactacaaagtaaattagattaagcaaagtagctactttgtatttttatgttttaaatattgtcatgtgcttatcagagaagtaattyctatatagtaatttatttctgcattttaatgatgttaaaatcctctttacacttatcgtttaaaaattttaatatttcttaaatgtatagaaataaattttaatttggcacgcaaattaaaactggcatttatactcaaaggagaaaaggatgactctctagaagaatataaatattggctaaacataggctttatatttttgttcttttttttttttttttttgagacgaagtttcactcttgttgcccaggctggagtgcaaaggcat

SEQ ID NO: 648301 - DNA, 446 bp, Homo sapiens
atttttgctaccacttggccctcaatgccagtactcctctgcgtttagagctcggctacagaaacggtgattcrccacaacactggatcggaagagggttgggctgggctttgtcggagattacagaggtttccaaagaagtttttgattacttccaatttttgccttcaatgctgacaggttttaccctcgccccactaggattccttgattctaatgagggtcccctccccagctctccctctccatttgtcccaggcacttcatgatcaatatccctcacactcgggtgagtggatgcaccacgagcaatcatttcagatgctcagggtcagccatcgctaatatctcccctcagagctacccattgcttcctctaaactagcttaatattgtgtttttaaaaaatggaattacaggtgatgatactgttgggttttggtgga

SEQ ID NO: 648302 - DNA, 446 bp, Homo sapiens
atttttgctaccacttggccctcaatgccagtactcctctgcgtttagagctcggctacagaaacggtgattcaccrcaacactggatcggaagagggttgggctgggctttgtcggagattacagaggtttccaaagaagtttttgattacttccaatttttgccttcaatgctgacaggttttaccctcgccccactaggattccttgattctaatgagggtcccctccccagctctccctctccatttgtcccaggcacttcatgatcaatatccctcacactcgggtgagtggatgcaccacgagcaatcatttcagatgctcagggtcagccatcgctaatatctcccctcagagctacccattgcttcctctaaactagcttaatattgtgtttttaaaaaatggaattacaggtgatgatactgttgggttttggtgga

SEQ ID NO: 648303 - DNA, 446 bp, Homo sapiens
atttttgctaccacttggccctcaatgccagtactcctctgcgtttagagctcggctacagaaacggtgattcaccacaacactggatsggaagagggttgggctgggctttgtcggagattacagaggtttccaaagaagtttttgattacttccaatttttgccttcaatgctgacaggttttaccctcgccccactaggattccttgattctaatgagggtcccctccccagctctccctctccatttgtcccaggcacttcatgatcaatatccctcacactcgggtgagtggatgcaccacgagcaatcatttcagatgctcagggtcagccatcgctaatatctcccctcagagctacccattgcttcctctaaactagcttaatattgtgtttttaaaaaatggaattacaggtgatgatactgttgggttttggtgga

SEQ ID NO: 648304 - DNA, 446 bp, Homo sapiens
atttttgctaccacttggccctcaatgccagtactcctctgcgtttagagctcggctacagaaacggtgattcaccacaacactggatcggaagagggttgggctgggctttgtcggagattacagaggtttccaaagaagtttttgattacttccaatttttgccttcaaygctgacaggttttaccctcgccccactaggattccttgattctaatgagggtcccctccccagctctccctctccatttgtcccaggcacttcatgatcaatatccctcacactcgggtgagtggatgcaccacgagcaatcatttcagatgctcagggtcagccatcgctaatatctcccctcagagctacccattgcttcctctaaactagcttaatattgtgtttttaaaaaatggaattacaggtgatgatactgttgggttttggtgga

SEQ ID NO: 648305 - DNA, 593 bp, Homo sapiens
tttaatctttcacacaactttaattttattttcctgtttaatactcttcagtaaatattgtgaaatacagacttcagtccaaataatccaattttactggaaactctgaagagttgatactgaggacacaccagcttgaccaagctaaacgagtcacacagccactatttaaaatgtgttctgtggccatatgattgtccaaaaacacatccaaagaaaatgtattcaaaagagacttttattgagttcatccaagcataaaagagcagtaagagcaagaaaggctcagcattgaccttggcatgaccttrtggccaccatgttggtgtctcaatgccagtgctcagggaacattggggatatccctgctgcccctctggatgagataatacattcaggatcattggtccatagatgatggggtcccctgctgaaattcctacaggggccaggaaggaatatgaatgagtaagaatgctggggaattttcttcaggatacattttttggaatattgagcacatagccatctctttcgctttcataacaataaagtctgaggtctcccacctttctggaagcaactggttctct

SEQ ID NO: 648306 - DNA, 593 bp, Homo sapiens
gtgaaaatcatacagaggcttgtaatgctcatgggtagaagcattcaatgttgttaacatgtcaatcatgcctaaattggtgtatagattcagtgcaatccaattcaaacatcaagtagatgttttagagaaaattgataaactgacctcaaaattcacaaaggaattgaaaggatctaaaagagtaaaaataacattgaaaaagaacacatttagagaaacttatttcaagacttatcacaaaggtacaacaatgaaaacagtgtagtgtcactgttaagagtggcaaatagataaatggaacacaacagaaactccagaaataaacattcacataaatggatgtctgatttctaacaaagtagcaagaacaatttagtggagaataaaagatgatagtttcaaaaaatgattctataaacattagatattcatatgtaaaaaataactcatgcatatcttttataaaataacttaaaatggatcacagacttaactataaaacataaaacartaaaacctatagaatgaaacatcggagaaaatctttgtgacttcaggtggcaataatttcttagatacaaaaccaaaaa

SEQ ID NO: 648307 - DNA, 347 bp, Homo sapiens
atactttgtcaccttgtgacgtttcttaccttggtctgtgcacagagttacctggttgccgtggtgttgcaagccttttcctccccatgttgttgagggtccgggtttatttgtcacaccagttggtgggggggacctgatccctcaccttgaggccaccacaaygagacagtgggatgtgcctcctcatgagaggtgaccatagaccccttccccaggggagaatgggaatcctggacaagccccaagaaattattggaagtaaatgcttggtgtcgcaaagtgaaaccagcactcagggaagtttttttcagcaaggcaatttacttctgcagaagggtgctccc

SEQ ID NO: 648308 - DNA, 347 bp, Homo sapiens
atactttgtcaccttgtgacgtttcttaccttggtctgtgcacagagttacctggttgccgtggtgttgcaagccttttcctccccatgttgttgagggtccgggtttatttgtcacaccagttggtgggggggacctgatccctcaccttgaggccaccacaacgagrcagtgggatgtgcctcctcatgagaggtgaccatagaccccttccccaggggagaatgggaatcctggacaagccccaagaaattattggaagtaaatgcttggtgtcgcaaagtgaaaccagcactcagggaagtttttttcagcaaggcaatttacttctgcagaagggtgctccc

SEQ ID NO: 648309 - DNA, 613 bp, Homo sapiens
tgtccctgaaaggaaacagataaagcaagaaacttggaaaacatatttgaggacatagtctatgaaaatttcccaacctcaccagagaacattcaaattcagcaaatactcactcaggtacaacagtagaaacctcctgcgagatactgtacaagacggccatcccctagacacatactcatcggattttcccaggttgaaatgaaagaaaatgttaaaggcagctagagggaagrggcagattatctacaaagagaatcccattaggctaacagtggacatttcagctgaaaccatacaagccagaagagattggggacctctattcagtattattaaagaaaacaaattccaacaaagaatttcatatccagccaaattaaacatcataaatgaaagagaaataagatcctattcagaaaagcaaatgttaagggaattcattatcaccagacctgccttacaagacatgctgcaagaagttttaaatacagaatgcaaagattattcctagccaccacaaaaccacacttaagtatgaagacactattaagccagcacacaatcaaatctgcataataaccagctaacaacataaagacagaatcaaatt

SEQ ID NO: 648310 - DNA, 580 bp, Homo sapiens
ttatttctccttcacatatgaagcttagtttggccagatatgaaattcttagttggaaattttcttctttaagaatgaaatgaggccaggtaaggtggctcatacctgtaatcccagcactttgggaggctgaggcaggcagatcacctgaggtcaggagtttgaaaccagcctggccaacacagcaaaaccctgtctctactaaaaatacaaaaattagctggtcatagtggcgggtgcctgtaatccctgctacttgggaggctgagacagaagaatcacttgaacccaggaggtagaggttgcagtgagctgagatcatgccactgcactcagcctgggcaacagagcaaaactctgtctcaaaaaaaaaaaaaaaaaaaaaagaatgctgaatataggccaccagtctcttctggcttttagggtttctgttgaaagatctgctgttagcctgatggagttccctttgtaggtaacctgccctttctctctagctgcctttgacattttttctttcatgtaaactttggagaatctgaygattatgtgtcttggggatggtcttgagtaatatctc

SEQ ID NO: 648311 - DNA, 329 bp, Homo sapiens
ttggtatcactctctttggttaactaaccttctgcaaaccctcttattttctgctcctttgcagtacatcctgtagcctcttactgggaattctcattgttcctgctggcaccctcttggttgaagtacctgcagtgatagcccaaggcctgtttccctctgagtactcacttggcccaagggaaacatatcatccttgccataccccatagtgggagttcagactgactcactgctgccttctctttctgtgttattatggattgtggtctcccttcagaattttccagaaaaggggctcatragtctctatgttcatatatgcctca

SEQ ID NO: 648312 - DNA, 567 bp, Homo sapiens
tccacttctttaaaggcctacaggctatcctaactatcccatcccaccattctctaccatctgcacacccagagtcttgcctggagtgggaaaatactataacccttagctctcctctttggctaggggttgtctcygtttctcctcagtgggtctaggaatgaatggaagacaaattacagcttaactatggaggagaggagaatgaggaggagggaagggaggaagagcagtagcagcagcagcagcttatctgtgtgtgacccatctcctatgggtctgtttcctcgacacagatgcccatccataaagagtacctgcttcttgctctacctctgctatcctgatatgacagtctttgtaacttatatgttcccttgggatatagtcctagaaataaaatagttgagttaagaaaatgtacacttttaggcttctgctatatattttagaattggcttcaggtcagtttatatcatcttacgtactcactgaaggttaatgagggggacttattgtccagtgcctttaaagatcttagctagtttactgggtagaaaagagctt

SEQ ID NO: 648313 - DNA, 567 bp, Homo sapiens
tccacttctttaaaggcctacaggctatcctaactatcccatcccaccattctctaccatctgcacacccagagtcttgcctggagtgggaaaatactataacccttagctctcctctttggctaggggttgtctctgtttctcctcagtgggtctaggaatgaatggaagacaaattacagcttaactatggaggagaggagaakgaggaggagggaagggaggaagagcagtagcagcagcagcagcttatctgtgtgtgacccatctcctatgggtctgtttcctcgacacagatgcccatccataaagagtacctgcttcttgctctacctctgctatcctgatatgacagtctttgtaacttatatgttcccttgggatatagtcctagaaataaaatagttgagttaagaaaatgtacacttttaggcttctgctatatattttagaattggcttcaggtcagtttatatcatcttacgtactcactgaaggttaatgagggggacttattgtccagtgcctttaaagatcttagctagtttactgggtagaaaagagctt

SEQ ID NO: 648314 - DNA, 560 bp, Homo sapiens
tttagtaactgatgagccactggagccctagggtccaactgtgtcttaaggagtctacaggctccatgtaagaatctccccagcttacatgtttgtcctatttaatcactcacttagcaactgctgcatcggcttgtgtgccaggggttgtgcaaggccctggaacacagtggtgagcaagacaaacatggccccatttagggacagcctgcaggctggtataaaagcagacattcccttttgtcttcctgcaagggaaagaaaagctccctgtttggtatttaaggaatagtagaaacacaagtgacttctcacaaccctgcatataaaatcaaagagaataagagcaatgtaatgaatggctcctaaaattcatctggacactccggagttcagtttattgttcaytttaaagaaaagtgagaaacaccccttagtggctgattacaaggagcagcatatctgcctctcagaagaatctggggagcacagaatatctttatttatggtggagaatgttctactgtcaaggtttggcgagttctttacttagctcagcg

SEQ ID NO: 648315 - DNA, 558 bp, Homo sapiens
aatatacataaaattttaatatgtatatttagttatatcaaaaacttgccacaaacagggcaggaaaaracaggagatttaagattttagtactcttgttatatcgggttctgggatggataatatgaaataaaatagagaatatatgtcaaatctggcatttttacatgcaagcttgtaggaaacagataatcatttaagggtttaagcaagaaggcagcatgaccaaaatatattttgtacagataactgtatagtggcattcatatagattttgtagcatgtttggaagtaggttggggagagactagaggaatgaggccaattaaggggttcaaatgggggaaaaggagtgatgttaaataatggaatgtcagtcataataaagcagagatattaaacagtttccacattttccaaagtgaatcaatagaccttggttgtgttttagccagagggaagttttttctttggaccaggaatataggtggtaaacatgtatacaaagatgtattacagattaggcttaagttgtaggaggtgatatcaattaagtgt

SEQ ID NO: 648316 - DNA, 539 bp, Homo sapiens
tgcaggaagtcagggaccctgaacagagggaccagctggagccgtggcagaggaacataaattgtgaagatttcatgaacatttatcagttcccaaataatacttttataatttcttatgcctgtctttactttaatctcttaatcctgttatctttgtaagctgaggatgtacatcacctcaggaccaccgtgataattgtgttaactgtacaaattgattgtaaaacgtgtgtttgaacaatatgaaatcagtgcaccttgaaaaagaacagaataacagcgatttttaggraacaagggaagacaaccataaggtctgactgcctgcaggattgggcaaaaagagccatatttttcttcttgcagagagcctataaatgggcgtgcaagtaggagagacatcactaaattcttttcctagcaaggaatattaatattaataccctgggaaaggaatgcattcctggggggaggtctataaatggccgctctgggagtgtctgtcttactggttgagataaggactgagatacgccc

SEQ ID NO: 648317 - DNA, 539 bp, Homo sapiens
tgcaggaagtcagggaccctgaacagagggaccagctggagccgtggcagaggaacataaattgtgaagatttcatgaacatttatcagttcccaaataatacttttataatttcttatgcctgtctttactttaatctcttaatcctgttatctttgtaagctgaggatgtacatcacctcaggaccaccgtgataattgtgttaactgtacaaattgattgtaaaacgtgtgtttgaacaatatgaaatcagtgcaccttgaaaaagaacagaataacagcgatttttaggaaacaagggaagacaaccataaggtctgactgcctgcaggrttgggcaaaaagagccatatttttcttcttgcagagagcctataaatgggcgtgcaagtaggagagacatcactaaattcttttcctagcaaggaatattaatattaataccctgggaaaggaatgcattcctggggggaggtctataaatggccgctctgggagtgtctgtcttactggttgagataaggactgagatacgccc

SEQ ID NO: 648318 - DNA, 546 bp, Homo sapiens
cattatcatttatcagcaggcttccgtatgtgatgtatctcaacctagaaaactctttcccaaccatatgcgttgacatttctgacatcctttagggatccctctccgaactctttattctgggttagatactttctcagtactcttcctgacatctttttctactgtaaaattaaataattcaaacttgaaactgttggaactttaaggcattttgaacccagagaggattctggctatgtggcatgagtcacatagtgtgcagctggaacttcttccccttcctataaatgattaagaaaggccttgtggcagcagagataagaccccactcagatcatcacccctcctcatggaatgtcaaggcaatcttccttttattatggcaatctgtaacttatcaagttgccataacytatgcactgaccttgtatggaaaatgttgcaactctccctatataaatgaaaccttgacttatccacttaggaacgaagacccattgttttagagtatgtgttttccaggtggtcatcttcaagctttgc

SEQ ID NO: 648319 - DNA, 582 bp, Homo sapiens
gaatagttagtagccttgggagagctcaagggtccatttaagaaaatgcagcaacatacatggaactattggagcaaaaaacagagaacaaccacacagaaaggattactggagagatggtcaaacctgagatatttgatcacaactggtaagaaagagaaagggcagaagctagcagtctcggccataaaaacacacaggaaagagaattcttgtrcactgttggtgggaatgtaaattggtatagtcattatggcaaatcacatgaaacttcctcaaaaaattaaaaatagaattaccgtatgagacaaccatttcacttctgggtatatattgaaggaaaatgaaatcaatatgtcaaagagatgtatgttctcccatgttcactgcagcattcttcacaatagccacagaatggaatcaacacttagtggaattcatagtataatcttatattttcaaatatgtgcatgcatatgtgcttctctgaaggtgtgcttgtgcaggtgagtcgaggtatatgaatatgtatacctactgaaaaatacctagaaagatattcaaggaactgaaagcagtggc

SEQ ID NO: 648320 - DNA, 590 bp, Homo sapiens
ggctaacttcattgttgtcttattttaagaaattactgcagtcacactcatcttcagtaatcagcactcgatcagtcagcagccatcaaccttgaggcaaaaccttcctcctgcaaaaagattactactcgctgaagcctgagatgatcataagtattctttagcaataaagtacttttaaaataaggtatgtgcattatttagacataatgctattgcatacttaatagaccacagtatagtgtaaacataacttttatatatactgggaaaaacaaaaaaattatgtggctcactttattgcaatatttgcctttccatggcagtttggaacctaactcacagtatctctgagatattcttttactgtgtaagctgctttctttttatttcctatattcagttttctgatgtaccaggctttggatcttttgttggtattcatccattcaggatgcaatcctcctttcttgatggtaactcttaatattataataactgtatttctctgctattaggactctagtgtattctgttctcttttgcaaaatctttgacccwtgaccctggtctgtaaaacagcaatgttt

SEQ ID NO: 648321 - DNA, 373 bp, Homo sapiens
acagcatgagatagctacttaatatttttggaaattatgtgatctaaattataatatagtttctattatattttacaayttcatatagattaacatggtttttttactttcttttgaaaaagagaacaacaaaaataacattacaaaggcataagaaattgtgtggtctctctctctctctctctctctctctcacacacacacacacacacacacatacatacacacagacacacacacccctgtatatatcaaataaactccacatgaaacactgagcatctttgttggggctttgacagctaaattaaattaatttaagttaagtcaaatatcttgcattgtatatttaagttgccattcaagtagtaca

SEQ ID NO: 648322 - DNA, 373 bp, Homo sapiens
acagcatgagatagctacttaatatttttggaaattatgtgatctaaattataatatagtttctattatattttacaacttcatatagattaacatrgtttttttactttcttttgaaaaagagaacaacaaaaataacattacaaaggcataagaaattgtgtggtctctctctctctctctctctctctctcacacacacacacacacacacacatacatacacacagacacacacacccctgtatatatcaaataaactccacatgaaacactgagcatctttgttggggctttgacagctaaattaaattaatttaagttaagtcaaatatcttgcattgtatatttaagttgccattcaagtagtaca

SEQ ID NO: 648323 - DNA, 616 bp, Homo sapiens
gtatggcttctgtgtttgaatactggctcctcccgttactaattgtgtgactttgagaagttgcatctcaattttctcatcttaaatctggggataaaaataatatctatctcagagagctgtatgggaggattaagtgggctttatatgtgtaaaggtcttctgagagtgcttgacacacagaaacagtaaatagtatctattttcaaacaatcatagtttttgtatttgagttattttctttgcaaataacataaaacacaactaaagctgacttatagaaagggaaaaaactcactggatcacagaacagtacaggaacatgtatgcattcagtcacagcttgatgtagggtttcaaatcatttcagcaaaatctgatttttgtctttcatgtcttgggcctacaaactctgcgaatatttcactckcagacatgtgttgaatttagtcacagaatggctgttagttctcaggggtacatgctttccagttgatatcaagtagaaaaaaagcaagagaatgtgtcccagcattttcagctaaagttttattgcaggtcagttcttggacaaatatttgaagttgaggaaatgcaacactgattggcttatacc

SEQ ID NO: 648324 - DNA, 614 bp, Homo sapiens
attctttgggatgattgagtggaactcacagagctgaacattccttgcgatgtagcagtttagaaacacactttatgcagaatctgcaagtgcatatttggacctctctgaggaattcgttggaaacgggataatttcagctractaaacagaagcagtctcagaatcttctttgtgatgtttgcattcaaatcccagagttgaactttcctttcaaagttcacgtttgaaacactctttttgcaggatctacaagtggatatttggaccactctgtgtccttcgttcgaaacgggtatatcttcacatgacatctagacagaagcattctcagaagcttctctgtgatgactgcattcaactcacggagttgaacactccttttgagagcgcagttttgaaactctctttctgtggcatctgcaaggggacatgtagacctctttgaagatttcgttggaaacggaatcatcttcacataaaaactatacagatgcattctcaggaactttttggtgatgtttgtattcaactcccagagttgaactttcctttggaaagagcagctatgaaacactctttttctagaatctgcaagtggacgtttggagggc

SEQ ID NO: 648325 - DNA, 521 bp, Homo sapiens
tttggagggctttgtggtttgtggtggaaaaggaaatatcttcacctaaatactagatagaagcattctcagaaactgctttgtgatgattgcattcacctcacagagttgaacattcctattgatagagcagtttggaaacactcttgttgtggaatgtgcaagtggagatttggagcgctttgaggcctatggtagtaaagggaatagcttcatagaaaaactagacagaagcattctcagaaaatactttgtgatgattgagtttaactcacagagctgaacattcctttggatggagcaggtttgagacacactttttgtagaatctacaagtggatatttggacctctctgaggatttcgttggaaacgsgataactgcacctaactaaacggaagcattctcagaaacttcttggtgatgtttgcattccaatcccagagttgaaccttcctgtgatagttcaggtttgaaacactctttttgtaggatctgcaagtggatatttggaccactct

SEQ ID NO: 648326 - DNA, 338 bp, Homo sapiens
aggtttgaaacactctttttgtaggatctgcaagtggatatttgtaccactctgtggccttcgttcgaaacgggtacatcttcacataaaatctagacagaagctttctcagaaacttctctgtgataattgaattcaactcacagagttgaaccstcctatggatagagcagtgttgaaactctctttttgtggaatctgcaagtggatatgtggacctctccgaagatgtctttggaaacgggaatatcttcacataaaaactaaacagaagcattctcagaaacttctctgtgatgtttgtgttcaactcccagagtttcacattgcttttcata

SEQ ID NO: 648327 - DNA, 561 bp, Homo sapiens
ccttgaccctgcctaggtatggtgcctgctggcagttgaacattttatactcctgggtttttatccaggttctaatcttgcagctgcattcagggaaaacaccctaaatacagcttctgtcaaacgagcctcacagttgaatgttcttcccaggacctgtaaaggacaaattgaactatttactcacacatacctcccttttcaaaaagactgctgtcaacacacttcctaaacacagactaattgcacaaattaagatggcggtttggtgattttcagggaaatctaaaagcttcaaaaaatctaaatggttttgtaagtcttcagaatgcacacttacaacagcayaaatgagggcttctctcccattagggaactggagtctgttactttatccccattgactctcgtaatgtccctggctcagcaccacatgcaacagatgcaaagggtcaccagtgaagggcaaaatattttgtgaaaataatagaactatgctatctacgtagccagtttttcccactccgcactttcagtgctatcgccttgctttcatatagt

SEQ ID NO: 648328 - DNA, 564 bp, Homo sapiens
aaatagcatgaggtcgcccaggcaatcattagaagagctagaaaccaaaatcagttagtctggctcctaagctcaaagtcttaaccacaatgctgattttagatgaggcaatgctcttggagawtttcttatttaatgatttaaaatatttttgtagccatggaaagtttaatttaaaatatattatttaaaaatcctattatatgagataaataaaggctgaactagactgcttagcaatatggtggactagatccactgggaacttttcttttacaaatatgggaatttttaaaatgtttaaatatatatctcagtactttagaaaacaaggaaagtttacaagggacagaaacaaagtgggatcagaaatagagtatactaaaatggaagatttcttaaaagcactcatgaattcctggtaagctagagctgttcttttaacagctgtgtggggaagaagaaaagatcttggacctatagaaagatgcagaatcacaaaaggcacatttgaaaagctggaattcccaaaaaagatactccctgagtgaaatgctgagtaag

SEQ ID NO: 648329 - DNA, 564 bp, Homo sapiens
aaatagcatgaggtcgcccaggcaatcattagaagagctagaaaccaaaatcagttagtctggctcctaagctcaaagtcttaaccacaatgctgattttagatgaggcaatgctcttggagaatttcttatttaatgatttaaaatatttttgtagccatggaaagtttaatttaaaatatattatttaaaaatcctattatatgagataaataaaggctgaactagactgcttagcaatatggtggactagatccactgggaacttttcttttacaaatatgggaatttttaaaatgtttaaatatatatctcagtactttagaaaacaaggaaagtttacaagggacagaaamaaagtgggatcagaaatagagtatactaaaatggaagatttcttaaaagcactcatgaattcctggtaagctagagctgttcttttaacagctgtgtggggaagaagaaaagatcttggacctatagaaagatgcagaatcacaaaaggcacatttgaaaagctggaattcccaaaaaagatactccctgagtgaaatgctgagtaag

SEQ ID NO: 648330 - DNA, 615 bp, Homo sapiens
attctatcagataaactgaacaaaaagattgaaatgatttttaaaaatcaagcagaaattctggagttgaagaatacaatggacatactgaagaatgcatcagaatctcttactagcagaattgatcaagcagagaattagtgagcttcaagacaggctatttgaaaaaacacaatcagaggagataagagaaaagagaattttaaaaaatgaagcacacctacaatatctagagaagggcttcaaagggtcatatctaagagttattggccttgaagaggaagtagagaaagagacagaggtagaaattcaaagggataaataacagagaacttcccaaacctaggaaaaggtaacaatattcaaatacaagaaagttacaaaacaccaagcagatttaacccaaagaagmctacctcaaggcatttaataatcaaattcccaaaggtcaaggataaagaaaaggctcctaaaagcagcaagagaaaagaaacaaataacatacaatagagttccaatatgtctagcagcagacttttcagtggaactcttacaggccaggagagagtggcatgacatatttaaagtgctgaaggaaaaaaaacttttaaccct

SEQ ID NO: 648331 - DNA, 625 bp, Homo sapiens
ataatacaattgcctttcttgtgtactttatgttatgcatgctcatctaactagcaaactgaaatttatctaaccattttaatcttcaagttcaagactgtcaggatatttttatatttgtgrgactcatgcaggtccacaagttccaattccctgggaaggaaacaagagaagctatctatagtgagacacagagatgtggattgtaataccaatccagccatcatttactctctgattctccattttataatttgttacattcaaaaatcattctaagtttacaggactgttgaaagaattaagtgtgaaaaaaactggtacagttatattatatatatgtgtgtgtgtgtgtactttaatatatatttcttcagcaatttaagagatgaactggagataaggcaaatctagagatatgagaagctgaaactagcccaaggaagaacacttaatcatagagaagaattcctgcagatattctccactatatacataccagaatcctgaatgtcttatctcatttgcccaaacaggacacatgatccctggaagagacttggaaattgatggcctcaaaagatagtgccctggaatatgcctctttgtatttttgtgattttga

SEQ ID NO: 648332 - DNA, 372 bp, Homo sapiens
aggaattcatttgggtatttttaatcttgaaggtaaagaacaagcacctttggagatgagtatgcatccagcggcaagcgctccactctcagtctttactaaggaatctrcagcctccaaacacagtgaccaccatcaccaccatcaccatgagcacaagaaaaagaagaagaagcataaacataagcacaaacacaagcataagcatgacagtaaagaaaaggacaaggagcctttcactttctccagccctgccagtggcaggtctattcgttctccttccctttcagactgagaaggggacaaaaagacctttcctttcatgtccagaagaatgtatgtaactaaagctttgtcctctgtgaagaatta

SEQ ID NO: 648333 - DNA, 576 bp, Homo sapiens
ttcagcttttgccattgggagctctattagttggctcacttgctttattttacaggaacatcagtgtatatttgtctgctctggaaatagccttctaagtagggaccacgggaaaaagttaatagggagaaaaagcaagtgttcaaaataaaatattctaattaaataaacaaaatataaaaatgtkaagtcagtatgtaaaaatatttctaatgtacttaaatgacaaaatttaagttaatgatagaatacaaagatatttacttagcattataaataattatgatactatatacaggaaggggaacatcacactctggggactgttgtggggtgggggaaggggggagggatagatttagggagatatacctaatgctaaatgacgagttaataggtgcagcacaacagcatggcacatgtatacatatgtaactaacctgcacattgtgcacatgtaccctaaaacttaaagtataataataataaaataaataaaataaaataaaataaaaatctactgaaaactagaaaaaaaaaatcacctatgactaacataacttcatccctaaaaaa

SEQ ID NO: 648334 - DNA, 581 bp, Homo sapiens
aaatgttctctaagtgattctgatggatgtcttttctcagcaacaccttgctactgagataaatgttcttcatagagatgagcaaaaaggagaaggggttttttactgctatcttagttagaaagtaaattcttacaggggcagagacttggctttatttgtctycctttccaacacattgcttgtgaaataatagttaaacatctcatcaaagctttcatgaatttactgaggcccaggtttctgtataaataaagagaaaggctggaaggtaacaagttaagtcagttttcacctaaacataaatgaggtagaggaagagaatgcaggatctgtccttggagatttgaaggacttaaatgtttagcactaacatattgaacctaattcttagcttcagaggtagtgagggcaatcacccaagagatcaatgcttgctctcccctgaggatgaatacactcctgcctttcctattccataccccaaaccttatttctgaccaactgcccaagacagagaatagttgttattttgttcttctccttttgccgtgaaaaattcatttaggacataacatcat

SEQ ID NO: 648335 - DNA, 594 bp, Homo sapiens
gactttcattgacttgattgggtttttcattattttcctttacctacctgtattagtctgttctcacactgctaataaagacatacctgagtctgggttatttataaaggaaagaggtttaatggactcacagttccacatggcttctggaggacctcacaatcatggcagaagaccaaggtagagcaaagggatgttttacacggtggcaggcaaagagagcttgtgcaggggaactcccctttataaaaccatcagatctcctgagacttattcactaccatgagaacagcatgggaaagacccgcccccatgatccagttacctcccacttggtccttcccatgacacaggaattatggcaactacaattcacgatgagatttggttgaggacacagccaaaccatatcactgcccacattatcaaattaacaaattatctatttgatgttctcaatttttaacacagatatttacttagattttaaggtcacttaatatttccgttcttcaccttaacaatagaaagaccttagaattcttcaaaatcraccttctatctcctgtgttatcattttctggtactttaatt

SEQ ID NO: 648336 - DNA, 165 bp, Homo sapiens
tcaaatttaattctgctagaatacttggtctattgattaactgcagctaatatggggtctacttcacatacaagttaaattcagtgcccttaatcagtcatatgrtcaggtcaacagtaataaattatgcaatattttttcacccctatagttttaatttctctt

SEQ ID NO: 648337 - DNA, 616 bp, Homo sapiens
tattccaaggtcaccaacatggcacatgaatagatatgtaacaaacctgcatgttgtgcacatgtaccagaacttaaagtataataataattaaaaaaaagaatgaggtaggcatgttacaagttgagttcctggctttggagaaaagcaagtccaacttcaaaaagacagaggttcacttgctgcttctttttcctctttatcaattatttgatttagtcaaattttctattcaagaaaatctcatgtgtacagttacagtggggttatctaaatgtgtaattatgtgtcaaagtagattagttctgctatctaaataatggttctggagaatgttctcataatgtttgttcattaatcaacctatgtctcactatcagtcttccaagtggcgtatgagctgggaaactaattaagccacataccatgtgaccttctgaaccagatcaacataaagaaattgctaaagaaacaagctctagattctagattcttttttcttgtattcatttagagatgatttacatttatttaatgatagaatgggaatacaatgggaggraagcaatgactgagacaagccacaaaaacacgtctagccttgagagttgcaacg

SEQ ID NO: 648338 - DNA, 539 bp, Homo sapiens
ataattccatttacatgaagcatccagaaaagataaatgtatagggacaaaaagtagattcatgtttgcaaggggctggggctggaagctggtagtgactgctaatgggcatgaggaatcttacagtgatggaaatgctctaaagttggattgtagagatggctgcacaactcagtaaatgtactaaaaatcttttaactttaagttaaaacagatacattctatagtatgtaaattatatttcaacaaagctgttttaataaaaaaaggaaaaatgtgtttactatatcggcttagaaacatgcctcatttctaggaaataaaagatagaggtgagagatgatttactttgagaaaagacattgtgtcacctatgaaattttattaggcacagagtcatattttaaggtagatagttctgtaytgctgaaatagtaattttaatgtctttatgttgccacatgttaagaccataatgtagttataaatggaaatgtttacacctgaagtgagtattttcaaattaaaatttaattaag

SEQ ID NO: 648339 - DNA, 395 bp, Homo sapiens
aaattcctgggtgtccaggcaaaacatcccaaaaaggcagagccttatatsaaacttctactagggcagtgcagaaggaaaatatggggttggaactcccacactggagaccaccatcatgcagaccccagattcatagacccccccccaaaacttgtttcctcaatgtggaaaagtcacaggcactcatcaccagcccagcccatgagggcacccttggggcatataccctgcaaagccacaggtgccaagctgcccgaggccttgggagcccagccctcacacccctgtgtcctggatgtgggacagggtttcaaaaagggtgattttggagctgtaggattgaatgactggccttctgggtttggagtttcatggggccagtaagtcctatc

SEQ ID NO: 648340 - DNA, 570 bp, Homo sapiens
ggaagccacttccatccttaactgtgaaaaatgagtaggggaaggtggtgcattctgggtcccatgattccagactgaccattggccctatttgagtgcagctgctgttaggcagaaactctggactccaaactctcagtaaaacttctgaagacactgctgttgctattgcagctgtcagcaccattgattcagctgagaagaagyccagaatatcacactgacacccacgctgttggttgtgtttttttgaaccagattgaaattaatatctattgtatggttcaatttctatgaagttcaatgtcaagcaaatgtaatttataaagataaaagtaagaacagtggttgcctatagtaatgattggaggttcacaatagagactcctggattctagtaatactcaattcatattcatgtaggttgtgatgacattagtattttacattctaaaaatgtttaatgctatatgctcaagatctgtgtctttcacatgtgcatatcatatttcatatttcaattaataaatcagtaaaaaaagttccacttcaggatacaatactgtagaa

SEQ ID NO: 648341 - DNA, 482 bp, Homo sapiens
attaaaaattattaattgtgggtctatgtgaccctgtaagaaggctacatcactactatatacttagaacctaaatttctatgccaaaatataggcgaatatagcaaatattgtccaaatttacaaggaaagagaaaatgaattctgtgttcatcttacagtttctaataaaatccccaacattgaacttaaatgactctccagttgttcattaggagcatatgctgttggttgactgccagcatacattatctcaccttttctttctaagatagaacatattcaatayatccaaggcttccaaggcttcagtacttctctaagtttactgtctcgtcttcagattcaggtatgatgtgattactctaagtatagcctgattctttgccaaaaataagaacaaaaatacgcatatgacccaattcagtacaaaggcaaatcagggcaaattaccttaagagtttttaaaataaatgtttctc

SEQ ID NO: 648342 - DNA, 514 bp, Homo sapiens
ctgtgcatctctgtttcagtaaaaggaggtcaatacagggaactgtggtttctgagaatgcaagatctgcaccaagtaaaggattagatgcagagctacccaagagaaccagctaccaggtggagaggatctgcgaactacaacatgatgatttcacatgatttccactgaggaaagctggcagctcagacttctccttyctggatggtaaacatctatggaagattctatgaattataatgagttaacaaaacataatacactaaatattagactacatcagcagatcctgtgatgaaaacttactgaaaatataactatagagggaggcaatggaaaagagactaaaggtttgaatagagaaaaaaagaaagagtgtcttgtaagcctgacttgccatcatgtcttagagtaagtaaggtataagctggccagagattcctttgaggcacaaaaggtgaagttaaagatattccactaaatttaatttttattatgatataagacaactggt

SEQ ID NO: 648343 - DNA, 365 bp, Homo sapiens
tcttcaaatttatagacaccggggtaaggctacatggttccattgtcaatgtttctattttaacatagcagtgaaagtactttgcagaagaattagtcaagaaaatgaccctaaaaatgacattcaaattgaggaaaaaaattaaaaggttgctgtttgtaggtgacatgatcttataaatagaaaaccataaacaatacatcaaaaaataacaaatgccctcagaaaattagcaatatataacattaacatataattatcagttatgattccatatgctaacaacaaaccatctgataaaaaaggaagaaaacaatctcatttccaatagaattaaaataataartttctgaaaaattaacaaa

SEQ ID NO: 648344 - DNA, 380 bp, Homo sapiens
tggtttgtcctggactcaactttatgtgcttttatgcttctgattattttaatctggtttctttcactgttagaaactataaccacaaaaaaaatcagctttcttgagttatgtgaatcattaaaccaaagggggacttggggacccccagtaaaaagtatatacattcttaaaaagaaacagaaaactggcyacagcagatattgttgatgacttgtcttctatctcctggactcaatgtgttcacctgaaattcacctgtttccaactaactgagagctccccacatcatgcctgtctttctgatttttgggcctgcctgcaagcttcttgaggctaaccagtgcttctcaaccacacataggaacaaagaaggagtt

SEQ ID NO: 648345 - DNA, 607 bp, Homo sapiens
gattcacccctctactaaggtgtgattattctgagaactctatctgatgttataagtttctcactctggctggagcacatactggttcttctaaggcccatatgacctccaggaatttctctggcccattgctaatgaagactcatttttctatctcatggagttttactttatgtaggcacagttcggttctcactcaaggactccagagaacctctacgtaaatctccacagttctctctctgtgcagccctcttctctctgtcagtctgccttratgattctagtcaccttggcctccataaactttgatatcttgctcttaaattcagcaaatcatgatattctctctcggattgtctcataccatgctggaggctggaaatcactttcagtaagtatgctggcactataaagggtatatattgttttctttctctgagaaatcacagttttgtgctgcctatttttttcatgcaatgaaaacagtttatatacttgttctggatttctaaacgtttacaaaagttgcataattctggtaatcattaattcttcatcagcaacagttgaattctcagagacttgtttaactgcccagatgaca

SEQ ID NO: 648346 - DNA, 612 bp, Homo sapiens
cctttaattctgctggttgactatatatttccactgtccttgctatactcagagttgagggtgatttcactacccaattgcaatagatttgatgcctatcacaatagtgctaaatagtcttcctcctcaacaaactatgccctgaagtaacatacctcaaaataataaaagccatctatgacaaacccacagcaaacatcataccaaagagaaaaaaaagctggaaggatttcccttaagaactggaagaagatgagaatgccaactctcaagactcctattcaacataaaactgcaagtcttagccagagtaatcagaaaagagaaagaaataaaagacattacatgggaaaagaggaagtcagattatctcacttcactaaggatatgattctataccttagaaaactctaaagactctgacagaagtcttttacaactaataaactatttagtagtttcagaatacaaaatcaagttacaaaaatcagyagcatttctatacaccagtagctttcaagcttacaggcaaatcatgaatgcaatcacatttaaaatagctacaaaaaatacctagaaatacatctaaccaaggaggtgaaaactctctac

SEQ ID NO: 648347 - DNA, 583 bp, Homo sapiens
acatgactattctcacaaatagaagttgggtctttcacttcctttgtccagaacatttatgatgagttgatggagttaaatcacaagatagactgcttgtattctagcttatggggaataaggcagtgctctgttgtgcctaatcctacttgtagtatcttccaagaatgtttaaaattaccaattgtccatggttaaaaaaaaatctacttcacattatgaaaacaatgggcagtccctggcattttcaaatcgtctttcgaacatttactttaaacaccccttagcattcattaatggtttgtgatagaagtacacttgattaaaatatctcaaattgagttacaattttctttaccattagatcattttggaggtggatgtggggtaataagcagggtgcaaatgtgtggtagataackctgaatttgtaaagctctcaaagaagtaattgaattatttagtatctagatcactgagacatgtgtgctgaaaatatcattaagtagaatagaactttccctcctgggattcccacataatcacaaacctcactggttttctttggattacaatattagaa

SEQ ID NO: 648348 - DNA, 533 bp, Homo sapiens
tcgggtttggctgaaaggaaaacagacgcggtcagcatctccagtgagcccacgcaggcctttccgggctgggccccacctgcctgcatctcggagtcctcggggtcyctgtgtggcccccgtggcctgacaccgaggacacgcctgtagtctgctgatcccagagggaggggtgcatgctgcctggcgtggggaagctgtcgtggcatggcgggtggctcctgggactgcccccagggttcagactggctgggggcttcctgccacacaccttcgtcccagggctgttgggcctgggatacggcccccagtcagaactcaggtgggaggggccttggatgtcacccagccccttgtcacctcacgtggggacccgtctccgcagtgggtgattgggcccggacgtgggtcaccctctgccctcctgggctgcccagtccatgccaggactgaccgttcccacttctggctgaactcttggctctggctctgggccctctccctgaatgctctgtgggtcagggacacggatt

SEQ ID NO: 648349 - DNA, 533 bp, Homo sapiens
tcgggtttggctgaaaggaaaacagacgcggtcagcatctccagtgagcccacgcaggcctttccgggctgggccccacctgcctgcatctcggagtcctcggggtccctgtgtggcccccgtggcctgacaccgaggacacgcctgtagtctgctgatcccagagggaggggtgcrtgctgcctggcgtggggaagctgtcgtggcatggcgggtggctcctgggactgcccccagggttcagactggctgggggcttcctgccacacaccttcgtcccagggctgttgggcctgggatacggcccccagtcagaactcaggtgggaggggccttggatgtcacccagccccttgtcacctcacgtggggacccgtctccgcagtgggtgattgggcccggacgtgggtcaccctctgccctcctgggctgcccagtccatgccaggactgaccgttcccacttctggctgaactcttggctctggctctgggccctctccctgaatgctctgtgggtcagggacacggatt

SEQ ID NO: 648350 - DNA, 547 bp, Homo sapiens
gaaattgcacacttgttttacatcatatacagaaaattagctcaaagtggattaaagatttaaatgtaatatctgaaaccatgtaaatcctggaagtaaacatagggaaaaatctcctcgacattggtcataattggcaatattttttttgatgtaacaccaaagcacaggcaacaaaagtgaaaataaataaatgggactacatcaatcttaaaasgttttacacagcaaaggaaaccatgacaaaatgaaaaggcaacctacgggatggaagaaaatatttgcgacccatatatttgataaggggttatttgaaaaaatataaggaattcacacaattcaatagcaaaaattaataaatacatgaataacgcaattaaaaataggcaaaggaccccaatggacttttttccccaaggaagatatacaaatggccagccagcatatgaaaaggtgctcaacaccactaatcatcagagaaatgcaaatcaaaaccacagtgagatattgcctcataggataggatggctcttataaaaaaacgaca

SEQ ID NO: 648351 - DNA, 646 bp, Homo sapiens
tctctcacatcaacacagaaatagggcacttctcaacattaattttggaattattcaccatttaaaaattgtcactgctctttttcattactgtagataactgagagttagctgttctaggaaaaggccatgtttcagttagtgctatgacttcttttttcgattaaggttgaagcagtgttctcttagtagcctgaacacttctcaaagcgacttatcactagcggctttaatattgagcttctatatcgttgtgtccacctcactttttaaggctgttcatacctggcaatattcacttactctgctatttttaaaaactattttaaagttttaagcacaatgttgactcttctgtaatttcctaaaattatattgttttcctacagacagctcaactttccttgatatgtaacactytaggaaaataactgccttgtaaaataaacgtgattttttttttcttttataccagaacaaatctgctgttttggagtgtacccaaccccaaaaccaaaactcacgtttgcaaagtgtgaaacatttatatatcaggtctttcctacgtgctaggaaatagcgtatggccattaccccattaaacctttacaagacctcaatgaggtgcagataaactgtactgtcc

SEQ ID NO: 648352 - DNA, 171 bp, Homo sapiens
ggaagttttccttgattattccctcaaatatgtttttcaaacttttaagagttctcttyttcctcaggaacaccaattattcttaggtttggtcatttaacataatcccaaactttttcaaggctttgttcatttttttatttctgttttctttgtatttgttggattggg

SEQ ID NO: 648353 - DNA, 574 bp, Homo sapiens
gggccaaacaaaataatgcttatgtgcaaatctggcccaaaccaaataatgcttatgtgcaaataatgcttatgcgcaaatctggtcaccaacatttcctgtgttaccctaaagccttctgagatctaatacaccaaattgcagagaaactctgccctagagttttctacctggaaaattgtgcagagagcaaagatcatgacagacccagagagcgggctgctgacctaaaaaggatgaaatcttaaacagaatccactggaaagtaggaagatggagaagtcgggggttaggatataagatggctactggccccaggagaggcaagagttctaatggtcagaagatgacagtgagagtgattagctggaaaacaaggcctttgagagaggtttttgcatgaaaaaacagatataagggcttttcactacatataaggctgtgacctaaataaacttgaatgtctgcgagaggcaaactgacttgartacttctgagcatctatcgagtcttcaaggctttcagatgcatgaatgatatatgatccttaggcctctttcaaagactttgtttt

SEQ ID NO: 648354 - DNA, 538 bp, Homo sapiens
gctgcagtgcactgtgatgaccatgcctgtaaccagcgactgcactccagcaagagcaacatggcaagaccccatctcaaaaagaaagaargaaggaaggaaggaaggaaggaaggaaggaaggaaggaaggaaggaaggaaggaaggaaggaaagaaagagaaagcttacttcatagagaaatactgatagcaaacaaagttgtaaatggaatacaaaagaaagttagtaaaatgtttaccgagttaattgacaaagtttgttaaataccattgaggcttctagtggaagtgaaaactggtatacaatctttctggaaataattttaacaatacttatagatagcctcaaaaatgagcccagcagctccttaatgacatggttcattccagagtggagtcagggaaaatacaagacaatgttgaaaaactctgtggtaccagactgtaagggagtattcacaaaaggatggaagcatgttaaaagaacatgggagccctcaattgagagaattcattgagaatgagttctcaatgtc

SEQ ID NO: 648355 - DNA, 288 bp, Homo sapiens
gtctataagggcatgcaagaataaaaataggagagtttttcaagagctttctagtcatgtaagtcaayttgtatcggttaatttttaaaaggtttacttacatgcaataaactgcacacacttcaattgtacattttgataattcttggcatttgtagctctataaaaccagcaacatattaaaatagcaaacatatccattacctttaccaccaaagttttcttgtgttttttctactcactttttcctgcctatccccatcccatccacaggcaaccattgatcca

SEQ ID NO: 648356 - DNA, 288 bp, Homo sapiens
gtctataagggcatgcaagaataaaaataggagagtttttcaagagctttctagtcatgtaagtcaatttgtatcggttaatttttaaaaggtttayttacatgcaataaactgcacacacttcaattgtacattttgataattcttggcatttgtagctctataaaaccagcaacatattaaaatagcaaacatatccattacctttaccaccaaagttttcttgtgttttttctactcactttttcctgcctatccccatcccatccacaggcaaccattgatcca

SEQ ID NO: 648357 - DNA, 288 bp, Homo sapiens
gtctataagggcatgcaagaataaaaataggagagtttttcaagagctttctagtcatgtaagtcaatttgtatcggttaatttttaaaaggtttacttacatgcaataaactgcacayacttcaattgtacattttgataattcttggcatttgtagctctataaaaccagcaacatattaaaatagcaaacatatccattacctttaccaccaaagttttcttgtgttttttctactcactttttcctgcctatccccatcccatccacaggcaaccattgatcca

SEQ ID NO: 648358 - DNA, 288 bp, Homo sapiens
gtctataagggcatgcaagaataaaaataggagagtttttcaagagctttctagtcatgtaagtcaatttgtatcggttaatttttaaaaggtttacttacatgcaataaactgcacacacttcaattgtacattttgrtaattcttggcatttgtagctctataaaaccagcaacatattaaaatagcaaacatatccattacctttaccaccaaagttttcttgtgttttttctactcactttttcctgcctatccccatcccatccacaggcaaccattgatcca

SEQ ID NO: 648359 - DNA, 315 bp, Homo sapiens
atggacattatataacaaaaaaatgatcaatggagcaagaatagataacaattgtaaatatatatatatatatatatgtacccacacctgagaactcaaatatataaggcaaatatgttacatagtaagggacagattctaactttatacaattatacttggataatttaacacattaytcagcattggatagattatctagccaataattaacagagaagcattggatttaaactgcactatattccaaatggacctgacatttacagaacattgagccaaacaacttcagagcacatattcttttcttcagca

SEQ ID NO: 648360 - DNA, 315 bp, Homo sapiens
atggacattatataacaaaaaaatgatcaatggagcaagaatagataacaattgtaaatatatatatatatatatatgtacccacacctgagaactcaaatatataaggcaaatatgttacatagtaagggacagattctaactttatacaattatacttggataatttaacacattactcagcattggatagattatctagccaataattaacagakaagcattggatttaaactgcactatattccaaatggacctgacatttacagaacattgagccaaacaacttcagagcacatattcttttcttcagca

SEQ ID NO: 648361 - DNA, 492 bp, Homo sapiens
ttgtatatgtccaagaattcatccacttctaggttttctaattgttggcatatagttgttcagaatagtctagtgagtctatttctctggtttcagttgttatgtctccattttcatttctgattttatttgagtcttctctttttcttaatcttgcaaaaggtttgtcaattttatcattttcaaaaaaccagcttttcatttcattgatattctgtaacttttttagtctctgtgctatttatttctttccttctactaattctgggttcattttatttttgttattcttttttgaggggcattattagattgtttattggaagaatttctacttttttgatatgagcatttattgctataaacttccttctcaaaactgcttttgctgtatctcatagrgttttagtatgtttcatttacattttcatttgtttcaagaaattttaaaatttccttcttaatttttcattgatctgttgatcattcaat

SEQ ID NO: 648362 - DNA, 492 bp, Homo sapiens
ttgtatatgtccaagaattcatccacttctaggttttctaattgttggcatatagttgttcagaatagtctagtgagtctatttctctggtttcagttgttatgtctccattttcatttctgattttatttgagtcttctctttttcttaatcttgcaaaaggtttgtcaattttatcattttcaaaaaaccagcttttcatttcattgatattctgtaacttttttagtctctgtgctatttatttctttccttctactaattctgggttcattttatttttgttattcttttttgaggggcattattagattgtttattggaagaatttctacttttttgatatgagcatttattgctataaacttccttctcaaaactgcttttgctgtatctcatagarttttagtatgtttcatttacattttcatttgtttcaagaaattttaaaatttccttcttaatttttcattgatctgttgatcattcaat

SEQ ID NO: 648363 - DNA, 492 bp, Homo sapiens
ttgtatatgtccaagaattcatccacttctaggttttctaattgttggcatatagttgttcagaatagtctagtgagtctatttctctggtttcagttgttatgtctccattttcatttctgattttatttgagtcttctctttttcttaatcttgcaaaaggtttgtcaattttatcattttcaaaaaaccagcttttcatttcattgatattctgtaacttttttagtctctgtgctatttatttctttccttctactaattctgggttcattttatttttgttattcttttttgaggggcattattagattgtttattggaagaatttctacttttttgatatgagcatttattgctataaacttccttctcaaaactgcttttgctgtatctcatagagttttagtatgtttyatttacattttcatttgtttcaagaaattttaaaatttccttcttaatttttcattgatctgttgatcattcaat

SEQ ID NO: 648364 - DNA, 593 bp, Homo sapiens
ggtgggaatgtaagttagcataacccttatgggagaaaagtttggaggttcctcaaaagactaaaaacagaactaccatatgacccagcaatcctattggtaggtatatacccaaaagaaaagaaatcagtatattgaagagatacctgcacttgcatgtttattgtagcactattcacaatagccaagattttgaagcaacctaagtgtccatcaacagatgaatggataaagaaaatgtgctacatataacaacggtgtactattcagccacaaaaaggagatcctctcattttcaacgacgtgggtggaactgaggtcattgtgttaagtgaaataagcaaggcacagaaagacaaatttcacacgttctcacttatttgtgggagctaaaaatgaaaactgaactcgtgaagatagagagtagaatgaygattaccagaggctgcgaatgagagggggagaagtggggatgagtattggttataaaaatataattagatgactagagtcaacaataatgtacattaaaaaataatgaaaacagtacaatttgtatgtaacacaaagaaaagataaatatttgagattat

SEQ ID NO: 648365 - DNA, 618 bp, Homo sapiens
caccttgttttagagtagagcatctgagaccaatccacatgttgacagtgctcattagtaagccaattgtagactaaatcttctctctcagagggactgtaaccaagtcaaagctcattagcaaaaaagtccttggtggccagacaagtttcctgcagattatgcagaccaaaccttcttcatttaaatgtttttttaataatttatctcaaaaattttctcaattagagcaaattgacactacattttccttaatacatttaattaattctttactgatatatagggcattgagatacattctgttgctctcatcacttatttctcttgaaaatcctcttagatttaacctacactttatgttcctttgatatttactctattaaagrtgtaaatagaaccctgcagtgaccaatttgaaagttaatagttcatctgcaattgatgaagaaatacaggataggcatgcctatgagaattaaatgctctttgaaaagccaaagcattaaacttttttcagtttgataaaatattctctctcgtgctctaaagttgtattaactctttagcaacaccaaaaatgctgttttgttgttgttttgtcaagtaaaaatactg

SEQ ID NO: 648366 - DNA, 618 bp, Homo sapiens
atactttgatagcaattcgttatttaaataaaggttttggtgaatagtggaattatgcccacctctttccctggtaagaaccatcatactcttagttccttcccccagtttctttgctgctttcacctctcttcttctggtttataaaataattaatatgtgggggcagaayaagcaatatctcttgagtcagtcaaagtgataaatgcgaggtttcctgaggatcaaataagagaaggcatgtaaaacccttggtgtcctgtttgacatagagaaaactctgtaattggcagtgagtttttttattcctttttacacatcacacctgaagggcaggaagacttaaagcacatgtaataaaggtctataaccacagcagtgtttgtgaaagtgaaaatcattgccacattcataaccttttgtgtaaaaaatcagacactctatttcccaagtcaaggagattaatgcagtataaacaaacaacatcatgaaagtgtaaaaatatatatttaaaaaaaatctaccagctcttttgtaacactattatcagaacagcattaaagatgatctcactgttaatctttacagaatttgaaactcttttctatatgaggtccc

SEQ ID NO: 648367 - DNA, 620 bp, Homo sapiens
ttcattgtggactctgtcatataccttgccctctccccycctgccttttgaatttgatcagttttctttactccaccctggttcaggccaccattatctctcccctggattactgcaatggctttgtaactagtgtccctgccattagtcctgtctgctctattccattctcccctctccagcaagagggatctaagatgaaatttatcatgtgactaatgggcctctgccccagacattgggcctttattatgcattgtgaatttctaggaggctttactagatttaacatcttgctaatagatttgaccacaggctttatattcgtgaaatatttcatggggataattttctgctgaacacaaccagggaaatattctagaagatttcaagggcaacagtttacactgtcacctctactttaaaaaagttctgcattagaattcttaaagttctttagaatgtgtcatcttaataataatgtctgacatttattgaattcttattatagaccaggcaatgctaaatatttcacatgcattatgttatataacctccaaaacagccctcgaggtgctattactacctgcatttcatagatgaggaataggagcttaggt

SEQ ID NO: 648368 - DNA, 620 bp, Homo sapiens
ttcattgtggactctgtcatataccttgccctctccccccctgccttttgaatttgatcagttttctttactccaccctggttcaggccaccattatctctcccctggattactgcaatggctttgtaactagtgtccctgccattagtcctgtctgctctattccattctcccctctccagcaagagggatctaagatgaaatttatcatgtgactaatgggcctctgccccagacaktgggcctttattatgcattgtgaatttctaggaggctttactagatttaacatcttgctaatagatttgaccacaggctttatattcgtgaaatatttcatggggataattttctgctgaacacaaccagggaaatattctagaagatttcaagggcaacagtttacactgtcacctctactttaaaaaagttctgcattagaattcttaaagttctttagaatgtgtcatcttaataataatgtctgacatttattgaattcttattatagaccaggcaatgctaaatatttcacatgcattatgttatataacctccaaaacagccctcgaggtgctattactacctgcatttcatagatgaggaataggagcttaggt

SEQ ID NO: 648369 - DNA, 620 bp, Homo sapiens
ttcattgtggactctgtcatataccttgccctctccccccctgccttttgaatttgatcagttttctttactccaccctggttcaggccaccattatctctcccctggattactgcaatggctttgtaactagtgtccctgccattagtcctgtctgctctattccattctcccctctccagcaagagggatctaagatgaaatttatcatgtgactaatgggcctctgccccagacattgggcctttattatgcattgtgaatttctaggaggctttactagatttaacatcttgctaatagatttgaccacaggctttatattcgtgaaatatttcatggggataattttctgctgaacacaaccrgggaaatattctagaagatttcaagggcaacagtttacactgtcacctctactttaaaaaagttctgcattagaattcttaaagttctttagaatgtgtcatcttaataataatgtctgacatttattgaattcttattatagaccaggcaatgctaaatatttcacatgcattatgttatataacctccaaaacagccctcgaggtgctattactacctgcatttcatagatgaggaataggagcttaggt

SEQ ID NO: 648370 - DNA, 511 bp, Homo sapiens
tccattttacataacagtgcactttctacatgtatctcctcttcttcatatatgtattctcctacactttaccagcatgtrttgatcttagatctttttacaaaaggtttagatgatttctcctccactcttgaaagaaatattttatgttctccaaatttgcttgcataatttctttaaatttgcatgtataattcattatgtttctccctattttaacagttgtcatttactgatgttataagtattcttctgtttgcccagtcatctgtaagtaaattacatgcagagggctatgttttcccatagtttaatcccaaatacttagtaaaaatatgtttttaaaatatttttaaatgagtgatgggtggtttggtagatggatggttaaaagaacaattttttaatacataataaatatgagttgaaccatgagaaatgaaatttatagagcactggtacaataatgtgtaattttcctttaaaatgtctttaaaattcatttaataac

SEQ ID NO: 648371 - DNA, 545 bp, Homo sapiens
aaatgagacactgaatggtttagagaattcctaccaatttatatttggggtataaatgtaaaggatgtgargaatgaagtgggttataaaagcagtatctaccataattataatcaaagagtaggttggctgagaaagtgaaatgtaagaattgttttacttcattcactttacaagcagtttttaggaatttgttgtgtgtcaaatataagaatcgttctgaaaataaaaatataaacaaacctgaagctcctccttcaagatacgttggagttatgattagctattacataattactggacaataaacataatattgtaaaaatatgatattgtggaaacaattatttaagattttgtgttataaaaatgggcttctacaaatttacaaaatagaaaccctgaggagacagtaccctgttctgcctgactggggtagggatggaagtgtacagggagctaggtagggaaagagtaatgtttaaaatcaagattaacagttaaaagttttaataggatttaagattgaagtaggagttttccag

SEQ ID NO: 648372 - DNA, 545 bp, Homo sapiens
aaatgagacactgaatggtttagagaattcctaccaatttatatttggggtataaatgtaaaggatgtgaggaatgaagtgggttataaaagcagtatctaccataattataatcaaagagtaggttggctgagaaagtgaaatgtaagaattgttttacttcattcactttacaagcagtttttaggaatttgttgtgtgtcaaatataagaatsgttctgaaaataaaaatataaacaaacctgaagctcctccttcaagatacgttggagttatgattagctattacataattactggacaataaacataatattgtaaaaatatgatattgtggaaacaattatttaagattttgtgttataaaaatgggcttctacaaatttacaaaatagaaaccctgaggagacagtaccctgttctgcctgactggggtagggatggaagtgtacagggagctaggtagggaaagagtaatgtttaaaatcaagattaacagttaaaagttttaataggatttaagattgaagtaggagttttccag

SEQ ID NO: 648373 - DNA, 551 bp, Homo sapiens
tttttgcatcctcatagcttagctcccacttacaagtgaaaacatatggtatttggttttccattcctgagttacatcacttaaaataacgacctctagctctatccacgttgttgcaagacattattttgttccttttaatggctgagtagtatttcctgatgtatatataccacactttctttatccaaccattggtcaataggcaggttagttccatatccttacaactgtgaactgtacygctacaaatatgcatgtgcatgtgtctttttcatatactaatttcttttcctttgggtagatacctagcagtgggattgctggattaaatgatagatctatgttaagttctttaaggaatctccatgtttttcatagtgattgcactaatttacattcccaccagcagcgtaaatgtgctcccttttcaccacatccgtactaatatctattgttttttgactttttaattatggccattcatgcaggagtaaggtagtatcatgtggttttaatttgcatttccctgatgattagtaaagttgagc

SEQ ID NO: 648374 - DNA, 551 bp, Homo sapiens
tttttgcatcctcatagcttagctcccacttacaagtgaaaacatatggtatttggttttccattcctgagttacatcacttaaaataacgacctctagctctatccacgttgttgcaagacattattttgttccttttaatggctgagtagtatttcctgatgtatatataccacactttctttatccaaccattggtcaataggcaggttagttccatatccttacaactgtgaactgtaccgctacaaatatgcatgtgcatgtgtctttttcatatactaatttcttttcctttgggtagatasctagcagtgggattgctggattaaatgatagatctatgttaagttctttaaggaatctccatgtttttcatagtgattgcactaatttacattcccaccagcagcgtaaatgtgctcccttttcaccacatccgtactaatatctattgttttttgactttttaattatggccattcatgcaggagtaaggtagtatcatgtggttttaatttgcatttccctgatgattagtaaagttgagc

SEQ ID NO: 648375 - DNA, 397 bp, Homo sapiens
taaggtttgggtcatttttgtcatgtgccttttagaccagtcaggtggaacacttaactatgttaaatcattttttcaagagttatgactaaacgattggcaaaggagctggagttggaggtaaacactgaagaaatgtggtcaaaggcaatttgaagttgacctggtggtctaaagtgcaatgaccaaactattcagctctcaatgattgatgtgtggacttcacacaaaagcaaatgtggaaattgtgattccaatctcaacmcaaatccagtcagttgctagtctaacctgttgggttatttttaagttttaaaacattgttgataattaaaaccacaatgggctgccaggtcaaacccatgagaatggccaagataagagaactgtacaatac

SEQ ID NO: 648376 - DNA, 421 bp, Homo sapiens
actttaaataatataaacaaatgacacactttttactcaactttttgttgtagaaaagttttttttcaatgaaaaacttctgttaacaatactgttctcaaggaatattttctgtttttataacctgggtcatgggttactactgacatctagttggtagaggccatgaatactgctaaactctctgcaatgcacaagacagtcctyacaacaaagcattatctagcccataatatcaacagtggtaaggctgtgaaatctaaactaaaaatagattttgaaaaaatttcaattgtataattctaccacactaaatatcaatataatcaatataagcatatactctttgagattctcaatcatttaagaattatgagagtcttaaggaacaaagaaaatacaaataatttgcttcgatatt

SEQ ID NO: 648377 - DNA, 556 bp, Homo sapiens
tggcattccttagatctgacaagtcagatattggtatttcttgacctgtttttcttgaaagctgctaagggagaagcagataaagtaaaatggcatatcagccagaagatgtctacagtgtgaggaccgtagcaaaagttattttaaactgcactctggcagccagaatgtcattgtctcagagttaggaaatgctggagctgctgctggtgtgactgtgtgatcttaggctagttactcccttttcrtaggcccgcatttactcatctacaaaatgagaatgtggactagaccagggatattcagactgcattttaggaggtcactgaggctcagtagagatgtggaaggaatggcaaatataaaggattattattgattgcagtgattaatgttacgttgttgctttgtgcggtgatgtctttaagcccaaagaaatggcgagctttgtggctgagtaaagcctgtccctggaagtatagtatctgccatcctcaggagtagaatcctgcttttgtctgaaggaattatcctgaagaccttgagagcaatacat

SEQ ID NO: 648378 - DNA, 556 bp, Homo sapiens
tggcattccttagatctgacaagtcagatattggtatttcttgacctgtttttcttgaaagctgctaagggagaagcagataaagtaaaatggcatatcagccagaagatgtctacagtgtgaggaccgtagcaaaagttattttaaactgcactctggcagccagaatgtcattgtctcagagttaggaaatgctggagctgctgctggtgtgactgtgtgatcttaggctagttactcccttttcataggcccgcatttactcatctacaaaatgagaatgtggactagaccagggatattcagactgcattttaggaggtcactgaggctcagtagagatgtggaaggaatggcaaatataaaggattattattgattgcagtgattaatgttacrttgttgctttgtgcggtgatgtctttaagcccaaagaaatggcgagctttgtggctgagtaaagcctgtccctggaagtatagtatctgccatcctcaggagtagaatcctgcttttgtctgaaggaattatcctgaagaccttgagagcaatacat

SEQ ID NO: 648379 - DNA, 556 bp, Homo sapiens
tggcattccttagatctgacaagtcagatattggtatttcttgacctgtttttcttgaaagctgctaagggagaagcagataaagtaaaatggcatatcagccagaagatgtctacagtgtgaggaccgtagcaaaagttattttaaactgcactctggcagccagaatgtcattgtctcagagttaggaaatgctggagctgctgctggtgtgactgtgtgatcttaggctagttactcccttttcataggcccgcatttactcatctacaaaatgagaatgtggactagaccagggatattcagactgcattttaggaggtcactgaggctcagtagagatgtggaaggaatggcaaatataaaggattattattgattgcagtgattaatgttacgttgttgctttgtgcggtgatgtctttaagcccaaagaaatggcgagctttgtggctgagtaaagcctgtccctggaartatagtatctgccatcctcaggagtagaatcctgcttttgtctgaaggaattatcctgaagaccttgagagcaatacat

SEQ ID NO: 648380 - DNA, 623 bp, Homo sapiens
ttatgtgattttgtgggatcatcacaaatatggggcaaataagggtctaaagatggataactcagcttcagaaatgctagtatcacacagtgttcattataccacttttcccagtgttttctgttgaacaatatggatagacttaatgtggaatgaaaacagaatcgtggataaaccgtctgataaggggaaaatttgaccttaaaattaaatttaattaatggccctgtctaacccatttcagagtttcctggaggtgagagattcatatctgagctttccacctctaatgaggagcggcttcatgaaggaacrgacgggattgctccagaaggtcattgattttcagcctctaaaaggacaactgtaatcctggttgatcttaactctcaaatttaataaaatcagtttaaatattttagacagtgtcaggggagatccagtatttctgtgtgttcactttgtccatggaaaaaggattttattttactactcaggaggagaaaacattgtagtgaaaaatttcagcttgtctctgcactcttacaaattttctctttccatacttagagtccaggatactcactaggtttgaatgagcacttaatttgcctcaaaaatgg

SEQ ID NO: 648381 - DNA, 609 bp, Homo sapiens
ttctttacctggctccaaggactctacaaactcctacttcacaagtttgctccttctcagccatctttgctggttcttctcttcctcccagactcttaatgttggaatgtcccagggtcctgctcccaggagtgcccagggtcctattcccttctccatccttactcacccagtctcatggcatttaaatatcaggtgtatgcaaatagctcccaaatttatatttaaaactcagacatctctctggaactttgtacttgtgtctccagttgcacactcaacatctccacttggatgtctaacacagacatcacagacttaacatgcctaagackcaactcaagatcttccctaaaaagctcctcctccatctcagttgtgagaatctcagctctttcaattgcttgagcccaaaacctctgcctactaccaacccatcacaatcaaacagccccttggctctatcttcaagtgatatttggaaactgacctctcttcaccgcctccactctgctgccctgcttccagtgtccatcttctctctcctcctgctaccacctccttgctctacccttgctctctattctcaatacagcctcccaaatttta

SEQ ID NO: 648382 - DNA, 325 bp, Homo sapiens
cctgccctgtaggaaggcagaatgtaactgttctktttgtttaacgattaagtccaaatctccaagtgcggcactgcaaagagacgcttcaagtggggagaagcggcgataccatagagtccagatcttgcctccagagatttgctttaccttcctgattttctggttactaattagcttcaggatacgctgctctcatacttgggctgtagtttggagacaaaatattttcctgccactgtgtaacatagctgaggtaaaaactgaactatgtaaatgactctactaaaagtttagggaaaaaaaacaggaggagtatgacaca

SEQ ID NO: 648383 - DNA, 462 bp, Homo sapiens
gtcaggactcccatcacagcttagctgagtgctctgctgagagtcttccaaggctgcagttagggtgttgactttgctgtgtttctttttgcagctcttccaggctcacaaggtcactggcagaattcagttctttgtggttgtaggactgaggttcctgctttcttgctgcccatcagtggggggccactctcagctcctagaggcccttgccttgtggcactcttgtaggccctctcctggcrtggcagcttacctcttcaagttcaggaggagactttccatccagactgctaagatagagtcttacataatgtagcaatcccaagagtgacatttcatcacccttgtcatattctgttggctagaagcaagtcataggttccacccacactcaaggggattatgcaagggagtgagtcattgggatcattttagaattctgcctaccatgctgtatga

SEQ ID NO: 648384 - DNA, 593 bp, Homo sapiens
tttatatacctaaaaaaaccaaataattcatgtaactaatttattgcactatttgcttgctagtggtggtctgaaaccaaaatcccagtatctgtgaggtatgcttayagttgtgaaagtagacagaagattagaaaggatatggaaagtttgaacaacactgccaaccaaattagtatttacaagacaataaactgaacacatgcagaatatacatttgtttccagagtaattgatattcaataaaatatttcatatactgtgtcatagaatgtctcactaatttttttaaaaaataaaatcttttgtagatgttgtactcaaatgtaattacatttgaatttgataacaaaaaaataaaaagatccccaaatattttcaaattaagctacacaattctaaaaatcccatgataaaagataaatctcaaaaaaattttaaaatattttaactaaataaaaacaaaataacaacataccaatatttgtacaaaacagctaaaatagtgcttacagagaatattagagatttagaatgtcatagaaaacaaaaatttttaattgatgatctaagcttcctcttaagaaagtaga

SEQ ID NO: 648385 - DNA, 593 bp, Homo sapiens
tttatatacctaaaaaaaccaaataattcatgtaactaatttattgcactatttgcttgctagtggtggtctgaaaccaaaatcccagtatctgtgaggtatgcttacagttgtgaaagtagacagaagattagaaaggatatggaaagtttgaacaacactgccaaccaaattagtatttacaagacaataaactgaacacatgcagaatatacatttgtttccagagtaattgatattcaataaaatatttcatatactgtgtcatagaatgtctcactaattttttwaaaaaataaaatcttttgtagatgttgtactcaaatgtaattacatttgaatttgataacaaaaaaataaaaagatccccaaatattttcaaattaagctacacaattctaaaaatcccatgataaaagataaatctcaaaaaaattttaaaatattttaactaaataaaaacaaaataacaacataccaatatttgtacaaaacagctaaaatagtgcttacagagaatattagagatttagaatgtcatagaaaacaaaaatttttaattgatgatctaagcttcctcttaagaaagtaga

SEQ ID NO: 648386 - DNA, 593 bp, Homo sapiens
tttatatacctaaaaaaaccaaataattcatgtaactaatttattgcactatttgcttgctagtggtggtctgaaaccaaaatcccagtatctgtgaggtatgcttacagttgtgaaagtagacagaagattagaaaggatatggaaagtttgaacaacactgccaaccaaattagtatttacaagacaataaactgaacacatgcagaatatacatttgtttccagagtaattgatattcaataaaatatttcatatactgtgtcatagaatgtctcactaatttttttaaaaaataaaatcttttgtagatgttgtactcaaatgtaattacatttgaatttgataacaaaaaaataaaaagatccccaaatattttcaaattaagctacacaattctaaaaatcccatgataaaagataaatctcaaaaaaattttaaaatattttaactaaataaaaacaaaataacaacataccaatatttgtacaaaacagctaaaatagtgcttacagagaatattagagatttaraatgtcatagaaaacaaaaatttttaattgatgatctaagcttcctcttaagaaagtaga

SEQ ID NO: 648387 - DNA, 619 bp, Homo sapiens
tgttattgctatttgtttcaggtgcccttaataatactgaggccaggtcctttatttccagtttctcaagagtttttaatcatggcttggttttccattttgtcaagggcatttttagcaaggtttgaggtgatgaaattttgtcgtggttgttttatttagtttgttattttagtctgttgggtgttaaaatacagtcatggctctctcatacagtctgttaatattatgaactacatcaattgactttcaaatgttgaaccaactttagattcctgaggtaaatcacacttttactttctactatgattttaatacagtaatctagtgcatttgtcattctccagtgccttaaaaatgttgtattttatctatttatccaccatttaatattattatcagataaaagggttagtctaaccaatctattcagtgactagattcaaaaccgtgagtagactttgtgtgaarctcagtgaaaaaccattgaagtatcactttcaatagtgatgccatgttatttcagaccaatatcagctttgctaagataggaaaacaagtccttaacttaaaaaaacttatgtttgaatagattttttaaataatattcaatcattaa

SEQ ID NO: 648388 - DNA, 590 bp, Homo sapiens
tactccaattcttaacttctgtgcacccagaggctcaacaccatgtggaagctgccaagacttggggcttgcaccctctgaagcaacagcccaagctgtaccttggcccctttcagccatgactagagcagttgggatgtggggcatcaagtccctaggctgcacacagcatgggaattctgggtctggcccacaaaaccactttttcctcctaggcctccaggcttgtgatgggaggggctaccatgaagacctgtgacatgccctggagacattttccccattgtctatgttggtgatcaacattcagctcctcgttwcttatgcaaatttctgcatccagcttgaatttctcctcagaacatgggattttcttttctatcacattgtcaggctgcaaatttcccaaacttttatgctgtctttctcttttaaaactgaatgccttttaacagcacccagccacaccttgaatgctttgaaatttcttctttgttgcttagcaatttcttctgccagataccctaaatcatctctctcaagttcaaagtttcacaaatctctagggcaaaatgctgccagtctctttg

SEQ ID NO: 648389 - DNA, 601 bp, Homo sapiens
aaagatcttttgggcttaaactatggggttttctagatataagatcatgtcgtctgcaaacagggataatttgacatcctttcttcctttttggatgccctttatttctttctcttgcctgattgccctgaccaggatttccaatactatgtttaataggagtagagtttccaaagttatttctgctattgatttctaatttcagtccattatggccagaaaagatgcttgacataaattctgtttttgtaaatttgttgagacttgttttgtgcctaacatgttatctatcttagagaaagtttaatgtgttggtgagtggaatgtgtattgtgcagctgttggatggaatgttctgtaaatgactgttagaaccattttatctagaatgcaatttttttttttttgagagagtcttgctctgtcacccagactggagtgcagtggcatgatcttagctcactgtagcctcygcctcctgggttccagtgattttcctgctacggtgcaatttaaatccactgtttgtttgttgattttctgtcaggctgatctctccattgctgaaagtgaggtggtgaatttccctactattattaga

SEQ ID NO: 648390 - DNA, 601 bp, Homo sapiens
aaagatcttttgggcttaaactatggggttttctagatataagatcatgtcgtctgcaaacagggataatttgacatcctttcttcctttttggatgccctttatttctttctcttgcctgattgccctgaccaggatttccaatactatgtttaataggagtagagtttccaaagttatttctgctattgatttctaatttcagtccattatggccagaaaagatgcttgacataaattctgtttttgtaaatttgttgagacttgttttgtgcctaacatgttatctatcttagagaaagtttaatgtgttggtgagtggaatgtgtattgtgcagctgttggatggaatgttctgtaaatgactgttagaaccattttatctagaatgcaatttttttttttttgagagagtcttgctctgtcacccagactggagtgcagtggcatgatcttagctcactgtagcctccgcctcctgggttccagtgattttcctgctayggtgcaatttaaatccactgtttgtttgttgattttctgtcaggctgatctctccattgctgaaagtgaggtggtgaatttccctactattattaga

SEQ ID NO: 648391 - DNA, 461 bp, Homo sapiens
ttttaactgcagaatttaattcttttacatttaaggctattattaataaatacagacatattcctacaattctgttaaattttttctggttattttgtagatcttttgtttctttcttcctctcttgttgtttacctttgtggtttggtttgtttctatagtgataaactttgattcctttctctttctcatttgtgtatccactgtaaattttttccttgtgggtactctgggtttacaaaaaaatcttatagtaataaaagactactttaagctgataacaattgaactttggtcacatacaaatattctagacttttactctcttccccacaattcgtaattttgttatcttagtttatatcttctcatattgtatattccttaayaatttgttgtagctatggttatcaatgaccactttaacacttaaccttcactctagagatttgaaagattat

SEQ ID NO: 648392 - DNA, 461 bp, Homo sapiens
ttttaactgcagaatttaattcttttacatttaaggctattattaataaatacagacatattcctacaattctgttaaattttttctggttattttgtagatcttttgtttctttcttcctctcttgttgtttacctttgtggtttggtttgtttctatagtgataaactttgattcctttctctttctcatttgtgtatccactgtaaattttttccttgtgggtactctgggtttacaaaaaaatcttatagtaataaaagactactttaagctgataacaattgaactttggtcacatacaaatattctagacttttactctcttccccacaattcgtaattttgttatcttagtttatatcttctcatattgtatattccttaacaatttgttgtagctatggttatcaaygaccactttaacacttaaccttcactctagagatttgaaagattat

SEQ ID NO: 648393 - DNA, 611 bp, Homo sapiens
aataattcatcctgaattgcttytgtgggcacctttccttcactgacctctttggccctctgaataatcttcattctggtttgttcatccactgctgagattctgaccaccagcaagcaaatgttgagcacacactttcatcctccagtttgaatccctcacctaacttccagatttgtatatccaattccagtggcctagcactgatcttgttgcatatgtctctcatgtcatcatatcccccaattaaatttatcctcttccgttatcctactcctagctccttttactctcagactggctcctcctcctgttttccttaagtaagtattcaggagttggtttcacttccatctatcagctttgattttctatttgctgagttccattccaggcagacttccctgtgtgatagcccctagcagcctcatacctaccttaaaaagcaagcaaacaagcaagcaaacaagcaaagaagcaacaattccacaaatctgctctacatctccagtatctttccattttttcccccaataatgataacatctttaacatggtgatatgatttggctctgtccccacccaaatctcatcttgaattgtagctccca

SEQ ID NO: 648394 - DNA, 579 bp, Homo sapiens
aatagaattaaggcaaaatggatggagaggtgatacatatgctgtaaaactatgtcagaaatatcagttgattctttagggaattggttaaaaaaataaatttagtccttatgrcaatttaacccaaagaatctaacacttattcttagtggcttaggatcatggatgatattaatctgtcacaagatgattctatgactatttccagaagtggaaaagtgcagaaatagaaaatgcatatgatattgctattttattttgttccaagtcttgtcactattggtggaaaacagttttccaaaggaatgaacatttagataaattatggaatgaagaatcattttcaatcctttatgcatagatgcattgataataactgaacatctttggcatctggcttccagatacagtgacgattccttcaagacatctagaaattaaatagatgtgcgtgaacactttaaaaaatgtaaatacattaaatgtcagttattttgaaataagttacttttttaaacaggaagcatttttaattaaaaattagaaaatagctatatttggacaattagttactcaatg

SEQ ID NO: 648395 - DNA, 579 bp, Homo sapiens
aatagaattaaggcaaaatggatggagaggtgatacatatgctgtaaaactatgtcagaaatatcagttgattctttagggaattggttaaaaaaataaatttagtccttatggcaatttaacccaaagaatctaacacttattcttagtggcttaggatcatggatgatattaatctgtcacaagatgattctatgactatttccagaagtggaaaagtgcagaaatagaaaatgcatatgatattgctattttattttgttccaagtcttgtyactattggtggaaaacagttttccaaaggaatgaacatttagataaattatggaatgaagaatcattttcaatcctttatgcatagatgcattgataataactgaacatctttggcatctggcttccagatacagtgacgattccttcaagacatctagaaattaaatagatgtgcgtgaacactttaaaaaatgtaaatacattaaatgtcagttattttgaaataagttacttttttaaacaggaagcatttttaattaaaaattagaaaatagctatatttggacaattagttactcaatg

SEQ ID NO: 648396 - DNA, 579 bp, Homo sapiens
aatagaattaaggcaaaatggatggagaggtgatacatatgctgtaaaactatgtcagaaatatcagttgattctttagggaattggttaaaaaaataaatttagtccttatggcaatttaacccaaagaatctaacacttattcttagtggcttaggatcatggatgatattaatctgtcacaagatgattctatgactatttccagaagtggaaaagtgcagaaatagaaaatgcatatgatattgctattttattttgttccaagtcttgtcactattggtggaaaacagttttccaaaggaatgaacatttagataaattatggmatgaagaatcattttcaatcctttatgcatagatgcattgataataactgaacatctttggcatctggcttccagatacagtgacgattccttcaagacatctagaaattaaatagatgtgcgtgaacactttaaaaaatgtaaatacattaaatgtcagttattttgaaataagttacttttttaaacaggaagcatttttaattaaaaattagaaaatagctatatttggacaattagttactcaatg

SEQ ID NO: 648397 - DNA, 579 bp, Homo sapiens
aatagaattaaggcaaaatggatggagaggtgatacatatgctgtaaaactatgtcagaaatatcagttgattctttagggaattggttaaaaaaataaatttagtccttatggcaatttaacccaaagaatctaacacttattcttagtggcttaggatcatggatgatattaatctgtcacaagatgattctatgactatttccagaagtggaaaagtgcagaaatagaaaatgcatatgatattgctattttattttgttccaagtcttgtcactattggtggaaaacagttttccaaaggaatgaacatttagataaattatggaatgaagaatcattttcaatcctttatgcatagatgcattgataataactgaacatctttggcatctggcttccagatacagtgacgattccttcaagacatctagaaattaaatagatgtgcgtgaacactttaaaaaatgtaaatacattaaatgtcagttattttgaaataagttayttttttaaacaggaagcatttttaattaaaaattagaaaatagctatatttggacaattagttactcaatg

SEQ ID NO: 648398 - DNA, 573 bp, Homo sapiens
ggatatttgttacacctgtacttaaagtaaaattcaaactccttatcctgtcctacaaggctccacctgatttgggccctgcctcatctctaacatcatcttatgccattttccttcttgttcaccaaagccacaccagctacctttctgtccctccttgttagacttgtttctgccttaagcacccttgctgctgctaccacctgaaatgcttctcctctggtattttattttggtgagaacgcctagcatgagatctaccctctaacatatttttaagtgtagaatacagtattgctatctgtaggcagaatgctgcaccacagatctctagaacttaccttgtataactgaaattttatactgattgattagcaacagcsccaaatcattgaaatcttcctaaagcctaaaattacttcacaaacgttcaaatgttttgaaaatgactattgtgaattatcttattaggatctacctatgattagcactgaaaatactcagtaattttttaaataaagaatcagttaaattcaagtagctttaatttgttgttgagttttatattaaatg

SEQ ID NO: 648399 - DNA, 481 bp, Homo sapiens
aaaaccttgaaatgagcaaaaattgattgcattttcacattgttttcaagcaagcaatttaaccaccttgctattttatggcatgcttattttttaaaaaaaagttatgatgaaatatgcataacatcatactcaatacaaagtttctggtatatttataattatgcaactatagccatggtataactttaaaatatttccactatcaggactagacaatcattactgatttcccttttatggacattccattttatcacctttattgtttggtttggtttcgtttttgagatggagtctctgtcatgcaggcttgagtgcagtggtgcgatctcagctcactgcaacctctgcctgcctcgcgggttcaatagattctcctgactcagcttcctgagtacctgggattacaggcgcccaccackgcacctggctaattttgtttttagtagagacatggtttcaccatgttggccaggct

SEQ ID NO: 648400 - DNA, 565 bp, Homo sapiens
tttgtgttgagtatgtatgtgttgagggtaggggtctagttttgttcttctgcatgttcatttccaatttccccagcaccatttattgaatggggtgtcctttttctggtgtatgtttttgttaagtttgtcaaagrtcatttggctatagattgtgtggctcaattctgggttctgtaaaatgtaccctagagccttgattctcctgaggcctcagtagtgacctgctcacagttagaactctgttgactcagtggtgtttctatgagtgtagtgattcgtggtcatggggtggttttcctaaaattgtggacaattctgttttgatgttcaagcatgtgctaaaaatttcacaataaatgtgtctgtgaattatccatttcatttccacattactccttggacttactgagatgtgtttgtgatgtcaagatgaggtgtttttctttccaggtgttggattttttacctatctgggtatttatgggctccctgggtggaaataagccgcatccatcacacctaccttatggaatttttagaaatttatttgtgcactgccact

SEQ ID NO: 648401 - DNA, 517 bp, Homo sapiens
tttacttagaactattctcagctactcacaagttctcactactcgcaacttctctttcactaaatattrtatcactgtccagccaagatttttttaaaaactttatgataaggatgactattgctccattttccaaaaccactctactcatttctgtctatcagcatgaccctcaacatacaaatttcttcatatatgtcaaaggtacccatccttttacacataacccaattccaagctactttcacaattttcaaataattgtaacatcagatttccacttcctaaccccaaattttcttttgtcagtttaagatgccattacaaactatcatatttggtgactcatgcaacattaattttatttcatttatcagtgctgtgaactccaagatcaagatgctgacaagataggttttattttgaggcttccacttttggctcagagcagccatcatattgttactttttcatatgatcatttcattgtagggcatgtgtgtgtgtgtgcatgtgt

SEQ ID NO: 648402 - DNA, 609 bp, Homo sapiens
gttttatccttatattctttttgccaatatgttttcccacatttctctacaataaacttctacacctttataatattgagagtaaatacttcttaagaaaaattaaccttaagagagagctcaaaaaaataaataattcacaaaaaactgctgtgaaggctatgcatggaaagggcagaagggagatggagggastgcagagacctgtgggctgagtctgagcctcaaggctttttcagcatgaaactcagcaaagacaggtgttaaaaaggcctgcctcccaccgcccctgctgttcactaagcttaggcaatcaaagtgtaccagtgttttttcactgcccagcatatactgatttaaggactcaacactctgacttgagaaaacctaaaacatgaagttatctcaaaggtgggtgagattctaaggaggctcaaatatatagtcctcaattaattctcacctcaacttagttacaatctgatacaacatattaggagacaggaacagcacagtggtaaaaatcaaacctcacctcaaaagatcgtaaattattgctctcagattagtattaactgacacaatatgtgcagtgagtatcttctcttc

SEQ ID NO: 648403 - DNA, 631 bp, Homo sapiens
aaacaatagaaataatcgatgaaatataaaataatgttggcaaatcttagctagactaaccaagaaaaaatagagaagactcaaataaataaaatcagaaatgaaagaagaaacaatacaactcatgccataaaaatacaaatgatcataagggattactataaacaattatttgacaataaattggaaggccaagaagaaatgataaatttctggaaatatacaccctactatgactgaatcatgaagaaaccraaaatttaaacagaccaatagtgaataagaagattgcatcaccaataaaaaactgattaaaaacctctcagcaaagaagctcaggaagagatggctttgttaataaatgccaccaaacattttttaaaaataccagttctttatatactcttccaaattattgaagaaaaaccacatttccaaactcattaaatgaggctagtatttctgtgatatcaaagccaaagactttataagataagaaaattacaggtcaatattcttgatgaataaagatgcaaaaattctcaacaaacttaaatactcacaaacagaattcaacagcacattaaaagtatcacacctcatgatcaagagagatttatccttgagatgc

SEQ ID NO: 648404 - DNA, 631 bp, Homo sapiens
aaacaatagaaataatcgatgaaatataaaataatgttggcaaatcttagctagactaaccaagaaaaaatagagaagactcaaataaataaaatcagaaatgaaagaagaaacaatacaactcatgccataaaaatacaaatgatcataagggattactataaacaattatttgacaataaattggaaggccaagaagaaatgataaatttctggaaatatacaccctactatgactgaatcatgaagaaaccaaaaatttaaacagaccaatagtgaataagaagattgmatcaccaataaaaaactgattaaaaacctctcagcaaagaagctcaggaagagatggctttgttaataaatgccaccaaacattttttaaaaataccagttctttatatactcttccaaattattgaagaaaaaccacatttccaaactcattaaatgaggctagtatttctgtgatatcaaagccaaagactttataagataagaaaattacaggtcaatattcttgatgaataaagatgcaaaaattctcaacaaacttaaatactcacaaacagaattcaacagcacattaaaagtatcacacctcatgatcaagagagatttatccttgagatgc

SEQ ID NO: 648405 - DNA, 600 bp, Homo sapiens
ttaccattctttgtgttataatataataatgattaacaatgctatctgtccaacgatctaatccatggatactgcgttatcttatctaaattaagtgacaagaatgttgcatttgtaatctataaatgacctcaaattctccagctacaaagaatttttaggcacattaaaaataattctaacttgtcctcagaacctgcagagtactgtgtgaaataacatggggtggggagaacagtgagcaagmtgttgccataagacaggcaaagaaagagaagggctgtaatgcatatgtatttgggggtgaagataaaaagacagtgaaagaaaaactgaagataattagaaaataaaagaagcagaatttatctgtctaaatttagagttagttgtgcagcctgactacagatttcctctctcaccatgcaaaaccaatgccacttcttcactctgggtgtttttaatctcttatatgaagatacaaactcactcgagcagaaatatttcctgataattgtaaagcatttgttacacacctagcaccgtcttgtgtttgtttacttcatacaaatggcaagaaaatcccatggcttatgaagc

SEQ ID NO: 648406 - DNA, 567 bp, Homo sapiens
aagcacattttgcagaaaatgattttttagaagtcagaactatgacatgaagtcaagcagggcactctaggactgactttgctgtgcttccttaatatgctccttgctctctttcttttctggaagctgtgactcacacaggtcatggagaaaatttcgtactccttcctcattcccagcttaaatactagtgtacaacgtggaaacctgtaaattatctgacatttctctctgtcctccaaacctttctcattcaattatcactaaatcatattgactatacctctcttctgcctctgctttatattaccacttccactgagaacataaacatttacaaaatggcttttattacaaaaaagccttccaactattaatgttatttcttacatgaaaaaaattaagcaaaacaaatgaaaaaagcataacaccaaaaaaaggccaacacattaaaatgagtaacggggattccaaactttatttcaccatgggcaggtgaaaaccttagaatacaytgatagtagtccaaggatgtgtgacatggaaactatagctgactactgcaaa

SEQ ID NO: 648407 - DNA, 611 bp, Homo sapiens
atttttatttttgtgcaattcttaaccattggatctattcccttattatgccatttgtcattatttaccagcattgtttttacatttttataggtattctcttctctactaatttaggggctctttgaagataataattaccttgctgtactttaaatacaccaaaatttgttatgattgctgaagaagtaaaaacaaagtgaaagctaccaattttattcagttcaaatagtggtatacctcagatatcgtggattcagttccaggccactgcaataaagcaagtcagacggaagtgtttggtttcccagtgcatctaaagtttatgtttatactacactgtagtctagtaggggtgcaatagtattatgtccatcgtaccatttctgtctattcaatatattggctatgggtttgtcataaatagctcttattattttgcggtgtttcaccaatacctagtttgagagtttttaacatraagggatgttgaattttatcaaaggccttttctgcatctattgagataatcatgtggtttttgtctttggttttggttatgtgatgtattgtgtttattgatttgcaaatgttgaaccagccttgcgtcc

SEQ ID NO: 648408 - DNA, 493 bp, Homo sapiens
tctccttgctcattaaaaatatgccttagaaagattttatcttttattaatccttttgaagacatactgtgcttcttaaaactgaagagctgtatctttctttattgaaaagttttaatatttatcactttgactattgcaccatcctcaatttctatattttcttctgaaactgatttaattagtttktttttttttttttttttttttttttttttaaacaaagtttcacttttgttgcccaggctggagtgcaatggcgcaatttaagttaaccacaacctccacctcctgggttaaagcgattttcctgcctcagcctcccaaatagctgggattacaggcttgtgccaccatacccagctaattttgtatttttagtaaatatggggtttctccatgttggtcaggctggtctcgaactcctaacctcaggggatccacctgccttggcctcccaacgtgctgggattacaggcgtgagccaccatgc

SEQ ID NO: 648409 - DNA, 594 bp, Homo sapiens
tttacattaactttctcctgggatcctgagcatttagttattcctttcattgaggtttttatcacaccacacttcaatgkttggttcatgtgcccatctctcttattagactgatattttgggtagcagattccatgccttttcaaatgcctaccccagactcatttaatgatatatatccaaaaaattggtacacaagaaaacctctgggtggttttcattttcgtgtgtcatctcagagtccccagagccaaccctcaagatcagtgattcgatctatatcctgcaccaaaatatctgatctctgaaaactacagatttttttaaaaggttgatccaataaaacaccctaactttgaactgataatgtttatttccagtattgtggtatagtgtggtatgaaaactaataatcaaaattaacagttacatcttcctttttagcagaaaaataataacaagaggattcattgtatgacaagcttttttctaggcctcctcacatacaagatctcattattgagcatatattgctaaattttcctctaatcgtgccactgtcccagacacttggattatatgtacaagatatat

SEQ ID NO: 648410 - DNA, 525 bp, Homo sapiens
gattctcttcctcgaagtcacactaccaaatgggattctaaactagctctatctaactcaaattcaaggctttttcctatagattacttgtcttattttaaatctaagatattattttaattttacctctttcaaaacagattttgactgctttataagtttactgttgaatgtgctgataacattctgagtacttaaaatgcagttcatctgaatgtattggaaatgtaaaatacacagggatttaaaaggtgatattgtaaaataatgtaaaatgtctcataactaaatattataccgattacttgttgaaattataatatttgtgatatattgatataaattaaatatattattaaaatcatcttactagttttactttttaaaatactgttactagaaaatttaaaattatatatatggctcaaattgtacttctatatgataatgctgctctataaagagctaaatttaaaaaawatatggattaactactggacaacctagttggttaatagctatggt

SEQ ID NO: 648411 - DNA, 584 bp, Homo sapiens
aaacaatgtagaaaacatatttgaggaatgattsaagaaaaatgtcctaatcatattagagatgttgacatccaggtatccaaaaatccagagaacatctgtgagatgctataaaaaaatacattaacaagatatgtatttaccagactattcaaggtcaatgctaaattagaaatcttaaagccaggtaggaaaaaaggccagatcacatacaaagggaaccctcatcaggctaacagtggacttgtcagcagaaattttataagccataagagattggggggctatttttagcattcttaaagacaataaattttaacaaagaaattccaaacaaaaatctaaaccaagtttagtttcttcctgccaagctaagttttgtaactgaaggagaaataaaatcttttccagacaagtaaacactaagggaatttgttaccactagaccagttttacaagagatccttaaaggagttgtgaacagaaaaactaaataacaatacctgctaccaaaacagcccacacttaagtctatagctcatagactctataaaggaaccacacaatagaaactacaaagtaac

SEQ ID NO: 648412 - DNA, 584 bp, Homo sapiens
aaacaatgtagaaaacatatttgaggaatgattgaagaaaaatgtcctaatcatattagagatgttgacatccaggtatccaaaaatccagagaacatctgtgagatgctataaaaaaatacattaacaagatatgtatttaccagactattcaaggtcaatgctaaaktagaaatcttaaagccaggtaggaaaaaaggccagatcacatacaaagggaaccctcatcaggctaacagtggacttgtcagcagaaattttataagccataagagattggggggctatttttagcattcttaaagacaataaattttaacaaagaaattccaaacaaaaatctaaaccaagtttagtttcttcctgccaagctaagttttgtaactgaaggagaaataaaatcttttccagacaagtaaacactaagggaatttgttaccactagaccagttttacaagagatccttaaaggagttgtgaacagaaaaactaaataacaatacctgctaccaaaacagcccacacttaagtctatagctcatagactctataaaggaaccacacaatagaaactacaaagtaac

SEQ ID NO: 648413 - DNA, 584 bp, Homo sapiens
aaacaatgtagaaaacatatttgaggaatgattgaagaaaaatgtcctaatcatattagagatgttgacatccaggtatccaaaaatccagagaacatctgtgagatgctataaaaaaatacattaacaagatatgtatttaccagactattcaaggtcaatgctaaattagaaatcttaaagccaggtaggaaaaaaggccagatcacatacaaagggaaccctcatcaggctaacagtggacttgtcagcagaaattttataagccataagagattggggggctatttttagcattcttaaagacaataaattttaacaaagaaattccaaacaaaaatctaaaccaagtttagtttcttcctgccaagctaagtttygtaactgaaggagaaataaaatcttttccagacaagtaaacactaagggaatttgttaccactagaccagttttacaagagatccttaaaggagttgtgaacagaaaaactaaataacaatacctgctaccaaaacagcccacacttaagtctatagctcatagactctataaaggaaccacacaatagaaactacaaagtaac

SEQ ID NO: 648414 - DNA, 532 bp, Homo sapiens
actaataatgaaactggaaggagtgatcatttttttgcagcttcctttttatgaaagcatgtgtttgactgaagtgtatgtgtgtaacttagaaattaaagatggcttataataatagaaaattagaccttatatttttcatatattttcttttaaattttagagacatgatcttgctctgtctcccaggctggagtgccatggcatgattatagctcactgtaaacttgaactccttagctcaagcagttctcttgcygcagcctccccagtagctaggacaacaagctgatgacacccagctaattttttaatatttttgtggagatggaagtttcactattttgcctagcttggcctcaaatgatcctcccacgtcaacctcccaaaacactgggattaaggagtgaaccaccatgtctggcctggtatgtatgttcttgattcctttttcctgtagcttggttctctgagactcagagtattgtttgtttagtgttcatagaaagcttctacagccagcgtctggaga

SEQ ID NO: 648415 - DNA, 532 bp, Homo sapiens
actaataatgaaactggaaggagtgatcatttttttgcagcttcctttttatgaaagcatgtgtttgactgaagtgtatgtgtgtaacttagaaattaaagatggcttataataatagaaaattagaccttatatttttcatatattttcttttaaattttagagacatgatcttgctctgtctcccaggctggagtgccatggcatgattatagctcactgtaaacttgaactccttagctcaagcagttctcttgctgcagcctccccagtagctaggacaacaagctgatgacacccagctaattttttaatatttttgtggagayggaagtttcactattttgcctagcttggcctcaaatgatcctcccacgtcaacctcccaaaacactgggattaaggagtgaaccaccatgtctggcctggtatgtatgttcttgattcctttttcctgtagcttggttctctgagactcagagtattgtttgtttagtgttcatagaaagcttctacagccagcgtctggaga

SEQ ID NO: 648416 - DNA, 473 bp, Homo sapiens
accagccacacagcaggaggtgagtggcaggccagtgagcaaagcttcatctgtatttacagccactcctcaccgatcacattacctccggagctctgctgcctgtcagatcagcagcggcattagattctcataagagcatgaaccctattgtgaactgtccatgcaagcgatctaggttgtgtaccccttataagaatctaatgcctgatgatttgtcactgtctccctgtctcccattaccgtcacccacacttgggaccatctagttgcaggaaaacaagctcagggctcccactaattctacattacggtgagctgtataattacttcattacatatcacaatgtaatmataatagaagtagagtgcaccatacatgtaatgtgcttgaatcatcctgaaaccactggaccgcatccccggtccatggaaaaactatcttccatgaaaccggtccctggtgccaaaac

SEQ ID NO: 648417 - DNA, 396 bp, Homo sapiens
  misc_feature 351: n = A,T,C or G
gaattcaatgcttgggtcacctccagattcattttcacagtctttcatgttttggtcatattacattgtattttgctgcccatatgactgatctytttttgttaaatgtgagatacttgttaaaaaatatttagcaatgaattgaggcctagtagcatgttatcttgctgcagaagagatgggagtctacttctggcggatggtcaggggtcctccatacaggctgcaattgaggtcgtcggtgcaggctcagtccctacaaaggccaaggtatttcctgtccacctctattctgatgcatgactcttctgggtctcaaccagagccagtggacttcagtatgggtcgctntcattggcagaccctcaatccacttgttttccatctaaccccacg

SEQ ID NO: 648418 - DNA, 528 bp, Homo sapiens
gaataagttttagtgatctattgcacactatggtgactatagttaatgtgtatttcaaaaytgtaccttgcattattcacttaacggttaatcttggaaatggttctatgtcagtagagagtgtcctcattcttcttttatatgtatgtacgagagattatttaagccagcccctactattggaacacagtttgcttccaggttttaggtcattgtaaccagtgctgcacagctttttgcatgaagctttggtgctagttccaaaggattctctgaaaacaaagaatatagtcaaatggcagggatattttggaggccattgataccgttctgaaattctctctccatagggctgctgtttttgctacttcctccaggagaaaatgaaagggctctgtttgtttatttttattttttattttttctgaaatcattcttttattcttttcatgaaatttcagaaaaattccaggagagctaacaacaaggactaaggttaaaaccaaaatttaatttttggtaccactg

SEQ ID NO: 648419 - DNA, 528 bp, Homo sapiens
gaataagttttagtgatctattgcacactatggtgactatagttaatgtgtatttcaaaactgtaccttgcattattcacttaacggttaatcttggaaatggttctatgtcagtagagagtgtcctcattcttcttttatatgtatgtacgagagattatttaagccagcccctactattggaacacagtttgcttccaggttttaggtcattgtaaccagtgctgcacagctttttgcatgaagctttggtgctagttccaaaggattctctgaaaacaaagaatatagtcaaatggcagggatattttggaggccattgataccgttctgaaattmtctctccatagggctgctgtttttgctacttcctccaggagaaaatgaaagggctctgtttgtttatttttattttttattttttctgaaatcattcttttattcttttcatgaaatttcagaaaaattccaggagagctaacaacaaggactaaggttaaaaccaaaatttaatttttggtaccactg

SEQ ID NO: 648420 - DNA, 567 bp, Homo sapiens
tgtgttccaaactttggcaaatgctagttcaaaggatacaggattcttacagtcctcaaaacttcttattttatcaagaaccttaaaaatacgtatgctcaggaatgacattggcaagatggcagacttgcaacctccaggcacttattcttacatggcaacattaaacaattagagattggctacaataactttataggagttctggaaatgaacaaaaatctacaacaaccaagcaaatgccgaatcaagaaaaatctacattcagatggaaggaaatgtcatggtgtttttactcattctttccttaccgcctctctagtgtggcatggcatggtttgagagaaatgacaccttaatccccagttcctgactttaaaccagagasagcagagtggatctaatttgcaatggtctaacccatctgggggctgcctgagggatcggtgtctgtatcacctaatttggagctcagaaagccaacaacggtacaacctggacctcaggctagaaggggctgcaggaagtagctagaatggctcatgaaaacagcaagggagcaagcgg

SEQ ID NO: 648421 - DNA, 567 bp, Homo sapiens
tgtgttccaaactttggcaaatgctagttcaaaggatacaggattcttacagtcctcaaaacttcttattttatcaagaaccttaaaaatacgtatgctcaggaatgacattggcaagatggcagacttgcaacctccaggcacttattcttacatggcaacattaaacaattagagattggctacaataactttataggagttctggaaatgaacaaaaatctacaacaaccaagcaaatgccgaatcaagaaaaatctacattcagatggaaggaaatgtcatggtgtttttactcattctttccttaccgcctctctagtgtggcatggcatggtttgagagaaatgacaccttaatccccagttcctgactttaaaccagagagagcagagtggatctaatttgcaatggtctaacccatctgggggctgcctgagggatcggtgtctgtatcacctaatttggagctcagaaakccaacaacggtacaacctggacctcaggctagaaggggctgcaggaagtagctagaatggctcatgaaaacagcaagggagcaagcgg

SEQ ID NO: 648422 - DNA, 496 bp, Homo sapiens
ttggaacttgctaggaaattctttatgggcaaaatatggggaaggcatgtagcttttcattttgtagccaccttatttaggaaccaaaaggaggaggcaggtttgcataacccagttcccagcttaacttttcccttggacttaataagtttggggtcacaagatttattttgctttcacaagttaaagaagagagatatcctcacaataagtgacttttgggaaggatgaaaggggtcttggaggaagacatgatggtttgtggcaaggtctgtctggatgggatgaagtctcctctcctctgataaaagttaaacttccctggttgctgagactccctgtggggaggactgataacaattaagttcctctaggagaatctgtccttaggcagataaaatgaattcagaaagtctcacccttcttacctattgrtgatcaatacagcaaagcaacttattttggggtggtccaagcccattttatgttgctataa

SEQ ID NO: 648423 - DNA, 533 bp, Homo sapiens
gtttgtcgatgtacaggtacatctgtaggatgctgtcattagacagtcatttaaaactgtattcctggctggtccagtggcagtagatttcagaatttattaacattagtgtcactaaagttggtatacaatccttcactgctaaatttgactggctaaaaaatacttcaaaaaaatagaactgtattcctgtttcatagattttcatgtagacatttctcatatatactcagctatactkggtcctaatgttaatgcaaacaaacatcagataattcaattcaggaaaaacctagcaaggatccccagacgccaggcaagtttcctcatccactcaaggcagtctgaaatggaccaagtaatgttcccaccctctgggttctcagcatcttgttctgcagagggcccacctgaggatatgaatctaaggtgcacacgtgcttcattcattcattcgttcatttatgccagaaactggtattgcctgcattgtccattggcagcattgcacctgccactgcttatacagagag

SEQ ID NO: 648424 - DNA, 598 bp, Homo sapiens
aagcttcttactacctggccccctttccatcctacctaaaacctcaacctgctgtggtcacactcaattttccagtttcttgaaaatgtcttcaaatacaagcaaggccccatgtaaaactggtcccctttggagaggctgttttctgttccaacaggcaaaggtgagaacttcttgctgtggaactccaaaatgttttgtttagcacctccatcaagagccacaagttttagggtcttttacaaatatgtggccatactgctgatattgtaactgtatttcatagaacttggtttgctcaaaaatacttaacacgttctataccactaatattctaaaaaacctctgtatttcataagcaggaaagtctatgtgtatatacctcaaacagtacaatctccatggtgatgagttctgtaaatatactcctatttgaaaaaattaattttccttaawtttggtaaaaaattacttcctttaaactagaagtaatgattcctaattctagtgtttacagacttagtgaaaaagcccttatttatcctatctacatattattttttcctttcctccctaaaacaaattgtcttaacattgg

SEQ ID NO: 648425 - DNA, 394 bp, Homo sapiens
tattttatttatatcatcaaaccaaatattcaggtgctcatcagtgaatggggaagcctcaacgatatgagttggatgtaacagtggtatttatttaataagtctttaaaaaatattttaaaataaattttgttgtgtatatttaaggaatacaatgtgttgttgtaagacacatatatgtagkaaaatgattaccattgtggaataaatacctcacataggcatccactttcccctaatgtggtaaaagcagctataatctgctaattcagcaaaaatactcaagtactgaatataatacagtattattaactatagtcctcatgtttctttttttgtttttggttttgtttttggttttggtttttttgtttgtttgtttgtttttgagacg

SEQ ID NO: 648426 - DNA, 573 bp, Homo sapiens
ttttgaaactgctgggaggaatgtaacgagaagctttattctttagyaggaagcatttctactctgaaacattacactaaaaggttttttggcaacgggttgtaaattccttcaatgtaaattattgatattgcaataatgctgcataatgatgtagtcaaataagtcatgagtttggggaaagttaagctgaggtatgactatctttacaactgccccaatcctttactaaaaattatgttttagtttataaaatctgagtaaagcacagtaataggatttccagtcctgaaaaatcattcttttctcagcaaaattttctattttctaacagatttccttcttactactctcaccctccctaaagctgccatgtcttataaaaagcttttgtttgttacagcactttgatccaacaactaaaccattttttaaatggtcactgatttttattcaacatccgtaaaatctgaaaaatcagagaaaactgcaggttacccctaagaaaccgcctctcccttaattgtcctttattcatctggatatacctggactgctgcttttctccaacag

SEQ ID NO: 648427 - DNA, 616 bp, Homo sapiens
atctgtccaacaattgccccaggcaatttcatatcagatttctcgttgtagtctctgcctactgctttttaaatctttccaaattgggggaaatacagcaaactggtttggggccctttaatgttggggggccagcaggggttcctgttggttcacccaacattcaatmgtgttgtattaggacctttgttttaaccccatcaatttccattttattcattccattttttataaccatctaaagatttccaccctcttgggatgaattccatgactctcctctttctttctccttttagtttcaccccatcaatgctttctttactcaccttatttattaataactttaaaaaatttccacctttctgcgaccagtcatttgactatcccttttgcctttccctattcctttgttaactaatctaatgtttttattaaccataagactcatgaggggaagctgaaacagtaaatttgataaggcttctggaactgttgtttgattctgcaggagtaatgtcacatagggtgcccatgtagaaggagcccccttagccacagcatttaccataacctgggtaacgagcatattcagcaggtgagtaaccctgtcatc

SEQ ID NO: 648428 - DNA, 616 bp, Homo sapiens
atctgtccaacaattgccccaggcaatttcatatcagatttctcgttgtagtctctgcctactgctttttaaatctttccaaattgggggaaatacagcaaactggtttggggccctttaatgttggggggccagcaggggttcctgttggttcacccaacattcaatcgtgttgtattaggacctttgttttaaccccatcaatttccattttattcattccattttttataaccatctaaagatttccaccctcttgggatgaattccatgactctcctctttctttytccttttagtttcaccccatcaatgctttctttactcaccttatttattaataactttaaaaaatttccacctttctgcgaccagtcatttgactatcccttttgcctttccctattcctttgttaactaatctaatgtttttattaaccataagactcatgaggggaagctgaaacagtaaatttgataaggcttctggaactgttgtttgattctgcaggagtaatgtcacatagggtgcccatgtagaaggagcccccttagccacagcatttaccataacctgggtaacgagcatattcagcaggtgagtaaccctgtcatc

SEQ ID NO: 648429 - DNA, 616 bp, Homo sapiens
atctgtccaacaattgccccaggcaatttcatatcagatttctcgttgtagtctctgcctactgctttttaaatctttccaaattgggggaaatacagcaaactggtttggggccctttaatgttggggggccagcaggggttcctgttggttcacccaacattcaatcgtgttgtattaggacctttgttttaaccccatcaatttccattttattcattccattttttataaccatctaaagatttccaccctcttgggatgaattccatgactctcctctttctttctccttttagtttcaccccatcaatgctttctttactcaccttatttattaataactttaaaaaatttccacctttctgcgaccagtcatttgactatcccttttgcctttccctattcctttgttaactaatctaatgtttttattaaccataagactcatgaggggaagctgaaacagtaaatttgataaggcttctggaactgttgtttgatyctgcaggagtaatgtcacatagggtgcccatgtagaaggagcccccttagccacagcatttaccataacctgggtaacgagcatattcagcaggtgagtaaccctgtcatc

SEQ ID NO: 648430 - DNA, 456 bp, Homo sapiens
agagctaatgtcaactgttaacggtcacaaggatacatagagtgcygaactaagcattaggctgtaactttcagcctttaggacctgagcttttttgtgtaattgtttggaaaggctaagctttgttgctgtatcaggctaatctaaaaatctctgagacttaagagaataaaattttatttcttgttcatttaattaaccaacttgccctagttttcctggttttagcattgaaaatcctgagacccagggactccctccattctgaacatgcaaaccaggatggttagtcactctgctcattcagtgataatgtaaacttggcatccattcaccatttcatagctatgacttctggaacacagggcctctgagatcatgccaggagaagagagaatgagagagccacaggcaatctttttaggggctaggtatgaaaacggcttacatcacttc

SEQ ID NO: 648431 - DNA, 633 bp, Homo sapiens
ctctcagcaaattaacacaggaacagaaagccaaacactgcatattctcactmataagtaggagttgaacaataagaacacatggacacagggagggaaacattacacactgggacctgttggggagtggggggcaagatgagggagagcattaggacaaatacctaacgcatgtggggcttaaaacctagatgaggtattgatagatgcagcaaaccaccatggcacacgtatacctatgcaacaaaccagtacattctgcacatgtatcccagaacttaaagtaaaataaaaactaaaccaaacaaaaaagaacatgtgaaaatatatatgtacaaagttgttcattagagtattctaaaaattagccaaaaatgaaaaaggaaactaaatatccactaatgggcactccttaaataaagtttcatgttgtcatgtaatgaaatatccaactgattatctgacacttgaatgttcatttcctgttataacatgatataataataataataatagtgttaaatgaaaattctaaaatgttaaacatattaaacaacaaatcccacatttataaaatcatttacagtacaattttattcttaaatatattggcagaaaaaatcctaaaatatc

SEQ ID NO: 648432 - DNA, 633 bp, Homo sapiens
ctctcagcaaattaacacaggaacagaaagccaaacactgcatattctcactaataagtaggagttgaacaataagaacacatggacacagggagggaaacattacacactgggacctgttggggagtggggggcaagatgagggagagcattaggacaaatacctaacgcatgtggggcttaaaacctagatgaggtattgatagatgcagcaaaccaccatggcacacgtatacctatgcaacamaccagtacattctgcacatgtatcccagaacttaaagtaaaataaaaactaaaccaaacaaaaaagaacatgtgaaaatatatatgtacaaagttgttcattagagtattctaaaaattagccaaaaatgaaaaaggaaactaaatatccactaatgggcactccttaaataaagtttcatgttgtcatgtaatgaaatatccaactgattatctgacacttgaatgttcatttcctgttataacatgatataataataataataatagtgttaaatgaaaattctaaaatgttaaacatattaaacaacaaatcccacatttataaaatcatttacagtacaattttattcttaaatatattggcagaaaaaatcctaaaatatc

SEQ ID NO: 648433 - DNA, 633 bp, Homo sapiens
ctctcagcaaattaacacaggaacagaaagccaaacactgcatattctcactaataagtaggagttgaacaataagaacacatggacacagggagggaaacattacacactgggacctgttggggagtggggggcaagatgagggagagcattaggacaaatacctaacgcatgtggggcttaaaacctagatgaggtattgatagatgcagcaaaccaccatggcacacgtatacctatgcaacaaaccagtacattctgcacatgtatcccagaacttaaagtaaaataaaaactaaaccaaacaaaaaagaacatgtgaaaatatatatgtacaaagttgttcattagagtattctaaaaattagccaaaaatgaaaaaggaaactaaatatccactaatgggcactccttaaataaagtttcatgttgtcatgtaatgaaatatccaactgattatctgacacttgaatgttcatttcctgttataacatgatataataataatartaatagtgttaaatgaaaattctaaaatgttaaacatattaaacaacaaatcccacatttataaaatcatttacagtacaattttattcttaaatatattggcagaaaaaatcctaaaatatc

SEQ ID NO: 648434 - DNA, 575 bp, Homo sapiens
tttataataaaattccatctcagttatgattgcctccctatcccaataattttatcaaccctcccttatctagtattatgtcactcaaacttcctaaagaaaatatctaggccttctgactccttttactttgtgggaagcctcaatactaggtagcaaagaacttaaggtgaggggtggggagtgtgcagaaacttctaccttaacacttatttatacacctctcaaaggtaatggcgtcctcaaaaggaattagtggagaataaatatgtctccatctcattacattagacggtacctctttttaaaaagtgaatattttcacacaataacttatgatatagtttggatttgtgtccccacacaaatckcatgtcaaattggaggaggggccttctgggaggtgattggatcatgggggtggatttcccccttgctgttctcatgatagtgaattctttctcatgagatctgatggtttcaaagtgtatggcacttctccctttgctgtctctctcctgccaccacgtggagaagcttcttgcttcccctttaccttctgccatgattgtaag

SEQ ID NO: 648435 - DNA, 557 bp, Homo sapiens
ccttctcagaaacttctctgtgacgattgcattcaactcaaagcgttgaaccctcctatggatagagcagttttgaatctctctttttgtggaatctgcaagtggatatgtggtcctctttgaagatgtctttggaaacgggaatatcttcacatwaaaactaaacagaagcattctcagaaacttctctgtgatgtttgtgttcaactcacagagtttcacgttgcttttcatagagcagatgagaaacatgcttttcgtagggtctgcaagtggacatttggagagctttcaggcctgtggtggaaaacgaattatcgtcacgtaaaaactagagagaagcattgtcagaaacttgtttgtgatgactgcattcaactcacagagttgaaggttccttttcaaacagcagtttccaaacactctttctgtggcatctgcagtggatgtttgggcctctttgaagatttcgttggaaacgggataatcttcacagaaaagctaaacagaagcattctcagaaacttctttgtgatgtttgctttcaactcacagag

SEQ ID NO: 648436 - DNA, 552 bp, Homo sapiens
cattcaactcaaagcgttgaaccctcctatggatagagcagttttgaatctctctttttgtggaatctgcaagtggatatgtggtcctctttgaagatgtctttggaaacgggaatatcttcacattaaaactaaacagaagcattctcagaaacttctctgtgatgtttgtgttcaactcacagagtttcacgttgcttttcatagagcagatgagaaacatgcttttcgtagggtctgcaagtggacatttggagarctttcaggcctgtggtggaaaacgaattatcgtcacgtaaaaactagagagaagcattgtcagaaacttgtttgtgatgactgcattcaactcacagagttgaaggttccttttcaaacagcagtttccaaacactctttctgtggcatctgcagtggatgtttgggcctctttgaagatttcgttggaaacgggataatcttcacagaaaagctaaacagaagcattctcagaaacttctttgtgatgtttgctttcaactcacagagttgaactttccttttgagagagaa

SEQ ID NO: 648437 - DNA, 557 bp, Homo sapiens
ccttctcagaaacttctctgtgacgattgcattcaactcaaagcgttgaaccctcctatggatagagcagttttgaatctctctttttgtggaatctgcaagtggatatgtggtcctctttgaagatgtctttggaaacgggaatatcttcacattaaaactaaacagaagcattctcagaaacttctctgtgatgtttgtgttcaactcacagagtttcacgttgcttttcatagagcagatgagaaacatgcttttcgtagggtctgcaagtggacatttggagagctttcaggcctgtggtggaaaacgaattatygtcacgtaaaaactagagagaagcattgtcagaaacttgtttgtgatgactgcattcaactcacagagttgaaggttccttttcaaacagcagtttccaaacactctttctgtggcatctgcagtggatgtttgggcctctttgaagatttcgttggaaacgggataatcttcacagaaaagctaaacagaagcattctcagaaacttctttgtgatgtttgctttcaactcacagag

SEQ ID NO: 648438 - DNA, 574 bp, Homo sapiens
cttctctgtgacgattgcattcaactcacagcgttgaaccctcctatggatagagcagttttgaatctctctttttgtggaatctgcaagtggatatgtggtcctctttgaagatgtctttggaaacgggaatatcttcamataaaaactaaacagaagcattctcagaaacttctctgtgatgtttgtgttcaactcacagagtttcacgttgcttttcatacagcagatgagaaacatgcttttcgtagggtctgcaagtggacatttggagagatttcaggcctgtggtggaaaacgaattatcgtcacgtaaaaactagagagaagcattgtcagaaacttgtttgtgatgactgcattcaactcacagagttgaaggttccttttcaaacagcagtttccaaacactctttctgtggcatctgcaagtggatgtttgggcctctttgaagatttcgttggaaacgggatactcttcacagaaaagctaaacagaagcattctcagaaacttctttgtgatgtttgctttcaactcacagagttgaactttccttttgagagagaagctt

SEQ ID NO: 648439 - DNA, 574 bp, Homo sapiens
cttctctgtgacgattgcattcaactcacagcgttgaaccctcctatggatagagcagttttgaatctctctttttgtggaatctgcaagtggatatgtggtcctctttgaagatgtctttggaaacgggaatatcttcaaataaaaactaaacagaagcattctcagaaacttctctgtgatgtttgtgttcaactcacagagtttcacgttgcttttcatasagcagatgagaaacatgcttttcgtagggtctgcaagtggacatttggagagatttcaggcctgtggtggaaaacgaattatcgtcacgtaaaaactagagagaagcattgtcagaaacttgtttgtgatgactgcattcaactcacagagttgaaggttccttttcaaacagcagtttccaaacactctttctgtggcatctgcaagtggatgtttgggcctctttgaagatttcgttggaaacgggatactcttcacagaaaagctaaacagaagcattctcagaaacttctttgtgatgtttgctttcaactcacagagttgaactttccttttgagagagaagctt

SEQ ID NO: 648440 - DNA, 334 bp, Homo sapiens
gcttttcgtagggtctgcaagtggacatttggagagatttcaggcctgtggtggaaaacgaattatcgtcacgtaaaaactagagagaagcattgtcagaaacttgtttgtgatgactgcattcaactcacagagttgaaggttccttttcaaacagcagtttccaaacactctttctgtggcatctgcaagtggatgtttgggcctctttgaagatttcgttggaaacgggatamtcttcacagaaaagctaaacagaagcattctcagaaacttctttgtgatgtttgctttcaactcacagagttgaactttccttttgagagagaagctt

SEQ ID NO: 648441 - DNA, 556 bp, Homo sapiens
attgcattcaactcaaagcgttgaaccctcctatggatagagcagttttgaatctctctttttgtggaatctgcaagtggatrtgtggtcctctttgaagatgtctttggaaacgggaatatcttcacattaaaactaaacagaagcattctcagaaacttctctgtgatgtttgtgttcaactcacagagtttcacgttgcttttcatagagcagatgagaaacatgcttttcgtagggtctgcaagtggacatttggagagctttcaggcctgtggtggaaaacgaattatcgtcacgtaaaaactagagagaagcattgtcagaaacttgtttgtgaagactgcattcaactcacagagttgaaggttccttttcaaacagcagtttccaaacactctttctgtggcatctgcaagtggatgtttgggcctctttgaagatttcgttggaaacgggataatcttcacagaaaagctaaacagaagcattctcagaaacttctttgtgatgtttgctttcaactcacagagttgaactttccttttgagagaga

SEQ ID NO: 648442 - DNA, 568 bp, Homo sapiens
aacttctctgtgacgattgcattcaactcaaagcgttgaaccctcctatggatagagcagttttgaatctctctttttgtggaatctgcaagtggatatgtggtcctctttgaagatgtctttggaaacgggaatatcttcacatwaaaactaaacagaagcattctcagaaacttctctgtgatgtttgtgttcaactcacagagtttcacgttgcttttcatagagcagatgagaaacatgcttttcgtagggtctgcaagtggacatttggagagctttcaggcctgtggtggaaaacgaattatcgtcacgtaaaaactagagagaagcattgtcagaaacttgtttgtgaagactgcattcaactcacagagttgaaggttccttttcaaacagcagtttccaaacactctttctgtggcatctgcaagtggatgtttgggcctctttgaagatttcgttggaaacgggataatcttcacagaaaagctaaacagaagcattctcagaaacttctttgtgatgtttgctttcaactcacagagttgaactttccttttgagag

SEQ ID NO: 648443 - DNA, 573 bp, Homo sapiens
ttctctgtgacgattgcattcaactcaaagcgttgaaccctcctatggatagagcagttttgaatctctctttttgtggaatctgcaagtggatatgtggtcctctttgaagatgtctttggaaacgggaatatcttcacattaaaactaaacagaagcattctcagaaacttctctgtgatgtttgtgttcaactcacagagtttcacgttgcttttcatagagcagatgagaaacatgcttttcgtagggtctgcaagtggacatttggagagmtttcaggcctgtggtggaaaacgaattatcgtcacgtaaaaactagagagaagcattgtcagaaacttgtttgtgaagactgcattcaactcacagagttgaaggttccttttcaaacagcagtttccaaacactctttctgtggcatctgcaagtggatgtttgggcctctttgaagatttcgttggaaacgggataatcttcacagaaaagctaaacagaagcattctcagaaacttctttgtgatgtttgctttcaactcacagagttgaactttccttttgagagagaagctt

SEQ ID NO: 648444 - DNA, 570 bp, Homo sapiens
ttctctgtgacgattgcattcaactcaaagcgttgaaccctcctatggatagagcagttttgaatctctctttttgtggaatctgcaagtggatatgtggtcctctttgaagatgtctttggaaacgggaatatcttcacattaaaactaaacagaagcattctcagaaacttctctgtgatgtttgtgttcaactcacagagtttcacgttgcttttcatagagcagatgagaaacatgcttttcgtagggtctgcaagtggacatttggagagctttcaggcctgtggtggaaaacgaattatcgtcacgtaaaaactagagagaagcattgtcagaaacttgtttgtgaagactgcattcaactcacagagttgaaggttccttttcaaacagcagtttccaaacactctttctgtggcatstgcaagtggatgtttgggcctctttgaagatttcgttggaaacgggataatcttcacagaaaagctaaacagaagcattctcagaaacttctttgtgatgtttgctttcaactcacagagttgaactttccttttgagagagaag

SEQ ID NO: 648445 - DNA, 568 bp, Homo sapiens
aacttctctgtgacgattgcattcaactcaaagcgttgaaccctcctatggatagagcagttttgaatctctctttttgtggaatctgcaagtggatatgtggtcctctttgaagatgtctttggaaacgggaatatcttcacattaaaactaaacagaagcattctcagaaacttctctgtgatgtttgtgttcaactcacagagtttcacgttgcttttcatagagcagatgagaaacatgcttttcgtagggtctgcaagtggacatttggagagctttcaggcctgtggtggaaaacgaattatcgtcacgtaaaaactagagagaagcattgtcagaaacttgtttgtgaagactgcattcaactcacagagttgaaggttccttttcaaacagcagtttccaaacactctttctgtggcatctgcaagtggatgtttgggcctctttgaagatttcgttggaaacgggataatcttcacagaaaagctaaacagaagcatkctcagaaacttctttgtgatgtttgctttcaactcacagagttgaactttccttttgagag

SEQ ID NO: 648446 - DNA, 637 bp, Homo sapiens
ttgggcacacaaataaatgaaaagrtattctgtgttcatgtattataagtattaatactgttaaaatgcccatactgcctaaagcattctacatattcaatgcaatccctatcaaaattccatggtatttttcaccaaaatagacaaaaattacaaaaatttgtatggactcacaaaatgccccaaatagccaaagcaattctgaattaaaaaaacaaagctagagacataatgctacctgatttcaaattatattacatatctataataaccaaaacagtatgatactgacatagaagcagatacctaggccaatacaagaggataaagagcccagaaacaagcccacacatatatagtcacttaatctttgaaaatgacacaaagaatatacagtgggaaaataagaatcttttcaatgaatggtgttaagaaaagtaaatatccacatacacaagaatgaaactgtatgcttaatttatgccatacacaaaacttgactcaaaatgaattaaagacctaatcataaggcctgaaactctaaaacttctagaagaaaacatagaaggaaagctgtttgaccttgttcttggcaatgtttctttgcataagacaccaaaaacacacacaagaaaag

SEQ ID NO: 648447 - DNA, 578 bp, Homo sapiens
catcacattatacgtttctaaatgtcattataatttatgtacacaggagtggcagaaagctataaaaccataattggggactagaagaccaacaatttctataggaatagtccagaatgtctagcattcaagcactaaaaaaatagtaagaaatgacagatactcagtaaaagttcatactacttaagtttaaagatgggacaacagggtatagataatgcaagaaatatattcagtagattcttattaagtgatctcataaaatactcttaacaaacccagagaatagtttgtakggaggaagaaattcagtctgttgtaaaaattagagcaacaagtgcctatttctacaagtgtggaagactggcatttccaaagaaccccttaacataaagaaactagatatttaataaaaactaggttttaatgaaagcctagctcacatgactagtgaggactatcaagtccaaacctcagtgatttagcacacatatgcactctctctctcttctttgtctctttctttctctctctctctctcaatacacaagcatgcaggcatatgtacacacatatac

SEQ ID NO: 648448 - DNA, 564 bp, Homo sapiens
tatgttttgtgtagataagaagggataagaaagagaaaactgcaattttaaagatatgataaaaagagagggaaaaacatatcttaaaaatatttcaagaatcacaataatttaactctttagatatatacagtatttatgaactaatgaaaacatattgcattattgttgtttactcagatgagaaaaatgcaaattctacctgaattatggggcatcctttgacagaaagggattctgctatcctttagtcttcaaaattatcaaataagtgtcaaagttttatattgcctcttttactatgacatcaggtgtctaaatgaaacctttaagttttccccagacttttaaattttaccttttgataaaattggttttcaaaaagcatctgttgtttgttygtttgtttgtttgtttgttttttcagacaaagtttcgctcttgttgcccaggctggagttcaatggcacgatctcggctcactgcaacgtgtgcctcccgagttcaagcgattctcctgcctcagcctcccaagtagctgggattacaggcgcccaccaccac

SEQ ID NO: 648449 - DNA, 622 bp, Homo sapiens
aaagaaaaatatacctaggaatacgcaaatgaggaaggttaaatatctctacaatgagaattacaaagcactgctgaaagtaatcagagatgacacacacaaatggagaaacacaccatcctcatggataggtagaatcaatattgttaaaatggcgttactccccaaagcagtgtatagattcaatgctattcctatcaatctactaataccatttttcatggaattagaaaaaattgttccagaattcatatgaaaccaaaaaagagctcaaatagctgaaacaatcctaagtaaaaagtgtagagcctgaggaatcaccatacccaacttcagactatactacaaggctacagtaaccaaaacagcgtggtacttgtacaaagacaggcacacagaatgatagaacrtaatagggaatccagaaatcagattgctttattgcacacccataaccatctgatctttgacaaagtcaacaacaaaaaaagcaatggggaaagaactccctattcaataaatagtgttgggataactgactagttatattcagaaggttgaaactggaccccttccttacaccatacacaaaaatcaacacaaaatggattaaaaacttata

SEQ ID NO: 648450 - DNA, 551 bp, Homo sapiens
ggtatatagcaagcataaattttcaatatttctgtaaartgggagagtgtaaatataaactgagatgatagtgttttttgaatactcattatgcatcaggcactattctgagtgctttccatttgctaattcatggaattctcacaataattctgtgaggtagacaaaattttcttcttcagttcatatgtggacaaatctgggcaaagacagatgaaagaaattgtgcaaaatcacatagctagaaatgaacagaaccaaggttcttccttgatagtctagctccagaaccgaagctcttaaccacaatgatatactgaccctcagtgtggatattgtaattgcctgcctaacctcacattttcattcagctatttaaatctccccccatgtgaagctcatgtgctttggaaaaagcagcaaagcaggtcaagcttatactgatgaacatgagctcatttgccaaacatgacccaatttaggccaatgagatttaagacattttctaggggtttccagaaaaaggtttcctaactttcttatttttcctt

SEQ ID NO: 648451 - DNA, 565 bp, Homo sapiens
tgtacagcttctctctgcagaatatttccttctctcagaagtaacgtataccatttatgtgcatttgtttagttgttcattcattacctcacatagttagtgatatttcctaaacccctactttggggaacagagttaactaggctataggagaaacatgaaatttacagatgttataatagggggagaagatgtgtacatgcagaacttttctccagggtgcaggtgatccgtcaagtggatctgctgcttccatctcctcacctgccatgacattataatttgtttctcctgtctggactgctatatgggccttaaaaatgttctctgtctgtttgmtctcacccacctcctttggtgaaatctcctgtaattgctgttaccagaatgtcatttgctgcttcagactgttggcttctcactgcctgctctgtcagtgggcatgatcctgacctttttggccctttaccaattgcactctctttactcaactcctttctccggcccaaagtacactctccatcctggccaagtacattcatttggcatatgcatgctgccttgc

SEQ ID NO: 648452 - DNA, 598 bp, Homo sapiens
cagatgattctgctgaagaattcttttaaatctgtttttgggaatcattaggctagtttacaattttcttttttcttttttgagataggatcttgctctgtcattccagctggagtgcagtaacaccatcatagctactgcagcctcaaaattctgtgctcaagagatcctcctgcattagcctcctgagtagctgggactagaggcacatgatatcatgcccagctaatttttgattttttwgtagagatagagtctcagcatattttccagtctggtcaagctcctggcttcagatgaccctcctacttccgcctcccaaagtgctgggattacaggcatgggcatcacacccagccagcttatgacttcaacatcctaatgaagtcaatacattgatgtgagagagagaaggaaggagatgtgaaagggatagccagatctctctgaaagggtactttactctgcagcaaagtattgccttcttccatctccttcaactttcatccttaagttctgaaggacctactttctatttgcttggaaaaaaatgttataatgagcgacacttactaactttgtcttcaaggagtccatc

SEQ ID NO: 648453 - DNA, 553 bp, Homo sapiens
tacctcctccccttcttcccctcccttcctatctcctttcttctctgcttccctccctctcttcctccctcacttcatttccttcttcccttcttctgcctccttacctccccgctccctatcttctttcttccttccctccattccttcttcccttcctccccctccttccctccctctcttcctccctatcttctttcctccctccctttccattcctctctttccctccttgcctttcatgtctagtgtctatgtgctagatgctgctagatgttggaaatactatgatgacaaagacgcaggctggtgagggagacagaaacaggcatkcttaaggcagtctgataaccatctccacagaggagaggacagggttctgtggcgcaaagaggagccaggccagcgggatgggtcttacctctgaaatctctcagcacccactgttgactgtcgatacctgacactggattttccggtacttcttgccctattatttatctgaaaggtgtctgtgattctggtcttagacaggccaaattaaatattcatg

SEQ ID NO: 648454 - DNA, 553 bp, Homo sapiens
tacctcctccccttcttcccctcccttcctatctcctttcttctctgcttccctccctctcttcctccctcacttcatttccttcttcccttcttctgcctccttacctccccgctccctatcttctttcttccttccctccattccttcttcccttcctccccctccttccctccctctcttcctccctatcttctttcctccctccctttccattcctctctttccctccttgcctttcatgtctagtgtctatgtgctagatgctgctagatgttggaaatactatgatgacaaagacgcaggctggtgagggagacagaaacaggcatgcttaaggcagtctgataaccatctccacagaggagaggacagggttctgtggcgcaaagaggagccaggccagcgggatgggtcttacctctgaaatctctcagcacccactgttgactgtcgatacctgacactggattttccrgtacttcttgccctattatttatctgaaaggtgtctgtgattctggtcttagacaggccaaattaaatattcatg

SEQ ID NO: 648455 - DNA, 559 bp, Homo sapiens
acatgtattttagtaagttaatgcctactcaagaacacataaagcagttagatggcttcccccaaaagaaacctctacaaatacaggcatactgcatttattatcagtagcactgctctcggtgatggaatgttccaaaatggtgaacaacacttgctaaaatttcaaacaaaacagaatagaattttctctcaatttacataatgctcacattcctggaaaattcagtgtctagtaaaatagtgcwaaataaactttgtgtttatatgtagactggagtttgtttctaggctcaaataattatggatatgtttttcatctacctgaatatgtgaaggattatttgaaaatcaggtgagccatgggattactcaatgtgcaggaccgtatcacatactgcagggtatctagcatatctgattcatgtccagcaaatgtcagtgacccccttccaatcattgtgataaccaaagtggcccccataaatttccaaaacacccttaagaagtagaaatgtcaccactgatcttgacaaaaatctatctaaatattcattcat

SEQ ID NO: 648456 - DNA, 569 bp, Homo sapiens
aaattcctgcatagaactttcatgaagagaggagagagtcggagtaaacagtatacaagcaaatacgcaartatagtgttctgtcatgtcaagagctaggaaaaaaggtcaaacaggataaggaaatagggaattgtaagaaggtgttattttagcctggtggccaaggataagctctcagatgagacggacagacctaaacaaaatcagtacatgagccacatgaatatctgaaggaagagcctttaagatagaggatataggagaggcaaggactccccaaatcaggagggcatagggcttggtgtggctcatggaagcagtaattgagttgaatggtggaaaatgaggccagaaagacagctatgggccagagtacagaagtccatataagacttggtaggtatctggaaggtgaaagatctctacaatgagaattacaaaacactgcccaaataaatcagagatgacacaaacaaatgtaaaaacattccacgatcatggataggatgaatcggtattgttaaaatggccatgttttccaaaggaatttacagatgctatgtggt

SEQ ID NO: 648457 - DNA, 539 bp, Homo sapiens
tacccgggctggagtgctggagtgaagtggtgcaatctcggctcaygacaacctccacctcccaggttcaagagattctcctgcctcagtctcctgaggagctgggattacaagcacccaccatcgcaagtggttaatttttgtatttttagttcagacagggtttcaccatgttgtccgggctagtctccaactcttgacctcaggtaattcacccatctcagcctcccaaagtgcacaaatatacttttgtgtgtgattacaatattaaaatacctccattttctgtagtaagctgcagctgttcgaagctctcaagtgctcaccttttcttttctctcagaacttccatatgctccaggaactaaatgtttaatatctgaaatattaaaaaggtctttaggaactacctgctccagcatgcacataccgtaatctgttctcatggtctgtgactcttcaaggcgaataattttaatattatttttcctcatagatacatcacattgcatttcctgttggaccattattacattgac

SEQ ID NO: 648458 - DNA, 539 bp, Homo sapiens
tacccgggctggagtgctggagtgaagtggtgcaatctcggctcacgacaacctccacctcccaggttcaagagattctcctgcctcagtctcctgaggagctgggattacaagcacccaccatcgcaagtggttaatttttgtatttttagttcagacagggtttcaccatgttgtccgggctagtctccaactcttgacctcaggtaattmacccatctcagcctcccaaagtgcacaaatatacttttgtgtgtgattacaatattaaaatacctccattttctgtagtaagctgcagctgttcgaagctctcaagtgctcaccttttcttttctctcagaacttccatatgctccaggaactaaatgtttaatatctgaaatattaaaaaggtctttaggaactacctgctccagcatgcacataccgtaatctgttctcatggtctgtgactcttcaaggcgaataattttaatattatttttcctcatagatacatcacattgcatttcctgttggaccattattacattgac

SEQ ID NO: 648459 - DNA, 604 bp, Homo sapiens
gctggttgaaagtggcttttaccagtctgcaagttactcactgttttgattaaggaggctttctaaagagacactgatggactgcagtagatagtaatttcctaaggtagaggatctatractagtgcttccctcactatctttgcagtgcttagatgtcatcaacataaagacagttaagagaactgatgacctacaaaaaccctctcaatatttgtagtatagaaagactgagaatttgaaatctaggaacatgactcttttgttattatcaaagttaaatggaaagtagatctaatgacatgatggaaatagaataggaattttactcagcatgtggtaaaaagataattgaagaaaatatagttgtgttacaggaagaatgtagtaggtttaactcaaaagaattcttttatactcatgttaaattatagaaattttattgccactaattcaaaggttatgagttgaaccaattggatattcacataacaaagttatatattttaccaggcagataataatgacaatatacacattagggtatatttcactgaatgggtgaattacaatgtcagagtggtcttgtgggtaatgggacatt

SEQ ID NO: 648460 - DNA, 562 bp, Homo sapiens
ggatgaaactaccactattattagcaaaaactacaatattttacttcaaaactataagaaggacttctgcacttgacaaagaagagaaagtaaatgctgaaaaaatttctacactcaaattctaaattctccatataccttcttatacattgtaatttgtcaatacacttcttagtgaaagttctattcagtgacctttgatattgcagccayattaacaactttcactttacatctcagtaaaaactatatgcaggatattttgtcattttcattttaatgacaataaaagtttttatttcctaccagtcagtgtgaatgcctaacagtataatttatccatgtgttgacagttgttcattgccagatacaaaagcaattgataagccaactttactttagtaaataccaagtaaatattgagaaagttaaatgatactctgaggaatataatcaactataatactgatttgctgtttttaattcctttaaatacagcttggaggagaagagtaaaacagatgcattgaatgaagatctcacagtgacatgaaaaagaggc

SEQ ID NO: 648461 - DNA, 603 bp, Homo sapiens
ggtgatatcccctttatcattttttattgtgtctatttgattcttctctgttttcttattagcctaagctagcagtctgcctattttgctaatcttttcaaaaaactagctcctggattcatttgattttttgatatattttctttccaaatttttctactggttattttaaaacccatcatttcttgatgcacatttatttattattttattactttttaaatgtacaatattattcaattttttaggaccttaaacctaatgaatgtttgttaacttctaagccatgttggcagtttcctacatagtaatttgcttattatatggggaaattggtsaaagataaaatgaaaatgtccagaaaaaatactttctagttaatagctagcatatgagacaggatggcagaggtttctcagcattcaaaggttatgatggcacattaactctggcttgaagaagcaagaagaacaatttgcaaaggaaggactatttcctagatcctgttagtgtaggaatcaagggaaataaattctaataaggtggagacctcatagaaaagtatcttagcctttaatactgcacatacgcaagttcgagtac

SEQ ID NO: 648462 - DNA, 613 bp, Homo sapiens
aatgaattaattccattatttcaacagtgggttcattatcgttggagtagattcgtaataaaaagatgagttcaccccccttttctctctgtcttcctcatgtgatgtcttctgacatgttatagcacagcaagaagggccatttaagatgctagcaccttgatcatagactttctagcttccagatccttgagaaaacaaattattatcctttataaattatccagtcttaggtattttttttcttatagcagcacaagacagactaagacaatcatttccattttcccaaacagtcttattaagccatttcaatgatgatgtaattgagtctcatggaagttaagtaacttagatatagataaaataagtgcctcagtagtagaaagctaataacatatatagcaaattcaaacttataccaaagcttataccaaaatatagaatgttaaccactgtcttcatatctacaatttgctttggaaataaactattttttttacttaactaacattttaatacaaataaaatagaaaaagcttataatatggaaaacagttgattayctaagtacattcaaaactgttatatacaaaagcatattaaaaagtca

SEQ ID NO: 648463 - DNA, 558 bp, Homo sapiens
ccaaaatgtaaaaaaggaaaacattgggctaatcagtgtcactctaagtttgataaagacaggaacccgatttcaggaaacaacatgaggggcccgccccgggccccattccaaacaggggcatttccagctcaggccattccctcacccctgtacaatgactgtcccctgccacagctggttgtgccacacacagtagatttatgctgcacaagagctgtgagccttctgcctggggaacccccacaaaaggtcccaacaggagtctgtggacccttgccagcggagacaataggattacttctaggcaggtttggtttaaatttaaaaggggtacaaatacacacaggagtcattgattcagattacagtggagaaattaaaattgttttatctacttctgttccctggaaatcagagccaggagagttcatagcacagcyccttattgtgccatatgtgggaatggggaaaagtaaaatttaaatgaacagaagtatttggaagcacaaatacacaaggcaaagcagcttactgggtaaatcaaattactgataa

SEQ ID NO: 648464 - DNA, 558 bp, Homo sapiens
ccaaaatgtaaaaaaggaaaacattgggctaatcagtgtcactctaagtttgataaagacaggaacccgatttcaggaaacaacatgaggggcccgccccgggccccattccaaacaggggcatttccagctcaggccattccctcacccctgtacaatgactgtcccctgccacagctggttgtgccacacacagtagatttatgctgcacaagagctgtgagccttctgcctggggaacccccacaaaaggtcccaacaggagtctgtggacccttgccagcggagacaataggattacttctaggcaggtttggtttaaatttaaaaggggtacaaatacacacaggagtcattgattcagattacagtggagaaattaaaattgttttatctacttctgttccctggaaatcagagccaggagagttcatagcacagctccttattgtgcyatatgtgggaatggggaaaagtaaaatttaaatgaacagaagtatttggaagcacaaatacacaaggcaaagcagcttactgggtaaatcaaattactgataa

SEQ ID NO: 648465 - DNA, 572 bp, Homo sapiens
tcagttcaactagaagatcgaattatcctaaatatatatgcattaaacacaaaccacccaggttcataaagcaagttcttagagaccttcaaagagtcttacactcccacacaataatagtgggagattttaacactgcactaacaatattagacagatcattgatacaaaaarttaacaaagatattcaggacctgagctcagcactagattaaaaagacctgacgacatctacagaaccctctactccaaaacaacagaatatacattcttctcattgccacatggcacatactctaaaactgatcagatatttggaagcaaaacactcctcagcaaatgcaagatacctgaagtcatagcgaacaatgtctcagaccacagcataatcaaattagaaattaagactaagaaattcactcaaagccatacaattacatggaaattgaataagctgctcctgaatggcttttgagtaaataatgaaattaagacagatgtcaagaagttctttgaaagtaatgagaacaaagatacaacataacagaatttctgggacacagctaaggtag

SEQ ID NO: 648466 - DNA, 374 bp, Homo sapiens
atcagaagatctccagggctcttctaacctttgaaattagtcatgatccaatgatcatgacttatctgattattccatcccaacctggatttatccctgattrgctggaccagccctctttgtgtccttcccttctctggagcagctcccaaatccaatcaccacctttgagaatttccagactaactaacctctacccatctccacacccaattctcattctctgcattactcagtatgttccatacaatcccaagtattccttccctatgcttgtgtacaatgaaaatgtctcaactgcaatgtgatcttgccaatataccagttccttcatgcctgtctactgcagaaccatcttgacttgcaaggtgcca

SEQ ID NO: 648467 - DNA, 554 bp, Homo sapiens
gatgaaataagtgggctcccaaggccttgggcagctccactcctgtgactctgcaggttacmgctcccgtggctgctttcatggcctggtgttgagtgccagtgctgtttttaagcacacagtgaaagctgttggaggatctatgcaagctgttgatgggtctaccattctgggttctggaggatggtggccctgttctaacagctccactaggcagtgccccagtgcagactctgtgttggggctctaatcctaaatttcctctctgcattgccttagtagtggttcttcataatggctccacccctgcaaaagacttatgtctggacattcaggtgttttatacatcctctaaaatctaggcaaaagttaccaattctcaacttttgtcttctgggcaccacaggcccaagaccacatggaagccaccaaggcttggggcttgcactctctgaagcaattgtctgagctgcaagttggccccttttagcgatggctggagctggagcagctgagacacagggcaccaattcttaaagctgcacagagcagaa

SEQ ID NO: 648468 - DNA, 582 bp, Homo sapiens
caatctccgcctcccgggttcaagcgattctcctgcctcagcctcccgagtagctgggactacaggcgtgtgccaccacgcccagataataattttttgaatttttagtagagatgaggtttcrccgtgttagccaggatggtctcaatctcctgacctcgtgatccgcctgcctcggcctcccaaagtgctgggattacaggcatgagccaccacacccggccccatggtattttgactacaaaatgagacacaatacatgaaaaagtggtctactgtggatcactactctcaatgaaaagaaacaaactattgatacatttgacaaaccaagactttctccccaaaactgggctgtgtggtcccctaactctacctgatagggaaaagaaaagtgagttgggaatgaggaaagtatttttttggagggaggtttgttttaggttggtttttgttgttgttatgatttgactgtgattcctccatagagtaaaacacagtcagttcttgttgtttgtggttattatgttctttaaagaacataattgctgtgagcactgaattagcaaatactgaactgtt

SEQ ID NO: 648469 - DNA, 600 bp, Homo sapiens
cataaccagttgtaagtatacagttttgtagagttaagaatatttacagtkttgtgtagcagatttctagattttttttttaatcttggaaaactctatacccattcaacaactattaatttccccttccttccacctcctggcaagtactattctactttgtgttatctaaaaatttggcttatatacctagggttatataatatttgttgttttgtaagtaggttccatgttatgtgtcaggatgtgtcaggattttcgttcctttctatggctgaataatatttcttcatatatatatattttctctctctatatatatatatccttttgtttatccatctattcctggatggacgttttggtttcttccaccttgtggctgtgtaatgctcctgtgaacataggtgtgcacatatctgtttgaggtcctgctactagttattctgtctctgtagaagttggatggctggatcatatggcattttatttatttatttattttttgaggagccagttcatatttccaccaacagtgttcaagggtttcagtttcacctgcacttgttactttctgttgggtttgaagtgatgtcccat

SEQ ID NO: 648470 - DNA, 600 bp, Homo sapiens
cataaccagttgtaagtatacagttttgtagagttaagaatatttacagttttgtgtagcagatttctagattttttttttaatcttggaaaactctatacycattcaacaactattaatttccccttccttccacctcctggcaagtactattctactttgtgttatctaaaaatttggcttatatacctagggttatataatatttgttgttttgtaagtaggttccatgttatgtgtcaggatgtgtcaggattttcgttcctttctatggctgaataatatttcttcatatatatatattttctctctctatatatatatatccttttgtttatccatctattcctggatggacgttttggtttcttccaccttgtggctgtgtaatgctcctgtgaacataggtgtgcacatatctgtttgaggtcctgctactagttattctgtctctgtagaagttggatggctggatcatatggcattttatttatttatttattttttgaggagccagttcatatttccaccaacagtgttcaagggtttcagtttcacctgcacttgttactttctgttgggtttgaagtgatgtcccat

SEQ ID NO: 648471 - DNA, 600 bp, Homo sapiens
cataaccagttgtaagtatacagttttgtagagttaagaatatttacagttttgtgtagcagatttctagattttttttttaatcttggaaaactctatacccattcaacaactattaatttcccsttccttccacctcctggcaagtactattctactttgtgttatctaaaaatttggcttatatacctagggttatataatatttgttgttttgtaagtaggttccatgttatgtgtcaggatgtgtcaggattttcgttcctttctatggctgaataatatttcttcatatatatatattttctctctctatatatatatatccttttgtttatccatctattcctggatggacgttttggtttcttccaccttgtggctgtgtaatgctcctgtgaacataggtgtgcacatatctgtttgaggtcctgctactagttattctgtctctgtagaagttggatggctggatcatatggcattttatttatttatttattttttgaggagccagttcatatttccaccaacagtgttcaagggtttcagtttcacctgcacttgttactttctgttgggtttgaagtgatgtcccat

SEQ ID NO: 648472 - DNA, 346 bp, Homo sapiens
gtaaatagcaaatggcattccttttcattcttgggttagtagatactacatcaatttttttttcttacacacatctaatgaaagatgtgaaaacaaaaactttcacagagaagactgtacttatgcaccataaattcatcatgttccaaagcttaaacarttcccgagaagtctgtgcatctctttttcactggctctacactttcttaagttttgccatcctcatggaactgtcagccagcacactgaaaggattctcagaaaacaaaagcatcatcaagttctcagggttgcggtagagattgaaggccaacagacctaagactcattcagaaatacttagctg

SEQ ID NO: 648473 - DNA, 346 bp, Homo sapiens
gtaaatagcaaatggcattccttttcattcttgggttagtagatactacatcaatttttttttcttacacacatctaatgaaagatgtgaaaacaaaaactttcacagagaagactgtacttatgcaccataaattcatcatgttccaaagcttaaacaattcccragaagtctgtgcatctctttttcactggctctacactttcttaagttttgccatcctcatggaactgtcagccagcacactgaaaggattctcagaaaacaaaagcatcatcaagttctcagggttgcggtagagattgaaggccaacagacctaagactcattcagaaatacttagctg

SEQ ID NO: 648474 - DNA, 346 bp, Homo sapiens
gtaaatagcaaatggcattccttttcattcttgggttagtagatactacatcaatttttttttcttacacacatctaatgaaagatgtgaaaacaaaaactttcacagagaagactgtacttatgcaccataaattcatcatgttccaaagcttaaacaattcccgagaagtctgtgcatctctttttcactggctctacactttcttaagttttgccatcctcatggaactgtcagccagcacactgaaasgattctcagaaaacaaaagcatcatcaagttctcagggttgcggtagagattgaaggccaacagacctaagactcattcagaaatacttagctg

SEQ ID NO: 648475 - DNA, 592 bp, Homo sapiens
gctttaaatttctaactttatttacccctatgcccaagcaagtaaacatttaaaggctaatcaagtgcttagctatagctaagtgtcatacactgatgatggctaaataaagctaaacctgtgtactggtagacattactcacagctcaaaactttgtgaattttgaattgatagaacttagttgagccacttgattaatgtctctgaaacatcttgtattactgtatatcccaatataatayaaacaagtaatacaatatgagaataatcaaaagaatggtattcacttagatatatcattaaaataatatatatgcataggcagatgtcagtcagtgtttcaactcatttctatttagacatacataatagttttaaaaaaagactttggaagtgtgccaaaatgaattggcacaaaataatgagtgggtaaaaaaattagaccactgggaatatttaaaaatccaacttttgggtactctgctattttcttagttttgcatagttccataaaacacaaatagcagttttactgttgcttttctgttgttttacaagcttaatgttggctgccagggctatgatgcagtc

SEQ ID NO: 648476 - DNA, 596 bp, Homo sapiens
ttttctttattcaatttgtcattaatgggcatttaggttgaatccatgtcttaattattgtgaatactgctacaatgaacattgttttcccatccaaatggtttcataggacttcttctttctgagagattgtagtgcactgtgattccatcccagagtccctgaatagttcatcayaccctagacatcccctgcttcaatctctctgaacaaaactaacctgtccgagatcccattattttagggtttcatcctgccaaagtacttatgggtgattgtgttacactcataaataacacatgcatcttttcagatttctaaagtcaatgccttcatttagaagtggacataagtttcagatccttttcatgtcagttggtaagagagttttgagcaggtaagctgtttattatttttagaattgcattctgttattaaaccacttgccatttgttgtgcattgatctactctggaaagaacagacataaatacagtactgagggtaggatggttttccagaactacttggctacactatccaggtaatggatgtctgaataacaggagacacccctcacatggactttggacttgg

SEQ ID NO: 648477 - DNA, 448 bp, Homo sapiens
ccgccttcccactgtgccctcacatgatctttcctctgtgtgtgcaatcctggtgtctctttgaattttctaatcttttcttataaagacaccagtcagattggattayggcccaccctaagggccccattttaattcaaaaacctcattaaggaccttaatttcaaatagtcacattctgaggttctggggcttagtacttcaacatatgaatctagggagacacaattcaggccataacagcacacattatgtacattatgtatcacattatgtacattaagtggacttaagttgtaatatatatttataattctgtttcatcaaagaaatagtcaacattttcataatgctagtcaatacgcagtaccaaatcatgccctcctttgtcaaagccttccaattctttccgatcttgctcaaaaaatacaagcaaagtcctttttat

SEQ ID NO: 648478 - DNA, 630 bp, Homo sapiens
attggatggtacattatgtgaagatactggtgttttctttatggtttttcatatataaagagatataggagataaacttcttcatcatggggtaggaggggagaatttgcaatctgatgtcaatggctcccttagtcacccgtgactcacyactcagcatcatctctcagaagcccacaccctggcttttctgtcctgtagctgggaccttctgcctgtctccatttcttcttatgtgtttttcatccctttcacactccttgccactcgtggatgcctcttctctttgtccctataggaacttccaatcctgctttagaacttactccttcaggaaagcaactctcactgaagtgtgggagcggagcagagaaaagactaggtaggaagagagccgagctcaattttatattccacaactaactggttctgactttctcaacaagtcgccaaagctagctgagtccaagttcctcatctgtaaaataaagatgttaccatctgtcccgccaaccccattttacttaatttcattgtgcgtgtctaaaatgaagttataaatgtgcgaaaagtccctcgtaatttataaattccatacaaatttgagggaatatatataattattattct

SEQ ID NO: 648479 - DNA, 630 bp, Homo sapiens
attggatggtacattatgtgaagatactggtgttttctttatggtttttcatatataaagagatataggagataaacttcttcatcatggggtaggaggggagaatttgcaatctgatgtcaatggctcccttagtcacccgtgactcactactcagcatcatctctcagaagcccacaccctggcttttctgtcctgtagctgggaccttctgcctgtctccatttcttcytatgtgtttttcatccctttcacactccttgccactcgtggatgcctcttctctttgtccctataggaacttccaatcctgctttagaacttactccttcaggaaagcaactctcactgaagtgtgggagcggagcagagaaaagactaggtaggaagagagccgagctcaattttatattccacaactaactggttctgactttctcaacaagtcgccaaagctagctgagtccaagttcctcatctgtaaaataaagatgttaccatctgtcccgccaaccccattttacttaatttcattgtgcgtgtctaaaatgaagttataaatgtgcgaaaagtccctcgtaatttataaattccatacaaatttgagggaatatatataattattattct

SEQ ID NO: 648480 - DNA, 548 bp, Homo sapiens
ccactgccaaaagttttttgtaatagactttatacttgaatgtcatcaagaaaaggttcagagaggtttgtagtaagtagtgtagctgagattcaaacccagactgggtggctccattattatttttcttaactgctgtgctgtgctgcttttccaggtaattaaaaagaaagatccaaagtattaataagatggaataagaactgcagaaagcagtcttgtatgtgacgtgtacttgagcaaaagtttttttaaaaagcgctatgatttccacccctcattctgtgtacctgatgttgttaatcacgtaccaatcttgtaaaatgttccctagggacatatttagkgtatctatatcataagtgaaatgcttgcttttgcagaaaaatgagtaaattggctagctactgtctacaatagttatgggctacattctaaaatctgttcataagtcaaagcatgagaatgcatttcccacattaatttaatttgctcagcaaatattgagaactttctacatgccaagcaatgttctgggcatcaaggac

SEQ ID NO: 648481 - DNA, 538 bp, Homo sapiens
tatttctttgggtttttatttttatgrctatatttttattttgtttttatgatcatgtaacaggttgaatagtatacctccaaattgctctgtactcggaacctcaaaatgtgaccttatttgggaatagagtctacataaatattagttatgataataatggtgatgatgaggatatagtctgtattagctttacacggttgctgtaacaaattgccacagaccaggtggcttaaggccacagaaatgtattctttcacagtaccagaggccagaagtctgaaatcaaattgtcagcaaggttagtttcttttgaagtctctgagcaagaaaccaacccagacctctctcatagcttctgatagttgccagcaatccttggcgtccttggcttgtgggtgcatctctctaatccctgcctccatcttcccacggcagtctcctctttgtgtatcactctgttgctattgtcttgtaaggtcaccagttattggatttagggcccactctaatccagtatcctcatcttaattacatc

SEQ ID NO: 648482 - DNA, 538 bp, Homo sapiens
tatttctttgggtttttatttttatgactatatttttattttgtttttatgatcatgtaacaggttgaatagtatacctccaaattgctctgtactcggaacctcaaaatgtgaccttatttgggaatagagtctacataaatattagttatgataataatggtgatgatgaggatatagtctgtattagctttacacggttgctgtaacaaattgccacagaccaggtggcttaaggccacagaaatgtattctttcacagtaccagaggccagaagtctgaaatcaaattgtcagcaaggttagtttcttttgaagtctctgagcaagaaaccaacccagacctctctcmtagcttctgatagttgccagcaatccttggcgtccttggcttgtgggtgcatctctctaatccctgcctccatcttcccacggcagtctcctctttgtgtatcactctgttgctattgtcttgtaaggtcaccagttattggatttagggcccactctaatccagtatcctcatcttaattacatc

SEQ ID NO: 648483 - DNA, 536 bp, Homo sapiens
attgttttcaggcaacagggatgaatctaacagaaaaaattgaataataaacaataaacaatgtaaaatttaaaaggaaaataatacagaacttctttacttacgtatatttactggctgcttcctataagtatgcgtcactctcctgtttataactcatgaatagtaattcttttgagagagaaaaactgcggcaacgaaaccacaaaacacgttgttagggcaratgcatttggtaataatgagagctttgttttccacttttctttaaaagtggaactttttctccctttatactaatccacttatttcactcttttctgttttgtctatccctctatgtatatatgtgtctatctatctactatttgccatctgtctaccaatctatttatttatctacctaccatctctctatcctctatctatccatctatctactatctatctaatctatctaatctatctatctatctatctatctatctatctatctatctatctatctatctatctatctatcacctatctatttc

SEQ ID NO: 648484 - DNA, 532 bp, Homo sapiens
caatgctcttcacacagaaataaatcaataaatgctgttgactggtgtctgactttacttaatgtctacccttttcgtgcctcaaactgctttgacagtattcattcackgagtttttgagtaaccctctctaacacacaaaatatctctccttcctcataattacacaaacaaggcaaaggagtcaggagactgggttctttctaggcctccacctatcactaacattggcagtcatatcacctctatgttgccacaatttattccctgtgaaacagtgtatttgaaccaagcaactttgaaagttaagatttcttccagttccaaaattaaatcttgaacgctgatgacaatgttgctgcaataaatgcaataatatctctctgcactgttattgcagtaccatagtcattattatcatcaccaagtccagtgttgactgtgcttagcactttacatatatgagctcacttaatcctcacctgaggcttaggaagtagttactattactacctgcattttacagacaagg

SEQ ID NO: 648485 - DNA, 622 bp, Homo sapiens
actaaaaaattcctagtgacataatagtgcaacatattactcgtgtgtttggggtgatgctgttgtaaacaacccactgcmctgtcagtcatataaaagcatagcacatataattatagatagcacacaatatttgataatgataacaaaaacgattatctattattaaaactattatttgataattgttgatcaattagttgatattattgataatgataataaaaactatgtttatgtatttactatacttttattgttattttagagtgtattccttctacttatagaaaaaaaaagttagctattaaaacagtctcaggcaggtccttcaagaggtagtccataagaaggcattgttatcattagtgacagctacaaacatgttattttccctgaagaccttccagtgggacaagatgtggaggtggaagatgatgatattgatgagcctaaccctatgtaggtctaggctaatgtgggtgtttttgtcttaggttttagcaaagaagtttaaaaagtaagaaaattaaaaatgcttatagaatgaagatataaagaaagaaaatatttttacacctgtacaatgtgttcatgttttaaactgttattacaaaagagt

SEQ ID NO: 648486 - DNA, 539 bp, Homo sapiens
acacctgtgaacccagttacttgggagcctgaggcacaagaatcatttgaaccctggaggtgaaggttgcaatgagctgaaatctcactactgcatttcagcctgggcgacaaagtgagactctgtctcaaaaaataaaataaaataaataaataaatttagtgtagcctaagtgcacagtgtttataaagtctatagtagtatacagtaatgttctagaccttcacattcatttaccactcagtcactgacccacctagagcaacttattcatggtaagtgttctatacaggtatatcattaaaacatattttgtactgttttcttaatgcactttttctatatttagatatgtttagatacacaaataccactgtgttacagtctctaaagtattcagtatagtamcatgctgtacaggtttataaactaggagcaatagtgtataccatattgcctaggtgtgtgataggctataccatctagatttgtgtaaacactctataatatttacacaatgactaaatcacctaacaata

SEQ ID NO: 648487 - DNA, 580 bp, Homo sapiens
tcagctctcaggaagggcctttttcagggaggagaaggactgtgcaaaagatagtgggtgagggtccatggcatgatcagggaacactatggttatggcactgatagaatcaacaagtcctttaagtctgttaaagatttattgagcatgtctaatgtgagtctttatctaagttactataaaaatattgattacaaggggtaggcctaggtcccagagcatatcrttaaagatctcttttctggctgattttgattctgattaatactttgagaaaatacatttgttcagatataatttctcctaactctgctctcataatctcgaacttctttttctttatcacaaggatatatgaaaaaccatcacatatcatgctgaaatcaagataataataccctatacctgctttaaggcccagcaattccacttctatgtatttatccaggagaaataaaaacacgtctactaaaagactcatacaagaatgtttatggaaaccatattcacaataaccccaagctggaaatgacccatatgtccattaataagagaacagatcaacaaaatgtggtatatg

SEQ ID NO: 648488 - DNA, 573 bp, Homo sapiens
ccacaccctgggcctggtagttaaagatccacccctgacctaatcggttatgttatctatagattatagacattgtatagaaaagcactgtaaaaatcctgtcctgttctgttccgttctagttaccagtgcatgcagccacccagtcacgtaccccctgcttgctcaatcgatcacaaccctctcacacagacccccttagagttgtgagcccttaaaagggacaagaattgctcactcagggagctcggttgttggagacatgagtcttgccraagctcctggctgaataaagcccttccttctttaactcggtgtctgaggagtgttgtctgcagcttgtcctgctacattacaagtaatgctctgtcagtacagagtagtagtaggcatttatggcctaccacatccttaaatatctcccacctctggtagtactgaaacactgctcacataaagagctacataggggatgagaagaaaacagaattctgtttacaaattcaggtatttgattattaggctaatgtttgtaaagtaaggtataaaaaatccaaaagagtggatgttccc

SEQ ID NO: 648489 - DNA, 557 bp, Homo sapiens
ttgaataataaaatgttgatttaacaggtggtaatgagaataaataagatatagaacactttcatctcattaactctatatttttatcccaaaatatctatataatatttacaaaaattgaatatgtgttttgtcaaaaagaaaatctcaataaattccaaaatcytggcaatcatatatatacagcattccgtgtaataaaactgcaaaaaaagcccaaaatagaaaagaaaaactagtcttagaaacaaactaacaacataccttaaaaaactagatgtaaaaactcttatgctcattttataaaaattatatttatttatataagtgttttatgtacataggaagaatcacaaaaaaatagacatgaaataatttacattggctacttttaggaatgatggaattgggggatgagaatagaggtatttttgagagacacttttgtatttttattttataaatctactgcttgaatttaaaagaaataattttgtaataaataaaagcaaggtttttaaaaatagaaagtgaagttcagccatgaggtctttgcc

SEQ ID NO: 648490 - DNA, 557 bp, Homo sapiens
ttgaataataaaatgttgatttaacaggtggtaatgagaataaataagatatagaacactttcatctcattaactctatatttttatcccaaaatatctatataatatttacaaaaattgaatatgtgttttgtcaaaaagaaaatctcaataaattccaaaatcctggcaatcatatatatacagcattccktgtaataaaactgcaaaaaaagcccaaaatagaaaagaaaaactagtcttagaaacaaactaacaacataccttaaaaaactagatgtaaaaactcttatgctcattttataaaaattatatttatttatataagtgttttatgtacataggaagaatcacaaaaaaatagacatgaaataatttacattggctacttttaggaatgatggaattgggggatgagaatagaggtatttttgagagacacttttgtatttttattttataaatctactgcttgaatttaaaagaaataattttgtaataaataaaagcaaggtttttaaaaatagaaagtgaagttcagccatgaggtctttgcc

SEQ ID NO: 648491 - DNA, 537 bp, Homo sapiens
acagttacgtagcttgtacagtatgtagcttctttttatgtaaacctatkaattctaataggtctaacgtgttgacttaaagtatttgttttcagatataactttaatacataccaaaattgataaaaatttgcttgcgcttatatttcttatattttaatttaaatattaaatataaacaaaactacgaaatcaatgagctccaaagtgaaactataatagtggatggtgttttatggctgaacatccattacctactaggtttaataagagagagcttaattttatgtatctgatttttactgtcatcttggttcttttaagttttagtccaatggatataagtcattacaatcattgttaatgctttaacaatgaacacattttttattgttaactacctactttatgatgtaataaatttaatacttcattaacatatgattgtgaagttgttttctaaattttattgaccaaacaatgctttattgtatgtttgttactattctcattattaaggaataccaagaaagcatc

SEQ ID NO: 648492 - DNA, 537 bp, Homo sapiens
acagttacgtagcttgtacagtatgtagcttctttttatgtaaacctattaattctaataggtctaacgtgttgacttaaagtatttgttttcagatataactttaatacataccaaaattgataaaaatttgcttgcgcttatatttcttatattttaatttaaatattaaatataaacaaaactacgaaatcartgagctccaaagtgaaactataatagtggatggtgttttatggctgaacatccattacctactaggtttaataagagagagcttaattttatgtatctgatttttactgtcatcttggttcttttaagttttagtccaatggatataagtcattacaatcattgttaatgctttaacaatgaacacattttttattgttaactacctactttatgatgtaataaatttaatacttcattaacatatgattgtgaagttgttttctaaattttattgaccaaacaatgctttattgtatgtttgttactattctcattattaaggaataccaagaaagcatc

SEQ ID NO: 648493 - DNA, 537 bp, Homo sapiens
acagttacgtagcttgtacagtatgtagcttctttttatgtaaacctattaattctaataggtctaacgtgttgacttaaagtatttgttttcagatataactttaatacataccaaaattgataaaaatttgcttgcgcttatatttcttatattttaatttaaatattaaatataaacaaaactacgaaatcaatgagctccaaagtgaaactataatagtggatggtgttttatggctgaacatccattacctactaggtttaataagagagagcttaattttatgtatctgatttttactgtcatcttggttcttttaagttttagtccaatggatataagtcattacaatcattgttaatgctttaacaatgaacamattttttattgttaactacctactttatgatgtaataaatttaatacttcattaacatatgattgtgaagttgttttctaaattttattgaccaaacaatgctttattgtatgtttgttactattctcattattaaggaataccaagaaagcatc

SEQ ID NO: 648494 - DNA, 598 bp, Homo sapiens
attcccattattcaagactgcttttgacttataacatgaagccttctataatatggtcactgaaatgaaaccaaatggtagaagaaagattgttgccaattgttaccatatagaaacattttagtggaaatgaaaaagcaaaaaattcagacaaaaattatgttgtatttccataaagttataccaaatatgcccacttctcttacctcccctttcacctccgctatctctttcacctctgccaccccggagacagcaagaccaacctcttcctcctcctcctcagcctattcaaagtgaagataacaaggatgaagacckttatgatagtccacttctacttaatgaatagcaaatatattttctctccattatgatattcttattaacattaacttttctccagcttattttattgtaagaatacagtacatagtacatataatatacaaaatatgtattaatcaactgttcatgttactggtaaagcttacagatgataggaggctaattagtacttatgtttggggaaaaacaaaagctatactcgattttccactgtgtgtgttgtgggggagaggtgtcaatgttcctaatc

SEQ ID NO: 648495 - DNA, 542 bp, Homo sapiens
gcgacagaggactgaggacttagttaagccctacctagacttctgacctatagaaattgtgagatagtaaatgtcattttaagatgytgtgttttagttaatgtgttatgtagcaataataattaataccaatgagttggaaaatgttaagaaaatatctctgagaatatggtttaaaaaaacataaaacaagggtaaaaatttgaatgacagagaaaggaggattaaataggtgaattgcaagaaattttttagggcaatgaaactattctctatgatattataatagtgctaaatgacactatgcaacttgtcaaaatcaatagaagtttatagcacaaagagtgaaccttaatgtatgtgaacgttaaaaaaaatatttagaaggttgtggtcccggaatagaaagcagaatatgacaaaaaataacataattgtattataaataataattaaacaacctcacttacagaagttgggagaaagtcctgaactaactaactttggaaatgaatgaagtctgcgagactaaggcaaagaat

SEQ ID NO: 648496 - DNA, 597 bp, Homo sapiens
tttttttccctaagagtctgagatttgggtatatgccaggcagaggatgcctatgtgatcagcctccaataaaagctgggtgtcgtctctaatgagctccccttgttggcaacgttttacacattgccataatttgttcctgggggaattaagtgaaggactccattgggagaagactctggaagtttgcatctggtttcctccagatttttttcctgcatctttttgcttttcttgtttactttgtatcctttcactgtcataaattatagctacaagtccaatgatattctgagtcctatgagacctcccaatattagaggtccataaatcatcaaatctggaagtggtcttaaagatctcccaacacatatagtatattagttaggtttctccagagaaagaggttcaataggctatagatagatggacacatagataaaaagagatttattgtgagggattggctgctacagttatggaggttgggaagtcccacaatcttctgtttataacttattagcacaggaaagccagtggygtattttcattccaaacctgacatcctgagaaccaggagagctgtctttgtctgtt

SEQ ID NO: 648497 - DNA, 608 bp, Homo sapiens
gtttaatggataaaatgaaacaaaaaagcaaaaacaattttttaatgtttaaaaagttattttacacaagataattgaaaatcatatacaaaactgggaaatacaacttatcagcaatctctctctctatatatatatatgtatgtatacatatgtatacacacacacacacaactatatatatgtgtgtgtttgtgagtgtgtatttatacagttgacccataaacaacataaatttgaactgtgtgggttcacttacatgtgaattttctttcacctctgccatccctgagacagcaagaccaacccctcctcttcctcttcctcttcctcctcagcctactcaacgtgaagaggacctttatgataatccacttcctcttaatgagtagtaaatatatttctcttacttttgatttttgtaataacattttttcctctagcttactttattataagcatatagaatatcatctatagagaaaatatgtttaactaatccttaggttattggtaaggyttctattcaatagtaggctatgagtagttaaatttgaggggagtcaaaaattatatgtaggttttctactgttggggggcaatgccct

SEQ ID NO: 648498 - DNA, 573 bp, Homo sapiens
actagttttatattaagatgatgaaaatgaacctacattgattaaatgcttaaataagtttggaacgagtttaacaaaagctttccaaacatttgtgaaactttttataatcttccttacatgtgggattggtagtaaaatctgatacgagggttagcttttcaaatacatttcaaaaataataagacctgtcagtattccatttgaatcattaactgtatacggtcccttcccatatgtaccaatggcttcctcgcacacttgtggttacaacattaccttctactgctaaatgcattcccaccccaatatacctgcctgcctattgtatattttgagtttcctagaaaataaatttaaaagaataaatgtagtttaaggactttttttttgccttttactagtattctatttttttcacacatgattatttttcccctagatactggaagagaaagaatactaaattcagacttagaaaactgtagatatgatcatagataatattttgacatgggragattcaaataaaagtctcaggctttcaatatgtttgtcaacagaaagagacgg

SEQ ID NO: 648499 - DNA, 595 bp, Homo sapiens
gctgaggtgggaggatcacctaagttcaggaaggtcaaggctgcagtgagccatgaatgtgccacttcacgccagcctggatgacagagtgagaccctgtttcrgaaaataaaataaaataaactgctgttttaaggtgctgtgatttgcgattgttcattactattgcaaaatctagcctaacatgactaatatataaggttgtacacagaacccgtggtgtggaatcctcaatgactaataggagtgatttgaaaattgagctctgggttttctagaaaacaacacaaaatgggaaacctgttatatcaaattactgtaagaagttcacactaaagatcctgcttgttgaaggagggcattgttatcaggctttatagctattgtcacactgtttctctttaaacagagttctttgttgatcttttgtcattttgtatttccctgactttagtatagaatattttccaggcaataaattcaacctatttttgtaattccttcacccttacaatcaaaccttggacatgatgtccagcatagccagaccttggtagcaggagattaagggctctttaaatgctatcattgagac

SEQ ID NO: 648500 - DNA, 595 bp, Homo sapiens
gctgaggtgggaggatcacctaagttcaggaaggtcaaggctgcagtgagccatgaatgtgccacttcacgccagcctggatgacagagtgagaccctgtttcggaaaataaaataaaataaactgctgttttaaggtgctgtgatttgcgattgttcattactattgcaaaatctagcctaacatgactaatatataaggttgtacacagaaccygtggtgtggaatcctcaatgactaataggagtgatttgaaaattgagctctgggttttctagaaaacaacacaaaatgggaaacctgttatatcaaattactgtaagaagttcacactaaagatcctgcttgttgaaggagggcattgttatcaggctttatagctattgtcacactgtttctctttaaacagagttctttgttgatcttttgtcattttgtatttccctgactttagtatagaatattttccaggcaataaattcaacctatttttgtaattccttcacccttacaatcaaaccttggacatgatgtccagcatagccagaccttggtagcaggagattaagggctctttaaatgctatcattgagac

SEQ ID NO: 648501 - DNA, 476 bp, Homo sapiens
aaacactaatattgcattagccaagtcccaggagagattttacatggaaagggagaagtaatatacaagtaagactagagaccaagactgctcaccttttacagacctggcaaacctgactaaaamgcgagagaggtttggttttcaagggggaacatttggattcctagccactagcttttgcttagtctgcctgagcctctccattgtatatcatcaggctgtccttaccattagtcccctgtaggacacctatccagaaaagttaaccaatttgtagcaacattctactgtcagatatcctactagttgccaaggatggaaagtcgtcaggagacttcctgtctgcaagaatcttataatctagaaaatgatataaaagcagaaaacagatagcaacaatatgaaataactgttcattatatagttctaaggaagaataaaagagacattaattctattaactctctcttcca

SEQ ID NO: 648502 - DNA, 604 bp, Homo sapiens
atatttttttaaaaaacaaaatcttcaaaccactgttgcctccaatttcaatcttccactttatttccttccatagctgccctccgttattaattctttaagtaacctcatgtaacatgagtaaatagtatataaaatgggggagtggaaagaccattttattatgacagaattttatggcttcataaaactccatcacattatagcttctttattacagttctagtmaacacactttagagtaatgtgaaacataatcagaaaagagagaccagcttagtattctcatataaaaaccaattgaagaaactgataatactttccagtaaaaataagacagagagaagaatgacagatctctcttagcagaaaaaaaaattttgttttgtttgatctctgaagatagagcttgggtctataaataaaagatatatgttgacaaattagagttaatcataaagaaaaaaattctgaccatatgtcctatagtgaaatgagataaaagtaaattcaatccaaggatggctcctggcttcatggagcctgcagcttttgcaatttggacatcccctttaagaagacaaacagaaatacataactggaa

SEQ ID NO: 648503 - DNA, 534 bp, Homo sapiens
aatacataattacagtttgtcataagttctaccttaagaaaatacagtattacaagtgagaaaccgaagttaaaattgggagtcatggaaggttttcctgaggaagttgtatttgaactgtagcccaagagatgagtagaagttgtcaaaatggaaagtggggaaatgagatattcacacggagatgcatgatrcagacatgtgcaaaggaaggggagagggagtggtcagcatgggatgcaggcaataaagagggtatatggtttaaatagaactaaaaaataataataaaaccaagtaaaagacagcatgcttttgagtcaccaggcacatgctctaaccattccaaacaatgtcagtgataaaatacgcccacctgtccaggctgactgctcctccacccccagccctcagcatgtcactggccagatatctgaaggttttgaggggggaaagaggttattgccatctaagaaagacaatgtggcaagagtacagtgaatgaagaagagagaaacaagacactctggaagg

SEQ ID NO: 648504 - DNA, 444 bp, Homo sapiens
cctccctgccccccctttttttcctggaatcaaattttatagctattatatttgtagtaaaaaatatgttttctgaagtttgtatatgttaygtgaagcttttaaaccactatttcatttaaacagcagcagatggtgcatttcgtttatgactgttccgtggatcctgtgggacagtgttgttcttcgaatgtttctatagcatcaccagcaattccgtgggcctgccaattaacaatgctgttgcaaaaaatcattaatgattcaaatcaagcacaatggtactattctttgatgctaatagtaaagattatagaaataatatgatatatttataatttgcaaagtcagttatttttatcattttaaagggatgaataaagaaaaaaagtcctgctttgttcaaagaagaaaataatcacactgtcatttgaaatttgttta

SEQ ID NO: 648505 - DNA, 573 bp, Homo sapiens
ttaatggcaactacagatactaggagttttcaataaatctatttcaagagcagctgctataaaattggttcattcttgtgaagtggaaggcatttttccctttttttctggcaaaaataatatatcttgacagctctaatatgtctttttctcacttttgttctagtctattttcttcaatagaaaaaatctttagcacaaaatcaaataaaactattagtgttataaaattctgtgaatttatgttataaaattaaattatgaaacaaaactgaacaaaagatgacaactattgtatttctattttcaaaaacaaaagaacagtcaaagtgatttgaaaactctaaagcatataataaatataatggcacrattttctcaaatagttgagaaaacagacatcattttgaaaacacacaaattcagatgtaagaaaacagatattttgcagttttaaaaaatttagtattttcagcttgtattgaaggctgctaagagtaaatttaggaagagtcttgagtataggatatagtgaatagtttatgtgattttattgttatttaagtatttaca

SEQ ID NO: 648506 - DNA, 573 bp, Homo sapiens
ttaatggcaactacagatactaggagttttcaataaatctatttcaagagcagctgctataaaattggttcattcttgtgaagtggaaggcatttttccctttttttctggcaaaaataatatatcttgacagctctaatatgtctttttctcacttttgttctagtctattttcttcaatagaaaaaatctttagcacaaaatcaaataaaactattagtgttataaaattctgtgaatttatgttataaaattaaattatgaaacaaaactgaacaaaagatgacaactattgtatttctattttcaaaaacaaaagaacagtcaaagtgatttgaaaactctaaagcatataataaatataatggcacaattttctcaaatagttgagaaaacagacatcattttgaaaacacacaaattcagatgtaagaaaacagatattttgcagtttkaaaaaatttagtattttcagcttgtattgaaggctgctaagagtaaatttaggaagagtcttgagtataggatatagtgaatagtttatgtgattttattgttatttaagtatttaca

SEQ ID NO: 648507 - DNA, 596 bp, Homo sapiens
taagtgaaaattgtcttggggtgagagttgtacaaaacaattaaaagctttggaatagaccctacagaggagatgaaaattaagagcagtgcgagggaattaactacacaattcttgttaacactaatggaggtagcatagtgaatgcctcacttatctcatttaccccttactgtccagttagttgctgagagyatttgtgtttatatatatttaggcacatagacagaacaattttaagaagtcttatagaagtttaaaagtgctgttgacctgaatgaatctggcaagatcaagaataaattcacaagtgcacagctctctaactaatccttagtaatttttgtaagttaaaattttacttctgaaaaaataattacttgaatcaggacattattgcctaaacatgattactgttacaaaacatatacagatttatatcttctctgtgaactttgtaccaacacaaataattaagtgtctgaaactctgtaaagtgatgactagtgtacattttatgatgctgcatcctcaaatttttaattgtatctgttcatttagttagaagctctgaaacttagtaaaaatacaattaa

SEQ ID NO: 648508 - DNA, 596 bp, Homo sapiens
taagtgaaaattgtcttggggtgagagttgtacaaaacaattaaaagctttggaatagaccctacagaggagatgaaaattaagagcagtgcgagggaattaactacacaattcttgttaacactaatggaggtagcatagtgaatgcctcacttatctcatttaccccttactgtccagttagttgctgagagtatttgtgtttatatatatttaggcacatagacagaacaattttaagaagtcttatagaagtttaaaagtgctgttgacctgaatgaatctggcaagatcaagaataaattcacaagtgcacagctctctaactaatccttagtaatttttgtaagttaaaattttacttctgaaraaataattacttgaatcaggacattattgcctaaacatgattactgttacaaaacatatacagatttatatcttctctgtgaactttgtaccaacacaaataattaagtgtctgaaactctgtaaagtgatgactagtgtacattttatgatgctgcatcctcaaatttttaattgtatctgttcatttagttagaagctctgaaacttagtaaaaatacaattaa

SEQ ID NO: 648509 - DNA, 567 bp, Homo sapiens
atgttgcaaatagagaacttctgtctccaagatatattttacaagtatcagatgaaatcaagcttttttaaaggtacttgtccttcaatctttcacctctaatgaatgccaagcttttcactgatttattgatcaaatgatccttaataaccctatgatgttctgtagaacatcccatttgtatgccaagtcactgatgacactaacatctcccaatgtaacaaatgaactagtccatgaacaagtactatgaaacayatctttttatataccaactcttttgcagatataaaaaatacataaaatctgttgcactatttataacacctactagaatgtctcgaaaatgcttcagaaggtttctggcgtaatgtacattaattaccagattaatacatttctagccacacagatcaaatattaattccatgagaataaaatgaaattaaggaccatttacaattaaaaattatactactgactatcaagaatatatattactccatggtaaaagtatttcttggtaatggtatttcttctttggggtatgtgcaaaccaataaaact

SEQ ID NO: 648510 - DNA, 567 bp, Homo sapiens
atgttgcaaatagagaacttctgtctccaagatatattttacaagtatcagatgaaatcaagcttttttaaaggtacttgtccttcaatctttcacctctaatgaatgccaagcttttcactgatttattgatcaaatgatccttaataaccctatgatgttctgtagaacatcccatttgtatgccaagtcactgatgacactaacatctcccaatgtaacaaatgaactagtccatgaacaagtactatgaaacatatctttttatataccaactcttttgcagmtataaaaaatacataaaatctgttgcactatttataacacctactagaatgtctcgaaaatgcttcagaaggtttctggcgtaatgtacattaattaccagattaatacatttctagccacacagatcaaatattaattccatgagaataaaatgaaattaaggaccatttacaattaaaaattatactactgactatcaagaatatatattactccatggtaaaagtatttcttggtaatggtatttcttctttggggtatgtgcaaaccaataaaact

SEQ ID NO: 648511 - DNA, 281 bp, Homo sapiens
gtatgaaggaaaaccagtcaaatgaggggtaagacatattcaaggtagagaacaatctacaattacactgagccctgaacaaagagagaaaataagctatacataaatttggggaagaacatttcaggaagagggaagtktacaggctctaatgaaatcaaaaagcaagtgtattccaaaaagagcaaaaaatcattatgcatgaaattgaattgaatgagcaatgagaagaatagtaaaaatgaggtcaaacaataatctagagctagatcagaaaaaag

SEQ ID NO: 648512 - DNA, 281 bp, Homo sapiens
gtatgaaggaaaaccagtcaaatgaggggtaagacatattcaaggtagagaacaatctacaattacactgagccctgaacaaagagagaaaataagctatacataaatttggggaagaacatttcaggaagagggaagtttacaggctctaatgaaatcaaaaagcaagtgtattccaaaaagagcaaaaaatcattatgcwtgaaattgaattgaatgagcaatgagaagaatagtaaaaatgaggtcaaacaataatctagagctagatcagaaaaaag

SEQ ID NO: 648513 - DNA, 281 bp, Homo sapiens
gtatgaaggaaaaccagtcaaatgaggggtaagacatattcaaggtagagaacaatctacaattacactgagccctgaacaaagagagaaaataagctatacataaatttggggaagaacatttcaggaagagggaagtttacaggctctaatgaaatcaaaaagcaagtgtattccaaaaagagcaaaaaatcattatgcatgaaattgaattgaatgagcaatgagaagaatagtaaaaatgagrtcaaacaataatctagagctagatcagaaaaaag

SEQ ID NO: 648514 - DNA, 574 bp, Homo sapiens
ctaagttctttagtggtaattactaagattttggtgcacacatcacccaagaagtgtacactgtattgaatacttattattttatcctttgcccccctccccyagattctccctgcatctccaaagtccattattcttatacctttgcattctcattgcttagctcccacttataagtgagaacataagatgtttggttttccattcctgagttacttaatttagaacaatctctctaattccttccaggttgttgcggatgtcatgatctcactcctttttacagctgcataatgttttatgttgtatatatgccacattttctttatccacttgttggtagataggcatttaggctggttcctgtaaattgtgctgctattaacatgggtgtacaagtgtctttttcatgcaatgacttcttttcttctgggtagatacccagtaatgggattgctgagtcaaatagtagttccacttttagttatttaaggaatctccatactgttttccatagtggtgtactagtttacattcccaccagcagtgtaaaagacaaaagtaaatattataa

SEQ ID NO: 648515 - DNA, 594 bp, Homo sapiens
caaccaatttttgcttttttttcttcttcttttgtacaacactgtttattagaccagatgatgtactctactccaaaacattcatatggaaaaaaattgargaattgtgattaaaattgattttttccctttggaaagttggaatcaaaaatggttacctgctcacttatgaaacagatttattctgttgacatggaggcttgtttgaaatgtaattgaatttctgttacctaatggaaagtgacagttaacagtatttattttccatttgtgtctcagtagataacataacacaattttgatttgtagttagctttggaatctgagattgttctatttctgtaattgaaaagatgggagtgtgatggccccaatacaatccttttttgtttttatacagccagtaaaggtagctttaatacagtaaacagcttctctcccatgctgctaatggttatattcagatgtactgcgtgtgttgtgtcttcttattagactctaacacatctttctatgttgataatctctccatttagactcatattttttttactttgcaactaatttctgtaaataacttcttctctgtcttct

SEQ ID NO: 648516 - DNA, 594 bp, Homo sapiens
caaccaatttttgcttttttttcttcttcttttgtacaacactgtttattagaccagatgatgtactctactccaaaacattcatatggaaaaaaattgaggaattgtgattaaaattgattttttccctttggaaagttggaatcaaaaatggttacctgctcacttatgaaacagatttattctgttgacatggaggcttgtttgaaatgtaattgaatttctgttacctaatggaaagtgacagttaacagtatttattttccatttgtgtctcagtagataacataacacaattttgatttgtagttagctttggaatctgagattgttctatttctgtaattgaaaagatgggagtgtgatggccccaatacaatccttttttgtttttatacarccagtaaaggtagctttaatacagtaaacagcttctctcccatgctgctaatggttatattcagatgtactgcgtgtgttgtgtcttcttattagactctaacacatctttctatgttgataatctctccatttagactcatattttttttactttgcaactaatttctgtaaataacttcttctctgtcttct

SEQ ID NO: 648517 - DNA, 505 bp, Homo sapiens
cagactaggtctggactcctttgcctctggagatgttgatagcttttgggtttcagagcccagaacagaagctaccagggctcctaggttgggattccctgaagcagaccttagtacaagagtttgtgggcaatctgggaggtgaccacaggaggcacacagtaggcagagtgsagaagtgagcccaggcatggagggcagctaatgcagggtgtgttgaccagaaggttactgccaagggcacctcgggctccatcccactgggaggttgtgtgaaacacagctccatgtgttgttccaccatagggaccaggagctgatgtatttatcctcaagtcattgattgaggttgcttccaggtcgttaacttccaggtacttctggcttgcacaatgagccaagcacacccctgtggctatgaaagtcctcaagcagaagcttagtcactggaaaggcgagttctgggcttagcagcagacacctagagtgattgctgcacctggca

SEQ ID NO: 648518 - DNA, 505 bp, Homo sapiens
cagactaggtctggactcctttgcctctggagatgttgatagcttttgggtttcagagcccagaacagaagctaccagggctcctaggttgggattccctgaagcagaccttagtacaagagtttgtgggcaatctgggaggtgaccacaggaggcacacagtaggcagagtggagaagtgagcccaggcatggagggcagctaatgcagggtgtgttgaccagaaggttactgccaagggcacctcgggctccatcccactgggaggttgtgtgaaacacagctccatgtgttgttccaccatagggaccaggagctgatgtatttatcctcaagtcattgattgaggttgcttccasgtcgttaacttccaggtacttctggcttgcacaatgagccaagcacacccctgtggctatgaaagtcctcaagcagaagcttagtcactggaaaggcgagttctgggcttagcagcagacacctagagtgattgctgcacctggca

SEQ ID NO: 648519 - DNA, 514 bp, Homo sapiens
aaatctgctctttctccacgtataaaagacatgagcaaatagctcgtgacgtttgtaccaaggattaaatgagggttgttttgtgaaaaatgtggcatgagcggtcttcatctccactgagcagagtctgtgtgttcacggcacttttggatctttggttttagatgacgaaataaggcatgcacccatgtttatgggtttggattattgcataaagtgaatatgtgtgcatgcaaatttctagattttatgacatctttcttggagcacggtgacaaatttggaatcataaagctattaaagttttctgttccatgrcatataaggggttactctgggcttgacaggaaaaggcacctgaggtccctagttagagacttatccaaagctgactccaggatagaccaagtggcatttccaaatgtatttgttcagaatcctggcgcctgggtctagcgggtgaaatgctaacctggcagtcagtagctggtgctcttgcatgttgtcttgtggg

SEQ ID NO: 648520 - DNA, 510 bp, Homo sapiens
gtggaaagagtgtggaccctgagctgggtgggagaagcaggctgatctcagcgctggcatggcttagggctgcacccatctcagctcacatggttaattaagggttttgtggtggttacagaggatctcgagggctatcccagccagcgggctcctgggtctgtcatcyctgcctgtgctttgttcagaaactacagggattcagtttcccatttgcacagcagcacccagtctttgcttttctgtttcttcgtggcttttaaatgttatcatattaaccatctagagaggcaccctgcaaggttattcctctcacctgcttttgctttccttgatttgatgaaatttacagcttctttctctcttccattatctttcagccaaaagaaacagagaaaagaaatactgacacttgcctccaattatatttctactctgatttttaaaattgtttttttcttatattattattctagttattaggtaacctgcctcagtttagtcaaccaa

SEQ ID NO: 648521 - DNA, 634 bp, Homo sapiens
atgtccctgcaaaggagatgaactgagatgagttcatctatctatactttacatatgagagatcagcaggacatgcttcctttttgggattgaatgcagtggtttgagtaagagttttttgaattttgttataaggacaactgtttctaaaacaacattttgacmcaattgagctgtgttttttaaatccgttcagtggagtctctctctctctctcttttttctctgaaagcagatattgactttagacacagactcagtcttcccaatacacaccaaaaagttgatctggctgttaaaacaacactgacaattcttcaggcagatatttcaaggctaagtgtttttcccaaggctgagtatttgatttaaaacaacaaaacaagctggcagttacaggctggacttgaaacattctcaatcagtgatgaagtgcatcgcgcgcccttgggttttcttcccaaggcatctaagaagcagccagatttccagcttgtgtgaaccaaatggcagcctaaggaagtgacagcacttaccctcttttgcatcagcagtggtcagtgagtaaaatgaagtgagccccaaacttcctcttaatgagaaaaagtgttactttatcaaccaagttgctcta

SEQ ID NO: 648522 - DNA, 589 bp, Homo sapiens
tcatctatctatactttacatatgagagatcagcaggacatgcttcctttttgggattgaatgcagtggtttgagtaagagttttttgaattttgttataaggacaactgtttctaaaacaacattttgacccaattgagctgtgttttttaaatccgttcagtggagtctctctctctctctyttttttctctgaaagcagatattgactttagacacagactcagtcttcccaatacacaccaaaaagttgatctggctgttaaaacaacactgacaattcttcaggcagatatttcaaggctaagtgtttttcccaaggctgagtatttgatttaaaacaacaaaacaagctggcagttacaggctggacttgaaacattctcaatcagtgatgaagtgcatcgcgcgcccttgggttttcttcccaaggcatctaagaagcagccagatttccagcttgtgtgaaccaaatggcagcctaaggaagtgacagcacttaccctcttttgcatcagcagtggtcagtgagtaaaatgaagtgagccccaaacttcctcttaatgagaaaaagtgttactttatcaac

SEQ ID NO: 648523 - DNA, 634 bp, Homo sapiens
atgtccctgcaaaggagatgaactgagatgagttcatctatctatactttacatatgagagatcagcaggacatgcttcctttttgggattgaatgcagtggtttgagtaagagttttttgaattttgttataaggacaactgtttctaaaacaacattttgacccaattgagctgtgttttttaaatccgttcagtggagtctctctctctctctcttttttctctgaaarcagatattgactttagacacagactcagtcttcccaatacacaccaaaaagttgatctggctgttaaaacaacactgacaattcttcaggcagatatttcaaggctaagtgtttttcccaaggctgagtatttgatttaaaacaacaaaacaagctggcagttacaggctggacttgaaacattctcaatcagtgatgaagtgcatcgcgcgcccttgggttttcttcccaaggcatctaagaagcagccagatttccagcttgtgtgaaccaaatggcagcctaaggaagtgacagcacttaccctcttttgcatcagcagtggtcagtgagtaaaatgaagtgagccccaaacttcctcttaatgagaaaaagtgttactttatcaaccaagttgctcta

SEQ ID NO: 648524 - DNA, 634 bp, Homo sapiens
atgtccctgcaaaggagatgaactgagatgagttcatctatctatactttacatatgagagatcagcaggacatgcttcctttttgggattgaatgcagtggtttgagtaagagttttttgaattttgttataaggacaactgtttctaaaacaacattttgacccaattgagctgtgttttttaaatccgttcagtggagtctctctctctctctcttttttctctgaaagcagatattgactttagacacagactcagtcttcccaatacacaccaaaaagttgatctgsctgttaaaacaacactgacaattcttcaggcagatatttcaaggctaagtgtttttcccaaggctgagtatttgatttaaaacaacaaaacaagctggcagttacaggctggacttgaaacattctcaatcagtgatgaagtgcatcgcgcgcccttgggttttcttcccaaggcatctaagaagcagccagatttccagcttgtgtgaaccaaatggcagcctaaggaagtgacagcacttaccctcttttgcatcagcagtggtcagtgagtaaaatgaagtgagccccaaacttcctcttaatgagaaaaagtgttactttatcaaccaagttgctcta

SEQ ID NO: 648525 - DNA, 475 bp, Homo sapiens
cctacccctggcccccaagttgtgacaaccaaaactatctccagatgttgccaaatgtccagttggtgattggggaacaaaacatctgaggttgagaaccactgctttagatcaatccaagttctagcagatgagaataactccattcttctttwgatgtatttattaatatttttaagccttgaaatgaaaaattgctttttaagcattagaaaatgcatactcttcttttgaaagcctagcaataaatcccataactatcagggtcttcgtttcctcatcttgagccttatttcaaggctccctctgttctaaattctgaccttgaaaactctattcctacctctttctttttttggacagggtctcactctgtcgcccaggctggagttcagtggcgcaatcacagctaactgtaccctcgacctcctggactcaagagatccttccacctcagcctcctaagtagctggga

SEQ ID NO: 648526 - DNA, 644 bp, Homo sapiens
catgcacatgcacacacacacacgcgcacacacacacacacacacacacatttcacccaactagcatgtcatggaagcagcaccgtctccagggtggtcctggcctgttccttcacaccatggggcctttgcctgtgggttcctgccttgctctaactgctcatgtgtctaaagggagggttgaggtctgtttgggttgaatggtgtctcctaaaaagataagttgaagtcctaacccctgatatctgtaaatgtcacacttaattgaaaataagtatttatagaaatgatcaaattaggatgaggtcaggctggtcatattgggttctaacccaatacgactcgtggaggcaaagatacatacacacatagggaaggaggccacatgcagatggcagtggagattggggcaatgcagccataaggcaaggaatgctgaggattgtcaacagaaaccagaagtcaggcaaggcaagttgacgggttcttctctagagcttttggagacaacgtggccctgccaataccctgattttggacttctagcttccagaactgtgagacaataggtttctgttgtcttaagccacccagctyatggtaatttttaatagcagttctaggaaactaaaaccaggtcaatt

SEQ ID NO: 648527 - DNA, 551 bp, Homo sapiens
taccttttcatctttctgcctgagtttttacagacttcctctcaacaaacttaataatttccttcttactgatcttacttcaaagtttctttgctgratttaacaatttcttatcacctcctacttcttgtcttggtttttcattcacatctaatgcttagcacagtcctgggtgcatatgaaggccacctgaatggacatttattaaatgaatgaatccttgactttatctcagtttcctcccctgctgctcttccctagttcttctccaccaaggcccagttgcaggttggccctattaggccaaccaatgtgttttatttggctcacatagagttttaaggttatgagtcaacatttgaaagttaggaggtttcacacaaaaatatgagttcctgcttttcttgagcaatttgaagatctggcatggaaacagttgctagaacgaaggggccccttttagagatgacaggtgcccttttgttcctcatggtccctggcattcttgctttttctctccctgacaccgaggctcttttagattttcattt

SEQ ID NO: 648528 - DNA, 609 bp, Homo sapiens
agactccgtctcaaaagaaaaaaaaagaaaagaattgtaatcttactgcagtacttggttagtggtaagcaatatgcacatggaaacaatatttacataggcataatcacataaacactgaatattactctaaccagaaacactkactagactgtatcaggagaccaagaagagcaaagcagctgaatgacagggtgggatgggagccctgtaaaagagctaaatgctcatctaccgcaagtagaagtcaataaatcaattttttaaaagtctaaaataaacaaaccacgatagtattcaggaattccagacacaactgctacatggatagaaagtgggtccctcccagaaacaagactaaggggtttgggtagggtaggaaacattttttttttaattttttgttttgtttttttgggacagggtctccctctgttacccaggctggagtgcagtggtgtgatcatggctcactgcaacctccaactcctgggctcatgcaatccttctgcctcagctaattccaagtagctgagattacaggcacaaccaccacacctggctaaattttttttaaacttttttttttttttctgtagatgggttctc

SEQ ID NO: 648529 - DNA, 609 bp, Homo sapiens
agactccgtctcaaaagaaaaaaaaagaaaagaattgtaatcttactgcagtacttggttagtggtaagcaatatgcacatggaaacaatatttacataggcataatcacataaacactgaatattactctaaccagaaacactgactagactgtatcaggagaccaagaagagcaaagcagctgaatgacagggtgggatgggagccctgtaaaagagctaaatgctcatctaccgcaagtagaagtcaataaatcaattttttaaaagtctaaaataaacaaaccacgatagtattcaggaattccagacacaactgctacatggatagaaagtgggtccctcccagaaacaagactaaggggtttgggtagggtaggaaacattttttttttaattttttgttttgtttttttgggacagggtctccctctgttacccaggctggagtgcagtggtgtgatcatggctcactgcaacctccaactcctgggctcatgcratccttctgcctcagctaattccaagtagctgagattacaggcacaaccaccacacctggctaaattttttttaaacttttttttttttttctgtagatgggttctc

SEQ ID NO: 648530 - DNA, 554 bp, Homo sapiens
atttaacaagtctttaggaagttccaaactttcccacattttcttgccttcttccgagccctccaaactgtaccaacctctgcctgttacccagttccaatgtcgcttccgcattttcaggtatcttttcagcagcaccccactctactggtarcaatttactgtattagctcattttcatgctgctgataaagagatacccgagactgagcaatttaaaaaagaaagaggtttaattgaacttacagttccacatggctagggaagcctcacgaccatggtggaaggcaaggaggaacaagtcacatcttatgtggatagcagcagccaaagagagagagagagcttgtgcagggcaactcctgcttataaaaccatcagatcttgtgattcccactcagtatcacaagaaagacccacccccataattcgatcatatgttactgggtccctcctacaacatgtgggaattatgggagctacaagattagatttgggtggggacacagagccaaaccatatcactatctaaagagttggggcatcatcatcaa

SEQ ID NO: 648531 - DNA, 615 bp, Homo sapiens
tttagaagaagtcagctggttaagaaaaatatctaagccaatgaaacattggctttaaattattttagatcatgatcaaagtagtcaatcaccaagaaactataaaagtcattwgaaatatatgttcaagatcccagatacacctatttttatcctgaattacataggctcaacaattcaatttattttttaaaaattcattgaatatctgtttgctcaaaaatatatttctttatgactgcaaagatataatgaaacttaagtttacaaaacactgtagttaaaagggagatgatctccttaagtctgtgtgaataagaactttttctcttacaaatgaaagaacgccaactcaaacttgtctgtaggggagacaagtgttttgttggatcacaaaactgaaaagtatagcagtagactgacttcagatatagctgaatccaggtaccaaactcattgtcataatggtcattctgtctctctttctctctgtctctctccacccaaaccgcatttcacatctctgctttctttattttggattctgtctcaagcaaattctctccatctggtggcagagatggtccctgacagcttcatgccttcatgattatt

SEQ ID NO: 648532 - DNA, 565 bp, Homo sapiens
gaagcccatatggctaatcactattcttgtgtgctttatgcaaataaccaggccaagtaaagtgagactaaaatttattttccaaataaattagccctactacaatttatccttgggagaaatggggaaactgaagagaaaaaatacattttggaagaaaactatagtagacccattaattattagattctagccctagccattgtttttgagtttttaaatcctgaataatttcctggctataagaagtctctaaagaactactgggttttaattttcttgatgatgcttttagttgggtccctaatggaccaggttcttttytgttgctcttgttcaggcatacaaattctcttttgattgtaatctttgtgtgcattatatttctactattcaaattattaatgttatatatctctcactgttttacttctcctgagaaaaccaaagccatggtattccgaagtctaagaaatgattcaacagagcttgtgaaccctcctcatttggaatcccactgggcccaatctgttttccaatgccaactcactgctgctaaagctat

SEQ ID NO: 648533 - DNA, 589 bp, Homo sapiens
cagtcttgtccaaacaccagcatcaacaatctttctcctataggttaaattctacaactccctaaaccagtggaaatcaaacttgtcagtactttagttgttcaaatttataagtgaatagagtctggaaatggtctgtggcctccaggctgagttttagtgtcctgggcaaagccctttgccacatgcttctgcagtaaggggcaatctgcccagtaatgttcaacatrtgtaactagtccgtgtgcatggtttctgcttcctgtctggtgtgcaatctaactttctactgggaccataacctcctcatcattgacctaatactctaatcctctttccttttttttttctgtaaatctactttctctggggactgaactttctttcgggccactttcaaactggactaacttaattgcagaccaaagtgtgcccaacaagaagtatagctactatccagagactcttcctatagtgctctgacttcttaggtagaatctcctgaatatcagcataagtctggactaggttcaaatttatactcctctttgaagaccagtcttactgccaagttatctcccatagcccc

SEQ ID NO: 648534 - DNA, 545 bp, Homo sapiens
cctattggatctcatgttctcatgagggagacaggcaacaagcaaataaatctacaatataatgtgtcagggatagaagccataagaacagagctatatgaagagacagactgaatagcacactgtttacctatcaacatggctctgctgcacgagggatcatggccccacctgcaagtcaggaggcagcaaggcagagagaataggctttggatcccctcagaactgaggtataggactgactccactattttattaatctctctaagcctcagtttcctctctgcaaaacggcaagaataacagcaactaattcatagagttaaatgagctgatgcttgaaaacagcatagcatagtgtaccaatatgagcactaaattaaataacaatgattatgagcactcaaaaaaagctacaataactactgtcgtttccaactctctctactccaaaccctgggcccataaactagatgtctcactaatcyctcaaactccacctttccaaaaatgaactcatcatcttagctgagagtagctcatcc

SEQ ID NO: 648535 - DNA, 531 bp, Homo sapiens
aaatgcaaatgagacagcttagagcagcttttaataaagccatgaagaacagcatgtctgaaataattatccttttttttttggttaaacaattttttcctccacaagttctctgtattcattcactctagttagaattcttattctattcctcaagtattgacaaaaagggaaaaaagtataccaattcaggattaaaamaaaatagtcaccgtaacattacccaagagcacaaaaatttgtactaaaaataacttggctttattggtggcatacatcctgtgaaaacttgcaaataattgatcttatactagtaggttaaatagtatgaatgcaattggtaggattagcagctaataatataaaaacaaggataattttcatttttatagaactttagcttctcagattcctcttataattatttcttctattgatcagtttgaaccttatgacaatctagagggcaacaagagtagctatatatgaggcaactaaggtatgcataacaatctgggtagcttggttagc

SEQ ID NO: 648536 - DNA, 541 bp, Homo sapiens
tccaagccaagattttaagaagcacattgtcttcatctrtttgtgttgctctaaaggaattcctaaaactgagtaattgataaagagtaagaagtttatttggctcatggttctgcaggctgtacaagaagaatggcactagtatctgcttttgctgagggcttcaggatgcttctactcatggtaaaagatgaagcaaagcccacatggcagagattacatggcgaaagaggaagcaaaatagtgagaggggagatgcccagctttttctaaaaaacagatctcatggaaacaacagactgaaaacacacttattactgtgagtacagcaccaagccattcatgagggatctgcctccatgactcaaacacctcccattaagcctcacctccaccactaggaatcaaatttcaacataatgtttgagggatgaacattctaactacagcacatactgtatttacaattgctccatttttactcataccactctacacaaggatggcatgtccaagcaggggaggagacacatggagcata

SEQ ID NO: 648537 - DNA, 577 bp, Homo sapiens
ctcttataacaactacttctgacttgacctgtaaaatgatatttaaaaatctgaatacgttacctttaagcattaatatgtacacacaattgtacatgcagacaaagtccctctcccaaatattcacacaaatctttgtgttgtgaaatttggtatagaattttattcaaaaagagagaacaggccttgtataaaagcatttttttasgtttaaaatattcgagaaaattgaatctgtaaatccagtttttatctgcaaatctaatctactcacactttatgttgatatgtcaattacagaactaaaatttcaacaaagaatgatctttccttaaagcagtgctatccaatgcagcttcctatgaggataacattctatatctatgctgtttgatatggtagccactagccatatatagcttttgagcccatacaatgtagctagtgcaactgaggacctgcatttttattcttaaacactcacatgttattagagacttctatattgaacagcccagctcttagtcattgaaatttctgcaaattactggggagtttgaacataaagggacttgct

SEQ ID NO: 648538 - DNA, 525 bp, Homo sapiens
atcttatccaagaccactgacatggtaactctttgagtttgctagtgtcacagtgttatyaggtttgagatgacccccaatgaagatgtgaccaaagctttagatcacagcagtcaactctcttttgatacctggaaggccttcctaagaatgatgggtgcaaataagcccagactgaagactataaaaaatacctaagtcttcaatgcccagacatcaacagacattcacaagcatcaatattgtccatgaaaccatgaccttatcaaatcaatattgtctatgaaaccatgacctcatcaaatgaactaaggaaccactgacaatcccagagtgacagagatgtgtgacctacagacagagaatttaaaatagctgttttgacaaagctcaacaaaattcaagataacacagagaaggaattgagaatcctatcagataaattacaaagagattgaaataattttaaaaaaatcaagcagatattctggagctgaaaaattgaactgacatactgaagaattc

SEQ ID NO: 648539 - DNA, 511 bp, Homo sapiens
cactgacatggtaactctttgagtttgctagtgtcacagtgttatcaggtttgagatgacccccaatgaagatgtgaccaaagctttagatcacagcagtcaactctcttttgatacctggaaggccttcctaagaatgatgggtgcaaataagcccagactgaagactataaaaaatacctaagtcttcaatgcccagacatcaacagacattcacaagcatcaatattgtccatgaaaccatgaccttatcaaatcaatattgtctatgaaaccatgacctcatcaaatgaactaaggaaccactgacaatcccagagtgacagagatgtgtgacctacagacagagaatttaaaatagctgttttgacaaagctcaacaaaattcaagataacacagagaaggaattragaatcctatcagataaattacaaagagattgaaataattttaaaaaaatcaagcagatattctggagctgaaaaattgaactgacatactgaagaattc

SEQ ID NO: 648540 - DNA, 634 bp, Homo sapiens
acaattaaaacttgttttgaataattcagctcatttctatggcaaatttatctgtcacttatatccaagctatgaatatacttttgcctcatatattatcctgagagtggacttatatattctttcaaaaatatgaggcttcatgctgtgatagttgaatataggttaagacaacttgcttctataggattagtcacatcctgagttctgagataaaactggcatttaatgaaatagtggtgcttaaaacattttctaggggctcttgggggttctcagaggccctttcaggggttctgcaacataaaaataattttcataataatactaagatattctttacctttttaaactctcattttctcatgagtaaagagtaaagtttttcagaggctacatgattggatattgcaacacaatgtagcaacaaagaagcaggtacgaaaatttagctgtttctaataagagagatattaaagagaactrtaaaatataaaaaatgccattcaattttagctcttttattgttgtttcagaaagtatagcttttaaagataaaatatagtaaaatttagtggtttttaatgttgattttaaataaaataataaatatttttactttctgttttgattt

SEQ ID NO: 648541 - DNA, 634 bp, Homo sapiens
acaattaaaacttgttttgaataattcagctcatttctatggcaaatttatctgtcacttatatccaagctatgaatatacttttgcctcatatattatcctgagagtggacttatatattctttcaaaaatatgaggcttcatgctgtgatagttgaatataggttaagacaacttgcttctataggattagtcacatcctgagttctgagataaaactggcatttaatgaaatagtggtgcttaaaacattttctaggggctcttgggggttctcagaggccctttcaggggttctgcaacataaaaataattttcataataatactaagatattctttacctttttaaactctcattttctcatgagtaaagagtaaagtttttcagaggctacatgattggatattgcaacacaatgtagcaacaaagaagcaggtacgaaaatttagctgtttctaataagagagatattaaagagaactataaaatataaaaaatgccattcaattttagctcttttattgttgtttcagaaagtatagcttttaaagataaaatrtagtaaaatttagtggtttttaatgttgattttaaataaaataataaatatttttactttctgttttgattt

SEQ ID NO: 648542 - DNA, 634 bp, Homo sapiens
acaattaaaacttgttttgaataattcagctcatttctatggcaaatttatctgtcacttatatccaagctatgaatatacttttgcctcatatattatcctgagagtggacttatatattctttcaaaaatatgaggcttcatgctgtgatagttgaatataggttaagacaacttgcttctataggattagtcacatcctgagttctgagataaaactggcatttaatgaaatagtggtgcttaaaacattttctaggggctcttgggggttctcagaggccctttcaggggttctgcaacataaaaataattttcataataatactaagatattctttacctttttaaactctcattttctcatgagtaaagagtaaagtttttcagaggctacatgattggatattgcaacacaatgtagcaacaaagaagcaggtacgaaaatttagctgtttctaataagagagatattaaagagaactataaaatataaaaaatgccattcaattttagctcttttattgttgtttcagaaagtatagcttttaaagataaaatataktaaaatttagtggtttttaatgttgattttaaataaaataataaatatttttactttctgttttgattt

SEQ ID NO: 648543 - DNA, 598 bp, Homo sapiens
gcagagggatgcctttgaatagcatggaaagccggtttgccccaagcaattcccagcttgactgttatctttagcttagtgattatggggacccaagatttattttcctttcacatcttaaactgcatgctagtatattttaacaaaaagattattactttgttatatatgtattactgagtgtttataattatasagaaataatatggtacatgaagcaacaagagttcagtttgaaattatacaatatagatgggtttaggaattcaggtaagaggatatcttaacagagataagtcaaatgagtgagattttgtggagaaaatgagtagggtgttgggcaaaaaggaaaggaagcacttggcttttcttaggaacaacataagcaatagcaacagcactgatcataatatctgtggttatccagagagaagttgactttgctagagtgcttgcatagcaggtcaatcaaatgggactgcattggaactgagggataaggagttttaaacagggacaaccaaataaaagtgatatttttaaaatatgcactgagaagcactttaaaaatagcaagaatttggtggccataaatata

SEQ ID NO: 648544 - DNA, 585 bp, Homo sapiens
ttttctgaggggaaattcaagcctgctgcagaaatttgcatcagtaatgaggactcgaatgttaatctccaagacaatggggaaaatgtctccagggcatatagaggtcttcactgcagccccttccatcacaggcacagaggcctaggaggaaaagatggtttcatgggccgggcccagggatcccctgttctgtgmagcctagggacttggtactctgcattccagtcactccagccatggctaaaaggggccaaggtgtggctcgggctgttgcttcagagggtggaaaccccaacccttggcagcttccacatggtgctaagcctggcgggtgcacgaaagtcaagagttgaggtttggggacctctgcctagatttcagaggatgtatggaaatgcctggatgcctaggcagaagtttgctgcaggggtgggggctctcgtgaagaatctctgctagggaagtgcacaagggaaatgtagggcaggagcccccacacagagtctctactggggcaccacctagtggagctgtgagaggaggaccaccatcttgcagaccccagaatggtagatccaccag

SEQ ID NO: 648545 - DNA, 585 bp, Homo sapiens
ttttctgaggggaaattcaagcctgctgcagaaatttgcatcagtaatgaggactcgaatgttaatctccaagacaatggggaaaatgtctccagggcatatagaggtcttcactgcagccccttccatcacaggcacagaggcctaggaggaaaagatggtttcatgggccgggcccagggatcccctgttctgtgcagcctagggacttggtactctgcattccagtcactccagccatggctaaaaggggccaaggtgtggctcgggctgttgcttcagagggtggaaaccccaacccttggcagcttccacatggtgctaagcctggcgggtgcacgaaagtcaagagttgaggtttggggacctctgcctagatttcagaggatgtatggaaaygcctggatgcctaggcagaagtttgctgcaggggtgggggctctcgtgaagaatctctgctagggaagtgcacaagggaaatgtagggcaggagcccccacacagagtctctactggggcaccacctagtggagctgtgagaggaggaccaccatcttgcagaccccagaatggtagatccaccag

SEQ ID NO: 648546 - DNA, 585 bp, Homo sapiens
ttttctgaggggaaattcaagcctgctgcagaaatttgcatcagtaatgaggactcgaatgttaatctccaagacaatggggaaaatgtctccagggcatatagaggtcttcactgcagccccttccatcacaggcacagaggcctaggaggaaaagatggtttcatgggccgggcccagggatcccctgttctgtgcagcctagggacttggtactctgcattccagtcactccagccatggctaaaaggggccaaggtgtggctcgggctgttgcttcagagggtggaaaccccaacccttggcagcttccacatggtgctaagcctggcgggtgcacgaaagtcaagagttgaggtttggggacctctgcctagatttcagaggatgtatggaaatgcctggatgccyaggcagaagtttgctgcaggggtgggggctctcgtgaagaatctctgctagggaagtgcacaagggaaatgtagggcaggagcccccacacagagtctctactggggcaccacctagtggagctgtgagaggaggaccaccatcttgcagaccccagaatggtagatccaccag

SEQ ID NO: 648547 - DNA, 611 bp, Homo sapiens
tgtcagtggcagatagggatgctgtttggagcctttggtaggtccgtataggtgaatcacagcagaggcctctaggattttggagcaaggttctgccatcttctgcagataactactctccttttaagagacagcttttggcctgttactgggctttggtagaaattgaatgttatcctttgggtgatcaagtaaccatgcaacctgaactgtctgtcatgaactgggtgctttctttcccatttagtcataaagtgagttgtgcacagcagcattccatcatcagatggaagtggtatatatgcgattgggctcaagcagatcctgaaggcacaagtaagttacatgaggaagtggttcaaatgtccatggtctctactcctkccaccctgccttttctttcccagcctgcaccagtggcctcatggggagttccctatgatcagatgacagaggatgaaaagattagggcctggttcacagatggtcctgcacaatatgcagataccagacaaaaatggacagctgcagcactatagcctattttttggacatccctgaaggacagaggtgaagggaaatcttccttgtgggcagaactttgagcagtt

SEQ ID NO: 648548 - DNA, 611 bp, Homo sapiens
tgtcagtggcagatagggatgctgtttggagcctttggtaggtccgtataggtgaatcacagcagaggcctctaggattttggagcaaggttctgccatcttctgcagataactactctccttttaagagacagcttttggcctgttactgggctttggtagaaattgaatgttatcctttgggtgatcaagtaaccatgcaacctgaactgtctgtcatgaactgggtgctttctttcccatttagtcataaagtgagttgtgcacagcagcattccatcatcagatggaagtggtatatatgcgattgggctcaagcagatcctgaaggcacaagtaagttacatgaggaagtggttcaaatgtccatggtctctactccttccaccctgccttttctttcccagcctgcaccagtggcctcatggggagttccctatgatcagatgacagaggatgaaaagaytagggcctggttcacagatggtcctgcacaatatgcagataccagacaaaaatggacagctgcagcactatagcctattttttggacatccctgaaggacagaggtgaagggaaatcttccttgtgggcagaactttgagcagtt

SEQ ID NO: 648549 - DNA, 611 bp, Homo sapiens
tgtcagtggcagatagggatgctgtttggagcctttggtaggtccgtataggtgaatcacagcagaggcctctaggattttggagcaaggttctgccatcttctgcagataactactctccttttaagagacagcttttggcctgttactgggctttggtagaaattgaatgttatcctttgggtgatcaagtaaccatgcaacctgaactgtctgtcatgaactgggtgctttctttcccatttagtcataaagtgagttgtgcacagcagcattccatcatcagatggaagtggtatatatgcgattgggctcaagcagatcctgaaggcacaagtaagttacatgaggaagtggttcaaatgtccatggtctctactccttccaccctgccttttctttcccagcctgcaccagtggcctcatggggagttccctatgatcagatgacagaggatgaaaagattagggcctggttcacagatggtcctgcacaatatgcagataccasacaaaaatggacagctgcagcactatagcctattttttggacatccctgaaggacagaggtgaagggaaatcttccttgtgggcagaactttgagcagtt

SEQ ID NO: 648550 - DNA, 622 bp, Homo sapiens
gatttgttttgtggcctaatatatggtatattctggagaatgttttatgtgctgatgaaaataatgtgtactcagtagcagtctggtgaaaggtgctgtaaatgtccggcctatttggttttgtgtgtcatttatctatgatggtcctttgctgattttctgtctacatgatttgtcaattactgagcatgggttgctgaagtcttctagtattatggtatagcagtctatttctcccttatatctgttaatgtttactttatatacttgttccagtgttgggtgcacaaatatttatgattattatatcctaagcctatagtgacccctttatcattatacattgatcttctttgtctcttttcagtctttaattaaagtctattttaactactcctatttttttggtctccatttgcatgaagtacgtattttcaactgttccccttgaaaatatgtgtgtctttataggtgaggtgggtttctgatagccagcacatagttggatcttgttttcttattcatgmagccactttcttttaattagagaattaagtccacttacattcagtgttcttactgataactaagaacttacttactgataactaagaactgccaa

SEQ ID NO: 648551 - DNA, 562 bp, Homo sapiens
ctgtactccagagttttcccacactttgagaaataaacttaatagtatgaatcccaaatgttgggatatatgaaagagttgctattaaatatctttttttctctattttttccttacttcattcctgatatattcactagaaaacaattactgaactctgcatctgaaagactgccagacctcagattgttacacaaaatttgaaattctccagggatctgcttctctattattgcaagataacagaaaakaacagttaaaaataggagtttacccttgtattacacttgctaccccatgttcactggcaaaacttatgacccttctcttggaagattatgctgtaattgactaaggctttctgataaggacattaaaattcagagataaaatttttatttattcacttctttttcagtgacattccttgtaagaggacctctgatgtgacattttaagaatagaacgatgtggccagattatgtatttattcaaaatctgtttttttctccatgattagagattaaaactcagattttcctgataatgaaacagactatga

SEQ ID NO: 648552 - DNA, 543 bp, Homo sapiens
ttttatcttacttgtgtttatcccagcattaggttttgtggtcattactctcgtcttgaaacactcttttttsttgcttccttgagaccatttccttgctgcaataacctcttggtttttctgtctagtcactgctttgtctctgctgttagttctctttctctgcatatttcttagatgctgtttttctcaggattctgtacaaagccctcctcattcccagccagtatcacagccagttgtgtagaatcaatttcagtccaagtaatgatgactcctgaatatagattatacctttatactgattgtatcttaaataggcatcttgctttcttgatatttggaaaagccacatttaggctcaacatgtcaacaatggaaactatcttctttgttaaagatgggctcgtcttctcaggttttctatcttggtgaaagtcatcaccttccaacaattactttaactagaaacctgggagacttctttgctcactctcgttctcacattcattattctgtttcaccaagtgcggctgattttac

SEQ ID NO: 648553 - DNA, 543 bp, Homo sapiens
ttttatcttacttgtgtttatcccagcattaggttttgtggtcattactctcgtcttgaaacactcttttttcttgcttccttgagaccatttccttgcygcaataacctcttggtttttctgtctagtcactgctttgtctctgctgttagttctctttctctgcatatttcttagatgctgtttttctcaggattctgtacaaagccctcctcattcccagccagtatcacagccagttgtgtagaatcaatttcagtccaagtaatgatgactcctgaatatagattatacctttatactgattgtatcttaaataggcatcttgctttcttgatatttggaaaagccacatttaggctcaacatgtcaacaatggaaactatcttctttgttaaagatgggctcgtcttctcaggttttctatcttggtgaaagtcatcaccttccaacaattactttaactagaaacctgggagacttctttgctcactctcgttctcacattcattattctgtttcaccaagtgcggctgattttac

SEQ ID NO: 648554 - DNA, 551 bp, Homo sapiens
tgtttatgtatatgatcagaaagccactgttagaaagtcttatacactcctcctctgcccttcaagttatgttggaccaccagtattttaggtggtgtcttagagagggccatggctgggccctagcataaagagattgagaccaaggcaagggcaacggctagagaggcttcccctgacttggagaggtttggaaaaaacactaccatttatagttacgctggcctcagactttgaacactccccraagtagatgagagcatgctctctctattcaggaagttaaactgtgttggcaaaaaatgttccctcttccatcaggagccagaaaaagcttttttcatctttaaatacatgaataaatgctcaacgttatggcagtcacttgggatcgaaagcacaccctttccaaatgtgatttacttatggaatgtttatttaattctatttcagattcattccacttaaaacctgaaaacattggaccacacaaagtcttactggtaagttcttcatttcttaaacaaagtgactgtttgactttatttttg

SEQ ID NO: 648555 - DNA, 618 bp, Homo sapiens
gtgtattacattagctatatgcatgatgatacctaaagagttgttgtcagattgtttaaatcatattaaagaaattcaatttctagtttcctgcgagttttaactatggttagacattgaattttgtcatctatttttctgtattttctgaaataatgtccttcatttttttacaagaatgaacatttggaaaccaatattatactatttaaattaccctcacatagttatgatgtatcatctattttatacattattatattcagtttgctaatattgtattaatagtttttatgtctatcattaggagtattggttgaaaaaattcagcaataaaactgtttgaattgggactttctttctgagaaagatttttgttatggactcaatttcttcacaagattataaacctattcatgttttctatttcttctgcaagttttataacttggatttcaagtaatgtgtccatttcatcgagttttaaaaattattagcrtaagttagttaataatttccccttattctttaatattcatacaatctgtatcaatacctttctttcattactgctatttgctatttttttttatcctttttcatcatgctttttagggg

SEQ ID NO: 648556 - DNA, 578 bp, Homo sapiens
taacttctgccacattttatagtcaacttgaaacttaaatttgtactcattgtagttattccatcctcaccacactttttttctcccattctttatgatactgctgtaaggttattattattattttgggtttccacaacattttcagaaaattatgtttttcaaagtcctgtgaaaaargcaaatggaatcattttgcaggaaacttaaataaaaacattgaagcatcaaataacaataaagtttcatagctgtgactcttgataaattgtttagattctaggtgacttttaaaattctattttggtattgctatctcgatcattttctgtgcagtattgggtctccaggacattatgatcatctatgtgggctttttctgttttttgtttctttaactgcttatgaaagatttggctggctctgcactgcttgcagattatattctgcacacagggacataccattaattcctgttttatttgtctatattaaagccaacacctgcatcttgtttagcaattaacctgcagagtaggataaattgaagtgattaaaaggatgtgtgagattcagtc

SEQ ID NO: 648557 - DNA, 578 bp, Homo sapiens
taacttctgccacattttatagtcaacttgaaacttaaatttgtactcattgtagttattccatcctcaccacactttttttctcccattctttatgatactgctgtaaggttattattattattttgggtttccacaacattttcagaaaattatgtttttcaaagtcctgtgaaaaaggcaaatggaatcattttgcaggaaacttaaataaaaacattgaagcatcaaataacaataaagtttcatagctgtgactcttgataaattgtttagattctaggtgacttttaaaattctattttggtattgctatctcgatcattttctgtgcagtattgggtctccaggacattatgatcatctatgtgggctttttctgttttttgtttctttaactgcttrtgaaagatttggctggctctgcactgcttgcagattatattctgcacacagggacataccattaattcctgttttatttgtctatattaaagccaacacctgcatcttgtttagcaattaacctgcagagtaggataaattgaagtgattaaaaggatgtgtgagattcagtc

SEQ ID NO: 648558 - DNA, 538 bp, Homo sapiens
ggaattctgatctatcataaggttaaacttctcaattaaggtcctctgtataracatcttcactgcaaacaagaggtagaatttcaaaattgcagaaaccaaatagaaagtcaagactggagaaagaaacatcctttaaagtcatttcagtcagacccagtccactgctggactctctcttaaacattgtttatttttcacctgacattctcttttatagaagtcatttaagtaaccaaagatagtcttttcttattctgactgaacagttatattttctaccattcacgttgctagtggtagcaatgtactttaaaatgacgccattaagaactggacttaattatttagatatggttggagtagcacagacccaagcaaaactgcacctcctttgttttagattataagtctaattcaatgattagttacttggatgatagaataggaaggggagaataagaatagggagttgaaatgacaatgataatttagatcatctgagcttaaaatttagatattctgagttcagcattat

SEQ ID NO: 648559 - DNA, 591 bp, Homo sapiens
ttactttctcataagcctatattttcattgcatcttcagcccaaacctaaacttattscttccttattttttatttttgctaaaatgtaaaattaaacatgtacaaaaaagggattcctttatggctcttaggatttggtttttgtcgttgttcttggtaattttgtttagtctgagtattttttgccaggtttctattgatttgggacttagacttattgctactattacaaggtaaatgttttaaattctcccatgattaaatgcattattacattgaacaaaaggctaaagaatccagaaaacagcagggcccctacttctgcatcaggttaaaacgtattacagagttggcagtgacttgttacctgaggcgtacagacactgctcttagttcctgaggaagtctatctacaaggcagaagacatttggttcatacaacagtttctgcaaccaatctatctcagtaataacaataaaatcttactatgtcttgaaaattcacagggcaagttagaaaagaatataaaagaggaagaaaatggaggagcagattctgtgggagagagaaaaacaattttgctttcagt

SEQ ID NO: 648560 - DNA, 596 bp, Homo sapiens
ggtgtcatacctaaaaactctgcctaacccaaggtcatgaagattttcttttatgttttcttctaaaggtttatagttttagattttacattgagatctgcaatccatttgaatcacttctttttatatratgcacgtttgcatccaagttcattgtttttgtctgtttctgcatacaggaatctaactcttccagtactgtttgttgaaaaggctatcctttcttcattgaattgcttttgcaatattgtccaaaatcagttgtccatatttttgagtgtgtctatttctggactttctatttggttcattgatcttttcctctatcttgctgctagtactagaatattttgatcacttgtagctttataataaatcttgaaagcagatagttttagaacttcatcttttctcttttttaaagttatattggctcttttggttttgttcgcacttccatatgaatttcaaatctgcttttcaatttctacaaaaagcctgctagaaatttgattagcactgcattgggaagagttctcattttagcaatactgagacttctgacctttaaacaaagtatatctctccgattattt

SEQ ID NO: 648561 - DNA, 414 bp, Homo sapiens
atgcagacatgtaagtgtgtgygcatccctgcatttggccatggcacaaactgggtctgagtcataataaccctgaaaatattgtcttccaaagcccatatccaaaatagtataaaacgaaagaatattaatgatggtttctcacaactctcagttgtatgaaagaacattaatgatggttcctcacaactctccatttgcagtagggtagcttcttgccttcccacactctcctcttatgcggctgtcctctcttcctcactttcctgcgctggcaagggagtgcacaccgaagagttttcaaactccttgtgtcaaaatgacacactaaaaccaaacatcttaaaacatattggctcaatccaccctgcatttgcctttttccagctttgccttttcagagatgagcaccta

SEQ ID NO: 648562 - DNA, 614 bp, Homo sapiens
cgtaaattgcccagtctctggtatgtctttatcagcagtgtggaaacagactaatacaacagtatttttaactataagcatcgtgctggacttaagatctctaggacttaccttacataactgaaactttgtaccctttgactaatacctacttttctggattgccaagcccctcttccagtgttattgactctttgcagtgaacaccaattgttctatagggctgccccacaacccatagccccttagtgctcactctctgagcactaagtccatgtggttacagtggaaaaagccatggaaaaacatgccatgaccttgccttctctccatgccctgcagctgatgaaccaggaacaggatcctaatmcaaccaatcagaaattgggactaaaagacttcagatagtctgacggcactattgagtgaatattggtagttgatgacttactgatagctacttcctgccatactgactggaaaacagtggcagttgatatgctgatctgagagaggactccctggtagagtggaccggttctctattgtagtctgtgctcaagggtcagctgtagccctacccttggaagctgtgattccattttcaacaatgg

SEQ ID NO: 648563 - DNA, 614 bp, Homo sapiens
cgtaaattgcccagtctctggtatgtctttatcagcagtgtggaaacagactaatacaacagtatttttaactataagcatcgtgctggacttaagatctctaggacttaccttacataactgaaactttgtaccctttgactaatacctacttttctggattgccaagcccctcttccagtgttattgactctttgcagtgaacaccaattgttctatagggctgccccacaacccatagccccttagtgctcactctctgagcactaagtccatgtggttacagtggaaaaagccatggaaaaacatgccatgaccttgccttctctccatgccctgcagctgatgaaccaggaacaggatcctaatccaaccaatcagaaattgggactaaaagacttcagatagtctgackgcactattgagtgaatattggtagttgatgacttactgatagctacttcctgccatactgactggaaaacagtggcagttgatatgctgatctgagagaggactccctggtagagtggaccggttctctattgtagtctgtgctcaagggtcagctgtagccctacccttggaagctgtgattccattttcaacaatgg

SEQ ID NO: 648564 - DNA, 479 bp, Homo sapiens
aaataaaatatttccagatgtttacactatggaatattwaaaaaaatcagaaggaacttagagaaagaatttcatggccaaaacagtaagagaacgaaaatataaaaattaaagtaatacatagaaagctgaaaaaataaatttaaggcctatatgctcttcaaggtctcattttcagctttctgcaagatatctctgcttgaatatccagctgacacttaaaacttaacatgtctataaccaagttcattattcgctataacttctctgtatttccatcattgtcaatattgccattatactcttagctcagcaggctattaaatatgcagtcgtctttgatttcttcttgtccttagtcagccatatcccatctatcaaacatgttcttccaaagcatttttcaaatgtggtacctacttttagttattacaatcagaacaatttcacatgtcacagtcacttttctagaataacca

SEQ ID NO: 648565 - DNA, 517 bp, Homo sapiens
ctctacattcaaaaacaacccttatgacaacaaaaacttacatcacaattagcttaggagrctttagttcttgagacataatttcacccaagaacttatagatgtgacttgtccaggagggtttctaggagggcagtcacttatctttgtagttaaaataagaaaaagggtacttgtgcattatagaagttttctcccgctgcctttgctataatttcctatagtaagttgttctgagaaaaatacataccgcttaggagaaggacctcagctataactttcattttgcactgtagaggtagtacagtactaaaagggaaagcaaagttcagaatatttaggccagaggctctgagcctgcctcattagcacttcaactgatcactctagaggaatgagcatcaatttgaatgatgtgtgcagtgccctcttctctgggagcagctgttccactttccctttttatgaactacttacatgaaagagacaactacttcttcaagagatgccctgattg

SEQ ID NO: 648566 - DNA, 561 bp, Homo sapiens
ctgttttgcattcaaccatttctggatccattttataccccttatgtttgtctttctttcctctccctcctagtttccaatttatgttgtttgtgtaattgtgaagcagctgtgaaactttcttaagaataaaaaaggatataaaagaagtggagataagtaaacaaatgtgggtagtctggaaatgatggcattttgtctcctacttgatgaggctcagyggtcaagcttctgtggggctaactggagagtccaaggctgttgaaagagattccaaagcttcctggctgcccagagctgcttggagttggctgaagtacaatagagaaaacacccggacaatttcttccacctcttccacccatgtcttaagcacacgtgcagcatgggagggaggaaactatggagactgtttgtgagagaaactgtagacctgcttctggagcatggagaagtggctttaggtagagcatgaacttgaggattcagagactcaagagacttcacgtcttagcatttccctaattggcacttgctgtccatttttatcccaacttgact

SEQ ID NO: 648567 - DNA, 601 bp, Homo sapiens
tccttgtagcgaacatttttgcaaagggtgcattttcacataaaaatgcttttagtagtggcttcgtttagttattctgcagctacttggctgtgggttcccagagagccctgaggcaacctttataaaaggcctaggtttgacttctctttggtcacttcagctttagagcaccctaagaaggctcagagaacmccaaatttcttcccagtaaagaggtcatggaataaatctggaggaactcaagaggggcgcctgcttttgaacagtcattagccaaacatgggtagattcctattaatcatgtcaagagggtacttgggaatcaagttcatgtggaattgggagattaaaagggttaggagtccttggagccgtaagacccctgaagttccaactatgctacttgctttctgtgtaatcttggataagaaatcacttgacctttctgagccttgatttccttacctgtaaaatgggaatgctaatcattgtactgcccaccatactgtctttttatgtgaatcaacaaagccacatttgtattggtgctttctttcctttcttttttttgaaatatgagatgcttcatgaatttgca

SEQ ID NO: 648568 - DNA, 564 bp, Homo sapiens
gttatattacattattttatttcatagtggttgccataagtttatagcttcaagtatgacagtctattttcaaattctattgtgccactttaagtagacaataagaatattaaacagtatatattttcatttctactcttctcatttgccttatatgctcatttgttgtcaagtattttacttcaatgtaaattttaaaattacacattgttacttttgtttacaagctccttaattttaaagacattaagatatgaggaaatatccacatatttgccattctctatttactttcagtggattcagattttcatctgatatcgttttttcttctgcccaaagaaagttaayaacaatttttataggacagatctgctttgacttttgagatacatttttttgagtataaatttctaggatgaaagtcattttttctcaccttttcccatttgttttttaaatgagtactttctgtggagaagtcggctgtcatactgatctctccaacttctgtgtctttgatctctctctgctgttaagatttttttttctttttcaatgctt

SEQ ID NO: 648569 - DNA, 648 bp, Homo sapiens
atacccttaatgggtcagtatagtagagacaactctggaaataaaatatagcaataattacagaaagtaagctatacccatagaccagaagaaatatttaaaagttattatatttatttatatctcaaaattactaccctgaaattgaaacacatagataactaagtagagaaaaaggagttaaagttactaagagcaattaagcaaaacatgggcttaaagacaggaacattttggaagaaatttgagtgatgtaaattttcctatcattctggtacctgactgaatttacttattttcaaatataatttttgttgaaatatttgtacttctacataaaagagaaatttagaaaatgtaaatttcacttagaaaattggtttgaataagagatctaacattttagtgtttctgaaaatgaggagttgctatgaaaattatttggcatatataactatgccaattattttatcactaacaaaaacatataaacaaawcatctactaacaaaaacatataacctctacaaagtccaaatatttatttaaaataatttaatcaatagcagctattcagtaaaaaaaatgtaaaaatatagatataattcaaagtaaaagaaaaaatgacaactctattagtgatgctttc

SEQ ID NO: 648570 - DNA, 604 bp, Homo sapiens
gcagcaggccagtagctccttctggtttagtgacctatgaagttctgctcacacaactcatggccctgtggtacaaagtcagtggctggggaccctacacatgagcccaggagagcacctgtagtcagcttcctctagacctgtagggacccttcccccatttctaccactstcttccaagggatatttctggacaaagctctcttttaccaagtccaaaggatgaaaagaaagatgaaattcctaaaagggagtgcattgacttcagttacatcttagtaaaagggtttctctctgtctgacttaggaactagaatcatgtctatgggacaatagcagaggtcccctctttcactaattagctctatatcaacattggagtgctccaagaggaaagtaagacagcctgggtggggagtgggtatgactgagagtagagaagagtccttgttggtatgaccctcacggatccttttaaaatgagctagcagaaatcttctccccttaaagcctacctctcccatttctatccagctactaggaagagccaaagagtggaatgtggggaactgggttaattgcttcaatttccggtactctagag

SEQ ID NO: 648571 - DNA, 570 bp, Homo sapiens
ccctgtctccatccccaattcccagaataaggaacgctttaatcaggaaagagactgrttataggccagcaaagttcagtctttaccgatttctgcagagaatggcacttgctggaacacagccactaggcagcaagacagagcaaactagaagttagctgattgggaatttggtcccagccctcactgatcgttgtgcgactgtgggtaggtcattcctttttgggtcacagctgattaactcagtcctgtagctagtcaggcagtcattttattcatctgccaggcatttacccagagcccactctgtatttgccgctgtaatgtacaagtagcacctacgtaagtaggtgccagggatccagagataagcaaaataacacacatccctgcccttatggagcttacagcctagtaggcaaacaccaaatcacataagtacctgtaaattaatggtgatatatgttagtaagggaaaggaaaggtgcatcattataaggagagacaggagaaattcacaaatctggagaacagagcagagttgctgcaaagctgaaggatgaaggataa

SEQ ID NO: 648572 - DNA, 570 bp, Homo sapiens
ccctgtctccatccccaattcccagaataaggaacgctttaatcaggaaagagactgattataggccagcaaagttcagtctttaccgatttctgcagagaatggcacttgctggaacacagccactaggcagcaagacagagcaaactagaagttagctgattgggaatttggtcccagccctcactgatcgttgtgcgactgtgggtaggtcattcctttttgggtcacagctgattaactcagtcctgtagctagtcaggcagtcattttattcatctgccaggcatttacccagagcccactctgtatttgccgctgtaatgtacaagtagcacctacgtaagtaggtgccagggatccagagataagcaaaataacacmcatccctgcccttatggagcttacagcctagtaggcaaacaccaaatcacataagtacctgtaaattaatggtgatatatgttagtaagggaaaggaaaggtgcatcattataaggagagacaggagaaattcacaaatctggagaacagagcagagttgctgcaaagctgaaggatgaaggataa

SEQ ID NO: 648573 - DNA, 597 bp, Homo sapiens
tatttctgtttacattttctgtgtatttgaatcacatcctctctttggttgactgaaggctgcctcttggcagcgacactgatgactttggaagagtctagggttgaagttgcctccttatcatcgttagtgcatgagcaccagaaaattcaggcatgcccaggggtagctggtacccaagggtgtctcccaggcgcactgtcaaggccaattctccaaggcctctgaagctaataaggaggctccaggcccaggccctttgacaatttcttcatccccctagaggtcagacagggcattcccaggtgtgaatcattttgctgatacgtagacctatttgcatagtgggattgcttcctccctgyctccccccacccccaaaattctgtctgcagacgtgagaaaaatgaagcacacaggaaaattgcctaggtgagcacatcccagaatgtgttcctgggaacacatgatcaggtacatttgggaatgtggggctgcatgaggttgccttggtgtaggatttcttgctcatgtgtgttgtgtgtctccagaaatgggatagagtgagtttccagactttatttgatcacagaatcc

SEQ ID NO: 648574 - DNA, 566 bp, Homo sapiens
gcagccagctttaaaataaaacctcgctgactgttccctcagaagtcccaacggcctgtcctgtgattccatgagaaggtacctaccctatgaaaatcccaaggatgtgaaagacagagttctttaagcccttctctgcaaagtgcactttcagatgtctgctgatcatttgagatcactagatttttatgctttctgttgtaggccaggctgtctgacaagggtggctgactttctcacttctaacatgcattccaggctctgccatgcctttattacaacagtgctcactgcctcattaatttttcatcaacaaaatacagttttaaaagaattctactmcgacagaggaacatgcatttcatgggaaatggcttttacttagtgtggtcttgtggaagtttaaaaaataaatgtaaggctttccaaatctttgcaattctcccaccattcaatcagtctataaaaagtgagattccccccaaaatttccaataattagaatcattcaaagagaaatcattctttctcccctcctttatttcctaaagtacattgcaaaatcct

SEQ ID NO: 648575 - DNA, 566 bp, Homo sapiens
gcagccagctttaaaataaaacctcgctgactgttccctcagaagtcccaacggcctgtcctgtgattccatgagaaggtacctaccctatgaaaatcccaaggatgtgaaagacagagttctttaagcccttctctgcaaagtgcactttcagatgtctgctgatcatttgagatcactagatttttatgctttctgttgtaggccaggctgtctgacaagggtggctgactttctcacttctaacatgcattccaggctctgccatgcctttattacaacagtgctcactgcctcattaatttttcatcaacaaaatacagttttaaaagaattctactaygacagaggaacatgcatttcatgggaaatggcttttacttagtgtggtcttgtggaagtttaaaaaataaatgtaaggctttccaaatctttgcaattctcccaccattcaatcagtctataaaaagtgagattccccccaaaatttccaataattagaatcattcaaagagaaatcattctttctcccctcctttatttcctaaagtacattgcaaaatcct

SEQ ID NO: 648576 - DNA, 559 bp, Homo sapiens
catggcatcaccgtgagccagtcctctaaactttcaggttcaggtatcatggccttacatgatattcatctgaagcaggatgagacagagcaggcagaaaaggaaacatttctgacaatgttctgttatgaagaatccacctttcctagaagccccagcraacctcccatcggactcataggtgcaaactggctgaaaggctcattccaagaccaagcacaggtacaagggccaaaactggctagaacaggcatgactcaccttttcagcttctcagtcatctcctctcaagggcacaggtctgtttggttggtttgtgaataaaactgggggactgttattatggaagaagcagtgataagaccctttccataaagaggagagacgtgaactggcatatatcaccaggaccacctccaagtaattgactaataaataaaagctctattagtaagaattatggaatttctgtctcatttttatctcatgaaaaatggttcaagatccattggtttcaatctatagttcaaaaggaatccagtctcttttaaacagcaag

SEQ ID NO: 648577 - DNA, 566 bp, Homo sapiens
gttggggtgatgaaaatattttaaagctgtattctggtaatgtttgtacaactctatgaacttattaaaagttatttacttgtagtgtgtaaattatatttcaataaaacccttcaagaataaaatgcaaataagaactggctgaacactgaactgaactgtaaccctcaaaaatttataatgggaataaaaaattgttccatattttttccacacacaaattgtatccatattttttcaattcttgctttcyttcctccagaaggcatgttctgcctcatttattattatctccccgcctgtacccacgacatatctccttcaagcccgttcaatatttcccactaacaattcatttcctacttctcctatattttaatcttctctctattagctccttttccatgaatgtatattaagctcatttctcccataattaaacaaataataaacttccatttttcctgaatgtgtctctagtctgcctcctttccatcttctaaaaatatgtttaaagacaggtagttttcagttgctgcctctatctctccatgctcctgttgtcc

SEQ ID NO: 648578 - DNA, 602 bp, Homo sapiens
tataagctccaatgaggcctttaagcaagggcacttaattagctgggttaatagagggaagaaaggccatagataatccaaatcaatatgttattcaaaaataatttataattgctttatttaaacaagtttatttttctatttgtcttgctttatgcaaatatccaggtaaactttccttccctaagcacgtattagctagggccaagaaaatggccagaaaccacaataaatagtgaaggtctcaggatatactttgccattgtgagtgcatgaagcagatttgcctcatgtagattatcgagaattgaatgtaagtaaacaccataaacgacaacatttctcattagattcaacgttggttagaattatttcactcaaaactccaggaacagagaaatgacttaatgacggaatacctaataattttctttcctataaggaactgctaagaacagaagcagtaatttccagagaggagctttatttttactctttaaaaaatgttttaatrgacagtactaagttacaaataaaaagtctgagttatatattgcatgggtgttaaaattgttagcaatttttaaaatgttaatgtgtgg

SEQ ID NO: 648579 - DNA, 545 bp, Homo sapiens
tcattgtacataaccatatataattccatacttacatattatgtgcttacatacaattaggacttgctaaggttattgagatatatatatatatacacctatattttatataactatataaaattatatatgtttggtattgtatatattgtaataatacrttatataattttataaattatatataatatatattaaccttagcaagacctaaatcattctatattatataaacatataattatacggtgtatattaggtaattaaattacatattatactatataattaaattacataattatatattaattacataattatattgtatactatttatgtgttaatatcaacattttatgctatatcatttattaggccctaactaggtgcccctcatgtctgccctttttgcatattggcaggttttttctaaccaatttttattactaggtgggttctgtagtagatggcagctctcaagctcacattttgtctgctataacttcagaaagggaagtgctcttctcctcggtactggctca

SEQ ID NO: 648580 - DNA, 608 bp, Homo sapiens
ggagaaggaatgtgctgacactttaacactctaaacccaccgatgcttagtttatagaacacacatatgacacacatcctaatacagactacggctctattaattctcttaaacatcttttttttycctaaatgtttcaatgccataaagcttacattcccttgaagcagagtacaggaaaccttagcaatatgctaccatccagtaggatataaatataaagaagctgtatcagcaagggatgctcagggaatgtgtttgcagcccgtttcacggtagccgcttgagaggggatattggaagtgagtgactttctttcatttggcaaagtttccttatctcagcacctactctttctgatggtatgtttttgaaggctgcacagtacgactctgggtaccgtgtgtacatacatatgtaaggaataacgtttatgttgctcagaataggcactttttgaaggcagtaaatctaaaagtaaagttaatagagcctatatttagtgctcatcttctcactttgctgatgtgtatgctgaacagaagatcacagatttgagtcagtctcgcaaagaggccggagtcggcaaatggctatattcagagctg

SEQ ID NO: 648581 - DNA, 651 bp, Homo sapiens
tggacttgtccaagagggagggcggcgaagagaaagcaaacaaagatagtgcctcagggaggaaggcaagatgagctgaagtctgaagtttgagaaccaagtcttgatctcctgatccagttatctgatctcttatgcattcagctgtcccagaaaacaccacagatccttgttctgcctagggagatgagtcctttaaatgcatgctgcattttagccactaactacaatcaccaattcttgcatcaaccactaacagtggctcagagattgccacttgaggctgcacattgcaaacttattttcccctctgatgctatttagtttctgatggtgttattaaaataaaaggctattttttaatgagctgggagagaatccacttaaccgaattgttcgtaaaaggaataaaacacgtcaagactctgcttagcgccaatccaccaatataggatcctgcctttgcaagaaccttcttatgtaaatatttacaaggagagtaaaaaaagaaagcggtttggggagccaccagatggaataatacaagaacaaacttgaacacagtcaaaatgggcttcaccaacaacaggcgtcctcttaggaatctaccattgcctgsgggggtgagaaaggaagaacagagagttaaaa

SEQ ID NO: 648582 - DNA, 570 bp, Homo sapiens
ttagggtatctagcagaagaaatttctaagcagcaaagcattcaagaggtgacttggatgctgttaaaggcattcagttttatatgggaagcagggcataaaagttcagaaaatttgcagcctgaaaaggtgaaataaaagaaaattctattttctgatgagaaattcaagcaggttgcataaatttgcataagtaataagccaaatgtgaattcccaagacaatggggaatgtgtctccagggcgtgtcagagatcttcatggcagcccccaatcacagccctgaaggcctaggaggaaaatatggttttgtgggcagagccyagggtgcccatactgtgtgcaatctagggacttggtgccctgcaacccagccactccagctgtgactaaaaagggccaaggtacagttcaggccttggcttcagagggtgtaagccccaagccttggcagctccacttggtattgagcctgtgggtgcacagaagttaagaactgaggtttgggagcctctgcttagatttcagaggatgtatgaaaatgcctggatgtccaggcagaagtttgct

SEQ ID NO: 648583 - DNA, 656 bp, Homo sapiens
tttcccatcaattgtgtataaggttttctttattctacatccttgtttgtactttttctcttgtctttttgataacagccattctaacatgtgtgagacaacatctcattgtggttttgattttcatttctctgttgattagtaatgttgaacatttttcatatacccattggcaatatatatgttttcttttgtgaaatgtctattcggattacttgaccatatttttattggattatttatttttgttgctattgagttgtttgaatttgttatatattcttcttattaatrcctagtcagaagaatagtttgcagatattttcttctattctgtaggttgtctcttcattctgttagttgtttcatttgctgtatagaaattttttgacttgatgttattccatttgtctatttttgcttttgttgtctgtgtttttgaagccttacttacatagtcttttaacagaccactgcctaaaatactttcttaatgttttcttccaggagtttcaagtctttaatccattttgatttgatttgtgtaaatggtgagaaatagggatctagttacatttttctgcatatagatatttagctagtttcccactaccatttattaaagagactatcctttccccaatgtatgttcttga

SEQ ID NO: 648584 - DNA, 656 bp, Homo sapiens
tttcccatcaattgtgtataaggttttctttattctacatccttgtttgtactttttctcttgtctttttgataacagccattctaacatgtgtgagacaacatctcattgtggttttgattttcatttctctgttgattagtaatgttgaacatttttcatatacccattggcaatatatatgttttcttttgtgaaatgtctattcggattacttgaccatatttttattggattatttatttttgttgctattgagttgtttgaatttgttatatattcttcttattaatacctagtcagaagaatagtttgcagatattttcttctattctgtaggttgtctcttcattctgttagttgtttcatttgctgtatagaaattttttgacttgatgtwattccatttgtctatttttgcttttgttgtctgtgtttttgaagccttacttacatagtcttttaacagaccactgcctaaaatactttcttaatgttttcttccaggagtttcaagtctttaatccattttgatttgatttgtgtaaatggtgagaaatagggatctagttacatttttctgcatatagatatttagctagtttcccactaccatttattaaagagactatcctttccccaatgtatgttcttga

SEQ ID NO: 648585 - DNA, 565 bp, Homo sapiens
tctttttgcaccgtgttggaaactgttgaagtactatcttcacagcgtaacyctccgtacatgcacttcattgctcctcaatttttctgcctttctccaacacaatacctgatactgccctactttctattctcttgtatccttattttttcctaattgagagagaacagtgatggtaattaaacaattgagtgaaaaccaattcctgcgatagtgctagatgcttaataggtaacatcttctgctcgagttactgagacttcacctactttgaagctactgatctcaaagaagcttaaggaataattatggaggagataattttaggtaaatttgaatttataaggaaatgttgtccaggaaaattatagggtccattttttaccaggcttgagacatatttggtacagagagtattagggagtggttagtcagaatggctgctttggaaaatgaatttaactgtaaaaagtctgttgagtacatataacagtggaataaaatggtgggggaggggaaagatcagttcatatgatacattttgacttcaaatttctcgtctctg

SEQ ID NO: 648586 - DNA, 565 bp, Homo sapiens
tctttttgcaccgtgttggaaactgttgaagtactatcttcacagcgtaactctccgtacatgcacttcattgctcctcaatttttctgcctttctccaacacaatacctgatactkccctactttctattctcttgtatccttattttttcctaattgagagagaacagtgatggtaattaaacaattgagtgaaaaccaattcctgcgatagtgctagatgcttaataggtaacatcttctgctcgagttactgagacttcacctactttgaagctactgatctcaaagaagcttaaggaataattatggaggagataattttaggtaaatttgaatttataaggaaatgttgtccaggaaaattatagggtccattttttaccaggcttgagacatatttggtacagagagtattagggagtggttagtcagaatggctgctttggaaaatgaatttaactgtaaaaagtctgttgagtacatataacagtggaataaaatggtgggggaggggaaagatcagttcatatgatacattttgacttcaaatttctcgtctctg

SEQ ID NO: 648587 - DNA, 565 bp, Homo sapiens
tctttttgcaccgtgttggaaactgttgaagtactatcttcacagcgtaactctccgtacatgcacttcattgctcctcaatttttctgcctttctccaacacaatacctgatactgccctactttctattctcttgtatccttattttttcctaattgagagagaacagtgatggtaattaaacaattgagtgraaaccaattcctgcgatagtgctagatgcttaataggtaacatcttctgctcgagttactgagacttcacctactttgaagctactgatctcaaagaagcttaaggaataattatggaggagataattttaggtaaatttgaatttataaggaaatgttgtccaggaaaattatagggtccattttttaccaggcttgagacatatttggtacagagagtattagggagtggttagtcagaatggctgctttggaaaatgaatttaactgtaaaaagtctgttgagtacatataacagtggaataaaatggtgggggaggggaaagatcagttcatatgatacattttgacttcaaatttctcgtctctg

SEQ ID NO: 648588 - DNA, 559 bp, Homo sapiens
aaggctgttcacccacttctttaaccattcttcaaatttaccatatatatwtttttttgactaagtgagataaatcacattgaaatgcgtgaaataatgtctggcatccagtagatgctcagtgacatttgtcccctttaatggtttcaactggctaggatttcccacgaagaacagtagcattttggtatcactaggctaatgtccattttctgtattggagagtagagaaaccccttgggtgatagcttattttacctactatggaatttttacagaacaaagttaagggtcatctgctgtgtggattcccactggttatgtgagacgtggcagaacataatggtaagaagaaggattcaggagctgaaccatctgggttcttcaggctgtatcacctactgcctatgagaggcttagccagttagttacctttgtgagcttcctctggtgaggatcagaagagttaatacataagacaccaattataatactaaacctgggatgtaaaaaggctcaattattattactggttaccattattattaagagtgttaat

SEQ ID NO: 648589 - DNA, 559 bp, Homo sapiens
aaggctgttcacccacttctttaaccattcttcaaatttaccatatatatatttttttgactaagtgagataaatcacattgaaatgcrtgaaataatgtctggcatccagtagatgctcagtgacatttgtcccctttaatggtttcaactggctaggatttcccacgaagaacagtagcattttggtatcactaggctaatgtccattttctgtattggagagtagagaaaccccttgggtgatagcttattttacctactatggaatttttacagaacaaagttaagggtcatctgctgtgtggattcccactggttatgtgagacgtggcagaacataatggtaagaagaaggattcaggagctgaaccatctgggttcttcaggctgtatcacctactgcctatgagaggcttagccagttagttacctttgtgagcttcctctggtgaggatcagaagagttaatacataagacaccaattataatactaaacctgggatgtaaaaaggctcaattattattactggttaccattattattaagagtgttaat

SEQ ID NO: 648590 - DNA, 559 bp, Homo sapiens
aaggctgttcacccacttctttaaccattcttcaaatttaccatatatatatttttttgactaagtgagataaatcacattgaaatgcgtgaaataatgtctggcatccagtagatgctcagtgacatttgtcccctttaatggtttcaactggctaggatttcmcacgaagaacagtagcattttggtatcactaggctaatgtccattttctgtattggagagtagagaaaccccttgggtgatagcttattttacctactatggaatttttacagaacaaagttaagggtcatctgctgtgtggattcccactggttatgtgagacgtggcagaacataatggtaagaagaaggattcaggagctgaaccatctgggttcttcaggctgtatcacctactgcctatgagaggcttagccagttagttacctttgtgagcttcctctggtgaggatcagaagagttaatacataagacaccaattataatactaaacctgggatgtaaaaaggctcaattattattactggttaccattattattaagagtgttaat

SEQ ID NO: 648591 - DNA, 539 bp, Homo sapiens
gcttttggtggccccaggcattgcttgrctgatggcagcataactccagtctctacttttgtcttcatatgtcattattccctatgtttctttgtattctccttttctgtctcttataaggacactcattggtggatttcatgcttatctcaatccagcatgacctcaaattgagatgctaaccttaattacatctacaaagattcttatgccaaataaagttacattctgagattccagttgaacatatctttggagatccactgttgaacctactatgcctaaaaactcaggcctgtcccaagggcagtatttaaaaagacagagaaattcattttgctttctgattttgagattgttcctcttacccctactccattttcaacacctgaactttatcaagaaaactcaaagacaaaatgtggccaaggttggcaataaatacatttttgccaataatctgatgggaaacgtatgttacttcttgtaaatcaaaataaattggatctgctggcaatctggttaacctgcaatttaga

SEQ ID NO: 648592 - DNA, 539 bp, Homo sapiens
gcttttggtggccccaggcattgcttgactgatggcagcataactccagtctctacttttgtcttcatatgtcattattccctatgtttctttgtattctccttttctgtctcttataaggacactcattggtggatttcatgcttatctcaatccagcatgacctcaaattgagatgctaaccttaattacatctacaaagattcttatgccaaataaagttacattctgagattccagttgaacatatctttggagatccactgttgaacctactatgcctaaaaactcaggcctgtcccaagggcagtatttaaaaagamagagaaattcattttgctttctgattttgagattgttcctcttacccctactccattttcaacacctgaactttatcaagaaaactcaaagacaaaatgtggccaaggttggcaataaatacatttttgccaataatctgatgggaaacgtatgttacttcttgtaaatcaaaataaattggatctgctggcaatctggttaacctgcaatttaga

SEQ ID NO: 648593 - DNA, 549 bp, Homo sapiens
aatacggacagactccagatcacatcatagtatggagtttgggcttccttcttcaggtgatggagagctactgaagcctcttaagcagaagagagatccaattggacttatgttttaagacctctctggaaatggtatagagaaaaaaattgtgggaaggatgggaattggaggamaagagaggatggatttaagagatgttgggagagtaggccaaaggacttgctgacccatgttgtgggagaagaaaatgtcttgagcagaaaaaaactagaatgactgcctatgtttcttcttgggtaattgaggtaaacatataaattcacccaagaaatgtgtattgagagcctattatgtactagatactaatctaggcactgggaatacagctttgaacaaaattttaaaagccctaatttcaggaccttacgttcaactggaggactgtcagtaaatatatcaagagataatgtaatttcagcttgtgagaagctttctgaagaagagtaaagcatgatataaggatggggcacaatgtttattttatgc

SEQ ID NO: 648594 - DNA, 546 bp, Homo sapiens
aagcaagaaataatcccaattctacataatrtcttccagaatatagaacatttatgaattcatctggtgaggtaagcattaccctaagactcaaaccagcttgcacattgcaagaaaagaaaactatagcccaagatacgtcatgaaaataaatgcaaaaaatgctcaacaaaatattagcaaatcaaacattgcaatatattaaaagaatagtatataaccaattggggtttatagcagatcccaggaaagaaaatcaggcttacatttaaaaaatcaatcaatgtaattcattatattatatacattcatctcaatagaaacaaaaacaaaatcaatgaaattcaacatccattcatgacaaaagtctcagaaaactaggaatagaagagaacttctttaactttatataggaaagctatgaaatacctacaactagcatcatacttaagagtaaaatactgaatgttttaccctccaaaactgggaataaagcgaggatgtcctctctgactatccccaatcaacaccagactggaagtcata

SEQ ID NO: 648595 - DNA, 597 bp, Homo sapiens
gagtggctaaagaaagtgtggtatatgtatatatataccatttactcagycataaaaagaaataatggcatttgcagcaacctgtatggaattggagaatattattctaagtgaagtaactcaggagtggaaaaacaaacatcctatgttctcactcatatgtgggagctaagctatgaagatacaaatcttcatatgatatgttggactttgcggacttgggagaaagactacacattgggtacagtgtacacggctggggtgctgggtgcaccaaaatctcagaaatcaccactaaataacttttcatgtaaccaaacaccacttgttcccccaaagacctactgaaataaaaaaattaaaaattaaaaaacaaaaaatgctgaagctttttgttaaagagcacttaaaattaaggttcccataatttatccaccagagggagccaacaaagccacaataataggaacatactgaccttagtgagctacaaatcaagattttcagacaagggctgcagagttgagacataagcaagtatcaattgcttggttcaaggaaggcatgtgaaaatttattgaagtcagatttaattca

SEQ ID NO: 648596 - DNA, 480 bp, Homo sapiens
agaactgatgtcagatttggctcatcatagtccacaraccatattggtaaagaaaatgaagaggattcctgtttaacacagagacacctatgttaaacattacatacagactaacccaaatatgcaattaaaccacaccactaaatggcaagatgaccatggatttaaacaaaatgtatgggggaaaaggcaacacattaaattcatgtgaggagctggacttctgaaacagccattctccttgcatagcactgtctgctgctacagctcatagaagtcaacaattttcttcaacactggtaggcagcctctaaatggccctgatcaccctcacctcctgccattcacacccttgtaaaattccacccctggacctagtgactcacttctaacaaagagaatacagcaaaagtaataacatcacttctgagatgaggctacaaggagactacgatgcctgctttggtcacccttctcctg

SEQ ID NO: 648597 - DNA, 399 bp, Homo sapiens
gttgcaggtaacatttgtctacaagcagattaggatactgagtttaatgtgcacgtgttttctatgcgagcccttgggatcaacacctgtggatagcaaaggaggggaaaaggattaggcagagggaaatgtcgtgctgtaatccagagccagcaatggtcttagccaatcccacttggagctttggagttaaaatgtcttgttgcrttatctcaaattgggccagaattgttgttggtgagtcagttcaggtttttgacttcactaacaaaaagaatttgagagcaagtccaaagtaagagtaggccaatgaatttattgcaaagcaaaagtagactctgagaggctgagtaggatgcttcaagggagagaaagcccttagtgccttaaggggaattc

SEQ ID NO: 648598 - DNA, 529 bp, Homo sapiens
caacatacaatgagtatttctattctgttttaaagatgtggaaagtgaagttgaaaagtaagacactatccaaagcacacaatggcataaatgaataataaatggcataaagtgaatcaaactaagtttattgttttagaaaacctcaaaagtgcacaagaagttatttactacagaaaaactttaaaaataagtaaatagaagaaaataatcactcccaagtaaaataaccatttaaacatcttcacgtatagtttctgttttactacatctctctctctctctctctgtatatatatatatatatayatatatatatgtatatatatatatatgtatatatatatgtatatatggaaataaaaattgaatattcaatttttcaatttatatattctatttttatttccatagatttttggggaataggtggtatttcgttacatgagtcagttctttaggggtgatttgtgagattttggtgcatccatcacccgatttgtagtcatttatccctcaccctcctgcc

SEQ ID NO: 648599 - DNA, 529 bp, Homo sapiens
caacatacaatgagtatttctattctgttttaaagatgtggaaagtgaagttgaaaagtaagacactatccaaagcacacaatggcataaatgaataataaatggcataaagtgaatcaaactaagtttattgttttagaaaacctcaaaagtgcacaagaagttatttactacagaaaaactttaaaaataagtaaatagaagaaaataatcactcccaagtaaaataaccatttaaacatcttcacgtatagtttctgttttactacatctctctctctctctctctgtatatatatatatatatacayatatatatgtatatatatatatatgtatatatatatgtatatatggaaataaaaattgaatattcaatttttcaatttatatattctatttttatttccatagatttttggggaataggtggtatttcgttacatgagtcagttctttaggggtgatttgtgagattttggtgcatccatcacccgatttgtagtcatttatccctcaccctcctgcc

SEQ ID NO: 648600 - DNA, 517 bp, Homo sapiens
aacctggaaagctttcctgttagcacttaaattcaggcaagacagaaaacaatcacttggcaactcctctgaagtctgaacactgaatgtgtgtttcagtattctctttcactcctttgggggaatcaggaactgtagagtattctcccaatctcgttatactgagtcacaggaggaatgatggtgattgagtgacagtccaaactgtggctttatcagcagccatgcaatctggcatcctttcctgttagcacttagrttcagggtagataggtgctagttccttgggcagccctgctgtcccaaaaagtcaaaatgttcgacatatcgtctagacatttctttctctccctagagataagctgggagtttggagctttctctctattgtgttgtactgttgagggaggatgagtgagtgccacaaatttacctgccggtttagatgtgcctggcttgaagcctaccagggaatccagagtctttaaattcgtttctgtacttttcacaaagggga

SEQ ID NO: 648601 - DNA, 514 bp, Homo sapiens
ggtcaggagatcgagaccatcctggctaacatggtgaaaccccatctctactaaaaatacaaaaaataaataaaataaataaaattagctgggtgtggtggctggcacctgtagtcccagctattcaggtggctgaggcaggagaatggcgtgaacctgggaggcggagcttacagtgagctgcgatcatgccactgcactccggcctgggygacagagtgagactccgtctcaaaaaaaataaaaaagaaaaaaaaagaaagataagtaacaatataaaaacacaaaagtgtaaaactcactggtaagggaaatatatagtcaaaaccagaatactgttgtactgtagaagcactgtgtaattcacttttagtatcagagttagacaaatatataaaaaacaactataattgtaaacaatgaacagatacaaaatgtaaatagatgtaaagtgtgacatcaaaagcataaaatgtgggattgaaatataagtttagaatctctgtatatgatt

SEQ ID NO: 648602 - DNA, 517 bp, Homo sapiens
aacctggaaagctttcctgttagcacttaaattcaggcaagacagaaaacaatcacttggcaactcctctgaagtctgaacactgaatgtgtgtttcagtattctctttcactcctttgggggaatcaggaactgtagagtattctcccaatctcgttatactgagtcacaggaggaatgatggtgattgagtgacagtccaaactgtggctttatcagcagccatgcaatctggcatcctttcctgttagcacttagattcagggtagataggtgctagttccttgggcagccctgctgtcccaaaaagtcaaaatgttcgacatatcgtctagacwtttctttctctccctagagataagctgggagtttggagctttctctctattgtgttgtactgttgagggaggatgagtgagtgccacaaatttacctgccggtttagatgtgcctggcttgaagcctaccagggaatccagagtctttaaattcgtttctgtacttttcacaaagggga

SEQ ID NO: 648603 - DNA, 622 bp, Homo sapiens
aaacatttcattttctaggaaatgtttaaaaatatggtatacccactgataatatttgataagtatctgaactatagttttaaaaaacactaataattatgctttaaaaaaacccagtgaaaaataaatgtccattacaactttgctcttaatttgttcacatttaaattttgcatggtatgtgttgtatctttttattatacaactttcacagcagataggcagacataaattgtttttatgccacttgcaaaaattctccagtatttggttcatagcttatgtttgaaattaaaggcaaaaggtaattattatttttatcaaaggaaatcactataattatttgatcacaaaaygtacgtcaagcaaatacatgttgaggaattaatgattcctttgtgttatcactttatcatgaggacttttactccttagacaaattatgaaccttctcaaaatagtaaaatgtaaaaccaaaaattataaagtaatttcataaatgtgactactttattgggtagatgagtgtactccccctttctgtaaatgtgcagatacaatttcagactgtaggaactttttttcctacttaaatggtgtaaaacaatagcttttcataaac

SEQ ID NO: 648604 - DNA, 550 bp, Homo sapiens
tccccataaagctgcatctccaacacattgttatgccaataaggttttatttaactttatttaaggatgattgtgtctttgaatgacaaatgtactgctgcttcctacctgcaagacgmacaatgtatgtttcaagggtgagcaagtgttatttcttaaatttctcaaatgcctgtagtaactattgtttctgcctctcaattgttgccagctctttgaagaaggggagaattgtgtgtttttgtgtggggatgtttctgatatgctgctacagttgcaaaacactggagctagagaaaataaagtactgatcttcgaagtgttgtgggctctgtggtgggaatcctgaaatgagaagggagtggatggcaagaggggacgtccttcacggggcctatgcttgttcctcttgagcactaaggaccaaggtctgcagctttgataggaacagcccctgcaaccccatttccccagggcaagcagattgatggtggtgtttgcattgtcttgctgggcaggagcgggagccctcccactggcttggctcacc

SEQ ID NO: 648605 - DNA, 550 bp, Homo sapiens
tccccataaagctgcatctccaacacattgttatgccaataaggttttatttaactttatttaaggatgattgtgtctttgaatgacaaatgtactgctgcttcctacctgcaagacgaacaatgtatgtttcaagggtgagcaagtgttatttcttaaatttctcaaatgcctgtagtaactattgtttctgcctctcaattgttgccagctctttgaagaaggggagaattgtgtgtttttgtgtggggatgtttctgatatgctgctacagttgcaaaacactggagctagagaaaataaagtactgatcttcgaagtgttgtgggctctgtggtgggaatcctgaaatgagaagggagtggatggcaagaggggacgtccttcacggggcctatgcttgttcctcttgagcactaaggaccaaggtctgcagctttgataggaacagcccctgmaaccccatttccccagggcaagcagattgatggtggtgtttgcattgtcttgctgggcaggagcgggagccctcccactggcttggctcacc

SEQ ID NO: 648606 - DNA, 455 bp, Homo sapiens
ccctgctcttgtcttctttgttcccggtttgtttttccctgcacttactctcttgcctttttggattcccttttaaatgtcaccttcaccaagttcagctgcttccacacctccccctcccctgaccccctgcacccagcaccattcctactgtatctagcataatatttcagaggctacctaaaggcaataattagacaaacactcaaaactgcacatcccaggcttgttcatgaaagtgaaaagctggaaaacaaacgatatctatcaagaaattaaatggtttatagacaatcctggctgtcctggtatttttgtaggaaagaaatttctttaacggtccccagcaacataccataagatctttattcccaawacatttatcaaatttaggatacttctgagcttccccatttctctggccttgcctcctaaaggtaatgttattttggtaa

SEQ ID NO: 648607 - DNA, 592 bp, Homo sapiens
tcagtaagtgaatggataaatacactgtggtgcatccagacaatggaatattattcagtgctggaaagaaatgagctaataagccatgaaaagacatggagaaaccttaggtgcatattactgagtgaaagaagccaatctgaaatggctacatattgtagaattccaattatatgacattctgaaaaaggcacaagtggagacagacagtaaaaaaaaaaaaaaaaaatctgtggttgcgaggggttgtggggagggagggataaataggggaagcccargggatttttagggcagtgaaactactctgtatgatgctgtaataatgaatacatatccatatacatctgtccaaacctatagaatgtacaacaccaagagtaaactctaatgtaaactatggattttgggtggtaatgatgtgttgatgtaggttcattgactgtgacaaatggaccactctggtgggggatgttgacagtggcagaggtggtgcctgtgtggggacaggggtagaaaggaactctctgtatcgtctgctcaattttgctgtgaacctaaaactgctctaaaaaataaagtccatttaata

SEQ ID NO: 648608 - DNA, 592 bp, Homo sapiens
tcagtaagtgaatggataaatacactgtggtgcatccagacaatggaatattattcagtgctggaaagaaatgagctaataagccatgaaaagacatggagaaaccttaggtgcatattactgagtgaaagaagccaatctgaaatggctacatattgtagaattccaattatatgacattctgaaaaaggcacaagtggagacagacagtaaaaaaaaaaaaaaaaaatctgtggttgcgaggggttgtggggagggagggataaataggggaagcccaggggatttttagggcagtgaaactactctgtatgatgctgtaataatgaatacatatccatatacatctgtccaaacctayagaatgtacaacaccaagagtaaactctaatgtaaactatggattttgggtggtaatgatgtgttgatgtaggttcattgactgtgacaaatggaccactctggtgggggatgttgacagtggcagaggtggtgcctgtgtggggacaggggtagaaaggaactctctgtatcgtctgctcaattttgctgtgaacctaaaactgctctaaaaaataaagtccatttaata

SEQ ID NO: 648609 - DNA, 526 bp, Homo sapiens
acctttaatatctcctcattattatttgcatagcatactaccaggggagatggataattaaaataataatatatttttaataactttaagttctcttaaatcatatggttttttaaggattaaaaaaaawatcctggatatctatggctatacttagacatatgtaatatacatatataacacaatagcttttggggaacaagtggtttttggttacagagtggtaaagtctgagattttggtgcccttgtcacccaagtagtgtacattgtacccaatatgtagtgttttatccctcgcccacctcctactctcccccttagtggtctccaatgtccattataccactctatatgcatacccatggcttagctaccacttaaaagtgagaatatatgatatttggttttccattcctgagttacttcacttagaataatggcctccagctccagttggagttgctgcaaatgacattatttcattctttttagggctgagtagtatgtcatgatgtatgtttacc

SEQ ID NO: 648610 - DNA, 526 bp, Homo sapiens
acctttaatatctcctcattattatttgcatagcatactaccaggggagatggataattaaaataataatatatttttaataactttaagttctcttaaatcatatggttttttaaggattaaaaaaaatatcctggatatctatggctatacttagacatatgtaatatacatatataacacaatagcttttggggaacaagtggtttttggttacagagtggtaaagtctgagattttggtgcccttgtcacccaagtagtgtacattgtacccaatatgtagtgttttatccctcrcccacctcctactctcccccttagtggtctccaatgtccattataccactctatatgcatacccatggcttagctaccacttaaaagtgagaatatatgatatttggttttccattcctgagttacttcacttagaataatggcctccagctccagttggagttgctgcaaatgacattatttcattctttttagggctgagtagtatgtcatgatgtatgtttacc

SEQ ID NO: 648611 - DNA, 526 bp, Homo sapiens
acctttaatatctcctcattattatttgcatagcatactaccaggggagatggataattaaaataataatatatttttaataactttaagttctcttaaatcatatggttttttaaggattaaaaaaaatatcctggatatctatggctatacttagacatatgtaatatacatatataacacaatagcttttggggaacaagtggtttttggttacagagtggtaaagtctgagattttggtgcccttgtcacccaagtagtgtacattgtacccaatatgtagtgttttatccctcgcccacctcctactctcccccttagtggtctccaatgtccattataccactctrtatgcatacccatggcttagctaccacttaaaagtgagaatatatgatatttggttttccattcctgagttacttcacttagaataatggcctccagctccagttggagttgctgcaaatgacattatttcattctttttagggctgagtagtatgtcatgatgtatgtttacc

SEQ ID NO: 648612 - DNA, 594 bp, Homo sapiens
ataaaaaactaggcaagagaagttcacatttgcatagcctatcaatagtgtctgccaagatatttccattttttagtgtatcagaaaattgggcacacatgactaacgtacttttttcattttaaatagaaacgtgtgtgcatatatatatataaaatatacatatttatgtgtgtaaatatgtgtgcgtgtatatgtgtgtgtgtaaaaccaatcaacttctgctgaaaaacttctgtaaaactcatttttttttctctagtatgtttcctctgaagrcaatcttcacatctagggaatattaatggtaataataacagcattgatttattgagagttttcctatgtaacaattactatataagcttattttcattcagtatgccatttaatctatttctccagtttcaatattaatattggtacttaataaatgagtaaactgaaaataataagtttaaaatcttttttcacagctaatcagcaatacaactgggatttgatatcagattcatgcgattccgaagaccctgaccaccaaatgcaaaaggtacatggcaatagctgattgcaatgagagaaaaacaactaata

SEQ ID NO: 648613 - DNA, 451 bp, Homo sapiens
tcaggctatacttagagtaatcacatcatacctgaatctgaagacgagacagtaaacttagagaagtactgaagccttggaagccttggatatattgaatatgttctatcttagaaagaaaaggtgagataatgtatgctggcagtcaaccaacagcatattctcctaatgaacaactggagagtcatttaagttcaatgttggggattttattagaaactgtaagatgaasacacaattcattttctctttccctgtaaatttggacaatatttgctatattcgcctatattttggcatagaaatttaggttctaagtatatagtagtgatatagccttcttacagggtcacatagacccacaagtaataatttttaatactctttttattctctctggttggctaacattaaaacaatccacagaaaacccccaagagctatgtattga

SEQ ID NO: 648614 - DNA, 588 bp, Homo sapiens
gtctgcttgtttgtttttatttcttccatttttattttctcataatatacatattttcccatcttatttgaaaaaataaagcatatttttaacacctgaattaacatgtttcaacactaattattatgttcatcgaaaccagatattgtgaattctatattgtgttgtgatggattttgttgaattccttttgtatatttgtattttgttctcaaacatagttaaattatttggaatcagtttgatgcttttagagattgctataaaattttcttagagaagatatagagttgctttaggtttaggaatgagtgagttccatcacaaaagcaggattcttccaaagattctccctaatagctcatatattaccctgtcttctactgtggtttgtggcaacaataatatttgcagagctttctgagctttgagaattgttcttcagaccctttgtgttggcattttaccccaggcttcagttattttctctcatgtattcacagtttagtattcaatgaaggactcaataatttcctgggaaggtctgcagacacacrgtcatctgtattcattagcatgggctgctat

SEQ ID NO: 648615 - DNA, 603 bp, Homo sapiens
tctgtgtctgagttaattgcttccttaggtttctatgtaggattgtctctccatcagtaactttcctatatcgcccatgttaacgtacctatatcgtttactgaaaaatttctcctttaaaaaaaaatcaatgtgtttgtttactttcttaaaatgccctcttaaactgcaaggtcaaagaaggtaagtatgatattcggatattatatatctaccacttaatacagaaaatattccagcacttgtataggtagtataagacataattttagaactctaaaataaaaactcacaaattgaagttaaatatccatttcccactgttatckccttttccttttaacacactgatatcatttggatctgtgtccccacccaaatctcaagtcaaactataagtcccactgttggaggtggggcgtgttgggaggcaattggatcatctagcggtttctcttaaatggtttagcaccatctccttggtgctgttcttgcgatagtgagtgagttattgtgagtctggttgttaaaagtgtatagcacctccccacttctcactcttcttcctgcttccagccatgtgaagtgctggctcccccgtca

SEQ ID NO: 648616 - DNA, 557 bp, Homo sapiens
gctgaggcaggagaattgcttgaacccaggaggtggaggttgcagtgagccgagatcatgccaccgcattccagcctgggtgacagagcaagactctgtctcaataaataaataaataaaataaaataaaataaaataaaataaaataaaataaaataaaataaaataaaataaaaacaaaaggaagtatagagagtagaacagagtagccaggctcactttttcaaagattaagaggcatatacctcacgatttctcccaggaccagctgtggccctcagatttaataagctgcaccctggagtactcatattagattcctagggcggccatgacaaagtaccatgaactaggtgacttaaaacaacagaaatccactgtttcctggttctggaggctgggaagtcaatcacccagttacctgcagagcctgcttcctctgaaatctgtargggaggatcctgctttgcctcctgcagcttttggtggcaaatgataatccttggcattctttagctgtatcatcattcctatctcgtctccactgtcacctgtgc

SEQ ID NO: 648617 - DNA, 607 bp, Homo sapiens
tgacttatttacaataatgatcttgcaaccctataatatgatatagatagccatttttagctttctttatttgttttcaataatggtgatatggtttggctctgtgtccccacccaaatctcattttgtagctctcataattcccacatgttgtgggaaggacctggtaggaggtgattgaatcttgggggtgggtctttccctgctgttctagtgatagtgaatgggcctcacgagatctgatggttttaaaaacgagtttccctgcacmagctctctttttttgcctgctaccatccacataagatgtgacttgctcctccttgccttctgccatgaggcctccccagccatgtggaactgtaagtccagtaaacctctttcttttgtaaaatgtccagtctcaagtatgtctatatcagcagcatgaaaatggactaatataaatggtttgtatttatcagtacagaagtcttgtgtcccttttgttaaacttatttcttggcattggatatttatgaatgctattttaagtagcattttactgttaatttcatttcttacttgtttgtggccgatatgcaaatatacaattcattgaatttat

SEQ ID NO: 648618 - DNA, 584 bp, Homo sapiens
caacttgggattgctaaccctttctaagtttgaattgacttcatgagattttctctccttcacattagcaagcaaaatatactgttcaggttggctgtgtgaactgggaagccaggtaattgaccctggtgggaggacatgagtggatggcagagcagaataagatcaatccaaagccccatggagtagctctccaagaagagtagttagctctagggtcctgatcctcaatttctctttctcatcctagtgtggtgagcagccactatataccttccccactggcaatgctgtttctaggccacagctgacacagacaagaggaccacttcagaggaaagataaataacaattattagaaatcataagggctttttttttygtaattggagccacaaactctactaattgcctctgaaactatatgctatttactgtattttattaactgcactataggagagtatgcccattctgtttattggcatcttgtagatatattgagatttttgcataaatgtgttattcatcacagaccaagccacataaataaaatatatagaaagatatagtactgtaaccaa

SEQ ID NO: 648619 - DNA, 451 bp, Homo sapiens
tgctccattgatttaaaatgtgaatttttaacttcagctagaaatgttggaatgcttcagtgttaatttcaaaaagtctttggtttttctgaaaattgttccgttttccaaggttcatgaaatgtgagggtttttttttttttttttgaggctctttctcaaaaatttcattaaatatggactataaatctgaagcatttaacatttggtttttttgtttccagacaaacagggaattatgcatgagatgattttgaggggtccgaatggccctggmcaggtgaaaacctgccccctgcaccgccccctctgagttgaccagggcacaagaaaagcacaaaggaatgcctacattcacgatttggggagcaccagcaaaatcgaataaaaagccttagtttggaaaccatcaatgaaggaaggaacccactggaatgtttgtaattacaag

SEQ ID NO: 648620 - DNA, 417 bp, Homo sapiens
tcatccatgttgtcgcaaatggcaggacttttttcttttttaagactgaataatattcctctgtgtgtgtgtgtgtgtgtgtgtgtgtgtgtgtgtktgtgtgtgtgttcctgtgtgtatgtgtctgtattgcacattttcttcatccattcatccactgaccaacacttaggttgtttccatatcttggctactgtgaataatgctgcaaactcagagaggcagagagtagaagagtggttggcaagactgcagggagaggaaaatggggagttgttgatcaaagagtacaaactttcagttataagataaataagttccaggaacctaatatacagcatggggactacagttaataatactgtattatatacttgaaatttgctgagagtaaatcttaagtgttttcaccaccaa

SEQ ID NO: 648621 - DNA, 470 bp, Homo sapiens
agtagatgtctctggtattatggcaatttatcttttaaaatgtatttatgtagatwtccagtttcttataatttacatgcattaaccatatgatgttctaaatgttttaatgaaaatataaaatgccttgacttagtaatttcacttcttaaaacatattataaaatcatcagaaggctgaggatttacatatgaatttattttatatcattatttataaagagaaaatgtgaattaattgaagtgcaataataaaaaattgatgttatattttgatatgttatttgaaatacaattataaagtaatattttgaggaaatgacatgagaaagcaatcatcatataataaaaagtgaaagaaaaaattaaatgcaaaatgtatctgtatataggaggatcccaatttgttatagtgacctttaataaaggctatttcatgtaatgtgagaagaagtaatttgttttcttct

SEQ ID NO: 648622 - DNA, 470 bp, Homo sapiens
agtagatgtctctggtattatggcaatttatcttttaaaatgtatttatgtagatttccagtttcttataatttacatgcattaaccatatgatgttctaaatgttttaatgaaaatataaaatgccttgacttagtaatttcacttcttaaaacatattataaaatcatcagaaggctgaggatttacatatgaatttattttatatcattatttataaagagaaaatgtgaattaattgaagtgcaataataaaaaattgatgttatattttgatatgttatttgaaatacaattataaagtaatattttgaggaaatgacatgrgaaagcaatcatcatataataaaaagtgaaagaaaaaattaaatgcaaaatgtatctgtatataggaggatcccaatttgttatagtgacctttaataaaggctatttcatgtaatgtgagaagaagtaatttgttttcttct

SEQ ID NO: 648623 - DNA, 511 bp, Homo sapiens
gttcctaccagaacaaccacatcagatctgtaatatatagctttaccacgtcctcagtgagtgcctcaataaatctgagatattcttttttcctttgtgactacttccttttgaccatacccacttggttctgggtcacttccaaaagctttaaaacatacttaatgaatgtgttccctaaaatgcctctcttatccagctgtcccttttgggaaaaataaaggaaaatcttgattaacattattgtgagaggttttggagagtgaaggtcttagcaattgcacttgcttctttggtttaatttggaatattcaaactctactagaagcattaaagaccagtgcattagtctgttttcatggtgctgataaagacgtacccaagactgggtaaatttataaagaaagagcggtttaatggactcacrgttccaagtggctggggaggcctcacaatcatggtggaaggcaaaagtcatgtcttacatggcagcagacaagagagaaaatga

SEQ ID NO: 648624 - DNA, 587 bp, Homo sapiens
ggggttcataagcaatggttgtcatactattttaattactctcaaatttatgtttttcatgatatccaaattacttccagataattttgatcatttgaaatcttctgtgaacaaaaaaagcgtatcttgtttttgaggatcccaaattatgtggcttatctatatgaaagaggacttttaatctttattagggccataaaagtatggtattaacagcaattttctaaaatagtaagctagattgacagatggaaaagaaaaagatctgctttaacagtaaaatttctatacagttgactctaggtgagtttactattaaaactcaataaatgtaatattttgtactactatgcataggggattatttcaacttatcctgagacataagttgaaatgaactttgtgaactttgaatggaaaataaaatataaatgcttattttctctgtcatacaataaaatgagggagagrcatggaacatccagaactaagacaggcagaaaaaaattccattaatttaaaattatgtttattttaggatattttacatgtttatttaatatgcacccaatgggatcagttcatgt

SEQ ID NO: 648625 - DNA, 570 bp, Homo sapiens
ctaatttaaacttacactttgagtaaaattttataagacatgctatccttttgctttgctgaaatcaagatataccacatctattgctgctttcatctattaatctcataacttgatccacaaggaaaaaaaagcaattaaatttgcctggcatgatttttttctttgtaaaatcctactgcttgcttttcataattcatttatcctctagatgtcttccaatatttatcttaggatttgtcttcgtattttactaagagttgagatgactagtgctctccttttaagaaaacagaggcttgtttgctcatagcttttctcttttatagcctcaagttacctatgaaaataaacaaagcagcgttcgtcattgggaagcaacctcactgaatagattatgtctccctattctgtcttaaaattgtggcacaaagtcaatatatatgtttttattcctaaacattctaaattgtatggtagaaaagcaaaacsctggatttttaaaacgaccctctcctccatgtgtttaacaagatctttattacatgctaattgcttcagcttcaactt

SEQ ID NO: 648626 - DNA, 539 bp, Homo sapiens
acgtgtctggctccagaatccacctcaaagggtcgcgtgttttccccctccgcgggaagcgaatccccgggatgccttggtgacactggacgcggtgtcgggacgaatcctcgcgatccgcgcacagtttgttttcaatgaatccagcatcggggcatttataatctcctacgtcatactattattaaatataacatgcataccgagttttgtaaaaaaaaatactgactatataaacatctggttaataaaaaggggtgtacaaatgaacccaaaataatcaggaaaactttactctctcaaggaaacaattccgtttctctaagttgtaaaaaaagattctgttgtttctcttttacttatgtcacattcgagattcaaataaaaacgcctctgcctctacaagactgcttcggtgtctggattccacgtttatagaacactgactccttcaaaccaagactgtgttttttttttttttaagttggggggaraaagcggctggggggcaaacggattttaaaaaagatggcttttcc

SEQ ID NO: 648627 - DNA, 493 bp, Homo sapiens
caaagccagattttgcacctgtatcctagttcaatcttttcaccaatgcatagaatatctacatttggagataacactatcacctcaaactcatgtaatttttttcttttttccaactcttatctatttctatttatcttttagtaaagaaaaacaatatattctgtatctatttttcttttagtgaaactatcatgtcatatactttcccactaaacatgggcttcttcattgctttgtcttttcccttcacttctataatcatattttctttcaaaatgtcttatattcatcatttcttctttatctcctttgcaatcaactaccaaaatgcagatcctcataattctagtttagactgttacaaatgcttcctctgttratgatagatttttttctctcagatccgcactgcttaatgctgcctgtttacacctttattaaacaacactttcctcatgtcattctgtttacagtcatgtctacattgtta

SEQ ID NO: 648628 - DNA, 619 bp, Homo sapiens
agtttttactgtcctcacttagtctggtttgtattgtaaccagcagtcttctgtgagtagtacacaacgccactatgttgtgcccagagctggttgattgagctcccattcattgtttgtggtctgtttgtccactacatttctacagaaaatgagaagtatttgttgtcaagatttggaatacatagttaattggatcttcactcaacctgtaccccatctacctgtcctttgtgtcttttcccaacttctttaacccatacgcagaccttcattggccaaaatatggaccaaaactcaggtggaaagttgctctgtgtcattccttgcacattagcacattatctttgtcatatttggcttactttcctctgaatcctatgataaacatggggcctctgagctcaaaagagtcaacaatctgaagggaatcccagtttctaatggtgtattcattataatgctaacttctatgyttattggtttataatctaatatattgctgataacattttgaaaaggggaaactgaaggatttctagagaaaatgtaattccatattattaaaatatgtcaattccttaagaaaaaactgttttgctaaagtttatcttacaaa

SEQ ID NO: 648629 - DNA, 601 bp, Homo sapiens
atgcattctcagtatttcttcatagcagtgtgagaacagactaatataaagctgaagaggcggaatgtatgcaaaatagtatacactttatcatgagacaaatttgaatttaaatccagatctgctctttggccactcactatatgaccataggctgattatgtacttcttgcagtcttggtttctcctctataaaatggaaatggcagcaggatctttttcatttgttgctataaagattatttttatgagcatcaagtacctagcacagtgccaggcacatagtatacagacacaaagcaatatctgttattattggtacttcatagaatttttctgaagattaaatgagttaacatcaatttcttagcacatcaaatrtattagttttaacctttaccacgtactagagaaagacatagtgcatacctcttgggccaaataattctggttttctgtgatgttgaaacccacagataattaacaggaaattatagacgtagcctaatgaaaacatagttattattgactaaactgcttatgaatccagtctgggttttgtgggttatatggcaataaataagcaaaatcgtcaccagca

SEQ ID NO: 648630 - DNA, 607 bp, Homo sapiens
aattttgtattatttgtagagatggggtctccctgtgttgcccaggctggtctcaaacccctgggctcaagcaatctgcctgcctcagcctcccaaagtgttgggattacaggcgtgagccactgtgcccagactaatttttcctttcaaggagttttcatagatatgtcttttaaaatcttttgtcttttgaaatttcatgatgttgttctttggtttagttttttgaccggactgtaactgaaatgttttcatcagaaaactcaggtccttaaattctgggaaattggtttgtacgtctctaatgctcttccttacatattgcatctgtttgtcttgtttgtgtgtgtgcrtgttttgttttcttgtcttgttcgtgtgtgtgtgtgtgtgttgtgtgttttgggttttttttgtttgtttgtttttaagacagggtctcactctgttgcccaggctgaagtgtaatggtgcaatcatagttcactgcagcctcaaacctctgggctcaaggaatcctcctgcctcagcctcctgagtagctgggactctaggtgtgcaccaccatgcctggcttattttgctatgttgcccaggctggtcttga

SEQ ID NO: 648631 - DNA, 561 bp, Homo sapiens
agctcccccaacccccggcccccaaaatgaaattattgcaagatctgcctggttctgctgtttgttgcctgggactcccgcccactcgcccaggacccagcaactgcctgtgcgcctcgtcctccgagcgctcgctgcagcgccccctgccgggaatcccgaggacgccgcagggaggaaagttaaatcccaactccggccgcggcatccwggtacaaagcaagcaaagggcgaggaggtgaacgcgcttcccgccaaagccaggggaacagggatgtgaccgctccaagccaggcaccggccgccgcggggaggtagccgggggaatcactcctccacgaccgttcccacgcacatcttgggagaaaccattccctctggagcccgatctgcccgaaaccctggggtctgaaaccctgagccgcggtgtgcaaaatccgtggagcagcggagggatgcctggtgaaaggggctcgctagctgcagcgcacctggctggtggttcccaggcctctgcatcccccgccttagtgtctttcattaaccaaggcgcttggcgga

SEQ ID NO: 648632 - DNA, 566 bp, Homo sapiens
tggaggagagaggggcacggttgatgcttggctgttttctacctaaatctgttaaatacccttcctcacaatgggacagtctatctcactcctgttttacttcttcatgcccttacatgtaggtagaatcaagacctcagtttcctagagggtctctatatgtgagaattttcatattttctcaccacacrtaatataatgattttctctaaagttcagcatataattttttcttcacaggctagcatctgaggcattttgccaaaggcagttttgagtgatgacgtttccttaaacaacttaagctgaaacccaacaattgatgccaagggaaagagaagtaaacagctgtagctacttacctgggtcccccataagagaagcaggggagatgtggatgttacaggttagcaaagaggggataagaagatagttagatagcataatacaaaatatgcacgcatataatttcaagcattgcagtctcagagataatagcaaaatcaaaattttttaaggtttaaaatcttgtggatgtttatttatcaagcttctggaagttaatc

SEQ ID NO: 648633 - DNA, 566 bp, Homo sapiens
tggaggagagaggggcacggttgatgcttggctgttttctacctaaatctgttaaatacccttcctcacaatgggacagtctatctcactcctgttttacttcttcatgcccttacatgtaggtagaatcaagacctcagtttcctagagggtctctatatgtgagaattttcatattttctcaccacacgtaatataatgattttctctaaagttcagcatataattttttcttcacaggctagcatctgaggcattttgccaaaggcagttttgagygatgacgtttccttaaacaacttaagctgaaacccaacaattgatgccaagggaaagagaagtaaacagctgtagctacttacctgggtcccccataagagaagcaggggagatgtggatgttacaggttagcaaagaggggataagaagatagttagatagcataatacaaaatatgcacgcatataatttcaagcattgcagtctcagagataatagcaaaatcaaaattttttaaggtttaaaatcttgtggatgtttatttatcaagcttctggaagttaatc

SEQ ID NO: 648634 - DNA, 586 bp, Homo sapiens
tcttttaaagagttattattcagcttctcacacacctatcctccactctcccaaacttgaggttgtcttgaggaccatgcatagtttaaagactcattgcacttccaaatctgagcatcatagttttaataaaacataaaatacataaaggtgaagatatatatggtatttctgaggatcaatattgtactcttaaacatgttgcatgagacacagataaacacatttagtccttttaaggaattcttagataaaaaagtgaaaacttgaaatatacwgcaatacagtaatattcaactaagggaacaaatgaacttcacatgtatttaaagagatgaattaggacaaatggaaaaatttaaaaaggaggaagataccttaacattagatatctttaaatgctctttaacattagaaatgtatgcttcttgaaatcatacctcctgataattatattatcttaaaggaaaacctggtgcttaaacgtcaaagataatataaaagttttcactgatatgggagaatggtctgccctaatgattgataagattcattccaattctaatagtctataaatattgtcatc

SEQ ID NO: 648635 - DNA, 314 bp, Homo sapiens
atacacatataaacacacatattagtatgaaaaacatacacatacacattcatatgtaaacagctagtacatctaagtatagacacttatgtatatggatacacattttatyagttgaaaatgaaagcaaggaaaatctggaattatttaaaggaagagattttgataagtgttgtgtggggttataagaattgaggagttgtaaaggaaaagtctacaatgaataactattataaaatattcttaactaaaaataaatttcgttgtgaaatgcccttaggcaagtgggaaaaattctttgcttaagaaatttt

SEQ ID NO: 648636 - DNA, 598 bp, Homo sapiens
gtcatttgggacctcttttaattatttatttctttttttgtctttaggagttgtacagatgttctgtgctgtatgatcttcctactgtgtattattggctacattgttttaggacttgtgggtgagtaaatacaggtatagaaaatatttaacacttgctaatggaataactaagtcagtgtcacatataaaaaattaattattgtcttccaaaagccttcctattattgaytgttgtctttcctggaggaaatgtgcctcaccaggatttatcgggtagcagacaataaaaaatgaacataaaacagtttagtcaaaggcaagcccaaattacttaagtaaatacaattataaagcagaaagagaaaagtttgtggtttctttttaatcattgttacttttgaaattctaataagcaactaattatgttcatgttgttctttgctaataagaactagggcctagatctttttaggtaatactaaatatataaacttttctttttataagcaaattaaaaagaaggaacaattattacgaatttcaccagataattcattgacatacaaaaagttctagtctctttgcccaagtgata

SEQ ID NO: 648637 - DNA, 585 bp, Homo sapiens
agtttatggggaggggaaagagaagttcatgatgatgtttatgtttatggactaaataactatgtctaatcaaatggttgtgccagccactggcaaaagaaacagaagtcatggaatgagtttggaagactgatgattaatttatttctggacataggtgagatctccagatgaaagtgtcctgtgtcatgttgacgttggatacatgggtctggaatccagaggaaacatcaggattaaaaacatacgtttgaaagacaatctacaggcaagrgtaagaatggctaaagaaagagttctaacaagaagggcagagagccaaagagccaaggctaaaatcttaaatccatactgaaaaggatgggaggaaggttatgaaccaacaaaggagactaagaggcatgtggaaaactgttgtgcatttctcaaaatcagcaatcagaatgttttgtagtaactaaaaagcaataggaaaatgaaacatcttctgtgctatgtgttttaaaagattgtagcaactaatagtcacaagcacaaaaacactcaggaaatgacattgccttttgcttttacccctcacaccaa

SEQ ID NO: 648638 - DNA, 608 bp, Homo sapiens
cctcactctaggaggttttttcatgctctttctaggcaataacacacccagaggaaaaatactactgttttgcctcttcttgaactttatacaaatggaatacataatatatgctttttgtagttgattgacttctttcaacatccggtattttagattcgtcrgtgttgttgagtttattaacagtgcattctgttttaattgctttatagttacatgatgcatgtttgggtagttttccaggtaattcttaagtactataatattttaaaatctttcacttatagctttgaaggaatattctgtggttgatcaggacagcctgccaccaaaatagaagtttcaaatgttctatcttctaaacattttaccatgaaatttcaaatttaaatcactcctttttttgatttaaccatagttacagaggctgaatttacattaaaacaaatgctgtctgataggactttctatgcatacattttatagaatattttatcatattaccatgtatacgtttataggattaactggcataaagaaggttaatagacacagagtgataggaagaaccaacggagaaaaggcaaatagatgaagccttaggaaat

SEQ ID NO: 648639 - DNA, 608 bp, Homo sapiens
cctcactctaggaggttttttcatgctctttctaggcaataacacacccagaggaaaaatactactgttttgcctcttcttgaactttatacaaatggaatacataatatatgctttttgtagttgattgacttctttcaacatccggtattttagattcgtcggtgttgttgagtttattaacagtgcattctgttttaattgctttatagttacatgatgcatgtttgggtagttttccaggtaattcttaagtactataatattttaaaatctttcacttatagctttgaaggaatattctgtggttgatcaggacagcctgccaccaaaatagaagtttcaaatgttctatcttctaaacattttaccatgaaatttcaaatttaaatcactcctttttttgatttaaccatagttacagaggctgaatttacattaaaacaaatgctgtctgakaggactttctatgcatacattttatagaatattttatcatattaccatgtatacgtttataggattaactggcataaagaaggttaatagacacagagtgataggaagaaccaacggagaaaaggcaaatagatgaagccttaggaaat

SEQ ID NO: 648640 - DNA, 565 bp, Homo sapiens
ttttcggctccatcaggtcatttatgttcttctctaaactggttattctagttagcggttcctgtaacattttatcaaggttcttagcttccttgcattgggttagaacatgctcctttagctcagaggactttgttattactcaccttctgaagcctacttctatcaatttgtcaaactcattatctgtccagttttgttcccttgctggtgaggagttgtgatcctttggaggagaagagccattctgtttttttggaattttcagcctttttgtgctggttttycctcatcttcatgggtttatctacctttggtctttgctgttggtgaccttcagatggagtttttacgtggtcgccgtttttgttgatgttgatgctatttctttctgtttgttggttttccttctaacagtcaggcctatcttctgcaggtctgctggagtttgctggaggtccactctagaccctatttgcctgagtatcaccagcagaggctgcagaacagcaaagattactgcttgctccttcctttggaagcttttgtcccagaggagtacctg

SEQ ID NO: 648641 - DNA, 565 bp, Homo sapiens
ttttcggctccatcaggtcatttatgttcttctctaaactggttattctagttagcggttcctgtaacattttatcaaggttcttagcttccttgcattgggttagaacatgctcctttagctcagaggactttgttattactcaccttctgaagcctacttctatcaatttgtcaaactcattatctgtccagttttgttcccttgctggtgaggagttgtgatcctttggaggagaagagccattctgtttttttggaattttcagcctttttgtgctggttttccctcatcttcatgggtttatctacctttggtctttgctgttggtgaccttcagatggagtttttacrtggtcgccgtttttgttgatgttgatgctatttctttctgtttgttggttttccttctaacagtcaggcctatcttctgcaggtctgctggagtttgctggaggtccactctagaccctatttgcctgagtatcaccagcagaggctgcagaacagcaaagattactgcttgctccttcctttggaagcttttgtcccagaggagtacctg

SEQ ID NO: 648642 - DNA, 579 bp, Homo sapiens
catctcaaggaacatggtatggtttttaaaggatcagctttcaacattctcagattaataagttcttagtgggttattgtgaaaatggacttagacaaaacatgcccaaaagaaacattgtctggggacaagctgtctcaggagattagtaacaggtgacatggaaacttaaacctcaaggtcaatagctccaatctatcctcagtcaatagtggctagcaagtcattaatgtacaaatgctggccagttttctaggagaaagaagaaaggttttctaatcttgctctttgaaagtatttgtatcacaagttctgatttgaaaacaagagaggatgtataaacatatgcaagcatacataaacatacmaacataaacatacctattaggataaaattgaaagaatatacaggtatatgttcctactcagcaggattatagagattttaaatttcatctttttgccaattcttgttttctaaatattttacaatgaagtacattgctttatactacaagaaaaaaattaaaacctcttttcttcccggactgatttctaaagaactaaaagacaatcaac

SEQ ID NO: 648643 - DNA, 579 bp, Homo sapiens
catctcaaggaacatggtatggtttttaaaggatcagctttcaacattctcagattaataagttcttagtgggttattgtgaaaatggacttagacaaaacatgcccaaaagaaacattgtctggggacaagctgtctcaggagattagtaacaggtgacatggaaacttaaacctcaaggtcaatagctccaatctatcctcagtcaatagtggctagcaagtcattaatgtacaaatgctggccagttttctaggagaaagaagaaaggttttctaatcttgctctttgaaagtatttgtatcacaagttctgatttgaaaacaagagaggatgtataaacatatgcaagcatacataaacataccaacataaacatacctattaggataaaattgaaagaatatacaggtatatgttcctamtcagcaggattatagagattttaaatttcatctttttgccaattcttgttttctaaatattttacaatgaagtacattgctttatactacaagaaaaaaattaaaacctcttttcttcccggactgatttctaaagaactaaaagacaatcaac

SEQ ID NO: 648644 - DNA, 522 bp, Homo sapiens
gatatcaaattctcttagatttttttcatctgagagtgtcttcatttaacctttgtttctgaaggatatttttgctggatatagaattccaagttgacatggttttttgttgcttgtttgttgttgttttgtcagcagtgaaaaatatgccatttccttttgacctccatggtttctgatgacaaatttgctctcattcacagtgttgttcctctatagataaagaaacatttctttatggctgctttaaagatatttttgtttttaattttcaaaagtttcactatgttgagtgttggcatcgatttctttgggtttattctgtttggaatttttctcagctttttggatctgtaagtgtatgtctttttgctaaagtttgaattcctcaktcataggtttttgggttttttttaatgctttttaagacccaccacatttcttttttcttttttatggctctgatgacatgaaagtaagatcttttgttttaggtcttcagatctcagaagccttgttctc

SEQ ID NO: 648645 - DNA, 670 bp, Homo sapiens
ttaaagttgtttaaaatcttgctttgttacgtaactataaattaacatctttgtatatgtgtctttgtacaaatatataaatgtatctgcaggttaaattacaactgttctagcaaaaggcatgattttgattcatgttatacagtatgcctccaaaaaatgtgcatcaatttatatttctactaacartatgtgagagttcatacttctccaggtcaatactgaattaatttattgaaattgtctttgaataagaaccttgactggtcttttgtattgctataggtcactcatttttttctgattttattttcatatttttattggctagttttttccttactgatttatcagagctcaatgtatagcaaaaaagttataaactacaacaaaacatccctttataatgtgtatcacaaagtattttaagctttacttgttggggtgttttttatggcaattatagtttttattgttgctgcttttatttcactttcatgttatcagttttatcattattcttgtctatggcttacatcagttgattctttattgaaaataaagagatatgctggattacatttattgatttgcgtatattgaaccagccttgcatctcagggatgaagcccacttgatcacggtggataagctttttgatgtgctgctg

SEQ ID NO: 648646 - DNA, 670 bp, Homo sapiens
ttaaagttgtttaaaatcttgctttgttacgtaactataaattaacatctttgtatatgtgtctttgtacaaatatataaatgtatctgcaggttaaattacaactgttctagcaaaaggcatgattttgattcatgttatacagtatgcctccaaaaaatgtgcatcaatttatatttctactaacaatatgtgagagttcatacttctccaggtcaatactgaattaatttattgaaattgtctttgaataagaaccttgactggtcttttgtattgctataggtcactcatttttttctgattttattttcatatttttattggctagttttttccttactgatttatcagagctcaatgtatagcaaaaaagttataaactacaacaaaacatccctttataatgtgtatcacaaagtattttaagctttacttgttggggtgttttttatggcaattatagtttttattgttgctgcttttatttcastttcatgttatcagttttatcattattcttgtctatggcttacatcagttgattctttattgaaaataaagagatatgctggattacatttattgatttgcgtatattgaaccagccttgcatctcagggatgaagcccacttgatcacggtggataagctttttgatgtgctgctg

SEQ ID NO: 648647 - DNA, 670 bp, Homo sapiens
ttaaagttgtttaaaatcttgctttgttacgtaactataaattaacatctttgtatatgtgtctttgtacaaatatataaatgtatctgcaggttaaattacaactgttctagcaaaaggcatgattttgattcatgttatacagtatgcctccaaaaaatgtgcatcaatttatatttctactaacaatatgtgagagttcatacttctccaggtcaatactgaattaatttattgaaattgtctttgaataagaaccttgactggtcttttgtattgctataggtcactcatttttttctgattttattttcatatttttattggctagttttttccttactgatttatcagagctcaatgtatagcaaaaaagttataaactacaacaaaacatccctttataatgtgtatcacaaagtattttaagctttacttgttggggtgttttttatggcaattatagtttttattgttgctgcttttatttcactttcatgttatcagttttatcattattcttgtctatggcttacatcagttgattctttmttgaaaataaagagatatgctggattacatttattgatttgcgtatattgaaccagccttgcatctcagggatgaagcccacttgatcacggtggataagctttttgatgtgctgctg

SEQ ID NO: 648648 - DNA, 670 bp, Homo sapiens
ttaaagttgtttaaaatcttgctttgttacgtaactataaattaacatctttgtatatgtgtctttgtacaaatatataaatgtatctgcaggttaaattacaactgttctagcaaaaggcatgattttgattcatgttatacagtatgcctccaaaaaatgtgcatcaatttatatttctactaacaatatgtgagagttcatacttctccaggtcaatactgaattaatttattgaaattgtctttgaataagaaccttgactggtcttttgtattgctataggtcactcatttttttctgattttattttcatatttttattggctagttttttccttactgatttatcagagctcaatgtatagcaaaaaagttataaactacaacaaaacatccctttataatgtgtatcacaaagtattttaagctttacttgttggggtgttttttatggcaattatagtttttattgttgctgcttttatttcactttcatgttatcagttttatcattattcttgtctatggcttacatcagttgattctttattgaaaataaagagatatgctggattacatttattgatttgcgtatattgaaccagccttgcatctcagggatgaagcccacttgatcayggtggataagctttttgatgtgctgctg

SEQ ID NO: 648649 - DNA, 607 bp, Homo sapiens
actttaaaattattataaaaagctktagtttagattttgagatgtcttgattatatcacaatcctgactccacctctcagcctctgcatttatgataatggaatcaagaccagtacactgttttgtcagaaggggcaaatttaacaaatctagatatagatatgcagctgtgaaattggtgactatgagataaacattttatgtaacacttgatgtttttttcactttttgtaatggtcatctttctgatgaagcccattgttctaccatctaagtactttataaagacagagatccttgattagggctgtgaacctgaaaaatagtttccagctttcctagttgtctctgatagctgtataagaaaagacaactttgctaaaaatttataggctgaacctatctggctttttaatagtaatagaatttaatataggtattcatttaatctgcccaggcatacatattatcaggtgatgacaagagcagtgttactcagcatcatctgcaaactggcagcatcagtatcacatgggagcttttcagaaatgcacattctcatggcccaatctagacctggtccctaggagtctttgttttagtaagc

SEQ ID NO: 648650 - DNA, 422 bp, Homo sapiens
attagagagcaggatgcccagtttytgagcagaagaaacattcgttagctccagctatgcaagagagaattacatatgagtgatgttgagaaaagatttttgttcagaattgtgcaccgtgccacaccgtggaaaggaaagcaagcacaaaactgggccaaatctacatggtctgtttgtgcagaagacaggtcaagctgttgaattttttttttttttttttttataggtaatttttttttattgtgaatgctgaaaaaaataccttttatttgtcacacaaattagaactatacacaagtataagaactcatgttcacatttttcccccaagcagtgcagtacatcatgtttttggtgtggtgccagaatatgatattgtaaaaatctgaacatttttctcctactacagcagtttaaaa

SEQ ID NO: 648651 - DNA, 522 bp, Homo sapiens
ctattgtgtctttccccctttgtttccccctaacggtaaagcatgttagatacatttgtcatacatatgaatagaaatttagtacatcactggtacttttattgtaaaaagtaaggttaataattctagattcctgttataagaattatatattcaaactgccttagaattatactgcattrtatagtaccttgccttgcagacatacaaagggaatttgttgggtgggaggtgagtagggaggaggggagaaaatgaagaatgcacttatggttgaaatatattagcctagtagaaaaatactggtcaagttgagttgagttgtccaaaaataattttaagaaaagttgactattataactatatggagacgtgggtcttataaggttgtatagaaaattctgatccaaactttattttccatggaaataaacttttgagtttaaaatgttcatccttgaatgaaattgtgcatactgagattctattgagaatactgaaaaatacatatgctgttcttta

SEQ ID NO: 648652 - DNA, 559 bp, Homo sapiens
gtcttactgatacttagttaaaacaatacaaaaattaaagattaattgccagaaaatattttagaatactttccatatccctacacttctctctataaaaaagactatttttcataatataacttttcttttagtattttatrtattgagactataaattggcagtcatatcaccaccattatcattagcattcatttcattcctatctaggtaagtgctgattcacaatatgatagaaggtgaaatatcttattctttcagaaaaaggcagaataatatcttcatgatcttgaaattggcaaaattttgttaaatggacacagaaagagttataagaaaaaaatggatgattaaaaacacactagaattaaaaatttcttttccccaaaatagagcattaaaaatgataagggaaaaggcaaggcacagagtataataatatgcttgtagctgaggatagacattctagaatagcactatacaaaagaactttctgcaatgtctgtaactgagctagctgtccactatggtagccactaattgtgcataaatattgat

SEQ ID NO: 648653 - DNA, 587 bp, Homo sapiens
ctgaggatagacattctagaatagcactatacaaaagaactttctgcaatgtctgtaactgagctagctgtccactatggtagccactaattgtgcataaatattgattacttgacatgggactagtaagactgaggagtcaaatttaaaattttatttaattttaaatgaaaatttatttaactttttaaaaatattgccagtggctactatattagacagtgcattacaactgggttttagagacttaygtatacttgcttattagaacccaagcctcctaactccagatgaactcccctatgatatcataacaagtatacatttctagccagttttgaccttcacaacgaagacatatacaatattagaaataagtttgtgttcattttattctttaagctctattcccactagttaattttactcatccaattgtcatatgtaatagctattgaaatagctgaaataatcattttcatcaatttttaaatcaaattttatcaaatttatacattttacttccttggagaagcatcatgaaatagtgatgacaaacaaattaaactcaaagtcaaattttgcag

SEQ ID NO: 648654 - DNA, 482 bp, Homo sapiens
gctgcatttattccatttggtagttggttttacttattgataaaagtcgttcaattaagaacaagttattgaatggagatttatattttaaccaaatcttttcaaatgttcttataggacctgcttgctttgaccatcttattttcacacaattattttggttttktgaatacacttcacctggggcaattattatgagcatcatattttctttctttgttacataattcactgaattttagtttaagatttgaatttacattaatttttcctcttccaccatctgctttgcctgactttgctattccccctactaagttcttgctttcttttaattatgtttaacagttttgatatagggaaatttaaactctattgcagattttaatataatacttttacaattaagagggatttaaagtgtagatttatgaatgtctacactcattcacatttctgttcatttgacaaaaattaaatga

SEQ ID NO: 648655 - DNA, 582 bp, Homo sapiens
aatgtcatggagatttttccttgttttattttagtagtttcataggtacagggcatatactgtctttcatctattcggatttgatttttttatatggtatgaaatacatgtctaattttatccctctgtatgatgatatccagttttaccaataacatttactgggtggggtgcagtggttcatgcctataatcccagaacttttggaggccgaartgggtggatcacctgaggtcaggagttcgagatgagcttggcctcatctctaccaaatggtaaaacctcgtctctactaaaaaagtacaaaaaaattagctaggtgtggtggcatgtgtctgtagtcccaggtacttggaaggctgaggcacgataatcacttcaacctgaggggctgagtttggagtgagccgagatcatgccactgcactccagactaggcaacagagtaagactctgtctcaaaaataataataataataacatttgattgtataagtgtagattcatatctaagatccttattcttttccacaggcctatgtgtctatttttatgctggtgtcattctgctttgcttactat

SEQ ID NO: 648656 - DNA, 602 bp, Homo sapiens
attttattcttatcagtgtattatcagtatgactgaggggagattactgacattcttgcattagatgtagggcctgtgcttcctccttctgaatctgagtgggttcttttggttgctttgaccaatagaagttataatcttgtcagttttaaggcccaggacttaagagaatgacaatgtacattttcctatatgttgaaactcagcctccctgctctgagaagttcatatataccagtgaagacacttttgagtttaccagctgatgtctgaggtggtagccaatataaacctcccagccatgtgagtggttggtgaaccaccttcaaaggctaccctctggcttcagtcagccttctcacmtgatgtcatgaaaagaaaagaagcctcatgaaatctttgttaaatttctgacccatataatcactgctttaagccactaagtcttggcataatttttaacacagcaataagtaaccaaaacaatcaattgtacagaatgttctaattaaagtggaggatagtcattgttgcaaagaatgggactattaatggggaaaaaattagtgtatactatcaattctggcataaggataatttac

SEQ ID NO: 648657 - DNA, 552 bp, Homo sapiens
gacaggcagtagataaggataaagtgtgaaaaattcaaacaatctccaaagcaagcttgaaataatccttcctttggagacctggtcttcccagtcaagatgcaaacaaaagaaaatggcctgtctttatttggttcactggtccagaaaatgtgccctgggaagataaggccgagctgggtgtttgaggtgaatacaaggagccaagaggccttgttggggatttctttcacccaagaacttcctaaacctggagcgttctccttgaagaggacactggagctggctgctgctgctttctttaaacagactcagaagttcttttcttggtaacacgagaaactatatgcagggcttcaaggacacattctgaatgatgatttatgctaagttgtttagcctcycctccccgccaataattcttccagagagcatttagctgatttggaaaaagtatatcaaatcccccagagaacagggtgtatcttaacagtggatgaatgtaattctggtcattatctaaatgctcaaagctttacaaactgagtaacc

SEQ ID NO: 648658 - DNA, 584 bp, Homo sapiens
aattataaaacaatttcacaggaaaaaatgaagaacaccagaagtaataacatctgcattaatacttttactcttttctttatatattttttgaaatacaagatttaaarcaattaaaacagcacatttttggattttaatcatctaagtgtgtatgtgtacgaacgtgacatatatgaaaacagtacgaaataaacgggaaagggtagatctatattgaaacaaagttgctctatttcaccagaatataacccacttttaacttgtagatgttttgtacttattttaaatttatttatatatttatttaaaagatttcttaaagtagttttatgtttatatcaaaattactttgagggtacagagatttcccacgtacctgctgtccccacatacacagcctccctggttatgaacattccctaccaaagaagtatatttttttgcaattgatgaatctaccctgacacttctttattatccaaaatctacagtttacattagggctcactcatgctgttggacattctgcaggttttgacaaatatatacttgcatgtatccaccattatagtataataaag

SEQ ID NO: 648659 - DNA, 584 bp, Homo sapiens
aattataaaacaatttcacaggaaaaaatgaagaacaccagaagtaataacatctgcattaatacttttactcttttctttatatattttttgaaatacaagatttaaaacaattaaaacagcacatttttggattttaatcatctaagtgtgtatgtgtacgaacgtgacatatatgaaaacagtacgaaataaacgggaaagggtagatctatattgaaacaaagttgctctatttcaccagaatataacccacttttaacttgtagatgttttgtacttattttaaatttatttatatatttatttaaaagatttcttaaagtagttttatgtttatatcaaaattactttgagggtacagagatttcccacgtacctgctgtccccacatacacagcctccctggttatgaacattccctaccaaagaagtatatttttttgcaattgatgaatctaccctgacacttctttattayccaaaatctacagtttacattagggctcactcatgctgttggacattctgcaggttttgacaaatatatacttgcatgtatccaccattatagtataataaag

SEQ ID NO: 648660 - DNA, 590 bp, Homo sapiens
gggccctgccctccatagccatctcatttaacatagcaaccaccattctcctcctaccactggccttgccccctaccactctttcttatttaatcttctccatttaatttttcacagttaaatatattgtgcaattcatttattatttctttcttttttttctttttttgagacgaagtctcaccttatcaaccaggctggagtgcaatggccagctcttggctcactgcaacctctgcctcccrggttcaaatgattctcctgcctcagcctcccgagtagctgggattacaggtgcccacgaccacacccagctaacatttgtatttttagtggagacggggtttcaccatgttggccaggctgatcttgaactcctgacctcatgatccgcccgcctttgtctcccaaagtgctgggattacaggtgtgagccgccgcacccagccctcacttattatttctttgtcatctcaccaataccagcactaacatgtcaactccatgaccgtggggatttcatatcttttatcctttctgtaggactccacacctctgggttccagaactctgcatgaacaaatttctaa

SEQ ID NO: 648661 - DNA, 480 bp, Homo sapiens
aaccaaaagtattttgatctcatttttcacactgatattttccaacacagagaacaatgttccagttatgtaggaactccagcatcctaatctggcaaagtgcacacttttcccatgccttaaaacaaaacaaaatagaaaaacacacaaaaatctccataagataatgttctccaacgagaacattaaaaacattaaaaatctgtcatctttctttaaggctacttatcatctttattgaaaagtgtccatgtgaaaataaactatatcacatgtgatacccaggagtgtaagtgcccataagtgatgaacaatcttttaacttcagctagtttacagaaaaatgttttaattctactggtggctgcaaagctacatcataacaaaattttaytggatgtgatatagttgatttgagccggttttacagatctacgaaacaggacaagggtagtctatttctggatgtatgtgaatgca

SEQ ID NO: 648662 - DNA, 515 bp, Homo sapiens
aatctcagttgttaaaatttttccaaatgagaacacttggacacagggcagggaacatcacaccatagggcctgttgtggggtggggggagsggggagggagagcattaggagaaatacctaaggtaaatgacaagttaatgggtgcagcaaaccaacatggcacatgtatacctatgtaacaaacccgcatgttgtgcacatgtaccatagaacttaaagtataattaaaaaattaaaaatttaaaaaaatttccaaatatatttatcttttgaataatctaaggcccttatccccctaaggtttacatggcatagttcatactgcttttacttttcaaagccgttaatcttttgtaataacattttgtatccagttatgttcctttgcttagttttcaactttgttattctccaagctgattttattaattaacgcagagagagtcaggagcatctgaattaattaggtgatagtgaactaggaggaaatcacaggcctcagtgtgagataaa

SEQ ID NO: 648663 - DNA, 515 bp, Homo sapiens
aatctcagttgttaaaatttttccaaatgagaacacttggacacagggcagggaacatcacaccatagggcctgttgtggggtggggggaggggggagggakagcattaggagaaatacctaaggtaaatgacaagttaatgggtgcagcaaaccaacatggcacatgtatacctatgtaacaaacccgcatgttgtgcacatgtaccatagaacttaaagtataattaaaaaattaaaaatttaaaaaaatttccaaatatatttatcttttgaataatctaaggcccttatccccctaaggtttacatggcatagttcatactgcttttacttttcaaagccgttaatcttttgtaataacattttgtatccagttatgttcctttgcttagttttcaactttgttattctccaagctgattttattaattaacgcagagagagtcaggagcatctgaattaattaggtgatagtgaactaggaggaaatcacaggcctcagtgtgagataaa

SEQ ID NO: 648664 - DNA, 515 bp, Homo sapiens
aatctcagttgttaaaatttttccaaatgagaacacttggacacagggcagggaacatcacaccatagggcctgttgtggggtggggggaggggggagggagagcattaggagaaatacctaaggtaaatgacaagttaatgggtgcagcaaaccaacatggcacatgtatacctatgtaacaaacccgcaygttgtgcacatgtaccatagaacttaaagtataattaaaaaattaaaaatttaaaaaaatttccaaatatatttatcttttgaataatctaaggcccttatccccctaaggtttacatggcatagttcatactgcttttacttttcaaagccgttaatcttttgtaataacattttgtatccagttatgttcctttgcttagttttcaactttgttattctccaagctgattttattaattaacgcagagagagtcaggagcatctgaattaattaggtgatagtgaactaggaggaaatcacaggcctcagtgtgagataaa

SEQ ID NO: 648665 - DNA, 566 bp, Homo sapiens
gcccatagacttttaaaaaattcttccaaaggattctgacatcctaatcagggttgaaagctactgctccaaagagcttgacataatcaaatgaacatttatcaggtgttcacaaggtttaggaaggcccagcacaaagcaaaaccatagagacgttgagtactcttttgcttcagcattcagcatccaattccaactccatgcttttccttacttccaacttccatttttgccccgagcaacctgtgcaggaaaccatcagtttccctgctccactggacatctaaagactatggtggtgatagaaaatgagagtcatcaaaaaggtccaagtttagtgaagatgcgcaaagggaaccagcccttcccaaagaattcagtgaatgagccaagattctccagaaaccgctcagctttgcagtgataattttctgtgaagacatagactgaaatgggaataagagatagaaagttgaaaaagawttttctcagaatccacatgtaaccttacagaaggcaaacagaagggttagtgagataaatggaatcacgtagctgaggtgaga

SEQ ID NO: 648666 - DNA, 415 bp, Homo sapiens
ggatctaaaggaaaaataaaaatattaatgcttctatgtagtwttaaaagttgtgaccataagatagcaagtataatcacacaccaaaaaatgacttttctgtcccaagtgagtggtaggcttcaatgtagtcacccagaaaacattaaatatttgtcatatgttcaagatacattttgaaacatctaaggaaatagaaattatcactttgttacatgtgcatgtaggtgcacacacagagtattactcagcgaattttttcagctttattctatataattatatattttttccagccttattctgcctgactatccagattttacactgtttagatctggctgtttccaaattgcacaaactgtcttgaactgaaatggacagaaggcaggcaaatactggtagaagagggcag

SEQ ID NO: 648667 - DNA, 415 bp, Homo sapiens
ggatctaaaggaaaaataaaaatattaatgcttctatgtagttttaaaagttgtgaccataagatagcaagtataatcacacaccaaaaaatgacttttctgtcccaagtgagtggtrggcttcaatgtagtcacccagaaaacattaaatatttgtcatatgttcaagatacattttgaaacatctaaggaaatagaaattatcactttgttacatgtgcatgtaggtgcacacacagagtattactcagcgaattttttcagctttattctatataattatatattttttccagccttattctgcctgactatccagattttacactgtttagatctggctgtttccaaattgcacaaactgtcttgaactgaaatggacagaaggcaggcaaatactggtagaagagggcag

SEQ ID NO: 648668 - DNA, 533 bp, Homo sapiens
tttcacctgagatcttataagcctggccttcactgtccatccttctgtcagcctttcaatcacaactatttaacaagtctctgcaatggtccaaagtttccctcatcttcctgtcttcttccaagccctccgaactctataacctctggccattacctaattcagaacctgcttctacactgtcagctatctttttcgcagcctggcaatgtggtaaaagaagaaaattccattatcagggggaawcatcaagaaggcctccaatatctgcattgaaaaagctcagtgctaatagccaagagattgggggaaggcctagaagacatttcatagcttcacttcgcagcattaattttctgtatgtacataaagaaaagaggtttagttgactcacagttcttcaggctgtaaagaaagcatagtggtttctgcttgtaggaggactcaggaagcctcccagtcataccagaaggccaagcggcaatgaaatgtttcatatggcaggagtagaagcaagacagagagaggaaaga

SEQ ID NO: 648669 - DNA, 533 bp, Homo sapiens
tttcacctgagatcttataagcctggccttcactgtccatccttctgtcagcctttcaatcacaactatttaacaagtctctgcaatggtccaaagtttccctcatcttcctgtcttcttccaagccctccgaactctataacctctggccattacctaattcagaacctgcttctacactgtcagctatctttttcgcagcctggcaatgtggtaaaagaagaaaattccattatcagggggaatcatcaagaaggcctccaatatctgcattgaaaaagctcagtgctaatagccaagagattgggggaaggcctagaagacatttcatagcttcacttcgcagcattaattttctgtatstacataaagaaaagaggtttagttgactcacagttcttcaggctgtaaagaaagcatagtggtttctgcttgtaggaggactcaggaagcctcccagtcataccagaaggccaagcggcaatgaaatgtttcatatggcaggagtagaagcaagacagagagaggaaaga

SEQ ID NO: 648670 - DNA, 237 bp, Homo sapiens
tgctaactttattcaataaatgtgactaaactgacacatttaaaatgtctttaaaagctgcatttaagttaggttttagaaattgcatgttattgtcttataactgatgatatactttgagatrctttggcttactctctagttgattgtagtttagctgtggttcataccacatttttttttcttttttttgaggcagtgtctcactttgtcacccaggctggagtgtcatggtgc

SEQ ID NO: 648671 - DNA, 237 bp, Homo sapiens
tgctaactttattcaataaatgtgactaaactgacacatttaaaatgtctttaaaagctgcatttaagttaggttttagaaattgcatgttattgtcttataactgatgatatactttgagatactttggcttactctctarttgattgtagtttagctgtggttcataccacatttttttttcttttttttgaggcagtgtctcactttgtcacccaggctggagtgtcatggtgc

SEQ ID NO: 648672 - DNA, 395 bp, Homo sapiens
aggacggtgtggcacctctttcctctctcagccttgctcctactcctgctgtatgaaacatttcattgctgttttcctactggtatgattgggaggcttcctgagtcctcccagaagcagaagccactatgctttctttacagcctgcagaaccatgagccaattaaaccccttttcattatgatcatacagaaaataaagtactgcgaagtggagctatgaaatatcttcaatgacatttccccatcgtcttggctattarcattggacttcttttaatgcaaatatctgaaggcttcttgaagtttccccctgaaaatggacttctttttcttctgcattgccaggctgcaacaaagatagctgaaaatgtaaagcaggttcagaagtgggta

SEQ ID NO: 648673 - DNA, 176 bp, Homo sapiens
tttcccttccacatccacccccacccatccatgattaaatcactccctcccactccctctcatactcttatccctccaaacccttccaatctttgtttgctacccactactgagcctgcttytactttttcagatatttatttagcaggttggctatgtagcaataacaaaaatcc

SEQ ID NO: 648674 - DNA, 552 bp, Homo sapiens
tgatcaagcgagattcatccaaagaatgcaaagatgtttcaacatacataaatgaataaatcacatgaacgtaattaaagacaaaatccatatggtcatttcaatatatgtagaaagaatattggacaatttttaacattttcataataaaaactttcagcaaataaggtaaagatggactgtactacaacacaataaaaacaatatatgataaaccygcagctaacatcatactcaatggaaaaatgctggaaactttttgtctaagattcacaataagacaagaatgcccattctaatcacttctattcaatatcatactggaggtcctattcagagtaatttgaatgaagagagaaatacaaaagtatccaaattagaaataaagaagttaaattgtctctgtttgcagatgacataattttataatatagaaaaccctgaagacttcaccagaaaactgctagaactaatacagaattccaataaagttgaagaatacaaaattggcatgcaaaaatcagcagtatttctatacacaagagcaaacta

SEQ ID NO: 648675 - DNA, 552 bp, Homo sapiens
tgatcaagcgagattcatccaaagaatgcaaagatgtttcaacatacataaatgaataaatcacatgaacgtaattaaagacaaaatccatatggtcatttcaatatatgtagaaagaatattggacaatttttaacattttcataataaaaactttcagcaaataaggtaaagatggactgtactacaacacaataaaaacaatatatgataaacccgcagctaacatcatactcaatggaaaaatgctggaaactttttgtctaagattcacaataagacaagaatgcccattctaatcacttctattcaatatcatactggaggtcctattcagagtaatttgaatgaagagagaaatacaaaagtatccaaattagaaataaagaagttaaattgtctctgtttgcagatgacataattttataatatagaaaaccctgaagacttcaccagaaaactgctagaactaatacagaattccaataaagttgaagaatacaaaattgrcatgcaaaaatcagcagtatttctatacacaagagcaaacta

SEQ ID NO: 648676 - DNA, 570 bp, Homo sapiens
atatatataagagtttatttcttggctttctattctattctgttggtctatgtttatctttatgcaaatactacattgttttgattttgcagatttaaagtaagttttagaattaaggcatgagagtcttccaaatgttcttttttattcctaagattgtatttgattatttaaatttatatgagattccatatgaattttaggatagcgttttttctatttcagcaaaactaaatttggattttgaaaggggttgcaytgatttgtagatcactttgggtagtattggcatcttaacaatattaattttttcagtctatgaacacaaaacatctttccatgtattcatggtttaaaaaaattctttcagcaatattttgtagttcacaatgtaccaatcgtttaccttcttgtctaagtacattcctgagttttattctttttgatgctattgtaaatgtaattgttttcttaatctcctttatgaattgtttattgttaatgtatagaaatacacctgatgtttatgtattcacttaatatcctgcaactttgctgaatttatgtgtt

SEQ ID NO: 648677 - DNA, 635 bp, Homo sapiens
cttaaaacaattcataagaataacgaagtatatgtaatatatttgaagtactttaaatattcatttcgaccatttaatttatagtgacaaatactaccttactagttggaaagtacctcagtcggtacccaacatgtaagacaacagtcaagtgtgtattactgctgaaaacgaaaaaaagtaatcttaaggatcaaagtttggacaggccaatattcatatttggcctccctccttccctgctaaatgtaaggcttaattggagggatataacatactggcttactatcaaggacatattgggtcattgaaaatacacttcaaaaggccaaacaaaacaaagtcattgtaggactttcagacaaartctgaaagcccactgtgtaggcttcagacaaagacctcaagagatttaagttatgctgcaagttacacaaccctcaactacaaacatttatacatcatggttataaaatcctctcctactaaagatcttatggagcctgcagaaatacctccttaaaaatataagaaacacattgatttaagaatattttttccactggctaggtagcaagaaaagttttcctttgaagggaataaacagactttcatttttaaggataaagaaacac

SEQ ID NO: 648678 - DNA, 590 bp, Homo sapiens
acctttcaaattagactttccttttttcttttaaatcataatttttgtaattacgaagtaatttttacctcatacatcttatttctcatgtaattctattaagcaacagaattctatttagccttggctagtagtgacatgaaaataactggaaaaccagattaaaaaatgaatggcagacagacttcaatataatttattttttgatatcttgccctctatatcttcatacaagtgaattttttagacttttaatttcaggggtatgggtgcatgtttgttatatagataaattttatgtcatgggagtttgatgtacagattatttcatcagtcaaataatacacatagtacctgacaggtagttttgcagaccctcctcccaccctccaccctcaagtaggccccagtgtytattgctccctttctttgtgtccatatgtacccaatttttagcttccacttgtaagtgaaaacaagcagtgctggttttctgttcctggaggataatggcctccagttctatccatgttggtgcacaaggcatcaggctcattctttttaaggctgcatagtattccatgatgtat

SEQ ID NO: 648679 - DNA, 576 bp, Homo sapiens
ttacccctgctaacaattgttcttactacttttacagatttatataacaataagtttcttttgaacagtctttgaagctgacaaattaaaacataaggaatttaataaartctccccaccccaaaggcaaaaacctatgtcaacccacttcttgaaacttactttcaatgtactataatcactccagtatacattacattctaggttttcatagtcacccttactttaatttggcagaaaatccatgttttctttatttaatttccctcagggaagtgcttctgtcaggagcaacatactatttctaactctaaagtgggacttttaagtgatttatgctatcaatgacttcttttatttttcagaggctctgatatttctgtaattaacagctaaaaaataggatatttggatggaataacacattgaggccgatcaccaatgtgcataaaataaacatctattaattttattttctctacatctttaaaattcacacttatttcagagtctttctaattaacaacaaagacacctatgctcctattcatgtttgaaaatcacttcttatcatat

SEQ ID NO: 648680 - DNA, 508 bp, Homo sapiens
ccaggtgatttgtatgtttaaactgtgagaatcactgctttgaagctgtatagtactttattcttgaaataaaggcaaaaggatttcttttcatggacaaagcaatgctactattagctgaagagattagcagatgccttgaatatttgaaaaaaaattcaaagcaaaaaagggctggtgggagtgattaacatgttactgagtgccattgctgatatgcggtataataatttaatttgtctttttgttctttctctgtggtatataatgatgcatttttaaataatagtatattcaacacattgaaacacagtattgtctccaatatagacaaagatattgacacagagwaagctattagatgaatgcattttgtctataatacaagttatataggcataagataattaacaagagagaaaggaaatgttactctcctgatatattttggctgtgtccccacacaaatctcatcttgaattcccatgtgttgtgggagggacctggt

SEQ ID NO: 648681 - DNA, 508 bp, Homo sapiens
ccaggtgatttgtatgtttaaactgtgagaatcactgctttgaagctgtatagtactttattcttgaaataaaggcaaaaggatttcttttcatggacaaagcaatgctactattagctgaagagattagcagatgccttgaatatttgaaaaaaaattcaaagcaaaaaagggctggtgggagtgattaacatgttactgagtgccattgctgatatgcggtataataatttaatttgtctttttgttctttctctgtggtatataatgatgcatttttaaataatagtatattcaacacattgaaacacagtattgtctccaatatagacaaagatattgacacagagtaagctattagatgaatgcattttgtctataatacaagttatrtaggcataagataattaacaagagagaaaggaaatgttactctcctgatatattttggctgtgtccccacacaaatctcatcttgaattcccatgtgttgtgggagggacctggt

SEQ ID NO: 648682 - DNA, 610 bp, Homo sapiens
tctaacacttctcacactttccacaaataatttcacaagaatttcaggcataaatatctctatctgcctatgtatttattcatctgtctatccatcatctgtctttctgaacataatttgtcatgaaattagcagagtaaaaattcacatgatttgcatttctatataattctcttattcttgaaacattaaaaaatataaagggcatgcacatattgaataagggactacagaatggaaaatacactgcatgtcatttgtccttaagatactgaaacaaagaaatagctattttttaagtgtttaagctcagaagtgagggttgaygtattgaagaggaattttttgattaaaagccaatgttagtcttgtgaaaaagtgtgatgtgtactgaaaaaaacacaagcctgtaacaccttctttattaagctgctttttttttctcctatatttgtatgaaatgtggttgtgagaaatatttgtatttttaccaacggatgctcaaaatttatttcatgaataaatgaagttaggtttgaaatttgtttcctaatcctgtggacaacatagtcatcaaccttaaattttacatcaggaaaatatttggtgc

SEQ ID NO: 648683 - DNA, 416 bp, Homo sapiens
aatctatcgctctcacaaaatctttaatctttgttgaagtttttctttcttgttttttcttaatttttagctgaacacgaataagtacgtggaaccatctgttgcttgaatgaccaactcttgtctcyggtacaatcctttgtaaaattctcaattgtgtaatttagtgtggaagcaaaatatcactagctaggcttacaatcgttgtgctagttttcaacttaatttcatgccacaccaaaggacttgagtaaaaagttcatgtaatagtctaactatgttttaggatgtctttttgcaaatgccctgcaaaaagtaaaaacagaaattttaaaaaaggccgggcacggtggctcacacctctaatcccaacactttgggaggccaaggcgggcaggtcacttgaggccaggaat

SEQ ID NO: 648684 - DNA, 550 bp, Homo sapiens
cttttttacaccattagtcctacattatacttttggaacaataagaataataactagcatatattaaatgctgccagacattattctaaaagcggctgtagatcaatttatttatgttccacgtaaagattgtatttttcaggacagctataacaaaatttctcatcctacatgctcttataacatgatgtttacacccatctccatcccactgagaggcaggatccgtgttccctttccttaaatctgagtgaatctgtgactacagtgaaagtgacacaatgcaacttccaagactagatcatagggatagtgsagctttcacctggaactgttagaacatgttctcttaaaatccagccaccatgctgtgaggaagtccaggctgcataaagaagccacttctagctgttctagacaaaaatttcagctgatctgtatcaattatctatggttcctgataagttatttcaaaatttagtggcttagaacaacagcaattgctttactattatgtctcatggtttgaggggttgacttggcttagcta

SEQ ID NO: 648685 - DNA, 571 bp, Homo sapiens
gatgtaacatttcatcatactatataaaagagaaaaatcagagcaaaatrtaattgacagttttctgagtttcttttagtcttaagttttgaaattgtttttatctatttttatttatttatttatttatttacagacagggtctcactctgtcaccccgggtggagtgcagtggtgcaattatggctcactgtagtcttgatctcctgggctcaagcagtcctcccaactcagctcccaagtagctagaactacaggtgtgtgccaccacacccagctttattttttattaaagaaaaaaatgtgtagacattagctttcattatgttgctctggctggtcttgaacttccagcctcaagtgatcctcccacctttgcctcccaaagttctgggattaaaagtgtgaaccacctcatgaaactgtttttttaaaattgtcattataatacttgataacataaaataaacgaactaaatcaaacatctgaaaatgatgctaacgtagttgggtgctggctttaaaaagtccattatgtcctttaccaattatgttagttttctaaggtggc

SEQ ID NO: 648686 - DNA, 568 bp, Homo sapiens
tgcagtgtgtagagtcagatttaccttaaagacagatcatattttcttctttaaatcatcttaagaaaagaccgatccccagaaaggagatgagaatcagggaggaaggactttgacgagcagaaaaacaggttttcaactttgtttagcctctagtggtagtgccccaagaatttcaaaccctttaattaataaagttaatctcaaccctgccagatgaagcagtattttaattcagcatagcaacttcttagyaaacatccactcacttcatttaatgagtaaaatgctcctattaaatacactcttacagcaatatgtacctggattctaagctttgttctcaactaagttcaaatgattgcttagtatctgggtccccaattagactgtagatacttttcaaagaaaaaactaaaaccagaaatactttttaaaaataactgtagctacttaattaatgtgttaatctctgttagtttgtttgatggattatatttgcaagtagtatttgtaattagcaaaaggtcttcagaagacatctgttaactgcatatttctgtaacag

SEQ ID NO: 648687 - DNA, 558 bp, Homo sapiens
gttgtgattatatgcttatacaagtgttagtacatacatatatatttttattctcttttgtcacaggactggaagcaatgacatcctagtagtaacaagcacagccagtggccttatcttactttttaataatgtttttcatgagaaaaatcaggagaattggccaaatctagtagtgaaacagaaaatatacaaaattagcttccagtatatgatactggcagaaagtaagaaaattctcaacacacacatgcaacacaacaaaagtattatgtcgargggacaaagaaaccagatgaaaaaactaccaacagataaagctaaaatcatttgagcaacaagttaaatatagtagtattgtattttaacccaaaatataatgtaaattctatgagtcatgctgtgatagttaatactgagtgtcaactctattggattgaaggattcaaggtattgttcctgggcatgtccgtgagggtgttgtcaaagaagattaacattttaatcagtggagtgggtgaggcagacccacccttaatcttggtgggcaccatcttt

SEQ ID NO: 648688 - DNA, 578 bp, Homo sapiens
tataaaacctgccaaaacaagttcatagggctatagaagcaaagccaaaagactttacccagcaacttctacagttgcatccctagggacaggagaggggagaaggaaagtacaataatataatagggaaggaaggaaaaataaaaaatattacccacatgaaaataattacaaaagttagaagtggcagcatttccagatgagaaggaactagcacaagaattctggaactaagaatgaagtgaaaccaccaaagtaccacactggttctccaataatggtctctaaccaaaatggaaactgagaaataacagaaaatattcaaagcatggattgcaaggaagctcactgatctccaagacaggtttaaaatcatagaaactttttgatgcaattcagcaaatkaaggaattaaaaagaaatcacttaagggacttcaaaatacaattgaaagttttattaatacactggaccaagcagaggaaagaatttcagagcttaaagattcatcttttgagctaaacagtgagaaaaaaaagaaaacagaattttaaaaaataaacaaagtcttcaagaaa

SEQ ID NO: 648689 - DNA, 575 bp, Homo sapiens
agggaatggtgataggtcacagaatactattaattcatattcaaagcactactgtacagaagtatggtatctaataagaaggctgaaggggtgacatggtgggaaggaattcttatttgtatctaggttttatcatatttttacatattatttacctttccaacccaaaggtattttttctctacaataaaataatctttatcatccaatataaaaatatcttctattacttgattgtattttattttataataataaaagttccaaacaacacacttctcaatataatttcaaaatgttttatagttaaaatggcatatgccaaacratgccaaaagtacagataaaacctgctgaacaaaatccaatgccccataaaatatatttgtcataccaaaatcatgacatttataagcatacatgtgactaaaactctattaaataagattgacagacaatgcttgtcttagaagactagatagctatcatgtatagatgagtgcctttcaaacatggatatacttcagaatcacctggaaagcttttaaaatggtaatgatatctgaactccatca

SEQ ID NO: 648690 - DNA, 575 bp, Homo sapiens
agggaatggtgataggtcacagaatactattaattcatattcaaagcactactgtacagaagtatggtatctaataagaaggctgaaggggtgacatggtgggaaggaattcttatttgtatctaggttttatcatatttttacatattatttacctttccaacccaaaggtattttttctctacaataaaataatctttatcatccaatataaaaatatcttctattacttgattgtattttattttataataataaaagttccaaacaacacacttctcaatataatttcaaaatgttttatagttaaaatggcatatgccaaacgatgccaaaagtacagataaaacctgctgaacaaaatccaatgccccataaaatatatttgtcataccaaaatcatgacatttwtaagcatacatgtgactaaaactctattaaataagattgacagacaatgcttgtcttagaagactagatagctatcatgtatagatgagtgcctttcaaacatggatatacttcagaatcacctggaaagcttttaaaatggtaatgatatctgaactccatca

SEQ ID NO: 648691 - DNA, 621 bp, Homo sapiens
ttctgcatttctaataaactcccaggtaataccaacatggttcgtttatggaccacattttgagcagcaagtttttaatgtatattaacatgctgtggaggaaaataatgcacaatttctgggaaatctaattgcactgatatagacaggtcgtaagcattagaaaaataaaagaaaaagagatgtccatttagctatacaaaagcaatccctaattatcatgtgatacagtatcagtaaatatagtagtgtcagattaattttatcatactttattttaaaagtaaatctggccagatatggtagcttaaacctatgattccagcacattgggaggctaaggaaggaggattacttgaagccaggagttcaagaacagcctgggcagcaaagcaagaccctgtctctataaaaaacaaaaaaatgttttaaaaattagctgagcatggttctgtgggcatgcagtctcgsctactagagaggctgaggtcagaggatcacttgagcccaggagttcaaggctgcaatgagctatgatcacaccactgcacttccccatctttttctaaaaagagtaaattctatatataaatattaatattcatatatatggcttattgg

SEQ ID NO: 648692 - DNA, 564 bp, Homo sapiens
aatgtttgggggttatgaaatgttctatatcttaattggagttgtggttacctaggttcatagactggtcaaaactcaagccattttttcccttaaaaagtgactgcatttcctggtatgcaaattgcatctcagtaaagttaaaaaggaacacaaagcaaatgatgtctaaacttattttttcatctaaaataaaaatggaacaggttctctttcaagctgtttactttttatcactgatattttcatgacgcctcagtgaggtatgggtatctctgccactcaaatctaacgtatccaacatgctcttttcactaactaaaaaactgctktgccttttgtattatctatcttgatttgataccatccctcacagaaatttgttgtatggatattttgcatgatatattgaagcaaagggccagggcaagatcactaataacttctcaatgttggcaaaagtattcttgcattggatatgaggcttaacctagccatttctatttctgcagtaatatcaatagtggttgcctttctagacagttaccagaaaactgttgtgta

SEQ ID NO: 648693 - DNA, 415 bp, Homo sapiens
caggagtctttttttgtagagattgacaaagtaatattaaatttcatatggaaatgcaaagaactagaatagccaaaacaactttgaaaaaaagatagagtactaatactacctaatgtcaaaagttctaataattttattcagctacagtaatcaagacagtatagttttggtgtcaagttccacaaacacatcaatagaataaagagtccaagagtagacccacatgtatgtgatggagaagggacagtcttctcaacaagtaatgttgraataatgggatattcataagcacaaaaataaacaattcataactcattcatatataaaattaactcaagatgaatcatagacacaaacataaaacctcacactataacactttcagaaaaagactaggagaaaacttttgtgg

SEQ ID NO: 648694 - DNA, 535 bp, Homo sapiens
ttgcgtgggcgaatgctggcagctgtactgataggaaaaggctacctgggactgggcaggttcagaatggtggctccatcttccctgctctttgtcagccacgtgtacggtaagaagcagacaacatggccaccaagtggaaagcccatttgcataataagattagggtggggtggccagccttccccgtgtactatgtaaatgtcacccctgascaacaaatctgtgggccctatgtaaatcagacatcgccccctcaagcctgcctgtgaaatttggtgcagtctgccgcaggctggcttttccctttcggacaccgctctctctagcagagagagagctgctttcctttctctttcttttgcctattagtgcccaagctcctatactcactcctcctgtgtgtctgtgtcatttatcctcttggcgcgagaggacaaaccctgggtgttcaccacagacaatgacccgcttcggtattgtatccttcctccccacccacccgcgtctgaatatcctaagtccattttaccac

SEQ ID NO: 648695 - DNA, 574 bp, Homo sapiens
aaccagaatactgcacagcagtgaaggagaacaaactactgttacctgcacaatataaataaatctcatagatgtgaagtcaatcaagagaaggcagacacaagagggtagatattttacaatttcatttatattaagttcaaaataggcaaaactaatttgtaagaacaggtttagttggtgagaaatctgtggagcattgttgattttacaggcccaatacccascttttctctgattttgcagttgtctccatagcaatagtcacagactctaaaatgggtagcctcttcaacaaaagaaactgtcattctcaacagctgtctgtgaaagtgtgcaatgccctgttaaggaggcacctgcagagatgtggggcttttcctcatttagaggaattattttgcaaacaataatactaatacaacactggatgagaaaaccatgggaggcctcttataaccattgtcttgagggacagaactaccaccattcacttagaagctaacatttccattctgagagtttgtgattcatctgatgggaattggataaaggaaatggaaattctgatgaa

SEQ ID NO: 648696 - DNA, 579 bp, Homo sapiens
ataaattcttgttcggtcattacgggggaagatagcaggctgagatattaaatgatttttgtttgcccatttttaaagaaaatgttaaggagattctcatttgctaaatgtctttgtaaacagacaagagaaacagatgagaactattagatcaaatcgtggttattgtacaagatgttctatacctaatagataaacaagacgtggaagaattaccgggaccagatggcagctcttatgtcctgtcatatgtamcattttcctcttcaaaatagagatgaagcacaaaaatgtgtctgagtttagtttaattgcaagtagctggggaaagaatacataagtcaatttctaaggctgccattttgtaccactattgcatttggaaataaagacccaatagaaatgtcacctcatatcaaaatcttctataactttcataaccacaaaattcagtccaaaaacaaaataaagtatttccacacggaaccgatacttaatcatataataatcaaaataaagtaagcatttgcagtacatttgcaattaaatataatgccaatttacaatataaacacagag

SEQ ID NO: 648697 - DNA, 557 bp, Homo sapiens
ttcctttgaacatccacacatcctgcaatagtttcatatactgtagggttttgagtctttcagggccacggttctcgttgttcatgcagtattctgcgaagctccagcattcttaaattgattaatgtggcatctggcctacatatggacatcaggtttcagtttttaaaatttgcagtaagctttaaataataacaataaaatataaattcagacaaatagttatgtcagtgagaggcattatgctggttgccatccatatctctatgtggctccatcatgggaatcttgagctagacgtcacgtccacatctagtttcccttcttagtctttgtttctactaagttaaaaaaaattctatctaataattatagaacactgggaatgttagccagaagctrtaggctttgatagataaggtatagcaaatgtagtgcttcacatatgtcagactttttctaggggctttagatatattaactcatttcatattcacaacagtctatatgcaggtactgttattatgcctatttcacagatgaggaaactgagtcac

SEQ ID NO: 648698 - DNA, 619 bp, Homo sapiens
aaatttttatatcaataatttactgaaatcattatatgcacatatatatataccctataactcatacatgtgtgtgtgtcgtatgtattctcctacaattaatgaattccattcctacatctatacccttgagaaatattttatatatgtacaccaaaagacatgtgctcatagaagcattccttgttgtcatgaacctaaccataaataattcaaatgtctactaatagaacaaaaaaattatggtatttttcattcaatcaaaaattatatagaattgaaaataattatggcttctgtacaagatggagaaaatgaaaggagcaccactcccayccatacaataatttaaaacaagccagacagtgtgcaaatctaaaactggttttgaatccatagagaactgaggctgcagaacaaccaactaccgtagtgtccttttatccgtggaagataccttccaagaccaccagtagatactgaaactgtggatacaacctaacccctatacatactgttttttcctatacatacatacttatgataaagtataatttataaattagacacaaaaaagattaatagcaataactaataataacgtagaacaattatagca

SEQ ID NO: 648699 - DNA, 594 bp, Homo sapiens
tgtggtccacactttaagagacactgatctaaacaattctttgctcaatgatccaggaaagggatgcataatggaaatttgagaaaaaatctgagatttgaattttaaaccctagactttgaatagacaatgatttggaaatatactcaaagaactggaagcaagtcttcttttcctgaagggaactgattagagtttagatctggtgagagtccctgagaaatgagcctggattctgacaccttcgctatgagtcgggaatggagatatgggggaaccgacagctgatgagatgtaaaagtataagaaccctccmccccagtccccaggtagagccctgggaatgtgggaaggtgggaaaagcccagagaagatatggatacccggtgtgtccgagtccaagagctggcaaactattccttaaagggccagatagtaaacattttagcttttgtatgcacatggactctgtcacaaatactcagttctgtcatcagcacaaaagtagctacaagtgatatgtaaatgaatgaatatggctatgttccaataaaactttatttacataaacaggcagcaggccccgtttggtct

SEQ ID NO: 648700 - DNA, 660 bp, Homo sapiens
acaagtaaaggcaggtgagaactctgatgacagggctccatttgtctagggctactgcgtgctgtgttggccatgggcagagctcccttcacaaggaggaggaggaatgtgttctcttagataatgccaatggatattgaccactgattggccccaactagcctctctgtttctactctctgctctttgtatattactagctttgttcctgcttttctgaataccaggcctgcttccatgtagcacacagctctgcttcctccctggtacccagttagatttaagcctcacttcagatcctcaccgctattgttcactgaacacaggtctctaggtcttgcctagcaatcagctgttttttgttactcctcctgggcagagcctgcgtggccttagcaggcagccattctcagttgtctttacctggtctggttaacctaggtctggcaagctgcccgtagggtccagcctggcctgccctggccttgtctggccttggcactkggtgttgggggtgtcccacagctttcctcaagggacagcctgtacctgagttggcccaagccgaaaaggaggcctcctcttccttttctggatttgtggttcgctagttattccccaaccctaccacagttgccttggcagcaacacaccctgggg

SEQ ID NO: 648701 - DNA, 594 bp, Homo sapiens
tccatgatgatgtaccaatttgctctgattgtctcataaagcaccattttccttccccatatattatggagcagatggctctcttctcaaaggaagctgtgccattttaaaacttttcttcccatgcaggatgagccactggctaaaatggtgagatcaccacccatmcagccatgctattataacccaggacactcatgtaggattgaggcctggaaagttaactgcatgattcccaggtgttagggctacttaccaagaatgcctgcttaactttgaaaggaaggtttccctgggaacatacatcctggtgaacaggatcaggtgttgcttaatagatattatgtagatacagagtaaatgtcaggcttacatagaggagttggctgctgaggcaaatttgttcttcagccttggccagcaacccagaatttaagggaggagtcaaggccggaagccacgtgcattgaggatctaggaaaccacccacagagtcatccttcttccagactcagcctcctcagacaaaaaatcccactctgttcccaggccggagagcctcctgggctggaattgctcaagcctcagctcaca

SEQ ID NO: 648702 - DNA, 594 bp, Homo sapiens
tccatgatgatgtaccaatttgctctgattgtctcataaagcaccattttccttccccatatattatggagcagatggctctcttctcaaaggaagctgtgccattttaaaacttttcttcccatgcaggatgagccactggctaaaatggtgagatcaccacccatccagccatgctaytataacccaggacactcatgtaggattgaggcctggaaagttaactgcatgattcccaggtgttagggctacttaccaagaatgcctgcttaactttgaaaggaaggtttccctgggaacatacatcctggtgaacaggatcaggtgttgcttaatagatattatgtagatacagagtaaatgtcaggcttacatagaggagttggctgctgaggcaaatttgttcttcagccttggccagcaacccagaatttaagggaggagtcaaggccggaagccacgtgcattgaggatctaggaaaccacccacagagtcatccttcttccagactcagcctcctcagacaaaaaatcccactctgttcccaggccggagagcctcctgggctggaattgctcaagcctcagctcaca

SEQ ID NO: 648703 - DNA, 547 bp, Homo sapiens
ctgcctaggctggagtgcagtggtgcaatctcggctaactgcaacctccacctcgcgggttcaagcctcccaagtagctggaatcacaggcacacaccaccaaccccgtctgatttttgtatttttagtagagacagggtttcaccatgktgtccagaccggtcttgaactcctgacctcaggtgatcctcaccacctagcctcccaaaatgctgggattacaggcgtgaaccacaatgcctggcctcttacaacaatcttataaggaaaggaagcacacctaatgagtttaactttaccaattaaaaactcaggatttgaagactgtgatagactaacccaaggatacacacttagcaagttgctaatccaagacttgcacaagtccttttagcatctgttaaaaatcctctacattgttttccaaagagatttgttctaatgattataataaatcttagttcttattgagtgttctctctttcccagacattgtgacaattcatgacatatatcccctctttaatcctacaatgtaagtaccatt

SEQ ID NO: 648704 - DNA, 558 bp, Homo sapiens
aaaactccctaataaactttgstatatgggctgacataatggacttattcttctactacaatcaacttatctcttgattagtttccccttagcatttaactcagcacgctttctaaatgtcaggcatgtaactgtgtgagtggggtatgttatgatgaataaggcaagttttctatctttaagggtctcacaagctggtggggtgattggggcaagagacagagacaaatatatagacaagtaaccataacatgaatcagatgaccagcagtgctatcccatgggcataaataatgctgtgggagtttggaggaggtagccctgagtttttcctgagagcactgtggaaggcttccaagagaaaatgacatttgagttggaccttcaaggagtcatgggatttctcacggagtcatgaaaaatacagagccataaggccagagtgtgggtgaggtcagggcattggtaaaaggtggactggaaaggtaaaacaggtccagattctagagcactttagtggggcattcaattacaagaagggcaggataacagcataca

SEQ ID NO: 648705 - DNA, 651 bp, Homo sapiens
aagttttaaagcaggaatgaaaggaagtaagaagcgggccaactgggcaacttcagagatcaagtgtgtggtttgaccttttgacttggagttttgtaygttggcattcttctggggtcttgtgtcccttctccactgattattctcttgggttgggctgtccacatgtgcagtgacctgctagcacttgggaaatgagcatgtgcagtgtgtttattggagttggatgcatgctcacttaaggtgttcttctctttccgatagaaggatcctagaaggtcatataccagttaaactctaccatttgcctcttaatgcacatgcttgagcccactcacccaactcctgagatcttgttgggaagctgctgatcaccagattcagtgtttctatctattgggagtctgcctttccctggcaccagctgtgatcaattattatgttagagagacagctaacaactgcctgatcatcacgtgatagtggtgtaacatttttggtgtgtgtgggagtagtgggagctttctcctgccctgctcatgtctgactagttacctactgtaacagtatgaacaatgtggcagatccaactatgctcactgtggcaggttctcttaaaggaagtctgagtggcactcctccatggccacc

SEQ ID NO: 648706 - DNA, 631 bp, Homo sapiens
ccatgttgcccaggctgctyttgaactcttggcctcaaattattcacccacctcggcctcccaatgtgctgggattacaggtgtgagccgccatgccagacctattgtaactttttaacttaaaaatagtgagagagattcttttagggacaaagttattctctggcatgcccgtttgcatattcatgtacaattatctaaaaattgctttctagtgaccttatgaaatgattggaccttcctccaaggtaagcacttagaaacttgatggcttatttatttatatggggacaaatgtttatcaaagtacgctttgataaactttggacatatcctgggattatttcctacacaaaataaaatgaatctgacacacagaaatgaaattgattgcaaacagtcctaagggcaaggctattattcaccaacaggacttttaatgactgttatagaacaatagttataaaaactcagagagatatacatgaattcacaaatatattttgaaccaaaagaaccaaaatcattctctgcatgtatttttgtttaatcttacgatatatatatattcgaacagtacttaaccaagatgtaatcctatcacttatttcaggagagaagaaataaaagg

SEQ ID NO: 648707 - DNA, 430 bp, Homo sapiens
ccacagagtgctcccagtaaatctgtagacccagcctccacctgaacccctgccttacatcaggtcttcatctcaatctgttgggaatccttctctgagattttatagtgtaattgctctttgatttgayaacagaagttaagcctataccttttcataatcaccttatccagaacatatccattatgcaaaggaaggaaacttgtagagcaataatggtgttttattttagttgtactagatgctttcacttatattatctcaactggtcctcaagataaacctctgtgatgggtgctgtccattttagaggtgaggaaaatgaagtcttagataaattttataacattttatttggaatcttatgtgctcgctcgctctctttctcttcccactccccttcaccccccatagtattagaaaataagaa

SEQ ID NO: 648708 - DNA, 633 bp, Homo sapiens
ttttaacttgcttcttgtgttatttttttatgcacagggttttccatgtgtttgttttgtctttcattggggcttatgtttgtaataaaattcttcaatattctcccttattgcttctacattttgagtcatggtcaaaaagttttactcactttcaggttataaaagaattaacccacattttcttttagtattcattttattgcctcttttctttacctctctgaccccttcataaattatgttagaatatcttttaagaataaacccaactgtatcttttttcccatattattaccaacttatcctaatcttacttattaaaaagtctatgtttttcaaactgattttagacgccatcttcattgcgtactttcgcttgcacttctgaagtttctattctgttccattgttaagtctctctattcatcttgtttaactcagaccttaattcggaacactatttttcttttcctgctatttctctatacagctactaccaatagtaatgcaatgagttacatttttaaaaatgaagygcattcaccaatgttattttatttttatcatatacctacaatgtaggtgggaagggcaccttttgcagactagactctggatgctttgcctctg

SEQ ID NO: 648709 - DNA, 591 bp, Homo sapiens
cataaacccaaatttcataatgttgcttcttgtagggtctgtcaattcaagctttacattccaagttcactacaagaaaaacaaatgtactaaaagacaaaaacaaggcagttcaggctctctgtaactgaccaggggtaagctctcaggtactttgtatctttacattctctcatttcataagtcttaccatatatatttcacataaatatttggaaaagtgtttctcctactagcagagttagccacttactcacgctcagctccaaattcaccctttttgcttgctctgtgaaaatggttctgagccactaaagtattttcgctttgctaaatgttatgatattaagctttgtcagtaaaggccactggtgagatactgcacaagtgttttgcttcctgytctagacaggttcctgcagggcagacagctcccccatactcccaggctcctgcagggcaaggcagccaggggtgcctggcacccagcagctgcctcctacagtctctcttgggcactgggtgcaaaggctcagtgcctcctgggaaatacattcccacaaacagcttcccttgtcaccttagaaggaa

SEQ ID NO: 648710 - DNA, 606 bp, Homo sapiens
aacaccgtgcactatgacattatggcagctgtggtgtcaccaggtgttaggaatttgtcagcttctttataatcttatggggtcactggtgcatatgcgatcttttgttgaccaaaatgtcattatgcgatgcgtgactgtcctatataattcatccacttaagctgaacacacaatccaaggctttctcagtgttttcatagggtggtgcaatcaccacygtagtctcacttagaagattggtgtccctccaaaagaatctcagtatctcttagctttattcttcctctaccttcatcccaaccttcaacccaggcaaccactaatcagtgtcccatctctttggatttgcctgttatggacatctcctgtaatggattcatagactatttggcctttttttatctggcttccttcacttggcatgacgttttcaaggtccatccttgttctaggattcttcaatactttattcttcttcagtgctgactaatattccattgtatggctatattacatattgtttattcattcatccattgatagacattttggttgcatctacatttgggttattataaataatgctgctctaagcattcatgt

SEQ ID NO: 648711 - DNA, 606 bp, Homo sapiens
aacaccgtgcactatgacattatggcagctgtggtgtcaccaggtgttaggaatttgtcagcttctttataatcttatggggtcactggtgcatatgcgatcttttgttgaccaaaatgtcattatgcgatgcgtgactgtcctatataattcatccacttaagctgaacacacaatccaaggctttctcagtgttttcatagggtggtgcaatcaccactgtagtctcacttagaagattggtgtccctccaaaagaatctcagtatctcttagctttattcttcctctaccttcatcccaaccttcaacccaggcaaccactaatcagtgtcccatctctttggatttgcctgttatggacatctcctgtaatggattcatagactatttggcctttttttatctggcttccttcacttggcatgacgttttcaaggtccatccttgttstaggattcttcaatactttattcttcttcagtgctgactaatattccattgtatggctatattacatattgtttattcattcatccattgatagacattttggttgcatctacatttgggttattataaataatgctgctctaagcattcatgt

SEQ ID NO: 648712 - DNA, 606 bp, Homo sapiens
aacaccgtgcactatgacattatggcagctgtggtgtcaccaggtgttaggaatttgtcagcttctttataatcttatggggtcactggtgcatatgcgatcttttgttgaccaaaatgtcattatgcgatgcgtgactgtcctatataattcatccacttaagctgaacacacaatccaaggctttctcagtgttttcatagggtggtgcaatcaccactgtagtctcacttagaagattggtgtccctccaaaagaatctcagtatctcttagctttattcttcctctaccttcatcccaaccttcaacccaggcaaccactaatcagtgtcccatctctttggatttgcctgttatggacatctcctgtaatggattcatagactatttggcctttttttatctggcttccttcacttggcatgacgttttcaaggtccatccttgttctaggattcttcaatactttattcttcttcagtgctgactaatattccattgtatggctatattacatattgtttattcattcatccattgatagacattttggttgyatctacatttgggttattataaataatgctgctctaagcattcatgt

SEQ ID NO: 648713 - DNA, 555 bp, Homo sapiens
ggatgtttaccctatgcctgtctcatcattgtattttggaaatatataacttgttttgacatcacaagctcatagctggagggaatttgcgttgggataaattgtgccttgagtctcacccatatctattttaaatgagactctggactttgtacttttgagctgatgttacaatgacttaacacttttgggattattgtcatrgaattaatttattttgtatgtgagaagaacattttgaagaatgaggcacagaatgctgcggtttgaatgtcctctccaaaactcatgttgaaagttaatttccactgtaacagtattgggaagtgagatttttaagttgattaggtcatgagggatctgcccctatgaacagattaatgctgttatctcaggagtgaattagttatcatttgagttaatgcctagtaaaaaggatgaatttgtttatatttcttttctttgtctcacatgcttatttgcttctaccatgatataaaaagccctcaccagatgttggtagcatgctctttgacttcccatcctccagaacta

SEQ ID NO: 648714 - DNA, 555 bp, Homo sapiens
ggatgtttaccctatgcctgtctcatcattgtattttggaaatatataacttgttttgacatcacaagctcatagctggagggaatttgcgttgggataaattgtgccttgagtctcacccatatctattttaaatgagactctggactttgtacttttgagctgatgttacaatgacttaacacttttgggattattgtcatagaattaatttattttgtatgtgagaagaacattttgaagaatgaggcacagaatgctgcggtttgaatgtcctctccaaaactcatgttgaaagttaatttccactgtaacagtattgggaagtgagatttttaagttgattaggtcatgagggatctgcccctatgaacagattaatgctgttatctcaggagtgaattagttatcatttgagttaatgcctagtaaaaaggatgaatttgtttatatttcttttctttgtctcacatgcttatttgcttctacmatgatataaaaagccctcaccagatgttggtagcatgctctttgacttcccatcctccagaacta

SEQ ID NO: 648715 - DNA, 475 bp, Homo sapiens
aaccaagggccactcgaatcaaaaacatttgggaatccctgcattacgttatgccacctaagatgtggaagctaaaacatggaccatccaagtatttgttccctaagctggctcacccccctcattagaagcaatgtgtgtttattcacatatccattcaaccaatacatgttgaacacttactatgttccaagcactgtgcagatgggggcatatagcagtgaacaagacagcagagtccctgccccgwtgagtctgctgggaggaaagacagacaataaacaggattaacagtaagcatgcatcctattagattgtggtaagtgctaagaagagggggacagagcaggctaggggataggaaatgtggagggcagggaggaggtgaaattctagacaaggtgaccagggaaggcgtccctaagctgacaatttggtaaagacctgaaagaggtgagagaactatcaaccactt

SEQ ID NO: 648716 - DNA, 558 bp, Homo sapiens
caaagggtttgaagaggcattttttcaaaagacgatatgcaaatggtcaacagctcaaaaaaaatgctcaatatcattagccatcagggaaatgcaaactaaaaatcacaagacaccagttcacacccactaggatggctaccatttaagaaaaaaaaaaaaaggcaaaaaaaaacccagaaaataacaagtatggcaagaatagggagaaactgaaagtgccatacattgctggtgggaacgtaaagtgattcaactgctttgaaaaatgatttggcagttcctcaaaatgacaaacrtaagagttaccatatgacacagcaattccacttctaggtatacaccgaagagaattaaaaagataatccacataaaatctaatgttcacagcaccattattcctaataggcaaaagtagaaactattcaagtggccatcaccttatgaacagataaacaaaatgcagtatatgtccataaagtaaaatatgatttggctagaaaaaggaataaaatactgatatatgaaataacatggatgctataacttggacatatc

SEQ ID NO: 648717 - DNA, 449 bp, Homo sapiens
gcctttttctcttctccgtgacctttgctaacagaagaccataatattttcagaggcaaaaaagggttgctttatttgcctaaagcaatctatagattggggaaacacagcctttgggacaaagtgaaagtgtgctccaagaagaggttggagagtcggagattataaaggcaaaaaactgcaaggccatgaagggggatctggggagtaagtaacagaatgttgattgaaccttgaaccttaggtctaaaacctaagtatcttttattggctgactctagttggtcagctggggaatttctgggtatagtctttyggcatcaatattcattgatgaggggaactagtttggcttggttgcagaaagggaaattttgtgatatttttgcaacatttttccagaacacagaggtcatgactgcccctcgtcctgctatgactgcctcgtt

SEQ ID NO: 648718 - DNA, 588 bp, Homo sapiens
tttacagttttttaatatagaatacctggcagtcaataaaaaaaaacctgttccatgaggagacaagaagagagtaacataccctgaaataaacaattaaaaatagggcatattaataggttataaatgaagatagcgggattattatcatcattctagatagcagagctataacaaagtttaaaaaataacgatgctgatgtacagattcaatgcaatccttgacaaaatacaaatgaccttcttcacaaaagtagaaaaaacaaccctaaaatttatatggaaccacaaaaacccagaatagccaaagctttcktaagcaaaaagaacaaaactggaggaatcacattaccgaacttcaaattatactgcagagctatactagcaacccaaacagcatagttctggcataaaaacacacaaaccagtggagcaaaacagagaacttagaaacaaatagataacgtctacagtgaacttattttcaacaaaggtgccaagaatgtacattggagaaaggatagtcccttcaataaatgctgctggggaaactggatatccatatgcacaagaataaaactagaccct

SEQ ID NO: 648719 - DNA, 637 bp, Homo sapiens
tcttaaatatatctgatattgctactctctagcttaaaactcatcactgactagaaaaaggacaaacattttattatagcttacaaggtcctctatgatcttgctcttgccttgtcaccagctttatctccaaccaaattttcctccaaacaaccccargccttgacaaagattggtcacatctaccaaactctagacggcctcttctgaatcctcttcccaaccaggccctgacttttgggctctgtgtttttctctgccttgtccaattatagcaagaaccctgctaagtcagtaagcagaggcccccatcctcaatagctgatcaccccatcccccaggtgatgtctgattaccatggccatcttcagcaagaatcttgttaggttgatttagccagaatccttcttacccctgatgtttcttgttagtcattttccatccactgatctctctcccctgctcctttgctataaattcccactcttccttgttgtattcagagttgagcccaatatctctcccctgctgccatatcacactacagtggtgccctacacctatcacaactgtcctaaataaaatctgccttaccatctttaacaagtgtcatgaattttttcattaacagcctcac

SEQ ID NO: 648720 - DNA, 554 bp, Homo sapiens
atattcttctgagtgtactgtatgtatgcatattaacttgttcaatctgtatcaccctctaaggatgtaacattattattccaaatttgaagttaaagaaactgagattttaagtaatcaagttcattggcataattgaaaggttaaaataagaaaagtcatttcaaaattamaatattgtcaaataacaaaatcaatacaaacttgatgttttttttctgttgaatgcatttcatacaaagtagacttaatacaagaaattttttatgcaggttttgaaagactgaacatttttaggacaagtaccaagatttgaaccctattagtctggctgactttcagtgtgtgaacttatacctacgtcaccacagctaccttttatgtgtttggtttaccacttcttttaaaaaaaattaaattatattaaatttaaatactattttcaaatgcttactttttacttgagaatgactctgctctttgatttcttgcatttttctggaaactctccccaaattaaaatgacaactctatattttccaaaatcattgttt

SEQ ID NO: 648721 - DNA, 599 bp, Homo sapiens
gggtagggccatcctacagtaccagtatagaaaccatgtgttaaattgtattatttccgaagttttcatcacctttgagtatttgtagaactattcagaaaaatcttcatcaacagtaaaatttggcgatgattactttgtaactcaaatattattttcrggccgggcatggtagctcatgcctgtaatcccagtactttgggaggccaaggtgggaggatcacttgagcccaggagtttgagacccgcctgggcaacatagggaaatccccatatctccaaacaaacaaacaaccatacaaaagaaatatgattttcagagaggattgaattgctaaggatggctacaatgaaaaaaaaagtacatttagaaagaataacctgttttatgaaatgaaattaaatattagtgtctgttcctgcctcatagaagattatggcaaaagttttcacttttttggtaacctaaaaatataaggtggatgaaaaaataacatttaattttaacctctaagaaatctcttagagacacatatcttggtcaagaagaattataacagtataatatgcatgcttttgcatgataaatagcgttttta

SEQ ID NO: 648722 - DNA, 314 bp, Homo sapiens
acacacacaccatgtatttttaaatcatgatgtgttgatgaggacttcatttgtttccatatgctgattgttgtgaataatgctgcagtgaacataggcgtgcacattcatatactttttgtgtatgtgtttctctgtattaaatgaatacaaaattgattgctagtattaaatttgtggccayttaggtgatttttatcattttgctaattcacacttttctggcagatgatcacttctcatttattcaagctatttgtttgctggcagatctacccagagcagtttgtctctcaccttcttatttgtttatt

SEQ ID NO: 648723 - DNA, 606 bp, Homo sapiens
attcctcccttcaaatgaagtccttctgtgctcctctcttgaaatctgtgaattatggggagcttgagaaccacccccaccccaccagtctcatgttcccaatcacatcaatcacatttctcttgccaaggacataacaaaagacaatatctacagagccagtaggaatacaataaaaattggcaccacatgtcacccaggatctctgcctgtctttgaggtgagctacagaaaaatccaaaaggtcaatgcagtctttttagaactctctttgcccctcacccacaagcctgttttccaaacacctccatgcagggaaactcttcacatgaaggtgctgcaagcatccccaccatgtcttggcctctgaacaccatgtcctcactggattaggagggccttgtaattcctactatcagtgatccaagctgtattatctggatatctatgaagattaaaagagcctcatcaccttgctaccagccatagcaagtcagtgtgaaaggccaaaactcagacrtgaagccatcccttaaaaaacttggctctggccaggcgcagtggctcacacctgtaatcccagcactttgggaggctgctgcaggc

SEQ ID NO: 648724 - DNA, 437 bp, Homo sapiens
tcaatgggacacatactctatgattctacttgtgtaagaaatttgaaacagtcaractcaaagaaacggagagtagaatggaggttaccagtggctggagaatggaggaaattgagagttgcttttcaatgagtataaagttccagtaaaaataagatgagcaggtttcagagcactgctgcacaacattgtggccatagttaacaataatgtatcatacacttaaaatacttttaaaagagtagatctcattttatgttcacttatacaagacatacttccaagatattgcagatttggtcccagaacactgaagtaaagtaagtcaaacaaaattttctggttttccatggcatatagatgttatgtgtacactatactgtagtctcttaagtctgcaatataaatatgttacaaataatgtacacactgtaatg

SEQ ID NO: 648725 - DNA, 437 bp, Homo sapiens
tcaatgggacacatactctatgattctacttgtgtaagaaatttgaaacagtcaaactcaaagaaacggagagtagaatggaggttaccagtggctggagaatggaggaaattgagagttgcttttcaatgagtataaagttccagtaaaaataagatgagcaggtttcagagcactgctgcacaacattgtggccatagttaacaataatgtatcatacacttaaaatacttttaaaagagtagatctcattttatgttcacttatacaagacatacttccaagatattgcagatttggtcccagaacactgaagtaaagtaagtcaaacaaaattttctggttttccatggcatatagatgttatgtktacactatactgtagtctcttaagtctgcaatataaatatgttacaaataatgtacacactgtaatg

SEQ ID NO: 648726 - DNA, 631 bp, Homo sapiens
aacatattggctatatttttctgccttcagaaatgtcctataagagaaatgaacctacatcagagtgaaactaaaaataatggaaacataactgtgataaaaacaggcactttgaatgctgtacwtctcatactttggaatcttgctggatgaaaaaagtatatttttgtaccaccctacagtaagcgggagatataggaaaactggagctcaacaggaggtaaaactgataagattggacaactagttctttccatgcacatcgtattagaaaaagagttccacaggcaaagacacgaaactgtggatttgctgagtggagttagtgggttggagaactggggagagtcaggtggtccaggctaggactgtgacacccccctccactgacagtaacatggttggtcaaactgtcacctaattcaccttaacttagagaccttatgcccaccaaggtagaagaatactaaccagagtaagatgcctgccagcaaatgcagaaataacagtggtgcgttttatttgaaacaaatttctaattttcatagggagaggccattcagctaaaaaaaataagaaacctttggttttaagacagtgtccggtcagatcactaactatggtgatcagg

SEQ ID NO: 648727 - DNA, 589 bp, Homo sapiens
ttcttctagagataaaaagtagtgtggtaattttcattctggttaaattaatcttactatctttccttttgatttacacagattccaatgtgactatggtagacctactttctgcatacagaagagtcaacattacctgataaccacaaaaaatactatcctctagcccatgaaactggacagggaaaaatatactttctagaccttaagataactgcagatagataaagtctcaattactgcaggtcatgacaacacaaagaaattgcttcataaagttgattttacagaagaactaaaacaactgcctaatagaytgtctatattatttaaagctttcattgtctttggatgttaagtcaatggtgggggagatacccaaatctaaactatatcatataccagcttttgtatttgtttttgcatgtgaatgcaaaccttagaaaaataatcatatataaaatggttctgtaaagaagattctcagggacttaacaatattaagtttctaatcatagtaaaggttgtaattgtgaataactaagagattatacccacccaactcactctacttttagagggagaaaaa

SEQ ID NO: 648728 - DNA, 373 bp, Homo sapiens
actgtgaagtaagcaaagttggaatgcccaagtgaaagaccatttgaatatttacaagtagatttcagacaggaatactacagggtggtcacaggataacaaattctaggcagcagatttacatgacttgaggctgtgggctgttaagacgctgaaaaaccagggtgtggaccaagctggctaaggctgagtggacccaacrtggtgctggattggatggaggttttacctaggccctcattatatgctcattaacatactaaatcacacacccgccagtgccatgacagttctgagaccagtgtttgatgtaaaaatggcaccacagttccaagaaatctccacctttacccaggaattttcgtgaacattc

SEQ ID NO: 648729 - DNA, 616 bp, Homo sapiens
tttttacttttcaaataaaatgcgagaaatgtttatggcaggagcaaatgtcttcattttgatgtattaaactgcaatttctacaaatacctcagccctactgatttcctatacttaagagctcagagtgcagtgcatgggtatgcctgatacattgtatattttcataaatacattccctttttgataagtatattcccttaaattaataacatacccctgcttcatgggttttttggtttgtttgtttgtttgtttgtttgtttgttttgagacggagtctcgctctgtcycccaggctgggatgcagtggcaccatctcggatcactgcaagctccgcctcccgggttcacgccattctcctgcctcagcctcctgagtagctgggactacaggcacctgccaccacgcccggctaattttttgtatttttagtagagacggggtttcactgtgttagccaggatggtctcaatctcttgacctcgtgatccgcccctctcggccttccaaagtgctgggattacaggcgtgaaccaccgcgcccggccccctgcttcatgtttgagaggaaaatctaatttgtttatactaatatttagagcacgcttccgg

SEQ ID NO: 648730 - DNA, 429 bp, Homo sapiens
gaaggggtcttcgggatcccgagaggtccacagagcacatttggagaaccactggtttatacacaggcacaatgcattagttttacaaagtttaaagttcctcaaagactggcctcttaaaaaggtagatgagtttgtcattcagacaacagaaaatacataaaaacatcatgagagtatactacagagaactaaagagaaaggaagctargaaatctgaatcacatttacatttattaaagtttactactactgctttgtagaacattcttgtgtttcaatgtgtggttagaagagtgaaaatatgtttggtttattgccatggcctgttagggagagtcaatactcatgggcatttctgactggttatcatataaaaggcttcacggtacagaccatgatgtgctgagaaagaagaagtcaggaaac

SEQ ID NO: 648731 - DNA, 579 bp, Homo sapiens
tcttgggaggctgaggtgagaggatcacttgagcctaagaggttaaggctgcagcagtgaggcagtaaagctatgatcgcgccacggcactccagcctgggtgacagagcgagaccccacctctttttaagaaaaacaaacaacaaaaaaattggggttgtatttttaaagccagaaagaataaaatacgaacattagcttccttggctgtgattgaactctttctaaggtaaaatgtagatgctgggaaacgccagtgaactagtgattcttgttggtcgggtttggttgatagcagatttactttgtttttctctggcaagaatgaggattccaaacaayttgtttccttgggttctagatggaagtgcctggagcctgcagacagggtctctccaccccagctgctggtccaacctgcctcgcagggcgtgacatggctgttgtcctcactgccttgtactctgcctcaccagtcccagtgagtacagtgaaccagtgcctcctccattcctgtcttcccccttcccacgtgcccactcagttgaggtcattttctgcacaaacgttgtgctgtgt

SEQ ID NO: 648732 - DNA, 625 bp, Homo sapiens
agtattttacaatgaaaagcctttgatagccacggacactcctaatggtttcccagagggagacacggagggggacaacactgccagatgcgattcctttggtcctgatggcatgggaggaaaccatatgcataacttctactctgcaacactcttttatcatggtgtgtccatagcatctttctctttgtaattcaagccattagtacagagggattcagcatctgtggccrtggggacactgttggcagcttgccagagatgcaaagaagccacacacagagcccctcagttactgtactgccggtgctgcagatgggaaaggggtgtgaaggtgggaagatggcccctgtccggaagctgtttgcagtctactgggagggataatgggtgttcacacaaacacggacaatgcaagggtactatgggaaaaagccatccatctgcggtaaacaaagggccctaggatctcagaggaatgacatgagagttgacgggtcctcagggaaggctcgatggagcgcaggtcttgggtagcctttgaagggtaggcagactttggtcctctgggtggactggagggaggtgacccatggcctgcaaaagatggttctcatgctcagtg

SEQ ID NO: 648733 - DNA, 581 bp, Homo sapiens
aatgcatacttatctatttcaatgaattgaggaaacatgctgagggtttttatttcacagtgtggccaaattatgcttcgctgtttacatcattgaaagaactaaaagggttttcctatctgagattaaggcccaatatctcacttgaacccataataactagaaactagggagataagaaaatcttatactgggattgaacaaataagtaaattgatggtggayagtgggatccaggtttctctctgctgagaggttatagataagttggaagtcagaatgaaacatgtggtgtgggcttggggtcaaagacatcagtgtaaattcatctttaacttaaaatatatacagatagataaatacagaaatgattttgtatatgtgtgaacacatgggttagtatacatacatatatttcctagctctgccctctgagaggaccttctagaagcaataacatcccaggatgaatgagcacacccaatgcccagatcttggtttctaacaccattctccaatgaaaggaaccagggctccttgagaaatggctgactctaaggctgagacagagaatatacaaa

SEQ ID NO: 648734 - DNA, 581 bp, Homo sapiens
aatgcatacttatctatttcaatgaattgaggaaacatgctgagggtttttatttcacagtgtggccaaattatgcttcgctgtttacatcattgaaagaactaaaagggttttcctatctgagattaaggcccaatatctcacttgaacccataataactagaaactagggagataagaaaatcttatactgggattgaacaaataagtaaattgatggtggacagtgggatccaggtttctctctgctgagaggttatagataagttggaagtcagaatgaaacatgtggtgtgggcttggggtcaaagacatcagtgtraattcatctttaacttaaaatatatacagatagataaatacagaaatgattttgtatatgtgtgaacacatgggttagtatacatacatatatttcctagctctgccctctgagaggaccttctagaagcaataacatcccaggatgaatgagcacacccaatgcccagatcttggtttctaacaccattctccaatgaaaggaaccagggctccttgagaaatggctgactctaaggctgagacagagaatatacaaa

SEQ ID NO: 648735 - DNA, 581 bp, Homo sapiens
aatgcatacttatctatttcaatgaattgaggaaacatgctgagggtttttatttcacagtgtggccaaattatgcttcgctgtttacatcattgaaagaactaaaagggttttcctatctgagattaaggcccaatatctcacttgaacccataataactagaaactagggagataagaaaatcttatactgggattgaacaaataagtaaattgatggtggacagtgggatccaggtttctctctgctgagaggttatagataagttggaagtcagaatgaaacatgtggtgtgggcttggggtcaaagacatcagtgtaaattcatstttaacttaaaatatatacagatagataaatacagaaatgattttgtatatgtgtgaacacatgggttagtatacatacatatatttcctagctctgccctctgagaggaccttctagaagcaataacatcccaggatgaatgagcacacccaatgcccagatcttggtttctaacaccattctccaatgaaaggaaccagggctccttgagaaatggctgactctaaggctgagacagagaatatacaaa

SEQ ID NO: 648736 - DNA, 634 bp, Homo sapiens
atagagaacccagaaagaaatacattcatctatagtgaactcattttttacaaatgtgccaggaacatacattaagggaaaaacagtctcttcaataaatagtgctgaaaaaactggatatctatatgcagaagaatgaaactagattcccatctytcatcataaacaaaaggcagattaactggatcaaagacttaaatctaagactcaaactatgaaactgccacaagaaaaccttagagagctctccaggacattggactgggcaaaaatttgttgaataataccccacagcataggcaaccaaagcaaagatgtacaaatggaatcccatcgatttaaaaagcttctgcatagcaaaggaaacaatcaacaaaataaagagacagtccactgaatgggagaagatatttgcaaactacccatctgagaagagattaataaccagaatatacaagaaactcaaacaaccaggaaaaaaaacttaatgatcagattttttaatgggcaaaagatctgaatagacatttctcaaagacatacaaatggcaaataggtttatgaaaaggtgctcaacttcattgataatcagagaaattcaaatcaaaactacaatgagatatcatcccaaccc

SEQ ID NO: 648737 - DNA, 597 bp, Homo sapiens
atgattatttataccttttgttctaggaaggttaatgtgatcagttatggggtgggtgctgcccagatcctaatgttaatgttagtaatatacagtaaatacagtgttttagatttctaaaatccaaaaagataatctaagtttgaaaccatttgtcctcaagggtttgtggacttatatttgaaatctggagagcggataagagcctgaaggacagtctgtgaaataatgagagttctatgatggatatrataaattgtcactcagtagctatctcaaatatctatcctgtttttcagaaactagaaagttagaaactacatttttctcattggaagctgctgttttagacaaatttcccaaagcagatgaatttctgccagatttggaagatgaaagtgatataaaggttgtgtgcctgcagttgctgctggtgagcccagccatgaaggatgtggaagtctagatttggtggtagcatcctgaacaggctgcttcctgatcctgggagcttcctgattatggtagtgaaggaggttataaatgtcagctacaactttgtgaacagttgcagaaataaggtccgtggtagctact

SEQ ID NO: 648738 - DNA, 638 bp, Homo sapiens
gcccacttctcacagttctattaggcagtgtcccagcagggaccctgtgtgggggctctgaccccacatttcccatctgcrctgatctagcagaagttctccatgagagccccacccctgcagcaaacttctgcctgggcatccaggcatttacatacatgttccaaaatctaggttgaggttcccaaaccctgattcttgacttctgtgcagtcgcaggctcaacaccttgtggaagctgcccaggcttcaggctcgcaccctctgaagccatggcccaagctctacattggctcctttcagccacggctagagtggctaggacgcaggcaccaagtccctaggctgctcatacagggaccctgggcctagcccatgaaaccactttttcctcctaggcctctaggcctgtgatgggaggggctgctgtgaagacctctgacatgacctggagacattttcctcattgtcatggggattaacattcagctgctcattacttaggcaaatttctgcaactggcttgaatttctcctcagaaaacgggattttcttttctatcacattgtcaggctgcaaattttccaaacttttatgctctgcttcccttataaaactgaatgcctttaacagcaccc

SEQ ID NO: 648739 - DNA, 523 bp, Homo sapiens
ctccatgagggcctgcccctgcagcaaacttctgcctgggcatccaggcatttctgtacatctgatatctaggcggaggttcccaaaccttaattcttcacttctgtgcacccgcaggctcaacaccaatagaagctgccaaggcttggggtttccaccctctgaagcaacagcttgagctataccttggcccyttttagtcacagctagagcagctgggatgcagggcaccaagggcttcacacagcagtgccccactctactggtaccaatttactgtattcatcagttttcatgctgctgatacatacctgagactgggaagaaaaagaggtggtaatggacttttcagttccacatggctggggaggcctgtcagtcatggcggaaggtgaaaggcatgtcttacatggcggcagacaagagaagagagtttgtgcagggaaattcccccttttaaaaccatcagctcttgtaagacttattcactatcacaagaacagcctgggaaagacctgccccc

SEQ ID NO: 648740 - DNA, 523 bp, Homo sapiens
ctccatgagggcctgcccctgcagcaaacttctgcctgggcatccaggcatttctgtacatctgatatctaggcggaggttcccaaaccttaattcttcacttctgtgcacccgcaggctcaacaccaatagaagctgccaaggcttggggtttccaccctctgaagcaacagcttgagctataccttggccctttttagtcacagctagagcagctgggatgcagggcaccaagggcttcacacagcagtgccccactctactggtaccaatttactgtattcatcagttttcatgctgctgatacatacctgagactgggaagaaaaagaggtggtaatggacttttcagttccacatggctggggaggyctgtcagtcatggcggaaggtgaaaggcatgtcttacatggcggcagacaagagaagagagtttgtgcagggaaattcccccttttaaaaccatcagctcttgtaagacttattcactatcacaagaacagcctgggaaagacctgccccc

SEQ ID NO: 648741 - DNA, 523 bp, Homo sapiens
ctccatgagggcctgcccctgcagcaaacttctgcctgggcatccaggcatttctgtacatctgatatctaggcggaggttcccaaaccttaattcttcacttctgtgcacccgcaggctcaacaccaatagaagctgccaaggcttggggtttccaccctctgaagcaacagcttgagctataccttggccctttttagtcacagctagagcagctgggatgcagggcaccaagggcttcacacagcagtgccccactctactggtaccaatttactgtattcatcagttttcatgctgctgatacatacctgagactgggaagaaaaagaggtggtaatggacttttcagttccacatggctggggaggcctgtcagtcatggcggaaggtgaaaggcatgtcttacatggcggcagacaagagaagagagtttgtgcagggaaattccccyttttaaaaccatcagctcttgtaagacttattcactatcacaagaacagcctgggaaagacctgccccc

SEQ ID NO: 648742 - DNA, 603 bp, Homo sapiens
gggcttgcctcttcctctccagtcaactccatcatcaacctttctgggttctgggctcttctttcttgggttcaatttctctgttccctctgttctcccatgaagccagattcaaagttagtgcaagcgtacggcctttataagctccaagccagtcctcaacagaggtcattccaatcccttactctcacacacctgctatggttagaattgggataaaggggctaggagagmccctgcttggaccttgatccaaaatgacaggtttcagtacagtgttccagaaattctcttaatggtttattgggcaccaactcaataaataaggtagccctaggatgccttagcacctcttattggttcttgtaaccctccttactactctataaataattacttcattagatgcctttcagtatatttgtagaggattttcttttctgattcctgtctccaactctcactgggcttcctctctttctctctcaggctgccggggatggtggcttcccactgctgctacttccccagtgcaacaatagaccttgttgttcccttaattctatgtatatttcttggtttctaatgtaacctcatctccct

SEQ ID NO: 648743 - DNA, 518 bp, Homo sapiens
attgcacactggtgccttatttagttcatttaatgaggttgtgtttttctggatagtcttaatttttgtggatgttcattgatgtctgggcattaatgagtcaggtatttattttagtctttgcattctgggcttttttttttaacctgtccttcttagaagggctttctaagtattcaaacaaaacagtgttgtaatctaagtcttcagtcattgcagtcatatctgcattaagggactccccaacccyagtaacacagcaaggcttgcagacttgtagaagtgccaccttggtggtcttaggtaagatctaaaagagttcctggattaccaggcagggactctttttctctttccttacattctaccaaataaatggagtctctctcatgctgagctgcccagagctggggtaggggtgacacaagtgccctgtcgccaccatcactaggactgcactgggtgcaactcaaagccagcacaagactgagtctcacacaggcccacagtgaccactg

SEQ ID NO: 648744 - DNA, 612 bp, Homo sapiens
ggagacttcaactctcctttcacactaatctatagaacaagtaaatggaaagtcagtaagaatatagaagatgtggacaccactattactcaatttgatatagtggatatttatagaacagccactcaataacagcagaatacatgttcttttaaagtgtacatgagacattcaccaggataagccatattccgggccataaaataagccttaataagtctaaaagatttgataaagtrtatgttctgaccacaaagaaattaaattagaaattagtaacagatatctggaaaatctctaaatatttggaaattaaacaatacaccttaataaaccatgggtcaaaaaaatcacaaggttaagttattcccctctgaattcaatattaataaaattttcaaataaatgaaaatgaaaacaatatatcaaaatttacaggaagcagttgaagcagtacttagagatgaacttatagcattaaatacttctattagaaacaagacgggtctcaaatcatttaaatttctacctgaagaaactagaagagcaaactaaacttaaagcaaacgaaaggaaataatgaaatagaaatcagaaaagcagtaggaaaaa

SEQ ID NO: 648745 - DNA, 575 bp, Homo sapiens
gccagactcctgcagaattaaagggagaggtgagacccgggcatgctaatcttccatatatcccaatgaagtcgtgctgtgaaaatgactaagagaagcaagaagccagagcaatctccgagggaaggtactctgagagcagtgtgtaggagggcggtatttgacttcagtatctgcataagccagcttgcagttcaaagcccttgttaaagcaaaccaacctgcttaaaggctgccgactcacctgctctgtctcaakgcacctctcccctaactctcactgacacaaatgggtatcatttctcagagtgaaaggaggctattcctttctctttgtcctagggctctttgcttaatgcaaataacaggcctcatgcacacatgctctaccaatccaacacattttctgtgtgtgtgtgtgtgtgtgtgtgtgtgtgtgtttatggagttacatatcgattttagtaccttctattggagttgatgttttaattgttttatttgttttgtttgattttttcttctcctccagcaagcaagaaatggaagagggcgcctctaagttcttcccattc

SEQ ID NO: 648746 - DNA, 575 bp, Homo sapiens
gccagactcctgcagaattaaagggagaggtgagacccgggcatgctaatcttccatatatcccaatgaagtcgtgctgtgaaaatgactaagagaagcaagaagccagagcaatctccgagggaaggtactctgagagcagtgtgtaggagggcggtatttgacttcagtatctgcataagccagcttgcagttcaaagcccttgttaaagcaaaccaacctgcttaaaggctgccgactcacctgctctgtctcaatgcacctctcccctaactctcacygacacaaatgggtatcatttctcagagtgaaaggaggctattcctttctctttgtcctagggctctttgcttaatgcaaataacaggcctcatgcacacatgctctaccaatccaacacattttctgtgtgtgtgtgtgtgtgtgtgtgtgtgtgtgtttatggagttacatatcgattttagtaccttctattggagttgatgttttaattgttttatttgttttgtttgattttttcttctcctccagcaagcaagaaatggaagagggcgcctctaagttcttcccattc

SEQ ID NO: 648747 - DNA, 575 bp, Homo sapiens
gccagactcctgcagaattaaagggagaggtgagacccgggcatgctaatcttccatatatcccaatgaagtcgtgctgtgaaaatgactaagagaagcaagaagccagagcaatctccgagggaaggtactctgagagcagtgtgtaggagggcggtatttgacttcagtatctgcataagccagcttgcagttcaaagcccttgttaaagcaaaccaacctgcttaaaggctgccgactcacctgctctgtctcaatgcacctctcccctaactctcactgacacaaatgggwatcatttctcagagtgaaaggaggctattcctttctctttgtcctagggctctttgcttaatgcaaataacaggcctcatgcacacatgctctaccaatccaacacattttctgtgtgtgtgtgtgtgtgtgtgtgtgtgtgtgtttatggagttacatatcgattttagtaccttctattggagttgatgttttaattgttttatttgttttgtttgattttttcttctcctccagcaagcaagaaatggaagagggcgcctctaagttcttcccattc

SEQ ID NO: 648748 - DNA, 575 bp, Homo sapiens
gccagactcctgcagaattaaagggagaggtgagacccgggcatgctaatcttccatatatcccaatgaagtcgtgctgtgaaaatgactaagagaagcaagaagccagagcaatctccgagggaaggtactctgagagcagtgtgtaggagggcggtatttgacttcagtatctgcataagccagcttgcagttcaaagcccttgttaaagcaaaccaacctgcttaaaggctgccgactcacctgctctgtctcaatgcacctctcccctaactctcactgacacaaatgggtatcatttctcagagtgaaaggaggctattcctttctctttgtcctagggctctttgcttaatgcaaataacaggcctcatgcacacatgctcyaccaatccaacacattttctgtgtgtgtgtgtgtgtgtgtgtgtgtgtgtgtttatggagttacatatcgattttagtaccttctattggagttgatgttttaattgttttatttgttttgtttgattttttcttctcctccagcaagcaagaaatggaagagggcgcctctaagttcttcccattc

SEQ ID NO: 648749 - DNA, 622 bp, Homo sapiens
aggatttgctgatggcttggatggaggaargaggaatatattatatttaaatctttaagccacatacattgatttgatcaaaattaacaggacaaatacaaatcatcattttcagttcagtttcatttaatcattatcagtggagctccaaatatgtgtaagatataatttcagattcattcatttgataaacatttatggaacactgactataccccaggtactgtgctgggtactaaaatctggagcaagatggacacagtccttccctcagaggtcttgaggttgagtgagacagagaaatcatcaaacagtgagtgcatgcatgcacatcatgagaagggccaagagggaaaaagacaaaatggcttttagaataaaaacagacagatctcatctagcttgtgttggctggaaggctcccctgagaaggtgacatttgggctgtctgaaggatgatggcagtgagaacatcatgtttaaaagtcctgtggtaggaagaaacattgtcattcaaggaacagaaagaaggccagtgtgccagaagcctagagaacaagcaagagggggatgatgtgatggagtgggcagtcagtggccagatcacacagggccacgctga

SEQ ID NO: 648750 - DNA, 602 bp, Homo sapiens
ggtgaagaaagtaaaaacataaatacttatagaaatgttgaaataggaaactcaggttttctaaagcttttttttcagagattattgctcattatagctatgatcagctacttacggattttgaggaacttaattgtgaattaattacttccttctttcctttctctctctctctttttctctctctctctctttctctctccctctctctttctttgtttcggcagagtttcactctgtcgcccaggctggagtacagtggcacaatctcagctgtctacaacctcccctcccaggttcaagcaattcttgtgcctcagccacctgagtagctgggactgcaggttcacaccaacatgcctggctaatttttctatttttagtacagacrggatttcaccatgtttggcaggctggtcttgaactcctggcctcaagtgatccacttgcctcggcctcccgaagtatggggattacaggtgtgaaccaccacacctggcctgtaataatgaatttcaaaaagactttttaatacctataatattaaaaaattaatctatatgtcgtttgtcattgccaagcttagaatattattataaatt

SEQ ID NO: 648751 - DNA, 568 bp, Homo sapiens
gaaactactttgtgatatctgcattcaagtcacagagttgaacattcgctttcttagagcacgtttgaaacactctttttgtagtgtctggaagtggacatttggagcgctttgatgcctttggtgaaaaagggaatgtcttcccataaaaactagacagaagcattctcagaaacttgtttgtgatgtgtgtacccagctaaaggagttgaacatttctattgatagagcagttgtgaaacactctttttgtggaaaatgcaagtggatatttggatagcttggaggatttcgttggaagcgggaattcaaataaaaggtagacagcagcattctcagaaatttctttctgatgtctgcattcaactcatagatttgaagattccctttcatagagcaggtttgaaacactctttctggagtatctggatgtggacatttggagcgctttgatgcctacggtgaaaaagtaaatatcttcccataaaaacgagacagaaggattctcggaaacaagtttgtgatgtgtgtactcagctaacakagtggaacctttctttttacagag

SEQ ID NO: 648752 - DNA, 632 bp, Homo sapiens
cttttccaacgatatcgttaaagcaatctaaatatcaatttgcagaatccacaaaaatagagtttcaaagctgctctgtaaaaagaaaggttccactctgttagctgagtacacacatcacaaacttgtttctgagaatccttctgtctcgtttttatgggaagatatttactttttcaccgtaggcatcaaagcgctccaaatgtccacatccagatactccagaaagagtgtttcaaacctgctctatgaaagggaatcttcaactctatgagttgaatgcagacatcagaaagaaatttctgagaatgctgctgtctaccttgtatttgaattcccgcttccaacgaaatcctccaagctatccaaatatccacctgcattttccacwagaagagtgtttcaaaactgctctatcaatagaaatgttcaactcctttagctgggtacacacatcacaaacaagtttctgagaatgcttctgtctagtttttatgggaagacattccctttttcaccaaagggatcaaagcgctccaaatgtccacttccagacactaccaaaagagtgtttcaaacgtgctctaagaaagcgaatgttcaactctgtgacttgaatgcagatatcacaa

SEQ ID NO: 648753 - DNA, 632 bp, Homo sapiens
cttttccaacgatatcgttaaagcaatctaaatatcaatttgcagaatccacaaaaatagagtttcaaagctgctctgtaaaaagaaaggttccactctgttagctgagtacacacatcacaaacttgtttctgagaatccttctgtctcgtttttatgggaagatatttactttttcaccgtaggcatcaaagcgctccaaatgtccacatccagatactccagaaagagtgtttcaaacctgctctatgaaagggaatcttcaactctatgagttgaatgcagacatcagaaagaaatttctgagaatgctgctgtctaccttgtatttgaattcccgcttccaacgaaatcctccaagctatccaaatatccacctgcattttccactagaagagtgtttcaaaactgctctatcaatagaaatgttcaactcctttagctgggtacacacatcacaaacaagtttctgagaatgcttctgtctagtttttatgggaagacattccctttttcaccaaagkgatcaaagcgctccaaatgtccacttccagacactaccaaaagagtgtttcaaacgtgctctaagaaagcgaatgttcaactctgtgacttgaatgcagatatcacaa

SEQ ID NO: 648754 - DNA, 632 bp, Homo sapiens
cttttccaacgatatcgttaaagcaatctaaatatcaatttgcagaatccacaaaaatagagtttcaaagctgctctgtaaaaagaaaggttccactctgttagctgagtacacacatcacaaacttgtttctgagaatccttctgtctcgtttttatgggaagatatttactttttcaccgtaggcatcaaagcgctccaaatgtccacatccagatactccagaaagagtgtttcaaacctgctctatgaaagggaatcttcaactctatgagttgaatgcagacatcagaaagaaatttctgagaatgctgctgtctaccttgtatttgaattcccgcttccaacgaaatcctccaagctatccaaatatccacctgcattttccactagaagagtgtttcaaaactgctctatcaatagaaatgttcaactcctttagctgggtacacacatcacaaacaagtttctgagaatgcttctgtctagtttttatgggaagacattccctttttcaccaaaggsatcaaagcgctccaaatgtccacttccagacactaccaaaagagtgtttcaaacgtgctctaagaaagcgaatgttcaactctgtgacttgaatgcagatatcacaa

SEQ ID NO: 648755 - DNA, 641 bp, Homo sapiens
tgaataggcaaacttacaggaattatggaatatcattgtatttacatacagcagtatctcagacatcactccaaaaactaaagggcaatgaggaaatatttccaaaagccatattacagtgctttgggggaggtgaaagagagaatgctgcaatatgttttcttgtttgactgactcaagctacattctaggagatattttaaaaagtgaataaaatctctgtgtcatagtcaaaagatgtaaggcaaaccacaattatccaaggaaatctgaaatgaatattactaaatacaaccttctggatttggttttacttaccatgttgactatgtctgcttatggttttcttacttatgcctacctacaccatcttttaattaaatgtgccgataaaatttctaagtgcagaatttcctttgcttgacacaaacactttgttctactgtgaatcaactgctggggctttctattgtatggatttctacaaarggatgtgctgtaactcaagtataagcagatggttctttcattgttgtaaatcaaattggtataacctgtgactgggttcgatgtggccccagtttcctgaggcctgtgaaaattgctaggtagctcattttcattttttcttatcaccttaa

SEQ ID NO: 648756 - DNA, 508 bp, Homo sapiens
gcttttggtggccccaggcattgcttggctgatggcagcataactccagtctctacttttgtcttcatatgtcattattccctatgtttctttgtattctccttttctgtctcttataaggacactcattggtggatttcatgcttatctcaatccagcatgacctcaaattgagatgctaaccttaattacatctacaaagattcttatgccaaataaagttacattctgagattccagttgaacatatctttggagatccactgttgaacctactatgcytaaaaactcaggcctgtcccaagggcagatttaaaaagaaagagaaattcattttgctttctgattttgagattgttcctcttacccctactccattttcaacacctgaactttatcaagaaaactcaaagacaaaatgtggccaaggttggcaataaatacatttttgccaataatctgatggaaaatgtatgttacttcttgtaaatcaaaataaactggatct

SEQ ID NO: 648757 - DNA, 518 bp, Homo sapiens
ctgaggagagatgctgattcttattwtgtgagagatttgtaatgctaacttaatcttctgactgaaccccttaatttcccatttttaactattctagatgcttgtctcaggaaatggaagaaatctcttcaataatgttaccagagacatgccatgtcatttctatcttctcaatacaactacttagttccttttttctttcatttttgcataatttccatagcaacgtgtacatggtgactacattacatcaatcagcacctccactcctggtcccagttttttctttgctaatcctcactgctgacttttgttgttgtggtttcattatcatttcacaaggtaactactgtcaccttggaaatgaagtgcatggtcaaagccctttaatacacaaaatatgtaaaatctcctcttatgcatattatacatgaaagaaggataagaccatcagttagttttgtctcccctgtagaaaaagccagagcatcaggacagctgcatcctctttcacagaa

SEQ ID NO: 648758 - DNA, 518 bp, Homo sapiens
ctgaggagagatgctgattcttattttgtgagagatttgtaatgctaacttaatcttctgactgaaccccttaatttcccatttttaactattctagatgcttgtctcaggaaatggaagaaatctcttcaataatgttaccagagacatgccatgtcatttctatcttctcaatacaactacttagttccttttttctttcatttttgcataatttccatagcaacrtgtacatggtgactacattacatcaatcagcacctccactcctggtcccagttttttctttgctaatcctcactgctgacttttgttgttgtggtttcattatcatttcacaaggtaactactgtcaccttggaaatgaagtgcatggtcaaagccctttaatacacaaaatatgtaaaatctcctcttatgcatattatacatgaaagaaggataagaccatcagttagttttgtctcccctgtagaaaaagccagagcatcaggacagctgcatcctctttcacagaa

SEQ ID NO: 648759 - DNA, 362 bp, Homo sapiens
aaagaaaattgaaaagagaatgcagaayggcacttactcaaatagttttgatgatttctgcttcactggctgattttgtagtaggtggctggaaattacagtgggatctttaaataagtttaaagtcatatctctgacttaccctgagtaatttttgacacagtaaagctgttttttttttggtaggcttaaaaattccactgagatttttcagtcacccactcacccacttccaaatgaatcagaaaaacagaaatcatcaaaaccagtagaataaatgttgctctgttttaagttttcttttccagttctcattcactgagatgagagtaaacattgaataaaacttcatgttaaaatgt

SEQ ID NO: 648760 - DNA, 547 bp, Homo sapiens
tgtacacctcaaaattagataacctagatgaaatggacaaagttttagccacacacaaattacctaatgtgattcaagaagaagaagaaattcttaacagacctacaacaagtacggagaatagaccrgtaatcaaaactcctcctcaacaacaacaaaagcccagtatcagatgtttcactggtgaattctgtcaaacatgtaaaaaagaataaataccaattcatcttaaattcttccaaaaaatagaagaaggagcatttctcaagtcattacatgagacaagcattatccttataccaaagtcagctgaagaaatccaaagaacggaaagttacagaacaatatttcctatgaatacaagtagaaaaaaagtaattaataaagcattccaatgtataatattatctcaaagaataaaatacctaggaacaaatttgaacaaggaagtgaaagacttgtacactgaaaactacaaaacattgctaaaaaagttaaagaagacctacataaatgaaaatattgagagacttagtattgttatgtt

SEQ ID NO: 648761 - DNA, 407 bp, Homo sapiens
gatcctgtagtgctattacctcctttgctcttcagcttagagctggcaatgacttcccacagctgctaatctctagatttctcracattcgttcattcatactcttacttgaaaaatttctcaaattatctgagcaggattctgtttactgcagatctgaaataattaataataaataaaattttgttttgtattttctgatattcttaatttgaaaaagaaaaaaaccctacatactacatacatgatttgtataaattcacatgataggctgtaggattttacttcaacattgaagttgtgtaaatatgaatcagtcctagggtaaaagtttgagttaatagtaaaatattttaaagcagataaatatcataacattttacaaaactttttatttaagtatttta

SEQ ID NO: 648762 - DNA, 407 bp, Homo sapiens
gatcctgtagtgctattacctcctttgctcttcagcttagagctggcaatgacttcccacagctgctaatctctagatttctcgacattygttcattcatactcttacttgaaaaatttctcaaattatctgagcaggattctgtttactgcagatctgaaataattaataataaataaaattttgttttgtattttctgatattcttaatttgaaaaagaaaaaaaccctacatactacatacatgatttgtataaattcacatgataggctgtaggattttacttcaacattgaagttgtgtaaatatgaatcagtcctagggtaaaagtttgagttaatagtaaaatattttaaagcagataaatatcataacattttacaaaactttttatttaagtatttta

SEQ ID NO: 648763 - DNA, 407 bp, Homo sapiens
gatcctgtagtgctattacctcctttgctcttcagcttagagctggcaatgacttcccacagctgctaatctctagatttctcgacattcgttcattcatactcttacttgaaaaatttctcaaattatctgagcaggattctgtttactgcagatctgaaataatkaataataaataaaattttgttttgtattttctgatattcttaatttgaaaaagaaaaaaaccctacatactacatacatgatttgtataaattcacatgataggctgtaggattttacttcaacattgaagttgtgtaaatatgaatcagtcctagggtaaaagtttgagttaatagtaaaatattttaaagcagataaatatcataacattttacaaaactttttatttaagtatttta

SEQ ID NO: 648764 - DNA, 407 bp, Homo sapiens
gatcctgtagtgctattacctcctttgctcttcagcttagagctggcaatgacttcccacagctgctaatctctagatttctcgacattcgttcattcatactcttacttgaaaaatttctcaaattatctgagcaggattctgtttactgcagatctgaaataattaataataaataaaattttgttttgtattttctgatattcttaatttgaaaaagaaaaaaaccctacatactacatacatgatttgtataaattcacatgataggctgtaggattttacttcaacattgaagttgtgtaaatatgaatcagtcctagggtaaaagtttgagttaatagtaaaatattttaragcagataaatatcataacattttacaaaactttttatttaagtatttta

SEQ ID NO: 648765 - DNA, 485 bp, Homo sapiens
cgatcagaagaacaatgcacgatagtttatatctgaaaggaaaaaaaatctttatatggttctgaaagcctaaatcattaacaacttggataataattagcataaaaatacacaaacatgccctcttcctagcrgtaagtacagagtgacaacagaatcaaagcatgtggctatgtgcatgtttatatttcaagacgcagagcactctattcctcttctctgccctttctagatggcacaattcctcatgaatctaagtgctgtcatagggtggattagggtgacctgccatttgtatgcaaccgatctctattttggaagtaattaatgtaaaaatatatttttaaaagataatttcaaatttcagggcaaactagcatggtttcacccctttcctttgtaacatttttcctaaggttggaaaagtaaggtaggctttagtacgatttttaataacaagttttcaaagtgagacgcaaaatggt

SEQ ID NO: 648766 - DNA, 485 bp, Homo sapiens
cgatcagaagaacaatgcacgatagtttatatctgaaaggaaaaaaaatctttatatggttctgaaagcctaaatcattaacaacttggataataattagcataaaaatacacaaacatgccctcttcctagcggtaagtacagagtgacaacagaatcaaagcatgtggctatgtgcatgtttatatttcaagacgcagagcactctattcctcttctctgccctttctagatggcacaattcctcatgaatctaagtgctgtcatagggtggattagggtgacctgccatttgtatgcaacygatctctattttggaagtaattaatgtaaaaatatatttttaaaagataatttcaaatttcagggcaaactagcatggtttcacccctttcctttgtaacatttttcctaaggttggaaaagtaaggtaggctttagtacgatttttaataacaagttttcaaagtgagacgcaaaatggt

SEQ ID NO: 648767 - DNA, 485 bp, Homo sapiens
cgatcagaagaacaatgcacgatagtttatatctgaaaggaaaaaaaatctttatatggttctgaaagcctaaatcattaacaacttggataataattagcataaaaatacacaaacatgccctcttcctagcggtaagtacagagtgacaacagaatcaaagcatgtggctatgtgcatgtttatatttcaagacgcagagcactctattcctcttctctgccctttctagatggcacaattcctcatgaatctaagtgctgtcatagggtggattagggtgacctgccatttgtatgcaaccgatctctattttggaagtaattaatgtaaaaatatatttttaaaagataatttcaaatttcagggcaaactagcatggtttcacccctttyctttgtaacatttttcctaaggttggaaaagtaaggtaggctttagtacgatttttaataacaagttttcaaagtgagacgcaaaatggt

SEQ ID NO: 648768 - DNA, 485 bp, Homo sapiens
cgatcagaagaacaatgcacgatagtttatatctgaaaggaaaaaaaatctttatatggttctgaaagcctaaatcattaacaacttggataataattagcataaaaatacacaaacatgccctcttcctagcggtaagtacagagtgacaacagaatcaaagcatgtggctatgtgcatgtttatatttcaagacgcagagcactctattcctcttctctgccctttctagatggcacaattcctcatgaatctaagtgctgtcatagggtggattagggtgacctgccatttgtatgcaaccgatctctattttggaagtaattaatgtaaaaatatatttttaaaagataatttcaaatttcagggcaaactagcatggtttcacccctttcctttgtaacatttttcctaaggttggaaaagtaaggtaggctttagtacgatttttaataayaagttttcaaagtgagacgcaaaatggt

SEQ ID NO: 648769 - DNA, 595 bp, Homo sapiens
ttctatttttctcttttctatttatattccaaattagaatataatgctmatcaagcatagtggctgtgtttcttgcttcgtctagtctgcaggtagcatacaaatgtaataaactacttattcatgtcacatctatttattttctgccttataccaagcttgtgggattctcttaaatacaacatttttatacttacacctaggcaatacccattagcatcgccttcctaaatcaggggaaattgagcctctgtaaggtggagtaacttactaagatacaaaactcagcattaaagtctgtatacttcaatatcctgccctcttctcatttgtctttactgccttttatgtatgtgttagatgttcaataaattctcttttttaaactgaatttaagccgtggagcagtgttttgttgaacaataaatatgatataggacactcttcctccctttcatttatgatccagttcatgaaaaagagaaattctttcattgtgctagaagcttaaaataatgaaaatgccactttctacattaaacagaaactgaagggaatcaaggtgaattgcacgagacatagaaaacaagtggga

SEQ ID NO: 648770 - DNA, 595 bp, Homo sapiens
ttctatttttctcttttctatttatattccaaattagaatataatgctaatcaagcatagtggctgtgtttcttgcttcgtctagtctgcaggtagcatacaaatgtaataaactacttattcatgtcacatctatttattttctgccttataccaagcttgtgggattctcttaaatacaacatttttatacttacacctaggcaatacccattagcatcgccttcctaaatcaggggaaattgagcctctgtaaggtggagtaacttactaagatacaaaactcagcattaaagtctgtatacttcaatatcctgccctcttctcatttgtctttactgccttttatgtatgtgttagatgttcaataaattctcttttttaaactgaatttaagccgtggagcagtgttttgttgaacaataaatatgatataggacactcttcctccctttcatttatgatccagttcatgaaaaagagaaattctttcattgtgctagaagcttaaaataatgaaaatrccactttctacattaaacagaaactgaagggaatcaaggtgaattgcacgagacatagaaaacaagtggga

SEQ ID NO: 648771 - DNA, 595 bp, Homo sapiens
ttctatttttctcttttctatttatattccaaattagaatataatgctaatcaagcatagtggctgtgtttcttgcttcgtctagtctgcaggtagcatacaaatgtaataaactacttattcatgtcacatctatttattttctgccttataccaagcttgtgggattctcttaaatacaacatttttatacttacacctaggcaatacccattagcatcgccttcctaaatcaggggaaattgagcctctgtaaggtggagtaacttactaagatacaaaactcagcattaaagtctgtatacttcaatatcctgccctcttctcatttgtctttactgccttttatgtatgtgttagatgttcaataaattctcttttttaaactgaatttaagccgtggagcagtgttttgttgaacaataaatatgatataggacactcttcctccctttcatttatgatccagttcatgaaaaagagaaattctttcattgtgctagaagcttaaaataatgaaaatgccactttctacattaaacagaaactgaagggaatcaaggtgaattgcaygagacatagaaaacaagtggga

SEQ ID NO: 648772 - DNA, 460 bp, Homo sapiens
atgacagttttattgcttttcatggcaatagattcctctggttcaacaagaagggcagaacaaggaagtacagaaacatctcaatatatctcaaaaagttatttaacatggacagtgtcatttaraatctttaacatccctatcaaatggatgccattattatcccccttttacaggatattaaaacttacatactgtaaataaccagctgaaagtcatatagcatggaaaatacaataagcatacaaagaagcaatggcatttgaagtggaggagggtgaaggattaaaaggctaaacttagtttggttaagaaaaaagaaaactagaaggtggcaaactcttgttggaaaggggaaggatttggacagagcaaggtagtggagtagatctctccagtaatcatacccctatggacacatctatatgaacaactatccacatatgaaattatctttaca

SEQ ID NO: 648773 - DNA, 460 bp, Homo sapiens
atgacagttttattgcttttcatggcaatagattcctctggttcaacaagaagggcagaacaaggaagtacagaaacatctcaatatatctcaaaaagttatttaacatggacagtgtcatttagwatctttaacatccctatcaaatggatgccattattatcccccttttacaggatattaaaacttacatactgtaaataaccagctgaaagtcatatagcatggaaaatacaataagcatacaaagaagcaatggcatttgaagtggaggagggtgaaggattaaaaggctaaacttagtttggttaagaaaaaagaaaactagaaggtggcaaactcttgttggaaaggggaaggatttggacagagcaaggtagtggagtagatctctccagtaatcatacccctatggacacatctatatgaacaactatccacatatgaaattatctttaca

SEQ ID NO: 648774 - DNA, 502 bp, Homo sapiens
aacactgatctaatagagagtagaagagtggttaccagactgggaaagatagggaggagaggttttaacaatgtgtcatgtatcaaaataccacattgtaccccatcaacatgtgaaattatcatgtatccacttaataaaagaaaagaaaaaagaaaatggaagagtcaagatactggggcactggaagaaatagaagagaaggtgarttggcagtaaggaagagagagtctgaaagagcatgtcacagagtggaacattaaagtttataacattagaaatcaatttttaagttattgaaaagttaagtttatagccatgaaagtgagtagctcaattgaagtgaaagtaaaagtcaatgaagattaaattagaaaatatattgcttggcatttagtaattacttcagaaatattaataaatcttaagaaaattaagaacaccaaagcattcatagtgggccattatcataacacgaatttatgtggtaatattttattct

SEQ ID NO: 648775 - DNA, 502 bp, Homo sapiens
aacactgatctaatagagagtagaagagtggttaccagactgggaaagatagggaggagaggttttaacaatgtgtcatgtatcaaaataccacattgtaccccatcaacatgtgaaattatcatgtatccacttaataaaagaaaagaaaaaagaaaatggaagagtcaagatactggggcactggaagaaatagaagagaaggtgagttggcartaaggaagagagagtctgaaagagcatgtcacagagtggaacattaaagtttataacattagaaatcaatttttaagttattgaaaagttaagtttatagccatgaaagtgagtagctcaattgaagtgaaagtaaaagtcaatgaagattaaattagaaaatatattgcttggcatttagtaattacttcagaaatattaataaatcttaagaaaattaagaacaccaaagcattcatagtgggccattatcataacacgaatttatgtggtaatattttattct

SEQ ID NO: 648776 - DNA, 434 bp, Homo sapiens
gaattcaatggaacggaagggaatggagtggagcggagaggagtggactggagttgagtggagaggattggagtgcaatggaatggagtggaatggaatggaatggagtggaatggaatggaatgaactggaatggaatggaatagaatgggatggaatgaactggaatggaagataatacagtggagtggaggagaatggagtgtagtggaatggagcgtagtggaatggagtggaagggaaaggaatggaattgagtggaatggaacggaakgaagttgagtggaatggaaaggaatggagtggaatggagtggaatagagtgaaatggagtggaatggaatggagtgtagaggaaagaaatggagtggaatggaaaggaatgatacagaatggaatggaacgaagtggagtggagtggagtggagttgagt

SEQ ID NO: 648777 - DNA, 619 bp, Homo sapiens
gagcccttcactcttctagaaggactttatttgacaggtaatttttccatggtttagaataaaagaggtaataactagaaatatctcccacatartaggctctacagcaaattctactttaaaggctgttgttcatgtctttaactgtggctgcccttaatgtttttgtcatccacagacaattgtctcattttggtcctctttaaatgatggttttataatcagctataaaatttaacagatgcccttaaatgcaggattctgattaataacgctggagattgtgacattacaatagagggaaaactttcaaatagaagagtgaatgatgtttgggctactttggactgtatttttctaaatgttattaatatgtgttccaaaattattggaaacttctatagaaatgtaatctccagtgtcggagatagggcctgctgggaggtggctggtgcatgggagcagtttccagtggttcccagtgttggagatggggcctgctggaaggtagctggtccatgggagcagcctccagtggttcccactttcggagatggggcctgctgcgaggtggctggtccatgggagcactttctaatagataagcataattacccta

SEQ ID NO: 648778 - DNA, 619 bp, Homo sapiens
gagcccttcactcttctagaaggactttatttgacaggtaatttttccatggtttagaataaaagaggtaataactagaaatatctcccacataataggctctacagcaaattctactttaaaggctgttgttcatgtctttaactgtggctgcccttaatgtttttgtcatccacagamaattgtctcattttggtcctctttaaatgatggttttataatcagctataaaatttaacagatgcccttaaatgcaggattctgattaataacgctggagattgtgacattacaatagagggaaaactttcaaatagaagagtgaatgatgtttgggctactttggactgtatttttctaaatgttattaatatgtgttccaaaattattggaaacttctatagaaatgtaatctccagtgtcggagatagggcctgctgggaggtggctggtgcatgggagcagtttccagtggttcccagtgttggagatggggcctgctggaaggtagctggtccatgggagcagcctccagtggttcccactttcggagatggggcctgctgcgaggtggctggtccatgggagcactttctaatagataagcataattacccta

SEQ ID NO: 648779 - DNA, 457 bp, Homo sapiens
ggaaacaaccagagtggaaatcaatggaatggaacggaatggaatgtaaggaatggaatggaattgaatggagtcaacgcgattggaatgaaatggaatggaactgaatggaatggaatggaatggagtggaaaggaatcaacccaagtggaatggaatggattggaatggaatgctatggaattgaatggagaggaatcaaaccgagtggaatggaatggaatggaatggaaatggaatgagacggaatggaatggaatgaaacgtaatgcaagkgaataaaatagaatggaatcaactggaatggaatggtatggaaaggaatggaatggaatggataaacccgagtgcaatggaatgagtggaatggaatggaacggaaatgagtggaatggaatggaatcaccgcgattggaatggtatggaatggaatggaatggaatggaatggaatggaa

SEQ ID NO: 648780 - DNA, 457 bp, Homo sapiens
ggaaacaaccagagtggaaatcaatggaatggaacggaatggaatgtaaggaatggaatggaattgaatggagtcaacgcgattggaatgaaatggaatggaactgaatggaatggaatggaatggagtggaaaggaatcaacccaagtggaatggaatggattggaatggaatgctatggaattgaatggagaggaatcaaaccgagtggaatggaatggaatggaatggaaatggaatgagacggaatggaatggaatgaaacgtaatgcaagggaataaaatagaatggaatcaactggaatggartggtatggaaaggaatggaatggaatggataaacccgagtgcaatggaatgagtggaatggaatggaacggaaatgagtggaatggaatggaatcaccgcgattggaatggtatggaatggaatggaatggaatggaatggaatggaa

SEQ ID NO: 648781 - DNA, 457 bp, Homo sapiens
ggaaacaaccagagtggaaatcaatggaatggaacggaatggaatgtaaggaatggaatggaattgaatggagtcaacgcgattggaatgaaatggaatggaactgaatggaatggaatggaatggagtggaaaggaatcaacccaagtggaatggaatggattggaatggaatgctatggaattgaatggagaggaatcaaaccgagtggaatggaatggaatggaatggaaatggaatgagacggaatggaatggaatgaaacgtaatgcaagggaataaaatagaatggaatcaactggaatggaatggtatggaaaggaatggaatggaatggataaacccgagtgcaatggaatgagtggaatggaatggaacggaaatgagtggaatggaatggaatcacygcgattggaatggtatggaatggaatggaatggaatggaatggaatggaa

SEQ ID NO: 648782 - DNA, 291 bp, Homo sapiens
cacaacttctctgctcaccagctctgtgcctctgggtaatttatttaatatttataaaccttagtgtgtatttttcatttccaaaataagaataataatgtctaaatttcaagtcttttgtggatattggagggaatggatttacaggcacagaaggagagaagtctcctaatacacatgggttattgtttttcttacctttacgccttggtgcaagtgcacatcgggtttgggttgtagtaataagaatatatttgcttatcaacytttcttaagttaattaggcttcat

SEQ ID NO: 648783 - DNA, 536 bp, Homo sapiens
cagtacaaaaaccaggacattcaaacatcccaggtttaaccattctggccttaggataaaggagaaagtggcaatgtacaaaaacaagcaatctgaattaacaagctaagtaaatagctgaaacgttaccaaaaaatcatgctcttgaaaggaggcagaaacctgacgctgagctccagagcagctggggtgactcagacagtgtcagagacatgggttccaacctcccaccccaagggctgggctgctggcccagatgtgggaatcgcatcagctagaatgcttcaaagctaaaatcaaagaagcaacatctttatgtctttcattagtcaactacctgactagttaaagggtttactgacagacaaccaaattcaccaccatttggtagtaagtgtattttaatgtactgcaattcttggaagactgactaaccatgaaatgcctacctgtgaacacccaatcactcaagactactgctaatttctatgcgacttttgcccyttgtacttagctgtattgttgcacatctcata

SEQ ID NO: 648784 - DNA, 604 bp, Homo sapiens
accatggaatactatgcagccataaagaaggatgagttcatatccttttcagggacatggattaagctggaaaccatcattctcagcaaactaatccaagaacagaaaaccaaacacccgatgttctcactcataaatgagagttgaacaatgagaacacatggacagagggaggggaacacaacacaccggggcctgtctgggggtaggggctgggggaaggttagcattgggttaaatacctaatgtagatgatgggttgatgggtgcagcaaaccaccatggcacgtgtatacctatgtaacaatcctgcatgttctgcmtatgtaccccagaacttaaaatataatttaaaaaaaaatctcaaacaactcactgaagtgtctcaaagctgaacaagttttaccaaaatgaatccttctcagttaactgatcaaatggatgaatcctgaccctctgaagtctctttcctgagttagagcagggaactgctctgagtgttaactgttggattcactgcagtgttctacaatattttacaagaagatgaacaggcaacctgcagacctaagcttgattcccaagtcacagtctgacccctgct

SEQ ID NO: 648785 - DNA, 571 bp, Homo sapiens
tatttattctcactacttctattcaacttatttctggaagtcctagccagagcaattaagccaaataaagaaataaaagatattcaaattgaaaaggaagaagtaaaattgtctctgtttgatgacatattatatataggaaaccctaaaaactccaccaaaaagctattagaaatgataaatgaattcaataaaattgcagaattcaaaatcaatrtacaaaactcagtagtttctttacactcacaacaaactatatgacaaaaataaagaaatcaatctcattcacagtagcatcaaaaaaactgtattttttttgtttaggagcacatttaggattgtacttaggagtacatttaaccaaggaggtgaaagatctgtattctgaacactataaaacattgatgaaaaattgtagatgacacaaatacatgggaaagatattttatgttcatgggtaggaagaattaatattcttaaaatgtccttactgcccaaagcgatttataggtttaatgcaacatttatcaaaatttcaatgtcattcttcacagaaatagaaaaaacaatt

SEQ ID NO: 648786 - DNA, 599 bp, Homo sapiens
ttatggtagaaaggttaataatttggactttgaggttgaccaggcctgatttttgaataaattcacaaacttacctccatacattatggtagaaaggtcaataatctggactttgaggtctaccaggcctgatttttggatccaggctgcaacactcacttgctgtgttaacgtaacaaagttcctagaccatgctgagcttcagtttacttgttattgaattagggatatagcgttcgaaggaagaagttctagtatttgattgcacagcagagaaattatagttattgaactggggatatgtagatagacataataaattttagtattcaattrtacaatggagaaatcatagggaacaataatttattatatattctaaaatagctagcagagaaaaattataatgttcccaacacaaagaaaagataaatattcgaggtgatgaatatccaaattactctgatttgatcattacacattgtatacatgtatcaaaaatatcacatgtaccccaaaacatgtacaactatgatacatcaataaaaaacaacaaaaaaaccaaaagaatagaaatcaaaaataaatacataaataca

SEQ ID NO: 648787 - DNA, 560 bp, Homo sapiens
aagctgtcggtggatctaccattctggggtctggaggacagcagccctcttctcatagctccactaggcagtaccctagtggggactctgtgttgggggcttcaaccccacatttccattccccactgccttagcagaggttctccatgaagaccacccctgcagcaaacttctgtctggagatccaggcatttccatacattctctgaaatctaggtggaggttcccatacctcgattctggacttcygtgaatccacaggctcaacaccacatggaagctgccaaagcttgaggcttgcaccctctgaagccatggcctgagctgtgccttgaccccttttagctgtggctggagcagctgggacacagagcaccaagtccctaggctgtacacaggcaaacagcagaggggccctgggcccagcctatgaaaccattttttcctcctaggcctctgggtgtgtgatggaaggggctgccacaaagatctctgacatggcctgaagacttagcgattaacatttggctccttgttacttatgcaaatttctgcagcca

SEQ ID NO: 648788 - DNA, 561 bp, Homo sapiens
atttcattccttctctttgaccagaacttctcatgagatcagcaccagctgcattgcaataggattgctttcctagtaattttcaatggaaaacataaacaagtttaaacctttkaccattagacctgaaaaatagtaaaaacaagaaaatatgtctctacataaaaagaactaaaatccttagtggctgatgtcacctacaagagatgaagatacaattgatcagaggaggtcaaacttggaaaattcagtttcgctaaaagaaaacaaaggtcaaaatattttatgtggataaataaccctgacaactgtagaagattttctacttcacatggaatggtttcctaacaaaaaagtctgggccaggcatggtggctcacatttataatcccagcattttgggaggccaaggcgattggatcacaaggtcaggggatcgagaccatcctggccaacatgatgaaaccctgtctctactaaaattagctgggtgtggtggtgagtgcctgtaatcccagctactcaggaggctgaggcaggagaattgcttgagcatgagag

SEQ ID NO: 648789 - DNA, 561 bp, Homo sapiens
atttcattccttctctttgaccagaacttctcatgagatcagcaccagctgcattgcaataggattgctttcctagtaattttcaatggaaaacataaacaagtttaaaccttttaccattagacctgaaaaatagtaaaaacaagaaaatatgtctctacataaaaagaactaaaatccttagtggctgatgtcacctacaagagatgaagatacaattgatcagaggaggtcaaacttggaaaattcagtttcgctaaaagaaaacaaaggtcaaaatattttatgtggataaataaccctgacaactgtagaagattttctacttcacatggaatggtttcctaacaaaaaagtctgggccaggcatggtggctcacatttataatcccagcattttgggaggccaaggcrattggatcacaaggtcaggggatcgagaccatcctggccaacatgatgaaaccctgtctctactaaaattagctgggtgtggtggtgagtgcctgtaatcccagctactcaggaggctgaggcaggagaattgcttgagcatgagag

SEQ ID NO: 648790 - DNA, 517 bp, Homo sapiens
gtattcaattccttacactccattacattccattccattcgrgttgtttccattccattccattccattccattccattccattgcactcaggttgattccattccattccattccattccattccattccattccattccatttcgttccattccattctattccgtaccattccattccattccattccattccatgccattccactcgggtttattccattcctttccattccattcgggttgaatccattccattccattccattccattccattccattccattgcactcgggttgattccattccattccctgccattccatttcattccattccattccattccattccattccattgcattccattccattccgttccattccattccattacattcggattgattgtattcaattcccttacactccattacattccattccattcgtgttgtttccgttccattacattcccttccactccattccattgcactcaggttgattcca

SEQ ID NO: 648791 - DNA, 505 bp, Homo sapiens
cattccattccattcccctgcactcgggtggattccattctattccattccattccattccactctattccattccattccattccattccattccattccattctattcgggttaatttcattycattccattccattccattccattgcattccattccattccattgaaatcgagttgattccatttcattccattccattccattccattccattccattgcattctattccggttaattccattccattccattccattccattcccttccattccattccattccattctattagggttaattccattccattccattccattacattccattgcaatcgagttgattccattccattccattccattccattcaattccggatgattgcattccattgccttccattccattccattcccctgcactcgggttgattccattccattcctttccattccattccattccattccatttcgtttcattccgttctattc

SEQ ID NO: 648792 - DNA, 587 bp, Homo sapiens
tttcagccttttccaagccaagtggaaatccccaattcacccccaccaaggttccaaaatcaggaaaaacacactttctagcagtgttagtgaaactcatgtaacactgtctccatcgagatcgagccctgagtaacaaaaagcaggagacaaacaggcttagaattatatgtaggggattaggggcatagctttcagaccccatagggaataaacctctagcttttcagttccagcattttratatgcctacctgccctaacagaggtaaaattagaggctacatggcaacattacaatggaaggtttttacttctatttataacttgcttatttggttatttttccttaccaaaagcacaagacagcctcaatatccttaaataccccaagtcctaaaattacttatttaaccctgagagatctagtttataagatagaacagctatcagccatgtaccatttgtatgctctttttttttaagtcaatcaatttttattcaaggaattccatttgtgttgtgatttcttccactgtccatcaaggtcactttagatcttctaaagatctggagtcaaaagattta

SEQ ID NO: 648793 - DNA, 633 bp, Homo sapiens
ttactatctttctcggtggaggcagttttagtgtcttccacttggtcattcctggaataatagctctcactccacaggtcagggraccaatgtgagaatgtaacgattctgtcagtggaatatgcctattacagttatgcatcctggaactggggaaataaccatagacaggtttagaggctgaaattcaaagtctgtagggccagccatcaagaaaagcaggctggaaacttccaaatcagggctgatgctgccgtctacaggtggaatttattctttttaagcaaacctcagttctgctcttaaatccttttaaatgaatggatcaggctcactcacattatcaaggataatatcctttaaagtcatatactaagatagatcatatcctggacaaaaaacaaatctcaagaattgccattacacagattgtgttcttcaaccacacacgatgaaatataatttaataatagaaaagtaataggaaattctccaaatacattgagactaaacaaacatacctctaaatattccatgagtcaaaggagatttcttaagggaagtgaaaaatgcattaagttttattaaaataaaaacacaacatattacaatttggcaggtacaggtaaagca

SEQ ID NO: 648794 - DNA, 633 bp, Homo sapiens
ttactatctttctcggtggaggcagttttagtgtcttccacttggtcattcctggaataatagctctcactccacaggtcagggaaccaatgtgagaatgtaacgattctgtcagtggaatatgcctattacagttatgcatcctggaactggggaaataaccatagacaggtttagaggctgaaattcaaagtctgtagggccagccatcaagaaaagcaggctggaaacttccaaatcagggctgatgctgccgtctacaggtggaatttattctttttaagcaaacctcagttctgctcttaaatccttttaaatgaatggatcaggctcactcacattatcaaggataatatcctttaaagtcatatactaagatagatcatatcctggacaaaaaacaaatctcaagaattgccattacacagattgtgttcttcaaccacacacgatgaaatataatttaataatagaaaartaataggaaattctccaaatacattgagactaaacaaacatacctctaaatattccatgagtcaaaggagatttcttaagggaagtgaaaaatgcattaagttttattaaaataaaaacacaacatattacaatttggcaggtacaggtaaagca

SEQ ID NO: 648795 - DNA, 563 bp, Homo sapiens
gtcccttgttatacaggtaaggaaactgaggccaggtactagaactctcttctccttatttccagtttactcctccatgtcctgctgctgctttagacgcaagctatgcaagcacaaaggtgcmccagatccctctgtcatcttccctgaccacccaaggtatggccctaccacactggtcacaagaagcaggatggggctctgggctttgctagtacacagagtattctgatctcagcctccagctccaccacttcttcttcccttttcaaattacatggtcccttggcaccgccaaattgtgaaataaggacatcaactgtggggactagtataacacaaggaattcagggtgcgtaaataagggggccaggaatgtcatcggatgtcaggggagtagacggactgatgagagcgcctgtctggattcccagaagcatgaactgccttgaggtggctcgaggacaggatgaaaaggacaatcaatgaaggtctttgaccagaactggaaacaacgcgtggcagccaagtggactggcgtgatgctggttttgttacaagtt

SEQ ID NO: 648796 - DNA, 520 bp, Homo sapiens
agtgccaaagatctcactatgtatatactgcaagaaatgcaaayactgtctttcactcttaccctgatctacttactctagtaatgaaaatacattcttaaaaaagattcaatttctctgtattacaaatttagggagagcttttcctttatttttaagtcagttttataggtatattttcccttcacttctctatcctagttatagaagataggctctgtttgaaaagaaaaatctttgctcatctcacatagatagaacctttatgaaatgagggaattcagtgggagatcttattagtaacactgacactgctcatttttttggtgagatctcgacagtttttcccatttctaccagcagcacatgtcatttctcatcagttattttcctttttcaggatatataaaaagagcaagtggtattgggagagaaaaaagcataacttcctcattgttataagttcttaagaaccagggacttagccgttccttgatcaaatctaaaaagacaagaaact

SEQ ID NO: 648797 - DNA, 520 bp, Homo sapiens
agtgccaaagatctcactatgtatatactgcaagaaatgcaaacactgtctttcactcttaccctgatctacttactctagtaatgaaaatacattcttaaaaaagattcaatttctctgtattacaaatttagggagagcttttcctttatttttaagtcagttttataggtatattttcccttcacttctctatcctagttatagaasataggctctgtttgaaaagaaaaatctttgctcatctcacatagatagaacctttatgaaatgagggaattcagtgggagatcttattagtaacactgacactgctcatttttttggtgagatctcgacagtttttcccatttctaccagcagcacatgtcatttctcatcagttattttcctttttcaggatatataaaaagagcaagtggtattgggagagaaaaaagcataacttcctcattgttataagttcttaagaaccagggacttagccgttccttgatcaaatctaaaaagacaagaaact

SEQ ID NO: 648798 - DNA, 533 bp, Homo sapiens
aaaaacgtaccctcattcatagggtacgttcacctcattcttcaaatactggtttccttaagtaatcagtttctggcacccaacatttggttttgatatccttcctatgtgttctcagagaaacctggtttgtatgactcaacctatgtagttcagtcttactctgatagatacacaatacatgtttggttgattaattaagaaaaagtctgtgacatccaacttccttcccatccacaagctcttactggggagatagccaacgtaataatgtctgccatgtgacagatacaataaataaataaataaatattaatgctgttgacatttgcaaagtagcatatattatgctaagagcattcacacacattatttygtttcatcctcaagacttcttctaaagccggtgatccttcttctgttcttctccacttccatcttcaggctaaggcaatggaaattgaaactcaaaatgatttttttttttctgaaactgaatataagtctgaaggattctagaaatatatatatat

SEQ ID NO: 648799 - DNA, 554 bp, Homo sapiens
atatttacacaaagatttgtgcttgagtgttcatagtagatttatttaaatagccaaaaattgagcaccatgcaaatgtccatcacctggtgagtagataaataaatcatggtatatagagataacagaataatatttggcaatgaaaagaaatgaactattaatacatgtaacaattggataaaccacaatggcattttggtaggtgaaaaaaaaaaaagccagccacagaagatcacacgctgcatggtttcacttatttgaattgttagaaaaggtaaaaccaatagagatagcacatcagtggcaggaggtctaagaaggagcttcattgtaaagaaatttaawggaaacttttagagtaatgtaaatatgactgtgtcggtgactatgttaatacacacatcaaaactcaataaaatgtacacttaaaattggtgaattttcctctatgtagattatacttcaataaagttaaaagaaaattgatgttttaatggtgaaaagataatcaaaatatagaatttagtgtcaagatcattatgaactattac

SEQ ID NO: 648800 - DNA, 608 bp, Homo sapiens
gggcttgcctcttcctctccagtcaactccatcatcaacctttctgggctcttctttcttgggttcaatttctctgttccctctgttctcccatgaagccagattcaaagttagtgcaagcgtacggcctttataagctccaagccagtcctcaacagaggtcattccaatcccttactctcacacacctgctatggttagaattgggataaaggggctaggagagaccctgcttggaccttgatccaaaatgacaggtttcagtacagtgttccagaaattctcttaatggtttattgggcaccaactcaataaataaggtagccctaggatgccttagcacctcttattggttcttgtaaccctccttactactctataaataattacttcattagatgcctttcagtatatttgtagaggattttcttttctgattcctgtctccaactctcactgggcttcctctctttctctctcaggctgccggggatggtggcttcccactgctgctacttccccagtgcaacaatagaccttgttgttcccttaatwctatgtatatttcttggtttctaatgtaacctcatctccctgtgacttccctc

SEQ ID NO: 648801 - DNA, 634 bp, Homo sapiens
gtctctaagaacttgttttataatctgggtgcttttgtgttgggtgcatatatagccttttactattwtgtaatgcccttgtctttttttgttttttttttaatctgtgttgatttaaagtctctttttccagaaactaggattgcaatccctgctcttcttctgttttctatttgcttggtagatttttctttttccctgtattttgagcttatttgagaagggtgtctcgattacagcataccgttagatcttgattctttattcagcttgctactctatttttaatcggagcatttagcccatttgcatttagggttaatattcatatgtgtggatttgattctgtcagtatgatcttagctggctgttttgcacatttttttatgtggtggctttatcgtgtcagcagtttgtgtacttcagtatgtttttgtagtgactggtaatcgtctttttcttgtttagtgccttcttcaagagctcttgtaaggcaggtcttgtggtaacagatttcctcagcatttggttttctgaataggatcatatttattttttgcttccgaaggttactttggccggatatgaacttctgagttagaattattttttaagaatgttgaatattggccct

SEQ ID NO: 648802 - DNA, 634 bp, Homo sapiens
gtctctaagaacttgttttataatctgggtgcttttgtgttgggtgcatatatagccttttactattttgtaatgcccttgtctttttttgttttttttttaatctgtgttgatttaaagtctctttttccagaaactaggattgcaatccctgctcttcttctgttttctatttgcttggtagatttttmtttttccctgtattttgagcttatttgagaagggtgtctcgattacagcataccgttagatcttgattctttattcagcttgctactctatttttaatcggagcatttagcccatttgcatttagggttaatattcatatgtgtggatttgattctgtcagtatgatcttagctggctgttttgcacatttttttatgtggtggctttatcgtgtcagcagtttgtgtacttcagtatgtttttgtagtgactggtaatcgtctttttcttgtttagtgccttcttcaagagctcttgtaaggcaggtcttgtggtaacagatttcctcagcatttggttttctgaataggatcatatttattttttgcttccgaaggttactttggccggatatgaacttctgagttagaattattttttaagaatgttgaatattggccct

SEQ ID NO: 648803 - DNA, 634 bp, Homo sapiens
gtctctaagaacttgttttataatctgggtgcttttgtgttgggtgcatatatagccttttactattttgtaatgcccttgtctttttttgttttttttttaatctgtgttgatttaaagtctctttttccagaaactaggattgcaatccctgctcttcttctgttttctatttgcttggtagatttttctttttccctgtattttgagcttatttgagaagggtgtctcgattacagcataccgttagatcttgattctttattcagcttgctactctatttttaatyggagcatttagcccatttgcatttagggttaatattcatatgtgtggatttgattctgtcagtatgatcttagctggctgttttgcacatttttttatgtggtggctttatcgtgtcagcagtttgtgtacttcagtatgtttttgtagtgactggtaatcgtctttttcttgtttagtgccttcttcaagagctcttgtaaggcaggtcttgtggtaacagatttcctcagcatttggttttctgaataggatcatatttattttttgcttccgaaggttactttggccggatatgaacttctgagttagaattattttttaagaatgttgaatattggccct

SEQ ID NO: 648804 - DNA, 634 bp, Homo sapiens
gtctctaagaacttgttttataatctgggtgcttttgtgttgggtgcatatatagccttttactattttgtaatgcccttgtctttttttgttttttttttaatctgtgttgatttaaagtctctttttccagaaactaggattgcaatccctgctcttcttctgttttctatttgcttggtagatttttctttttccctgtattttgagcttatttgagaagggtgtctcgattacagcataccgttagatcttgattctttattcagcttgctactctatttttaatcggagcatttagcccatttgcatttagggttaatattcatatgtgtggatttgattctgtcagtatgatcttagctggctgttttgcacatttttttatgtggtggctttatygtgtcagcagtttgtgtacttcagtatgtttttgtagtgactggtaatcgtctttttcttgtttagtgccttcttcaagagctcttgtaaggcaggtcttgtggtaacagatttcctcagcatttggttttctgaataggatcatatttattttttgcttccgaaggttactttggccggatatgaacttctgagttagaattattttttaagaatgttgaatattggccct

SEQ ID NO: 648805 - DNA, 566 bp, Homo sapiens
tttttaaaatttcaggaccagagggtacaagtgcaggtttgtgacatggctatattacatgatgcagaggtttgagcttctaattgtcccttcacccaagtagtgaacaaaatacccaataggtagattttcaacccttatccctctcccactctcctcccttttggaactctcagtgtctaatgttcccatctttttgtccctgtgtatctaatgtttygatctgattcatttcttgttaaatttatgtatcatgcagtttgatacgttgtttaagttacttgaaaaagtataaggctgtaagaagattttaggaatctagaaaacattcccaaagataagtttatcaaactgtttaactgtcagcaaacctctttaatttccaataatggcagtagtgcatatgctagaacagaattattagctaataagctgataagtaccaggatctcagactgacttttaatatttagtgagaaataatatgttattcaaaaaacttaatttaatttatttgaacaactttatatatctcagtaatatttcaggattgaaatattcaagat

SEQ ID NO: 648806 - DNA, 574 bp, Homo sapiens
tctcatgggtttatcagggttttctgcttttgcatcctcctcattcctctcttgcctctgccttggaaaaagtgcctttctcttcccaccatgattctgatgcctccccagccatgtggacctgtaagtccaattaaatctcttttccttcccagtctcaggtatgtctttatcagcagcctgaaaatggcctaatatgggggagaacagaaacaaaatacaaattagagatatctctgaacacccccactcatatgcacacatacacatgcgtacctacatacatgttttaacagtgggaccaagacaaagaatgtttctactaattcataaagatcaatccagtttatacatcacrtctgtggccacacataatgtctactcttattcaggagaaatatcttgtttctcttagcctccatagctctgaacacaaccctatattttgattgctttacagaaaattgtagaaataactgagatttatttaatgcttacttagaatgtgccaacactattctaagaacgttacatttttgttcctatttcttcctcagatcaaacattattattg

SEQ ID NO: 648807 - DNA, 574 bp, Homo sapiens
tctcatgggtttatcagggttttctgcttttgcatcctcctcattcctctcttgcctctgccttggaaaaagtgcctttctcttcccaccatgattctgatgcctccccagccatgtggacctgtaagtccaattaaatctcttttccttcccagtctcaggtatgtctttatcagcagcctgaaaatggcctaatatgggggagaacagaaacaaaatacaaattagagatatctctgaacacccccactcatatgcacacatacacatgcgtacctacatacatgttttaacagtgggaccaagacaaagaatgtttctactaattcataaagatcaatccagtttatacatcacatctgtggccacacataatgtctactcttattcaggagaaatatcttgtttctcttagcctccatagctctgaacacaaccctatattttgattgctttayagaaaattgtagaaataactgagatttatttaatgcttacttagaatgtgccaacactattctaagaacgttacatttttgttcctatttcttcctcagatcaaacattattattg

SEQ ID NO: 648808 - DNA, 574 bp, Homo sapiens
tctcatgggtttatcagggttttctgcttttgcatcctcctcattcctctcttgcctctgccttggaaaaagtgcctttctcttcccaccatgattctgatgcctccccagccatgtggacctgtaagtccaattaaatctcttttccttcccagtctcaggtatgtctttatcagcagcctgaaaatggcctaatatgggggagaacagaaacaaaatacaaattagagatatctctgaacacccccactcatatgcacacatacacatgcgtacctacatacatgttttaacagtgggaccaagacaaagaatgtttctactaattcataaagatcaatccagtttatacatcacatctgtggccacacataatgtctactcttattcaggagaaatatcttgtttctcttagcctccatagctctgaacacaaccctatattttgattgctttacagaaaattrtagaaataactgagatttatttaatgcttacttagaatgtgccaacactattctaagaacgttacatttttgttcctatttcttcctcagatcaaacattattattg

SEQ ID NO: 648809 - DNA, 555 bp, Homo sapiens
agcctttcccaaagccatatctatgttaagcatcttccctgctgtttcatttcatccttgtctctgtcctataagggaagcactattttcccattttataagtggcaatactgaggctcagagaaaacaaaaaaaagtaggcagtagccaagccaagaattaaactcagatctgtctgggtgccaactccaaattcgtagaagggtaccaccctgctcctggaggctcacctatgttctctcagcccagccagtgtttatcaactctacggtcccctcaagctccctgtcaggtctgctactgcaccttgacatcaatgtttacttaaaagaactttctcctctcttctgtgtggtctgattgcagcaaatccaatgtcaattttgctcatgctcaatctcagtttagataaaccgtttagcagagtatatacgataaagctccctgccaagttataaattaagtagtcaaacaaacaaacacaaaatcaaataaagatctaattagcttggtccaattactctgctctcttscagctagtctaggataatctat

SEQ ID NO: 648810 - DNA, 510 bp, Homo sapiens
tagaaaagaaaaattattttctgtaaagaaattcaagccagctggagaaatttacayaaataatgaggagctggatgttaatagccaagacaaaggggaaaatgtctccagggcatttcagaaatcttcatggcaacacctcccatcacaggcctggaggcttaggagggaataatggtttcatgggctaagaccaaggccttgctgctctgtggagccttgaaacataacaccctgaatcccagccactccaggtccaggaatggataaaagggggccaatgtacagctcaggccattgcttcagagggtgcaagccccaagccttggcagcttccatgtggtgttgggcctgtgggtgcacagaagacaaagtcagctttgggagccttcgcatagacttcagaggatgtatgaaaacacctggatgtccgacagaagtctactgcaggggaggagccagcatttccttttatatagatttttttggtactcctttaggtattatgtt

SEQ ID NO: 648811 - DNA, 638 bp, Homo sapiens
gtacctcagaatgtaacctcatttggaaataaagtgtctacagaggaaatcaaattaaaatgaaatcattagggtaggccctaattcaatgtgactgatgtccttatacaaaggggaagtttgtatatgcagagacagacaaactcacgaaggaaaatgatgtgaagacgtataggaaaaaggtggccaggggactaaaacgatgcatttacaagcaaaaaaatgccagtgattgcagcacacactagaagctagaagaggcaaggaaggattctgccttagagccatcagagagaacayggtcctgccaacacttcagttttagacttcaagccttcagaactgtgacacgataaatttctgttgttttaacctacccagtatttgttattttattatagcagccccaggaaactaatatagttaaaaatggggattattgtgttctgacaaagttcacagtggttgaaggaaaactatgcaaggagtaagagacacacaaagcaacattaaagtctgcactctaagtagttgagcttgcttggcacaatgtttattagtaacagtcaattagtgatatattttctttcctttgaaatgaattgtctagttattgctaattgatgacaatgtacaac

SEQ ID NO: 648812 - DNA, 421 bp, Homo sapiens
ttgtagaactacaggagctctcctttcaatggtagacatgatgttaggtattaagtaattataatgataagtattactctgtgcggggcatagttgtaagcaacatatgttaaccagtttaatattcacacaacccaatgagatatataattattatgcaattttacatatgaagaaggaggagataagctgaagcatgaaaggatgaataactctgatagtgcttagaaaatcttatgagaatgtgtaaggagaatatrtgatgtgtgactaaacagttaaaccatatgaagaaatgtaatcaaagaaaggttaagcaactgcggtatggtaacacagcgagatattttgaatgcctcatctcatttagtctccacagtaaccttatatggtaatattaatacttcatctttacaactga

SEQ ID NO: 648813 - DNA, 412 bp, Homo sapiens
tagttctaatctaaagccctagtgaagagccactacttgagagtggggttttaaaattattgtttatatttgaatatgtgtaggcctgatattctaggaattaatacttcatacagttctgtgcacctaaagataggcttttctaaaagtgagacatttgctgaacttccccatcttaacctgttgctagaactctctaagtctgatgaagcacagccattctgtgaccgccttcatttgcatgtacatgtaaaacgggtctcactcagcctgctccaggtaactgamcctaaccgttactgcctgcaagggtgccttgctcccaccctgcggacacagtgtgcctgctctgtactctgcatatttatgtcaggaagagtacaaaagtaagattgggtaagggcttctctac

SEQ ID NO: 648814 - DNA, 612 bp, Homo sapiens
cttttatgggtgaattctactaagcattcaaagaagcaatattaatacctcttaaacgctttcaaaaaatagaagaggaaacacatttgttcagaaaacaccctactggaaccaagcctcactctccataagaagaagacaagttcagaccaaataaagaggcagaactttccaggttgttaggtagtcaaaaccttattcaagaagaatttatatacaaggtagccttgggcaacaggaaaatgaggaagatctctacaatgtgatttatgtaaactttataccatgaaaaaaaaaaaaggaaagtaggaaaaaaagaagaaaaatgtcactgatggtctgttaaagcatctgattactttcttaatttatttactctctacctaaagggattctttgggttctttacaatctggtcaacatttctaaaggtcaggaaagaagtactttgggttgcagtggttatcctgatactggcatgtttctaytgattactgcattttacaacacattttccaatcacttacctagaatatattcacaacaacttccaaacacattttgtgaggccaacatcaccctgataccaaaactaaagacactacaaaaaac

SEQ ID NO: 648815 - DNA, 597 bp, Homo sapiens
ttggaaaatctagaagaaatagatgaactctgagacacaaacatcttacccagattgagctaggaagaaatccaaaagttaaacagattaataataaataataagattaaagacataataaaattttctctttaaaaaaaaagcctgggacacaatgacaaactacactgctgaattctattgaacatttagagaaataatatcaatcccactcaaactgcttggaaaaatagagaagaagcgaatacattcagacttattctactaggccagtattaccctgatttaaaataacaacaaacaacaacaacaacaaaaaacacagacaaaaacgtatcaaagaaagaaaattactggccaatatatctgatgaatattaatgcaaatatcttcaacaaaatactagaaaactaattaaacatttcgacaatacattaaaaagattattcattgtgacaacatgggatttaatacagygagaaggattgttcaatatatgcaagtcaactgacgtgacacatcatatcaagagaatgaagaacaaaaactatacaatcatttcaactgatgctggaaaagcatttgataaaattcaac

SEQ ID NO: 648816 - DNA, 607 bp, Homo sapiens
gggctcccctgacgggatctttggacccaaatgaggacagagcatcagcctagcaggctcccagaggaggaaatatttggaacagatgatgctggcagcaacttcctgggcagcctgcagtgttccttgagggaagggtgaacctgaattcaccctcaggtgaggcagcctttagcagaaacccatcgccctgctgccccacaggagctgagcactagcaaagtatggtctgatatctttgtttctagcagaatgatttgaatgctctcaggaattctgtttagtctgtctcctgtggttggaacttcctctccaaatggtcacatagggaatgttattttccaactggcatgaggagaatttcctayggggactatcaaaatgcagtgctgtggatgagctgctccattcaagagggaatggccttttgcagggtctttatggaaagcaaacattttgcagctgacggttttgtgtcaccaggtactttcttttttttattttatttattcatatatttatttatttatttatttgagatggagtctatctcggctcactacaacctctgcctcccagattcaagtgattctcctgcctcagcctc

SEQ ID NO: 648817 - DNA, 640 bp, Homo sapiens
aaggcccacaaaagcaagaaaattgcttttaaatgaaagaaagatttccatttcacttcaacccctaatgcctcacataactctaacatcattcctggtccaactgaaatatttgaatccaaatagtccttaagtcatttggaccctattcaaatgtgaattcatctctttaatcactcttcctcttatttttgaaataaagactaatattgaaagttaagagtctatttgttaattttttttatttaagattttttaatataggtttggtcaccattgctttcttccccatcattcctttctcatcattgtcttgaagttcctaaacttgtctttttctatttttaaaatttcccttcatttaagtattgtggacagcaggcagactgaataatgatgaatatgattaatgttcagacttaataagtcttatgaaaagacctttttgttccaagggaagggatgtgatgttttggcagcatatagtgtcacartgacagagtcaaatgtagagtaacccaatgaagggacatagcatgtcttagccatacttaccctgagagggagtcacacatataacagcctatttagatatgtccagagaagggaagggattttcccacaatggcgtctttctgtt

SEQ ID NO: 648818 - DNA, 462 bp, Homo sapiens
  misc_feature 427: n = A,T,C or G
ttataggagcagaaacaagatttccaaccaaggaaaaatatggaaaagaaagggacaggcacctcaagctgtgtgtcccaagccttggtgaaggccaacagaacagggagtggctcacctcccattgagatgttatgaaactaggaggaccctcaggaatactatagtctaggaggaggttcagagaagttaagtggcttgctcaggattggtgacttgcccaactaattacccctactaattagttgaatggggtccagtgttcattccatttcaccacactccctccatattgtcagttaatatcaatgctaaaacatcacaaataaatacaaggagggaattkagacaataataaccagaggcacgctgttgtggacgaggaggaatgtattagtcagagttctccagctcttcagaaaaacanaaccaacaggatggatgtgtgctatatatgtaaat

SEQ ID NO: 648819 - DNA, 485 bp, Homo sapiens
taattaaactaacaagattctacacagcaaaagaaacaatcagcagagcaaacagcccacagagtgggagaaaatctttgcaatctacacatgtgacgaaggaccaatatccagaatctataaggaactcaaataaattagcaagaaaaaaacaaacaatcccatcaaaaattgggctaaggacatgattagacaattatcaaaagaagatatacaaatggccaacaaacatataaaaaaatgctcaacatcactaatgatcagagaaatgcaaatcaaaaccacartgtgataccaccttgctcctgaaagaatggccatgataaaaaaaaatcaaatcaaataataatagatgttggcatggatgtggtgaaaagagaacacttttacactataggtgggaatgtaaactagtacaatcactatggaaaacagtgtgaagattccttaaaaaactaaaagcagaactaccgtttgacccagca

SEQ ID NO: 648820 - DNA, 582 bp, Homo sapiens
agaagtgggtgtgggtatagaggaagcamgatgggcagtatgccaatggcctaacctaggtgatggataccagagcattcattatactttctctacttcagtatgtgtttaagatgtttatagtaaagttttcagaaattgagagaatggtaatcaacagagtttttttaaacttttaagttcaggggtacatgtactggtttgttatataggtaaactcatgtcataggggtttgttacacgcattatttcatcacccaggtattaagcctagtaaacattagttattttttctgattctctccctcccccaaccctctaccctctggtaggccccagtgtctgttgttcccctctatgagtgcatgtgttctcatcacttagctcccatttatcagtgagaacatgtggtatttaattttctgttcctgcattagttcactgaggataatggcctccagttctatccatgttcctgcaaaggacatgatctcgttcttttttatggctgcatagtagtctgtggtgtatatgcagcacattttctttatctagtctatcattgatgggcatttaggttgg

SEQ ID NO: 648821 - DNA, 588 bp, Homo sapiens
atggctgggtcaaatggtatttctaattctagatagaatgtttcctcttataactcatagtgaatatgactggacaatgaaactattttgtaatttctttcctgaaaggtaaaggcgttagaacatagaatctttcactgattctacagaatcttaagactccttcagagatggcagtcattcctaccgtgctgaacatcatgttgtcacggtsagaatcagaactaaattgattaagggtctgaaacagtttggcactcttgggcacttattctgataagaaagctgatgagacagggtaatgaaaagaggctgcaagaaatgaccattcatgcattcagccaacatttaggccaccctcctgtattccaggcactgtacgtggcactgagaatgcaaagcaaaacgagtcatggtctactggcgggagccttctcagcggagaaaagatcaacaagaaaagtgcctgctggagacctctcctagggcataaaccaatatagaggtggggcagctacgtcagcctgaggtgtccttaggcagaacagaaagtgagaatcagagcagtatctcatttctgaacacctg

SEQ ID NO: 648822 - DNA, 553 bp, Homo sapiens
caacattgtaaatcagcacaatttgtagctgggtgaatggaagaaatagttctattcatcacttcctcattttccctaaatctacaatctccagatgtcactactgaattaacagccaacaattccacaacattacctgggagacactggccctttttcttcctcttcctcatcatcactttcattttctgtaaataaattcagagaagcaggtcacattaagcaattcatacttcacatatgaacaaatcactgtccagtcatagcacaaggacataactattctcagtgcaagaataaggattctgacaggaatattctagggtgtcctagattaactttggtgagaattagatraccctgctttccagacccacaggccaaaatctccctctacgtgtagaccataatgccatattccctgcctgagtcaaagttaaacaaaattttttccccaaaaaaatctccaaaaattggtcaaacaattttctaagagtgctgctgcgatacggacttatatcaccaggtaacatggacattaaatgtttagagg

SEQ ID NO: 648823 - DNA, 553 bp, Homo sapiens
caacattgtaaatcagcacaatttgtagctgggtgaatggaagaaatagttctattcatcacttcctcattttccctaaatctacaatctccagatgtcactactgaattaacagccaacaattccacaacattacctgggagacactggccctttttcttcctcttcctcatcatcactttcattttctgtaaataaattcagagaagcaggtcacattaagcaattcatacttcacatatgaacaaatcactgtccagtcatagcacaaggacataactattctcagtgcaagaataaggattctgacaggaatattctagggtgtcctagattaactttggtgagaattagataaccctgctttccagacccacaggccaaaatctccctctacgtgtagaccataatgccatattccctgcctgagtcaaagttaaacaaaattttttccccaaaaaaatctccaaaaattggtcaaacaattttctaagagtgytgctgcgatacggacttatatcaccaggtaacatggacattaaatgtttagagg

SEQ ID NO: 648824 - DNA, 543 bp, Homo sapiens
ctttttctttttaaacagttccttatgttagccatgaaatctagctggggctgtgtggtttctgattccccctggcttattctttactttttcccacttttccaggctcagcagggagctgctggatgagaaagggcctgaagtcttgcaggactcactggatagawgttattcaactccttcaggttgtcttgaactgactgactcatgccagccctacagaagtgccttttacgtattggagcaacagcgtgttggcttggctgttgacatggatggtgagtacctttctatgaaggtgataaggatccactgagtcttctggttagggtcatattcctactgcaagtggcccttactgagctgagagatgtcattgccacagggaggtcctataggcacatgtaggttgaatgaaactctagttccacttggaagcccagacaagggatgggtcagtgagcaaggctctcttcctagtctcaggccatgcctgtggcgccctaatcctactctcatgacgttggacctgggcagatgtga

SEQ ID NO: 648825 - DNA, 532 bp, Homo sapiens
gagcctgaagtccctgtgtgaggattagacagtggattgttatgtgtgtaggagaaccagcttaatatgtctgtccatgtctgaacttattgcagaaattgaaaagtaccaagaagtggaagaagaccaagacccatcatgccccaggtaactttgagcaattatggatgcttaattctgtgttgacacctggagatgccaggtccagggaaaacaagagtgtgttcaatttcatgttttcaacgaaggttgaattactcctcctgayattgctgttggttttcattgcagtagatgtttaggtttccatttcttcctccccttatcatttactaacttactataggttgaccatacctcaaaggctgtatggcaactgcatggaatcttgagcaagtttatggaaaattattgagcccactcttttcatgatcactgttcgctgtgtgtcccgagggcactaactcagagtgtcctttgaccccttcatcagtgtgtcacccggccaactcgctgagctcactttctcctc

SEQ ID NO: 648826 - DNA, 490 bp, Homo sapiens
aataagccagggggaatcagaaaccacacagccccagctagatttcatggctaacataaggaactgtttaaaaagaaaaaggacagatccattaatgaggtaatgaattattgcctttatgttgggatagaccagggccaggtagaaaagaatgaaagagaaagacagggagagggagggagagagagagagagagagagaggagaaagtragctcagcgagttggccgggtgacacactgatgaaggggtcaaaggacactctgagttagtgccctcgggacacacagcgaacagtgatcatgaaaagagtgggctcaataattttccataaacttgctcaagattccatgcagttgccatacagcctttgaggtatggtcaacctatagtaagttagtaaatgataaggggaggaagaaatggaaacctaaacatctactgcaatgaaaaccaacagcaatatcaggaggagtaattcaaccttcgtt

SEQ ID NO: 648827 - DNA, 490 bp, Homo sapiens
aataagccagggggaatcagaaaccacacagccccagctagatttcatggctaacataaggaactgtttaaaaagaaaaaggacagatccattaatgaggtaatgaattattgcctttatgttgggatagaccagggccaggtagaaaagaatgaaagagaaagacagggagagggagggagagagagagagagagagagaggagaaagtaagctcagcgarttggccgggtgacacactgatgaaggggtcaaaggacactctgagttagtgccctcgggacacacagcgaacagtgatcatgaaaagagtgggctcaataattttccataaacttgctcaagattccatgcagttgccatacagcctttgaggtatggtcaacctatagtaagttagtaaatgataaggggaggaagaaatggaaacctaaacatctactgcaatgaaaaccaacagcaatatcaggaggagtaattcaaccttcgtt

SEQ ID NO: 648828 - DNA, 485 bp, Homo sapiens
gtgaaacatgtggatctagaacaagaacaaaatgatgttaccttgatgatctctatgtagggtcacactcaaggcatcttaaaatattttgctggccaacaaaagacacctcctgttctaattgggcattgtccttttctttaaactatgcagacaaacaatattataaagtgagaacatccgcataaaaaacctaaacataaatcttaatagtgagttcatgaaaattcttactgatgaaatggcaatgtcacagactgactgtttatgtccccccaaatttgtatattgaaatcctaacccccaagctactcgtgttaggagatagagccttggggaggtgattaggtcatgaggacaagattctcatgaatggratttgtgcccttataaaagagatcccagagagctcattggccccttccaaagtatggggatacagcaggaagttgccatctatgagccagaagggtgaacctcacccc

SEQ ID NO: 648829 - DNA, 530 bp, Homo sapiens
tggtttggctgtgtccacacccaatctcatcttgtagctcccataattcccacatgttgtgggaggggcccagtgggagataactgaatcatgaggatgggtctttcctgtgctgttcttgtgttagtgagtaagtctcatgagatctgatcatttttaaaatgggagtttccctgcacaagctgtctctttgcctgctgccatccatgtaagatgtgacttgctcctctttgtcctccaccatgattgtgaggcctccccacccatgtggaactgtaagtccattaaacctctttcttttgtaaattgccyggtctcaggtatgtctttatcagcagcatgaaaacagatgaatacaacaatactgtaacaaatcgactcacatctgttctctttataggaattgcagtgctacaatattagtggctcttaattctaagagtgttaaaaaaatattaatgcttgtctcacccctaaagtctagggtgtgacctgagtattaggttatttaaaacttttctcaggtaata

SEQ ID NO: 648830 - DNA, 514 bp, Homo sapiens
gctgaggcaggagaatcacttgaacctgggaggcagaggttgtggtgagccgagatagcgccattgcactccagcctgggcaacaaaagcaaaactccgtctcaaaaaaatatataataataaatatatatatattatatataatcaatataaatataatatataataaatatataatatgtattatacaaataataaatatatatattatatataataaatatatcatatagatgatatagtttagagttaaatactgactgctcttgggaactttgaggtattctgagggatataaataacacgaagagaatagcacattggcttgaagcagattagagtctgctacctgcgtgaatacttgyttttcatgaactatgaggatgcccttagcttttgaaccacttctacttgtgttgaaatttaccctttaattttggggtttgacaggctctgcccttctgttatgcttgagtctggcttttcctactctgactcactttgattcttgacc

SEQ ID NO: 648831 - DNA, 478 bp, Homo sapiens
cagacactctttcttttattcttagaacactccaaaagctaggtaaggcaagacattattatgctttcaacattttcaccaaattcaaacaaaaggctaaataggttttataagctattattttctttttctttatatctaactagataattctttagccaattataatattatgtatatagttacttttgccaatgtttgttcaatctttgcttagaataactacacactayacactatataactttcaaatgtggcaactatgactgctgctttggtggttcagtggtagaattctcaagtgtggcaactttttacatcaattttgagaaaacttatgaataaaatttgtcaacaccacttgataactgtgaaaatacttagtgttctttaacaatatgagttctgttaaaatcacttagaaagtctctttatcctctattagcatcaaaattgctttatagaaaaaattacctac

SEQ ID NO: 648832 - DNA, 605 bp, Homo sapiens
gggcttggcagacaatgagtgacaggaggtgttgggaggattacccattctaaggctcttttcaactcctcatactgtgctcaagcctgaataaaaacacatcactggaaatgtccttctggtactctgggctaagtttcttatcaccttttctcctttttctgctttctccaaatatctatcatcacaattgaaaagatagttaaggcacaatcctgccctcaaaaaataaccagtgtagtaataaaggtgcttgtaggcaaatcatggaaacatacttagctaagtactatggtggaggtatattcaaggagatagagaggtgcatgtagttaaataatgctrcaaggaaagatgaaggaagatggagcagagggaatgaggaagtggaaggtacgtgggtagacagagtcagtattaagagagccttgtataacttactaaggtgtttggactctattctccatgtggtgtttctcatacttttattatatgaaacacagcaagaaatacatttcatttcatgacttaatagacatacatataattgaagcaaaagttacatgaaataatattcaatcacattaagtatcttaaactcctgt

SEQ ID NO: 648833 - DNA, 605 bp, Homo sapiens
gggcttggcagacaatgagtgacaggaggtgttgggaggattacccattctaaggctcttttcaactcctcatactgtgctcaagcctgaataaaaacacatcactggaaatgtccttctggtactctgggctaagtttcttatcaccttttctcctttttctgctttctccaaatatctatcatcacaattgaaaagatagttaaggcacaatcctgccctcaaaaaataaccagtgtagtaataaaggtgcttgtaggcaaatcatggaaacatacttagctaagtactatggtggaggtatattcaaggagatagagaggtgcatgtagttaaataatgctgcaaggaaagatgaaggaagatggagcagagggaatgaggaagtggaaggtacgtgggtagacagagtcrgtattaagagagccttgtataacttactaaggtgtttggactctattctccatgtggtgtttctcatacttttattatatgaaacacagcaagaaatacatttcatttcatgacttaatagacatacatataattgaagcaaaagttacatgaaataatattcaatcacattaagtatcttaaactcctgt

SEQ ID NO: 648834 - DNA, 499 bp, Homo sapiens
tcccaaagtgctgggattataggtgtgagccaccacgcctggctgatttctattttgcatagttgttatcggacagaaacactgctgatttttgcatttctagttttgtaccttgtaactttaccaaatgtgttaattagttctaacagttcctgtggagtttttagggttttcttgtagggagaccccctgaaactattgctacagaataaaagatgaaatgctcctgattattataaatacaaaattgcatgcaggattgtgtaaagacaatgcaaggttgggctgcctgaatgagccaacagcacatgatgtgcttcctcctgcagagagcctataaacggatgtgcagtcagggaggtttcrcatcaccaatattcttatcccagaaaagcagatgttcacagctctgggaatggaatgcgacccttgtggagagcctataaatggacgcatgaggggcggccattcatatgtataaaatagggttttaaatgcc

SEQ ID NO: 648835 - DNA, 542 bp, Homo sapiens
ctctgcaaaataataggccaatcctcttcaatagtgtcaaagatatgacaaacactgattaacatttccagattaaatragacttaaaagaaatgaaagctcaatacaatgcacgatcttagatcaaatcctagaccagaattatttctcatttgccataagacatttgtggcacaactgataaaattcaataaagtctgtagattagataatagtatcaatgttaatttactgattttgatgatggtactataaatgtccttttaggaaatacccactgaagtatttagaggtaaatgggaacctgtctgctacttattttcgaatatctcaggaagaaaaatggtagaaggaggcacagggacaaggcgagagaaggccatcaggatcatctgtggtcaaaggactctgggcacactgacatccaatacctaattttaaacttttgattgttttattattattttgttagagatagggtcttactctattgcccaggctaggatgcagtgacatgattattgctcactacaaccttgaac

SEQ ID NO: 648836 - DNA, 542 bp, Homo sapiens
ctctgcaaaataataggccaatcctcttcaatagtgtcaaagatatgacaaacactgattaacatttccagattaaataagacttaaaagaaatgaaagctcaatacaatgcacgatcttagatcaaatcctagaccagaattatttctcatttgccataagacatttgtggcacaactgataaaattcaataaagtctgtagattagataatagtatcaatgttaatttactgattttgatgatggtactataaatgtccttttaggaaatacccactgaagtatttagaggtaaatgggaacctgtctgctacttattttcgaatatctcaggaagaaaaatggtagaaggaggcacagggacaaggcragagaaggccatcaggatcatctgtggtcaaaggactctgggcacactgacatccaatacctaattttaaacttttgattgttttattattattttgttagagatagggtcttactctattgcccaggctaggatgcagtgacatgattattgctcactacaaccttgaac

SEQ ID NO: 648837 - DNA, 550 bp, Homo sapiens
cagacaaaatagacagtatagaaaagaacataactgacctgatagaactgaaaaacacactgcaaaaatttcatratgcaatcacaactattaacagcagaatagaccaagcagaagaaatgatattagtgctttaagactggcattctgaaacaagacaggcagacaagaatagagaaaaaagaatgaaaaggaagaaacaaaacctctgataaatatgtttatgtaaagagaacaaatctatgattcactggtgtccctgaaggagatggggagaatggcagcaacttggaaaacatattccaggatatcattcatgagaacttcctcaacctagctagagaggctaacattcaaattcagaaaatacaaaaacccatttaaggtacttcacaggaagatcacctccaggacacataattatcagattttccaaggttgaaatgaaagaaaaaaatgcaaaaggcagccagagagaaaggtcaggtcacctacaaagggaagcccataagactaagcagacctctcaacaaaaactctacaaaccaga

SEQ ID NO: 648838 - DNA, 550 bp, Homo sapiens
cagacaaaatagacagtatagaaaagaacataactgacctgatagaactgaaaaacacactgcaaaaatttcatgatgcaatcacaactattaacagcagaatagaycaagcagaagaaatgatattagtgctttaagactggcattctgaaacaagacaggcagacaagaatagagaaaaaagaatgaaaaggaagaaacaaaacctctgataaatatgtttatgtaaagagaacaaatctatgattcactggtgtccctgaaggagatggggagaatggcagcaacttggaaaacatattccaggatatcattcatgagaacttcctcaacctagctagagaggctaacattcaaattcagaaaatacaaaaacccatttaaggtacttcacaggaagatcacctccaggacacataattatcagattttccaaggttgaaatgaaagaaaaaaatgcaaaaggcagccagagagaaaggtcaggtcacctacaaagggaagcccataagactaagcagacctctcaacaaaaactctacaaaccaga

SEQ ID NO: 648839 - DNA, 550 bp, Homo sapiens
cagacaaaatagacagtatagaaaagaacataactgacctgatagaactgaaaaacacactgcaaaaatttcatgatgcaatcacaactattaacagcagaatagaccaagcagaagaaatgatattagtgctttaagactggcrttctgaaacaagacaggcagacaagaatagagaaaaaagaatgaaaaggaagaaacaaaacctctgataaatatgtttatgtaaagagaacaaatctatgattcactggtgtccctgaaggagatggggagaatggcagcaacttggaaaacatattccaggatatcattcatgagaacttcctcaacctagctagagaggctaacattcaaattcagaaaatacaaaaacccatttaaggtacttcacaggaagatcacctccaggacacataattatcagattttccaaggttgaaatgaaagaaaaaaatgcaaaaggcagccagagagaaaggtcaggtcacctacaaagggaagcccataagactaagcagacctctcaacaaaaactctacaaaccaga

SEQ ID NO: 648840 - DNA, 550 bp, Homo sapiens
cagacaaaatagacagtatagaaaagaacataactgacctgatagaactgaaaaacacactgcaaaaatttcatgatgcaatcacaactattaacagcagaatagaccaagcagaagaaatgatattagtgctttaagactggcattctgaaacaagacaggcagasaagaatagagaaaaaagaatgaaaaggaagaaacaaaacctctgataaatatgtttatgtaaagagaacaaatctatgattcactggtgtccctgaaggagatggggagaatggcagcaacttggaaaacatattccaggatatcattcatgagaacttcctcaacctagctagagaggctaacattcaaattcagaaaatacaaaaacccatttaaggtacttcacaggaagatcacctccaggacacataattatcagattttccaaggttgaaatgaaagaaaaaaatgcaaaaggcagccagagagaaaggtcaggtcacctacaaagggaagcccataagactaagcagacctctcaacaaaaactctacaaaccaga

SEQ ID NO: 648841 - DNA, 586 bp, Homo sapiens
tgcagtgagctgtgatcatgccattgctcttcagcctgagtgacagagtaagacactgtttttgttttgttttcttwttttaaatgagacagtcttactctgttacccagtctggaatgcagtggtgcaatcttggctcactgcaacctccgcctccggggtgcaagcgactctcgtgcctcagcctcccaagtagctgagactacaggcatgtgccattacaactggctaatttttgtatttttaatagagatggggtttcaccatgttggccaaagctggtctcaaaagcctgacatcaagtgatctgcccacctcagcctcccaaagtgctggaattacaggcatgagccaagaccctgtcttaaaaaaagtaagaagcaaaaagtagaacagtaaattctcacagatcaaaataaactccatatatattgatgcatatgtatgtttgcaaaaataatttaaaagtaaataaagtgctaatgttagtttcttttgaaaatagagacagaggatctaaggtgaaagatttaattttgtacatttgcactatctatgaatcattttatactatctaaatttctga

SEQ ID NO: 648842 - DNA, 601 bp, Homo sapiens
aggaatttaaaacttgaactacattccacttcttttcccttaaaagattaagttttacattgtcaaggttttcaacattcatttctgtaattgtacttatatcttccgtgctctattgattctcatgcattttcaaggaacatgcttttgtttgtctgatcggttgtttggttggatggatggatggttggttggttggttggttggttggttggttggtttcatttgttttctctccctcctttctggaagcagtcaggatgttttctacccctttagtgttctcgattttcacaagttgtatttggtgataggacttttatttatttatttatttatttatttatttatttatttatttattttcatttatccttctcagaactcagtgtcactttttatcagcatacttaagtttttctttggtttagtgaaattgacttcaagatttgtattacygttatcattattatcccatccccagtagaaactctatagggagggatgctgaacctcttcagtcttttacatctcatgccttttttaatatactttttttaacagccctttttctctacatcctgggagagttccttgattt

SEQ ID NO: 648843 - DNA, 351 bp, Homo sapiens
gaaggcaaatggggtgaaatacctatgtccaaactttcttttcattgaaggagaatacacaactatgcaaagcttgcaatttacatcccacaggaagacctctcagcttacccccatatcctagcctccctatagctccccttcctattaatgataagcctcctctaatctcccctgcccagagggaaacaagcaaagaaatctccaaasgaccacagcctccccctgggctatcagttatgtccccttcaagctgtagggggagggcaatttggcccaacccaggtacatgtccccttctccctctctgatttaaagcagattgaggcagacctcgggaagttttcagat

SEQ ID NO: 648844 - DNA, 563 bp, Homo sapiens
ggaggtctcagatggaaataaggaacttattgggaactggagcaaaagtcacccttgttatgccttagcaaagaacttggctgcactgtgtctatgtcctagtactctgraagactgaatttaagagtgattctgcagggtatgtggcagaagaaatttttaagcagtaaagcattcaagaggtggtctggctgtttctaacttcctagatcagatatggaagcaaaaagatgacaaatctggaaaatatttaaaagggaagcagaatgtacaaatttgaaaaatttgcagattgggaatgtagtagagacagaaggagacttttcaggagaggaatacaaggaagctgtgaagcaaccatttggtggagagatttgcgtgactaaaagagagctgagtgctaacaggcaagacaatgggacaaaggccttgaaggcatttcagaaacatttcaggctccctttcccatcgcaggtccagaggcctaggaggaaagaatggtttagtgggccaggctcagggccctgttgccttgagtagcttcaggacactgctccctgtat

SEQ ID NO: 648845 - DNA, 563 bp, Homo sapiens
ggaggtctcagatggaaataaggaacttattgggaactggagcaaaagtcacccttgttatgccttagcaaagaacttggctgcactgtgtctatgtcctagtactctggaagactgaatttaagagtgattctgcagggtatgtggcagaagaaatttttaagcagtaaagcattcaagaggtggtctggctgtttctaacttcctagatcagatatggaagcaaaaagatgacaaatctggaaaatatttaaaagggaagcagaatgtacaaatttgaaaartttgcagattgggaatgtagtagagacagaaggagacttttcaggagaggaatacaaggaagctgtgaagcaaccatttggtggagagatttgcgtgactaaaagagagctgagtgctaacaggcaagacaatgggacaaaggccttgaaggcatttcagaaacatttcaggctccctttcccatcgcaggtccagaggcctaggaggaaagaatggtttagtgggccaggctcagggccctgttgccttgagtagcttcaggacactgctccctgtat

SEQ ID NO: 648846 - DNA, 563 bp, Homo sapiens
ggaggtctcagatggaaataaggaacttattgggaactggagcaaaagtcacccttgttatgccttagcaaagaacttggctgcactgtgtctatgtcctagtactctggaagactgaatttaagagtgattctgcagggtatgtggcagaagaaatttttaagcagtaaagcattcaagaggtggtctggctgtttctaacttcctagatcagatatggaagcaaaaagatgacaaatctggaaaatatttaaaagggaagcagaatgtacaaatttgaaaaatttgcagattgggaatgtagtagagacagaaggagacttttcaggagaggaatacaaggaagctgtgaagcaaccatttggtggagagatttgcgtgactaaaagagagctgagtgctaacaggcaagacaatgggacaaaggccttgaagrcatttcagaaacatttcaggctccctttcccatcgcaggtccagaggcctaggaggaaagaatggtttagtgggccaggctcagggccctgttgccttgagtagcttcaggacactgctccctgtat

SEQ ID NO: 648847 - DNA, 423 bp, Homo sapiens
cttgggctcccccttgaggccagggctcttacctagagcatttgtagttcccagcccggagaagggttctcagaagcgaaaattccactgaagacaggttaagtggaagaggcatctttgaacagctgtaggactgggtgctgggctggtagaatgacagcagattcaggtccttccaagtccattagaggcactcaagtcatggctccaccgggtcccatcctggagatcacacttgtctgcagccaagaccccagcaagatcagccctgcctgactggctcaggtgctgtgtcactccagccctctcctaccgcagctgcagccctagccccaagcacaggtgtggcctggcccaggccccagggtctgctgtccaagagaaagggcaggwaagggaggcagacagttgagaatagcctca

SEQ ID NO: 648848 - DNA, 540 bp, Homo sapiens
ttcgactcttcatgctctcctcagagaagtcacaaataaatttaagacaatcattgccaaaagttgacttgagaggctttctgagaaaagcattttctagccattcctctagattttctgggctctttactctctgtttatattaactcctgcattcttttatcctgttttttgtttttgctttttaattattttttttctttttttggtcctgggggacctcagagccaaatgtaatacccaattgtagtaaccaacttatcctaggttcccgagagcatttcttgattctactttacgtgatagtttatctacctttgtattcttgaagttttttctttaaactcttatttaagtgttacggtatattattatttttaaaataataactgttaaaatatatttactattttccataaatattaaaaaatccaattaatatagttctcggacacagggacgcaaatattgaatatactataccaactttaattatgcataaaggtgcrtttatgttattttctgaagagtatttttaat

SEQ ID NO: 648849 - DNA, 543 bp, Homo sapiens
aatgatgctaacatgtacctcttatgataycttatgatatttcaaagcaaaaatacttgaaaaattatctaatgatatccctggcacaaaataggtttttaacaagtagcacttttgcttccttgaatcttcttagctagttaatgatgagctgtaagtagagaaggaatacaatgtctctcttatttaacaggtcttacaataaactcccaccacttccacatgaatagccaatagccaaacatggctttgacatctacataaaaacatgtcgtacttctgcatgtgtcctgctctcctcccttcccattactcagtctcatcatgcataaaatagataaatacaatgtgcttgcataattacaggccttacaaataggctccttgggccaggtgctgctctccagtgtgtaggatgatgacattcttgagatgcaccaataggattggaactttttgtggcaggacaaaaagcagcttttcctctgatcatgttgtttgactctgacacaattttggaaagaggatcttcccaccacattt

SEQ ID NO: 648850 - DNA, 543 bp, Homo sapiens
aatgatgctaacatgtacctcttatgataccttatgatatttcaaagcaaaaatacttgaaaaattatctaatgatatccctggcacaaaataggtttttaacaagtagcacttttgcttccttgaatcttcttagctagttaatgatgagctgtaagtagagaaggaatacaatgtctctcttatttaacaggtcttacaataaactcccaccacttccacatgaatagccaatagccaaacatggctttgacatctacataaaaacatgtcgtacttctgcatgtgtcctgctctcctcccttcccattactcagtctcatcatgcataaaatagataaatacaatgtgcttgcataattacaggccttamaaataggctccttgggccaggtgctgctctccagtgtgtaggatgatgacattcttgagatgcaccaataggattggaactttttgtggcaggacaaaaagcagcttttcctctgatcatgttgtttgactctgacacaattttggaaagaggatcttcccaccacattt

SEQ ID NO: 648851 - DNA, 579 bp, Homo sapiens
tctcctgtttcccgccatctacatttgcatttccatggacaactgcattcatttctaatacctaccagagtgctatggacctgggcccatttgaatccccatctaaactgcaagctctttatgcacaggggccttcccttacttagatcagctttctctaagaytgcctcatgcgtggtgctgcctataaggattggaaagaacagagttgtgtaaagagcagtagacatagagttcaattttcagtccttccccttggtagttttatgatcctggggatgtttcctcatttatcaagcagaatagctacaacacccatttgatagaattactgtgaattagataacattatgcaaagtataagaaatatagtaggccctcaatagatgcccgtttatcatttttatttgtacttgattgattgcataaaacctgcaaagaaaaatgaagcctagatcatcaggtcagcaagagacacattaaacagatggcaaggcaacaaggagatgaggcatgagagagcaatttgaagaagccaggaatggtgaggtttaatcaatatggaaatgtgggcacaaa

SEQ ID NO: 648852 - DNA, 579 bp, Homo sapiens
tctcctgtttcccgccatctacatttgcatttccatggacaactgcattcatttctaatacctaccagagtgctatggacctgggcccatttgaatccccatctaaactgcaagctctttatgcacaggggccttcccttacttagatcagctttctctaagactgcctcatgcgtggtgctgcctataaggattggaaagaacagagttgtgtaaagagcagtagacatagagttcaattttcagtccttycccttggtagttttatgatcctggggatgtttcctcatttatcaagcagaatagctacaacacccatttgatagaattactgtgaattagataacattatgcaaagtataagaaatatagtaggccctcaatagatgcccgtttatcatttttatttgtacttgattgattgcataaaacctgcaaagaaaaatgaagcctagatcatcaggtcagcaagagacacattaaacagatggcaaggcaacaaggagatgaggcatgagagagcaatttgaagaagccaggaatggtgaggtttaatcaatatggaaatgtgggcacaaa

SEQ ID NO: 648853 - DNA, 559 bp, Homo sapiens
gacagccttctagtaccataggaactataaatatgatcctaacaaactcttggagacagtgagctcattgattattagattactagtttactttaccagaggcaccaacstatgagtttcctttctgagctacaattgggggcatatatgctggcctacggtcaactacagcagcagccaaaagaagctgtagtcagtgaatcagtaacagttttgtgagcactttcaagcaggcactcatcactgatgatgtaataatattcttcttgtactgaggttttgattgttgtcggtttttgtttttctttctttgtcttcttagttaaaattagtacattttttattgcttagatgacaggttactgggatggtaactttcactttttgtgtagacgtaagaaggaaaatgaatatttgcagtctggaggggaagaaagaggtaaattatcattagaaccctaaggagacttcccttcaggagagtcacaagaagatctgcatccttacttacctagaggacatatgtctgctactgaaaaatcacaggtatatgccctta

SEQ ID NO: 648854 - DNA, 559 bp, Homo sapiens
gacagccttctagtaccataggaactataaatatgatcctaacaaactcttggagacagtgagctcattgattattagattactagtttactttaccagaggcaccaacctatgagtttcctttctgagctacaattgggggcatatatgctggcctacggtcaactacagcagcagccaaaagaagctgtagtcagtgaatcagtaacagttttgtgagcactttcaagcaggcactcatcactgatgatgtaataatattcttcttgtactgaggttttgattgttgtcrgtttttgtttttctttctttgtcttcttagttaaaattagtacattttttattgcttagatgacaggttactgggatggtaactttcactttttgtgtagacgtaagaaggaaaatgaatatttgcagtctggaggggaagaaagaggtaaattatcattagaaccctaaggagacttcccttcaggagagtcacaagaagatctgcatccttacttacctagaggacatatgtctgctactgaaaaatcacaggtatatgccctta

SEQ ID NO: 648855 - DNA, 559 bp, Homo sapiens
gacagccttctagtaccataggaactataaatatgatcctaacaaactcttggagacagtgagctcattgattattagattactagtttactttaccagaggcaccaacctatgagtttcctttctgagctacaattgggggcatatatgctggcctacggtcaactacagcagcagccaaaagaagctgtagtcagtgaatcagtaacagttttgtgagcactttcaagcaggcactcatcactgatgatgtaataatattcttcttgtactgaggttttgattgttgtcggtttttgtttttctttctttgtcttcttagttaaaattagtacattttttattgcttagatgacaggttactgggatggtaactttcactttttgtgtagacrtaagaaggaaaatgaatatttgcagtctggaggggaagaaagaggtaaattatcattagaaccctaaggagacttcccttcaggagagtcacaagaagatctgcatccttacttacctagaggacatatgtctgctactgaaaaatcacaggtatatgccctta

SEQ ID NO: 648856 - DNA, 559 bp, Homo sapiens
gacagccttctagtaccataggaactataaatatgatcctaacaaactcttggagacagtgagctcattgattattagattactagtttactttaccagaggcaccaacctatgagtttcctttctgagctacaattgggggcatatatgctggcctacggtcaactacagcagcagccaaaagaagctgtagtcagtgaatcagtaacagttttgtgagcactttcaagcaggcactcatcactgatgatgtaataatattcttcttgtactgaggttttgattgttgtcggtttttgtttttctttctttgtcttcttagttaaaattagtacattttttattgcttagatgacaggttactgggatggtaactttcactttttgtgtagacgtaagaaggaaaatraatatttgcagtctggaggggaagaaagaggtaaattatcattagaaccctaaggagacttcccttcaggagagtcacaagaagatctgcatccttacttacctagaggacatatgtctgctactgaaaaatcacaggtatatgccctta

SEQ ID NO: 648857 - DNA, 615 bp, Homo sapiens
ggacactcaatctactctactcttttgtgatccacctttcttcacttctgggagcaaaatgggtgttgaggttggtcagtagactaagaacatgattgtctactcaagggttatctattgagcactgatatctttgttatgaaggctgaggctgccttctaaggaatcaggtagaattagaatcacaatcgagaaaaaagttattttgccctttgcttgccagataatctgaagggmaggtgacatcttaagaagaaggtttgaattctatttcaatcacttccttgcagtgtagccttgggtcattatttaacccttctgtgcttcagggttcttcagcagtaaaatggagataattaaagttcctctctcacaggactgctttgagtaacaaatgagttcatatatgtaaaacacacactcaatgcaaaatgagagctatttatattagtattgttcaatataagctgtgatttgctcactcatttgtatatttacttgccttagctgatgagaacatttattctgatctattcaatagggggctttaacttttttatgaagtcattacctaaattgtttttgtattcaaactggcccaggaggtgtcagcgg

SEQ ID NO: 648858 - DNA, 615 bp, Homo sapiens
ggacactcaatctactctactcttttgtgatccacctttcttcacttctgggagcaaaatgggtgttgaggttggtcagtagactaagaacatgattgtctactcaagggttatctattgagcactgatatctttgttatgaaggctgaggctgccttctaaggaatcaggtagaattagaatcacaatcgagaaaaaagttattttgccctttgcttgccagataatctgaagggaaggtgacatcttaagaagaaggtttgaattctatttcaatcacttccttgcagtgtagccttgggtcattatttaacccttctgtgcttcagggttcttcagcagtaaaatggagataaktaaagttcctctctcacaggactgctttgagtaacaaatgagttcatatatgtaaaacacacactcaatgcaaaatgagagctatttatattagtattgttcaatataagctgtgatttgctcactcatttgtatatttacttgccttagctgatgagaacatttattctgatctattcaatagggggctttaacttttttatgaagtcattacctaaattgtttttgtattcaaactggcccaggaggtgtcagcgg

SEQ ID NO: 648859 - DNA, 564 bp, Homo sapiens
acttaatttgggaacagaagctacacatgaaagccttaaaaaaaattgatgaaataaaatctgctaattcatgtgattatctcagaacccaaaagacaatgttttgggtcattttatgccactgagaactttacctgaacacttgtgacaaataataggactactatctttctaytatacacattttggcaaataactgagcataataatgaaatacaattctaatactgtgctctaacctttagagcacaaaattaaaggaagaaaaacccctataattaaaatactacagaaaatggccaaatggacatgggagtaatgtaaaataaatcctggaatttaatcagctttttaatcatcactagttaagacaattggttgggactgttattgtcaatagcaaactaaaatcatttcacgtgataatttcgagggttaattgttgcagtttattcaatgcaatcttctctaccggcttcatttttatttgccagtacaccaatataccatgattagcataaattaaactaagtcaattctgtgggttactaaattattttacac

SEQ ID NO: 648860 - DNA, 387 bp, Homo sapiens
ctggagcctaataagttatyttgggccatagggtcccatactaaggatgacagaaatgcaaacaagagagattcggggccttaataattgcggaaccaccaaactactcttgagctggctacctctagtctcttttcctaaacataaaatacactcgactctaaacttgtttaaactgctgttattttcagttctttgttactcacagccaaatctacttcttttttaatgttgttgttattttgagacagggtctcactctgttgcccaggctggagtgcagcagcgtgatcatggcttaaggcagtcttgacctcctgggctccagtgatcctcccacctcagcctcctcagtatctgggactataagtgcataccaccgtgcca

SEQ ID NO: 648861 - DNA, 580 bp, Homo sapiens
tgaggtgggacacagaattttaagtgaagaagaagggagaagcttatctttatcaaaattaaatattagatactgagtactttgtaaagtctgttgctgctggggatcaggcaaattgttataaccttcctggaaggcaatttcccataattatcagcagtttacagaatatccaagccatttgaccctaagataatgtttctagggatttctcttaaggatttaatcaaggacacatacacagattatagcagttcaaaattggaacccatctaattaacaataagggattgtttaattacacatgaaatattatttaaacwtgaacattatattgcctttaaatatttgacatggaaagaagcttaaaactcagtcctatttccttatcaatgttctatcaacaaggggcaggaggtgtcacctccttgggaatcagagttggcccctcaggtaggtgtttggagcttccaggtaggggctggggacaaagtgtggatggggcacctgctggacctgtggcgagatcatcagggattgctattggtctcagcaagggagtgaggctgaccagttctca

SEQ ID NO: 648862 - DNA, 609 bp, Homo sapiens
cagtttctaattaattgcatggccttgaataaattacttaacttatctgagctccagtttctcaatctggagaaaacacaggattattatgaggagattcactataagcagagtacctagcacttggttgaacagagcgcacacattaaattgcacctattgttaatatataacttctcagggagaaaagatctctttgtcaaggtagatgtgaggagattttctgggaaaggcagaaacaaggtgaccagaattccacgatccaccccacaccctggttcacagcgtacttctgctgcagggagccattccatcttcaaggcccagagaggcattcctacaacaccccatggttcaggctggagtgaacaaacactgggaagctgaattataaggaaatcacccaaaacttctcctggcccgcygggctttccatctcttttcaactttaaagaaaatatcacatatttattccctctaagcaggttcatagggtgtttatagatcatgcaatcccacacaaggtgtaaagtagaccctgcaatcctcagagaacattcacatggattcaactgattatgatgatgatcactcatatcacagatgtca

SEQ ID NO: 648863 - DNA, 573 bp, Homo sapiens
aataaaaacatgaaatacattgactggtttttagtgtttaacgaytgattttattaatctgattcctcaaccgtgtcagtggtatcctttgctttctttgattttacctacacatccctacccccatttccttctgctcttctaatctgacattctggaacgtcatctttattagcttgttgataatgttgtactgctaactaaatggcacttttactcatttctgtcagggtccaatcagcatggttagggtgatatttagggatcataatgatatgttagcagtgaataattttaacatattaactgtttattcctctggttgtcaggccctgaaaaaacagatgacagtacccttggttgattttacatttcttttggctgagatcactagtatattgaagtgttaaaatgtcacttctcacatttttctttgcaattaaagttggttcatctcacatttgtaattttttatttgtaaagaaagtaattggaaagtaagccctcttgttcattcagtttccccattagggaactttcatattaatgttataaatattcttaattattgta

SEQ ID NO: 648864 - DNA, 624 bp, Homo sapiens
ttgttctttttgcttagtcttgctttggctatgtgggcttttttttagttccatatgaattttagaattgctttttctaactctgtgaaraatgatggtggtattttgatggggattgcattgaatttgtagattgcttttggcagtatggtcattttcacaatattgattgtacccatccatgagcatgggatgtgtttccatttgtttgtgtcatctatgatttctttcagcaatattttgtagttttccttgtagatgtcttccaacttgtttgttaggtatattcctaagtatttttttttttttttgcagctattgtaaaagggattgagttcttgatttgattctctgcttggtcactgttggtgtatagtagacctactgatttgcgtatattaatcttgtatctggaaactttgctgaattgttttatcaattctaggagctttctggaggagtccttagggttttcaatggtcatatcatccataaacaaggacagtttgacttcctctttactgatttggatgccctttattttcttttcttgtctgatttctctggctaggacttccagtagtatgttgaagaggagtggtgacagtgggcatccttgtcttg

SEQ ID NO: 648865 - DNA, 574 bp, Homo sapiens
aaacacaaagcacattttgcagaaaatgattttttagaagtcagaactatgacatgaagtcaagcagggcactctaggactgactttgctgtgcttccttaatatgctccttgctctctttcttttctggaagctgtgactcacacaggtcatggagaaaatttcgtactccttcctcatgcccagcttaaatactagtgtacaacgtggaaacctgtaaattatctgacatttctctctgtcctccaaacctttctcattcaattatcactaaatcatattgactatacctctcttctgcctctgctttatattaccacttccactgagaacataaacatttacaaaatggcttttattacaaaaaagccttccaactattaatgttatttctyacatgaaaaaaattaagcaaaacaaatgaaaaaagcataacaccaaaaaaaggccaacacattaaaatgagtaatggggattccaaactttatttcaccatgggcaggtgaaaaccttagaatacattgatactagtccaaggatgtgtgacatggaaactatagatgactactgcaaa

SEQ ID NO: 648866 - DNA, 215 bp, Homo sapiens
atgaaaattaaaatttcttctagtgacgaacaaaatgatacccagaaacaactttctgaagaacagaacactggaatatcacaagatgagattctgactaataaacaaaagcagatagaagtggctgaaaaggaaatgaattctraggtattttctttagtcattatcaaatgttttcatatgtgtgtatatttttaaaaagctttattttggaa

SEQ ID NO: 648867 - DNA, 549 bp, Homo sapiens
tggttggctgccgcctgatggatagacgagggaggagtgtactctcttcagtgtgttctgacggagccgaagtacagaaascatatttacaggtaagagcgaaaaataaaaaaaaagaaaagagaattctttttttctttaaaagagaatgcttcttaatttttacggaaacaattttatagtaggaaaattattctgaggacattttctgaaagtgtgtcccttttattacttgaggaagctttgcaatgagcttgctgttctttctctctgcaaaatccttagctgattaaaaacaaaacaaaacaatcaccagaggcatgtcttatcctaaataactttctatgcaagtgtcactgaagcaaaattaatagataaaatgaatcatcatgtgtctcttcaaaaatgtttaattcaagcttgttactaggaatcgcaggaaggatgagaaaacctcggtaaattccacaggtcctgagaaaatggagccttctgtgaatatacaatataaaatttcatgtgatggcttttaatattgacaatacagta

SEQ ID NO: 648868 - DNA, 598 bp, Homo sapiens
gccctttgctctgtcaggaaactgtccttcagagtaaatgatgcttgtgctggttgcaggcatattaattatgcaatgctgtattttgagatgcaattgcagatgcaattraactatttcactgaatttacaagttttattatcacttgagaacaccagacaattactccacttgtgttcatagaccatcattcccttttgacgtatttgggttgtgatgtgtgccaggcttccagacaagcagaagtcgtcaacttagaggtctcaaattctgtgattccgacaggaacagatttattctcaaaaccccagcattggcaaaagagatttttttaaaggcaggaacaagatgacagcctttcaaacaagttctatttctttatagcttatcaccgaatcatctattaaaaatattacaagctaattttatagtttagtcaatgctatcattgggatgtgaccttcagtgatctcagtgctggctggcttggctgctgactgaaacataccagcaatagctatgtgcctcactgacctactgaagatacccttttagagaaaatgttgaaaacatggaagagtgccttgaccattgcca

SEQ ID NO: 648869 - DNA, 599 bp, Homo sapiens
agagggattacatttacatgtcaaaagatgcaaaggccacagagtcctgctaaaaagttgatggggagagagaggaatgggggagagaagaaagataagaaggggagagagagagagagagagaaagagagagggagaggagagaggaggagagagagaattctgcaatattaaccatggctttctctgtgtagtggtttatrggagaagatttttgtttttttatgattacctgggttattttttattttctacaataaacatatatgattcttgaaatcaccagagagagatgtcattaaagattaaaatattgataagagtgggtctgtgcctcttcttccagagccaggtaggagtaggaagctacctttccagcgagaaaaatcatcctgtttgtacaggacacgtttgtcatccggtgtttccttgactccctcttatcttgctgacaaggagaaggatggaaaagggactgtgatcgagtgaggcccacggagcatgactcaaacaacccattgtgaaggagggtaatcgcagaatcagctttggaaatcaaataaaatgccatgtcttgtagccaagagacactgcccaag

SEQ ID NO: 648870 - DNA, 586 bp, Homo sapiens
aaacagaatgagaagacagggcacaaactgggagaaaatatttgtaaaacacatatctgataaaggattgttatataaagtatacaaagaactcttaaaacaacaataagaaaacaaataagctgacttaaaaaaatgggccaatcacttttacagacacatcaccaaagatgatacagatggcagatacacacatgaaaagatgctccacgtcagacaccagagaaatgcaaattaaaacaaacataaaataccactacacatttattagaatggccaaaatctggaacactgacaagaccaaatgctggcaacaggacctctattgctggtgagaatayaaaatggtacagccattctagaagagagtttggcaatttattacaaaactaaacatactcttaccataccatccagcaatcacaccccttggtatttggtatttactgaaagaagctgaaaacttacgcccatccaaaaacctacatacagatgtttatagcagctttattcataattgctataacttggaagtaaccaagatgtccttccgtagaggaatggaaaataaaactgtggcatatcc

SEQ ID NO: 648871 - DNA, 572 bp, Homo sapiens
tagtgctttgagtctaaggttgtaaagtatttttgttcttactataaatattgcaaaagtgctttgcactggacagactgtgagcagtggatattgcccattgcctatgcagaatcattcccctcctccctcccaacagagccacgacttcatttgggaatctgtcccaccccacacagccttgtgacccaggacacaaggctccttcccatcctcatccctgtccaaaagcctcaggtgggcctgatagggccaaagataatgccatctcccttgtcaatgattggctcaaggatggggtcttgggacgcagmcctgcctagtgagataggaggagtctgtcaaggagctgcaggggaaagtttctcagctcctagagcaatggcctgaggagggcaccaaaacttcttaccctgtgatcattgtcaggtctgaatgcaattcctgaaaccctgcagccatgtggctgccaccatgaagataaattgagagaggaaggcacaggggagaaggcctttcacaatgtcactgagcagcctaatcaacccatcctaaagacgggcctgcctctg

SEQ ID NO: 648872 - DNA, 538 bp, Homo sapiens
ggttccttgcacttaattcatatgtgaatctccctaagtattcatatatattatgggatctgctttgatttttgaaccktgacagacatagggctgacagatttgtcttcactgttctgacactcttgaatataagtcttgtgggggctattggcaaagaattcctctgtcagaatatatttgagtagccgcttcttaaatctcttttcttttttaaattgtcacatgacaacaaaaatatttgttatagaaagaaaaatataatccatccctatcatttggattctgtatttgtgaattagcctacgtcctaaaacttgtttataatccccaaattaattactatattgcatttctagtcatggcagaacatcatgcaccatgtggagaaaagcattaaaataataactcgtatttcacccacgagattggcaaaggtttgtaaattcagtaagagacctcaaattagtagagttatttggttagtcagtgatttctcttagagtggtagaaaacaaaaaaagttttatcttcctgt

SEQ ID NO: 648873 - DNA, 580 bp, Homo sapiens
atgttgtaactgcaggtttttccttccaggagtgagtccgtgctgctgcacatgccccagcctctgaatctagagctcagtgcagggcccatcactggactgagggacaggctcatccaattctgaggtaagtctccacccacaggcagcactcccactatctaaatattattattgttaggaccacatgggtaatacttcaccatttatcaaatattttacttctttatagacataagtgaacaacataatcatgcaacccttttgtatctgtgtctgtatagtcagatttatagcattaagtttgaaagatagtgaaaaacaaatacattttggcctcatatgtactgagtaatgtaatgggaaaaargagtagtgtagcaaatttaaaaaaggagcaaatggaacaatgctcagaatgaaggtgagttatttaatgttaaatacaaaattttacatttccttagtgtattcatttgaacagctaagaactttttttgggattatggtttactggggattgctgagggtttttaattttttaaatggatatgtatcatgtattgcaaaaaaaaatagt

SEQ ID NO: 648874 - DNA, 273 bp, Homo sapiens
gcttcagccccaagctagcatggaggaccacagagagactggtaaaagattttacagaaatctgctttaaattgtcacttaygacatgtacttacggatttttatccagtcatcaagagcagttcttgagtaactgaaaatcttcacattctttccaaaatgatagcactagtttttaagaataagaaacatttctaaataatgatcttgataatagcatagcatttagggcatataatgtgcaaattttgctttgaaaattggattgaaaga

SEQ ID NO: 648875 - DNA, 273 bp, Homo sapiens
gcttcagccccaagctagcatggaggaccacagagagactggtaaaagattttacagaaatctgctttaaattgtcacttacgacatgtacttacggatttttatccagtcatcaagagcagttcttgagtaactgaaaatcttcacattctttccaaaatgatagcactagtttttaagaataagaaacatttctaaataatgatcttgataayagcatagcatttagggcatataatgtgcaaattttgctttgaaaattggattgaaaga

SEQ ID NO: 648876 - DNA, 550 bp, Homo sapiens
tgcctcttataaatcattcagaaggagaatgaaaacgaaataaaaaatgttcaggacgaaataagaatttcataaaatgagcattccaatagaggataaaaatatgataaggtgctcaacatttgtgattagtagaatgctggttaaaaccacaattcaatatcactatactaagagcagagtagctaagtttgttgttgttgttgttttttacagtgacaacatcaaattgaagctatgatttcaagcaattgaaactcatacactgatggggtagcatgatatatttaaattattacaaccactttggaaaatgttttgacagtgttcactacaacmtaaacttatatttactctatgaactagtagttcaactccaatttatatagccaaagtatgtacatataaatattataaattatttataaagttgtttataacagcattattcaaaatcaacaaaactagaaacaacaataatgtatataaccagttgaatgaatatataaacatatgtatatcatataaaatatatggcaattaagcagaa

SEQ ID NO: 648877 - DNA, 598 bp, Homo sapiens
tgcatttaagtgtttttgagagctgctgggcgcaagctgccttacagtgacctctgtgcaaatggcacttctctatccagcatactttcttacagcgctccccaagctgcaaaatctccaccttgccgaagactactggattcctctccatttttactgcaacactggagccatgctatgttgtttgcagaaatgataaaataccctttccccagctctgccttgaagattgttaatctggtgctaatctcacaaagttctttgtgtaaacagccacttcaacctttctctgcagccttttttctgtattatggttcagagtgagtccctagggcagggtattaaatgaactagatactgtgctttgtgttttttttttttggaccaagcatccacacacaaaactgttctcttctgtccctatttggcccctataaatggttgctgaaggagggatgctgttgccaaccaaacaaatccaatctcaactgtgtaacatttaccctagttggtttatctagtggaaacatagaacgtggtttaccaaaatgcctggtatayggctttatatcctatttggtgacatttagaactctat

SEQ ID NO: 648878 - DNA, 481 bp, Homo sapiens
atgcatttgttttcatatggtctagggtagttttatgcttcaatgccagagttgaatggttatgacagagttgacttaacccacaaagcctaaaatatttacttctggacctttatagaaaaaaaaagttccagctcttgacttgtagtaatatgaacagttttggttggcatatttaagaaatattaataaactagagttagctattatgagaatgaaatgtgtgaaaactatgctacacagtaaagtacggagaatttttagtctggaaaaaagrgcttttaaggagtttataaaattcaaaaaaagcagattaggttgatgcatactacttccactgacaactggtttactaaagattggagaaaaaaaggggaatatatttagaaaggcaacttggagttcattggaaatatgaatacttttggactcaataattacactatgaaattaatctgagagggatatttctatacatgta

SEQ ID NO: 648879 - DNA, 580 bp, Homo sapiens
atcatcataagacagggattcactttttgtcattattataaatgaagaaactctttattaaggaaatatagtagcgttcactaatgcaaacagcaggaggctgaagggccagagttcaaatttaatttttctctcaaaccaaaattatggccattgcattattttctgccacattttatatttcctcagacattttcattttgagacccaaaagaaaacattctgcarttttgaaatgcccaacaaatgttactagagtcaaagggttcaggggttaaaaaatttgtcaccatcttatgacatggtaaatcatcaaatgattataggtagtacacatatttaaggtttagggatttttattctgtatttgtgattgtaattcaatctcatctttaacttgagatgtaaatgtgatttgtaactttaagtatcaatagaaagttgcagattttcaggaataaaaaaataatcgctatcattctcaattggaaaataatttgaagtgttttctttgtagtatgagggtctctggggcatgaacagctgcttttaatattttctaacccaatacctattatat

SEQ ID NO: 648880 - DNA, 585 bp, Homo sapiens
tacagcaaatgttcctgcccagattcccaatccgttgaaactcacttagttctgattggtcaatatagctgagctctgattggcagtgacctgtgattggttggtttgtgagccccaaaccagaagtctctgtgagatgtttctttcaaatgccccagtgtatgtgtgttgagggaggaaggaggggggtgttccagccacagtttatcttggtatcaacaggaattggtttggcttgattgtatctggcttctgaacaagcttgaatgttttagaatattcaccaggtccaatcaccttaataaaytttttattttgtgcactttgtttcattctgttattcttcttttcttccttttctctcttcctctcttttgctccttctcttccccttccttcttaaaaaatgaatgccaggattatatgttccatgtggcaagctaatacaggaagtcctgtggtacttttacaacacggttctaagaatccagagtatgtcaccactccctcagcaagctgtggccacctggttctgttttaacttttagggggtttattttgtctgtcagtcagggacacacttta

SEQ ID NO: 648881 - DNA, 554 bp, Homo sapiens
gtaaaatccaacatcttcataaaaacctctcaacagattaggcatcaaaaaacatacctcaaataataaagccatctatgtcaaacccacagccaatatcatactgaatgggcaaaagctagaaaccatttgcyttaagaactggaaagaaacaaggaagctcactcttaccactcctattcaacatagcactagaagacctagcaaaaacaatcaggcaaaagaaataaataaaaggtatccaaataagaaaataagtcaaactatctctgttcactgacagtaagaccctatacctagaatatcttaatctttcaaaaggcttctaaaactgataaactagtttagtaaaattttaggatataaaatcaatgtacaaaaatcagcagcattttatacactcaacaagatacaggctgagagtaaaatcaagaacacattccacttacaatagccacaaagaaaatcaaatatctatgaatatagctaatgaaggaggtggacagtctctacaaggagaactgcaaaacactgctgaaggaaatcaaagatga

SEQ ID NO: 648882 - DNA, 377 bp, Homo sapiens
atttacttttatgagaacatcatgggaaagacctakccccatgattcaaatacctcccactgggtccctcccatgacacatgggaattatgaaatctacaattcaagatgagatttgggtggggacacagccaaaccatatcataggagtttttcagattgtggagattaaccccttattagatatatagcttgcaaatattttctctcattctgtacattgccttttcactctgttgattatttcctttgctttacagaagcttttagtttgatgtagtctcacttgttcatttttatttttgttgactttacttttggtgtcatatccatgaaatcactgccatgaccaatgtgatactaagagggaagtttatt

SEQ ID NO: 648883 - DNA, 407 bp, Homo sapiens
tgtggtaagggaaaactgcccagtcagagtcattactgtctaatggatgttagccacagaccagtgaatgtagattgggaagagaagaaagtgttcctttccttgcagttcccaccatccaaacttctgtttttggccataaagaaccctgacattcaacctccctcttcttcccagttctctactcacttattcccactctttatatcttcaaaatatatatatatatatatatatatatatatatacatatacacactatatatatacacacactacatatatacatagtttgaagatataaagatatatatatakagagagagagagagagagagaaagactcattctgtcacctggactggagtgcagtggcacaatcatggctcactgcagcctcaatctcc

SEQ ID NO: 648884 - DNA, 616 bp, Homo sapiens
tttatggggtcagacagcctgtgtttgcctcagtttctttctcagctgctctgcctaggagctgggcgactctgcgtccactaatcagtccctttctgcctccattttctcatttgtaaaagataataggacctaattcatgagactgttctaagaattaagtcagataatatgtgcaaaccactcagacgattacctagcccatgaaataaaattttagctgttattgtttttttattttctattacccataaactacttcataagattggaagaaatcaagtaagatcatatakgtaaaacagtgcagggtctgatacacattatggtaactgtcatcattatgtaaaatgatttgaagactgtatatctttttaagtttatttttatatataaattacatataaatgtatgtatactcatatataaattattaaaatctcaatataatttgaatgaaatggtttgattgtatataagtgatttatatataaattatttgaagactatatatatattttaatatttatctactaattttttcagtcagcctttattgagcacctattatgtgctaggtttatatttgtagtatacagtttttccagcgtagtag

SEQ ID NO: 648885 - DNA, 616 bp, Homo sapiens
tttatggggtcagacagcctgtgtttgcctcagtttctttctcagctgctctgcctaggagctgggcgactctgcgtccactaatcagtccctttctgcctccattttctcatttgtaaaagataataggacctaattcatgagactgttctaagaattaagtcagataatatgtgcaaaccactcagacgattacctagcccatgaaataaaattttagctgttattgtttttttattttctattacccataaactacttcataagattggaagaaatcaagtaagatcatataggtaaaacagtgcagggtctgatacacattatggtaactgtcatcattatgtaaaatgatttgaagactgtatatctttttaagtttatttttatatataaattacatataaatgtatgtatactcatatataaattattaaaatctcaatataatttgaatgaaatggtttgattgtatataagtgatttatatataaattatttgaagactatatatatattttaatatttatctactaattttttcagtcagcctttattgagcacctatwatgtgctaggtttatatttgtagtatacagtttttccagcgtagtag

SEQ ID NO: 648886 - DNA, 566 bp, Homo sapiens
gtgtgtgtatatatatatatacgttttcttatattctgtcccaaatgtaaattttttataatgaccaattactaatagccctagaattcaagtaatttataggtatcctagatataaattaaacagagcaagtcaagctgccatatatgtggctaaatgtttgcttaaaaataaatcttttttaaacaggatatcaggtagatttgcacttctaaaagtgcattttagagaatatataggataattatctcattatacagctatgaggatactgtaccaatgaaggtagttaacttacccatagtcatagctatagcatcaaagccatcattatcctgatccccagttctgatgatttgccattagttcatgctaccaaacatttatttatttatttagagacagcatctcgctctgttgcccaggctgsagtgcaatggcacagtctgggcccactgcaacctctcccttccaggttcaagtgtttctcgtgcctcagcctcctgagtagctgtaattacaggtgcacaccagcatgcccagctaatatttgcatttttaacaaa

SEQ ID NO: 648887 - DNA, 542 bp, Homo sapiens
gagccttgtcactggtaattattggacaatggatagctcctggaacaaagtagtagtgaaattatttaaattttcacctataatgaactgtaatggtatatgggtgaaagaaaatgtactagtgggtgcaatatatcaggagttaagaaaaatgagggaaatgataaatgcaagaacaatgaaatttgacagctctgtctgggggcaactgtgtttagaaaaagataataaaatgctcttctcaatcagaataagaatatcacattttgagtgtgtgttgggggagcaaatattatgatctcgtaaagaactgtaaaatgcaagaatagtagtattcattaaatctckgcttaattcatcaaaatgtcttaaaagggcagatagatgttgaagactgatactagactcccactaaatagtagtcctaatcgtagtaattaacatggctgcaattgtgaggtatgtgcctattaatctgtatgaatgcatgctcttttgcattcttaccagaaagaaggatcagaaacagtctatatttacaa

SEQ ID NO: 648888 - DNA, 625 bp, Homo sapiens
catgttgagaataaaaaatgtagtgagtaattatacactaaaatcatagtatcttataggcaatttttttaggtcatagaaatttgagaagcacaaaaacacacttctaaaatcactataattctttttcttttctttcctttttttttttaagacaggatctggctctgttgcccaggctggagtgtagtggtgcgatctccgctcactgcaacctctgcctcctggggattcaagcaattctcgtgcctcagcctcccaagtagcgggattacaggcacatgccaccacagccagctaatttttgtatttttagtaaagaaggagtttcttcatgttggccaggctggtctcaaatacctgacctcrggtgatccatccgtcttggcctcccaaagtgctaagattacaggcgtgagccaccgcgtcaggccagatcactgtaattctcattgaaatgggaaatgcaagtcgcttagaggactaaggattagaccatgaagacttataagcagaagagtccagctatgtctagacaggccactgtggttaagagatgggcacacaaagaacaatgcttgccccaaacaagtggttttagacagtgaggcccttagccataagc

SEQ ID NO: 648889 - DNA, 558 bp, Homo sapiens
atagcaataatattcaagctgagcgcaatcccattcacaatagccatgaaaagaataaaatacccaggaatacagctaaccaaagaaatcaaagatctctgaaaggagattacaaaacactgctgaaagaaataagaaataacacaaacaagtggaaaaatattccaaactcatcaatagcaaaaatcaatattattaaaatggccatatagcccaaaacattgcacagatttgatgctattcttatcaaactattaatgtcatttttcacagaattagaaaaaatctaaaattcatatggaaataaaaagagcccaaatagtcaagacaatcctaaggaaaaggtagaaagccagagacatcatattaccagactgcaaactatactacaaggtagtataaccaaaacaacatagtactggtataaagcacgcacttagacmaatggaataggttagagaacccagaaataaagcttcacacctacacacatctgatctttgacaaagttcacaataacaagcaatggggaaaggactccctatttaataaatggtc

SEQ ID NO: 648890 - DNA, 538 bp, Homo sapiens
tgttgtctgtttccaaaatggattcaataaacaacattttgtccatgttaccctattctcatgctgggtgccccaggggtgtcttgatcgaatttgcaagtatagcagtcaaatcagatctttttttttttttcctcaaattagatcttgatgcatctttccctcaaactccctgccccaacttctgcctcctcttttcttgttgcctctactccacagtcagacagcagccttagctcagccagtcttccctgggttttgtttgcaatcctggactggattggcaactcatttcctggagaaacatattgtggagctagaaaatactgaaaaaagtctgagaagccaatactttttctaaaaccrgcttggcctttcttcccagagtatttgacctagagggaacagttaccatatgtactcatggatgatctcatatattcccctctgattctgtttggcagaggaaatttatgttttactctgcataaatacttctaggaggcttatagcagcaacagtctgagaccgctaaaga

SEQ ID NO: 648891 - DNA, 644 bp, Homo sapiens
tttcaaggtcaatttttttctaatataaataatggtataataataacattttgcctgaagcctgactcacctattagatcactaccctaggattaattctcaaaatttaagaatgcaaggccaaagagtaggagcatttttaaggtgatgtgtaatatcacactgacctcaagaaaagtttcacccattaaactcccccaacccactatagaacttttgctctctatatcaaactttgaaccacttcccagatgagccatagcattcaaggctggaagaaaggtggtatcctatgagagtgtccccacaagattaatccatctgtccggagaagcaaatccgaaatccagccagggccaaggaatactgtaggcatgtgctttttgagcaacacttccattaaccctgtttctggtaccacctgtctaggaatccacgttaggggcttccccctcccccgacactaaatacttggtatattttccaacatcaattctgtttctctgacaccaactgggtatccaacaayccaattcaattataacactatcagaattagcatagaccccacaggttaagggctcagtcccacaagactgccccacttcgaatgccactcacaagtccaaggttgccagttgcac

SEQ ID NO: 648892 - DNA, 572 bp, Homo sapiens
gtgctgatatatgtgtaaacatgtgtgtgagtgtaaatatagtacagtgtaaagggtttgagactagataaacaatacttgttaggctaaaagcttttgaagtatggtgagaatatcatgctataaatcttcacagttttagaaaaacagttgtgacagttgtggaggaaaccacggaataattattttcatactcagcaaaaatgtattggcactaacacccataaaagtaacgtttattcttgaaatatcccttcttatcaaagctaaatctttctgttgcaatcctgcatgcttattaatttactgaaattcttgtttttatacagctgggcaaacttcaktgctatctttattggaattctcataatttttcatagtttttctttttctggcatcaatatatacagtgaccatataattaattaattccataaatataaatatgctgtttatttggaacaggatcctatctaaatctctgaaaagagagagaccaaggggcaacattttgtgcactcaagaagctcacattttagtggtgaagacgaacaaataatgacgatgcaata

SEQ ID NO: 648893 - DNA, 371 bp, Homo sapiens
ggagggcgggagcgggctcgggcctgggaggggagtgcgagtgcagggctggggactggaccctggggagggaggtgcgggttcagcgccgggggacgggcccctggggaggggtgcggggccgggggaccagaccctggggaggggcttamggggctggaggacgggaccctgggaagtggggtacagggctagaggtcgggactctagggagggagcctgggtcgggcgcacgggccgggcggggcgcgcggtgggggagcgacgggtggagggtggggtgggatgacagcggcgacgcagccccggctgtttttgaagcggggcccgggcctcaccgggctgcggcgtccgactcgagtgagactctc

SEQ ID NO: 648894 - DNA, 371 bp, Homo sapiens
ggagggcgggagcgggctcgggcctgggaggggagtgcgagtgcagggctggggactggaccctggggagggaggtgcgggttcagcgccgggggacgggcccctggggaggggtgcggggccgggggaccagaccctggggaggggcttacggggctggaggacgggaccctgggaagtggggtacagggctagaggtcgggactctagggagggagcctgggtcgggcgcacgggccgggcggggcgcgcggtgggggagcgacgggtggagggtggggtgggatgacagcggcgacgcagccccggctgtttttgaagcggggcccgggccycaccgggctgcggcgtccgactcgagtgagactctc

SEQ ID NO: 648895 - DNA, 505 bp, Homo sapiens
ttttttcttttttctctttttttttaagatagagtctcactttgtcgcccagcctggagtgcagcgacacgatctcggctcactgcaagctccgcctcccaggttcacaccattctcttgcctcagcctccccagtagctgagactacaggtgcccaccaccacgccaagctaattttttgtatttttagtagagacagggtttcaccatgttagccaggatgcagaaataatttttaacatgacaaaaatgataagaaatgtaaatacatcaaacttagcctgagagaggacccttacattgcatcaacaatataatctaayactattttgctaggaatgatttaaacaagcatgtcataaaaagcttaaattaaaaaggtagaaaaacctgtaccaaaagaaagccttaagtgccaaagaaacttgtgataaaaacattagaagagacaaagaatagcagtacatgtcgataaatggaaaaatcaacttatactcctttaaat

SEQ ID NO: 648896 - DNA, 480 bp, Homo sapiens
cctgccacagttgtctcattttggtgaagtgcgtgtccagrtttccccatgctcccagctgcaacatggatctgtgaaagacagtacagcagaaaagtattcacatcctggctctctctgcccttcattgtctttaagctctttaacaacttttacttggagaggaaaacaactatctagacaggaacacggagcagcagagggagaaattgtgtctttactgatttcagtcaattattgcagtgaccacatgtctcaggagtgttgatgtccagatgagggctgacccatgaaaggtcagcaaggaaaaaggaggacctaaactttcctcggtttgcaagttgtaaaagacccatggaatgccaactatccttgtccatggacatgtggacagactgtccagtggctatcatcaattttgcatctatttgtaaattctatgtcagcattcctattgtcctagctatgcgtggcattttt

SEQ ID NO: 648897 - DNA, 480 bp, Homo sapiens
cctgccacagttgtctcattttggtgaagtgcgtgtccagatttccccrtgctcccagctgcaacatggatctgtgaaagacagtacagcagaaaagtattcacatcctggctctctctgcccttcattgtctttaagctctttaacaacttttacttggagaggaaaacaactatctagacaggaacacggagcagcagagggagaaattgtgtctttactgatttcagtcaattattgcagtgaccacatgtctcaggagtgttgatgtccagatgagggctgacccatgaaaggtcagcaaggaaaaaggaggacctaaactttcctcggtttgcaagttgtaaaagacccatggaatgccaactatccttgtccatggacatgtggacagactgtccagtggctatcatcaattttgcatctatttgtaaattctatgtcagcattcctattgtcctagctatgcgtggcattttt

SEQ ID NO: 648898 - DNA, 559 bp, Homo sapiens
tcagttattaactagatgactccatgatccacggatccttgttcagtgactaaaacatggtcttgccatttttataggaatattttaagttttttagtgtttctatctgtatgtcttataagctaaatatgttttatgacaacatttaagagtttcatcttttgttgcaatttacagaagtatttttagaagggtgtctttagaggagatcttagtgatatatttagtaacattactcaacgtgttgctttttcattctttcatttaacagatctttcttgtactctctatgtagcaggcactaatctaaattggaggggagaaaggggcagacaggacaggagtgagtgaggcaaagtctaccccacaaaawgtctacaccacaaaaagtctatgccacaaaaaattcacattctaattgggaaagcagactataaacaagtatgcaaatgcataatatacatagtaagaatacatagtaatacataatatacatattaggaataaaatgtgtacaaagaataaatagtaagaataaaacattctggtaagaaattaa

SEQ ID NO: 648899 - DNA, 587 bp, Homo sapiens
aagggagcggtcactcctagacctgaagcatctcttccatagacgtcacagtatatatcttcccagccagctcctccccagcccttcagggaaggtgaacacaattccacactagagtggcttttaaagaaaaataacatgtatgaactcttcccagaattctatgaaatgaatgagtttgcattactttttctagcttatgacccgagtcttttattttttcagatacatttagttgtgtctttcaaaatctatttttgcagaacctaccctttgttagcattgggctggaaccccggaaggataattatgtgtgggacttggtagctgcccttaggtgtacaatcccataaaggagagatgccatatgcagaatgatgaaatgcagcatgaggctaagtgtccagcatgggttatggagggtagatgagagagaggttggtgcccagaagacagccgtcctgcctcgggcctatrtgtctgcagaggcccacaggagtggggcagtcctgttcagggagggctgaggggttctccgaatcttatcaggtaggacagggagactttagaaaggattgggcattcag

SEQ ID NO: 648900 - DNA, 655 bp, Homo sapiens
ctagcttatgacccgagtcttttattttttcagatacatttagttgtgtctttcaaaatctatttttgcagaacctaccctttgttagcattgggctggaaccccggaaggataattatgtgtgggacttggtagctgcccttaggtgtacaatcccataaaggagagatgccatatgcagaatgatgaaatgcagcatgaggctaagtgtccagcatgggttatggagggtagatgagagagaggttggtgcccagaagacagccgtcctgcctcgggcctatatgtctgcagaggcccacaggagtggggcagtcctgttcagggagggctgaggggttctccgaatcttatcaggtaggacagggagactttagaaaggattgggcattcagtttgtgggtgtgttataagcaaagtctggagcagctgtgagttggatttcactgggtttcatggagcagatgtctcttgctggggaatgatgggatgtaagactagagacagacacagtcagaggcratgtctgccttgaggcagacaaacagatttcaacttggtcttctgggcctaggcagtgagaagcctggaaggtgtctgagcttggagatgacctcatagatccaactttttggaagattggttgggtggcaga

SEQ ID NO: 648901 - DNA, 561 bp, Homo sapiens
atgattagtatattagtggctctattagaaaaagtagataacacacaagaacacatggaaaatataagcagaaaggtggaaactctaagaaagaagcaaaagaaaatgttaaaaatccaaaacactgtgacctaaataaagaatgccttttataggcttattagtaagctggacaaagctacggaaagaattagtgagcttcaatatttcaaaagaaaattcctagaatgaaatgaggcagaaacaaaacaataaaaaagaagttattcaaagactgtggaacaatttcaaaaagtgtaacacacatacaattggagtaacagaagataataaagcagaattatttgaaataatgatgaccaagaatattccaaaattaataacacagattaaaacacatatccagggccaggcgtggtggctcacccctgtaatcccagcactttgggaggctgaggtgggtggatcacgaggtcaggagatcaagaccatcttggctaacaargtgaaacccggtctctactaagaatacaaaatattagccaggagcggtggcgagtg

SEQ ID NO: 648902 - DNA, 564 bp, Homo sapiens
taatttaattaaattagctgtatcaattgccttttatctttccctcacttcaaagcagtttctatctcccatattgacagcagtgcaattcacaaatcttcccattttgaggatataaggcacaacatatagagaaatgtttcccagcattaaggtattggccagaagaaaakatatttatgattatgcatttctcttggataaactgagtcctggctatctaatgacagaaatatgctatacactttaatatacatattattttgcatgtatttgtaaaatgtgtggccctttctaagactctgatcacagcctctcttgcctgctctaagggcattgctgttccaccacccaagcacacattgtttatggcataaactgacttgtgaacatggaataattcaatcaatattcctctcataaggattatacttgtaagagtaacttacatacacataggtcactgaatattgaatgagttagcactaatcactaaatatatacctgtgtgtttttgactccttatagcttcttaatttcctaaagttaattaataattctgta

SEQ ID NO: 648903 - DNA, 491 bp, Homo sapiens
ttctgtcagtgacttaaaatagggctacttctatcttttcagccttgattttcttgatatattttaaacctacagatcagtttaaaaatagataatatgtaacatagatactattcttccacagtccttggcagtgtttctcagtcctctcaagaattagtcatttcatcatccctcactagacgcagcaagaagggataaagaggaaactggaaatttgttctgaagtacatctccaatattttgaatgttgatcaacagcattctgatcttctccctgaatgagtaaaaagaaaagatgtaatactgggtcagccaaacccactgcgtggcacttagccaggatgattcattttgcttggagcaatcttacaccctttgtgaaactgggtttcttttggttgaaggaagaaaaagactcgtccagagctgtcagtcacttcttaagcaccttcaaatgarggccttattggattgttttgatctgccca

SEQ ID NO: 648904 - DNA, 646 bp, Homo sapiens
ccccgtctttactaaaaataaaaaaattagctgggtgtgatggcatgtctgtagtcccagctacttgggaggctgaggcaggagaatcgcttgaacccaggaggcggaggctgcagtgagctgatattgcgccagtgcactccagtctttatgactttaaattatgactttaaaaactcataatttaaaaactttaaaactttcataactttacaaaggcagagtttctggaaaaatagaagataagaagttgctatgtgaaaatttcactggcctgtctcttttatctctccctcagcaccaaagaataatctactccataaaatttcagattatatttaaggagcaatgaatgttggattggtaaatgccatttcatcattagaaaacaaatctatttcttaattgaataaaaccagccatttatttatttaatctctagaggaggtatcwcaaacaaagttttcaaaaatcaaattaaaaaatcaatagttggtgggatctggaatactgtctactatttgttatatatgaaaagtcaaaaattaatacaaaccaatgagaaaaaacaacaggaaaactgctgattaaaggaataaatgaaaagaaaattatattttcatatctatacaattttatatagtca

SEQ ID NO: 648905 - DNA, 604 bp, Homo sapiens
tgttattggctgccatttgtttggcatctttggtagaatcaggctactcctttatacctcatttgctgtcttttgtgttatcgttttgtgttggggtatccaatcatgtgtttgtcataatagggaatattatagggtagaaagtacgtatcagcccattgttcaagctagcttgacagatggttacatttggactggcattcacttgacaaacttttgtatgagtcatcaatgaaactggatgaggttctccttcatccacaatttgtgtcctgagagctgagttttcatcggcagagaggtttctacctgctggtggggtgtaaaaattgttgggttgggggcctgagacacaaagtgcataagccttacattcctattgaccwttgccagctctcatggggttgtatacatctaaatcttttcctcttccagaaaaaaacaaacaaacaaacaaaaaaaaaaaccctgctcttacttggacattcattacaatcctaaattttgtgcttctctttctaaatggcataattctaccaaggatgatttgggcctacactagcaactccggggaacacttgatttgaacaaaattgctcattcc

SEQ ID NO: 648906 - DNA, 531 bp, Homo sapiens
ctgtaattcttattcttgtttctctataggttaaatgatttttcttctggtttctttcaagattttcttcttgtcttcagttttgctgcttgatkattatatgcctttgtttgtccttgtggtgattattgttttaaaatatttattttgcgatgtttcctgagcttagtggatatgtggattgatgtctctcatcagctttggaaaggtatcagcaattattactacaaatatttttctgctctttcctcattttcttttccaggtaatccaattacacctactttacaccttttgaaattaccccacgttctaaagtgttctttcccccacctcttttctttctttgcattttggtttgggacgtgtatattgacctattttcaggatcactgattctttccatggctgtgtccggtctactgataagctcaagaaagataaacttaattttcattacaacttttttgatatctagcatttccttttgattccatctttacgtttccatgtctctgcttacattactca

SEQ ID NO: 648907 - DNA, 579 bp, Homo sapiens
ctctctggagtttcagggagtgacccctcaactccagcaccttgaaacttggtaagctcaaagggcaaattgcacagagtggttccagtacctacagaaccgattttttgtccaggctcttggtgacttaataagcaagcccytgctttcaatgattggttttgccttgaatctctgaacacggaaagagctagaaggcaccttaaagactgcttggtccaacctgctcattgtattgatgagaaaactaaggcccaagaaccagtttatcaagctttagcgcctggcttagttcattttcacttggccttctctcatggaggccggccatctcttcaattcttttagataatctcttctggacctccattgaaaaatttaagcatgtgaagtctagagttgggtgggaaagacatgcaccaaagttaataaaccaaaagtccatttacttatctgagatttcattctatctttctggaggtctcatcagaactacacagttgaagacacttttctctctctttttttaaaggcccccctctctcttttttaaagctttatcactgatataattatgga

SEQ ID NO: 648908 - DNA, 579 bp, Homo sapiens
ctctctggagtttcagggagtgacccctcaactccagcaccttgaaacttggtaagctcaaagggcaaattgcacagagtggttccagtacctacagaaccgattttttgtccaggctcttggtgacttaataagcaagcccctgctttcaatgattggttttgccttgaatctctgaacacggaaagagctagaaggcaccttaaagactgcttggtccaacctgctcattgtattgatgagaaaactaaggcccaagaaccagtttatcaagctttagygcctggcttagttcattttcacttggccttctctcatggaggccggccatctcttcaattcttttagataatctcttctggacctccattgaaaaatttaagcatgtgaagtctagagttgggtgggaaagacatgcaccaaagttaataaaccaaaagtccatttacttatctgagatttcattctatctttctggaggtctcatcagaactacacagttgaagacacttttctctctctttttttaaaggcccccctctctcttttttaaagctttatcactgatataattatgga

SEQ ID NO: 648909 - DNA, 597 bp, Homo sapiens
tgtagcatctactggatgcctcctacccacagaccagcgtttttgtcaggctgagtggcaggcacatgaccagtggcatctttcccagcagcataaacgtctttgaggaattcctctgagagaaagatatttgtcttggtgctgaaatatttctgcctgtgaatttgagctgaatgtctgacccttaggtaacaacaacagcagtggctccagtgtccaagatggaagtagctcctattgggaccagccttttcccaagctgtcctcttcctgaattttccagcctgaatctttcctgacagaagtcwcctgtgttagagggtgctgatcagaagccctgctgctccctgcttctcagtgaatttgcagtgcatgtgtgtgggtgtgtttaagtgtatgcgtgtgtgagggaagtaggaaaatgaacacattttcattcaggctcttccctacctcatcgacagacacactttcttggcatgtatgtttgctggcctgtgtgtctatggcacacctgctggccttgactgtggggctgtagtctggcctcaccacactggttcactaccttttaaggatcaggctcttttcaagttc

SEQ ID NO: 648910 - DNA, 541 bp, Homo sapiens
ctgggacagatcatgaggcaactaaacttccaaaaccttcaagtgaggtgtctgagtccttgcaccaccctgagacctgttcatggcggttgctcttctgtcttctggcttcagtcacccaagtatcactgctatgagttcccccttacccacatacaaactgtaccattattatgtaatatttttccttaattcactgaaaaccttaaatacctgtatttttagaaggaaacttgattccatcattgtcaatggaaaacaatctcacttatcacaaattgaaagtgacaataaacatrtggacaatgaagttgatgtcatcgcactctaacttttgactgagtctgaaactggctctcaattccttaaaaatgaaattagcaagtggtagagaagagctgatgatatacaagtctccagctgaaactttctgctgtcataatcagagaaccacaaataattgaaaaggagacaactttctaacgctgcaattcagtgtatttaatgttgcgttcaatcactcacggtttatgtgattctc

SEQ ID NO: 648911 - DNA, 541 bp, Homo sapiens
ctgggacagatcatgaggcaactaaacttccaaaaccttcaagtgaggtgtctgagtccttgcaccaccctgagacctgttcatggcggttgctcttctgtcttctggcttcagtcacccaagtatcactgctatgagttcccccttacccacatacaaactgtaccattattatgtaatatttttccttaattcactgaaaaccttaaatacctgtatttttagaaggaaacttgattccatcattgtcaatggaaaacaatctcacttatcacaaattgaaagtgacaataaacatatggacaatgaagttgatgtcatcgcactctaacttttgactgagtctgaaactggctctcaattccttaaaaatgaaattagcaagtggtagagaagagctgatgatatacaagtctccagctgaaactttctgctgtcataatcagagaaccacaaataattgaaaaggagacaactttctaaygctgcaattcagtgtatttaatgttgcgttcaatcactcacggtttatgtgattctc

SEQ ID NO: 648912 - DNA, 567 bp, Homo sapiens
aagtccagagagaggcaagaggacttcggcccacatctagacctgatgaccagggtcttcggccatctaatctgagcaaggaagacaccccgggcagagttcataaggtcagggtggggttgttaggaaagcatagatcccagcttccccactctgagtatatttaatcagggcatgaasaaaaggagaagataccatcctctagccccagatagcagaacaaagcaggaagtagccccagttcacaaaggggagttttcctgccatcaactggggaatattcagaagcccacttagaaaggccaggagagaactgattcttttcccagggacccaaccagacacaacaaattctgaatcgtgctggaccgtggacacagatcagcaccatgaacgctggcgttatctaatgctgccccagattggcagcacagcctgatatcaactgtgacatgctgggacaacctaacctccgaaaaccccagccacaggctgaatagactcagaagttctgtcaatacaatggggacaaaatacctactgcacatagtgttgtgagggttaaac

SEQ ID NO: 648913 - DNA, 549 bp, Homo sapiens
tctctgtttttttcaaacagaatagagacaggaagatgacataacatgttgtgatgaatttctgaaaaatctctgtatcacttccaagactaaacttgctatgaagcttccagaagcagagtctasatttgcgtctgaacctcctgcctgtcattgaaatatttgcctgatgacactttcaggggtcttgaaatttagagctggaaagaacttaaaaattattgtccttcttattttactaatgaggaaatagaagatgcgagtcacttgctcatttacttatttattctttctattgccagtcactaaaaacaggctacgggcttgattctttattatgtcttgtgattaaaagcaaataagttgacttagtctagtgcccagaattttagagttgtttattttagtgggaaagggcatggaagaagcactggatctattgtcataggattagtgtgaaccctgaatccacttatgagtataatccattaattcaccattaattttttgagcccctactatgcatcaggcataaagacacagtaaata

SEQ ID NO: 648914 - DNA, 566 bp, Homo sapiens
tgggacaggaaattgaagtcgggattcctgtacctgctcccagagtccatattctttgctatgacatatgctttctctctcttttttgtctatagttaattcactgcttcccgagatcaatgagtttacagatggtcactccttgtgctccaaactcggaacacagttggcttgcagtaaatgtttgctggacctaggaataaatatgtatttctttcgtccttggaatttttactgtgatcccataaatctagagtccttaattccaataccttctctatattctttgaggccaccaccaacgaactgaatttaactctagtttcctaacagtttctccatctttatgtagagtttggggagacagagattttagttcaagtcccagaactgccacctggcagctctatgtctttggtcaagttatttaatgaatctattaatttttttcaagacaaggtttccctcagttgtccgggctggagtgcagtggcacaatcaggactcactgtagccttgracttccaggctcaggtgatcttcccagctcagcctcccaagtagct

SEQ ID NO: 648915 - DNA, 566 bp, Homo sapiens
tgggacaggaaattgaagtcgggattcctgtacctgctcccagagtccatattctttgctatgacatatgctttctctctcttttttgtctatagttaattcactgcttcccgagatcaatgagtttacagatggtcactccttgtgctccaaactcggaacacagttggcttgcagtaaatgtttgctggacctaggaataaatatgtatttctttcgtccttggaatttttactgtgatcccataaatctagagtccttaattccaataccttctctatattctttgaggccaccaccaacgaactgaatttaactctagtttcctaacagtttctccatctttatgtagagtttggggagacagagattttagttcaagtcccagaactgccacctggcagctctatgtctttggtcaagttatttaatgaatctattaatttttttcaagacaaggtttccctcagttgtccgggctggagtgcagtggcacaatcaggactcactgtagccttgamcttccaggctcaggtgatcttcccagctcagcctcccaagtagct

SEQ ID NO: 648916 - DNA, 574 bp, Homo sapiens
ctaacaaggacctgtagattgtaacagacatatttttataccagtcattttaaaatgaaaaaatttcaaaaatttcactagtaagttcatgtaggatttttaagatatactttacaaataaacgttttattttactaaatgcttttatagaaatcattgagatgattgttcatgttttttgttttgttagtgtagtgcattatattagttcttttttcactaatgtacttttaacagtattattgagacataatgtacataccataaaatttacctatttcaagtttacagttcaatgggttttagtatatttatagaattgtacaaccattgccataatataattttggaacatttttatcacaccaaaaagaaaactcatacccattagtattcactcctatccctcaccttgggtgaggaacacacagccaaaccatatcagttacctttaaatttgtaagccaaatttaattcaaatttaattcaatttttttccagtaaattctacaacatttctattcttccwaccctgacaacattcgtagcatatttgatctatcttcaataacag

SEQ ID NO: 648917 - DNA, 576 bp, Homo sapiens
ccaatgcaacggaatacagagccgagaaataaacccacacatttatggtcaattaatttttgactaaagtgtcaagaacatataatggagaaaggatagtctcttcaataaagggtggtgggaaaactggatgttctgcagaaaaatgaaataggacccttatttcacaccacatacaagaatcaactcaaaatggattaaagacttaaatggaagactcagaattgtaaactataagaagaaaacttagaggaaatgttccacaaccttggtctggtcaaagactttttgatatgaccccaaaatcacaggcaacaaaagcaaaaataaacaagattacatcaaagtaaaaagcttttgcwaggcataggaaaaaatagagtgaagagacagcccatggactgggagaaaatattttcaaaccacacatctggtagggggctaatatccaaaatacataaaaaactcaaacaactcaatagcaataaaacaacccaattaaaaagcagacaaaagacctgaaagatgctactcaagacatacaaatggctgatagatacactaaaaagggctcat

SEQ ID NO: 648918 - DNA, 508 bp, Homo sapiens
tcatcagaaatctgattaatattaggccaaaaaggataggccaagttagaagagaaactagttgtctagattggctgaagaatatacatgcaagcctgcacctgtgtgtggagaattttaactttacacatgaaaataatgartaagatgactcagactttgttgggtttggcagccaaaatggccaagattattttacaagcatcttatataggatttatttaaaaatatacaaaattaaggacttggaataaaagcacagaatggctcaggtatttttccttttcttcctcactactttactcttatttatttatttatttattttttgagatggcgtctcgctcttgttgcccaggctggagtgcagtggcatgatctcgtctcgctgcaacctccacctcctgggtggagcaattctcctgcctcagcctgctgagtagctgagattacaggcggctgccaccatgcctggctaatttttgtatttttagtaaaaatggaattc

SEQ ID NO: 648919 - DNA, 601 bp, Homo sapiens
tcttttctctttttgagctatggtaaatattattgccctttaattttactgtccatgtgtttgtcactaatatatagaatataactgattttttatgtttatcttttattctgctaacttgttgaactcgttttttagttttggagtttataaattccttaagatttcctgacaattatatgcaaattgaaaccatttcgttgcttttctgatctgttgttattttatttacttttcttgcctttatacactggctagaacttccaaccctacattgaatagagtcatgagagtaaacattcttgccttgctgtcagtcatagagggaaagaatctggtcttttaccattgaatatacagatggtccttcatatctgtggcattttatctgtggatttaatcaacaatggaacaaaaatttttaaagaaacttaatcgttgtgtctgtgctgaacatgtatacagaactttttcttgtcattattccctaagaatacagtataacaattatttacatagcatttacactgtactaggtattatcagtaatccagrgatgatttaaagtatatgaaaaaatgtgcagaggctatatgcaaac

SEQ ID NO: 648920 - DNA, 516 bp, Homo sapiens
tgattgtataactaagcctaaatattctgtaataaaatattatttcaaaatgtttcacatttcagcttaattttacagtgaaaaaatatattttctttaaaattacatagaatagacatgaaaactggatgaaatatccatatttgtaataggacataaaagctatatatatcatccctgtcataattcaaatgaaatgtaacttctcaagacagcacatcaaggaacaaaagcatttttctcagtcttcatcattgtttaggcttccttaaatgtggcaaatctaagtacttactgaatatctccatatgagatataattttcaaggaacyatttgttccaagtatcttggaaagcaaactggtggatgaggaaaatgctttcacaggttcccatgggataattaatcattgctcattttggaactgcattcaatgtctgtggcgctgtcacttgcaaataagaaattgtgtattcttcaaactttaataggaacattgtaaaattctgtagttt

SEQ ID NO: 648921 - DNA, 584 bp, Homo sapiens
tgcatgtttatgtaaaaaaagataaatcaaggaaagaaattaaatactaaacaaagatgtaaaatgcttaaaatattcagcaagatagctgcatcatcacttataccgtaaccaatttggggccataataaatgaatattctacaacctttgtgtatgtggcttcttgggttctttcaacttstcactgttgtcagattatgacaagaatattgggtaaggggatgaaaagctcttaacaggaaattggctaacacagtcagacttcaaaatgaaacactttgaagctgttactagcctcagatagatgtacatgaaatcttcagtaactattaaatgaaagggccaagatgtagagcatagcacatatactctacaagacacaaacacacacataactatctatgctcatggataaaaagactttgggaggacatgtattaaactgctaacaatgttggcctctgaggaagaagtctcgggggacagattcagattgcattcaaaactctttcaatattctgagctttaaaaatcgatgcatatgtggctttttttcaataaaaaagtggctcataaagatac

SEQ ID NO: 648922 - DNA, 550 bp, Homo sapiens
gctatgtaataacttgtataaatatttaaattagcaattcacaaactctttaagtattagctcattcttttgaatcaatttagaattctctttcttaccatataagaagtggcactattacactgaatatgtaagatgcatgaagtagagttacatatgaagaaaaaaatttactttgatgttagtgttttcaagacttataatatgtagcaatagtaaaatgcgttgaattagaaaggggatgtgacagttacatgcatgtgtataacccaagtaccaatattataggcaacaacagatatgatgtttgagtgtgttatgtaattcagacatagtgagagtgaccacgtagaagtagtgcttacactgttgataaaactttaagaaagaagtctcaaataggtttaagtaatgaaaatttaatagaagataatgttcatgtttatggaatgatggctatgttctaagayagaagactatgatctctaattatctattcacaacaaatacatgtgatgtctgccagcacgtttagagtctatgtaagatg

SEQ ID NO: 648923 - DNA, 619 bp, Homo sapiens
gacagctggtaggggattagaatttagaaataacttcaactgaaaaagttcaggttgaagccctgtaacacaaaagtacctggttggggcttgagaaggcctgggttttgcttttactctacctctgactagttacatgacctttttatgccatagcttcataggattaaggaaatcaggcaaaccactaataggttatcagttctctttattaagctttgtcaaggacagatactatattttggtcagcaaggttccaagtgtctgcagctttgggctgtgatttacaccagattctagcttcttagaggtgcttctcctgggcgcaccattaagccgctagaaagccacttctttgagcctttcccatcctctctctctaaagctagggcttgtgctggggatagttaattcctaggaaycacactctggaaaacctcagtcattttgcattctcttagatcgcccctccaccgcagtagtactctgctgcttccttcttttcagcaacatgtcatagacttctcaatcaatttctgatttctcatatgcctggaggaaaagactgcttcacctctcagctatggcaaaaagccctaaagcaataattgcaaactct

SEQ ID NO: 648924 - DNA, 503 bp, Homo sapiens
aagtttgcttagggtaagagatgaggggaagagagagctagagaacagtagawcagagtaagtgtttgatgatactttaatcgaaaaagtgacacgaaaatgatttaatgcgcctccatatttatgtttttctcttgatatctctttctaataacttttgtttatagaccaaagcagtttttgaagtcagaagactaaacaatgaacagcattagccctaaaaataactttttttccccaaaatttgcttccctaatctgcaattaaaagttctgcaaaagaagttattgtaacagtgtacctaacagtagataaactgtgaaagtgctgggcataattttctttacctgtctgatcttcataggcacccagacatctatagactatttactcctcacctcaactcaaaatggtgttcttattaaggcacttcatgatttttaaaaatcatatttggaatatattaatatactttgcctctacaacaaatgaggggttatgga

SEQ ID NO: 648925 - DNA, 503 bp, Homo sapiens
aagtttgcttagggtaagagatgaggggaagagagagctagagaacagtagaacagagtaagtgtttgatgatactttaatcgaaaaagtgacacgaaaatgatttaatgcgcctccatatttatgtttttctcttgatatctctttctaataacttttgtttatagaccaaagcagtttttgaagtcagaagactaaacaatgaacagcattagccctaaaaataactttttttccccaaaatttgcttccmtaatctgcaattaaaagttctgcaaaagaagttattgtaacagtgtacctaacagtagataaactgtgaaagtgctgggcataattttctttacctgtctgatcttcataggcacccagacatctatagactatttactcctcacctcaactcaaaatggtgttcttattaaggcacttcatgatttttaaaaatcatatttggaatatattaatatactttgcctctacaacaaatgaggggttatgga

SEQ ID NO: 648926 - DNA, 503 bp, Homo sapiens
aagtttgcttagggtaagagatgaggggaagagagagctagagaacagtagaacagagtaagtgtttgatgatactttaatcgaaaaagtgacacgaaaatgatttaatgcgcctccatatttatgtttttctcttgatatctctttctaataacttttgtttatagaccaaagcagtttttgaagtcagaagactaaacaatgaacagcattagccctaaaaataactttttttccccaaaatttgcttccctaatctgcaattaaaagttctgcaaaagaagttattgtaacagtgtacctaacagtagataaactgtgaaagtgctgggcataattttctttacctgtctgatcttcataggcacccagacatctatagactattyactcctcacctcaactcaaaatggtgttcttattaaggcacttcatgatttttaaaaatcatatttggaatatattaatatactttgcctctacaacaaatgaggggttatgga

SEQ ID NO: 648927 - DNA, 516 bp, Homo sapiens
gctacataatattccttaggccacatctaacagaaaaattataaatttaaaatcagacaacaaagtgtctaagacttaccctaggctctagggagtcttaaataatacacagaaaaaatactcttgagataccatcttttcctatatcactaagaatatgtcaggaattgaaaagaaaaaaatgcatggttaattaattgatagaatgagttaaaatactgttgtttctgaattgtaacagaaggtttttaaatgggttacacatgtccattgaaataatattaatactttgtaaaataacctaactacttactaaaaatamatcacaatgaataaaattactgttaaaataaagtgattaaatgattaagaatctgtttactttcttttcccccttttattcaaactcaataattgctcccccccttttttggaaaaaacatctcataatttttttaaattctagttaattattcctcaattgcttggttgcaaaattttgtatcaagtataaca

SEQ ID NO: 648928 - DNA, 216 bp, Homo sapiens
tgcataatgtgtttattgcttgattgtgtcccataagtctcttaagctatattcactgtttttcatttctttcttggttttcttttactttctccagatgatttycaatgagctgtattcaagtgatttcttctcaaatgacttacctggctgatctacctgttgttgaacccctctatgaatttttcatttcaattattatattcttcatctcta

SEQ ID NO: 648929 - DNA, 616 bp, Homo sapiens
attgacatttgtcctagaaattagtactgatgcctctggaaaactttaaatttggcttctttcatttaaccatggttatgtktgcctttctgtagtgatatctactgatggccattgaaaaagctatcatgtgaatttctgtcttattcattagatgtatatgaaaaagatgtatgcatttttggcacaaaggtagaatttttaaatttaagcatcgtatataattataaaatgttgtgaaagatacattttagaaaacattataaataatgttagtactaatactaattttgagcctaagggagatgttatgcatttgaaatggcaggcactggggcttacctgaggaagttcctgtctcttactacttagctatgtgtgttagaaactccaagagctggcatgccagttcagtgatgggcaggctagttttcttctcactgaggactggaagtaaatagatgatccatggcttctcatatcacaaagcccttttccaaagaggatgagtggtttagaagacctatctgtgccctgatgtcattaatgccacctataacctccacaagcatgctgctatttaaacaggactatttgcttgctcaagggagaaagc

SEQ ID NO: 648930 - DNA, 616 bp, Homo sapiens
attgacatttgtcctagaaattagtactgatgcctctggaaaactttaaatttggcttctttcatttaaccatggttatgtgtgcctttctgtagtgatatctactgatggccattgaaaaagctatcatgtgaatttctgtcttattcattagatgtatatgaaaaagatgtatgcatttttggcacaaaggtagaatttttaaatttaagcatcgtatataattataaaatgttgtgaaagatacattttagaaaacattataaataatgttagtactaatactaattttgagcctaagggagatgttatgcatttgaaatggcaggcactggggcttacctgaggaagttcctgtctcttactacttagctatgtgtgttagaaactccaagagctggcatgccagttcagygatgggcaggctagttttcttctcactgaggactggaagtaaatagatgatccatggcttctcatatcacaaagcccttttccaaagaggatgagtggtttagaagacctatctgtgccctgatgtcattaatgccacctataacctccacaagcatgctgctatttaaacaggactatttgcttgctcaagggagaaagc

SEQ ID NO: 648931 - DNA, 540 bp, Homo sapiens
tctcattctcagacacctactccctcccacaccctgggccaagaactgggcagagaggcctaggggttgccctttccctgagcagctgactgtcattccaaaaccatctcaaccagagaggcctcttggttctttcatgagctgtctcttcacagaaattatgtttagtgtgtgctttagatttagatttccacccagatcttcctgtataagcatcaggtgaagttagtttaacaaagactagcctcgttcccatccaagaccaagtaaataataatctctaaggtgaagaaaagataaaaatggggcattagaaattttaaaagggcccaagcaattctcacaagcaggcccttcagaagtsaccaaaccaagcatttctgtcatgtctcaataatgtggtagagaaaggtcactgagtcaggagccaaaggtccctgtgccagccctgggtgtcccaccaacctgctacatgatgttgagcaggtcatttccttccactgggctccattttctcctgtgtgaaatcaagtgttgagc

SEQ ID NO: 648932 - DNA, 578 bp, Homo sapiens
tgaattcattaaatttcacctgtttacctgcatgggaacctggacttctgctgagaggagaaatggagagggccccatggccctcggtgctggtgggacccaaagcagaatcagaggagcaggtataagaattgaaggcaggaaactgctgtagattctcgaggggaatgtggacttctgggtctgcaaaggaaagataacccttgtaaacccatttacagaattcaattttttttttttttttttgagatggggtctcactctgtcacccaggctggagtgtagtggtacgatctctgttcactgcatcctctgcctcccaggctcaagcgatcctcccacctcagcctcccgagtagccgggaccacaggcacgtgccaccacacctagctaattttttgaatttttaaagagatgaggtttcaccatgttgyccagcctggtcttgaactcctgagctcaagtgatctgcccaccttggcctcccaaagtgttgggattatagacgtgagccaccacacctggcctgaatttttcaaatagtttccaacagttgaggacatcacacatgcgtacc

SEQ ID NO: 648933 - DNA, 475 bp, Homo sapiens
tgtatatatacatatatacatatatgwgtgtatatatacatatatacatatatgtgtgtatatatgcctcctttgaaacaagttgtgcctttgtattcttctacatcttacatttaattttgtattactgtaaaatattttctaattatgaacattttattatgaacatttgttaatattattttatattaatcatgaataattatcaatagcaataattttattaagtagtgttataattataatttatattctgtatttattcacagactagtcccttctgccttctgggcaggtcacatctgaaagattatcctctttgaatcagtttgaatgttctagtgaccaggccacacagtttctcttgacatttaaaaatgtaagttgttccacccagccacagaagcatacctaatgtatgattcttatttatttaaaggcgaaaacagaccaagctaatctatggtgttataag

SEQ ID NO: 648934 - DNA, 223 bp, Homo sapiens
cagttgcttttattcattccatgaatatgtaggatagcatgatggttttgcagtccctgtaggcattattataggtggaactctttgcaaagcctgcattttaaaagattctgaaatacttttgtgggtgtcctgtttcagatgctagaaagatgctaatggacccttctgactttctttttggtgcytctcttaggcagcattttcaaaagatcactaactc

SEQ ID NO: 648935 - DNA, 519 bp, Homo sapiens
acacgctggcaacaaatgccaaatatcaaaagttgatttttaaatacatttttctaatacttaacaaactaatgcatttcatcatgcaaagaatctaatccaagcttcaacattctgaggtggacacaaacaaatctcttycattgtgattaattcctacaaaagcagcttttcatatgacatttcattgaggataataaataataaccacaatagtccttattaatatctgccttaccaattcctaatgccttataaggaaaatagaattccaaatgtgaagtcagagttctatggctattctatatctgaagcgactgcacatacattatcagtttttcctgaactacatcttatagccagactgaaccagtggactttcttctgggtttcagagaaataatttctagctcatttattccaaacaaaagttagcacttctaagcacagatatgtctaggtagaaggacagagatattacgtctttctggaaaatattcccaattatgatcacccctt

SEQ ID NO: 648936 - DNA, 588 bp, Homo sapiens
ggaatgcaaatgtatccaggtaataggaaaagtctctttaaataagtaatgtgttaaaatgaaaactgaagaataactaaggcttaggcagtggacgaggtagagaggaaggtgttgcaggcagagggagaagtctatgccaaggcctgcgtgttgaagacagtgaggtgcccacagggttcaggaagaagacactgttgtaaagattggtctgtcctctccaggcccacagctccacaggaacaggagggagctttccaacacaaaaatgctctctaatcagaagagcaaacgccacaggaggtgaaagacccttcaggtaaataaacaaattttttttaatgaagtatttctacttctgagaagataaacatatgtttctctattcctcctactaataaaattaaaaatcctgacattccatataaaataaacataagaagactctgaaaggtgcaaagaaggcagccygctagggaccctggacctgaagaatggtacagggtgagttccctaagttttctttttgcttcatgtatcccagcctgagaactgaagaagccagccagcctggaaatggcaacagac

SEQ ID NO: 648937 - DNA, 423 bp, Homo sapiens
  misc_feature 1, 2, 3, 4, 5, 6, 7, 8, 9, 10, 11, 12, 13, 14, 15, 16, 17,18, 19: n = A,T,C or G
nnnnnnnnnnnnnnnnnnncctttcattccgaacaccacagaataatctgttcaccccacccacacccatgccagcctagattccatccccccagactgtcaccaggcaccctttgcctccctgctggcaatgacatgggaggcctagtggagaatcgggactttcaccatggcccagcagtgacaaagccacctcctccatgatgtcagtgaattccaccctgtggtgctcgcgtgtttcgggtggtcctagttaaccagcttcccagggaagcctcttccyttgagttcgctttgcatcattgttgagtcttgtacaccgtctgatgctcatgcattttattctggcagtgctcttaccagaagaatagcaggagcaggatggtgtcgtgggccagatttagtcacaggttagatgactga

SEQ ID NO: 648938 - DNA, 623 bp, Homo sapiens
caagtcaccctaataccaaaatcaggaaacgacataaccagaaaagaaaactacagaccgatatccttgatgaacatagatgctaaaatccttaacaaaatactagctaaccaaatccaacaacatatcaaaaagataatccaccatgatcaaatggatttcataccagggatgcagggatggtttaacatatgcaagtcaataaatgtggtacaccacacaaacaaaatttaaaaaaaaatgrcatgatctcaatagatgcagaaaatgcattcgacaaaatccagcatcactttatgattaaaactctcagcaaacatggtacacaagggacatacctcatgtaataaaagccatcaatgacaaacccacagccaacataatactaaatggggaaaagttgaaagcactccctctgagaaggggaacaagacaaggatgcccaatttcaccactcctcaacatagtactgtaagtcctacccagagaaatcagacaaaagaaagggcatccaaatcggtaaagaggaagtcaaactgttatcgtttgctgatgatatgactgtttaccttgaaaaccctaaaggctcctccagaaagctcctacaactgataaaagaattc

SEQ ID NO: 648939 - DNA, 491 bp, Homo sapiens
ataatacattagctcttctagaagttagaagtgactttggattaagtctttcataaggtggctaaatgaatttatatggctcatcasaattcactagattggttaagcaggaaatttacagagatttttttctttgctgtaaatgtttttctaaattgaaaaacttctaatactgtcttctggaatactagaaataagtgcaagtgattgtttttggcaggaggccacataaacatttctgcttctctgtgacttatgggtagcattgatataaattgttaaaaataatgatcgtagatagataatgtatcagagtttgggctcagccgctgtagctgctgttgacccagaggaaccactgggatcctcacatctcagggcagcacatcgtttgcagcaatggttggttctgtacaaccttttatgaaattaggtgaggcccttgattagaatttgttttttaaaaggtttaatatgagtttatatctcta

SEQ ID NO: 648940 - DNA, 491 bp, Homo sapiens
ataatacattagctcttctagaagttagaagtgactttggattaagtctttcataaggtggctaaatgaatttatatggctcatcagaattcactagattggttaagcaggaartttacagagatttttttctttgctgtaaatgtttttctaaattgaaaaacttctaatactgtcttctggaatactagaaataagtgcaagtgattgtttttggcaggaggccacataaacatttctgcttctctgtgacttatgggtagcattgatataaattgttaaaaataatgatcgtagatagataatgtatcagagtttgggctcagccgctgtagctgctgttgacccagaggaaccactgggatcctcacatctcagggcagcacatcgtttgcagcaatggttggttctgtacaaccttttatgaaattaggtgaggcccttgattagaatttgttttttaaaaggtttaatatgagtttatatctcta

SEQ ID NO: 648941 - DNA, 491 bp, Homo sapiens
ataatacattagctcttctagaagttagaagtgactttggattaagtctttcataaggtggctaaatgaatttatatggctcatcagaattcactagattggttaagcaggaaatttacagagatttttttctttgctgtaaatgtttttctaaattgaaaaacttctaatactgtcttctggartactagaaataagtgcaagtgattgtttttggcaggaggccacataaacatttctgcttctctgtgacttatgggtagcattgatataaattgttaaaaataatgatcgtagatagataatgtatcagagtttgggctcagccgctgtagctgctgttgacccagaggaaccactgggatcctcacatctcagggcagcacatcgtttgcagcaatggttggttctgtacaaccttttatgaaattaggtgaggcccttgattagaatttgttttttaaaaggtttaatatgagtttatatctcta

SEQ ID NO: 648942 - DNA, 491 bp, Homo sapiens
ataatacattagctcttctagaagttagaagtgactttggattaagtctttcataaggtggctaaatgaatttatatggctcatcagaattcactagattggttaagcaggaaatttacagagatttttttctttgctgtaaatgtttttctaaattgaaaaacttctaatactgtcttctggaatactagaaataagtgcaagtgattgtttttggcaggaggccacataaacatttctgcttctctgtgmcttatgggtagcattgatataaattgttaaaaataatgatcgtagatagataatgtatcagagtttgggctcagccgctgtagctgctgttgacccagaggaaccactgggatcctcacatctcagggcagcacatcgtttgcagcaatggttggttctgtacaaccttttatgaaattaggtgaggcccttgattagaatttgttttttaaaaggtttaatatgagtttatatctcta

SEQ ID NO: 648943 - DNA, 293 bp, Homo sapiens
agtttgggctcagccgctgtagctgctgttgacccagaggaaccactgggatcctcacatctcagggcagcacatcgtttgcagcaatggttggttctgtacaaccttttatgaaattaggtgaggcccttgattagaatttgttttttaaaaggtttaatatgagtttatatctctaaatatcagtttctaattttttttaaargcctatgtttacaacaaatttgggagatacctatatgcactactaactagtgttcttttgtggtgctttagaaattctggcttacttg

SEQ ID NO: 648944 - DNA, 358 bp, Homo sapiens
tttgggagatacctatatgcactactaactagtgttcttttgtggtgctttagaaattctggcttacttgtatttttgctggccttctaatgatttcactcatcaatcagaagatatttgtgtccacctycctgcttcctctccggtgatcttgtctattcttggccattttagagttgacttagcagccttcacaaaactggttggaatttccactgggattaaattgataggtcatttttgggagacctttgcaatattgaactttccaatccgtgaacttatctgcccatgtattatgtttgtttttggtagattacaaaattatatgatcactccaaaaattaccttgcccttt

SEQ ID NO: 648945 - DNA, 474 bp, Homo sapiens
ttgattagaatttgttttttaaaaggtttaatatgagtttatatctctaaatatcagtttctaattttttttaaaagcctatgtttacaacaaatttgggagatacctatatgcactactaactagtgttcttttgtggtgctttagaaattctggcttacttgtatttttgctggccttctaatgatttcactcatcaatcagaagatatttgtgtccaccttcctgcttcctctccggtgatcttgtctattcttggccattttagagttgacttagcagccttcacaaaactgrttggaatttccactgggattaaattgataggtcatttttgggagacctttgcaatattgaactttccaatccgtgaacttatctgcccatgtattatgtttgtttttggtagattacaaaattatatgatcactccaaaaattaccttgccctttatagtaaaaccttccattgtaa

SEQ ID NO: 648946 - DNA, 474 bp, Homo sapiens
ttgattagaatttgttttttaaaaggtttaatatgagtttatatctctaaatatcagtttctaattttttttaaaagcctatgtttacaacaaatttgggagatacctatatgcactactaactagtgttcttttgtggtgctttagaaattctggcttacttgtatttttgctggccttctaatgatttcactcatcaatcagaagatatttgtgtccaccttcctgcttcctctccggtgatcttgtctattcttggccattttagagttgacttagcagccttcacaaaactggttggaatttccactgggattaaattgataggtcatttttgggagacctttgcaatattgaactttccaatccgtgaacttatctgcccatktattatgtttgtttttggtagattacaaaattatatgatcactccaaaaattaccttgccctttatagtaaaaccttccattgtaa

SEQ ID NO: 648947 - DNA, 618 bp, Homo sapiens
gagccatttgaaatattttaataccaatttaaaattatactgtcagaataggaagagaagaatatgtcatgagcataagagagtgtggctcttggagtagtgattaagaaactaggcccaggagccaaactgctcgagatcaaatcctggctccaccaagtgcaaactggttgaccttgggctggttatttaacatctctgtgccccaattccatcatcatttaacaagtgaaagtaagttgtattagcccattcttggattgctacaaagaaacacctgagactgggtaatgtatagcaaggggatttaattggctcacaattctacagtctgtacagaaagcatggtgccaggcatacttggtgatatggttttgctgtgtccccacccaaatctcatcttgaatggtagctcccataattcctacrtgttgtgggactggtgcgagataattgaatcataggggtggatactcccatactgttcttttagtagtatgggagattggatctcacgagagccaatggtttgataagggaaaacccatttcacttgattctcattctctctcttgtctgctgcgtgcctttcaccttctgccatgattacgaggcctc

SEQ ID NO: 648948 - DNA, 496 bp, Homo sapiens
ctacatattcatatataatacactcaaaactatacatacatgaatgagtaaaacaaagatctagaatgatgtataatttgataccagtgcttacctatggwtagagcagtgatcagagatgagattatagaattttcagttttttaattccaggtttattgaggtataactgacaaataaaaattgtatatacttaaggtgtacgacatgacgttttgatgtatgtatgcactgtggaatgattaccacaatccagtgaattaacataatcagcacttcacagttaccatttttttggtggtgagaacacttaatatttactgtcacaaaatttcaagtatacagtacagtgttatttaccatagtcaccatggtgcacatgaaacctccagaacttattcattctgcctagctgaaactttgtgccccttgatcaatatctcatttcccttagccctcagccctggcaaccaccattctatactttgcttccatg

SEQ ID NO: 648949 - DNA, 585 bp, Homo sapiens
taagaagtatataaaatatataacctataatatataactaatgttaatctataatattttagacatatatatctcttctaaacatgagtattagaagaaaaagaaaacaatgtcttctctctatttttgttataaaatcatacatagacatttcaggagatgtaaaataaaggcactaagaaagacattttattaatttaatcattactaattcarctttttagtaatattttgctaattttctttccaaggttttacccatatacatataggagcacactgctacacaaatactttatcatttcttataatatattttacagaagtagtatcatacctaaatttttcatttaatattatgagacatatacaagcatcaaaaaataaatgaaaattgtgattattatttatgtcataatctactaaatattttctgctctgttagtttataagtttccagacacaacatacttagtcatgaaatattaggaaaatctgttctaaaatcaaaagcaaggttagaatctctcactgataatatacaatgtattttcaaaaggaataaattaaagagacattgttagt

SEQ ID NO: 648950 - DNA, 582 bp, Homo sapiens
aggagggaccattcagaggatgcttcccaccagttcaagtgacagtgtcagaaccaaagcgcatattgtaggaaatcaaacaatggcctccaagttccatttctacccagggatgaacaaatcaacatcaatcttggtaacacaactgccactgatggtgccttactcttctctcatgacatggmacaattgatagcaaacataaaatttgttcttgtttaaggatttatatccactaatatggtaacatagtagtggttccatagttctaacctgtttatcaatccagttaatcttttactatcttgcaatctgttaatgaaactgtttttctttgttttataatttcaacttttagagtcaggggtacatgtgcaggtttgttacatcactaaattgcgtgacactgagctttggggtacaaatgattcccatcacccaggtagtgagctaaatacctactaaataggtagtttttcagcccttgcctcgctccctctctcccttctctggtagtccccagtgtctttagttgccatctttatttatgtccacatgcccaactgtgtgttcttaactaaa

SEQ ID NO: 648951 - DNA, 459 bp, Homo sapiens
gtaaggtaaaatggaatttatatgtgatagcatcaggtttctcagtgaaggatgaatctaggttataagttgaaagtgagggtcaaaggaaggtatggggaagttgaggaaataggaggaggtgtgaagtgtcagggagtggagaaagtgagtctgttagtactaaaatggyattttgttttaggcagcaccagtttgatggttgagataatgcaaatgaaatcagttagcttggggttatgatttcccaaatctaagcacacagaaaccagttgggagggttctgaggaaaagagggaattagttgaagggatctgtaagcaaacagtaattatggatataagggattatagcattttttgcctgacagaagaaagtgtgtgtatttatatgtgtttacaggtgcttaaaacttgatgatgttattgtcttgaagggaacttgtcatgtggtggagaa

SEQ ID NO: 648952 - DNA, 459 bp, Homo sapiens
gtaaggtaaaatggaatttatatgtgatagcatcaggtttctcagtgaaggatgaatctaggttataagttgaaagtgagggtcaaaggaaggtatggggaagttgaggaaataggaggaggtgtgaagtgtcagggagtggagaaagtgagtctgttagtactaaaatggcattttgttttaggcagcaccagtttgatggttgagataatgcaaatgaaatcagttagcttggggttatgatttcccaaatctaagcacacagaaaccagttgggagggttctgaggaaaagagggaattagttgaagggatctgtaagcaaacagtaattatggatataagggattatagcattttttgcctgacagaagaaagtgtgtgtatttatatgtgtttacaggtgyttaaaacttgatgatgttattgtcttgaagggaacttgtcatgtggtggagaa

SEQ ID NO: 648953 - DNA, 591 bp, Homo sapiens
gctgaggaatgagattgaaatttttctgaataatattgccctcaactgttaagtcaaatgcttaatagctttgaaagttggcttttcctatagatttcataatattttgtaacaaattcacctaaaattacaaggcagaacagtgattataagtgaaccttatactgtggtaaggtcacttctacaagaataatgaatcatgaaaatcaagagaaagaacaaatagtaggaaaatatcttccaattccttttggcccttcatatttccacctaaactcataagcttttaaaaagataattattatttatacttaaaaagataatataggataatatttttgtaaaagagttcttgagatacagcactgaatrtaaagaaaatattggagcattcaactacatttgagaaataacttctgtttattaaaagatactgtaagaatgaaagcacaagccctaatgaatattcctgtttgatactaaaccaaagcttgagaagtggtagtttctcaagtttttcaagtggtttggtgcaatctgaagactgcaatcccatcaatgaactttatatctttaccctttaaaattata

SEQ ID NO: 648954 - DNA, 613 bp, Homo sapiens
tttcctgtttttgaaaagttaccctttaacaaatataacatgcacaggtgagttaatgccatgcttctcaaagtatggcctgtggaaggagcagcctggtgctccctcgcagtatttttgacagaagtgcagaccactgggccccacctcaggagtgtggagttgtagccggatccctttcactgacacattaaagttagagccaccctaggttaatacacatcactgaccggcctcaaggaataggagtgctgggtctatcagtctctcccaaccattccctgggctttgccaagtgctttctgcctgccaagctcactcttggatcagatggggcctccctgccagcagttctacctcatcctctctgcacctaagtcaactccggagttcacagacctcacttctgatctccaccgcscctcctccccttccacggtgactcaaaccttaaggcagtgaaaataaggagactcacaaactaggagactacagcttcagaccacacattttccactgagccagtacctgagcaaaaactagttttctggagttggggggatgaggaagattcaatattgaaagtgtccttggtggcatttcaaagctcaac

SEQ ID NO: 648955 - DNA, 424 bp, Homo sapiens
ggtgagctcagacatttggcaatgaatattgaatgtgtattccaagagacatgaccttaaaatatcatcaagctaagtagcagtgaaattgaactctgctgtattacagaagtcagtgtttcttacatctttatgatatataaatatttttgcattgtggtagataataatttgtatggaaaaatttaattgaatttaatttatcctatggcagaattatgttacatgggtcattttagttttggatttaagcatcttaaaattataaatgcaaatattcaacacataaaacccacatgaatacacaytcccaaacatttgaaatcctaacagtcatttctaacagctttttcctacaaaagaagtcagctattcttagagattacatgcattcccatagcttgagaggttcacactataaggt

SEQ ID NO: 648956 - DNA, 520 bp, Homo sapiens
aaatactttaggtgacaagtaaaggcaactgtgaaaagcaacatttgattttagcggacagggtacctgtggaagaagactggttaggagtggaagygaggtgtaaaggcactgaaatgtctgaggcagggacaatattcagtttctcttcctctatcacctagtgcaatgtacttgttaaacgtttgttgaatgagtgagaaggactttagagaaattgctttggatatagggatacactttactattggagaaaacacccgagatcagaaagttgctaatgagataggtgtgggggatgaatggtaaagacactgattgtacctttttggagttttctaccattgtgttttatttcttttcaccggcatgttcagtatgttattagtggtcaaatgaaaaggaataaagttctatatatatttttttaagtctccaagctcattactagatagaatagttacattattgtttactttgctgatgtttagctaaatgtagcaaactgaagcattatgga

SEQ ID NO: 648957 - DNA, 520 bp, Homo sapiens
aaatactttaggtgacaagtaaaggcaactgtgaaaagcaacatttgattttagcggacagggtacctgtggaagaagactggttaggagtggaagtgaggtgtaaaggcactgaaatgtctgaggcagggacaatattcagtttctcttcctctatcacctagtgcaatgtacttgttaaacgtttgttgaaygagtgagaaggactttagagaaattgctttggatatagggatacactttactattggagaaaacacccgagatcagaaagttgctaatgagataggtgtgggggatgaatggtaaagacactgattgtacctttttggagttttctaccattgtgttttatttcttttcaccggcatgttcagtatgttattagtggtcaaatgaaaaggaataaagttctatatatatttttttaagtctccaagctcattactagatagaatagttacattattgtttactttgctgatgtttagctaaatgtagcaaactgaagcattatgga

SEQ ID NO: 648958 - DNA, 520 bp, Homo sapiens
aaatactttaggtgacaagtaaaggcaactgtgaaaagcaacatttgattttagcggacagggtacctgtggaagaagactggttaggagtggaagtgaggtgtaaaggcactgaaatgtctgaggcagggacaatattcagtttctcttcctctatcacctagtgcaatgtacttgttaaacgtttgttgaatgagtgagaaggrctttagagaaattgctttggatatagggatacactttactattggagaaaacacccgagatcagaaagttgctaatgagataggtgtgggggatgaatggtaaagacactgattgtacctttttggagttttctaccattgtgttttatttcttttcaccggcatgttcagtatgttattagtggtcaaatgaaaaggaataaagttctatatatatttttttaagtctccaagctcattactagatagaatagttacattattgtttactttgctgatgtttagctaaatgtagcaaactgaagcattatgga

SEQ ID NO: 648959 - DNA, 520 bp, Homo sapiens
aaatactttaggtgacaagtaaaggcaactgtgaaaagcaacatttgattttagcggacagggtacctgtggaagaagactggttaggagtggaagtgaggtgtaaaggcactgaaatgtctgaggcagggacaatattcagtttctcttcctctatcacctagtgcaatgtacttgttaaacgtttgttgaatgagtgagaaggacttyagagaaattgctttggatatagggatacactttactattggagaaaacacccgagatcagaaagttgctaatgagataggtgtgggggatgaatggtaaagacactgattgtacctttttggagttttctaccattgtgttttatttcttttcaccggcatgttcagtatgttattagtggtcaaatgaaaaggaataaagttctatatatatttttttaagtctccaagctcattactagatagaatagttacattattgtttactttgctgatgtttagctaaatgtagcaaactgaagcattatgga

SEQ ID NO: 648960 - DNA, 651 bp, Homo sapiens
ttctgaatgacaaactctataatgcttaaaaagcccaatcagacctaggatacaaggctgtcataacttkgtgtaaaataagctaaagtctccaacaaaaaatcatcagatcctcccaagaaaaacagagtttgatatatatttttttaaatgtccatatgatttttgttttgtgtccatgttgggtgaagtccttcttgtttctctaatacaatcttcttattctgtcacacacccacctcactcccaaattttatagtttatttgtttaatgtgcatattattttcccttttctacattgtactttggatacactattgaaattcctgaattccagtgataaagaaaattttgtgaatgcgtcttgactgaaagagtgaataatctttcatgcactcaaatttggaagcaggcagcattttattggtcactcatgcattgcccacatgttgctctatttctttggaaatctctctctcattcctatccttccgtgaaatctctactctgcatagtagcctgttctaccacacccagaaaacttttgaccacaaaagagccagtgtgatgaagcagcagagaactgagtccagaggaaagaaacaaaatatttaatgaactttgatactgctgagataagtgagtatgag

SEQ ID NO: 648961 - DNA, 557 bp, Homo sapiens
tcctttctttcttcctatgagatttttcacttatttcttgaaattggtttaaagaatacagcatatccaggttttaggggaaaagagacttggcactaaaaacgataatactttgctatgcactgaattcacaagaacaattttttaaatctatttctgctttttyaattcctagagaaaccattttctgtctgatatatcttctttcttcagaaaccttatttttgttatagctcaaagcaaacctctcatgcttctcttttggaggtaaactttctctttggagtagcataaagacattgtactcttagttacttctcttcagtttattttattttattttatgaggaattaaatgtatagaatgaaatatacacaattaaagttatacacccatgtgacacacatcttaatccaaacacaaaacgtttatttcacctcataaacttctctcatgcccctttccagtcaacattgcggcaacataaggcaactggtgatttggtttctatcaccataggttaggtctgccagttctagaacttcatataaatgaa

SEQ ID NO: 648962 - DNA, 632 bp, Homo sapiens
ttttttcatagtcatcctcatgcctcaaaattttctaggtattataaaaacagaaataattgaacattgcaatgacattcatttataggaaataatatgggtagtgatcagtggacaaaggtaatataaagaaacaggtaaaaagcatttgtttgtaagtactgtggtatagcactttaaaaaaattacagtatacaattagcattcataaagcttccacacatatatgagtgctaaatcctaaacttatactaatttttttccgtgagggaaaaatatcctagcaaattctttgttattctattaggaaaatttttacttctggctgaaggtaaaattctgtacctgaaaattgccattctgtgaaccattattgccttagacatcagcaagaaaataagagatgcccttccaaaatctgaatttattgattcttcttatgtaatagtatttcagttaatgaaattaattttgaawtttaatccatcatcttcttttgaaagatggtaataattggcataaactaaataattggcatagagaaaaatatatttaaacaatgattacaattgataatagaactataaaatcatttttaatttatgaggtttcaattagttctatatactata

SEQ ID NO: 648963 - DNA, 607 bp, Homo sapiens
atggcctgcagatatttttctcaattataattcactttcatactgtaaaagtatctttgctttgtgtatatctttttcatataaaaacttttaatttggcagggaatagtggctcatgcctgtaatcccagaactttgggaggcccagatgagtggatcatgtaggtcaggaattgagaccagcctggccaacatggcaaaaccccatctctactaaaagtacaaaaattatctgggcatggttgtgggcacctgtattctcaggtacttgggagactgaggcagcagaatcgcttgaacccaggaagcagaggttgcagtgagccaagatcaggctgctgcactctagcctgagtgatagagtgagtgagactctgtctcaaaaaacaaaaaacaaaaaaacctttcgatttattttccagaggtctatttttaatttagtaacaagatttttaaaaatatttataaaattaaataacaatagaatgttagaactaggccctataaaatataaaattgtcaaaattgsttagcatgattgtagcttcaaggatcctattgttaatgtggcaacttctgaaaccaaacatcatcatgcttagcatca

SEQ ID NO: 648964 - DNA, 616 bp, Homo sapiens
ttacaacaatatcatattcctctaccaattttctatattagtcctttcttacattgctctaaagaaatacctgagactgggtaatttataaagaaaagcagtttaattggctcatggttctgcacgttatacagaaagcatgatgcatctgctgggcttctgcrggggcctcagtaagctaacaatcatggcagaaggtgaagggggagccagcacttcacatggctggaagcaggaagaagagtgagaggtggggaggtgctatacacttttaacaaccagactcacaataactcactcactgtcacaagaacagcaccaaggagatggtgctaaaccatttaagagaaaccgcccgatgatccaattgcctcccaacaggccccacctccaacagtgggacttacagtttgacatgagatttgggtggggacacagatccaaatgatatcaatgtgttaaaaggaaaaggagatagcagtgggaaatggatatttaacttcagtttatgagtttttattttagagttctaaaattatgtcttatactgcctatacaagtgctagaatagtttctgtattaagtggtagatattaatatccaaatatcatactta

SEQ ID NO: 648965 - DNA, 502 bp, Homo sapiens
aacttgatgtctaactactgtggatatattttgtcatttattaacattcccctttcaggttaatatcaagtcaacaaaaatttggagttctcttgaccctttccccaatgtgtaaattagtaatataatgtcaatattcagacaggcaaataaactaagctccctttgatgaaaacgacatgcagtaacgcttccctactgagaatcatcttagtttgtgaaatcataatctggaatggctatatctgcaaaatacattaaaagaaagaaaatatgaaaaacataayctacaatacttttatgtatatctaatcattttatatttcttttttattatactacttgaaatacatacataaaggataaagagtttcaacaaatctcaaaaaggaaacctaattatgtataatattctgactgattttgtttgcttaccaaattgaaattgaaaagaaaaaatacagcactctataaaaaaataaaatgatttcaaaatataatt

SEQ ID NO: 648966 - DNA, 570 bp, Homo sapiens
gtccttcattgaatactaaactgtgaatacatgagagaaaataacagaagcctggggtaaaatgccaacacaaagggtttgaagaacaattctcaaagctcaagaaagctctgcaaatattattgttgccacaaaccaaagtagaagacagggtaatatatgagctattaggtagaatctttggaagaatcctgcttttgtgatggaactcactcattcctaaacctaaagcaactctacatcttctctaagaaaattttatagcaatctctaaaagcatcaaactgattccaaataatttaactgtgtttgagaacaaaatacaaatatacaaaaggaattcaacaaaatccatcacataacaatatagaattcacaatatctggttttgatgaacataataattagtgttgaaacatgttaattcagttgttaaaaatatgctttattttttcaaataagatgggaaaatatgtatattrtgagaaaataaaaatggaagaaataaaaacaagcagactcctaaaacagaaaaaataagtatattagattaaaaatgtatgaataaat

SEQ ID NO: 648967 - DNA, 636 bp, Homo sapiens
gcaccttagtctaaatctgaaatgtgcctctacctaacctttctaatacattttcactatttcttagttattagaataaatttacataatttctgaaacaactttctctatggagtattccctttrgtttcttttcccttccaaacaatttaatgaattacaaatatgggggagatattttttcaatgggtaagacttgacttctacaaatacatgtttaattccttctcaaaattatttctacttcctcttattcaacactgtgctagattttagggatatataataagacaatatatgaggtccttgctgttgtgaaaggtacattcttatctttggcaaattgtagaatctttagctttggtatgcaagggcattggtgtttggtacatgcttggctctttgccttaagaattgcctctttccaccatgcatatttcacctgtgtgggaattcttgcagatctctgtattattgatagtcattttgctctgacattttatacaaagctgaatcagcaacagtatgactaaacacaaccaaaaaagaaagctagaaagattatattagacacttacgtgtatggatcattatggtgaggactgctaaaaaaaacaaaacaaaacaaaaaaaacc

SEQ ID NO: 648968 - DNA, 636 bp, Homo sapiens
gcaccttagtctaaatctgaaatgtgcctctacctaacctttctaatacattttcactatttcttagttattagaataaatttacataatttctgaaacaactttctctatggagtattccctttagtttcttttcccttccaaacaatttaatgaattacaaatatgggggagatattttttcaatgggtaagacttgacttctacaaatacatgtttaattccttctcaaaattatttctacttcctcttattcaacactgtgctagattttagggatatataataagacaatatatgaggtccttgctgttgtgaaaggtacattcttatctttggcaaattgtagaatctttagctttggtatrcaagggcattggtgtttggtacatgcttggctctttgccttaagaattgcctctttccaccatgcatatttcacctgtgtgggaattcttgcagatctctgtattattgatagtcattttgctctgacattttatacaaagctgaatcagcaacagtatgactaaacacaaccaaaaaagaaagctagaaagattatattagacacttacgtgtatggatcattatggtgaggactgctaaaaaaaacaaaacaaaacaaaaaaaacc

SEQ ID NO: 648969 - DNA, 636 bp, Homo sapiens
gcaccttagtctaaatctgaaatgtgcctctacctaacctttctaatacattttcactatttcttagttattagaataaatttacataatttctgaaacaactttctctatggagtattccctttagtttcttttcccttccaaacaatttaatgaattacaaatatgggggagatattttttcaatgggtaagacttgacttctacaaatacatgtttaattccttctcaaaattatttctacttcctcttattcaacactgtgctagattttagggatatataataagacaatatatgaggtccttgctgttgtgaaaggtacattcttatctttggcaaattgtagaatctttagctttggtatgcaagggcattggtgtttggtacatgcttggctctttgccttaagaattgcctctttccaccatgcatatttcacctgtgtgggaattcttgcagatctctrtattattgatagtcattttgctctgacattttatacaaagctgaatcagcaacagtatgactaaacacaaccaaaaaagaaagctagaaagattatattagacacttacgtgtatggatcattatggtgaggactgctaaaaaaaacaaaacaaaacaaaaaaaacc

SEQ ID NO: 648970 - DNA, 571 bp, Homo sapiens
gtcaatgtaactaatttttggacgataacrtgtgaacagaagcaatatttgcagcatctaaaagaaatgtgtgtgaccttttacccctgttaccatgctttagaattcatagctgttttcagctattttgtatataaaataagcatataaaagcgacaaaataaatcaacatcgtagagctatcgtgacatcactggacttctcctaaaacttttacatgaaaaatatgtgaattatttcaagctgctctacttgtttttcatagactctgtcattaattaattttttatgtaccactaaaaagcattttaaaatgcctctaaactatggcacactgctaaatattttctagatgcctcaaaaaagtttttatatgcagtaattttgttttacatacacatgcacacttaactgatttcaagttttttcaactttcatatgaaattgaaagttgaaaaggcacatgaaatgtctttttgaaattcctaactcaatttaatttttttttacatttaggtttaccatactgttttaacaaaatgctccgtatttattctaatatttttaaaac

SEQ ID NO: 648971 - DNA, 571 bp, Homo sapiens
gtcaatgtaactaatttttggacgataacgtgtgaacagaagcaatatttgcagcatctaaaagaaatgtgtgtgaccttttacccctgttaccatgctttagaattcatagctgttttcagctattttgtatataaaataagcatataaaagcgacaaaataaatcaacatcgtagagctatcgtgacatcactggacttctcctaaaacttttacatgaaaaatatgtgaattatttcaagctgctctacttgtttttcatagactctgtcattaattaattttttatgtaccactaaaaagcattttmaaatgcctctaaactatggcacactgctaaatattttctagatgcctcaaaaaagtttttatatgcagtaattttgttttacatacacatgcacacttaactgatttcaagttttttcaactttcatatgaaattgaaagttgaaaaggcacatgaaatgtctttttgaaattcctaactcaatttaatttttttttacatttaggtttaccatactgttttaacaaaatgctccgtatttattctaatatttttaaaac

SEQ ID NO: 648972 - DNA, 538 bp, Homo sapiens
ttggttgtttttcgatcagatagccagttaaaccagaaagaaaaatcttaccaaaaagtttccacttagaaaatttaatagccaaaaaaactaatatatgcaagaatgaacaaaaacatattgataaaagttatacatcatatttttattgaaatatttcataatgaaatgtttcacatggttaaagaactacaaattcatccagtgtaaataaaaacttcatgggaaatgtataatatatgagggattatttgatatctgaaaaaactagatagaaaataaatgcttaaaaacttctagaaggtaatccagtagartatttatcagcttaggctaacaaatgatataaacatgattaaagaagagctaaacttgaataaaaatattaagttgatgacaagtgtaaaacaccattcttcaaaatatgcaattacaaataggaaagtgctaataggagaaaaaataagatgtttataatgcaaaaagtattaacattcaaaactgttgataatataaagaaagatattataaggaaaag

SEQ ID NO: 648973 - DNA, 499 bp, Homo sapiens
ccaccttctagatgtccctgcttattcttcaaatcttctcttttgtggccccaaagaatgattcactctctggagtgaaaaataaccgttgctttctttgcctggaactttaaactgagttgtgctgtatcatccaaacctactcaatcctctcttttccattaatcagtgaggtccaaaggagccaaagacaaatctctcctgtttttcttagaaatgtaaagatgttgcatctgtaaccacaggctgcttktaatcctaaaagtcagcgtgataatgaaatccagtgattaatttctgtcttctaatcaataagtagacatatcaatttatagtatgttagaaagcctcaacttcactgaaacaaaaagcaagaggctctgcaaatgttggagtgtgctaaaggaaaagcatggactgatgtttggggaaaggttggtcaatgtgatgaggccatctgtgtttgctaatagtgcttatcaaaattaggttcctacgc

SEQ ID NO: 648974 - DNA, 584 bp, Homo sapiens
gtttttttttttactattgttgctttaaagtctactttatctgatataactacacctgcttgcttttggtttccatttgcattgaatatctttctccacccccttaccttgagtctatgagaatctttgtatgttaggttctgatgcagctcaacattttgtttcaagatttagcatttcttgtaggactggtctgatagggacagattccctcagcatttgcttgtctgaggaagacattatttctctttcatttatgagactcagttttgctggatacaaaatttttgactaatagttattttgtctaaggatattaaagataagcctaaagatacagtgaacttctggcctgtaagatttctgctgagaagtctgctgttagtctaataggttttcctttataggttacttgtwgcttttgtctcactgttcttagaattcatttcttcatgttgactttagatagcttgattactatatggctttgtaatgtcagttttgcagtgaacctccccagagctcattgagtttcttgtatttggacatctaaatatctagcaaggctagcaaagttttcttca

SEQ ID NO: 648975 - DNA, 360 bp, Homo sapiens
aagcttgccaagaaaagcaagaacgaagaaaggaaagaaagaaggaagaaaaacaaatggcaaaacagagcaatatttaaatgtggttatgattcagccaaccattacatttaatgataatgtgcctgtttgggaaakaaaatagaagaattaactgaatgccaaggggagggggaaggaacaaatgaaaaaatcaaaacaaaataaaactgtgaaagataattaatgggaatagaaaaaattatgtacaaaaagcattttatttggagagtaatttagatctttaggaatatattggctatattcaagttcctatacttaagtgctatacaataataattaaaggtaccagatttagta

SEQ ID NO: 648976 - DNA, 582 bp, Homo sapiens
caaaaagcattttatttggagagtaatttagatctttaggaatatattggctatattcaagttcctatacttaagtgctatacaataataattaaaggtaccagatttagtaaagggattttgcaccatgaatttttttttcctgtaaagatacaaatatatctccttagtagaacagataacctcacagatttatgacactgttatatatcaatctatatttatttatttaaccaarcaatcttaatgttattttgctaaattgcttctaaatgtcccagtttctcagattccctttgtgtcatttaaaacatctatttgttatttattaattcaagttaatatctttaaaacctattcattttatatttgtctgaaagctatgattttaagcttctaaaaattatattttaatagaaatcagggactagttacctttaatctgggggagatactacatattttaaagcctgaagtcaatgtctagacaaaagtttctgcttaacatcaaagggtatgcaacatttgctgtggctctcaaatattaagaaaggaaaacacaactgggaatttgtcactagc

SEQ ID NO: 648977 - DNA, 582 bp, Homo sapiens
caaaaagcattttatttggagagtaatttagatctttaggaatatattggctatattcaagttcctatacttaagtgctatacaataataattaaaggtaccagatttagtaaagggattttgcaccatgaatttttttttcctgtaaagatacaaatatatctccttagtagaacagataacctcacagatttatgacactgttatatatcaatctatatttatttatttaaccaaacaatcttaatgttattttgctaaattgcttctaaatgtcccagtttctcagattccctttgtgtcatttaaaacatctatttgttatttattaattcaagttaatatctttaaaacctattcattttatatttgtctgaragctatgattttaagcttctaaaaattatattttaatagaaatcagggactagttacctttaatctgggggagatactacatattttaaagcctgaagtcaatgtctagacaaaagtttctgcttaacatcaaagggtatgcaacatttgctgtggctctcaaatattaagaaaggaaaacacaactgggaatttgtcactagc

SEQ ID NO: 648978 - DNA, 592 bp, Homo sapiens
acccactacgtaataagcaactaattaaatttgactaatattaataatttcattattattcatcttaatatcatggcatgacttctaaggtatattattaaatagaaaaagakaagttttaaactgagccatagtttagaacttgacttaaagcagactcacaaagcaaatgctcatatctaggacaggtaaatctacacgtgtttatacacacattcactgtatttggggaaaatacacaccaaactggaaacactggttgtctctgaagaagagacagggctttggcaatattcaaattaggctttaactgtttctgaaagtttcagttctctataaggagaaggtattacttatgtaatttttaaaaattacatattaagtactaaatgactgaagcttcttagaattgatgggtgcaggcatcacatgggcagcaaggcattcacataatggagaatcatggtctcctgtagatgtctaggagtgataaaattaactaccttttaggtggtgtagtttcctggttgagctgataattattaagttaatgattagtaggttatttctcaacaccgaagagattattagt

SEQ ID NO: 648979 - DNA, 592 bp, Homo sapiens
acccactacgtaataagcaactaattaaatttgactaatattaataatttcattattattcatcttaatatcatggcatgacttctaaggtatattattaaatagaaaaagataagttttaaactgagccatagtttagaacttgacttaaagcagactcacaaagcaaatgctcatatctaggacaggtaaatctacacgtgtttatacacacattcactgtatttggggaaaatacacaccaaactggaaacactggttgtctctgaagaagagacagggctttggcaatattcaaattaggctttaactgtttctgaaagtttcagttctctataaggagaaggtattacttatgtaatttttaaaaattacatattaagtactaaatgactgaagcttcttagaattgatgggkgcaggcatcacatgggcagcaaggcattcacataatggagaatcatggtctcctgtagatgtctaggagtgataaaattaactaccttttaggtggtgtagtttcctggttgagctgataattattaagttaatgattagtaggttatttctcaacaccgaagagattattagt

SEQ ID NO: 648980 - DNA, 428 bp, Homo sapiens
catacaatggagttccaatatttctttcagcagacttttcagtggaaactttacaggtcaggagagaatggtatgacatatttaaagtgcttaaagaaaaaacatttaccttagaatagtatgtccagtgaaaatatactgtaagtatgaaaaaacycaaagaccttcccaaagaaatgaaagctgagggatttcatcaacaccagacctgtcctacaagaaatgctaataggagttattcatgctaaaagaaaaatgtgtcaatgagcaagaagatatcatcagaaggtaaaaaaatcactggtactagtaaacagatagaaaatcatagattagtataacactgtaattgtgatatgtaagtttctcgacttaaatagaaagactaaatgatgaatgaataaaaaatgataactacaacatttcaa

SEQ ID NO: 648981 - DNA, 638 bp, Homo sapiens
tgttaacttattcttaagtgtgtgtgtgtgtgtgtctgtgtgtgttttgaaacacacacactccctctgtcactcaggctggagtgcagtggcgtgatctcagctcactctaacctctgcttcttggattcaagtgattctcttgcatcagccttccaagtagctggggctacaggtgtgtgccaccatgcccggctaatttttgtatttttggtagagttggggttttgctatgttggcccagctggtctcaaactcctgaccttaggtgatccaccttccttggcctcccaaagtgctrggattacaggagtgagccaccatgcccggcctgaagtgtttttaaattactactaggaataagatcttttcttccagtttaattttctacctgattgttcttcagtatgcaggaaaattatgagtttttaaaatattaaataggtaactggttacttccctgaattacattgtttctaatggctttgcagttgtttctcttgggatttcaagtatattgtcacatcatctgcagtaactataattttgttccctctcttacaatatttatatcttttattggttatcttatctaattataaagtttttccagaaaaaatgttagttaatagcagtaa

SEQ ID NO: 648982 - DNA, 638 bp, Homo sapiens
tgttaacttattcttaagtgtgtgtgtgtgtgtgtctgtgtgtgttttgaaacacacacactccctctgtcactcaggctggagtgcagtggcgtgatctcagctcactctaacctctgcttcttggattcaagtgattctcttgcatcagccttccaagtagctggggctacaggtgtgtgccaccatgcccggctaatttttgtatttttggtagagttggggttttgctatgttggcccagctggtctcaaactcctgaccttaggtgatccaccttccttggcctcccaaagtgctaggattacaggagtgagccaccatgcccggcctgaagtgtttttaaattactactaggaataagatcttttcttccagtttaattttctacctgattgttcttcagtatgcaggaaaattatgagtttttaaaatattaaataggtaactggttacttccctgaattacattgtttctaatggctttgcagttgtttctcttgggatttcaagtrtattgtcacatcatctgcagtaactataattttgttccctctcttacaatatttatatcttttattggttatcttatctaattataaagtttttccagaaaaaatgttagttaatagcagtaa

SEQ ID NO: 648983 - DNA, 579 bp, Homo sapiens
tatatacccaaaggaatataaatcattctattataaacatacatgcatgcatatcttcactgcagcactattaacaatagcaaagacgtggaatcaccccagtgcctactgatgaagactagatggagaaaatgtggtacataaacagcatggaatgctctgcagatataaaaaggaatgcgatcatggcctttacagggacatgggtagagctggaagttgttatcctcagcaaactaacgcaggaacagaaaaccaaacactgcatgttctcactcgtaagtgggagctgaacgatgagaacacatgaacagatggaggggcctgttggaggggtgagtggagggagagcatsgggaagaatagctaatggatgctgtgcttaatacctaggtgacggttgatctgtggagcaaaccaccatggcacatgtttacctactatgtaacaaacctgcacatcctgcatatataccgtggaacttaaaagttgaaagaaaaaaaaaaaaaagaactcatagtacatgaggacttgagtagagttcttgaaagggcaacaccttaacagtaacgttaaatt

SEQ ID NO: 648984 - DNA, 528 bp, Homo sapiens
agtaaaataatccaccttgtattttaagaggagcattctaccttctctgtggaatagagaggtggaagggaaagcttgaagcagagagagcagtgaagagtgtactgtaatattcttatgtgagaaatagtggagggaatgagaggtggtcagccttaaactgccatttgctctctgtatcagggctcagggactttcagactctccagggattccttacagtttttacattygtttctcagttgcaaacataatctcttcactctatgagaactctagatctgaatccttgttatgagtcaggagtcctctctagtttactctcttgtcagtaactagacttgaaatgttttgatattaattgatatagtaataagattggttagagaaatagcaaagagagagcatccccatcctatgaccatatcagcaccagaagagaaaaacacatctacacagtttttcccttggcataggtcctggtattctgttagggaacaggttatgaaggaaatacaaagggtcttt

SEQ ID NO: 648985 - DNA, 468 bp, Homo sapiens
taggaattccactttagagtccaatctgaccatctgaatctgaatcggactatagtggatggactgatgctaccctgcagccttacttccttaactttgtttccccaggccctaatataaaccccaggaaaacaggcatacagctgtatgcatttggcagattactatccatttcattgttcagttgttctggaaagrcaccgaatgcaactgtagcctggaaacatttggaaaaatggtactgttcctgatatctttgtttcttcctaggtgacagttgaaggtgactttcctttgtacagttctgcctgctgttagcaattttccaaaattaaataccatattttgtgtttgataggcacagctgtgtctgttaccaagggcaagcccacttgcacaacactctgtgttcatttatatactgagaactttatttagaacccagttttacagaaaaaaatcaagttg

SEQ ID NO: 648986 - DNA, 566 bp, Homo sapiens
tataaattacccagtctaaggtaatttgttacagcagtccaaatggactcaaacaggttgtaaacacttgaaaaatgagtatctgtattgaatcgcatattttagccgtagtttgcttgtaggagtacagcctatgkccaaagaattaatagctgactctcatttgaatggccaagatttgctctctatttccagtattttatttttgtgcctgtatgttggatacaggcaaatttttacacaataaaccagaaaagttcaatagtctttcattctctgctttcactaacttcttttaagtatatttcaacaattatcttaatattagcaccagtagattaagcatactgttataaacactctatttattcaaagcttgaattgagctagctgctaataacatttttttaattagcattgcaaccatattcacctaccatatttttccctctcctttgatttctgggccattactcactttcacaatttgtatgtgactcaccattctgtacctacttttgccttaccttaaaatattttttgatttaatacatttacattttttc

SEQ ID NO: 648987 - DNA, 566 bp, Homo sapiens
tataaattacccagtctaaggtaatttgttacagcagtccaaatggactcaaacaggttgtaaacacttgaaaaatgagtatctgtattgaatcgcatattttagccgtagtttgcttgtaggagtacagcctatggccaaagaattaatagctgactctcatttgaatggccaagatttgctctctatttccagtattttatttttgtgcctgtatgttggatacaggcaaatttttacacaataaaccagaaaagttcaatagtctttcattctctgctttcactaacttcttttaagtatatttcaacaattatcttaatattagcaccagtagattaagcrtactgttataaacactctatttattcaaagcttgaattgagctagctgctaataacatttttttaattagcattgcaaccatattcacctaccatatttttccctctcctttgatttctgggccattactcactttcacaatttgtatgtgactcaccattctgtacctacttttgccttaccttaaaatattttttgatttaatacatttacattttttc

SEQ ID NO: 648988 - DNA, 566 bp, Homo sapiens
tataaattacccagtctaaggtaatttgttacagcagtccaaatggactcaaacaggttgtaaacacttgaaaaatgagtatctgtattgaatcgcatattttagccgtagtttgcttgtaggagtacagcctatggccaaagaattaatagctgactctcatttgaatggccaagatttgctctctatttccagtattttatttttgtgcctgtatgttggatacaggcaaatttttacacaataaaccagaaaagttcaatagtctttcattctctgctttcactaacttcttttaagtatatttcaacaattatcttaatattagcaccagtagattaagcatactgttataaacactctatttattcaaagcttgaattgagctagctgctaataacatttttttaattagcattgcaaccatattcacctaccatatttttccctctcctttgatttctgggccattactcactttcacaatttgtatgtgactcaccattctrtacctacttttgccttaccttaaaatattttttgatttaatacatttacattttttc

SEQ ID NO: 648989 - DNA, 557 bp, Homo sapiens
atccagttaattgacggtgctgtgtttactcttttttctgtctgcttgatatgtccatttttgatagaggggtgttgaagtcaccaactatgatagtggactcatgtttttctccttgcagttctattagatgttgcctcatgttttttgatgctccattgttaggcatctatacattaaggattgtcatgtctttataargaactgacccctttatcattatgtaatacccatctttagccctgataactttctttgctctgaagtctagtctgtttaaagttaatatagctgttcccattttaaaaattagcatcagcatagtatatctttcagtatgtgctcttatagttaatgcatgtttcttgtaggcaacatacaattgggaaggtttttttaaatccatttttacaatctttgccttttaactgatatatttagaacattgatgtttaaagtaactaatgatttagttgaattaatacctatcatatttgttagttttatatttgtttccctttttctttgttcttagtttgtcttccgctattttactg

SEQ ID NO: 648990 - DNA, 572 bp, Homo sapiens
tgatcttcacaggcatatgttgagggaaacaaatgactggcatgaggttgtgcagctggtgaatttgaaactcaaccatatgagtaaaaacaatttgagtaagacacaatgaatttagacttcatttattctcattttgaaataatttgcaaaagtgttaggctaaggatttatattttcattacctatgaggaaataaagcaarcaaatttggaccaaaactacaaaaactaaagcattcaaagtatcatcaagtgctttaaaagtcacattttcagtattctcatcatcacacaaacacttaaattgaaatgacaaattattcagtatggctggtcagaagagagatttgactcagagacatttgttactagttgttatctgttattataggaattgccataatgagacaagctcactcatcatggatttctattggtaagaagaaaaataagggatttttgtgagaagacaatgctgtccttttaatgttagcatcaaaaggtccaggatgaaacttaattatttttatcttttcatacaaccatttagagagttatcatgaatgagct

SEQ ID NO: 648991 - DNA, 572 bp, Homo sapiens
tgatcttcacaggcatatgttgagggaaacaaatgactggcatgaggttgtgcagctggtgaatttgaaactcaaccatatgagtaaaaacaatttgagtaagacacaatgaatttagacttcatttattctcattttgaaataatttgcaaaagtgttaggctaaggatttatattttcattacctatgaggaaataaagcaaacaaatttggaccaaaactacaaaaactaaagmattcaaagtatcatcaagtgctttaaaagtcacattttcagtattctcatcatcacacaaacacttaaattgaaatgacaaattattcagtatggctggtcagaagagagatttgactcagagacatttgttactagttgttatctgttattataggaattgccataatgagacaagctcactcatcatggatttctattggtaagaagaaaaataagggatttttgtgagaagacaatgctgtccttttaatgttagcatcaaaaggtccaggatgaaacttaattatttttatcttttcatacaaccatttagagagttatcatgaatgagct

SEQ ID NO: 648992 - DNA, 599 bp, Homo sapiens
tacagatcatactgtgatttcatctacttttcagtcatcttttcttcccttagtatatagttctatagattccatgacatatatagattagtgtatcactacaatcaagatagagtactgttctatcaacataaagaaatttatyttttaatagtcacaaccctccacttcctcataccataacccctaataaccactgatctgttctccatccctacatttcatcatatttaggcttttaaataaatagaatcacacagtaagtaaccttttgagataggcttttttcccacttagcctcaatatatattcaagttattgtgtctattaatagcttattctttttcatttctgagtagtattctgttgtaatgatgtaccacagtttgtttattcattcattcattgaacgacaattgagtttttccagattagggctattacaaataaagttcctatgcattttagtgttctggtttttcgtgaatgtaagtttccatttctctgagataaacactaaagattgtgatttatatgtcatgtgataaagatatggttaactttataaaagactgccaaactgtttttcagaataaatg

SEQ ID NO: 648993 - DNA, 621 bp, Homo sapiens
gaatgaaaaaaggaagttgtccatgtcaattcttaggttttaagcttcaaaaaagtatgtagataatggctatagtaatcaaaattaagaataatagagggaaatagtttgaagagaggaaatgatagatatttttggccatattaaaactgaggtatctacaggacataccaaaatatctaactcagtaggaaaaatattattcagaaaggacatttggtttatgaagaataaagacctattggattaagtggaatgttttacttaaaagtagtttcctactcttttcaggaatattattggcaattaatctttgacctctaagccagttcacattaaaaataagaccacaccaaaagacattttagattgagaaactaatgtgaacaattcatggggagaaaattgaaatatggcaatagtctattgtacagctgtcttgaaggggaatttgaaggccataactgtcgaaggattttcctaacttacagaagcctgtgtacactaccagaagaattgatgtttgcarttccacccactgtgtactttttcatgatgagagaaatcattcaggacaacgcagttagcaaaccataactcaaaatcgatagacccccaccc

SEQ ID NO: 648994 - DNA, 637 bp, Homo sapiens
cagtaatatttatacagtcaaaaagtggaaacaatccatgtgcttgttgactcataaatggacacccaatttccagctataacaaagaatgaagtacttatacatggtataatatgggtgaaatttgaaagcattatgttaarttcacagaaggacaaacattacttgattttattcacatgaaacatcaggaatcggcaaatcaattgggatataaatcagattagtggtcattagggctcagggaagcagaatagggtgtaacaacttaatgcataatgggcttttagaagggacatgatgaaattatcctggaacattgtgaatattctgaaagcaattgcattgtatgttttaaaatggttaagttattaattttatattatgtgatttttgccttagaaaacaaaaaagagaaaatagccttactgtatatacaaaaaactcaagatgtgttacaaatttatatgtgaaatccaaaatactgtaatatttaagggatagctaagtagaataacactaaaatttaacataatgaaatatttccttagaaaagaaaaaagcacagtaattaaaaagggaaatatagttaatattttttccctccattaagcataccattaactgattaaaaaat

SEQ ID NO: 648995 - DNA, 586 bp, Homo sapiens
tcccacctcagcctcatgttgtagtgaactttgttatgcagtgtctcctattctacatgtgcaggagtatttttacagtatgtacctggagtggaattgcttggtcattgggcatgtgtgtgttcagctctattgagtggcatcataccgttctccaaagcagttgtaccaatctacaccctcaccagcagtgaatagtcttcccattgttcttcctcaatgaaactagatattcacagccttttargtttttcctagagtatgaagtggtatctctttggggttttaatgtttatttccctgattagaattgtagttgagcatcttttattatgtttatggaccatttatgttctctcttctgtgaaattcctattcgggttttttgctcattttaaatgttgttgtttgtgtttttcttatataggaactcttcacgcattcaagatgcacatatgttgttcagaatagtacctgagacatagaaacaactttgtaagaatagctatcattatattaccattgtatttaatcctttgtttttatgtgttacaattatcttctgctagtttgtggcttatttttc

SEQ ID NO: 648996 - DNA, 309 bp, Homo sapiens
cagaagcaggacagggacagggccaatgctcaggccagggacagggcatgacaggamgtgccagagcagggctgggccaacgtcggggcagggcaaatcagaccaggacacctccaattccagctctggccctgccttggccctggcccttcctggcctgaccttgtccctggccctgccctatccatgccctgtgtgtttgaccagtgttttataaccagaatcctacaagaaacttaaattagttctttttgtgcatttttagtagagatggggtttcacaatgttgcccaggctggttccaaactc

SEQ ID NO: 648997 - DNA, 418 bp, Homo sapiens
cattgatatggtttggctctgtgtccccacccaaatctcatcttgaattgtaatccccacatataaaggaaggaacctggtgggaggtgattggatcatgrcagcagcttcccccatgctgttctcatgataatgagttaagttctcaagagatctgatgggtttataagtgtttgacagttcctccttcacatgcttactttctcccttgcctgccaccatagaagatgtgtctgcttctcctcccactatcatggtaagtttcctgaggcctctccagcatgcagaactgtgagtcaattaaaccttttttcctttataaattacccagtctcaggaaagtcttttatgacagtgtgaaagcggactaatacagccatgagaaatgaataacggttaaatggtaggaagaagaaag

SEQ ID NO: 648998 - DNA, 418 bp, Homo sapiens
cattgatatggtttggctctgtgtccccacccaaatctcatcttgaattgtaatccccacatataaaggaaggaacctggtgggaggtgattggatcatgacagcagcttcccccatgctgttctcatgataatgagttaagttctcaagagatctgatgggtttataagtgtttgacagttcctccttcacatgcttactttctcccttgcctgccaccatagaagatgtgtctgcttctcctcccactatcatggtaagtttcctgaggcctctccagcatgcagaactgtgagtcaattaaascttttttcctttataaattacccagtctcaggaaagtcttttatgacagtgtgaaagcggactaatacagccatgagaaatgaataacggttaaatggtaggaagaagaaag

SEQ ID NO: 648999 - DNA, 496 bp, Homo sapiens
atatataaatttacaggaactttgaagtttgaacaatacagatactgtgtatatatgatatacatacaaacatactacatgaatataattttttaaaaagttgctatgtagacaaaacagaatgtaagttagaaatatttattaaaataagttagtctaaccagtgtgataaaagttttaagttattaagaagatgtgatgacttaaatgtgcgttagcctgatacatacatatatatatacacacaaaccacacactctctcacaaccacagacayacacgtatttagagagagagtcaaattatataaagcaaaaatatcagaaagtagaaatggataagcccccaaatattatagacatttcaaacacacatctttcaataatagataaaagaaaaaattaaaagagtaagttttaaaagaagctagtggattttaaaaagggcaaatattatataaggaacatgaatattatagttcatgttattttcttgt

SEQ ID NO: 649000 - DNA, 385 bp, Homo sapiens
gtgaattcctcaaactcttgcatatttaaaatcacatttttgaaccttgatgcttgaagtgtagtttgggtaacagatgacctttaagccaattttggcatgcaaggggttgtttattaggcatcagcactgctgaaaatcgtggggatgcaggcttaatttcaacactattctaaatacttgaaagatattatataattctttaataaactcctgtgtataaaaatggttcacattaactcaatatccatgattaaacatttacaaaatcaagacactgttatttagtggagacttgctggctattctatgagaggaggtattgttattgtaatctcatcctctcataaawatgtatcatattactcataaccagcccttcata

SEQ ID NO: 649001 - DNA, 492 bp, Homo sapiens
aatgaaacaagacttttaaataaaattaaactttcaaattatccaggtratgggcctgtcttttaattcaatggatatggagcataatgaattatccctgttcattgggtaataagttttcattcttctaatactcaaaatgtcctttaatttttaatagtcatatcattatccctaggtattttagcttctatcttaaattctaaaataattttgaaacaggagaaagtattctttattactatatgtattaaacatcatggttttcaaatttaactgcaaatgtatcttttcattgcttcttggtgacgcccttcaccctatccatattgtcactaccaagtggtgattacttttcaggttcacatacttattctttagaaaaatctctgtgccttataaagaatatgattgttggcattcaaaagccagcgaagtatacattattagcctgttgcctaactcatttctttaagaaactacactaattac

SEQ ID NO: 649002 - DNA, 492 bp, Homo sapiens
aatgaaacaagacttttaaataaaattaaactttcaaattatccaggtaatgggcctgtcttttaattcaatggatatggagcataatgaattatccctgttcattgggtaataagttttcattcttctaatactcaaaatgtcctttaatttttaatagtcatatcattatccctaggtattttagcttctatcttaaattctaaaataattttgaaacaggagaaagtattctttattactatatgtattaaacatcatggttttcaaatttaactgcaaatgtatcttttcattgcttcttgrtgacgcccttcaccctatccatattgtcactaccaagtggtgattacttttcaggttcacatacttattctttagaaaaatctctgtgccttataaagaatatgattgttggcattcaaaagccagcgaagtatacattattagcctgttgcctaactcatttctttaagaaactacactaattac

SEQ ID NO: 649003 - DNA, 563 bp, Homo sapiens
acactagatattaacattttaaaataaaaatattactttgggtttaatcacaacttaaagaaattttccataaactcttctcattacacaaaatattaccattggaaagaatccacatatactgacttttaggtaatatgcattttgctactttatcatattggtttttttctttactaacatttctaatatttaaatcttaagatgaacaagctgaatgattgttaagtgaaattaatctctaataaatttaagtataacatagttcctgtgtaaaaatcaatttttaaatttctgaaaactttagaacacatatagtggagtttgtaatttatcatatgtaggctggtataaagtagtataaagtcatggctgggagagggttattgttgcagatttcatattcctgtaagttttgaytaaactcttcacctatccgtctatagttaaaggaatccaaagcctggatcccataagaaataagcaactttctcttaattttatgagatgaggaagaatcatgttgaatacagttgtctctcaaacaatatgggggttatggg

SEQ ID NO: 649004 - DNA, 575 bp, Homo sapiens
tttcagtttttccccattcagtatgatactagctgtgggtatgtcatatatggcttttattgcattgaggtatgtgtcttctatacccagtttttttagtrttttttttcatcataaaaggatattgaattttatcaaatgcattttcagcatcagttgcaatgatcatatggcttttgtccttcattctgctaatatgatgtatcacattcattgatttctgtatgttggaccatccttgtattcctgtgaaaaatctctgttgttcacgatgaatgatctttttaatgtgttactgaattcagtttgctagtattttgttaagggtttttgcatcgatattcagagatattgacctgtgattttctttatttgatgtgtctgtctagttttgatttcagggtaataatacttgcctcatagaatgagtttggaagtatttctttctcttctatttttcagaatagtttgagtaggattggtattagtccttctttaattgtttggtaatatttagcagtgaagccatggggggtgcttggcttttccttactgggagactttttattatagca

SEQ ID NO: 649005 - DNA, 592 bp, Homo sapiens
attcaaagccagtatatgtacaaggatcctgccttgctgtggctccattacaggggcaacatattgaacttagaaagtggatcaatagaaacttccacattgagaatttaccttcatcttgggtagctgcgacctcagaacctatatttttcatttcagagaaaaagcaaaagaagtgtgatagaggtctttatgactagagagccctgaaattctagacgcaagaaaatcagctgcaggttttgttttagagcctgaagttgggtagtattagcagactggcagcactttcattcatctttccagggtgttaacttccaactcgaatattggcacttaaatttccacaccctgttaagcaaactgcttaaaacaaaacattcagctctcgtcaatgaaattcaaggatactcctacagtgatattaatctacagaacaagagaagccttttaaaatttgcgatgccttttatagttttctctcccycaggatcccatttcacatacatctcactggctttggcagtggtgacccaaagtctggcagcttgagaaaagtagccccaactttaaccaggcttcagcatttccc

SEQ ID NO: 649006 - DNA, 443 bp, Homo sapiens
agatctttttatcctttatctactttattcccattctaaatttcttaaatctgtgtagaaattggtaacatgggaaaagtatcttgaacattgctgacacaggccttcagcactcaataaatgttaattgactctaaatgttatagttctcccttttacatttttttctgttttttcttggtttcattttgtattttaaggcatcaaggcttttataagagtggtatatcatagatttccccccccaccagccttcttagtgatgcctaatactcttttarctttctgattttagtgtttttatttaaatagctaatctagaatgaattctggagtatatctctatgaggtctgagttttcatttaggtacagttaggtttgtttcctaaatggatttctttgtatttatctgcatcaaaacttgtgttccattttgctttcc

SEQ ID NO: 649007 - DNA, 540 bp, Homo sapiens
ttttaccttccacttatctgtgtctttgtatttaagttctcctctttgaaacagcatatgttttggtctttctttttagctgttattgcttatggtatattttactgtatttttatttacattttcaatttactcgtgataaaattggctccttttgccatagacttctatgagttttgagaaatatttacagttgtgtatttactactataatcaagatatagcaattctatcatctgagaaaattctccttaggtgcaytggaggtcagtctattcccagtcaatccattcccccaaccacagctcatcggaaaccatgatatttttgtgaccctacaatttggccttttcctgaatgtcatataagtagaatcatacagaatatagcctttaaaatctgacttcttatatcagcataatgcatttgagatttattcatattactgctggtattcactgtataaatgtatcatattttgtttatccattatccagtagaaggacatttggacactttggagtttttggtgattatgaa

SEQ ID NO: 649008 - DNA, 508 bp, Homo sapiens
agtaatatatgacacccttttcatgaaatgtattattgagactatcaatacctctccactgtttttatcatattacttaaaatataaagattcaaaattaggcacaaactctttatgctatagctcacatacaacaataaaacctaaaccatatttaaattaaatacaaacaacattatgaaattaataaaattcaaattaatattaatttaaacataacattatattggtctactgaaattaaatgtctgttgtttcatttaatagaaaacaacatatagcctcaaaactaattttatttttaatctactttcataatacttgtgttagaaatgaccatttgcataagtatattttgcaaaatggtatatcaataacttcaaggttctgtttccaaccttaaacttaatcaaaactctgccagtgagcacttctataatggcagttttaataagatrttttctagtacctctgtgaagtgagtttcttgtgtattctaagagaattg

SEQ ID NO: 649009 - DNA, 608 bp, Homo sapiens
tttagagtcttgtctctaccttcagattttcatctgtagtatgaaattatgactctccaaacatattactaagaccaattttccccttaaagcaaagcccaaatgtgtagacattatatattgttctattgagggaacttgagataaaatacatgtgcatgctttctaaactgtaaagtgctatctacatataagtttgttgctattgcatggttaagatacactttgtaatggggaattatgattgaactgcaatttgcagtttctggagcccacttccatttaaatttgcagttttatccattgttattcaattgttttaagtaatttaagtgycaggcaatgtttttgtattctttcattggaacaaatatttgagtaggtttaacataaaaattgatataaacagaggctatatttttggttcgggaccattaaagggcagatatttggagaagtgcttttgaaagagtttggaacctgcctaagtctgtggctctcaccagctgccctcctagtttctctccctcagcttcctcccacatctgcaaggagcatgtatgcagggactcctcactgagtcagtccctccagcagtctccatgtgt

SEQ ID NO: 649010 - DNA, 620 bp, Homo sapiens
cactttataagccaatcagaatccacctgtagattcagatgttaccatctagtatacagctgaagccagaagtcaactatggaaacgataaaagggcaacagaagtcagctaacatctgtaaacttctataagcttggaatcccaaatctggatatttcttgattaatccaaagtgcagaaatcatgaggtggtggaatcaacctccctacatctggtaaagcatcactatagcggtgaacaagggcacttcaaattgtgttggaccagttttcattagggatgtgtatgttatgatcaaaatagacayagcagaacacagaaaactgggcccatgggtggcagatcagtttctccagttgtctttctccttcacatatgaaagcaggacaggtttcttcagactaaataagctctaggtgttcatgaactttttaagagaggaaacacactaaaatgtaatgggtgcctttccagttacttggaaaatttatttaaatattgaaaagaaatgagtctttaattattcctcaagctggtgaagtgagttacactggagatatacttacagatctctatattcacatatcactaactctctattcagtttgacaccctcaa

SEQ ID NO: 649011 - DNA, 552 bp, Homo sapiens
tttgtctctctatgtcactctccttggcttgctcacttcgatgaagaacattgccatgttataagctgcctagagagascagcagggcaaaggactgagggtagcctccagtaaccagcaaggaattaaggttttgggtccaagatctcacagggaactaaaccctgccaggaaccagctgtgtgatcttgaaaggatatcctttcaggtagatctttgatggcttaggtcctagcccacaactttgctagagcctgtgagagaactgaagcagagaactcagcaaagatgcatctgagttctcgatgtgctgaagctgagagatagtagtattgtcacttcaaaccattaagtttggggataatttgttatgaagcaaaagataactaaacttaagctattctttcctctaggctgaaagaatgaagtgctcccaatcagcctctcccctaatctcttgatctcacaccttgcctgatttgctgcatcagttttcttctctttccttttcactctcaacttccccattccctctcttaccaaaatgaattc

SEQ ID NO: 649012 - DNA, 587 bp, Homo sapiens
atgttctttgtgtaaatgagtggaactgggtggaagggtttaatgaattcagagaagttagtcataaatcagtgaaaacaagtggaatttgcaggtttagattgagcttgaaaataaaggttgagattgaaaataaagcacataattggcctaagagcaccctagacccacagaacatgttcttgctgaagcagttgggcagaaccaagactggtcatatgattccagaacagcaacaaaggacacccaattgttctgagtgtgcactgaaggaagtggcaaagttactctcccgtaggttgctggagggcctgcattagacccatcttaactctttcagtgccarttttcaacagtgacttttttccacgttaaaatacatgttggttcttttattaagcaacatgttaaaaattaatttcctattttttggtgaaaagtatttggcagcagggagaaaaatatgttcaagatatttgagctactgccacacacctgttcccttataacctggagcagaagtactggtccatcagagaagacatttccatgacctctttagcctctttataaatattaataattaa

SEQ ID NO: 649013 - DNA, 590 bp, Homo sapiens
actaaataccactggacctcagtttcttatctctgaatggacataactgtataaacgcttgagagttgtgagacataaatgaatattgcatgtaaatcgcctaagatatggtttggtataccatggatattcaagaaatagtagctattatcattaaatatatgctggacttgactctacattttttattatttgccaatagaaggcttttcaggaaataaaagcaaagatgtttataatgtatcactaacagcttgttctttatttttttctaagatattttacaacttaataaaactataaagtttagagtttaaaacaggtatggagcttttttctaaaatggattaattaaattttgttatttcaaactctgtggttatcttcacaaaatcttgattttggaaaaatatgcatgtggtttttaaatatttgactatttccttcactaaatgmgggtggcctcagcttaaagatttatacacggaagcgggagacattatccagaatatatatcaaggaatttaaatagggatatccaattaattaacatctgtattcatttatgcctagctttacattggatagat

SEQ ID NO: 649014 - DNA, 528 bp, Homo sapiens
actttgaggcatttttctctcatacaaaattttaatttttatggagtcaaatacaaccttggcgccgatctggttcccgtactgcctggcctgcgtgagcactatttccctcatggctaaggtgggattacagaggcaggagaaacgcgagaaggagcagcagacacacagctacccagcccgccctccaccaacgctgaaatagcccggcgcccacctgcctcagcctcggattctgctcccagaataagcaacagctttacttccacacaggtgtacccacctgtgactcccttggcgctgaacgtctgttggggagctcargtgtccttgctgtggtcctttccatgttggggaaagctggtcagctggagaacttcctcccacaactttagtaagactaaatccttagctgagctgaaactgaattttcctcccatgtgggaggagaagactcttgtttccatattcacagagtgcctttgcacctgtcctagattgatgacatattgttgtaattgatgagtc

SEQ ID NO: 649015 - DNA, 528 bp, Homo sapiens
actttgaggcatttttctctcatacaaaattttaatttttatggagtcaaatacaaccttggcgccgatctggttcccgtactgcctggcctgcgtgagcactatttccctcatggctaaggtgggattacagaggcaggagaaacgcgagaaggagcagcagacacacagctacccagcccgccctccaccaacgctgaaatagcccggcgcccacctgcctcagcctcggattctgctcccagaataagcaacagctttacttccacacaggtgtacccacctgtgactcccttggcgctgaacgtctgttggggagctcaggtgtccttgctgtggtcctttccatgttggggaaagctggtcagctggagaacttcctcccacaactttagtaagactaaatccytagctgagctgaaactgaattttcctcccatgtgggaggagaagactcttgtttccatattcacagagtgcctttgcacctgtcctagattgatgacatattgttgtaattgatgagtc

SEQ ID NO: 649016 - DNA, 528 bp, Homo sapiens
actttgaggcatttttctctcatacaaaattttaatttttatggagtcaaatacaaccttggcgccgatctggttcccgtactgcctggcctgcgtgagcactatttccctcatggctaaggtgggattacagaggcaggagaaacgcgagaaggagcagcagacacacagctacccagcccgccctccaccaacgctgaaatagcccggcgcccacctgcctcagcctcggattctgctcccagaataagcaacagctttacttccacacaggtgtacccacctgtgactcccttggcgctgaacgtctgttggggagctcaggtgtccttgctgtggtcctttccatgttggggaaagctggtcagctggagaacttcctcccacaactttagtaagactaaatccttagctgagctgaaactgaattttcctcccatgtgggaggrgaagactcttgtttccatattcacagagtgcctttgcacctgtcctagattgatgacatattgttgtaattgatgagtc

SEQ ID NO: 649017 - DNA, 611 bp, Homo sapiens
taattataagttttactttggagcagttcaaacccgcagtaagctatgggtgttagagatagtcaggcgtctgatttagctggagtcttctttagagtaggattagccctttcacctttccagaggactgcagtctgcacacagagtgaaggtaatattggattcttaaatctgaggataggtgttgggatacacctgctgtgaaagacgggccattgccactttgcaggcttttagattacccaaactaaggagttatttcttctggtaaacatttttcagatggggtggggaatgcctcgatctaaccagtgagggtatcagtaagcattagcaaatatttgaatctcctgcagaaagatatctgcataaattagagttgccagttctcacctgkataggttcctcaattttggacaggtttacctggagaaggagaaaattgctggccatttgggtcatgtcaggcacagagctcacagggctgagtcacctgttttggtgttttgaaaagatttacccctataaacaaatgagacattaacagaaaccaagaatcacttctagggtgaaaagaatcatgaaagtgctgaattatattcctatgactg

SEQ ID NO: 649018 - DNA, 459 bp, Homo sapiens
atccacccttgtaataaggctaggttttcatcttttccctgagtaattttccagactttattaaaattaaaaagctgtatcacactttttttttattccttcacggagtcaaacgatcataattttttctctctatatcccattttcttcctaatttatttgtcttttctagattctagtcctcttctgggtcctagtcaggcactgctgtgcctcctacttgataggtctcatgcccctggttgcaggctgccaccctattagcatgtgctctagccaatcccatcatacactgcttttctaccatgcagcaggtaaacataaatatatgcaaatcctgcctggtcagatcatacgtcaaggttagccttttaaatttgtctatgaattttaccagaacctctgaaaactttttaagtttttccttgcatakggctaattcagttgtaaaaaagtgta

SEQ ID NO: 649019 - DNA, 550 bp, Homo sapiens
gccaggtgtcagctgattgattttgtgtggattgttttccttggagtgggggtcttgtcttggtgtccattcatggtgttgctgaaagatgttgctggaaaagagggtcctgatacagaccacaaagtaggattcttagattttctgcaggcaaaaatttgaggtgagtcagagagcacagtgaaagaagcaagtttattagaaattactccattacagagttggacatcctcagaaaacaagagcaggaatgcattgtcttttgttagtgtgtctacttataagtaactataaagagaaagtgttatarttaaacttggaaggtgcagatgtagtcactaaagtcggggctattggttttaacaataaccattaacccattgacctaagctagttcattaataatatccttacaaaaaaattctgcactcctaggacatttatacattttttcaggctttgtggaagatgtcttgtatgaccacaaatattctgcaattgtaatttgtggccatttaaaaaatgtgactattttcagaccatgaacatt

SEQ ID NO: 649020 - DNA, 447 bp, Homo sapiens
aaccaattttatttcttgtaggcatatactgagcagtggaattgctggaacatatagtagctctatttttagttatatcaggaacatccaaactgtccttaaatgtgctcccaacagcagtgtacaagggttcccttcactccacatacccaccagcattttttttttcactgtcttctggataaaagccaccttaattggggtgaaatgatatctcattttgggtttgatttgcatttctatgatgatcagtaatgtggagcacctttycatttgcctgtttcacatttatatgtcttcttttcataaatgtctatttaaattttttgtccactctttatttgggttattacttttttctatagaattttttgaactcaatatattgtagtgtattagtctttttctgtactgttattaaaaatacctgagactgtgttatctatt

SEQ ID NO: 649021 - DNA, 510 bp, Homo sapiens
agactgggtaacttataaaggaaatgggtttaattgactcacagttccacatggccggggaggcctcaggaaacttacaataatggcagatggggaagcaggcacctcttacatgacagcaggcgagagagcctgtatgtgaagcaaagraggaagagtcccttataaaaccatcagatctcatgagaaatcactcattatcagaagaacagcatgggggaaaccacccccatgatccaatcgccttctaccaagtctctccctcaacatctggggattacaattcaatatgagatttaggtggagacacaaatcctaaccatatcatgcagctattaattgttttcagatggataatttaaaatattttctcccattgtgtggattttctcttcacttgtttcttgtttccttcacttcaaaaaggctttctgactttctgtaatcccatttgtccatgtttgttttggttgtctgtgcttctggggcattatttaaggaatttttacc

SEQ ID NO: 649022 - DNA, 510 bp, Homo sapiens
agactgggtaacttataaaggaaatgggtttaattgactcacagttccacatggccggggaggcctcaggaaacttacaataatggcagatggggaagcaggcacctcttacatgacagcaggcgagagagcctgtatgtgaagcaaaggaggaagagtcccttataaaaccatcagatctcatgagaaatcactcattatcagaagaacagcatgggggaaaccacccccatgatccaatcgccttctaccaagtctctccctcaacatctggggattacaattcaatatgagatttaggtggrgacacaaatcctaaccatatcatgcagctattaattgttttcagatggataatttaaaatattttctcccattgtgtggattttctcttcacttgtttcttgtttccttcacttcaaaaaggctttctgactttctgtaatcccatttgtccatgtttgttttggttgtctgtgcttctggggcattatttaaggaatttttacc

SEQ ID NO: 649023 - DNA, 549 bp, Homo sapiens
ttacatgacagcaggcgagagagcctgtatgtgaagcaaaggaggaagagtcccttataaaaccatcagatctcatgagaaatcactcattatcagaagaacagcatgggggaaaccacccccatgatccaatcgccttctaccaagtctctccctcaacatctggggattacaattcaatatgagatttaggtggagacacaaatcctaaccatatcatgcagctattaattgttttcagatggataatttaaaatattttctcccattgtgtggattttctcttcacttgtttcttgtttccttcacttyaaaaaggctttctgactttctgtaatcccatttgtccatgtttgttttggttgtctgtgcttctggggcattatttaaggaatttttacccaaaccaatgccctaaagagtttccccaatgctttcttgtaaaagtttgatggtttgaggcattaggtttaagtctttaattcattttaatttgatttttgtaagtggcaagaaatagggttctagttttattcttctgccaatggc

SEQ ID NO: 649024 - DNA, 591 bp, Homo sapiens
gaattcctccagttttgttttatatactcagcatagtttggctattatggtgtgtgatgtttccatataaatttcagaattttttttctatatctgtgaggaatgtcttcttcttytttttttttagatggcgtcttgctctgtcacctagactggagtgcagtgatgtgacctcgacacactgcaacctccaccacctgggttcaagcaattctttgactcagcctcctgagtagctgggattacaggcacctgccaccatgcctggctaattttttgtacttttagtagaggaggggtttcaccaagttggccaggctgatcttgagctcttgacctcatgatccaccaactttggcctcccaaagtgctgggattacaggcatgagccattgcccctggcctgttattttgatagagatggcatgaaatgtatagattgctatggattgtatggacattttaaaaatactgattcttccaatctgtgaacataaacatatctttccaattttggggtcctttttcatgtcttttatcagtgttttacagttttaattgttgagaacttttatttctttggtaaattcc

SEQ ID NO: 649025 - DNA, 591 bp, Homo sapiens
gaattcctccagttttgttttatatactcagcatagtttggctattatggtgtgtgatgtttccatataaatttcagaattttttttctatatctgtgaggaatgtcttcttcttttttttttttagatggcgtcttgctctgtcacctagactggagtgcagtgatgtgacctcgacacactgcaacctccaccacctgggttcaagcaattctttgactcagcctcctgagtagctgggattacaggcacctgycaccatgcctggctaattttttgtacttttagtagaggaggggtttcaccaagttggccaggctgatcttgagctcttgacctcatgatccaccaactttggcctcccaaagtgctgggattacaggcatgagccattgcccctggcctgttattttgatagagatggcatgaaatgtatagattgctatggattgtatggacattttaaaaatactgattcttccaatctgtgaacataaacatatctttccaattttggggtcctttttcatgtcttttatcagtgttttacagttttaattgttgagaacttttatttctttggtaaattcc

SEQ ID NO: 649026 - DNA, 567 bp, Homo sapiens
tttgttgactgttggcatatagaaatcctactgatttgtatatgttgatttgtattctgcaaatttactcaagttattacttctaatagtttttggtggatgtattaggccattctcatattgctrtaaaaagtaattagtgactggttaatttataaagaaaataggtttaattggttcatggttctacacgctatacagaaagcatagcactggcttctgcttctggggaagcctctgacaactgacaaggcgaaaaataaatctggtgctcgcacatcacatggtaagtgcgagggcaggtgggaagtgtgacacacacttgtagataaccagctctgataaaaacttactattgtgggaatggcaccaaaggaaatgatgccaaactgttcatggaaatcttgccctcatgattcaatcacctcccctctaggcccacttccaacattgagaattatatttcaatataagattttggtgggaatacacatccaaactgtatcattttgctcctggccattccaaatttcatatccttctcatatttcaaaatgcaatcatgac

SEQ ID NO: 649027 - DNA, 567 bp, Homo sapiens
tttgttgactgttggcatatagaaatcctactgatttgtatatgttgatttgtattctgcaaatttactcaagttattacttctaatagtttttggtggatgtattaggccattctcatattgctataaaaagtaattagtgactggttaatttataaagaaaataggtttaattggttcatggttctacacgctrtacagaaagcatagcactggcttctgcttctggggaagcctctgacaactgacaaggcgaaaaataaatctggtgctcgcacatcacatggtaagtgcgagggcaggtgggaagtgtgacacacacttgtagataaccagctctgataaaaacttactattgtgggaatggcaccaaaggaaatgatgccaaactgttcatggaaatcttgccctcatgattcaatcacctcccctctaggcccacttccaacattgagaattatatttcaatataagattttggtgggaatacacatccaaactgtatcattttgctcctggccattccaaatttcatatccttctcatatttcaaaatgcaatcatgac

SEQ ID NO: 649028 - DNA, 180 bp, Homo sapiens
tgagtgtcctgcagcccgaagcgtttactttgaaaaaattagagtgttcaaagcaggyccgagccgcctggatacctcagctaggaataatggaataggaccgcggttctattctgttggttttcggaactgaggccatgattaagagggacgggcgggggcattcgtattgcgccgcta

SEQ ID NO: 649029 - DNA, 209 bp, Homo sapiens
tgagtgtcctgcagcccgaagcgtttactttgaaaaaattagagtgttcaaagcaggtccgagccgcctggatacctcagctaggaataatggaataggaccgcggttctattytgttggttttcggaactgaggccatgattaagagggacgggcgggggcattcgtattgcgccgctagaggtgaaattcttgggccggcgcagttc

SEQ ID NO: 649030 - DNA, 196 bp, Homo sapiens
tgagtgtcctgcagcccgaagcgtttactttgaaaaaattagagtgttcaaagcaggtccgagccgcctggatacctcagctaggaataatggaataggaccgcggttctattctgttggttttcggaactgaggccatgattaagagggacggscgggggcattcgtattgcgccgctagaggtgaaattcttgg

SEQ ID NO: 649031 - DNA, 497 bp, Homo sapiens
caacactgtcacatagaggattaagcttccaacatgtgagctctgggagacacatgcagaccatatatgggggattgatgagtgtatgggagggaccagtcatkaatattttggctgagagttgtgtttgagagttgaagccatactccttcatggcagggcacacatagacctttgaatgctctgaggaatgaatattgaagcgtgtaactcatggcagaaggtggaatatttaaaaggcaaaactgcctgggtcacataaaagagtgaacaaacagcctgtagcctgtggtaggctcctcttccctttccgtccccacctttcacctttctctctttctttctttccctccctccctctctctctcccttcccccccactctccttccttcctctcttccttccttccttcctctcccttcctctttctctccctccctgcttccttgtttctttccttctttctctttccctctttctctccctccttccttcc

SEQ ID NO: 649032 - DNA, 497 bp, Homo sapiens
caacactgtcacatagaggattaagcttccaacatgtgagctctgggagacacatgcagaccatatatgggggattgatgagtgtatgggagggaccagtcattaatattttggctgagagttgtgtttgagagttgaagccatrctccttcatggcagggcacacatagacctttgaatgctctgaggaatgaatattgaagcgtgtaactcatggcagaaggtggaatatttaaaaggcaaaactgcctgggtcacataaaagagtgaacaaacagcctgtagcctgtggtaggctcctcttccctttccgtccccacctttcacctttctctctttctttctttccctccctccctctctctctcccttcccccccactctccttccttcctctcttccttccttccttcctctcccttcctctttctctccctccctgcttccttgtttctttccttctttctctttccctctttctctccctccttccttcc

SEQ ID NO: 649033 - DNA, 497 bp, Homo sapiens
caacactgtcacatagaggattaagcttccaacatgtgagctctgggagacacatgcagaccatatatgggggattgatgagtgtatgggagggaccagtcattaatattttggctgagagttgtgtttgagagttgaagccatactccwtcatggcagggcacacatagacctttgaatgctctgaggaatgaatattgaagcgtgtaactcatggcagaaggtggaatatttaaaaggcaaaactgcctgggtcacataaaagagtgaacaaacagcctgtagcctgtggtaggctcctcttccctttccgtccccacctttcacctttctctctttctttctttccctccctccctctctctctcccttcccccccactctccttccttcctctcttccttccttccttcctctcccttcctctttctctccctccctgcttccttgtttctttccttctttctctttccctctttctctccctccttccttcc

SEQ ID NO: 649034 - DNA, 479 bp, Homo sapiens
gatttatacattgtgtaaaaagtaaattagatagctagtaggtaccctatatatattataattttgacctataagattaagtttagtgcaggcaaaaagggctcattaaaattttcatccactttttcaacttctttccaaactataatataatttatgccccaactgttattttatcaattactcttaaccatatttcataaaatttatatttttttctttatttagaaatgtaaggctattatttgcttttaaaggctgtgatacagctttttttattttgtgaaataatagcaccaacattataaatatttattgtgtaaatacttactcattaaaatcttcccattagagaattttattaattattgtagttcatttctgtaaaattgtactgccacacaccacagggcaatgattcmaaatgcctggtcttcacagatgcacagtcactgttgaacattgtggttatttagaaa

SEQ ID NO: 649035 - DNA, 575 bp, Homo sapiens
acttaaatggagaatttaaaaagcctgaacttatagaagcagagtgtacaatggtaatgaccaggcctggaggtagaaaaaatgagaagktgttcaaagagtacaaactttcagttataagataaataagttttgggggtctaatgtacagccttaagatgtagttaataacagtgttttgtatgcttaaaatttgctacaacagtaggagacctcaaatgctctcactacaaaaaacataaccatgtgaggtgacaaaaatgttcatcaacttaattgtattaaacattttacaatatatatcaaattttcataatgtacacaatacataattatgcaatttttattggtcaaaaattaatgttatgtacacatgcatatattcatataagtgtgtatatagacatatataaaacatatacatatatatcaattacatatgttgttatgtatataattgtgtgtgtgtatatatatatatatatatacatatatacacacacatacatatcaatgacaaaatcctagtaagcttcaaactaaacaaggcaaaattataaaatgataactattta

SEQ ID NO: 649036 - DNA, 555 bp, Homo sapiens
catcatgtgaaataatcaagaccatgtgttattgtaaatatttctagcttacaacacaacaacctgatttttactgtttgaaataaccataatataaatcagttaattaaaaattgcataaataatcctttcaaataaaattctgcctaaattttacattactcatatgttcaaatgataatgagctcataggattttccaatacctcagtcaaaacattgtactgattccagctgtgggaatagtacctgaaagttatcttacagatggggaaaaggtacctatgtgacattggcctttgcactactgtacccttttgggtcaggaaaaagctgttcccttaaartcctaaaatctcttctgtcaggtctaaagggtgggtgggaaacatagtttttaaattttagccacagatgttttattccttgcttaaagcagtgactagataaaggccactagaagagtctccaacgttcctttagaagcatgtgtctgagaacatcttcctgaaacactcccttgtctctgcccaaaatcaccttaggtaggaaaatc

SEQ ID NO: 649037 - DNA, 490 bp, Homo sapiens
atttgatggatttctccatttttcagaataaaatactatattttaattttattttcagaacaagcaagattcttattgtaattgtgcatgtttaggctttactyttattttgctactcaactcaatatgcctgtatgttttggtcaatctggaaattccctcacaccttttcatactgtattgccctctacttgtaatacactcctgctgaagtacaccctcctctcctactatatatcgctcatttataactctcctactttatgtcacagaatatttcacttttctaggcttccttcacaacataatcttatggttattataggatttatcaaattgaattgaatttgtgtttctttttatgtgtccactgtaatgtggtgaatggaagaaattgaatgaatattcatatttttacttttgttcattcctgtgtttctgctcctaggacaagtcaattagattaaatttaccatttacctactaatgt

SEQ ID NO: 649038 - DNA, 490 bp, Homo sapiens
atttgatggatttctccatttttcagaataaaatactatattttaattttattttcagaacaagcaagattcttattgtaattgtgcatgtttaggctttacttttattttgctactcaactcaatatgcctgtrtgttttggtcaatctggaaattccctcacaccttttcatactgtattgccctctacttgtaatacactcctgctgaagtacaccctcctctcctactatatatcgctcatttataactctcctactttatgtcacagaatatttcacttttctaggcttccttcacaacataatcttatggttattataggatttatcaaattgaattgaatttgtgtttctttttatgtgtccactgtaatgtggtgaatggaagaaattgaatgaatattcatatttttacttttgttcattcctgtgtttctgctcctaggacaagtcaattagattaaatttaccatttacctactaatgt

SEQ ID NO: 649039 - DNA, 645 bp, Homo sapiens
tggctcatggctttgcaggctgttcaggaagcataagcttctgcttctgaggaggcctgaggatgcttcccatcatggcagaaagagaaggagaagcaggcacatcttacctggccaccagagcagaaggaagagagagctaggttagaggtgttgcatacttctaaacaaccatatattgcaagaactctttcactagagcagcaccaaagggggaaatctgcccccatgatccaatcagctcccaccaggcaccacctccaacactgaggattataattctacataagatttgggcaaggcacagatccaaactgtatctggagaattgctactctgctgtctcactgaattttcttcctatgggcacagcaggatgctaccttctaaccaggcggtcttaacttgtgggcagttttactgtccacaagatatttggcaatgtttggagacattttcarttttcacaattaagaaagtgctcatggaatctagtaagtaaaaactaagggtactgctaaccatcctacaacatataggacagtccgtgacaacaaataattttccagctaaaatatcaataatgctgtggttaagaagccccaagccccttgagaccattagaaagctgtgaaatacagtcca

SEQ ID NO: 649040 - DNA, 521 bp, Homo sapiens
gaataagaaaatctcttcttccatcactcctttagaaaatgtttgtggcagggagtgggacatccggcttcagagcaggaactttcattgcaccagtgatgaaaaagagaatgaaatgtgggtgacgttgagaaaggcaagaagatttttgttcagaagtgtgcccagtgcctaaaagggaggcaagcacaagactgggcctaacctccatggtctctttgggctgaagactggtcaggccattggattctcttacaaagaygccagtaagaacaaagagatcacctggggagaggatacagtgatggagcatttgcagaatcccaagaactacatccctggaacaaaaatgatctttgctggcattcagaagaaggcagaaagggcagacttgatagcttatctcaaaaaaagctactcatgagtaataattggccactgccttatttattacaaaacagaaatgtctcatgacttttctatgtgtaccatactttaatagatctcatacaccagaattc

SEQ ID NO: 649041 - DNA, 622 bp, Homo sapiens
atatacattgtggtgtgttcatgtgtgacgtgtgtgcacaggcatgtgcaagagtgtgctggtgtgtgtgcatgcatgtgtgtgtccctaatgtgcatgtgtgtgtgtctgcatgtgtatttgagattttggtaggcaagtagggagattgcaaattgagtgtgtgtaggtgcatatgtgtatacatgtgcctgtttgtgtgtgtgtgtgtgtgtgtgtgtgtgtgtgcataaagataaagagctagatacattgtctttagaaccgtattcacagttgagcgcctttctctgagccaggagaatccagtgtgctccttgtaccctctcagagtttaacaagggaaagctttgaactttcaactttagtgmcggggctgctactccttttgcctttccctcttcccccataaaacgtctgtttatgtattgtgtaagaacccattttaaacccaccaacctccccttacttttcacttactctgcgtaaaagcttagtcaagtttaagagcactttaagagcataggtgattcgtcagggtgtgagaactatgattcaggtatttattttcatcacttcatacctttactttctctagtatttgacagtttgggctctcggg

SEQ ID NO: 649042 - DNA, 436 bp, Homo sapiens
tttgtatttttagtacagacagttttcaccatattgaccaaactggtctcgaactcccaacctcagttgatccacctgcctcagcctcccacaatgctgggattacagccatgaggcaccatgcctggactcatttttcataataaaaaataatagaagaaaactgtaaaatcaataaatagcagataagtttttatattaaaatgtggaagtaacttctagaacttccaagtggttttctctagggaatggatatcagaggtaggaagggtcgggtaaagraaatttctttaaattttgtgctactttaatttttaaacattttttaagcattacttttgtaaaaaattaaattaaattaggaagtaaacatagatatttaaaacattttcaaaagaagattaaaccatgatcccatctttcaaacataacaatt

SEQ ID NO: 649043 - DNA, 611 bp, Homo sapiens
ccatgtagtccattgtctcacctatgtttgtttaggattactattcttcctgaaaacatggacgttgggaaaaattaagaaccgctattctagaggtgtaagggaatcaatggattttgggaaaacattcaaccttttctccaggaaaattattagattaatacaatgtgaccttgtcaaatattccttgaaaggagatctattataatgtatttaatttataaatttcatttcccccatcactgacctsttttttgacctttgtatttctcaaactgaagtgctgtatcatccagtcttttctatttctaatctctgtcacctccattccatctagtcattcccagcagtgtccttccaaagagcaaatccttgatatttcattatttggttaaaaaaaaaagattgatggctcctgttatatatggtgaacttggcaaatactgcagatatcaagccattgaccaacaggttttctgattgataacagcaatttttactgctgaacatatagtacgttggtaattctcaacagagatcagcaggcaaccactacgaagcagagctggtaaaggaaaagagacttgcctgccacattggttcctgggatc

SEQ ID NO: 649044 - DNA, 611 bp, Homo sapiens
ccatgtagtccattgtctcacctatgtttgtttaggattactattcttcctgaaaacatggacgttgggaaaaattaagaaccgctattctagaggtgtaagggaatcaatggattttgggaaaacattcaaccttttctccaggaaaattattagattaatacaatgtgaccttgtcaaatattccttgaaaggagatctattataatgtatttaatttataaatttcatttcccccatcactgacctgttttttgacctttgtatttctcaaactgaastgctgtatcatccagtcttttctatttctaatctctgtcacctccattccatctagtcattcccagcagtgtccttccaaagagcaaatccttgatatttcattatttggttaaaaaaaaaagattgatggctcctgttatatatggtgaacttggcaaatactgcagatatcaagccattgaccaacaggttttctgattgataacagcaatttttactgctgaacatatagtacgttggtaattctcaacagagatcagcaggcaaccactacgaagcagagctggtaaaggaaaagagacttgcctgccacattggttcctgggatc

SEQ ID NO: 649045 - DNA, 603 bp, Homo sapiens
attgcccattaactctcattcaggcatgaattcgtataatcatttccttgtcttcttatacttaccttgcaaataaactttaaaagatggaaaggcctatgtttaatgtatatgatgaatcagtgtatctattagaaagttccaaatgttgccataatgaaaaataggtcaaagaggatggtggcttaaagtcagatataaaaactttggcaataaatgactagtaaaacaaaagagtctctgtaattgctaataaactcaatttattgagcccagatgtggtggtaagagcaggagttttggagcagatatctgggagtataaatcttggtcctaccatttataatgtatgtgatstttggccatgatgaggcttaacctctttcaccttcaggtatctctcctataagggggaataataataatatcttacaaaataatgatgaagattagagttgattaaataatatcaggtatgtgactctattatagcacagtgactgctgaagtattttattgactttcaaactcctggcctcaagtgatcctcccacctcagtattttattgactttcaaccagtgttggtaaccattatggaatt

SEQ ID NO: 649046 - DNA, 603 bp, Homo sapiens
attgcccattaactctcattcaggcatgaattcgtataatcatttccttgtcttcttatacttaccttgcaaataaactttaaaagatggaaaggcctatgtttaatgtatatgatgaatcagtgtatctattagaaagttccaaatgttgccataatgaaaaataggtcaaagaggatggtggcttaaagtcagatataaaaactttggcaataaatgactagtaaaacaaaagagtctctgtaattgctaataaactcaatttattgagcccagatgtggtggtaagagcaggagttttggagcagatatctgggagtataaatcttggtcctaccatttataatgtatgtgatctttggccatgatgaggcttaacctctttcaycttcaggtatctctcctataagggggaataataataatatcttacaaaataatgatgaagattagagttgattaaataatatcaggtatgtgactctattatagcacagtgactgctgaagtattttattgactttcaaactcctggcctcaagtgatcctcccacctcagtattttattgactttcaaccagtgttggtaaccattatggaatt

SEQ ID NO: 649047 - DNA, 570 bp, Homo sapiens
tccgttttcatactgttaataaagacataaccaagaccggataatttataaaggaaagaggttgaattcactcagttcagcatggctggggaagcctcaggaaacttacaatcatggcagaagcgaaagcaaacatgtctttcttcagatggcagcaggaaagaaaacaagaatgagaactgagtgaaggagaagccccttataaaagcatcagatctcgtgagaacttactatcatgagaatcccatgggggaaacggccctcatgattcaattacctcacaccaggtccctccacaacatgtgggaattatgggaactacaattcaagatgagatttgggtggggacacagccaaaccatattagaccccttcttggaggtatcaaaaaggagcaggtatgatacaagccttcgaacaaatataacataccatgttatggcattcccagaggtgtagacagactgagaaaaagcaaagaagtggaaactcaaagacagtaattcagattagctcaaatacatggtgtgcrtccagtaagtggtcttaagagagtgtagaagaaagcat

SEQ ID NO: 649048 - DNA, 583 bp, Homo sapiens
tggtggtatgaagagatgaagtcttttgggaagtgtttaaatcatgagggcatcacatttatgaatgaattaatgcacttataaaagaggcttcaaagaaagtttgctgctttttgctgtttggctcttctgccatgtgaggacatagcattcctccccttcagacgacacagcctcaaggcaccatcttggaagcagagcaaggcctcaccagacaccaaacttgctggctccttgatcttggattttccagcctccagaactgtgaaaataaatttatattatttgttaatgacccagtcttaggtcttatttatagaatcccaaagggactgagacagtatagttataaatcaatgtcaagtttcttccaktttcttaatatggaggtttgccatttgaggatgcttcattgcttctctgacctgaataaagtaacatatatgattctcattatactattgatatttaagggaacggcttacatccatttcataagaattgtgtctcatgaattatatttgtattccagaaaccaaactttgtctggagcatcccaatttaagatagccatttggtaagt

SEQ ID NO: 649049 - DNA, 583 bp, Homo sapiens
tggtggtatgaagagatgaagtcttttgggaagtgtttaaatcatgagggcatcacatttatgaatgaattaatgcacttataaaagaggcttcaaagaaagtttgctgctttttgctgtttggctcttctgccatgtgaggacatagcattcctccccttcagacgacacagcctcaaggcaccatcttggaagcagagcaaggcctcaccagacaccaaacttgctggctccttgatcttggattttccagcctccagaactgtgaaaataaatttatattatttgttaatgacccagtcttaggtcttatttatagaatcccaaagggactgagacagtatagttataaatcaatgtcaagtttcttccattttcttaatatggaggtttgccatttgaggatgcttcattgcttctctgacctgaataaagtarcatatatgattctcattatactattgatatttaagggaacggcttacatccatttcataagaattgtgtctcatgaattatatttgtattccagaaaccaaactttgtctggagcatcccaatttaagatagccatttggtaagt

SEQ ID NO: 649050 - DNA, 583 bp, Homo sapiens
tggtggtatgaagagatgaagtcttttgggaagtgtttaaatcatgagggcatcacatttatgaatgaattaatgcacttataaaagaggcttcaaagaaagtttgctgctttttgctgtttggctcttctgccatgtgaggacatagcattcctccccttcagacgacacagcctcaaggcaccatcttggaagcagagcaaggcctcaccagacaccaaacttgctggctccttgatcttggattttccagcctccagaactgtgaaaataaatttatattatttgttaatgacccagtcttaggtcttatttatagaatcccaaagggactgagacagtatagttataaatcaatgtcaagtttcttccattttcttaatatggaggtttgccatttgaggatgcttcattgcttctctgacctgaataaagtaacatatatgattctcattatactattgatatttaagggaacggcttacatccatttcataagarttgtgtctcatgaattatatttgtattccagaaaccaaactttgtctggagcatcccaatttaagatagccatttggtaagt

SEQ ID NO: 649051 - DNA, 387 bp, Homo sapiens
acaaatcctaccagctgtacagagagcaacagggaaatttggcctctgtatcactgtccagcattatttaaagctaggatttaggaaggmagcaggaattatttggcagatttggaaggatagtttcgttaagtgaactttctacttttttggtggttatgtcaaagaatttttttcctcttctcaaaaataggcttcccatgaaagtattggatgcaaatgaaacaggcatacatctaaagatatctttggagaataaatccttacaagtcacagaactaggtcacacacattagtaagtcaaaagttggaaattaggggagagagcatttggaatgctttaagcatttccatgttatttctcaccttcctagttgaagatccact

SEQ ID NO: 649052 - DNA, 590 bp, Homo sapiens
cattcttaaaattagagctttggaaattgaaatagaccgcccaaggagacagcatgccctggtggctctggtgcctcactgagcagccagccttggcatatctctattatatgtatcccattttagaggggaaagaaaaaacaagggacaggaagagagaggtggggaaagagagagagataaagatttccatatgagcattataggaaactagcataatctctgctagggatgagagactmtcatttatgaagatttcttaatggactgttttagttatatgaatgagggcctcaagaagtagtctgggatggtgattaattttataataaggtcacaaggattttgaagatatttttctgactattgcacagaggaaagggggaagaaaaatagtgaagagggaagacacagcaaagctaagaggacccaacacacggtagggtcggggaccttggagaaacatggtcttaaatgttgagtaaatggtgtatgcctttcaactcaaagcaggtttctattctatggtgtgctacattgtactattcatcaactcaacaaatgttttttggtcatctatcacaagcatg

SEQ ID NO: 649053 - DNA, 585 bp, Homo sapiens
gaacattaatactacttattaaagggctcacagaaatgaaaaaaagaaaatgatgtcgagaaaaaacatttttacattgtctctggtgcctcattgatattatgtcaactggtgtgtgtaaaaatttatgataagtgttctggtcactaattaatgggtgagataagctttgagcttgccctgatgtatttatgtcaagcaatctcaccataacaattgttcctaaaaggaaactttagggcatataagkagtatagagtactagatagagtcataatgagataaaaaatcctggtgaaactcaataatccattgtaaataacactctagctagaagatataaagattccttgaaatcaggaaataatatggcagaaattttaattagacagaaataagctattcaaaacctgaacaatattaattggatttcccgcatattttcgaattttttcattaggtaattttttgtaattcaagaatagtaacttttatatttaagcactctgattctcttattcatctttcttgacatcaatactagtgtttttttaaaacaaaaaaactcattatttttaagataaa

SEQ ID NO: 649054 - DNA, 649 bp, Homo sapiens
attggctgttgctccagtataaagcaatgaatagtaataatttacaatgagatgaattgactattaaatttattaaattcagcaggaatttctccctctggatttaagacccactaccatgcagctcaaactctgtcattagttccatcttccattgaaccccaaggccctgtcagataatayggattatgtgcttcatttgaatatgcctttgcattcacatttcatgtctgtactcatgttgactctttgatttggcagaataatagcctggttattaataagagtctacatttgcacaggcatctccatggtttttccaataactgattcccattttgcaaaagaaaacagtgaaaactcaggaaagaaatgccatattgctagaaagctacagatctgagattagaaactaggtttcaaagcttcaccatggccatattgcctctcctggtatgattgaaatgcaaagaaagatacttttaataaatgcagccatatattgtgttgtttaatgaattatatatgaacaaatatacacatattctgacccaatatgtcaatagtgctgaggctgagaattattggtctacactgagggtacagcaaacttttgaactggcattctaagcactggtctttgaaactg

SEQ ID NO: 649055 - DNA, 396 bp, Homo sapiens
tataaaatcctagtctataaagaatgcccagtttctrggtaagggataaaggttggcagtttgcaaaaagaaaaatgttaacataaccatttctcctattctattctgtctctccttatctagccaagaaaactccagggtgctgtgttcagcatttgtatatacagacaaaacattctgtttatgcagataagataaaggacaaggcacatgaaagtttgagagacaatgattactgaagagaaaatgttgaactaagattcctattctagcactggttctaggaattctttctttactaactgtgtgactttgaattattcaatgtgaataataaaacttgcttagtagtttaggtgtattagacactaaagggattaaacactatgaataatc

SEQ ID NO: 649056 - DNA, 396 bp, Homo sapiens
tataaaatcctagtctataaagaatgcccagtttctaggtaagggataaakgttggcagtttgcaaaaagaaaaatgttaacataaccatttctcctattctattctgtctctccttatctagccaagaaaactccagggtgctgtgttcagcatttgtatatacagacaaaacattctgtttatgcagataagataaaggacaaggcacatgaaagtttgagagacaatgattactgaagagaaaatgttgaactaagattcctattctagcactggttctaggaattctttctttactaactgtgtgactttgaattattcaatgtgaataataaaacttgcttagtagtttaggtgtattagacactaaagggattaaacactatgaataatc

SEQ ID NO: 649057 - DNA, 618 bp, Homo sapiens
tacatctatcataatcaacagagatttatcagttatactcatgacaccctcaaaggcgtggctagccaattagatgccaccagctgaatggcctgggaaaacaggtttgtgttagatgtaattaactagcagtaaagggggcatatatgttatgctgggtgggaaattttgtacttctattcccaagaatactgccccagatgggaccatcacaaaagctttacaaggactgatgactctagccaacaaactggcagaaaatgctgaaagtaatataccatttatgggttggctagaaggttggtttggaaaatggaaaggcatggtatcttcaattcttacatctctcataattgaggccagagtcttaacagcagtggagtgttgtattatgccttgtgtaaaggaacyagcacagagattaattgaaacagctagtaataaacaaatgtcatgacttaccagtaaagtaacctgctactattagaaaccaaattaaactcattctcctatgaggaagaaagtaaatgacttctagagcaattcgaggaccaaaacgatttaaatgaaaatgagaccaaaggaagtaaatagaaaagaggaggtaatttgtgagaa

SEQ ID NO: 649058 - DNA, 531 bp, Homo sapiens
atcttactaaaaataatgttttatcttattttccctaatattgcctctttaaaataaaatgcacaaaaattttattttcatatttaatattkacttatgataagttgcaaatgcaatgctttttgatgtccattattattaaataaaaaattatattcctttatgcaactttaaataaatgattatgataatgatgatgctgatgacagtgatgatgattaacctcagtagagcactcaaagtttactgatgcttttactttccctatctcatttaattcaaattagccctgccaaaaatgcttatgggtagactacgcagagaggtgatcttctttataaggcagtaacactgggggtaacatagcaagtgattttattaccttactaatacactctagatccactaattaaactcggatttctctgaacccaaattccatttttttgcagtgtgtcattttatgacagtactttgtgaactgaaaactgctatacaaacgtgcaaggttatcattactctgtttattat

SEQ ID NO: 649059 - DNA, 601 bp, Homo sapiens
gatgggatgataggtgcagcaaaccaccatgacacatgtacaaacctgcacatcctgcacatgtaccctggaacttaaaaaataaaataaaataaaaagaagaaataagattatacaggacaaattacttggaaacttattaaaataaggatacttcaaagaaaaagctatgaaatgcgactaaagttatagttagttttcaaatatacaaaccattcaacttaaggagttaggaaaaaacaataaaagaaaattgctatcagttagagacaacgtatgtttttgcttctaatttaaattaaagccaagtagagagtaacaatttaattgttccatatatatataaatgagaatttataagtaaggatttaataaatataaaagataaaatgaatgaggtatgaatgatctaaaaaacaaaaccaatagcatttgtaaagttaacgtgaataaaaagagctgttagatgatttttaaagaacgggcttggcagccaatatttatttatgtttgcctgtttctgtgatatttttctatattgcagaaaacaaaggtccttctaygactaatgaaattcaatatcaagaactggaaacatctg

SEQ ID NO: 649060 - DNA, 558 bp, Homo sapiens
cttttcagcgtatcagggcaagtgaggcaaatggtttttcagataagatcagagctcatttttagacctagcgttgatttttacctttctaccttaggaggttcattatagagaatggtgcaaaatactttaatgatcttttatactcattggacatttttaacccaaataattcrgtagcaattcaacattaggtctttactggggaataaactcattttttttctgggcttctggggcctttcttcactgggatatcaatataacacaggatatttggggggcttgggttggaggagataggtgacagtctgaactcaggctttatttcctaggagactgtgacatccttaggagagagctgtatgtgtcttcgtcatcttgtggcctagttcagagactctatctacttcatatcactctgagaatttaatgaaacaatatatctaaaataattagatcagtgcctagaacataagtacttaataaacattacttatcattgcttgaaatatatattcagtgaatagaaatgccatactaatatcatataatctg

SEQ ID NO: 649061 - DNA, 532 bp, Homo sapiens
tgaacaaaaatatatggtgtacctagctagcaggctagcactttggagctttcagagataaatgagaggacttaggacacaataaactactcttaaggaagtcacattctaastggaaggagcggagagccaaaactaccatagctccatgccatcatgtgtcactttcaaaatggaaagatacagtcaagagggattactattctgaataactgtgcagcattatttaaaatttttattacattatactacaacattttaaaggcattgagatttagaaagaattgcctttgtcacgcagtgctgcagcagcttgataaacgatcaagatttctagaacagactgctttaataaagcatctgatagaatgttaatcaaacatgcatgagaaacagggtagcattttttttttcttggtaagaataaaaaataaaaatgtgattaaagtttagtcattccaataacctgattgtcacttaacatgtccccagatttaggaacagcatctagcatttgtcagtgatttcctgt

SEQ ID NO: 649062 - DNA, 418 bp, Homo sapiens
gaggatgtgcataagttatataaaaataactacagcattttataaagggagttaagcaccagtggattttggaatctgcaaggatccstagaacaaatcacccaccagatactgagggatgcctctacttctaaataatccatgagtcaaagaggaaggctcaaggaaaagcaaaaatatatattgaactgcatgataacagaaatacaatatatcaaaatctatgggactcaactagagcagtgttgagatgaaaatttatagcacattttagtgcctacattagtaaaaaggaaacagaaaaatatcatatcaataatctaagttaccacaatctaagaaactagaaaaagaaggatgcagcaaacccaaagaaggaaggaaataatgaagaaaataataaagagcagaaataaaa

SEQ ID NO: 649063 - DNA, 625 bp, Homo sapiens
tttaaaaaaaaaagctattttaaagttatttcttaattacaaatgtttgctaaagctttttttatggttgccccattaaatccttcatttccagacctaagacatgctctttctttatacgtcagccaactcacaacctaatttttcttatttgggccaccaaaccttccattcaatatgcatatgttcrtcctcccctggaggcctcacaaattttatcttgaagaaaatgcatcttttctggggccattcattctagtcctggcttttcagcttgcagatatacctagggtttccctttcttacccacctcctcaagttcaccttagtgcccagcctggaatttccattgaaagctacatttgtgatgattgccgaggggatgtcctgcaatggcttccattagacttgtgttgtgagtcatcaattagattatgagtatggtgtccagtggtcattttcagcgtcctctggaaattcatgggtttcaatatgtggttatgggtattaacaacatattaatagataaatcaagtaagtagttgaaatggggtggggaccttaaggtatttagtgggattttaagttagtttcttaaacctgttttttgtagggccttatgaat

SEQ ID NO: 649064 - DNA, 620 bp, Homo sapiens
agataattttttcttaaaaaagaaaaggaacaaatgctgtaatcatgttacatttcaagttttaagctgtttacttgtctctggctatcatcaatcatgaagtgattgtgaggaagtatacttcaaggttaaatgcaaggggaaactgccttcatttctggaaaactgccaaagggcccatgtatagttcatttctctgcagtgtgtaattgcagcttttataaataagattaaaaaagagccttggtggtctatggtaacccttattttctttggagatgttttccaggtggccagtgttctgcaaagtgggtataactgctgcttcagcataaacacaaagctctgcaattttgccaggagagaagtaaattatttgccaaaatagaaccatgtggaaaactcrgaagttttaggttctgaagaacttttatgggctgacattttgcattctttagctcagcaaccccaaatatctactatataattaagaacaacatccgagtaatactactgtcagcatctggatgtttatggagctctatcatgcacaaagatgtatagattactgcataaaaaatatatctctgctcatgatgtaaaccaacactaactgaaga

SEQ ID NO: 649065 - DNA, 448 bp, Homo sapiens
aaaaactgtccagaaatcagtgaagcctttgcaagcagatgatgacaaaggataaccacctaacagaccatagcaaatcaagcccagtggattttccagttttttcaaatacaataatcttaacagcttyttacacatttgacctttttaaaaaaaattcattggaatattatacgattttatatttatggcaaaattctctggacctagaaaatagatatcaagctatatccttctttggaatttgtagtagctgtattacaaaaacagcaaatcccaagaaaatcctcatgggattttaacatacatgttccatttaaaattatcccaatgacttggattcctggataagagttagaggcagtggctactgcacaaattgtatatcattagagtatcaaaatgatttgattattttccagcatgcatgtgacttcatacaagtatt

SEQ ID NO: 649066 - DNA, 448 bp, Homo sapiens
aatcatcatcaaatggaatcaaaaataaccatcatcaattggtattgaatggaattgtcatcaaatggaattcaaaggaatcatcatcaaatggaamcgaatggaatcctcattgaatggaaatgaaaggggtcatcatctaatggaatcgcatggaatcatcatcaaatgtaatcgaatggaatcatcatcaaatggaatctaatggaatcattgaacagaattgaatggaatggtcattgaatgaattgaatgcaatcatcgaatggtctcgaatggaatcatcttctaatggaaaggaatggaatcatcgcatagaatcgaatggaattatcatcgaatggaatcgaatggtatcaacaccaaaccgaaaaaaacggaattatcgaatggaatcgaagagaatcttcgaacggacccgaatggaatcatctaatggaatggaatg

SEQ ID NO: 649067 - DNA, 455 bp, Homo sapiens
aatcatcatcaaatggaatcaaaaataaccatcatcaattggtattgaatggaattgtcatcaaatggaattcaaaggaawcatcatcaaatggaaccgaatggaatcctcattgaatggaaatgaaaggggtcatcatctaatggaatcgcatggaatcatcatcaaatggaatcgaatggaatcatcatcaaatggaatctgatggaatcattgaacagaattgaatggaatcgtcatcgaatgaattgaatgcaatcatcgaatggtctcgaatggaatcatcttctaatggaaaggaatggaatcatcgcatagaatcgaatggaattatcatcgaatggaatcgaatggtatcaacaccaaacggaaaaaaacggaattttcgaatggaatcgaagagaatcttcgaacggacccgaatggaatcatctaatggaatggaatggaataat

SEQ ID NO: 649068 - DNA, 455 bp, Homo sapiens
aatcatcatcaaatggaatcaaaaataaccatcatcaattggtattgaatggaattgtcatcaaatggaattcaaaggaaacatcatcaaatggaaccgaatggaatcctcattgaatggaaatgaaaggggtcatcatctaatggaatcgcatggaatcatcatcaaatggaatcgaatggaatcatcatcaaatggaatctgatggaatcattgaacagaattgaatggaatcgtcatcgaatgaattgaatgcaatcatcgaatggtctcgaatggaatcatcttctaatggaaaggaatggaatcatcgcatagaatcgaatggaattatcatcgaatggaatcgaatggtatcaacaccaaacggaaaaaaacggaattwtcgaatggaatcgaagagaatcttcgaacggacccgaatggaatcatctaatggaatggaatggaataat

SEQ ID NO: 649069 - DNA, 563 bp, Homo sapiens
cagagaacaaagaaaaagtgaagatagagaggagatggactaacccctgactatgtaatctggactcctggatccagcattcctgatgaactttacaattcctgaacttttcaataaatgtatcttttgctttaggccacattaaatggcttgctatcactttcaaccaagagattcccaaccaataaaatatcactggtttcatatttttaaaactttttgcattttatatctcatgggactacctcattgttataactcatacataactagtagacattattaatacatttctcagcaaaatcagggawccctctaattccccaaaccaagtctttcagatgtaaactctttaaattcctgatgagcgaggaaacaatagattcagcagataggtaagaaagttattacacctagtttgcagcccaagctagtatttcagtcaacaatgcatgccatttttagacaattaaggtttgaaaaccatctgcatgagttttaaagactgttacaggccctctgcctattgttggtcatgttttcactgctgaattcccgctgaa

SEQ ID NO: 649070 - DNA, 442 bp, Homo sapiens
ggatagcattaggagatatacctaatgttaaatgagaagttaatggatgcagcacaccaacatggcacatgtatacatatgtaacaaacctgcacattgtgcacatgtaccctaaaacttaaagtataataaaaaaaattacgtttcttggaatttatttaatgtttatgttttaaagagaaaatataacctwatttttttttttttttttttttttttttttttttttttttttagtttgagtgctgtgacagccttgggaaatagtcaaaacctaataccacaggcttcatccttgttctgtggaaaaaaacaaaattatttgatgctgtatctgaaattcaagccaatttaaattgagcatgtacagggtctctctccttgttttccctttaatcatactgatactgtgccctggcctccatgtggctgatacattatt

SEQ ID NO: 649071 - DNA, 614 bp, Homo sapiens
acctgttcaacatagaccaatacaatgctgcccacactcattttgaccaaataactttcttctttaacccaaaatatctgccagtgtccaagggcagccccactgaaaagtgatgcagtgaggagagacggcagaatttagaggaatgggtctcaaactttagtgtgcatcagagtcaccaggaaggcttattaaaataagaaacyaccccagcccagagtttccaattcagtaggcttaggttggagcataagaatttacatgccttacatgtttctcagctgacgctaatgctgatggctaggggaaccccgttttgagaaacactgatctgcagaataaatgatttcaaggcttcggtcctctagctggagtttgctcctccatccaaggatcttattcccaggtgaactccaacttgtccactttctcacactggcagtagcagctctgacccatctttctagtcttaggcacctgtaatgggttgcagtgtttttttccaaaagatttgtttcaatagtaatccccagttcctgtgaaggtaagccttatttggaaagaaggtctttgcagatgtaatcaagttaaaatgaggtcatactggagtaggg

SEQ ID NO: 649072 - DNA, 495 bp, Homo sapiens
ccagaataggaaaacctggtttttccaaagcagagcttaatatcacaagagaaagagccttgaaaatactayagagtaaggcctcattcacatgggtgaggttgataatttacttcacaggtgagatgacagtatcaaggttctgtctggcctctggcctctggtcaattgattcaaactttggatcccagctctggtgcagctgtgctgcctaacctcagcaagtcactcccccttcctggtggtcagttgtctcatcttcaggttaggacagagtttctcaaccccggcactgttgacattttggtccagattactctttattgaggagggttatcctgtgtattataagatgagcagtgtccctggccgctacgcaccggatgccagcagcacccaccccaatttgccaatgtctcatgggaggcaaaatcatgcctggttgagaaccacggggttaaatgaccctatatcctaatatctagggctcccacc

SEQ ID NO: 649073 - DNA, 495 bp, Homo sapiens
ccagaataggaaaacctggtttttccaaagcagagcttaatatcacaagagaaagagccttgaaaatactatagagtaaggcctcattcacatgggtgaggttgataatttacttcacaggtgagatgacagtatcaaggttctgtctggcctctggcctctggtcaattgattcaaactttggatcccagctctggtgcagctgtgctgcctaacctcagcaagtcactcccccttcctggtggtcagttgtctcatcttcaggttaggacagagtttctcaaccccggcactgttgacattttggtccagattactctttattgaggagggttatcctgtgtattataagaygagcagtgtccctggccgctacgcaccggatgccagcagcacccaccccaatttgccaatgtctcatgggaggcaaaatcatgcctggttgagaaccacggggttaaatgaccctatatcctaatatctagggctcccacc

SEQ ID NO: 649074 - DNA, 498 bp, Homo sapiens
aggagacattgttcttggccctctgtatctggtgtaggagggtacacattacagggtgttagaagctcagaaaaagactaaacaagtcataattcactttaagacaatcacagctatagtagatctatatttctattcaattacgccttgcattatgcagctgttggaaacgctgttgacctgatcatattttcttatatattacaaggcaattctttcatgttccaataaacaggtgactctacagcactgctgtccaagagatataatggaaaccacatatggaatttaaacttttctagtagccacatttttaaaaagggaaaagggaaaaaggtgaaattaatttaacaatatgttgtatgtaatatactatatccaaaaakattatcatttcaaaatataatcaacataaaaatattcttgacatatttcattttatttttgcattaagccttcaacatttggtatgaattgttcacgtgcagcacatttcaa

SEQ ID NO: 649075 - DNA, 498 bp, Homo sapiens
aggagacattgttcttggccctctgtatctggtgtaggagggtacacattacagggtgttagaagctcagaaaaagactaaacaagtcataattcactttaagacaatcacagctatagtagatctatatttctattcaattacgccttgcattatgcagctgttggaaacgctgttgacctgatcatattttcttatatattacaaggcaattctttcatgttccaataaacaggtgactctacagcactgctgtccaagagatataatggaaaccacatatggaatttaaacttttctagtagccacatttttaaaaagggaaaagggaaaaaggtgaaattaatttaacaatatgttgtatgtaatatactatatccaaaaatattatcatttcaaaatataatcaacataaaaatattcttgacatatttcattttatttttgcattaagccttcaacatttggtaygaattgttcacgtgcagcacatttcaa

SEQ ID NO: 649076 - DNA, 577 bp, Homo sapiens
ttagatccaacataagatagtcatttctttcatgggtcatttacccactcttattccaggcccattcttcaccagctactctcaggatttgaagtgaatgctctagtttgataagggtgtagggtttaggattgttcagtattaaaaacaaataacaacaaaaaaccaaaatatagataaagccaatgctgacctccagaggttagaatcaacatatcttttcttgtttttaagtacaacttaaacagatttctgtgtaacagatcgtatcatctctgaagtttgttcattcaggtaggaaaaaagaccaaaaactcagctaatattattaaaaaataataataaagtgagaggaagatccctgttttcyccaagtggttttaagaaacagctttcaaaactcttctagaagggtattcaattaagccagtagcaaaaatgtaactggcaaaatctaatgttgttttaaaaaaaacacatgtgcatgcacccacatacacacacatttatatacccacacaatattatatatatatgtgtgtgtgtgtgtgtgtgtgtgtgtgtgttcaagatggtg

SEQ ID NO: 649077 - DNA, 620 bp, Homo sapiens
actatacttttaatattgaggttattctttttttgcttttgcttttatttaagttggagattatgctttgaataaagatgctagtatctgtgcaaaattgtttatttcatatatatgatggatccatagctaggacctaggtgagaccaatgctttcatcttaccagatccatagtctcctagatttgaaaggaatcttagactttcrtaagccctctgcacttggtagatacctataatagacaccatatctgcaatagagacataatgcattaattagaattaaaggggaccgtttatgtgttaggattctgggtgcaagtaaaaaaacactccaaatcatttcagcaaatatgggaatttacaggcgcatttaacaaactgaataaaaaaagggccaaagtgactgcaatactttcgacattatttttatctctcagctctgcctccacattggtatgtcagctctcttatccctagctggctttcagaatctgaaggttggagtcatagctgtcccccactctaggctcacatttttgagcctcacattcctggtgggaaagggactctgtctccacccctgatgaaaataaatcctgagtgtgtacaactgccaa

SEQ ID NO: 649078 - DNA, 620 bp, Homo sapiens
actatacttttaatattgaggttattctttttttgcttttgcttttatttaagttggagattatgctttgaataaagatgctagtatctgtgcaaaattgtttatttcatatatatgatggatccatagctaggacctaggtgagaccaatgctttcatcttaccagatccatagtctcctagatttgaaaggaatcttagactttcgtaagccctctgcacttggtagatacctataatagacaccatatctgcaatagagacataatgcattaattagaattaaaggggaccgtttatgtgttaggattctgggtgcaagtaaaaaaamactccaaatcatttcagcaaatatgggaatttacaggcgcatttaacaaactgaataaaaaaagggccaaagtgactgcaatactttcgacattatttttatctctcagctctgcctccacattggtatgtcagctctcttatccctagctggctttcagaatctgaaggttggagtcatagctgtcccccactctaggctcacatttttgagcctcacattcctggtgggaaagggactctgtctccacccctgatgaaaataaatcctgagtgtgtacaactgccaa

SEQ ID NO: 649079 - DNA, 541 bp, Homo sapiens
ccttgaaacaggtcaatggataaacaaactgtggtacatccagatgataaaatattacccagcaatagaaaggaatgaatgcttgatacttgcarcaacatgcatcactatcaaaggcatcttgctgaatgaaagaaatcagtctcacatacaaatggccaacagatatatgaaaatgtgctcaatatcactaatcatcagggaaatacaaattaaagtcgcaatagaatatctcctcacacctgtttgaatggctactatcaaaaacgcaagataagttttagagaggatgtggagaaaaaggaaccttgctacactgttggtgtgaacgtaaattagtacagccattatggaaaaacagcatagaagttcctcaaaagattaaagatataattaccgtatgatctcaccagcaaccccacttctgagtatgtatccaaaggaattgaaatcagtatgtcaaagcagtatctgcacttccatgtttattgcagcgttattcacgatagccaagatatggaagcaaactgtgtccaccaac

SEQ ID NO: 649080 - DNA, 409 bp, Homo sapiens
acggaaaatatgttgttatagttactaattttctacgcactctccacctctttttggctaacataactctgagtttgttgggcagtcatgtgatccagagatgccagtgagatataagcagatcagttctggaaaagcttttgtgttcttttcttacggacagggagaagagatcttgctgacccaccccttctctttctttctgacctgaatgtggatatgtggtttgcttctgtggctgcaatcaggtgacatgaggcaccaaccattggaccaagaagacaacagccaaaracagaagagcagaaaaataaaaggaaaaggcctgtgttttgataacatcaatgagcagcagtaccagtgccaatagtcacctgtctccagccttcttgtgaatgagatactacag

SEQ ID NO: 649081 - DNA, 617 bp, Homo sapiens
tatttgtcattgtctttgaggagaaaattgatagttcttcaagagaggcactgtttcttgtgaaacttagttctttaagaaatgtcttgggtggggcatcatagagagacactgagttatggtggaaactgtatttaaatcatatccccaaattaaatgcaaaattagttttcatatggttgtttcttgtagkaccttttaatgtaaactgcagatataataccaaaccctaacacagtgaaaacaattatgtaagagactatttaggtcatgcagcctaaatagatttttgttgggctttgaaaccaaaaacaacaaataatattttttatttcctcatctaaataattttcatccctctaggttgtcatacaatcaatggaaagcaagacatagtttctgttatgtaattcaaagtttcacaatggaaacaaatcactctcctatggaaatttcccaaaatattgctctgaaagaaataagttttagaatctaaatttatatgtttcacagtcttctttgattccattaattaaataattgcttacctctattgttttcctggttagaaagaaggtcatttaattgggtcttagtctatcagacaaaaccagctg

SEQ ID NO: 649082 - DNA, 455 bp, Homo sapiens
ccatggatgttagtcactggcgagactgccgagaagccacaaactcagccctctgtggaaagcacattccaaagtagaagaattgccagatgtgaatagatgctatcatttgctccagaatctaattcttcccatagggctggacctatggaccctatctaaggggcactggaactatcctcactaaaccctcaaatctctcacttgctggccttcccccgggcctttrtatcacctctttgaggtaagacactacctccagagagtccctgtctatggagggctgacacctagcagtacatcattgcttattactggcctggaggaagatagggtcttgatgggagaaggtagggcctagggcaccaacttctcaaggttttctggttataagaaagctgagacaaccacttggtccaccataaaaaggaaaaggagctattgtagagcagtta

SEQ ID NO: 649083 - DNA, 501 bp, Homo sapiens
acatacacacacacacatatacatcatggaatactactcagccattaaaaggaatgaaataatggcatttgcagcaaccttgatggaattgtargccactattctaagtgaagtaactcaggaatggaaaaccaaatgttgtatcttctcactcataagtgggagctaagctatgaagatgcaaaggcataagaataatacaatggactttaggggcttgggggaaagggtgggaggcagtgaggcataaaagattacacactgggtacagtacacactgcttcagtgatgggtgcaccaaaatctcagaaatcaccactaaagaacttattcttgtaaccaaacgcgacttgttccctaaaaacctattgaaatttttttaaatgcaaaaaaaaaagaaagaaagaaaaggaaagaaaagaaaagaaaaggcatttatttcttacggttatggaggctgagaagtcccaggtcaaggggctgtatctggtgagggccttc

SEQ ID NO: 649084 - DNA, 564 bp, Homo sapiens
tgtcttgtttaccaagatttaggaagaatgttccaaaaggactcctattttcctaatttcatggcctttaaagaaaatgacagatattttcataaagaagaaaaaagatgcaacttaccaaaggagaacatgaaatcaactaactcagagtacacattgtttacaaggctgaaaccaaactgttttaaattctttaactttttaggagaatttgcagctactgtatcccatgcraggaattaataacataagcatgatagtcaaaatgtatttactacttcgtatctgccactgatagaagcatttctcttatatgcaagaggcaatttatcacagtgactaaggggttggatcatggcttacagtggctggcactgccagttgctagctgtgtgaccttgggcaattttcccaaccactctgtttcagtttccccgtctacaaacgggggtgataataaactcatcccctagggttattgtcagagttatacaaatcgataggtatgacgagcttaaatagtgataggtccataatgaacttcaaaagtttgctgctgctgct

SEQ ID NO: 649085 - DNA, 564 bp, Homo sapiens
tgtcttgtttaccaagatttaggaagaatgttccaaaaggactcctattttcctaatttcatggcctttaaagaaaatgacagatattttcataaagaagaaaaaagatgcaacttaccaaaggagaacatgaaatcaactaactcagagtacacattgtttacaaggctgaaaccaaactgttttaaattctttaactttttaggagaatttgcagctactgtatcccatgcgaggaattaataacataagcatgatagtcaaaatgtatttactacttcgtatctgccactgatagaagcatttctcttatatgcaagaggmaatttatcacagtgactaaggggttggatcatggcttacagtggctggcactgccagttgctagctgtgtgaccttgggcaattttcccaaccactctgtttcagtttccccgtctacaaacgggggtgataataaactcatcccctagggttattgtcagagttatacaaatcgataggtatgacgagcttaaatagtgataggtccataatgaacttcaaaagtttgctgctgctgct

SEQ ID NO: 649086 - DNA, 599 bp, Homo sapiens
ttgctacgaaaagaattcctgaataatttgataatatgaatatatttctatgaagaattatgtaagaccttcataaataccttataattacaaaattttccaagcctatttaacttattttgtaagtcttccaaataatttatattctttttattagcagaatacttttcttgtctgggcatggtggctaatgtctgtaatcctggcactttgggaggctgaagtgagtggatcgtttgaggccaggagttcgagaccagcctggccaacatggcaaaacgctgtctctactaaaaatacaaaaattagctgggaatggtggcatgaccctgtaatcccagctactagggaggctgaggcacaagaatcgcttgagcctggaggtagaggctgcagtgagctgagattgagccactgctctccagcctgggtgagagagcaagactctgtttcaaaaaacaatagaaggaataattttcttatgttacttctttttgattccaattctaatatttgtagtattagggtttttcagagaaattgaaccaytagaatgcagatagagagagaaagatttattttaagaaattggctcacac

SEQ ID NO: 649087 - DNA, 628 bp, Homo sapiens
tggttggctctatgagaggttttgtctattgtataaaataaaatcttgaaactgtcatataacacttatttattcatagagaaatactggtgtcaaaaatacttaaagaggaaatgaaaagtaaagtgtctggataacggcacaaaatgatttactttattaaatgatcagtttacttgagaaaattttttaaacatataaaaacttgcacaaagagtacatamatcttttaaaacataaacaaatctggattcataacagagggagagctctcgggaaaaactttggagctgaaaggtgaatttcagtggtatatttgtggaaatactaaaccaaattttgtcaaattatttgaaaatgataaatggtcactcaaactaacctaattgtttcttcacttgaaccagttgaatatgtctctgccaagtcctatactgacaaaatttttatgcacaaatgaaaactatatctttgaaaaatcatgttggagaagaaaatctttatatgtttctactttgggctaggcttgaaaatgaagtatatcagtaaatttcacctcaatcccacattaatttaaggtgctattaacagctggccagaaaaaaatttatttaggaaaaacttaata

SEQ ID NO: 649088 - DNA, 561 bp, Homo sapiens
acacactggtgtgtgtgtgtgtgtgtgtgtgtgtgtgtgtgtgaacaacccaactttattacatatcacagaagaattcctaggaatattttgcayatttatgataaagtggtttctttttgtcttgatttgagttgaagatgaaggaaaatgatggataaatcttaaggctgtccagtggatacccttctccctccatattatgtgctagacttctcctttcatggaaacgatttcatacttttattactacatctgtcttctaacatttgaatggtacaaagatagatatgtgacctgatcaacaaggacattttcttgggatgtttaaaaattggaattgggacagagaacctctcttctgatttgagatttaaatatgaaattcagagctaagtgtagccatgtttcctgtcctgtgtaggaaacaggtataaaatagaggacaataaagctgaaatctagattaaaacagagattggcaatgaagaaaagctttcacgcttttggaatcctgcttactagttgctcctgaggctcagctgaagtcctccatgttcc

SEQ ID NO: 649089 - DNA, 525 bp, Homo sapiens
gtgaaaaaaaactttcaaagatccttgggctgatggagcctacatttgaggaattacagggggtaagcagaaaattaaaaataaccataaaaataattaatttcgaatttgaaataagagtaagaaattgtgatgttgataagtacaatggtaaaaatagagcaggttacagtggattgtttaatgtcccaaatcgactgaatacwtgaatgtgtctatacataactatgttaagcatgtattttatttccttaagaaaacagctgtgagagcaaagtccattacatcgatgtgtattagatttcacaacttcagcataattaacatttcaggccagataatttttggtgtggggtccacccagtgcactgtaggctatgttagcagcatcttttacctctagccattaggtaccagtagcacaccctcctcctaccagtgtgacaatcaaaaatgtctctgaatgatgataaatatctctaaagaggcaaatagcctccactgaagaaccactgatgaacatga

SEQ ID NO: 649090 - DNA, 525 bp, Homo sapiens
gtgaaaaaaaactttcaaagatccttgggctgatggagcctacatttgaggaattacagggggtaagcagaaaattaaaaataaccataaaaataattaatttcgaatttgaaataagagtaagaaattgtgatgttgataagtacaatggtaaaaatagagcaggttacagtggattgtttaatgtcccaaatcgactgaatacttgaatgtgtctatacataactaygttaagcatgtattttatttccttaagaaaacagctgtgagagcaaagtccattacatcgatgtgtattagatttcacaacttcagcataattaacatttcaggccagataatttttggtgtggggtccacccagtgcactgtaggctatgttagcagcatcttttacctctagccattaggtaccagtagcacaccctcctcctaccagtgtgacaatcaaaaatgtctctgaatgatgataaatatctctaaagaggcaaatagcctccactgaagaaccactgatgaacatga

SEQ ID NO: 649091 - DNA, 504 bp, Homo sapiens
cttgctgttcctgagatttacccttttataacaaaccaataatctagttaagtaaattgttttcctgagttctgtgagccagtctagcaaattaacaaacccgaggaagtcgttgtaggaatctccagtttgtagctaagtcagtcacaaattgtaggtaacacrgggacttaccacttctgactagcctctgaagtgaggggggcacttctgtgggattgagcccttaacctgtgagatctgtactaacttcaggcagttagtatcagaattgagttgaattgtaggacatcctgccagtgtcagagaatcagctggtactgggaaaaaactccacacatctgcagtcagaaatgaagtcttgagaatagtagcagagtatagaagaaatgggagtttttttcttttaaaatgcaatgtatattttatttgtaaaaacactatagaaaactatagatttcataaaatattgagcttagcaggataaaatctggataagactta

SEQ ID NO: 649092 - DNA, 602 bp, Homo sapiens
aatattagggcataattatatctttttaaaaatactgtttatgaaaattttcataaatgatctaaataaggtaatcctgttttattttcgtgaaacttactcatcttaaaaatacggttttaaattattgagatgttaaatgagagtttttaaatttttaatcattaataaaatcttactattaaaaataaactttatcaagacaagtctgtgtgtrtatatatatatatatatatatatatatatatacttttttttttttttttttttttaaaacaaagtctcactctgtcttccgtactggagtgcaggggcacaatcttggcttactgcaacctccgcctcccagattggagacattctcctacctcagcctctcgagtagctgggattacaggcaagtgtcaccacacccggcttatttttgtatttttagtagagatggggtttcctcatgttggccagactggtcttgagctcctgatctcaggtgatccacctgtctctgcctcccaaagtgctgggatttcaggcgtgagccactgctcccagcctcatatgttttttactgatacgtaatattttacatatttatagggtcc

SEQ ID NO: 649093 - DNA, 418 bp, Homo sapiens
acaaacattcagaccctcatagcagtgttctggaatccccggtgaggaacaaacattcagagcctcatatcagtgttmtggaatcctatgtgacggacaaacattaagtccccagaagcagttttctggaatactgtgtgaggaacaaacattcagaccctggtagtagtgttctggaatcctatgtgagagacaaacactcagaacccaacagcagtgttttggaaccctatgtgagggtcaatcattcaggccacagcaggattatgctggagtcctatgtgagggacactcagaacatagcaggagtgttttggaatcctatgtgagggaaaaactttcagacactcgtagcagtgttctggaatcctatgtgggagacaaacattcatacaatcttagcagtgtacgggaattc

SEQ ID NO: 649094 - DNA, 418 bp, Homo sapiens
acaaacattcagaccctcatagcagtgttctggaatccccggtgaggaacaaacattcagagcctcatatcagtgttctggaatcctatgtgacggacaaacattaagtccccagaagcagtttwctggaatactgtgtgaggaacaaacattcagaccctggtagtagtgttctggaatcctatgtgagagacaaacactcagaacccaacagcagtgttttggaaccctatgtgagggtcaatcattcaggccacagcaggattatgctggagtcctatgtgagggacactcagaacatagcaggagtgttttggaatcctatgtgagggaaaaactttcagacactcgtagcagtgttctggaatcctatgtgggagacaaacattcatacaatcttagcagtgtacgggaattc

SEQ ID NO: 649095 - DNA, 418 bp, Homo sapiens
acaaacattcagaccctcatagcagtgttctggaatccccggtgaggaacaaacattcagagcctcatatcagtgttctggaatcctatgtgacggacaaacattaagtccccagaagcagttttctggaatactgtgtgaggaacaaacattcagaccctrgtagtagtgttctggaatcctatgtgagagacaaacactcagaacccaacagcagtgttttggaaccctatgtgagggtcaatcattcaggccacagcaggattatgctggagtcctatgtgagggacactcagaacatagcaggagtgttttggaatcctatgtgagggaaaaactttcagacactcgtagcagtgttctggaatcctatgtgggagacaaacattcatacaatcttagcagtgtacgggaattc

SEQ ID NO: 649096 - DNA, 531 bp, Homo sapiens
catctgtgagggttggaataatcttcccaacttctctctctcttttttttttttttgagatgaaatcttgcctgggctggagtgcagtgatgcgatctcagctcactgcaacctccacctcccgggttcaagcaattctcctgcctcagcctcccaagtatttgggattacagtcactcccgaccaggcccagctaattttttgtgtgtttttagtacagagaggatttcactttgttggccagtctggtctcaaattcctgacctcgtgatccacgtgccttggcctcccaaagtgctgggattacaggcatgarccaccaagcccggccccaacttctcctaatgttgctattttgatcttcttttttaaatcatcaatgttctcaatagcatctagaatggtgaatcctttccggtaggttttcaattattttgcccagatctatcaaaggaatcactttctagagaagctatagctttatgaaatatatttttaagtgataagacttgaaagttgaaattattctgt

SEQ ID NO: 649097 - DNA, 594 bp, Homo sapiens
tatatattatatttgttactgttttctattcattctcctcagtcttcattcttttgtctaccactctttttctgccttttgcagttttcattgatgattttagatgactacattttccgtcttttttagcatgtacttctctttttaaaattttttttaactatttgccacagaatttgcaatatacatttacaacaaattcaagtccactttcaaataacactatcccactaacccacaaataggactacctgcttaacaaacaaaacacctaattcctcaatatacatttacaaccaattcaagtccactttcagataacactatcccacttcacgggtgactacctgcttaacaaagaaaacacctgattcctccctcccatccttccattccattccttgtattattgttccttatttcccttgtgtataagcatacataatctatctgtgtgtatttrttgttatctacaaacttattggtcagatcaattatgaataaatacatgtttttattttaccacaattcctccctcccatccttccattgcattccttgtattagtgttactcatttcacttgtgtataagc

SEQ ID NO: 649098 - DNA, 612 bp, Homo sapiens
agcaactattctttccctaagagaatagttctgttgtgaaataatctcattgctttgtcacacctctggtgccctataacagttttcccatatcattctacatggcactttctcatttcactgcctttgcagaatgctaaagggcagtgttgcacaatgattaagagcacacactcrggagttaagagtgccagagttcgaacctcagccttgacttttcaacattatataccagcagtgtcattgctccttagttcccaaccttaaataataagagataataaaagtaccctaccctaaagcctttttatgaggcttaaagaagtaaaatgcatagaagagtgcttatcacatagtcagctttatatatctgcaattattttgttttaaatttttgcttcctcagatattcaaaatttaccataaacacaatctatattgagatgtttcttcttcctaacatgagctacaaaatgctgactgttgttttaattatttaccctgatcaggtgtctttctgtttacttgaccctgtagtatccttgaatttgaatatttcattttttattccctctgccgcaaacatttcacttggaatatgataatagagga

SEQ ID NO: 649099 - DNA, 571 bp, Homo sapiens
tactttctgtcaaaggacttaagtgtttcacaatgaatgtctttctcctcttagataataacactaattgctaatatttaaggagtgttttactaagtgtcaggggctattttaagaatgggttatggatattttatttactcatagcaatcttaagaggtctcttgacctcctgtcttaggaataagattaaataattttcccatagtatcagaaaaaaagattatagcacaaaggatcttgttctatggcccatgttcttaaagatttgggccatagtccctcttaatgataaaatwaagattttgaaggagtctccagtggcccaatcaaaaagcagaattgagatactgtgatgctgtaataaaattagcatttggggagtggacaagagaaatgcctgttttttggcctctcctatctaatcttgtttagcagccctatattccaccagcccatagcaggttctgagagtgggtctttcattaagcaattttactcataacttggtgcttgaggtagcactaattacaaagctcaaagagggatgggggaagctttccaagagcca

SEQ ID NO: 649100 - DNA, 552 bp, Homo sapiens
acatgatcatgtcctttgcaggaaaatggatggagcyggaggccactaaccttagcaaactaacacagaaacagaaaaccaaatactacatgttctcacttataaataggagctaaatgatgagaacacatgaacccatagaggggaactccacacacaggggcctttcagagggtggatggtgggaggagggagaggatcaggaaaaataactaatgggcactaagcttaatacctgggtgaggaaataatctgtacaattcccaagacacaagtttacctatgtaacaaacccacacttttacccctgaacttaaaagttaaaaagaaaaaggaaaacagtcagtaaaagacaaagctaatatttataaaataaaagtaactagcagaagacatcttttcagagcacattggagtgaataaaagcctcctttaaaaacagttgacagggagcatttatctaacacattaacttcgggctattacagatgaaggattaaagtttttaaaaatcagtaataatgtccctcatgcaatcaggaaacaacttaa

SEQ ID NO: 649101 - DNA, 552 bp, Homo sapiens
acatgatcatgtcctttgcaggaaaatggatggagccggaggccactaaccttagcaaactaacacagaaacagaaaaccaaatactacatgttctcacttataaataggagctaaatgatgagaacacatgaacccatagaggggaactccacacacaggggcctttcagagggtggatggtgggaggagggagaggatcaggaaaaataactaatgggcactaagcttaatacctgggtgaggaaataatctgtacaattcccaagacacaagtttacctatgtaacaaacccacacttttacccctgaacttaaaagttaaaaagaaaaaggaaaacagtcagtaaaagacaaagctaatatttataaaataaaagtaactagcagaagacatcttttcagagcacattggagtgaataaaagcctcctttaaaaacagttgacagggagcatttatctaacacattaacttcgggctattacagatgaagkattaaagtttttaaaaatcagtaataatgtccctcatgcaatcaggaaacaacttaa

SEQ ID NO: 649102 - DNA, 428 bp, Homo sapiens
aattctcctacacagggtcaggattcatatttggccaggacatatactgggaataatttggaactcgtatattgttatgaggaaytggaagccatcttggggaccagcaagaagcccagagagaggaagtgacttgcctatggtcacacagccagctgataaaggttccaggggtacccagatcttttaacaaactatcttcttattttcttaggttcttatttcctttgctttgacagaatcttcctgtgtagcagcagctgttttccttaccaaagtgagaaataagttggctctaatcctcatcttccattgtttgtgaatttggggccctacactaacatctctcccacaatacaaacatttttaattcctagaggaccatggacggtccctcatggtctttttgtgctcttgataagtatttt

SEQ ID NO: 649103 - DNA, 551 bp, Homo sapiens
ttttatatctcttaaataatttatgttttatctctcaattcattaaactggtcaattatatttacattaatagtgygtctaatgataaacctttctcttactcaaaggataaatatgaataaatcataagatatatttcaatgtgctgttgaatgttggttaatttttttttcaaatttttatgttgctactctttaagcaacactgcctattattttctttccttgtacattctctggttttaaaatcaagatcatatcaatcattttaaataagatagaagctattttatctatctctattttctacaactgtacaaggcaaggtaagtattttttgttcctcgaatgtttgatataattctcttatctggatatagaaatgtttgtgtatttttaatagtgagtgcaatttaccttaatatacacaggcttattcatattttcaattttcctttgaatttgtttaaagttacagttttctgaaaatattgtttcacctatgatttgaaattttaatagcactacatgtttacatatgtaacaaaactg

SEQ ID NO: 649104 - DNA, 631 bp, Homo sapiens
  misc_feature 630, 631: n = A,T,C or G
tttgaactgagcatgatgaaataacaatccttagaccatgaatgaagaaactgaagcctaggaaaatgaagtcaaattgctaatgagtggtggtggccagcttgtaactgagatctgtgtggccacagatcccattctagctcagcaccttgctgtcagtgagagagagacatggtcaggcttccagtcctgttttgctctatcccagtgaggtagtgtgagatgagagtcagattgccatcactcttactcaatagatattcacagcacaccagaaatgaattttctttccactgcatctttctggagtagaaaaagatgtgcacattctcatagccaaaaaatataaggggctatgtatttgatacaaatagataaacatggaagcttctcatgctcatctttatctttgtgcaggattctcagcaagaaagaagaaaatagactcaaaaggcagaggactttgmaggaagttttttcttactgtttatttttcaatcttgacaatgaccatgaaaagataatttagccaatgtcctctgaagtccaacatgtcagtgtcctatcaagccagagaatggatgatccacactttaaaataattccttccttcctgtattaatgaattcnn

SEQ ID NO: 649105 - DNA, 570 bp, Homo sapiens
cccagaacatttcctgaaatgcttttgaaattggtgtacaaacggaagttagagataaacttcataattctccctattgtccagctcctcctaacgatcaaaatcaaacacatctactcacaattccaaagacaaacatcaatttcagagtcagtacagtcatctgataagcagaaatattttatttttcccataattctcaatgtatgaggctatctcttacataaagaagtgagtcctttctttkattatgcagaagtgtgacttcctttcctccaactgctaacctcaccctttcaaatggtgtcctcaggtaattggcattgatgagtgatagatatctaaataacaacccccttagctccagcctgaatttagagtaatcatgtgtaagaacattcaggtcttggctaagggccattctcatcctagaggatgctaaagatgcttcctttcctctggatgatgtaattttttgttctctaattgcacttttcccctttatccttcactcaagaagaatatatgaattgaaatgtgtgggaatgatatgactttatagataatcca

SEQ ID NO: 649106 - DNA, 553 bp, Homo sapiens
gtcaccacttttgttattcattataatactgggagtcttggccagagcaattagacaagagaaagaaatcaaggacatccaatttggaaaggaagaagtcaaattagccttgcttgcagaccaaataatcttatatttaaaaaaaatctaaagactctaccaaaaaactgttagaactgataaatgaattcagtaaagtcataaaatacaaatcaacctataagaatcagtagcatttatatacaccaacataatctgaaaaacaaatcaagaaagtaacccacttacaatagctacaaagaatataaaatacctaggagtcaatttaaccagagcaatgaaagagctatacawggaaaactatgaaacgctgatgaaagaaattaaagaggtcacaaaaaatggaaagatattgcatgcttatggattgggagaattaataccattaaaatgacaatactactcaaagcaatttatactcaaagcaatgctactcaaagcactgaatcttcagtgcaactcttaatcaaaataccaattacattcttcacag

SEQ ID NO: 649107 - DNA, 553 bp, Homo sapiens
gtcaccacttttgttattcattataatactgggagtcttggccagagcaattagacaagagaaagaaatcaaggacatccaatttggaaaggaagaagtcaaattagccttgcttgcagaccaaataatcttatatttaaaaaaaatctaaagactctaccaaaaaactgttagaactgataaatgaattcagtaaagtcataaaatacaaatcaacctataagaatcagtagcatttatatacaccaacataatctgaaaaacaaatcaagaaagtaacccacttacaatagctacaaagaatataaaatacctaggagtcaatttaaccagagcaatgaaagagctatacatggaaaactatgaaacgctgatgaaagaaattaaagaggtcacaaaaaatggaaagatattgcatgcttatggattgggagaattaataccattaaaatgacaatactactcaaagcaatttatactcaaagcaatrctactcaaagcactgaatcttcagtgcaactcttaatcaaaataccaattacattcttcacag

SEQ ID NO: 649108 - DNA, 431 bp, Homo sapiens
tgactgcatctccaaaaaaataaagacattttcttgcataaccacaaaaccatgatcacaacaaatccagcaattattcctaagtatcctctaatactcaaaccgtattcagattttcccagttgctcaaaaaggtctttgcagttgratgaggagatgaacaaggcctatattcacattgcctttgattgctagctacctttccctacaaaatttgcttttgtaggcgtagggggatctgcagtgagctggggctagctagttgcaacaagtgacccagagctgttgaaatgcatctgaggtggggaaagcaggtttgaggtagggtctgtgaatagagtgcagtactgattctgaggcctggagacagctctgtgctgctgagatgctttcactttattctattttctttcatctgaagaggcaaggag

SEQ ID NO: 649109 - DNA, 447 bp, Homo sapiens
ctgaagagagacacagagctaagatcaaggtgaggggagatggcttgccttttggtggcatggtcagggaaggactgtcctacaaagatgcaataaacagggacaatgacattgagacacaaagggagagaaggagctgagtaaggaaagggaaataagtgttccaggaagaggaaactgcacttgcagaggccatgaggtgggaaaagaacttgatgtgctcaaggtcaaaaagcaggacagacacatctcaggatacagaatggctctttaaatgaaacacattcagctttatgaaaacttatgacagtgagtgtctttctgtcttgctttctgctttcyttccttgctttcctccttccttatctggctgtggcctcgtgaaaggtcctcttggcccagcactacaatcctgttaaagaggtcctgtgtggggagtatagaccg

SEQ ID NO: 649110 - DNA, 584 bp, Homo sapiens
ttgtgcttgtaaaatttgtcagactgaataaacttatatagtgaaaaaatacatrtgctatgataaattttaataatacgcttctttgtctcagtcctgagatttctatataattggcatttttaaagaattaggaattattttccctgtaaaccaaaatgctaaattcttaggtattaacaaaaaaaaagtataacattgaactctgtcaaaactctaagagaaacaaaaacatataaagaggattttttggtcttctctaaggtaatgattattataacaattttaatatttgaaaagcttttcatagaatatgttctcagatagtcaatccattattgcataaatattttgattaacaaataatttgcactttttcatgtttaaacccaaagaccccatatctatagtttgtcttcaaaaatatgaatatatatgtttgctttattttttcagaaagaaaatcatgatatattctcaaaaccaaatattttctaaagttttaaaataatttaaagaaagggaaatttttgtgatggataggatgctcaaaattttggcattaaatatgagtattaacctac

SEQ ID NO: 649111 - DNA, 584 bp, Homo sapiens
ttgtgcttgtaaaatttgtcagactgaataaacttatatagtgaaaaaatacatgtgctatgataaattttaataatacgcttctttgtctcagtcctgagatttctatataattggcatttttaaagaattaggaattattttccctgtaaaccaaaatgctaaattcttagrtattaacaaaaaaaaagtataacattgaactctgtcaaaactctaagagaaacaaaaacatataaagaggattttttggtcttctctaaggtaatgattattataacaattttaatatttgaaaagcttttcatagaatatgttctcagatagtcaatccattattgcataaatattttgattaacaaataatttgcactttttcatgtttaaacccaaagaccccatatctatagtttgtcttcaaaaatatgaatatatatgtttgctttattttttcagaaagaaaatcatgatatattctcaaaaccaaatattttctaaagttttaaaataatttaaagaaagggaaatttttgtgatggataggatgctcaaaattttggcattaaatatgagtattaacctac

SEQ ID NO: 649112 - DNA, 502 bp, Homo sapiens
ttgctttatgaatctggctgctcctgtattgagtgcatatatatttaggatcattaagtcttctagtttaattgaaccctttaccattatgtaatgcctgtctttgtcttttttatctttgtagacttgaagcctgttttgtcagaacctagaattgcaaccccagcgtttttctcttttatgtttgtgtgttgattttcctccatccctttatttttagcctatgtgtgtcattattgtgagatgagtattttgaagccagcatatcattggatcttgctttttgatctagcttgccatactgtgtcttttaaatgggacatttagcctgtttacattcaaggttagtatcgttgtgtgttgatttgattctgtcattgtgttgtgagctggttattataccagcttgtttgtgtcattgctttatagtgtctstggtctgtgtacttaagtatgttttcatattgactggtaatggtctttcctttacatatttacttct

SEQ ID NO: 649113 - DNA, 591 bp, Homo sapiens
tccacctcaccttttccccaggagttcctgggaaccaagaaaaagtcctgatggtaggtagcctggtgcagggttgtcagcttcctctcccttcagctcacatcttcatccttcctccattcattttcaatgtggataacttacaatgaacagaaatttatttggctcatgattctggaggctgggaagtccaagggcatggcagtggcattggcatcttctcagcatctagtgagggccttcttactgtatcatgtcacagcagaaggcagaaggtggaagggtagaagagcatgcaagagagagacagaaatggagtcaaactccttcttttatcaagaactcactcctgcaataactaacctacttacatgttaatggcattaatccattaatgagggcagaaccctcacaacctaaaagctcccatctctcaacactgttgcattrgaggctaaattcccagcccataaactttcaggaacacattcaaatcatagcatttcaccctttgcccctcaaatgtatgttcttctcatatgtgaaatatattaattccatcccaatagccccaataaagtcataagttgt

SEQ ID NO: 649114 - DNA, 501 bp, Homo sapiens
ctgtgagaaaggtagaagaggtataggcatatcccatttccttaccagtttctctgaaaagtgcatcataaagtgaaacattgtaaggagatcctactttcctgaagggtcaatgttaatttgagagctatgtactttaggaaaagctcccacttaccttagagctattctaaaacaacatagtgggtgcccaatgacaaacctggcaaaatgctttcacatatttcttctcattgacagtgtyctttaaaataaaggaccaacccaaagagtgttacctttatcctctccagcatcctcaattcattcaaaggtacaaaagtagttgcctaatagcagatagatggaagattcctgtccttcaaagatattggacctccagacactttgttgacagatatcagataccagaattcctcacactcaatgataacctgtaagttgcattactagggtataagaccagagttttaaaatgaaacattattataatagtgctac

SEQ ID NO: 649115 - DNA, 559 bp, Homo sapiens
aggactgctttgtgaaaattaagctgctaatcatgtacatgtaaatttatgaaagaaaacaattagaattgtcatgtcatagagtgaaaacttcgtttttactctgtgctctataaaagcccaacacctctttattgcaatgtatgcctttcaccttaaaagaaaaataaaactgattttaatcgatttttctctcagtatagtggattgtcattaacactgtggtaacatttcatgttattgcaatcattttccatggtcatatatgtggggaaaatacttagtatctgcttctgtgggttatagaaacagacggtttggataaattacatctgtctaggcagactcctacttttttgttgtgttatgtcattcatcagggaagtaatraaatagagatcagtggttctgatgtagtaactaatacgtcaaccacaagctgatttgaatagcattttcatggtgcataccaacactaataactgtgtggtttcctcataacctcagcaggttgtatttatatactgacaaaaggaccatgtaaaatccatgcacagct

SEQ ID NO: 649116 - DNA, 546 bp, Homo sapiens
tcgtcagcatctgttattttttgactttttaataatggccattctgactggtatgagataatatatcaytgtggttttgatttgcatttctctaatgattagcaatgtggaacttttttttttgtatacttgtttgccttgtctatgacttttgaaaagtgtctgttcatatcctttgcccactttttaatggagttgttttttgcttataagtttgtttaagttccttatagattctggatattagaccttggttagatgcatagttcgcaaatattttcttccattctacaggttgtctctttactccgttgatagcttattttgctgtgcagaagctctttagcttattctatttatcaattttatatttttgtttcaaatgcttttgacatctttgttatgaaatcgttgccagtgcctatgtccagaatagtattgtcttggttatcttccagagtttttatagtttcaggttttacactgacatttttaatgcatctcgagttgatttttgtatatggtgtaaagaatgggtccagtttc

SEQ ID NO: 649117 - DNA, 546 bp, Homo sapiens
tcgtcagcatctgttattttttgactttttaataatggccattctgactggtatgagataatatatcactgtggttttgatttgcatttctctaatgattagcaatgtggaacttttttttttgtatacttgtttgccttgtctatgacttttgaaaagtgtctgttcatatcctttgcccactttttaatggagttgttttttgcttataagtttgtttaagttccttatagattctggatattagaccttggttagatgcatagttcgcaaatattttcttccattctacaggttgtctctttactccgttgatagcttattttgctgtgcagaagctctttagcttattctatttatcaattttatatttttgtttcaaatgcttttgacatctttgttatgaaatcgttgccagtgcctatgtccagaatagtattgycttggttatcttccagagtttttatagtttcaggttttacactgacatttttaatgcatctcgagttgatttttgtatatggtgtaaagaatgggtccagtttc

SEQ ID NO: 649118 - DNA, 580 bp, Homo sapiens
aaaaggaaatcaagtatgaaaatttgtaagtgtggaattttgcagtatgttaaattctagattctccttattttctatgttatcaacaaaaataggattagaagtaaatggctctatttggaaccaaacatacttaagcttttatttaataattacaagagcagaagaagactcaaaggtcattatcattaaagaggcaaaggactactggctggatactaccagaaagaacagctctggcttggtaatagtagytttatggggagaaaagttctaagtaatagctcaacacacaaagatatttctgaagaaatacaaaacctctaaaggatttaagtttctaactaaacaaaagatcccaataccacattgataagaagcaaatgtttttttatttcaatgtactctatgtagctcaaataacgtaactgttaactgcatggaaacaggaaacataaatcaatctcttgataggcagaaaaatcattagtaaatcagtaatttgtactccatcagggaaaacgaaaaaaaaaaatcttgaatcttggatctacctatgtaattaatgtaatgaagaaaa

SEQ ID NO: 649119 - DNA, 578 bp, Homo sapiens
acagctatttcaaaattacacttattaggcttgctggtagattttgttattggattgcaattttttttagtattttgataactatttcaagataaatgatttcctttgtaatcccatgtattttatttcatgcatttaaaaatattattctgaaaatgggttcataaattttgccagactgtgtgaagagttccatggcccaaaaaccttgatttaaggcattcagggagagatgaggagcttcaacatagtttgggagctctcaaaatatcagaataatggcataatgaaatattacatgtatattgtttaaaaacttaatcatttgaaggatatattatatctttctaatcatttgaaatataaattatatcattgggttttccatcttgatatatttctgttttggcttctttttttaacattatcaactgctataattttgagtaatartattacttgacattatttattgagtacctgctatgtgccaggcataatattaagtgcattatgaatattgtttcccttactatgttaacatggaaaaattactggactagggatcaaaaaatatt

SEQ ID NO: 649120 - DNA, 443 bp, Homo sapiens
tgtgcttcatagggttgttacaaggatttaaatgatataggcatgaaaaggggctggtacagagcaagaatttagtgattgcatccacatataaatgcatgycatcaacacagacctcctcttgtaatttagttaatggtattataccaatgccattttcttgttcaggtaatatatagtgatgatgtaagacaatatcattggaagaaactaagtgaagagtacataggaactctatactatttttgcaacttcttgtgagcccaaaattatttcaaaataaaacatatttttaaaaatttcaaaaccaaatataaaaataataatcataatgcagaccttctccccacaagccaacctctaccactgtctcctacagctccatgctgtagctgcacaacaaaaatttgcaaaggatgaaagataaagggaccatccacatt

SEQ ID NO: 649121 - DNA, 443 bp, Homo sapiens
tgtgcttcatagggttgttacaaggatttaaatgatataggcatgaaaaggggctggtacagagcaagaatttagtgattgcatccacatataaatgcatgtcatcaacacagacctyctcttgtaatttagttaatggtattataccaatgccattttcttgttcaggtaatatatagtgatgatgtaagacaatatcattggaagaaactaagtgaagagtacataggaactctatactatttttgcaacttcttgtgagcccaaaattatttcaaaataaaacatatttttaaaaatttcaaaaccaaatataaaaataataatcataatgcagaccttctccccacaagccaacctctaccactgtctcctacagctccatgctgtagctgcacaacaaaaatttgcaaaggatgaaagataaagggaccatccacatt

SEQ ID NO: 649122 - DNA, 552 bp, Homo sapiens
cttcagcgtgggaggtcatcctgggagaggcctagagactgagatcagagccgaggggcagaccacggaacagggaggtgtctgggtggctggacatgccatggagttctggtccagtctttcatgtcttaaacaggatgataagacaagtgagtacggcttgaagtgtatatgttttcaaatctgttttttgtgattgtaaaattattgaaagaagaagaaaactgagtggttaatatgtacgtgaaacatctttaataatcatggcaatgcaaatttaaacaacaatgaaatagcatctccatccatcatcttggctaaaagtartctggttgacagggccagtactggggaagacgtggagaagccctcataacgccgttggtgggaggtaaatcagcaagctgcttcgagagctgttggggggtacttggtggaccctaaaacggcaggccccaggacctagggattccatttctagctatgttctctagtctaaagcaatggttctcaaaccacatgtagtttgcctccaaactgcagattgccagg

SEQ ID NO: 649123 - DNA, 566 bp, Homo sapiens
gcctgcatcgactctatttgttttctctcacttacggtcccagtggcgcttaatttttcatcatgcatttctgtcgtctcctcagtttccctgtaagcatcttcaggaacaagcccatggyccccagagccccttctcctcaccgagtcctatcctcaggcctcccgccaggccctgcagctgctcaggaaatgggtgtggggagattaatgcctcctcacaccccatgaaggcttctgaccttcactgcacagtggaatgctttcagctggggtggtggcgcagccaggggtggcttgagttggccttacacccaatcacttccatcatccatcccaaataaaaatacactaagaaaaaagaacactcactagcaaacatcagctcaagacaatcaccagactcttacaccccccaccgccagctttctacctgagtctttctttcctctgtagagactggcccctggtctaggaagatctttccctccattctctgactatttacactatttatgtatttgcctctgctgaaaaaaaaaatcatctttcttttctaagtaatga

SEQ ID NO: 649124 - DNA, 605 bp, Homo sapiens
aggtaattatttttgttttcttatctcagcacttgtcatgtaaaaacaaatttgacattttcttgtcctttactaaccccctcaaaggcacaagagtcatagagaagcccctgactcatttttattaacaatttatgcattagatttgctttatagggtgcaaagaacttccaagagccgcagagttaagagtcaataagtcaaagttgatgtcatataatatgttataagtatggagtttggcctttgcycctttctcaaatatttatatgatataaagtgataagtgctaaaagagaaatgcagatagaaatgctaatattgggaatatagaaaaataaaaaaatgctttaagataaagtaattaagtaaatgtttgcagttacagagatggaaaggcaaggcactcaagaaaacggggaccctatgagaggaaaatggttgggggggatcagtgtggaagctttattaataataaagaataggaagtattagagctaaaatagtcaaaaaatggtccacggacactgatttttttcaaataactcactggcaatgcagttaaaagatataatcaattatctctatttttgtgataaaattaa

SEQ ID NO: 649125 - DNA, 605 bp, Homo sapiens
aggtaattatttttgttttcttatctcagcacttgtcatgtaaaaacaaatttgacattttcttgtcctttactaaccccctcaaaggcacaagagtcatagagaagcccctgactcatttttattaacaatttatgcattagatttgctttatagggtgcaaagaacttccaagagccgcagagttaagagtcaataagtcaaagttgatgtcatataatatgttataagtatggagtttggcctttgcccctttctcaaatatttatatgatataaagtgataagtgctaaaagagaaatgcagatagaaatgctaatattgggaatatagaaaaataaaaaaatgctttaagataaagtaattaagtaaatgtttgcagttacagagatggaaaggcaaggcactcaagaaaacrgggaccctatgagaggaaaatggttgggggggatcagtgtggaagctttattaataataaagaataggaagtattagagctaaaatagtcaaaaaatggtccacggacactgatttttttcaaataactcactggcaatgcagttaaaagatataatcaattatctctatttttgtgataaaattaa

SEQ ID NO: 649126 - DNA, 541 bp, Homo sapiens
aactaaatattcaattttttaagtggctttctctccttgccaggaagacatggcttaaataattttctgtgatgagttttaaggcaacatttwaaaaaaaagagataacagtcatatattgttgcttctctgacaactcatttcacagcaagtgaaggccagtacatcttagcggataagaaatacacatgtaaaagaaaaaccacatttaaaaaatttaaaaaccaaatcctacatttatagttataaagatgaactctcagggtacatattttgtacagtgtgtatctctgtctgcaaatgttttcaaccctatcggagaagtgaatactgctaatttaatacaagaaaacactcgctgtgattggggcctgaaatatctactccaattcttcaaatgcattgcatgtgtgctcattacaccaagaatgagagggagcatatctaggtgaacgccacagcttgactcacatcaccccaagattttgccatgggataatcttgagaccatgtccaaaacacaaaatgttttattttcctg

SEQ ID NO: 649127 - DNA, 444 bp, Homo sapiens
aggtacacatgactgtgaccatcacatatgaaggtggtaagccacagggcacaccgtaaccctggtagctctagccatgttttatcttcttgcacaaaacttaagtggcatcaaaaaagttataaatgtttattgaaagcaataaaaaataagctacagtttatgaatatagcaaattgccttgatatcacataatagtctttctcatatgatgcaatatgaaactccaaatagatgtcaataaaaggattcctattcttaatttttttaaacttgctcacctrtaatcaaagatacagcaaagacaccttagtttttcttaaaagaggcagactggatgctaacaattaatatcacttattaaaaaacattattgaaatccaaaaaatgagagaatgatatctaaatgaaaagccaccctaaaagagtgaaataggctaaaaa

SEQ ID NO: 649128 - DNA, 582 bp, Homo sapiens
gatgggtccacctttcagtgaatgtgatgctcaagactctctggatcatttttcctgtcctgaggacagggatagggttgaatctgaagtcatcataggtacatgatggatataatgcagcaccagcagcatcagtctgtgaagagggctaggcctttcattatgcctatcttcagctgccgtttttctcagtaagctggtgcctcacaggaccatccctctcaattctgctactttgaagtgaagtcaggagacttatctttaattagtttatttaatcctaatgttggttcatgaaatgtttgtggaaagacttaaaatcagtttatagtattggcagttgtggcttttagtgctctgatgagcatgttgtgttacaacgaactattagacaatttgaagaatagtttgcttcaaattagagtgtatcaatactttcttaaggggttgcacctgtagttttagccatcaaataattatgattacagtagccccctcttatgcatggttttkctttctgctgtttcagtcacccacagtaagctgcattctgaaaatattaaatggaaaattctagaaatt

SEQ ID NO: 649129 - DNA, 608 bp, Homo sapiens
  misc_feature 594, 595, 596, 597, 598, 599, 600, 601, 602, 603, 604, 605,606, 607, 608: n = A,T,C or G
cctagcatctatttttactcatctccaatctattattcacatgtttacccagtgatctattaaataaacattcatttgatcatgttgctctcatgcttaaaactctaaataatttcccattacttttaggacaagattcaaaatatttaaaatggcccacaaagtcttaccttcctttccaagcaattattatttctcttctgcatcyggctctatgcatcaatcatgaaaacttccttttgtttctcaaagaatgctctttctcacctcaaggcctttgtacacattttaaaattgcatttctgttcatattaaggcagaaataaattatccacatggctagaaaactaaagcagcacaaaaatctgtaaaataaaaaactaaaagctttcctctcactcctccatgtcactcttctccaaataaccaatgtcatttgcctcttgtatattttcctaaagtgtgtgtgtgtgtgtgtgtgtattttgggagacgtgggagaaatgggtgtgctctatactctgcaatatagtacaatgattaaaatacaaatttaggaacttgcctgccgaattcgaatcccatgtctcgggnnnnnnnnnnnnnnn

SEQ ID NO: 649130 - DNA, 640 bp, Homo sapiens
gtggctctgtgtatttttttttttgtgtgtatatatattcatttaattcacaacttataaagcagagcccactgatttttcattttacagataaagaaattaagacccagaatgaataagtaacttgctcctaaggtcacaagccaagtttgtggcagagatggtgatgctcccagcagcctgtctggagcagccactgcagggatgcsagttgcagcaggggaagggcatccagggctgtgctctctatggagctggtgggaggcaggaacaggtgggagccacgccccctactgagttggcagggtgggagccccaagcttctgggtgcagctgcagccacccagccacggctcctgacctgggcatccttgcactcttgggagcccgggaaaccccccttgccctcacaggatcagaagtgccttctcctgctccctgacctctccctgcttccaatgcccactccaattttggagcaaatttgtggccgagcctgggtgctgtcacaacccagctgagtgtgcatgcactcagggtggtgctgacatgccagcccccccacttcctcagtcccctcctaactacaggcactgatgactgtgggagagaggccaggagtgatgctgagggcagctca

SEQ ID NO: 649131 - DNA, 640 bp, Homo sapiens
gtggctctgtgtatttttttttttgtgtgtatatatattcatttaattcacaacttataaagcagagcccactgatttttcattttacagataaagaaattaagacccagaatgaataagtaacttgctcctaaggtcacaagccaagtttgtggcagagatggtgatgctcccagcagcctgtctggagcagccactgcagggatgccagttgcagcaggggaagggcatccagggctgtgctctctatggagctggtgggaggcaggaacaggtgggagccacgccccctactgagttggcagggtgggagccccaagcttctgggtgcagctgcagccacccagccacggctcctgacctgggcatccttgcactcttgggagcccgggaaaccccccttgccctcacaggatcagaagtgccttctcctgctccctgacctctccctgcttccaatgcccactccaattttggagcaaatttgtggccgagcytgggtgctgtcacaacccagctgagtgtgcatgcactcagggtggtgctgacatgccagcccccccacttcctcagtcccctcctaactacaggcactgatgactgtgggagagaggccaggagtgatgctgagggcagctca

SEQ ID NO: 649132 - DNA, 568 bp, Homo sapiens
acatacatacacacacacacacacatacatggggagtttattaaatattaactcacatgatcacaagttcccacaataggccatctgcaggctgaggagcaaggagagcaagtttgagttccaaaactgaagaacttggaatccaatgtttgagagcaagaagcatccagcacaagagaaagatgtaggctgggaggctaggccagtctcttttttcacaattttctgcctgcttatattayagcagcacgggcagatgaatagattgtgcccacccagattaagggtgggtctgccttccccaaaccactgactcaaatgttaatctcttttggcaacaccctcacagacacacccaagatcaacactttgtattgttcaatccaatcaagttgacagtattaaccatcacacctaccatataattcagacattccacttatagggatttacccaagagaaataaaagtatatgttcatacaaatattgggacctgattgttcaaagcagctttattttcagtagccaaaacaagaaaagtcccaaatttcctttaacaagtgaata

SEQ ID NO: 649133 - DNA, 568 bp, Homo sapiens
acatacatacacacacacacacacatacatggggagtttattaaatattaactcacatgatcacaagttcccacaataggccatctgcaggctgaggagcaaggagagcaagtttgagttccaaaactgaagaacttggaatccaatgtttgagagcaagaagcatccagcacaagagaaagatgtaggctgggaggctaggccagtctcttttttcacaattttctgcctgcttatattatagcagcacgggcagatgaatagattgtgcccacccagattaagggtgggtctgccttccccaamccactgactcaaatgttaatctcttttggcaacaccctcacagacacacccaagatcaacactttgtattgttcaatccaatcaagttgacagtattaaccatcacacctaccatataattcagacattccacttatagggatttacccaagagaaataaaagtatatgttcatacaaatattgggacctgattgttcaaagcagctttattttcagtagccaaaacaagaaaagtcccaaatttcctttaacaagtgaata

SEQ ID NO: 649134 - DNA, 486 bp, Homo sapiens
gctgacaacatctgcccaaggtggtcagggcactgcttggttttatacattttacgkagacatgagacatcaatcaatatatgtaaaaagtacattggtacagtctgaaaaggagggacgacttgaagcaaaggcaaaaagactccaagtagggagggagcttccaggtcacagataggtggtacacaaacagttacattcttttgagtttctggttagcctttccaaaggaggcaatccaatatgcaactatctcagagagcagaggggtggctttgaatagaatgataggtaggtttgccctaagcagtttccagcttgagttttccttcatgattttgggatcccgaactattttcctttcacatttccccccttttcttttaaaaaattttgtggagaaagaattttacaagaaaatgagtctctggtctcaggtttcatctgatctctcatggctacgatggtttatgcctagatggggag

SEQ ID NO: 649135 - DNA, 643 bp, Homo sapiens
aagaaatgcatcattagtatcattgttgtgcaaacttcacagagtgtacttcaaaaatctaaatggtatattgcctactgtatgactatatatatacatgtacacatatatacagtatagcctattgctcctaggctacaaacctatacagcatgtaactgcaatgaatactgtaggcttttgtatcacaatggttagtatttttgtatataaacatatataaacatataaaagtttcctaacaatacagtataaaagataaagataaaacatggtatacttttataggcacttaccatgcatgaagcttgtgggactggaagttgctctgggtgagttaatgagtgagtggtgagtgaatgtgaaagcctaggaaattatygtatattactgtagactttataaacactgtacccataggatacattaaatttatgaagaaatattttttcttcaataataaatgattttaaaggcttgtttactatttcgtaacatttagcttaaaacacaagcatgttgtatagctgtacaaaatatttttatatccttattctataaggttttttccatttaaaaaattttttaattattttttacttcttaaactcttttttttgttaaaaactacaacacaaacaca

SEQ ID NO: 649136 - DNA, 582 bp, Homo sapiens
tgtttcagaggatgcaagccccaagccttggtggtttccacgtagtgttgggcctgacggtgcacagaaggcaagagtttaaaaacctccacgaagatttcagaagatgcctgaaaacacctgcatgtctaggtagaagtctgctgcaggggcagagccttcatgaaaagcttctagtaggtcagtgtggaggggaaatgtgaggttggaacccctacaaagtctccactggggcactgcctagtggagctgtgagaagacggctactgtcctccagcctccagaaaggtagatttaccaacagcttgcaccatgagcctggaaaagctacaggcactcaacgccagcctgtgaaagcagccaagggggctgtatcctgcagagccacagaaagggagctgccctaggccttgggaacccaccccttgcatcagcatgcccttgatgtgagacttggagtcaaaggagattattttggaggtttaagatttaactactgtcctgctgggtttcagacttgcttgggggyctgtagcccctggttttggccaatttctcccattagaaatgaaagcatttacc

SEQ ID NO: 649137 - DNA, 602 bp, Homo sapiens
gcccaccaaattatttataaaaaccctagcctctgagttctcagggagagagacttgagtaatatctcagtctactgcatggctagcctgacattaattaaactctttctttactgcagtagcatgttcttggtgaattgtttttgcctatgcaggatacaggaagttgggtgattacataattgcttgcagctagggtcagaagctttggtcagacttggaaatctggagaactgtgcctttaatcttgcaatgtggttaatgccaggagcttaacatagctaaactgcaatgtagtcacttctgactttgggaaagggatagcagtattaaaaaaaaaaattccactcgtttcacaaacattagctactaatgggtaacttccatawcagaaatataaaaataaacaattcaaactgtcagattatttttaaatataaaaaatatcaaatgtgattaaaagtatgcttcagtagactattaaatggtagataaatctcacaaaagtacatagaaaataatggcaggctacgaagcatgcatgcttgtagtatatcttcatatattggaaaatattgctatatttttacagtaagataaat

SEQ ID NO: 649138 - DNA, 563 bp, Homo sapiens
aggcccacttatttacttttgcttatttttttgcttttgcttttggtgttatataaaaaaatcattacacaaaccaatgtcaaagagatttttctttatatttcctctagaaattgtacagtttcaggtcttaaatttaagccatgaatctatgtcaagttagtatttgtragtggtgtaagatatggactaaatctcagtcttttgcatgtgcatattccaaagaccatttattttccaaagatgatttattgaaaagacagtcatttctccattatgtattcttagcattcatgtcagtattagttgactgtgtacacacgagtttatttcaaatctgttccattgatttaggtgcctgttttaggccagtgtcatactattttgattgaaatagctttgtaatatagtttgaaataagaaagcatgatgcctctaagttttcttttttcaagattgttttggcattttgaggtcttttgtggttctctatgaattttaagattgatcttttctattctttgaaaaatgccattctactcatctgacaaagggctaatatc

SEQ ID NO: 649139 - DNA, 628 bp, Homo sapiens
atcctgtcagtggcagcatcttcacattttatgcctgatttacagacagccttgctcatatttaatcaaactttatttgtaaacatgctgtcaacaattttattatttgcaaagatttctctaaaagcagcaaattcgtgctcaaatgaaatgatttcatggcaaattgaagccagaaaaggtcaataattgggctttttcttgcttgccaagttgaccagaaatatattcagcaagagcagctgccactgaaacatgtcaatgtgactccatagatcctcacatgctttgagtctaccctagggaaatataatttcagaagcagcaaacttgacccttcacttgcaccttgatccatttcttgcatgtcaataactgacgttcactagcctcaaagtacgcttaagattctttagacaagtgatctaagaagactgaaagccttatcacctcatggtactttaaaacatggggaacggtgattctagtattttgagtctaagatcatcaagttttaaatttccaatccacttttaaaaattgttttygcaacatggaaaatacacatttgctgctgaagaactgaagtgaaatagaattgtttccaaattatctttagtggtatgta

SEQ ID NO: 649140 - DNA, 560 bp, Homo sapiens
ttcattgctgttctctgtgtgtgacacacaggtgagcgggagttttgcaggacgttcattgctgttctttgtgtgacacacagatgagcgggagttttgcwggacattcattggtgttctctgtgtgtgacacgcacgggtgagcgggagttttacaggacgttctttggtgttctgtgtgtgacacaggggtgagtggcatttttgcaggatgttcattgctgttctctgtgtgtgacacacgggtgagcgggagttttgcaggacgttcattgctgttctctgtgtgtgacacacaggtgagcgggagttttgcaggacgttcattgctgttctttgtgtgacacacaggtgagcgggagttttgcaggacgttcattgctgttctccgtgtgtgacacatgggtgagcgggagttttgcaggacgttcattgctgttctttgtgtgacacacaggtgagcgggagttttgcaggacgttcattgctgttctctgtgtgtgacacacgggtgagcgggagttttgcaggacgttcattgctgttctgtgtgtgaccag

SEQ ID NO: 649141 - DNA, 560 bp, Homo sapiens
ttcattgctgttctctgtgtgtgacacacaggtgagcgggagttttgcaggacgttcattgctgttctttgtgtgacacacagatgagcgggagttttgctggacattcattggtgttctctgtgtgtgacacgcacgggtgagcgggagttttacaggacgttctttggtgttctgtgtgtgacacaggggtgagtggcatttttgcaggatgttcattgctgttctctgtgtgtgacacacrggtgagcgggagttttgcaggacgttcattgctgttctctgtgtgtgacacacaggtgagcgggagttttgcaggacgttcattgctgttctttgtgtgacacacaggtgagcgggagttttgcaggacgttcattgctgttctccgtgtgtgacacatgggtgagcgggagttttgcaggacgttcattgctgttctttgtgtgacacacaggtgagcgggagttttgcaggacgttcattgctgttctctgtgtgtgacacacgggtgagcgggagttttgcaggacgttcattgctgttctgtgtgtgaccag

SEQ ID NO: 649142 - DNA, 540 bp, Homo sapiens
accccccacaaaaaacaaaagagatcctgatacaaggtgctagttagtttatgtagaattgatgttgtcaaataatctgacacagtaacaccaaaaccaactcaaactagacaaacacctgtctatctgaaaccatgtggaatcagttatttaaaaaaaaaagaaaacaagttttccaggtagcttagactttaaccctttaaaagaaaatttttattttcattttatagggaagcctttctaaaatatacataattcttttttcttaaggaaatcatatttaaaataatttaagctactttgaacattatttctctactctataacaaaataattgtttcagacagtttaccccacacaacgatctcagacaactgtgatgacttttgtatgtgtgtgtgtgtgtgtgtgtgtacgtatgtgtgtgttcctgctttcctttsctatcaggctgtcagatttcatttctcaggatcatgaatatgtttgccaatggcaactgctccctgtatttaattactttcatttattgaaggttca

SEQ ID NO: 649143 - DNA, 665 bp, Homo sapiens
gaattttcatctttcccaatctacctgttagtgtatatgttcagagttctcgaatagctgctccatgcattctgccctgattttatcactgcattcatggggagagcaagggtggaacatgcttactttatcttacccagaaatggaagactactgaattgattcctggactaagatgcaaaggcaattcagtggagaaagcatagttttatcagtgaaacctggtgaaactattagttwtccatatggaatacatgcatgcataatacataacacatacatgcatacatacatgctacattagtccattcttatgctgctataaagaactgcccaagactgggtaatttataaagtaaagaggttaactgactcacagttccacatgtctggggaggcctcaggaaacaatcactgtggaaggggaagcaaacacgtccttcttcacatgatggcaggaaggagaagtgccaagcaaaagggggaaaatccttttataaaaccatcagatctcatgagaactcactatcatgggaacagcatgagggtaagtgctcccatgatttaattacctcccacctggtctcttccacaacatgtttaggggattaagggcactacaattcaagatgagatttgggtagggacacagcctgaccatatca

SEQ ID NO: 649144 - DNA, 572 bp, Homo sapiens
tttacattttcattaaggtctataaatcattttgagttcctttttgtagattttgaggtgtgggttggagtttcatttttatgtttatgaatatctaattattccacaccatttkttgaaaagactgtcttttttgttttcactgaattattgccttcgcacatttcttaaatatcaggtgaccatatatgtggaaatctatttcttgactctctattgtgtgacattgatctatttttctctcctatgccaatacaacattatcctgattatatttaaagtaactctgaagacaggtagtataagtccaccaattgtgttcttctttttgaaagttgctgtagtgtgtatatttccttggcattaccatatgaatttttaattgctttatttatttaaaaagttcttctgggatttttattggtattacattatatatatagatatagttggagagaactgatgtcttaataatattactaacttctgatccataaacatggtatacctctgattatgtatgtctctcatttcaacgatttttgatagttttcagtgtgttagtattaaac

SEQ ID NO: 649145 - DNA, 572 bp, Homo sapiens
tttacattttcattaaggtctataaatcattttgagttcctttttgtagattttgaggtgtgggttggagtttcatttttatgtttatgaatatctaattattccacaccatttgttgaaaagactgtcttttttgttttcactgaattattgccttcgcacatttcttaaatatcaggtgaccatatatgtggaaatctatttcttgactctctattgtgtgacattgatctatttttctctcctatgccaatacaacattatcctgattatatttaaagtaactctgaagacaggtagtataagtccaccaattgtgttcttctttttgaaagttgctgtagtgtgtatatttccttggcattaccatatgaatttttaattgctttatttatttaaaaagttcttctgggatttttattggtattacattatatatatagatatagttggagagaactgatgtcttaataatattwctaacttctgatccataaacatggtatacctctgattatgtatgtctctcatttcaacgatttttgatagttttcagtgtgttagtattaaac

SEQ ID NO: 649146 - DNA, 572 bp, Homo sapiens
tttacattttcattaaggtctataaatcattttgagttcctttttgtagattttgaggtgtgggttggagtttcatttttatgtttatgaatatctaattattccacaccatttgttgaaaagactgtcttttttgttttcactgaattattgccttcgcacatttcttaaatatcaggtgaccatatatgtggaaatctatttcttgactctctattgtgtgacattgatctatttttctctcctatgccaatacaacattatcctgattatatttaaagtaactctgaagacaggtagtataagtccaccaattgtgttcttctttttgaaagttgctgtagtgtgtatatttccttggcattaccatatgaatttttaattgctttatttatttaaaaagttcttctgggatttttattggtattacattatatatatagatatagttggagagaactgatgtcttaataatattactaacttctgatccataaacatggtatacctctgattatgtatgtctctcatttcaaygatttttgatagttttcagtgtgttagtattaaac

SEQ ID NO: 649147 - DNA, 561 bp, Homo sapiens
gctttataagttactagaacttaagggagttctaaacatggaaacaaaagaatgatacctgctaccacaaaaacacacttaactacatagcccatggaccctataaagcaaccacacaatggagactacaaagcagccagctaacaactgtacaacaggatcaaaaccttatgtaacaatattaaccttgaatgtagatggtctaaatgcccccacttaaaargcacagagtggcaagttggataaaagaacgcaatccattgatctgctgtcttcaagagacacatctcataggtaatgacacacaggctcaaagtaaagggttaaagaaagatatatcatgcaaatggaaaacaaaaagggtcaagggtagctattcttagataacacaaaaattaaaccaacaatgtaaaaaaaagaacaaaaaggggcattacataaagcattcatagacaaaaaagggcattacataaagtgttcatatcaacacgaagacttaaatatcctaaatttacaggtgctcaacattggcacacccagattcataaaataactacttcg

SEQ ID NO: 649148 - DNA, 561 bp, Homo sapiens
gctttataagttactagaacttaagggagttctaaacatggaaacaaaagaatgatacctgctaccacaaaaacacacttaactacatagcccatggaccctataaagcaaccacacaatggagactacaaagcagccagctaacaactgtacaacaggatcaaaaccttatgtaacaatattaaccttgaatgtagatggtctaaatgcccccacttaaaaggcacagagtggcaagttggataaaagaaygcaatccattgatctgctgtcttcaagagacacatctcataggtaatgacacacaggctcaaagtaaagggttaaagaaagatatatcatgcaaatggaaaacaaaaagggtcaagggtagctattcttagataacacaaaaattaaaccaacaatgtaaaaaaaagaacaaaaaggggcattacataaagcattcatagacaaaaaagggcattacataaagtgttcatatcaacacgaagacttaaatatcctaaatttacaggtgctcaacattggcacacccagattcataaaataactacttcg

SEQ ID NO: 649149 - DNA, 561 bp, Homo sapiens
gctttataagttactagaacttaagggagttctaaacatggaaacaaaagaatgatacctgctaccacaaaaacacacttaactacatagcccatggaccctataaagcaaccacacaatggagactacaaagcagccagctaacaactgtacaacaggatcaaaaccttatgtaacaatattaaccttgaatgtagatggtctaaatgcccccacttaaaaggcacagagtggcaagttggataaaagaacgcaatccattgatctgctgtcttcaagagacacatctcatargtaatgacacacaggctcaaagtaaagggttaaagaaagatatatcatgcaaatggaaaacaaaaagggtcaagggtagctattcttagataacacaaaaattaaaccaacaatgtaaaaaaaagaacaaaaaggggcattacataaagcattcatagacaaaaaagggcattacataaagtgttcatatcaacacgaagacttaaatatcctaaatttacaggtgctcaacattggcacacccagattcataaaataactacttcg

SEQ ID NO: 649150 - DNA, 619 bp, Homo sapiens
ctatctcaagttgataagggtctaaagttgtctcaagagattagcttctatccttcctggtagagagaggaggggggcgctgttacacatctgtctcttctttggcaaagaggaaggacagaggttttccttaaatatgctgcttctcaatttcattcctctcacaataatccttatgccaaagtggcatatttcgggggtgacatatattgttaccctttaataaattcatgctgcaatatgtttataataatcagtacatatttgttcattactttttaagtactcagtaaaaaaaaaaaaaactgtaagaatattaaaatatgaagggcaaaatgcctccctttaaagagtsctaaattcagctgtggagctaaacatatatatcttaagatatgtcagtatgtatctttcttttccgttttgaatgaaaaatttcaacatatgatgaagtagagagggatgagatgagatctctgcaggtcctgggtctgtggtgcttatgaacattttcctcctttgcctggcccttctgtgctctgaggagggggaggctgaccccttcacctgtgtttttcagcaccacccccacacttgtttctagcaatagaaggctcca

SEQ ID NO: 649151 - DNA, 577 bp, Homo sapiens
caagtctctgttgtgttggaaagtttgaggatcattctgaaagcaactgggagccactcagttatgtgaggagaggaataacttgatcacatatcaatattttatttaaaaaactctatggtgatgatataagacgaaccaaatagcgaaggcatgaggcacggcaatattgaaggtttggtggccatakgattatgcctagcagatctccaagttcaggaagctgaattgatcaaggaccccagatgcctctggaaacctttctggcatttaccctaaatgcattcttcccgcaggttgctcacagagaataactaatcatggaaggaataccaggctaggctgctcctggaaacatgaagttctctgatggcttactttgattctatgactccttgattgcctcgtgaactatccttaggtgcaggacagtctgaaacactttatgcaacctcatcactctctctttcactcagggtcagatttgcatcacagtctgatgactctcagccctacttgacttcctccccattgtcagtgatggcattcttgcaataaaatctttgcacatttcacc

SEQ ID NO: 649152 - DNA, 605 bp, Homo sapiens
tcataataggaactgttacagtgaactaaatatggcctgggaaggactctgtacttctagatttgagtccctgtggacaaactgcaacctaacttaataggtagaaagactgaaaacctaacttaggagtatgtgcctaaaacagtagctgagtcgtggccaatcccaacagccaaacttctgccactcacacactgctgagtgttcagctgtgttcaaataaggcaaatgctgagcactgtaaccagtccagttgtttytggacctcactgctgagaactgtaatggacccagttgcttctagacctcactcctcacttcagatttttgtacatcatgttccctttattgtctataaatcttccaccatgtgtctgtgctggagtctcactgaatctgctgtgattctgggggctgcctgattcgtgaatcattcattgctcaattaagttcctttaaatttaattcagctgaagattttcttttaatagatggtgtcagaagtgggatctgtgggagcaggactgctagggcctctggagctatactgtggtgagcagtgttgctaaggcttctaatgacccccagagtgctgaggtacaagg

SEQ ID NO: 649153 - DNA, 549 bp, Homo sapiens
cagatcgtttgtgaagataagtcttccctctatcaatgagtaaagatttttgccctttaaaactttyttaagtcatgattttaagtaaatgaatgacttacagtgacctggaattctatttcataacatcaagtgtttaaacttttaatatatttaataggcttcccaaaatcaaatttcaacttcaaaattgtcttttctgacctctaactttgggatactacagaggcccttgaagcacccaaaagagaggtaaacaggactatttaacatgttaagtcacatgggtagcactgtcaaaataaaacataatgttgaaccttcttcaggttatatttagtttatgtcatcaacccgttctaaaattgtataggatttctaaaattcttttttttttcccccgagatggagtcttgctctgtcaccaaggctggagtacagtggcacaatctcggctcactgcaacctccgcctcctgggttcatgccattctcctgcttcagcctcccgagtagctgggactacaggcatccaccaccatgccaagct

SEQ ID NO: 649154 - DNA, 549 bp, Homo sapiens
cagatcgtttgtgaagataagtcttccctctatcaatgagtaaagatttttgccctttaaaactttcttaagtcatgattttaagtaaatgaatgacttacrgtgacctggaattctatttcataacatcaagtgtttaaacttttaatatatttaataggcttcccaaaatcaaatttcaacttcaaaattgtcttttctgacctctaactttgggatactacagaggcccttgaagcacccaaaagagaggtaaacaggactatttaacatgttaagtcacatgggtagcactgtcaaaataaaacataatgttgaaccttcttcaggttatatttagtttatgtcatcaacccgttctaaaattgtataggatttctaaaattcttttttttttcccccgagatggagtcttgctctgtcaccaaggctggagtacagtggcacaatctcggctcactgcaacctccgcctcctgggttcatgccattctcctgcttcagcctcccgagtagctgggactacaggcatccaccaccatgccaagct

SEQ ID NO: 649155 - DNA, 554 bp, Homo sapiens
catctggtaaccatcatagtaataattgttcaaacacaagtcatccatgaaatgctaaatctagtgggttctgaggagtaaccagatatttacagagcctcaaagtatctccatacaaaatacggttgaactacataaagaaaattgtaacattagcatggacaaacctggcaggtactccttaactctcctaagtaataaaaactgtaaaatgcaaataaaccttcgatgacmtttactaacctttactaaagtatcaatgatgacttgattgtttaaacagctgacatttgggcaatttgagtatgtcaaactcaataatactggttttcatttgcaagatccacttaaaacttaaggaggccaaaaaacatcatttaaaataccctataaattataatcatacatgtgatacaaaaatatcctacttcagtaaatattggaatgttatatattttatgagaaacaattaaaatgtgtaaatagcccagtaataaagttttataatcttttaaatcatcatagaatttttccttaagactttatggttaaat

SEQ ID NO: 649156 - DNA, 554 bp, Homo sapiens
catctggtaaccatcatagtaataattgttcaaacacaagtcatccatgaaatgctaaatctagtgggttctgaggagtaaccagatatttacagagcctcaaagtatctccatacaaaatacggttgaactacataaagaaaattgtaacattagcatggacaaacctggcaggtactccttaactctcctaagtaataaaaactgtaaaatgcaaataaaccttcgatgacctttactaacctttactaaagtatcaatgatgacttgattgtttaaacagctgacatttgggcaatttgagtatgtcaaactcaataatactggttttcatttgcaagatccacttaaaacttaaggaggccaaaaaacatcatttaaaataccctataaattataatcatacatrtgatacaaaaatatcctacttcagtaaatattggaatgttatatattttatgagaaacaattaaaatgtgtaaatagcccagtaataaagttttataatcttttaaatcatcatagaatttttccttaagactttatggttaaat

SEQ ID NO: 649157 - DNA, 583 bp, Homo sapiens
ttgttctttacctaaaacacttcagttaactaagtrtgagtttaaaaactaaagacttgagaactttatcagagttaataagaatgagatatgtatgtacatttacaatacagaattactatttaataatttacacatggcattaattctaattgtgtttaaatatcagagctttttcagtcttcattcatgtaatcaacagccacatgctaaggtactagaaccagcactggaattacaagatgaagatggcatggtccacctcccaacagtcataagctctaacctaaaaaacagacaggcaggcaatgtccatatagagtcatagataccatgacaggtatagagcagggcactactggaacacagagaagggacatctatccacttttatgtcaatatcatgggctttctggtggaggagataacataggttgatacctgaaggacaaggaaaagcttcccagatagaggaaagaggcaaaggcaaagagcctgaggtgaggaagagccctgcagagttccactccatccagtttggtgctagagcaaagggcagagtgcagtaagcggtgagaaacaa

SEQ ID NO: 649158 - DNA, 593 bp, Homo sapiens
aaaggcaaagagcctgaggtgaggaagagccctgcagagttccactccatccagtttggtgctagagcaaagggcagagtgcagtaagcggtgagaaacaaggctgagtaacttgacaagaatcacattgacatgggtgtttttatttcatggtgaaaaatttggaacttttcctgagaacaagtgtaagccaatgacacagtaaatgacaggagatttaaaatgtcacctgtcaagtgactgcttatgaagggttattgctcagctaagtatttctgaatgagtcttargtctgttggccttcaatctctactgaaaccctgagaacttgatgacgcatttgttttctgagaatcgtttcagtgtgctggctgacagttccatgaggatggcaaaacttaagaaagtgtagagccagtgaaaaagagatgcacagacttcttgggaactgtttaagctttggaacatgatgaatttatggtgcataagtacagtcttctctgtgaaagtttttgttttcacatctttcattagatgtgtgtaagaaaaaaaatattgatgtagtatctactaacccaagaatgaaaagtaat

SEQ ID NO: 649159 - DNA, 649 bp, Homo sapiens
ttactgttttctattcattctcctcagtctccattcttttgtctaccactctttttctgccttttgcagttttcattgatgattttagatgactacattttccctgtctttcttagcatgtacttctctttttaaaactttttttttaactagttgccacagaatwtgcaatatacatttacaaccaattcaagtccactttcaaataacactatcccactatcccacgaataagactacctgcttaacaaacaaaacacctaattcctcagtaacatttacaacaaattcaagtccactttcaaataacactatcccactatcccacaaataagactacctgcttaacaaagaacacacctaattcctcaatatacatttacaaccaattcaagtctactttcagataacactatcccacttcatgggtgactacctgcttaacaaagaaaacacctgattcctccctcccatccttccattccattccttgtattattgttctttatttcacttgtgtataagcacacataatctatctgtgtgtatttattattatctacaaacttattggtcagatcaattatgaataaatacatgtttttattgtaccacaattcctccctcccatccttccattccattcctt

SEQ ID NO: 649160 - DNA, 589 bp, Homo sapiens
tgttagtatagctttagtaatgcggtgatgaggtgacagggcaggtgatgctctcttagtctctttaggctactataacaaaatactttagactgagtaattcataaacaacagagattattgctyacagatctggaggctggaaagtccaagactaaaggggcagaatatttagtgtttggtgaaggtcaaacattcagacactcgcaacgattatagtgacagcagcagtcttcaggaatcctatgtgagggaaaaacattcagaccacaacaggagtgctcgggaatcctatgtgagggacaaacattcagaccccagcagtagtgttgtggaatcctatgtgaggggaaaactttcaaacccttgtagcagtgttctgcaatcctatgtgaggggcaaaaattcagaacctcgtagcagtgttctggaatcctatatgaggaacaatcagaccacagcaggaatgttctggaatcctatgtgaggggcaaacattcagaccacagcaggagtgttctggaatcctatatgagggacaaacattcagaccacagcaggagtgctctgtaatcctatgtgaggggcg

SEQ ID NO: 649161 - DNA, 502 bp, Homo sapiens
tgggaatgcagatatctctttcatatactaattttccctctcttgggtatatacccagcagtgggattgctgtatcatatgatagttctatttttaattttttgagggacctccatattgttctccatagtgaatgtactaatttacattcccaccaacagagtaagagggttctcttttccctacattcttgcaagcatttrttattgcctgtcttttgcataaaagccattttaatgggggtaagatgatatcttattgtagttttgatttgaatttctctgatgatcagtgatattgagcatcttttcatatacctatttgacatttatatatcttcttttttgtttttgctcattttttgagacagtgtctcactctgtctcccaggctggagtgcagtggtataatgatggcttactgtagttatgactaccagggttcaagcaatcctcccacctcagcctcctgagtagctgggaccacaggcatggatcaccat

SEQ ID NO: 649162 - DNA, 528 bp, Homo sapiens
tgagcatcttttcatatacctatttgacatttatatatcttcttttttgtttttgctcattttttgagacagtgtctcactctgtcwcccaggctggagtgcagtggtataatgatggcttactgtagttatgactaccagggttcaagcaatcctcccacctcagcctcctgagtagctgggaccacaggcatggatcaccatgcccaggtaggttttaaaattatttgctatgtttttcaggttggtcttgaactcctgggctcaagtggtccaactgtcttggctccccaaaatgctggaattacaggtgtgagccactgcgcctgacctgcatgccttcttttgagaaatgtctgttcagattttttgcccatttaaataattggattattagtttttttcttatagagttgtttgaactccttatatattctggttattaatcccttgccagatatatagtttgcaaatattttcttccattctgtggattgtcttttcactttgtccattgttttctttact

SEQ ID NO: 649163 - DNA, 566 bp, Homo sapiens
atgggggtaagatgatatcttattgtagttttgatttgaatttctctgatgatcagtgatattgagcatcttttcatatacctatttgacatttatatatcttcttttttgtttttgctcattttttgagacagtgtctcactctgtctcccaggctggagtgcagtggtataatgatggcttactgtagttatgactaccagggttcaagcaatcctcccacctcagcctcctgagtagctgggaccacaggcatgsatcaccatgcccaggtaggttttaaaattatttgctatgtttttcaggttggtcttgaactcctgggctcaagtggtccaactgtcttggctccccaaaatgctggaattacaggtgtgagccactgcgcctgacctgcatgccttcttttgagaaatgtctgttcagattttttgcccatttaaataattggattattagtttttttcttatagagttgtttgaactccttatatattctggttattaatcccttgccagatatatagtttgcaaatattttcttccattctgtggattgtcttttc

SEQ ID NO: 649164 - DNA, 601 bp, Homo sapiens
tacagatgacatgatcttgcatttagaaaatcataagaaatttactaaaaagtgttaggactcatgaacaaattttggaatgtaacastatataagatttgtatacaaaaataactgtatttctttaccaagaaatcaagaatccaaaaatggaattacaaaaataaatcttgttacaatataattaaagctggggtaactttaacataagaagcttaaacttgaacactaaaactacaatgcatggttagtgttggaaacacccaggtaccatccctgagccttctctccttggctctgagtactttaccttcacggggtgaggaaagggtttgcattcttggcttttacattatagtaggtgggttcggggtgaggtatctgcaagtcaaatgagtattacaatctctacttttatgtataggagactggggcccacaaagagagggaatgacaatccatatcctggaaggcgaattgtcaggcactgatttcccctatgtaaaccctgccaatcatcgtgtatttaaaggatccccggataccttaccaataggtgttcaagagagaggcctgtaatctaggcgtctgagaaagcaag

SEQ ID NO: 649165 - DNA, 534 bp, Homo sapiens
  misc_feature 1, 2, 3, 4, 5, 6, 7, 8, 9, 10, 11, 12, 13, 14, 15, 16, 17,18: n = A,T,C or G
nnnnnnnnnnnnnnnnnntagagagtaagccaaagcatctcaaagtatatcatcacttatcaggcaataacatgcaatttctaaaacctaacttaaatgcagcttttaaagacatttcaaacrtgtcagtttagtcacatttattgaataaagttagcaaatggatatctcttgaaaatgagagctccagggaattaaaaaatgttaagttcccatttcctttctgtgttaacacagctaattatgatctttacttcacatgcaaaagtcaacagaacaactcagtatttcaccaaattataaacaagaattacgctagagaaatgaaaccctaaagagaaacggtcatataactaacctcagtcaagtagttctggcagttatttgaagtctgaggtttgaagtaggaattcttacgggcatttggggaatatattttctgttgagtcctatactagtaagattttcaacacaaggtgactctcgacctcgccttgtaggaagagtgctgagaaaatatttcacctgctcttt

SEQ ID NO: 649166 - DNA, 507 bp, Homo sapiens
atacctgttgtaaggaattataattttaaaatcgttctaaagaagcaccattgtttctaaggtgatttctactgaacaagcagttcaaacaaagtagacagggaagagaaatggctatcagtgacgtatggctcaacaggtaaaacttcctgccttctaaaatggctctacttgtaagattctgaagattccattagaaatacttgtatttaaagggtaataatgtgggaaaatgaatatgttgatttgcttgattataagaaccacttcactagaaataattatatcaaaacatcatgttgtactccttaatgtaggttaagaaaactaaaatgaaygaaaaaaaatctaggaatacttgtgtttagtaaaccagttttggatttcactcttgtacatttcacccattatctaggaccaattaaacatttggcactgaggaataattcagagcaacaactcctaggggagaactagattgtctggttggtgatcaaaaagaactaa

SEQ ID NO: 649167 - DNA, 557 bp, Homo sapiens
tgtttctaaggtgatttctactgaacaagcagttcaaacaaagtagacagggaagagaaatggctatcagtgacgtatggctcaacaggtaaaacttcctgccttctaaaatggctctacttgtaagattctgaagattccattagaaatacttgtatttaaagggtaataatgtgggaaaatgaatatgttgatttgcttgattataagaaccacttcactagaaataattatatcaaaacatcatgttgtactccttaatgtaggttaagaaaactaaaatgaatgaaaaaaaatctaggaatacttgtgtttagtaaaccagttttrgatttcactcttgtacatttcacccattatctaggaccaattaaacatttggcactgaggaataattcagagcaacaactcctaggggagaactagattgtctggttggtgatcaaaaagaactaaagcatctctgaaggctattagcccccaacactgtgaccaaggccctggaggtggggcatgttctttctgccttccacacaccgcttcaggctgaacaaggt

SEQ ID NO: 649168 - DNA, 582 bp, Homo sapiens
attctgacaagtaattttataacaagatcacttcattaattataaagcttcaaaaatacttagtgaaaaaaactaacagatcaggttaattacatgagacttttcaggaaaaaaagccatacaaaagcaaaaaaaaaaatgagaggagagacaaaaactatctttgactaacattttaaaggtaaaattatttactaacattatttttcaaaattacattgtcaaattagcattcacttccttctaatctcctgaagccatctcactaaaaattatgcttttgaaacaaattaatgagcttaattcattttctatgagtgtatgttttgacttacttagttaatttttttgacatggaactgttagctttcaatgctgctgcaaaggcttccttatattcttctaactcagttgtaacgtcttcataagcagttttcattttgtagaatttacrttccacatctttaagtgtgagttccttcttatttagtgaagctgtattatatccttgtttaactgctctaattgttttttatattgtgcttgttcctaaaacagaggaaaataatacacttttaaaac

SEQ ID NO: 649169 - DNA, 649 bp, Homo sapiens
aaagtgatcaatgaacactgtagcttaagaccaattcataattatcacataatttctaaatcacaattttttcctgtgccaactggtcttaatcatcaaatgactccataatgagaatcattactctgaaagattgattttgttataataataatggaaatttaaatatttaaaagaaaaaacagataccatttttttctagaactctacaaagcagattgctacaagagaggcagaggaaacactatatatatatgtgtatatatatatatatatatatatatatctccaaaatataatttgcagtgaaataaatgaaagcacattacaagtaaacttacctgatttaaacaactcacctgtaaatggatttcttctaatttttctactgccwgcattgccctttcatctagctctgatttatattcttgtagtttactaagttctaccatactgttttccatatgtgtcttaagatttaatatttcttcttccaacatatttttatcctcctcaagtttttcacattcctgttgtacttttttcatagataataactcctgttgaaaaacttgattctctttaggcaaattgacacattttgaagatactgcttccttctccgccataagatcatcaaattgcatga

SEQ ID NO: 649170 - DNA, 483 bp, Homo sapiens
tactgggtgacataggcaaaatcagacatttacctgatttcaattaactaaaattctaaaagaagaagttttgagtatttattaatcaacctagtattcaattttcattttcttttctaaatgaggaaataaggagaatattatggaatgatttttattcttcacagaagtaaaataagcatagtgtgttttgagtgttaagacacaaatgcaatttctcctttaccttactccaagcttgtttgtatggagaagttaagaccatcccatctctatgttatgccacaatgcttctctatagcacacaacttggctctgaaattttgaaagtcaaaatactaatctactatgtgtctctgataaattgcctgaacsttacctgattttgaagtgctgcactcctaagactttcttggaatgagttaaaccttttattccaagaatcctctactgagatagaaagcagagctgtgcatctctgtt

SEQ ID NO: 649171 - DNA, 483 bp, Homo sapiens
tactgggtgacataggcaaaatcagacatttacctgatttcaattaactaaaattctaaaagaagaagttttgagtatttattaatcaacctagtattcaattttcattttcttttctaaatgaggaaataaggagaatattatggaatgatttttattcttcacagaagtaaaataagcatagtgtgttttgagtgttaagacacaaatgcaatttctcctttaccttactccaagcttgtttgtatggagaagttaagaccatcccatctctatgttatgccacaatgcttctctatagcacacaacttggctctgaaattttgaaagtcaaaatactaatctactatgtgtctctgataaattgcctgaacgttacctgaytttgaagtgctgcactcctaagactttcttggaatgagttaaaccttttattccaagaatcctctactgagatagaaagcagagctgtgcatctctgtt

SEQ ID NO: 649172 - DNA, 431 bp, Homo sapiens
ggtactgcttggtttaaaactcctggccggggttcaaggtctaagagaatcaacaacatgtcctttttatagaaaaagagatttatattttacaagctatccttttcattagtatcaagtctgtaaaattaaatgaaaaatctttctttcactgcttaaaacactgacagatttatatagaggaataagaccttgtttcctttggccccaatttctatctaaagggtctgggaaacacacccttcaaactatcaaatctcatcagatgggttttattaacacttataatgtggcttcctttctaatctgattctggtgcagcatcacagagagaagaagcgtgaaggaaatcaaaatattttacccycaaatatattttttgacttattttgaaatggctgctgcagggccaagagattgaaatggccctc

SEQ ID NO: 649173 - DNA, 431 bp, Homo sapiens
ggtactgcttggtttaaaactcctggccggggttcaaggtctaagagaatcaacaacatgtcctttttatagaaaaagagatttatattttacaagctatccttttcattagtatcaagtctgtaaaattaaatgaaaaatctttctttcactgcttaaaacactgacagatttatatagaggaataagaccttgtttcctttggccccaatttctatctaaagggtctgggaaacacacccttcaaactatcaaatctcatcagatgggttttattaacacttataatgtggcttcctttctaatctgattctggtgcagcatcacagagagaagaagcgtgaaggaaatcaaaatattttacccccaaatatattttttgacttattttgaaatrgctgctgcagggccaagagattgaaatggccctc

SEQ ID NO: 649174 - DNA, 560 bp, Homo sapiens
cctataaacgtttgtggtaattgaatgtgaaatctgggaagcatctcgttttccagaattctgcactagaaactcagcagtttcactctgcttcttgtgttgtggcaaacattggttcccatagttcagggagaactttcacttttttgatatcccaggatccaaaaaaaaaaaagagagagataaaaggcagtrgggaaaagaatagctcagtgcagaaaagggaaaacttctttactcttcctgaaggcctacaaggtcacttcctcttaatctggctatttcatgtaaaatccaggtggcaaagacagaagatatatgttatgcctgtgtctttttatttctctgtttctgccagtcagatagcataaacatttatatcagatagcaaagagtggatgcgaataaaagcacaaaatggagaagagtcttttttgaaattttggaaaattattccattcactcaaacagaaatgagcagacttgacaaaaatttcaatgataaaatgataagtatcttataattattatgtataatgataaagtaagcacaaaatagt

SEQ ID NO: 649175 - DNA, 560 bp, Homo sapiens
cctataaacgtttgtggtaattgaatgtgaaatctgggaagcatctcgttttccagaattctgcactagaaactcagcagtttcactctgcttcttgtgttgtggcaaacattggttcccatagttcagggagaactttcacttttttgatatcccaggatccaaaaaaaaaaaagagagagataaaaggcagtggggaaaagaatagctcagtgcagaaaagggaaaacttctttactcttcctgaaggcctacaaggtcacwtcctcttaatctggctatttcatgtaaaatccaggtggcaaagacagaagatatatgttatgcctgtgtctttttatttctctgtttctgccagtcagatagcataaacatttatatcagatagcaaagagtggatgcgaataaaagcacaaaatggagaagagtcttttttgaaattttggaaaattattccattcactcaaacagaaatgagcagacttgacaaaaatttcaatgataaaatgataagtatcttataattattatgtataatgataaagtaagcacaaaatagt

SEQ ID NO: 649176 - DNA, 560 bp, Homo sapiens
cctataaacgtttgtggtaattgaatgtgaaatctgggaagcatctcgttttccagaattctgcactagaaactcagcagtttcactctgcttcttgtgttgtggcaaacattggttcccatagttcagggagaactttcacttttttgatatcccaggatccaaaaaaaaaaaagagagagataaaaggcagtggggaaaagaatagctcagtgcagaaaagggaaaacttctttactcttcctgaaggcctacaaggtcacttcctcttaatctggctatttcatgtaaaatccaggtggcaawgacagaagatatatgttatgcctgtgtctttttatttctctgtttctgccagtcagatagcataaacatttatatcagatagcaaagagtggatgcgaataaaagcacaaaatggagaagagtcttttttgaaattttggaaaattattccattcactcaaacagaaatgagcagacttgacaaaaatttcaatgataaaatgataagtatcttataattattatgtataatgataaagtaagcacaaaatagt

SEQ ID NO: 649177 - DNA, 560 bp, Homo sapiens
cctataaacgtttgtggtaattgaatgtgaaatctgggaagcatctcgttttccagaattctgcactagaaactcagcagtttcactctgcttcttgtgttgtggcaaacattggttcccatagttcagggagaactttcacttttttgatatcccaggatccaaaaaaaaaaaagagagagataaaaggcagtggggaaaagaatagctcagtgcagaaaagggaaaacttctttactcttcctgaaggcctacaaggtcacttcctcttaatctggctatttcatgtaaaatccaggtggcaaagacagaagatatatgttatgcctgtgtctttttatttctctgtttctgccagtcagatagcataaacatttatatcagatagcaaagagtggatgcgaataaaagcacaaaatggagaagagtcytttttgaaattttggaaaattattccattcactcaaacagaaatgagcagacttgacaaaaatttcaatgataaaatgataagtatcttataattattatgtataatgataaagtaagcacaaaatagt

SEQ ID NO: 649178 - DNA, 587 bp, Homo sapiens
aagctaatgaatgaatgtgatcatttaaaagaaagtctctttcaatatgagagagagaaagcagaaagagtagtaagtatcaaggaagataaatattttcaaacttttagaaagaaaatttaaacatttggttctggatacatgttgaacttagttgaatataaaaatcaatggataaaaagtgtgtttaccatactgtataattccatttacatgaagcatccagaaaagataaacgtatagggacaaaaagtagactaatgtttgcaaagggctgggtctgaaagctggtagtgactgctaatgggcgtgagggatcttgcagtgatggaaatgctgtaaagttggattgtagagatggctgcacaactcagtaaatggactaaaaaatcttttaaccttaagttaaaacagatacattctatagtatgtaaattatatttcaacaaagctgttttaataaaaaaaaggaaaaccgtgtttactataccagcttagaaacgtgtcycatttctaggaaatcaaaggtagaggtgagagatgatttactttgagaaaagacattgtgtcacctatgaaattttatt

SEQ ID NO: 649179 - DNA, 549 bp, Homo sapiens
gtctccactggaagtatatcacattatcacattaatttggatgagacacaggtcccaaagaagaaattatttcaagtggaaagtcaagtatgtatggaacttagcatgtcaactgttattctgtagctagttgaattacataacatgttttaggatactaattatggcagaagcttgattttttattttcattacaatgaattatttccaytttactatctctataatgtacttatttttataaagttactttcattctaccattttgaaaaaccattgcataccttttctcttacaatatgtacccttggaaaagttgagaattatacatcattcctcatagaaaactgacttttgtcctgttaaaacagtatttttaagtaatttttgtattgctctgatgaggcaggccagattaaatcagagaagaatgtttcatggaatgttccagaaaattgtcttatttcttcacttttgtgagtggacacagaatctgtgtctatttatttcacagattctaggttaacttgtacagaaaggccattatac

SEQ ID NO: 649180 - DNA, 592 bp, Homo sapiens
atatgtatctatatgtattaatggagacatattagtttagaacagttatattttgaagatgtcattctttaaaaaattattaatatctacatgattgctgcagatattttaattttaaacaaacatttttcactaatgtgaccagtatttgtgtcctattttattaaacagacatttcaagattcttttagagttaattattaaaaattaagtatcataaatatttctgaagtactaccttaaaaaaaaccctttcctggcttttcatatagttaaacattttcataattactaaaaagttaaaaataaattaacaaccataatcaaattagaattctactttttatatcagatgaaatactatataaaatgtccagaatatctagtgttaatgaggctgtgcagcctggacatttgatgtctcatgtgtgggaatgtgaactaacccawccattctgaataattattggctctgtgtgttaacagtctagagtcctgaaacaaggatcttaattctaaaataaaatcctattctaagaatataccaatggttgataatcaaggaagtttcaaagttatacagaagaacctt

SEQ ID NO: 649181 - DNA, 246 bp, Homo sapiens
agagggagtttaggcaataacccccaatcccatttcctccttccctttaatctcatgaacatgcatagaaggcaatgagcaagggaaccgatggagatattcaatatggaccattccacttggacaaaagccagtaaataggggagtataacaggggacaagggccaaacagaaagtatctattacatttrccaatgcagatcaatcatgtcaacaatagaaatggcagttttggcattcggttat

SEQ ID NO: 649182 - DNA, 453 bp, Homo sapiens
catttaagccatcttgagagtagagcccatagggaaaactacaaatggaaaattcattgatttttgattttgctttcctatggatyaaatttaacactttcttgtaaatctctccctttgcagatcatatgtgataaatagttatccaactttctagatatccacccagatctgcttccatatgaagaggtggaaacggattctgtgcatgatactggttaggattgggaactgtttttttttaaaggagatttttaaaatttgttttccttgtacacatagccataatattgtgttgctaactgccctctgggaacaaagtcatgtcaatcacaaatatattgcctaaagcgggaggcttattactctgctgtgaattccatctcctattatgttttaaagatgctacaaacttgagacagtactatgtagatgacattcccagcaaatccc

SEQ ID NO: 649183 - DNA, 453 bp, Homo sapiens
catttaagccatcttgagagtagagcccatagggaaaactacaaatggaaaattcattgatttttgattttgctttcctatggattaaatttaayactttcttgtaaatctctccctttgcagatcatatgtgataaatagttatccaactttctagatatccacccagatctgcttccatatgaagaggtggaaacggattctgtgcatgatactggttaggattgggaactgtttttttttaaaggagatttttaaaatttgttttccttgtacacatagccataatattgtgttgctaactgccctctgggaacaaagtcatgtcaatcacaaatatattgcctaaagcgggaggcttattactctgctgtgaattccatctcctattatgttttaaagatgctacaaacttgagacagtactatgtagatgacattcccagcaaatccc

SEQ ID NO: 649184 - DNA, 457 bp, Homo sapiens
cttccatttaatgacaatttctatttagtatacaacagtccttccccctgcaatgcaatttcttcactctttaaagctctgagtctggctactggtctctgttatgtactcatccctagagccaagtcttcaaatatttctcagaacttcttcacatctaaaaatctaggattaatttattgctctctgattatattcttctggtatttcaagtatcctgtataacttcttcatctgcccttgcttttcttctacatcaagatgtcaagttcatggacttcccaattaatcattttaaaaatktatttcaagcctttatgagtcactaaaatatacatatgttctcaggaattatggccctacaatttgtatgtgagaatagttcctgtgtcaggcattatggacataagaggaaataaattctagcccctgcctacaaggagctaattcccagcct

SEQ ID NO: 649185 - DNA, 446 bp, Homo sapiens
gaagcctctaacaatgcatcttgactggacagatttgacaattaaaatggctggaagaaaataggcttcataagtgtcacttactattcacattacacattaaaaggacatctcctaaattaaatcttgtctatgataaaaaggcagaaaatcatgacccaaggctcatttataactgcagaaatgttcaagatagaccaasgcttgctatgtttaggaactgacaagtacaggtctttataatctaccattttgcctcatttgataccaggtgaccttcataatgcaggcaatagagaattgcaagatttgtcagacatttcaggtctttggaaagctatgctctttcacaagaacagccatggaaacaggaagaaagtcaattcccacttaaggtaatcagaatttacaaatattcctttcttcattgaaatctcaataggcac

SEQ ID NO: 649186 - DNA, 586 bp, Homo sapiens
cacacccctgtcattaagtgacacatgactgtattagttaacactatgggaacttcatgggaaatggacactctagctccaccataaatagaaactgtttatgtcaaaaaaacacataaaagcatagttgcaagattacatttccttccagatatttcatttagtatctccacagatcactaacttcctgaatagcattcttgtgtctccactgcctcacatttgatttcaggtcattccatcaattgtcaaagacgcatccaacattaacttyccaactactggtttggattgtgtcaacattgtcattctgggccacaacaacacaaaaggctaactcagtgaggtaacatagacactgatcagtgagattttgctgatggatggtaccatttttttaccaagatcaagggtattcataccttcaggcatctagataacattgaaaagggtaggttcatagataaaaagggaaagaggaagggtttttgcactatacatgagctaccgtgtctcctgtttaacctgagtctgaagagattcaaagtgcaggtgccatgaatgcctctttaatagctccatgtcg

SEQ ID NO: 649187 - DNA, 586 bp, Homo sapiens
cacacccctgtcattaagtgacacatgactgtattagttaacactatgggaacttcatgggaaatggacactctagctccaccataaatagaaactgtttatgtcaaaaaaacacataaaagcatagttgcaagattacatttccttccagatatttcatttagtatctccacagatcactaacttcctgaatagcattcttgtgtctccactgcctcacatttgatttcaggtcattccatcaattgtcaaagacgcatccaacattaactttccaactactggtttggattgtgtcaacattgtcattctgggccacaacaacacaaaaggctaactcagtgaggtaacatagacactgatcagtgagattttgctgayggatggtaccatttttttaccaagatcaagggtattcataccttcaggcatctagataacattgaaaagggtaggttcatagataaaaagggaaagaggaagggtttttgcactatacatgagctaccgtgtctcctgtttaacctgagtctgaagagattcaaagtgcaggtgccatgaatgcctctttaatagctccatgtcg

SEQ ID NO: 649188 - DNA, 586 bp, Homo sapiens
cacacccctgtcattaagtgacacatgactgtattagttaacactatgggaacttcatgggaaatggacactctagctccaccataaatagaaactgtttatgtcaaaaaaacacataaaagcatagttgcaagattacatttccttccagatatttcatttagtatctccacagatcactaacttcctgaatagcattcttgtgtctccactgcctcacatttgatttcaggtcattccatcaattgtcaaagacgcatccaacattaactttccaactactggtttggattgtgtcaacattgtcattctgggccacaacaacacaaaaggctaactcagtgaggtaacatagacactgatcagtgagattttgctgatggrtggtaccatttttttaccaagatcaagggtattcataccttcaggcatctagataacattgaaaagggtaggttcatagataaaaagggaaagaggaagggtttttgcactatacatgagctaccgtgtctcctgtttaacctgagtctgaagagattcaaagtgcaggtgccatgaatgcctctttaatagctccatgtcg

SEQ ID NO: 649189 - DNA, 614 bp, Homo sapiens
cttgtgtctccactgcctcacatttgatttcaggtcattccatcaattgtcaaagacgcatccaacattaactttccaactactggtttggattgtgtcaacattgtcattctgggccacaacaacacaaaaggctaactcagtgaggtaacatagacactgatcagtgagattttgctgatggatggtaccatttttttaccaagatcaagggtattcataccttcaggcatctagataacattgaaaagggtaggttcatagataaaaagggaaagaggaagggtttttgcactatacatgagctaccgtgtctcctgtttaacctgagtctgaagagattcaaagtgcaggtgccatgaatgcctctttaatagctccatgtcgattgattttctgggctacacttcccagcattcaaattgctaaatgcatataaactactagtgaatatttattacctggatttgtgcttttgagtgatcttatctatagttatgtgcttcagtgatccaacttggggtgcactccaaactttgataaagaccctgcttattccttgagtaatgctacactgacaaytgatttagtgaatgccactgtgaaaataataa

SEQ ID NO: 649190 - DNA, 619 bp, Homo sapiens
gagttggacttgtccgaaagcttttgtataaacttgcttgatgagcaactgttgtccactggtaccttcactgtacaatccacacacaacaaaacttcacaactggacacctaaatttgcactttgtttggtaaagttgaatgaaaaatgttgtcttttaagcttatgctctcttatgaaagctgttattagattaattttactccaagatatgccaattaggaaataacttccmatttaatttcaccagctccctgtgggtggactaattactcacacatcacacttactctggtggtgaaatgcctcaaaagaaggtctccagagtgttgctctacctagaaggacaagaatgaagagacataaaaatcattcattaagaaggaagaagattttccttgcctagattttcacttgtaggatccaattaattttatcacttaatattttgtcctggtgggcattcactttacaaatttgtaaggtcagtagaaatggaaacttttggaaatcaaactgtaaatgttctgtagacgttgacagaaatagctatttggagctgtgcttttgccaactagacactctgagaaaatctgtgagaggatattttcaggaagtc

SEQ ID NO: 649191 - DNA, 619 bp, Homo sapiens
gagttggacttgtccgaaagcttttgtataaacttgcttgatgagcaactgttgtccactggtaccttcactgtacaatccacacacaacaaaacttcacaactggacacctaaatttgcactttgtttggtaaagttgaatgaaaaatgttgtcttttaagcttatgctctcttatgaaagctgttattagattaattttactccaagatatgccaattaggaaataacttccaatttaatttcaccagctccctgtgggtggactaattactcacacatcacacttactctggtggtgaaatgcctcraaagaaggtctccagagtgttgctctacctagaaggacaagaatgaagagacataaaaatcattcattaagaaggaagaagattttccttgcctagattttcacttgtaggatccaattaattttatcacttaatattttgtcctggtgggcattcactttacaaatttgtaaggtcagtagaaatggaaacttttggaaatcaaactgtaaatgttctgtagacgttgacagaaatagctatttggagctgtgcttttgccaactagacactctgagaaaatctgtgagaggatattttcaggaagtc

SEQ ID NO: 649192 - DNA, 619 bp, Homo sapiens
gagttggacttgtccgaaagcttttgtataaacttgcttgatgagcaactgttgtccactggtaccttcactgtacaatccacacacaacaaaacttcacaactggacacctaaatttgcactttgtttggtaaagttgaatgaaaaatgttgtcttttaagcttatgctctcttatgaaagctgttattagattaattttactccaagatatgccaattaggaaataacttccaatttaatttcaccagctccctgtgggtggactaattactcacacatcacacttactctggtggtgaaatgcctcaaaagaaggtctccagagtgttgctctacctagaaggacaagaatgaagagacataaaaatcattcattaagaaggaagaagattttccttgcctagatttkcacttgtaggatccaattaattttatcacttaatattttgtcctggtgggcattcactttacaaatttgtaaggtcagtagaaatggaaacttttggaaatcaaactgtaaatgttctgtagacgttgacagaaatagctatttggagctgtgcttttgccaactagacactctgagaaaatctgtgagaggatattttcaggaagtc

SEQ ID NO: 649193 - DNA, 606 bp, Homo sapiens
ggtttttttttttgctttactaacaaagcatagtccaaatgacatgacctttcagactatacctttagaayccaatagatcataattttatatgtaatttttaaaacatcataaccagttatgaaacttaagatattcttactatctcgagtaactattagttattctagtaattcttagtatctctagtaactcatagctgtctttacccttggaattgaggcaagaaattttcagaattatcttgctgttttatttatataaccttactcataatacacaaggtaacatgaagtattgggtcatattactgaggaatagaaattatgaacagtttaacaacaatggccactgagttaaactagtgttaaaggagtcatcattgccagtgcttcaaatgttgcagttttatattgctggtcaccagtgccgaggttaaagatttattctgttttgtggtcaccagttgacttctgtgtctgtgttcagggagtgaatggggtcataaaagtcaatgcagttgcctattaagagaatcctaccttgcagaatgggacctttggtgtcagggtgtgaacaataactttatttcaacataaatacata

SEQ ID NO: 649194 - DNA, 606 bp, Homo sapiens
ggtttttttttttgctttactaacaaagcatagtccaaatgacatgacctttcagactatacctttagaatccaatagatcataattttatatgtaatttttaaaacatcwtaaccagttatgaaacttaagatattcttactatctcgagtaactattagttattctagtaattcttagtatctctagtaactcatagctgtctttacccttggaattgaggcaagaaattttcagaattatcttgctgttttatttatataaccttactcataatacacaaggtaacatgaagtattgggtcatattactgaggaatagaaattatgaacagtttaacaacaatggccactgagttaaactagtgttaaaggagtcatcattgccagtgcttcaaatgttgcagttttatattgctggtcaccagtgccgaggttaaagatttattctgttttgtggtcaccagttgacttctgtgtctgtgttcagggagtgaatggggtcataaaagtcaatgcagttgcctattaagagaatcctaccttgcagaatgggacctttggtgtcagggtgtgaacaataactttatttcaacataaatacata

SEQ ID NO: 649195 - DNA, 606 bp, Homo sapiens
ggtttttttttttgctttactaacaaagcatagtccaaatgacatgacctttcagactatacctttagaatccaatagatcataattttatatgtaatttttaaaacatcataaccagttatgaaacttaagatattcttactatctckagtaactattagttattctagtaattcttagtatctctagtaactcatagctgtctttacccttggaattgaggcaagaaattttcagaattatcttgctgttttatttatataaccttactcataatacacaaggtaacatgaagtattgggtcatattactgaggaatagaaattatgaacagtttaacaacaatggccactgagttaaactagtgttaaaggagtcatcattgccagtgcttcaaatgttgcagttttatattgctggtcaccagtgccgaggttaaagatttattctgttttgtggtcaccagttgacttctgtgtctgtgttcagggagtgaatggggtcataaaagtcaatgcagttgcctattaagagaatcctaccttgcagaatgggacctttggtgtcagggtgtgaacaataactttatttcaacataaatacata

SEQ ID NO: 649196 - DNA, 602 bp, Homo sapiens
ttttttaattgggatcttagaaattctgttgttgagttgtgggatattaagcttttatcagatacacattttgattttatcagatacatattttctcacatattatgggttgtcttttcactcccttgatagtrtcctttgatgcataaagggttttttattttgattaaatctaattttcgtgtattttcttttgttatctgtgattttctgtcatatttcaaaatacacttaaaactcaaaggtcataaaggtttaccgtgtgttttcttctaagagttacatatttttagtccttacatttaagtcttttattaatttagaattaatttttgtatatactgcaaggtaggggtctaacttctctcttgtgcactgacatccaactgttgaagagactgttctttcctcccttgactagacttggccaccttgttgaacagtcattgaccatatatgtgaggactaacttgtaggatctcaaatctgttctattgtatttgtctgaaagtctattggtcttattccagtaccacactctcttgattactgtagatttgtagtaggctgtgaaactgaaaaatgtaagttttccaatgttc

SEQ ID NO: 649197 - DNA, 444 bp, Homo sapiens
ccctttagctcaaggaagaaatcataagaaacaccttaaaatacattgaactgaatacaaataaaaatatrctatatcaaaatatgtgggataaagttaagcagacccacagtaaattttttgtataaatgcttattctaaaaaagagaagttcaaaataagtgaactaattttctaccttaaaaagaaaatctaaagcaagagagcaaattaagtccaaaacaagtagaagaaagaaaataaaacagaaattagaaatcaatgagacagaaaacagacacaggagaaaattaacatggccaaaagttagttctgtgagaaagaaagaaaacgcaaattataaatatcagggattaatgagattgtacagttgtagacacaagagacattaacaagataatggaatattgtgaaacattttatactaattttcattacttggat

SEQ ID NO: 649198 - DNA, 444 bp, Homo sapiens
ccctttagctcaaggaagaaatcataagaaacaccttaaaatacattgaactgaatacaaataaaaatatgctatatcaaaatatgtgggataaagttaagcagacccacagtaaattttttgtataaatgcttattctaaaaaagagaagttcaaaayaagtgaactaattttctaccttaaaaagaaaatctaaagcaagagagcaaattaagtccaaaacaagtagaagaaagaaaataaaacagaaattagaaatcaatgagacagaaaacagacacaggagaaaattaacatggccaaaagttagttctgtgagaaagaaagaaaacgcaaattataaatatcagggattaatgagattgtacagttgtagacacaagagacattaacaagataatggaatattgtgaaacattttatactaattttcattacttggat

SEQ ID NO: 649199 - DNA, 444 bp, Homo sapiens
ccctttagctcaaggaagaaatcataagaaacaccttaaaatacattgaactgaatacaaataaaaatatgctatatcaaaatatgtgggataaagttaagcagacccacagtaaattttttgtataaatgcttattctaaaaaagagaagttcaaaataagtgmactaattttctaccttaaaaagaaaatctaaagcaagagagcaaattaagtccaaaacaagtagaagaaagaaaataaaacagaaattagaaatcaatgagacagaaaacagacacaggagaaaattaacatggccaaaagttagttctgtgagaaagaaagaaaacgcaaattataaatatcagggattaatgagattgtacagttgtagacacaagagacattaacaagataatggaatattgtgaaacattttatactaattttcattacttggat

SEQ ID NO: 649200 - DNA, 444 bp, Homo sapiens
ccctttagctcaaggaagaaatcataagaaacaccttaaaatacattgaactgaatacaaataaaaatatgctatatcaaaatatgtgggataaagttaagcagacccacagtaaattttttgtataaatgcttattctaaaaaagagaagttcaaaataagtgaactaattttctaccttaaaaagaaaatctaaarcaagagagcaaattaagtccaaaacaagtagaagaaagaaaataaaacagaaattagaaatcaatgagacagaaaacagacacaggagaaaattaacatggccaaaagttagttctgtgagaaagaaagaaaacgcaaattataaatatcagggattaatgagattgtacagttgtagacacaagagacattaacaagataatggaatattgtgaaacattttatactaattttcattacttggat

SEQ ID NO: 649201 - DNA, 224 bp, Homo sapiens
tggatgcaggtgcagtgccacattttttgtcactttctgatgtgccccaccagcactgaagagatagcctggagacagggcaagaggaaggctgagaargatgagatggtgagtgccagattcttcctggccctgagcccacccccagtgtgacactcaacttttaggagtgggagagcaagactgatggcttcaagtgcttcaccaagaagatggacaacagg

SEQ ID NO: 649202 - DNA, 495 bp, Homo sapiens
acaacagggcactcagctcaacttcacagccaatgagtggtggcaggctttgagaaagagcatcagaagcctgacagttcttcttcagcctcagccaggccttggagctggaccaggccatccacttcagtatagatgccttccactctgtcagtgagctctttkccagtcagtccaggaaggacctggacccagccatggacctgttagtgctgtctcagggacaccagaccaacatcctggacatcatccacatacacaaggaagctcttaccaaagtcatggagagcaggcaacatgtggccgaagggaagacagaggtgcagaggctgatgacgtcagaatcacaggaacaggatttctttggccactttggctgaaattcaccacttccatccaattccagtgagagacatggactcacagatgcaggatttcttgcaacaagagatactactttttcaaaaagtcacccaggaattgatagtgttgaac

SEQ ID NO: 649203 - DNA, 187 bp, Homo sapiens
ggatttttcttattgctacatagmcaacctgctatacagatttctgaaaaagtagaagcaggctcagtagtgggtagcaaacaaagattggaagggtttggagggattagtttatgagagggagtgggagggagtgatttaatcatggatgggtgggggtggatgtggaagggaaaaaggggtgggt

SEQ ID NO: 649204 - DNA, 187 bp, Homo sapiens
ggatttttcttattgctacatagacaacctgctatacagatttctgaaaaagtagaagcaggctcagtagtgggtagcaaacaaagattggaagggtttggagggattagtttatgasagggagtgggagggagtgatttaatcatggatgggtgggggtggatgtggaagggaaaaaggggtgggt

SEQ ID NO: 649205 - DNA, 544 bp, Homo sapiens
agttggttttctgatgccctgttgtttctgttctgaatggtttatttctcattataagagctcagcaaagcaggcagagttaaaaagcagagacatgaaggctttaaaatcatggacttcactcctacactgaatctcaggtccccagaaagacagaaacaccatgggaccacagcaaaggcagaaggaggagtgagagagggrggtggacagaacaacaaacaggagttggctctcattttttcacgcgtgccattttctttaggtttttctagtttatggagtctctttgttccagttgagcacacagataaactagagatctcaaggcttttgctgagaacatcaaagcctttaacctctgttgggccaaatatttagaccaaaaatacagacagacacacaaaagccagaaccggaccagattgagtagcttagtggctacagcctttattccctttattctttaggatacgaactcaaaccagattcagggttctaacccaaccaggacccccctgggtgaaactgaaaccccacagtc

SEQ ID NO: 649206 - DNA, 579 bp, Homo sapiens
agctgttctatggcatcatcctgcatgaccacttgtgcatgtaaaccagcccagccaccaacccccaaaagttggtctgcagttatattaatttgaggttgggcccaggcattgtgagcagcctgaatggaagcttcatctgcctactaagttttaaattgtaagaactgagcaggagttagacaagctagagtaaaagtgtcccagtcagtaggaatcatccgactggaaacagcaacattctttaacagtcccatttcaaaaggagaacctggtccatactgatttatagcttgtttaatttttttgagtratttaaaaggaaaaggcccaaatgtagctataatatttccctgttgatctggggggtgtattcaaacagggaactgccaagcctctaaatcccacttttgtctagcttgctgtattcctgtctgaatagaactaagagcagtcgctcaaggcgctgctcgaacagtcaccagggcaactacttttcacccagtgtcctccagaaaagaaagatctggagggtcgttttcttcaaaatagtaatgagggtgtgcagaaggataagga

SEQ ID NO: 649207 - DNA, 579 bp, Homo sapiens
agctgttctatggcatcatcctgcatgaccacttgtgcatgtaaaccagcccagccaccaacccccaaaagttggtctgcagttatattaatttgaggttgggcccaggcattgtgagcagcctgaatggaagcttcatctgcctactaagttttaaattgtaagaactgagcaggagttagacaagctagagtaaaagtgtcccagtcagtaggaatcatccgactggaaacagcaacattctttaacagtcccatttcaaaaggagaacctggtccatactgatttatagcttgtttaatttttttgagtgatttaaaaggaaaaggcycaaatgtagctataatatttccctgttgatctggggggtgtattcaaacagggaactgccaagcctctaaatcccacttttgtctagcttgctgtattcctgtctgaatagaactaagagcagtcgctcaaggcgctgctcgaacagtcaccagggcaactacttttcacccagtgtcctccagaaaagaaagatctggagggtcgttttcttcaaaatagtaatgagggtgtgcagaaggataagga

SEQ ID NO: 649208 - DNA, 613 bp, Homo sapiens
aaaggttgccaatttcttgtagatcctgctagagttaaacttcatttaagtaatcattaaaagctgcatttattccctcacttgaacttttgatttcacactattaggactaatcctctaagtctttgctaagttatgttcctccttttcttgtggcttgactctgatgctctctatatgcaacatcaattgatgtaaagtacattcagggcaatagagtttctttaaatattactttgttattcaaaataatcacaaaagcactcatcgtaggaaaacttggaggactcaaatatagggaaatactttttctttctaaggcacaattctctaaagaagttcaccttaacttgaatatacatgggaaaatatccttgttcactaatagtctatattcactctgttttcttccctcatagaccagccggttcactattattytccaaatgatgtgtgcctctatagagtccaggctatctgcatatctaatttttcccacaaattactgttttgaattgcactgaattgaattcaaggggatgtcatttataaacagtgcaaatatatactgcacgagggatcttagaaatcatacacatggtttgatccataa

SEQ ID NO: 649209 - DNA, 589 bp, Homo sapiens
gctcctattcacccaaatatctttctcctcatccttttctttcccaggtttctttggtctgtctgctgctttccccatttgccatcccttgactgagacagctaggtattttctcagayatataggtattacatgtctttacatgctttagatacacactgccagaaatgctattccagcctgagggatgtgaaaaaaccgaacctctgtatcagttcctctggaaaccaccagactggtcaaaatacacaaccacagtttctgagaacaaggtttgtaatggccctctggcaccaactaaccacaccagaaatgtccttatggccactatcacactgggaactgggggtgatacacaggtaaccaaaatgccaccatgctttctaaccaaaatttagcagcttctatcttcattaagcactcacctgattgctctgtttcattagattctttataatctaattttcaaaaaattgattctgtcagtttttgcctacttaacagttgcttcagtggaggcattaattcttggagcttcttactcagctgtgtttaatgatatcactcctgcttctatttataaaccgca

SEQ ID NO: 649210 - DNA, 524 bp, Homo sapiens
aaatctgggccaaagagggagaaactgcaatggatctttgtctataattatatatctatctgtatacattcattttttccctttataagagtgtagatggatgtactgagagagatatgatagagacagaaatagatagagatacagataaaggggttagagttacagctagagatagaggtagaggtagagctagggatagagttagagatartagatttgagatagagatagatagagatgagatagagatagacagagatagagatagacatagagatagagatagacatagacatagagctatcacttcaaaactagaggataaggacttctatacaggtagttttaatagtcctcaaggactaccttttaattgcagatatctagagagtaggaccacacctggaaagcattgttaaaccatcatttgagaaacccacttgcagaggttaaaaaggcaggaaagggatctgtgtctgggatccctaagatcacgctgaggctcaatagtttgctagaac

SEQ ID NO: 649211 - DNA, 524 bp, Homo sapiens
aaatctgggccaaagagggagaaactgcaatggatctttgtctataattatatatctatctgtatacattcattttttccctttataagagtgtagatggatgtactgagagagatatgatagagacagaaatagatagagatacagataaaggggttagagttacagctagagatagaggtagaggtagagctagggatagagttagagataatagatttgagatagagatagatagagatgagatagagatagwcagagatagagatagacatagagatagagatagacatagacatagagctatcacttcaaaactagaggataaggacttctatacaggtagttttaatagtcctcaaggactaccttttaattgcagatatctagagagtaggaccacacctggaaagcattgttaaaccatcatttgagaaacccacttgcagaggttaaaaaggcaggaaagggatctgtgtctgggatccctaagatcacgctgaggctcaatagtttgctagaac

SEQ ID NO: 649212 - DNA, 452 bp, Homo sapiens
cctgtacacccactttataggaaagggatagtagaagcaggcaacttagaggagagaaaaagatkttttggaaagatgaatgagccctcagaagatcaagtaatgatctatgacagtctttctggtcctgctgctgacctccagactctgcttctgtgataggaattaatcttccctggttgatgagactcccagggaggggacttatgacaattgtggtccttttggagaatctatctttaggcaaataaggaaaattcagagaaggctccctcccttttcccaaatttgctgttctcggagtgctttcagtttgaattaatcagcataccaaaaaggcacagtttggtgcagcatttcttgcactccttcacttcaaagtcatgaacaaatttctcctatatttatttctctctattgttgttttgtaggtatatatttttaatttatag

SEQ ID NO: 649213 - DNA, 629 bp, Homo sapiens
gctcttttactaggcactttatccttaagtccttaaacggtccttactatggtcataagccaaggagaagagtccagtggagagagatttttgaatatgtaacagagagagaarttattaatgaggaataatcctcagaaatataaggtgcttttgcattaataatatcctgaaagatttagtttcatgaacactttagatggtgatctcctagaaggcggggtttgtcttatttatctcatattgcaagagcttggcacagtactcggcttataatacacattcctgagtgagaatagacttgtacttagaaaaatttggaagggaagaagaacttttaagaatatcatatcctatttagtgtctgacttttctaagaaacaggcaagatgaaagagtgaaattgaaaaaagtgaagtattagagatccattacttgaggaatggagaggaatgaactaaagaatatttaaaagaagcatggactagagtaaagatgcaattgaagtaatgtgaatgttagaaagggtaaaaaatcataatgtgtaattaaaagcaatagtattctctacctatttttacagttatttattatgtggctttgtgtacaagtaaacatgattttgggat

SEQ ID NO: 649214 - DNA, 647 bp, Homo sapiens
ctactggatgtggcctatctccacgggtgatagttggtagagctcacaactatttttattcttaataacacatggaaatatagaccataacgaatgaattgtcatatttaaagagaggcaatttttaataataattttagaaatgcttgcttctttttgagatggattttcgctcttgttgcccaagctggagtgcaatggtgcgatctcggctcactgcaatctctgcctcctgggttcaagtgattctcctgcctcagcctcctgagtagctgggattacaggcgtgcaccaccacgcccggctaatttcttgtatttttagtagaaatgaggtttcaccatgttagccaggctggtctcaaactcttgacctcaggtaatccacccacctcggccggccaaaatgctgggattacaggtgtgagccaccgcgcccagccaaaatgcttgctttttatggcaaatcaagtatttttaagtatgtcttacatgtttctatgaaaaatttctccatctttatagaaaaacaagaaggaaatcagggatagggtgattaatatctattaaaactccmtatgtgctaatcataatagtgttgctttacttaagttatctcaatctctccctcaacaacctgtgaaatag

SEQ ID NO: 649215 - DNA, 403 bp, Homo sapiens
acacttctgtatattccataaaatgtgcatttcttcatggatactctttgaatcatctaaatggagactctttatagaaatattgaatcattaattcttccawctactgtactcctttccaacatactgtcttactgatttttcactttttcctatttatatccattttgttctactaacccatctgtcattggccttcttctatagcctacctcaaatttcagttcacactagctgtgaacagcactcaaattgctgctgtattcttaaaatataaatttacttcataaagcaaaagtgaatcatatgcatgttacaaaaaatattcctagcagagataagatgggatggtatttgctgggatgtgcagcattgttttttccaaattaatttctctcagaat

SEQ ID NO: 649216 - DNA, 403 bp, Homo sapiens
acacttctgtatattccataaaatgtgcatttcttcatggatactctttgaatcatctaaatggagactctttatagaaatattgaatcattaattcttccaactactgtactcctttccaacatactgtcttactgatttttcactttttcctatttatatccattttgttctactaacccatctgtcattggccttcttctatagcctacctcaaatttcagttcacaytagctgtgaacagcactcaaattgctgctgtattcttaaaatataaatttacttcataaagcaaaagtgaatcatatgcatgttacaaaaaatattcctagcagagataagatgggatggtatttgctgggatgtgcagcattgttttttccaaattaatttctctcagaat

SEQ ID NO: 649217 - DNA, 592 bp, Homo sapiens
cctttatcacagatagtgtgagaagcactatctgagaaggcagaaacgtggtttttggcttttattttttaatctttggagtttacacagtgcttaaagtggcaattttatacagtaagtttccccacaaaggcgagaggcaattgwgcttacagggtttaccagatggaatcccaataaaaaataaacagaacactcaaattgggtaatttgagaagagcttaataaagggacaatctataaagttgtaggcaggctgtggtaatcaacaaagggtattgcaatatttcagagctagtgatagcagggtaacttactgcctttaggactgaagggctaagggaggaggcagtcactaaaatgtgaagaaagatttatgggatgacagctgcctgatggtggccatgacctttggtcaatgaatatggagcatagccattccacagcaacctctagggaaaaacctgggggaataaatattctgacttcactcttgtcccttccctggatctcttgctggctttccccattggctgaacccaactggaagctaattggcaagggcatccactgatataagcagaacaggaag

SEQ ID NO: 649218 - DNA, 592 bp, Homo sapiens
cctttatcacagatagtgtgagaagcactatctgagaaggcagaaacgtggtttttggcttttattttttaatctttggagtttacacagtgcttaaagtggcaattttatacagtaagtttccccacaaaggcgagaggcaattgtgcttacagsgtttaccagatggaatcccaataaaaaataaacagaacactcaaattgggtaatttgagaagagcttaataaagggacaatctataaagttgtaggcaggctgtggtaatcaacaaagggtattgcaatatttcagagctagtgatagcagggtaacttactgcctttaggactgaagggctaagggaggaggcagtcactaaaatgtgaagaaagatttatgggatgacagctgcctgatggtggccatgacctttggtcaatgaatatggagcatagccattccacagcaacctctagggaaaaacctgggggaataaatattctgacttcactcttgtcccttccctggatctcttgctggctttccccattggctgaacccaactggaagctaattggcaagggcatccactgatataagcagaacaggaag

SEQ ID NO: 649219 - DNA, 592 bp, Homo sapiens
cctttatcacagatagtgtgagaagcactatctgagaaggcagaaacgtggtttttggcttttattttttaatctttggagtttacacagtgcttaaagtggcaattttatacagtaagtttccccacaaaggcgagaggcaattgtgcttacaggktttaccagatggaatcccaataaaaaataaacagaacactcaaattgggtaatttgagaagagcttaataaagggacaatctataaagttgtaggcaggctgtggtaatcaacaaagggtattgcaatatttcagagctagtgatagcagggtaacttactgcctttaggactgaagggctaagggaggaggcagtcactaaaatgtgaagaaagatttatgggatgacagctgcctgatggtggccatgacctttggtcaatgaatatggagcatagccattccacagcaacctctagggaaaaacctgggggaataaatattctgacttcactcttgtcccttccctggatctcttgctggctttccccattggctgaacccaactggaagctaattggcaagggcatccactgatataagcagaacaggaag

SEQ ID NO: 649220 - DNA, 592 bp, Homo sapiens
cctttatcacagatagtgtgagaagcactatctgagaaggcagaaacgtggtttttggcttttattttttaatctttggagtttacacagtgcttaaagtggcaattttatacagtaagtttccccacaaaggcgagaggcaattgtgcttacagggtttaccagatggaatcccaataaaaaataaacagaacactcaaattgggtaatttgagaagagcttaataaagggacaatctataaagttgtaggcaggctgtggtaatcaacaaagggtattgcaatatttcagagctagtgatagcagggtaacttactgcctttaggactgaagggctaagggaggaggcagtcactaaaatgtgaagaaagatttatgggatgacagctgcctgatggtggccatgacctttggtcaatgratatggagcatagccattccacagcaacctctagggaaaaacctgggggaataaatattctgacttcactcttgtcccttccctggatctcttgctggctttccccattggctgaacccaactggaagctaattggcaagggcatccactgatataagcagaacaggaag

SEQ ID NO: 649221 - DNA, 543 bp, Homo sapiens
ttccatgtaaacatgttaatttaatatttaattagattttgtgttaggcagaataatgtccctccccaaagatgtcggtatactaaccccttggggctgagaatacattatgctacagagcaagaagggattatatttgcatatggaattaaggttgataattagttgtatttagaattaagacattattctagattatccaggtatgcctaatgtagtcacaagcgtcctttaaagtggaaggtggtgatagaaaaagaggtcagagtcaaaaggagattggaaatgytatgctgctggctttgaaatagagggggaaggtcccagagtcaaggaatgcagtggcctctagaagctaacaaggcacagaaacaaattctcccctacagcctccaaaacaccccagccctgctaatgcctcaattccagcccagtgagacccatttcagacttctgagctccagagctgaatgataacaagtttgtattttttaagttactgaatttgtagtaacttgttacagcagcaaaaagaaactaatc

SEQ ID NO: 649222 - DNA, 555 bp, Homo sapiens
aaatttcataactcacatttgcaataataacctggtaataagaaatctttttatttgtttgtgctttttcccaagtaaattttctttccctgctgttagcccaccctttcaaataaagtgccctaaatggagttttccttacagccagctcagtaacacttttggcatcaacttccttggagcatatctgatatagaattgttgggaatgttttttcctgtctccaatgccattttagcataattcagcagagagaagtcggcaacgctcatgtgagtgggygctttcttggcatcttcattatggggcgtaaaaatgtgggtgcatttttctaagccatcttggaaataaaaatgcccaaatggcttattattaatgtattagaaaccagtctatttcatcccctaaaaaagaaaacagtttttttatgtacttgtcatctgcttcaaaacccaaagccaaacagtagaacttgataaaaagccagagaaaattagtcctactaattgaatggcctttggcgtatagaagaagagcaatgcttgatgctcaatt

SEQ ID NO: 649223 - DNA, 555 bp, Homo sapiens
aaatttcataactcacatttgcaataataacctggtaataagaaatctttttatttgtttgtgctttttcccaagtaaattttctttccctgctgttagcccaccctttcaaataaagtgccctaaatggagttttccttacagccagctcagtaacacttttggcatcaacttccttggagcatatctgatatagaattgttgggaatgttttttcctgtctccaatgccattttagcataattcagcagagagaagtcggcaacgctcatgtgagtgggtgctttcttggcatcttcattatggggcgtaaaaatgtgggtgcatttttctaagccatcttggaaataaaaatgcccaaatggcttattattaatgtattagaaaccagtctatttcatcccctaaaaaagaaaacagtttttttatgtacttgtcatctgcttcaaaacccaaagccaaacagtagaacttgataaaaagccagagaaaattagtccyactaattgaatggcctttggcgtatagaagaagagcaatgcttgatgctcaatt

SEQ ID NO: 649224 - DNA, 547 bp, Homo sapiens
gattactgaattattttatttagttatttaccctccatgtatttctctagtatctaaaccagtcttgatatgccaccaaaataaatttttcataccacaaatataatygtttgactccaaatatggtggtcagcctcatggcctatcactcttctatcttgccatataaaataattccctggagaattatgttattctattattttgactatgatatggactcttctcttccccatgaaggcaacagccgtttttttcttggactgtcaggtcaaggcaatagctatttttttcttggactctcaggtcaagtgttacctacaggaagccctacctccctgaccattttgatgttagagatgttcgcacactatattcctccaccaatagtgcctatcaccctatactctggtgtttgcttgttttcttactttcaatgtagactcttaaagcctagaagacaagagtagtatcttatctatatttgcatttaaaacatttaccacagtgtttggcacatagtaagaactcaatacagataagtatt

SEQ ID NO: 649225 - DNA, 496 bp, Homo sapiens
ctgtcctggccagtcagggttgctcacccctgtaatcccagcactttgggaggctgaggtgtgtagatcacctgaggtcaggagttcgagaccagccggaccaacatggagaaaccccatctctactaaaaatacaaaaattagctgggtgtggtgttgtgcacctgtaatcccagctacttgggaggctgaggtaagagaatcacttgaaccctggaggcagaggttgcagtgaactgagactgcgccattgccctccagcctgggcaacaagagcaaaactccgtycccccaaaaaaataataagtactgtcttgactgtggtcatcaaaaatatttgattaagggttagctagaaagcctgaccctttcacagacagacggaagggccaaaagaaaatagattgtttgcagtggggcaagaaggataagaatcctatggaaaaaaaaataacagagggatttgtttagtgagcgctggggagaggcatttgtt

SEQ ID NO: 649226 - DNA, 562 bp, Homo sapiens
agatggttatgagacagaaaaacgaaaatgttttgctaaacgtgttctgataaggggctgtgctcctccatggtggtgcccttctgattgggtgctgcccaatcagacacagcccaccaaatgtcacccccatgaggcacacagaggaaccacagattaccccgaggtcaccttcattttgcaactggcaaaactgcagaagaaaccaaaccacactgctctgagcagagggcatcccatcaccctgacaaawgctttctgtaaagggtgccacggaggttgtccctgggccagacattgggcagggcctagctccagcgagaagctgttgaagaggctccctgtgtgccttgggatggagggtgtgggcagaggatggcgctggtgagagggagagaggagaattcatgtaggaggaatgaaatgggaactcctttttgggttaaaggtattgagatacaaaacagaaaacttaccttcagtgggcttggaaacaaaataaaagttctcctgcaactttttttctggagggtgcagtcaaaatgagcattgtttttgcaaa

SEQ ID NO: 649227 - DNA, 575 bp, Homo sapiens
tctaccttttcataaaaaatatttggaattgtcagtcttccttcagatgagagaatatacttctagtgttagtttaatcaccatgtaacctgcttcctgttgtccttctgagatgaatgtcattgatataacaggtcttttggatctctccgtcaggtctcttgcattttctttaacaatttctatctctgtattactcttccacttcatttttaaaatggaaagtrcaagtcttaatagtagccatgtctttcaatttatttactgatttaaaaaatctaatatcaagttttttatttggctaatccaagaaatctctttgttcttattttaatttgcctcaagtactcttattatgttgttattcaaactattttctgtctcttccagcaagtctatttcatcagggcaagttcagatattctatttgttcttcttgatggctgccaaacccatgtgtgactgttatttggtaatataagctcagttccaaccaaagagactcaatgtaactggtattagaagagaggtgtctctagcgtggcagtcaggctgttcctgtagagacagcaaaa

SEQ ID NO: 649228 - DNA, 580 bp, Homo sapiens
tccttttgagaaaaatattttaaaattggggtattaagaaaatgggtttgtgacttgtgtttcagtctaagtcatgtttcagatattttggtaaaaattttattgtattagaaatgtaacaatacactggtaacatcgaagttattatttccattgcagatttttctcttgaacttgaaacataaattcaatggcatatttgaattgtttactaggatatacaagaattaaatatcatgtgtcaaagtagaattctgtttcccacctgtaggagtttaatggtgtccttctaaatgttatgttcacctggaacctcacaatatggccttatttggaataaggacttttaaatatataattatagtgaagattttaagatgagatcatcctggattagggtgggccgtaaaccaatgacaagcatttatataagaaactctctgaaaacagagagacgcaaaggaaaagaccatgtacaaatgatagcasgtattagagttatgctgccataagccaaggaacaccaggagccaccagaggctggaagaagctcccctaggatctttgaagggagtatggc

SEQ ID NO: 649229 - DNA, 531 bp, Homo sapiens
caaataggagcagaagttggcattatcaccaagccaaaatttctgagatgcgaggagccccagcctgttcctaagtatgctgatattcctaaatgtcatttatttatttagccatcacccttcataagactttttttaaatcctaacactgggtatccaaggatccgttttcgattcaccttgctatcctcataatctagcactgagtctagcacacaacacacaagcaacaagactgttgaactggaataatccttgctggtggtggtaataaggtacacgtcacagaccacatacttctttacgttaaacttagtatactgcatttacttgtatgccacattataagcttayagaggactggagccatcataggtgatcaataaatatgtgttcaaatatttgaagtgttcaaatatgtgaaatatgtacatcaaatatataaagtcagagaaatgaatttctcaggaccaggatatttttttaaaactcatttgagcttattatttcaaaattatctaccaacttttt

SEQ ID NO: 649230 - DNA, 531 bp, Homo sapiens
caaataggagcagaagttggcattatcaccaagccaaaatttctgagatgcgaggagccccagcctgttcctaagtatgctgatattcctaaatgtcatttatttatttagccatcacccttcataagactttttttaaatcctaacactgggtatccaaggatccgttttcgattcaccttgctatcctcataatctagcactgagtctagcacacaacacacaagcaacaagactgttgaactggaataatccttgctggtggtggtaataaggtacacgtcacagaccacatacttctttacgttaaacttagtatactgcatttacttgtatgccacattataagcttacagaggactggagccatcataggtgatcaataaatatgtgttcaaatatttgaagtgttcaaatatgtgaaatatgtacatcaaatatataaagtcagagaaatgaatttctcaggaccaggatattttttwaaaactcatttgagcttattatttcaaaattatctaccaacttttt

SEQ ID NO: 649231 - DNA, 538 bp, Homo sapiens
ttgtgcctattagtaattcttctctttcttttgctaattttatctaggcatttagtgcttgtatgtttcacgtgcccctcagtcccaaggggcaactgtaagtgttgctcagcctgaagtcagttccattccccttgccaatgattggttcaggtatagtgatacacaagggaagtctgctgggagtctggtttccytgaatttataaggtatactccttttggatatagtaatgtaagctcatgataattggagctgctgtagccatcttgggtcatagggggaaaagtgaaatgaagaatgactctcaactcaagattaacttgtcaaattgaactcttgatccccagctccctctccataattttttgtttcatctttctagttgcttgggccaaaaatcttgcaattatccgtaactcttctctttctctcacatcccacattcagttcgttagaagatcctataggctccttcttttaattatatttacagtcttaccacttttattatttgcactgctagcatcctcttcca

SEQ ID NO: 649232 - DNA, 538 bp, Homo sapiens
ttgtgcctattagtaattcttctctttcttttgctaattttatctaggcatttagtgcttgtatgtttcacgtgcccctcagtcccaaggggcaactgtaagtgttgctcagcctgaagtcagttccattccccttgccaatgattggttcaggtatagtgatacacaagggaagtctgctgggagtctggtttccttgaatttataaggtatactccttttggatatagtaatgtragctcatgataattggagctgctgtagccatcttgggtcatagggggaaaagtgaaatgaagaatgactctcaactcaagattaacttgtcaaattgaactcttgatccccagctccctctccataattttttgtttcatctttctagttgcttgggccaaaaatcttgcaattatccgtaactcttctctttctctcacatcccacattcagttcgttagaagatcctataggctccttcttttaattatatttacagtcttaccacttttattatttgcactgctagcatcctcttcca

SEQ ID NO: 649233 - DNA, 600 bp, Homo sapiens
ccgggcatggtggctcacgcctgtaatcccagaactttgggaggccgaggcaggcggatcatgaggtcaggagatcaaggctatcctggctaacacggtgaraccccgtctctactaaaaatattaaaaaaaaaaaaaattagccaggcgcggtggtgggcgcccttagtcccagcttctcaggaggctgaggcaggagaatcacttgaacctgggaggtggaggttgcagtgagccgagatcgtaccactgcactccagcctgggcgacagagcaagactccgtctaaaaaaaaaaaaaaaaaaaaaagagagagagagaaatagctttagttcttttacagaagatgaaagaagcatggaaaagcctgaagcctcacatttctacaatgcaactgtaagactgctgttctcactttttttgcataggtccctccacttggttcagcagctgattccctatatggcctttgggcacagaggagttcacaggtttctgatgtgaggactcaggaatggtacttggtcttctgctgaaaagctaataattgcttgctttgggtacaacttccccacccagaaaattcaacttgtaattctt

SEQ ID NO: 649234 - DNA, 600 bp, Homo sapiens
ccgggcatggtggctcacgcctgtaatcccagaactttgggaggccgaggcaggcggatcatgaggtcaggagatcaaggctatcctggctaacacggtgagaccccgtctctactaaaaatattaaaaaaaaaaaaaattagccaggcgcggtggtgggcgcccttagtcccagcttctcaggaggctgaggcaggagaatcacttgaacctgggaggtggaggttgcagtgagccgagatcgtaccactgcactccagcctgggcgacagagcragactccgtctaaaaaaaaaaaaaaaaaaaaaagagagagagagaaatagctttagttcttttacagaagatgaaagaagcatggaaaagcctgaagcctcacatttctacaatgcaactgtaagactgctgttctcactttttttgcataggtccctccacttggttcagcagctgattccctatatggcctttgggcacagaggagttcacaggtttctgatgtgaggactcaggaatggtacttggtcttctgctgaaaagctaataattgcttgctttgggtacaacttccccacccagaaaattcaacttgtaattctt

SEQ ID NO: 649235 - DNA, 500 bp, Homo sapiens
cttcccatagcagggttctgccatctaccctgcatcaccttctccagggtctctgtacccaccaactttcaggtcagtatcagcagtgatgccctctcagagctaagtattttaaatagaaaactccaatgaaagaaaataagtgccaacatagattctaaactccagaaaaatatccttcaaatttaaaggtaggttagacttccaagtggtagagtagcctacaccacagtaaaactttccactgatgataagtataaactgtggagaaaagatgaaaaacaatcatttgaaggcagttatgagcaaytgaaagcagaaattaaagtggaatcaactcttcttttcttttttattattttttagttttttatttttggaatcaacacttaaaaaaagggaattgcagtaggagtgatttatgtgtgtagggcttttgacctggaaaagctctcaggtatgtgtgttgtggagtggctggagctcaaatacaaagccat

SEQ ID NO: 649236 - DNA, 495 bp, Homo sapiens
atcatccacatattgcaagaccctgacctgaggatgggaaaactcagagaggtcctttgacaatgyctgtccaaacaaatgagggattatctcaaaatccctgaggcagcaccatccattttaactgggcagtttggccagaagcattcttcaaaggcaaacaggtattgagagtcaggatgtaacagtatgcagaaaaaggcatcctttaaatctaagactgtaaaccatttagttccctcaggcatttggattagcaaggtatagggattaggtactaccagatggattgagactatggcctcattaatgaatctccattctgcattgggtttttgtgctcctaatattggggtgttgtagggactgttacagggtttaaggaggccctgcatcttcaggttattaataatggcttctagccctttcttaccctctggctttaggggatattgtctccgattaggaaaaaagtgggatcattaggatagatcc

SEQ ID NO: 649237 - DNA, 564 bp, Homo sapiens
ctcagcaaaacccaggttaggtaaattcaaagaaaatcacacatgtaatacacttctaaaaaccaaagccaggaaaattttaaagaagccagaggaaaaagatttattatatacaccagaacaatgataagaatgatagccaacctctgaatagaaacaaaggacattgtaaaacaattgaacatcatctttaaaatgctgcaggggaaaaatacctgtcagcctcaaattctataccaagtaaaaggaaaaaaaaattcttcggtgattttccacacattcagtatatatgtatatattcagagcaatgccttaaaaaaagcatgcagaggcatacttaaaaagtatataagaaaataaaaaggactgttttttaaatacttgattataaggcagaaaaggatgagtaattgaacaaatagataacaaatatcaagatgacagatttaaaaactatcgatcaataattataattaaatacaggrgtggctggcaagatggccaaataggaacagctccaatctgcagctcccagtgagaccaacacagaaggcaggtgatttc

SEQ ID NO: 649238 - DNA, 619 bp, Homo sapiens
agtgacatacttagaactataaactttaatcaggaagcctcatattagtggagaaaacaaaaattaaagtatgagatcactctcatctcagattagtgaaccatttgagacattatcttggaatctatagggagactttgtttttttctttttccttagaagagtattagagaagactttatggaagagaaaatcttaaagctgttcttttaaagttaagttagctgttattggaagaaaagtcgtccccaagttggaatagtattttccaaaatatcgactaaaagatggtaggggagaacttaatttttacttaaagaaagatgtttaaagcaatggaaagcaataaatgagacaagaattttattttattttattattttatttatttatttaatggccagaactgataaagaacttgaagctcaaactctggaacttggtttgatttgtgtatcagggaaggttttgaggaatggggtgacatgatcaaagaggcagaggggagataactttgtcagagacacatggaactgatggaaactaagaratactgaggcatgaaagctgataaagaaaaagttaaagtcatttagctaacaaatgaccaagtgctgtg

SEQ ID NO: 649239 - DNA, 548 bp, Homo sapiens
caagcctgcaggatagagccaggtgaggcaagtggtggtggagctcagagtgtcacgtaattaagtgttgttgcaaggactggaggggaagatggggtaatagatgtctgcctggagtgaagacatggcagggccaagcctgcctgcgatgtgtcccaaacctccaatgatccccaaccctgtgcaataaaagccgggtagaccaggcaactgacgaaaccccagctcctgatgaaagagggaattgttttcttctgcctkcctgctgagttgtaggattcggaacctttgtcttatccagcttaaatccctgtcactccttagcagggactcaggaggaggagttatgaggaatgtggtaaatgatgatgcgtattcccttgtggggaaaagcagcaaatgccacagtgtccctgccatgctcatgctctccttagttatggaattgctgattcctgggagttgaaaggatcacctaggttattccctctcactcagttgatgttggaatcccagctacaaggtgcctcacaagagcccctcccatc

SEQ ID NO: 649240 - DNA, 589 bp, Homo sapiens
gcatatttcaaatatcagataaaattaaagtgtttatgctatgattacactttcattttgcagatcgtgtcaactattaattgtccttcaattctgtgttaaagtccgaaatcacaattatttttaagatttggtgttttcacaagacatgcacttttcagctgaattcatgtgactctactctttaccgtaaaatcaattatttctgaaccaaaagcaatgctacaggggagagtagaatagctagaataaattgacttgggggattttggatttttaagagatctgggtttgagttcctgttcaaccactgtcaatgaccttggtgaaatcccctaacatatctgtgcccttccttcatttgtgaaatactgaaataatatcaactttgcatgctgttagatagatacagtgaaaaaawtaaacaaatatacatagcagaatgcaggtacaaattagacactctacaaatatcacgatcaattttccttatctcattttgcttgaagtctagcacatacatgtttgtgatttttatgttgttgggcagtctttaaaattttgatttcaatagctacatatgtctctg

SEQ ID NO: 649241 - DNA, 595 bp, Homo sapiens
tttagctttcaataatacctttccatgaaacacacatgaattggctttatctgaatatttgcagtgttccccttttttccaaaaatgttaagaaatcattttatgaaacaggtttcactatactatattgtcccaggatgtcatttgcatgtttactatttggttttctaaatacatttatcggtacaagttattgtacttagttgatctgcttcctctactcatcaaggtggtttatcatttgtggtgcataggtgagcaataggatctagtgtaacgcgggcttaggttcaaacccctgcatgtatagatgaaattgggttatctgcacttcttgtacctttcaatagtgggaggagagaaggaaatccatcactactggaaaatatgctctgtactctatcaactctgttgamcctcagcataaaatattttaaagcatttccctaacaaacaactctagttagacaatctgtatcataaccactacttttatctatgagacccctctgtctcttagaacatagtggtcatgggtactggtagcccatatgatgcctttaggaaaatagaaaaaaagcaaatctccaaaacc

SEQ ID NO: 649242 - DNA, 461 bp, Homo sapiens
aatgttgtgacagttaggaaccacagatagtttgaaagctaagctaaatatccctgcaaacagtctccctaccctggaattcaaataagtgaaataagtcaaatactttttatataaagtgattctttattgactattataatttgagacgtgaagatcagtggctgcatattatgaaaaggtcatcatgagatagcaatgaagataattctagggtccttttgagcttatgatttccacaagacaatgtattatacattccacctacctctgtggctgtgaggggagtrcacaagttgctgtctagaattcatctatccaggttcggattatcagtgcatggtttcttcattcttgagctcctggggatttagaaaccttagataactaaaacttgtactccataaatacactcctatttgtcatcagtgcatacctttaaatattcaaatcatcattct

SEQ ID NO: 649243 - DNA, 566 bp, Homo sapiens
gacatggtacattctagtaataggaactgctttgagtgtagaaatttaaattactctattaatatgccattacgtcttatttggttgagcaagtcagtcactttacaataactgcatcaccatgtgttctttttatggatctaataaaatgcatttagactgaaattagatccctgaaatgagccattttgctcttagacttcacctcaaccagtcttgccaaatctgtgtcattagccagaaatgccagttgatggcttggcagawaccctatactgccattcaaatgaaagtacattaatgtctcaaaggttgccatcttgatttagaatatggatgctgaagactgtgatagtgaaggaaagcacttttttctaaaaagaatattttccctgtatacattgggtttcaagaatatcaacgaaatattaaaaacaaaatattaagaaattatgtcatccagttagatgtttcccaacgttttctagtatgaagaccattttttaatgtcttcatgaacacctacatgatggtagtcatgcttttagcatcttttgattgggcca

SEQ ID NO: 649244 - DNA, 540 bp, Homo sapiens
acactgttcccagttggcttctctgcactcatgcccaaccattaactgccacgaattcattgatctggccacacagagtctcccactgttttctaaatggtccatgccttttcttgcctcaggttctttcctttttgctgttccctctacctggcttgccagtttctctcttctttgctcacactcaacgtttaaagctcacttcaaatggcscctcatctcaagagctctctccaggcagcacagatcacctgacttcatctatgcttccttcatgcttggtgcttaagctatttccatataacttatcgtttgcatgactctctgcctcaagcaactcctgaagaagaccaagtgttctttcacatcgtatcactgcttctagcacaaaggtagttcaatagcagtttgaggaattcgactgaatgagtttgtatacgtgtcatatatgctgtaacagctaaaaggctcaatgtataaaagccaacagtaacctgcaacaatgtaagagaacttcatgaaatctcttcccaaggtcac

SEQ ID NO: 649245 - DNA, 633 bp, Homo sapiens
taaaaatgatcagccagcccatcttccctatctctgagcatttcaactcaaattctggggacagccttacttttaattggcaatggaaatgtgaaactaagagtccagctataggcgtgaacaacttggccaaaggttctgctgagcaaaactctatccatcactgtaccagctaacataagcgttctatcaggacaaaaccacagtacagtgttagacatctgaggcttagcagagaagaayagaactgccacatagcctgagacatgtaccctatagaatcatggaaactggaaggaactgtccatcaaagactactgaacaggatttgaaattaaatttaaggctcctggttttgccagcctgaatattttgtttctgctgccaatctcagttctttctgagcacactggacagtcaattaaatgtagcacagtgtcaggggaatggagagctcttcccaaagatgactcattgggaagtgacagccacctctgcaaaatcgattatgaatttaaaaagcaagtgcctgggagaattcagtgaaagaggaggtaccagccccagagatgttacaaaattataccatcgtgcaataaatgatattcagatgatgcctccgagaaaccacga

SEQ ID NO: 649246 - DNA, 583 bp, Homo sapiens
gtgaacacgtccctgtgccaggagggtggtgcaccccacctccgtgagaacagaarctcctccacttaggactctttcaatcctcatcctgtgtgcctcttcttctggctattcatctgtgtcctttaccatagactttataataaagcagcatcagaaaccaggaaaccagtaggcatctccctgagttctgcaagccgttagaaccaactatggaacctaaggagagggtcatgggaacccctacacggggtcattgtggctacgtcagacagaactgtgggtaacctggggacccgctatttgtaactgatgtctgcagtgggggcagtcttgtgggactgagcccttcatctgtggagcctgcaccaactctaggtagttagtgtcctaactgcatagtagaacacacagttggagtctggagatttggtgagctgcttggtatggaaaatctgcacatttggtgtcagaagtgaagtgtgtgtgtgagagtgtagaaagaaaaagagtgtttttccctttttacttatataaccacaatactattactacacttgaaaaaataacaatcattttgacc

SEQ ID NO: 649247 - DNA, 583 bp, Homo sapiens
gtgaacacgtccctgtgccaggagggtggtgcaccccacctccgtgagaacagaaactcctccacttaggactctttcaatcctcatcctgtgtgcctcttcttctggctattcatctgtgtcctttaccrtagactttataataaagcagcatcagaaaccaggaaaccagtaggcatctccctgagttctgcaagccgttagaaccaactatggaacctaaggagagggtcatgggaacccctacacggggtcattgtggctacgtcagacagaactgtgggtaacctggggacccgctatttgtaactgatgtctgcagtgggggcagtcttgtgggactgagcccttcatctgtggagcctgcaccaactctaggtagttagtgtcctaactgcatagtagaacacacagttggagtctggagatttggtgagctgcttggtatggaaaatctgcacatttggtgtcagaagtgaagtgtgtgtgtgagagtgtagaaagaaaaagagtgtttttccctttttacttatataaccacaatactattactacacttgaaaaaataacaatcattttgacc

SEQ ID NO: 649248 - DNA, 583 bp, Homo sapiens
gtgaacacgtccctgtgccaggagggtggtgcaccccacctccgtgagaacagaaactcctccacttaggactctttcaatcctcatcctgtgtgcctcttcttctggctattcatctgtgtcctttaccatagactttataataaagcagcatcagaaaccaggaaaccagtaggcatctccctgagttctgcaagccgttagaaccaactatggaacctaaggagagggtmatgggaacccctacacggggtcattgtggctacgtcagacagaactgtgggtaacctggggacccgctatttgtaactgatgtctgcagtgggggcagtcttgtgggactgagcccttcatctgtggagcctgcaccaactctaggtagttagtgtcctaactgcatagtagaacacacagttggagtctggagatttggtgagctgcttggtatggaaaatctgcacatttggtgtcagaagtgaagtgtgtgtgtgagagtgtagaaagaaaaagagtgtttttccctttttacttatataaccacaatactattactacacttgaaaaaataacaatcattttgacc

SEQ ID NO: 649249 - DNA, 583 bp, Homo sapiens
gtgaacacgtccctgtgccaggagggtggtgcaccccacctccgtgagaacagaaactcctccacttaggactctttcaatcctcatcctgtgtgcctcttcttctggctattcatctgtgtcctttaccatagactttataataaagcagcatcagaaaccaggaaaccagtaggcatctccctgagttctgcaagccgttagaaccaactatggaacctaaggagagggtcatgggaacccctacacggggtcattgtggctacrtcagacagaactgtgggtaacctggggacccgctatttgtaactgatgtctgcagtgggggcagtcttgtgggactgagcccttcatctgtggagcctgcaccaactctaggtagttagtgtcctaactgcatagtagaacacacagttggagtctggagatttggtgagctgcttggtatggaaaatctgcacatttggtgtcagaagtgaagtgtgtgtgtgagagtgtagaaagaaaaagagtgtttttccctttttacttatataaccacaatactattactacacttgaaaaaataacaatcattttgacc

SEQ ID NO: 649250 - DNA, 310 bp, Homo sapiens
tttcaggtgctctagataatacctcaggtcttgaatcttaattgtttcatatatatatatatatgtatacacacacatatatatacacacatatatatacacacatatatatacacacatatatatacccacatatatacatatatacacacacacatctatacatatatatacccacatatatatatacatacacacacacacacacatatatataaaacatcagtcctgtaattggcctgtgtttgtcttttgggtgtgcagtattccaggmactccctaaagctttggaccctcagggataaggagt

SEQ ID NO: 649251 - DNA, 573 bp, Homo sapiens
tagaatgtttgaaagtctaagaaaggactgtttttcagttcagacctagatcaaacagcattcagttgttctaataaaccagagtatcacagggaccattgtgaaaaatgaaagtgccagggcctcacttctaatgatcgcacatctaagatgaggtctgaaaacctattcgcaaaagaatgtatttataaagatgtttctmcaataattctgattcatggccaggcttgggaaacacttcttagaaaactcatgaagtacaggaaaatctttgtctagtcatgttagatggcaaatggcagggagagaatggggagatgactagataaagctaatactatgggagcagagtgaccttgtgtcagataatctgtcactgatcatgaagacttaaaagtgtaacacaagaaaaaaaaaaaccttggctacacattcttgtctggcataattaggtcactgcagtgctcatctggggaatttatctgtagttaactggcaaatagtttgtattttggcaattctgacttaaactatagcagttagctttgagtatttccatataatatatgacca

SEQ ID NO: 649252 - DNA, 573 bp, Homo sapiens
tagaatgtttgaaagtctaagaaaggactgtttttcagttcagacctagatcaaacagcattcagttgttctaataaaccagagtatcacagggaccattgtgaaaaatgaaagtgccagggcctcacttctaatgatcgcacatctaagatgaggtctgaaaacctattcgcaaaagaatgtatttataaagatgtttctacaataattctgattcatggccaggcttgggaaacacttcttagaaaactcatgaagtacaggaaaatctttgtctagtcatgttagatggcaaatggcagggagagaatggggagatgactagataaagctaatactatgggagcagagtgaccttgtgtcagataatctgtcactgatcatgaagacttaaaagtgtaacacaagaaaaaaaaawaccttggctacacattcttgtctggcataattaggtcactgcagtgctcatctggggaatttatctgtagttaactggcaaatagtttgtattttggcaattctgacttaaactatagcagttagctttgagtatttccatataatatatgacca

SEQ ID NO: 649253 - DNA, 578 bp, Homo sapiens
tagtcattttgtatatgacagatcacaggagaaagagttggaagctataaaagtggataagaaaaaaatgactgaaatataacaaattgttaagggccaagaatggacttgcatttataattctgtgcaaaccaggtatataagaagttcacactttttgccgtcactctaccatgggccttcactgggtaggtattgacaagaaatrtttacagtagaaaactgagactgtcccctttgaactatgaatattcaaggacttgacaaggtctgagggaagaacatatggtactggagaaactaacttttcatatggaaagaaacttgaaaaatttcttccaaacctacacaaaatgatcatgaattggtttgtgagacttgaagtaaaacctaaaactataaaagttttagaaaaaaatatatttagaaagaaacattcaaggctttggaggagacagagaatttttaggctacaaggagcattattataaaagaaaatatttgataaatcagaatcaataaaacataattttctactttttgtaatacattattaagaaaatcaaaagacatgacag

SEQ ID NO: 649254 - DNA, 578 bp, Homo sapiens
tagtcattttgtatatgacagatcacaggagaaagagttggaagctataaaagtggataagaaaaaaatgactgaaatataacaaattgttaagggccaagaatggacttgcatttataattctgtgcaaaccaggtatataagaagttcacactttttgccgtcactctaccatgggccttcactgggtaggtattgacaagaaatgtttacagtagaaaactgagactgtcccctttgaactatgaatattcaaggacttgacaaggtctgagggaagaacatatggtactggaraaactaacttttcatatggaaagaaacttgaaaaatttcttccaaacctacacaaaatgatcatgaattggtttgtgagacttgaagtaaaacctaaaactataaaagttttagaaaaaaatatatttagaaagaaacattcaaggctttggaggagacagagaatttttaggctacaaggagcattattataaaagaaaatatttgataaatcagaatcaataaaacataattttctactttttgtaatacattattaagaaaatcaaaagacatgacag

SEQ ID NO: 649255 - DNA, 570 bp, Homo sapiens
ctatgttgcccaggctgttctcaaacttctggcctcaagtgatcctcctaactccatctcccaaactactaggattatagacatgagccactgtgcccagtcaaatcttgatttatgactatatacattttttgaaaatttaccaaactgtacacctaaaaatggtgaatgttattgtatgtaaattttaccataatttaacaaaatgacttcaacatagctttgttttccagagtgatttaggaaaaagtcctaaaagaactatacaattttaataagactacactgaacacaaggattacagtatcaggaaaagagactttctcttttaagcaatatctttaaatgggctataatcatattttaaatgcaccataattatattatacattttctattttttactgtcaaatgagttatgaaggtaaatgtgtaattaggtttatctgtgtttgttatattttttacaaaaataagtcrtagtcttatcttgttaagttgctattttttcacataaacaggtcatagtcttttcaataattgtcattctctaaaaagaggtagttcatt

SEQ ID NO: 649256 - DNA, 561 bp, Homo sapiens
gctggcaaggtaaaaagacagccctcaccagaatctccaacttccaggctccaggacaatgagaaaataagtgtattgtgtaatccaatcagtattttatggtattttttaatggtactttttatggcagcctgagctgactaggcttaccttgtttcactgaactcccaagcattatgggtacaccaggattctgttctcatggatcactgcaaacactatatgcaagtgagcagcaagaaacagtggatacatatatggcactatattgaacatgttaaccttgctcacataatgccctattgtcccaacaaactttgattataamacacaagttcataataaaattattaagaattttaaggtactgagtttaaagcattacaccagtacagggaccatctgagtgtagggccttatgtgactgatgtatgtagcaatgtaggttgcctgcttataaaacagaccctggttgtaatcacttgtatatggaactgaagaagatcataatctgtcttcaagtaacaactgatactaagctagaacataaatacaattaac

SEQ ID NO: 649257 - DNA, 641 bp, Homo sapiens
acaaaaggaagatttgatagttgaatggaattaatggttttagatgatgtrttagatcttttcctctgtagaacacctaaaaatgaatatttccagaatccagaagggaacttatcatatctgagcaaagctgtttttcattctatttagaaaatgcatgttttatataagaccttgcagccattcctttaccctttgcatgattatcttctcttttaatgctttctctctccttagtggccttttaggtcatgctagctgagagaagattactgctgacaatacacacttcccaccacccttctctaaatgtaaatcttcacttgcattcaaaggcaaacatttacccctgggccttgcagtaatagaaataaagtttactatcttacatgctacccttactcaaagctgactcagccatccatagagttgcctatttgagaaccgcctttacttatcagtacaatgctttgggagagtagagttttgtgtgaactctcattatgagtccttcaattggcatgataaaaaccaaagccacgttaaggaaataaactgcatctatctgctatcgcacattgagaacattgaattagagggccatgttatgcgaagaaaggtggggagatggagattctgaa

SEQ ID NO: 649258 - DNA, 641 bp, Homo sapiens
acaaaaggaagatttgatagttgaatggaattaatggttttagatgatgtattagatcttttcctctgtagaacacctaaaaatgaatatttccagaatccagaagggaacttatcatatctgagcaaagctgtttttcattctatttagaaaatgcatgttttatataagaccttgcagccattcctttaccctttgcatgattatcttctcttttaatgctttctctctccttagtggccttttaggtcatgctagctgagagaagattactgctgacaatacacacttcccaccacccttctctaaatgtaaatcttcacttgcattcaaaggcaaacatttacccctgggccttgcagtaatagaaataaagtttactatcttacrtgctacccttactcaaagctgactcagccatccatagagttgcctatttgagaaccgcctttacttatcagtacaatgctttgggagagtagagttttgtgtgaactctcattatgagtccttcaattggcatgataaaaaccaaagccacgttaaggaaataaactgcatctatctgctatcgcacattgagaacattgaattagagggccatgttatgcgaagaaaggtggggagatggagattctgaa

SEQ ID NO: 649259 - DNA, 291 bp, Homo sapiens
agctaagatcaaaaggattatgtgtggatgcaaatagacttaagtagtgaaattattttttaaaggaaatctctaacagaaatcaaaagataatttttttgtaatgatgtaatgtctgactcagctgaacctgcagtattctayctgcaaagtaactacaataaaagaagacagagaggccccatttccccatgagatatcttggtgtacaactactttattaactggctttaatgtgcacattggttccccgaaaataaacatctatttcaggtttggagatgtgatgtg

SEQ ID NO: 649260 - DNA, 574 bp, Homo sapiens
tctgaaaaaacatatgattctggttaaatttaaggactcttggatcctgcaggcccagatattcataccttgagcagccatgcaaatgagagtgtcatcatttcaaagttcaataggaagaaaatgaagcagctgctatttaattttttayggagcctacaatttgtctcattagtgggcaaataggacaggctgggaactaaaagctatctaggcctcaactctgcaggacagaaaaaaagtgatctgtatcaaatcactcactcgggctcctggggatagggttagactggctggtgctggggaaagggcacctggctccaaatcctggctgctaggcaggctccatcacctcactgatacatgacctttggcaaagtacagaaggttccagagcctcatgaccgtatctaaaaacagaggaatttggaattaccctgtccatctctcagagctgtggagcacctgggaggcaagaatccctggtgctttgaaaactccaaaaggctgttcaaatgcaatttgagaatgacctggatacctggattgttaaactgaggcccaagggtagcag

SEQ ID NO: 649261 - DNA, 430 bp, Homo sapiens
tgaaaataatcaatcctaaaacccccaagcatactgctattgtttgctattgaataatgttttctagtctgggtgtggtggcacctgcctgtaatcccaacactttggaagatccaggcaagtggatcacctgaggtcaggagttcgagatcagcctggccaacatggtgaatccccgtctctacaaaattacaaaaaattagcaagccatggtggtgcatgctggtaatcccagcttcttgggaggctgaggcaggagaatcctttgaacctgggaggcagaggttgcagtgagatgagatcatgccattgcactccagcctggactacagagacaaattccatctcaaaaataataataataatgttttctacaagcaaggggttactttatactgggaactggtgtgmagggattcaccatgtgtaa

SEQ ID NO: 649262 - DNA, 453 bp, Homo sapiens
ccattcctttcctttcgcttgcattccattctattctcttctactgcatacaatttcactccattcgttcccattccattcaattccattccattcaattccattccatttgtttccattctcttcgattccatttctttatattccatgccattcgattccattctattgggttgcattacattcgtgttcattccattccagaccattccatttgactccattcctttcgagccctttcaatttgagtccattcctttccagtccatttcactccagtccattactatccattccataccattccatyccattccatctcattccattccattccattccattccattccattccattccattgcattccattccattccattccattgcactgcactccattccattacattctactctatctgagtcgattttattgcattagattcta

SEQ ID NO: 649263 - DNA, 587 bp, Homo sapiens
caaaacaaaacaaaaatccactacagcttgaaattcttcatgaacaaaaatcttcaacaaaattagggagccaaattaaagaacatcttgaaggaatcattcaccatgattatgaggggtttatccttgggatagaaagatggttcaattcaacgcacacaaatcaataaatgtgatacaccacattaacaaaataaaggakaaaaattatatgatcatctcaatagatgcagaaaaagcacttgacaaaattcagcatctcttcatgatcaaaacacttaacatattaggtatagagggaatgaatgtcaatacaataaaaaccatatacaacaaacatgcagccaaaatcattctcaacaggaaaattaaaagtgtttcctcttagatcaaggaaagagacaaggctgcccattgttgccacttctttttgacatataactgaaagttctagcagggaaattaggcaaaaataaaataaaataaaataaaataaaataaaataaaaggcatcacaataagaaagggaaaagtaaaattatctctattttcagatgacatgatctgatatgtagaaaatcctaaag

SEQ ID NO: 649264 - DNA, 608 bp, Homo sapiens
cacaatgcacaaatgattactttattgcgtattaaatatataaggtgattgatatgtattaggttcttacaatattccaagaattttatattttacactcagagaaaatacactaatattacttaccatgccaaactgaggcagattgtattttccaagatgtctgcaacaagctttcttatcttgtacactcatctaataatgtggcattgactcatttctattaagaagtgctttcctcaaagctgtgtgctggagatattaaaaaagaaagaaagaaagaaagaaaaatgaagagctttccttcctcttgaatctaggaagtcctatgactatkgtagaaatgatgttatgggacttccaaggctagattattaaaggcaatacagcttccatctgtttctctcagagctttattcatggaaaccagctgtttcctcggagcccaggccacatgcatgaaccacatgtagatgttccagtcaaattttcagctgaggtaccaaatgacagccagcattaatgccagtcatgtgagtgaggaagcctttgaaatgacaccagtctgggctgccataaaaccaatgtccaaaatgaggaaattgtgt

SEQ ID NO: 649265 - DNA, 648 bp, Homo sapiens
atagtattctgggtattttttacattacatttatcacattgttgtttcatagctattgttatggtcctttttaaagaaaacacatacttggcayttaatacatgattattgaataagtacaagagtatcttggatctagaatgattttcaaacctgtagagacatacacatcatcatgctttagaattataagcaaatgactaaagtgggctctataaagttttaggtatgataataatttgattaattttgccttttgaaaagatatttgaaatatagattcatgtatacatttaaaaaccttctcaatttgagaatgaaaatcaagatgaaaaatcgcagaagtgaggaagataatttagtggaaatagaaataaaaattgaaaccacctgaaaacaactaggaattcactatagtgtcgcatgattacggagaagagaaatgggttactccgtatattaatacattcattccttcatttatttatgtattcacttattcaatatgcttcttttcaagcattggttacatgtgtcatgatgggaacaatgggaacaagcgagacagagcctgtcttcaggcttgtgggttggatgtgtgcagtgaaaacccagcgaatgtgcatcaaaccttgaatttgatgcatg

SEQ ID NO: 649266 - DNA, 640 bp, Homo sapiens
atgcaatcattaaattggctacagctaattcttggttcagttgaggaggccatcgttagctattagtacatgagaataatgaacacagaatcagcaaaccaaagggtggcattcatgggagaagacattttccgagtttttctggttcaacctctagaaagtttatatggccaaaccagataatatattatattggactgaatattctcaagaatttgttcaaatttttgagcacttatatattcttacgatcaagttaggaaataaagttttctgtttgaaatattaactattgaagagacaaattttagttacatataaaccattgcctgrtagagcctggaaaaaaaagttcaatttcagtttaaattctgagacatctgaataatgcatttatgtgctcattagacatataaataaactacattgtttaaagtccagagtattacctccttttggaataattctccacttagcaagaccagaggtacatctcaaattaaatttttctctaatgtttcacaattagctaatgatgtttacattaccatcttctagtatgacatgttggtaaagatgtaagaaatatgtgctgcctgagttggggtcactacagaggcagactctgggataaaaaatt

SEQ ID NO: 649267 - DNA, 552 bp, Homo sapiens
aaatcaaccactatactgtaaaggtttcatttttattttattttaaaaagtaatagttactttaaaacttcttgggattaaaaaagtatatctgagaatgaataataattaaattagttttcccattgtagtaataaaaatattaataaaagcattaatgagagtgttaatgacaacaataataataatagctagcagcattttttttcattcattaaaaaacctatatcaggcaatttctttttgccaagtataatttcaggcactacggcttyaatagttaatgaaatagacaaatatctctgtgtgcggctttaatagttaatgaaataagacaaatagctctgtccatacgaagcttatattttgctgaaatatttacataatgcttactatgttccaagtattctcctacttaccatacatatatatgcattacatatattgactcatttaatccttttaaattgctctaagatttggcactacttttattctaaatttataattgaagcaaatgagttataataagtttaagaaatttgaacaggg

SEQ ID NO: 649268 - DNA, 529 bp, Homo sapiens
tcagaagggaccagctggaggtgaggagctggaggtggtgagcggggtgtggaccaggtagagggccttcctcccagcctccatgccgggaacacatgtgacttgggctgtacctgtggtggtcccagcttgygtgtgtgcacgtgcctcagatgtgctcccatatatgttgtgttcccaagagtttctggggagcttgctgtacacccatcctcctgggagtggtgtgtgcctctagagctggtgtccactcatgtccatggcatggctgagcatgcagattcctggacgccacccagccctacagaatctctgaagtggagcccgagaatctgcattgcagtcagttccctgggagggcatcacgggtcctgaacttttgggattgctggccgtggagacaggccgctgcctctcagacccctgtgtaccccgctctcttctcagagcccagaccaggaccaggagggtctgtcaagggcttctgctcacccaggaaccccacagagcagccacgggccttccagag

SEQ ID NO: 649269 - DNA, 550 bp, Homo sapiens
agatctacatcttccagggagaggcagctgagatcagaagggaccagctggaggtgaggagctggaggtggtgagcggggtgtggaccaggtagagggccttcctcccagcctccatgccgggaacacatgtgacttgggctgtacctgtggtggtcccagcttgtgtgtgtgcacgtgcctcagatgtgctcccatatatgttgtgttcccaagagtttctggggagcttgctgtacacccatcctcctgggagtggtgtgtgcctctagagctggtgyccactcatgtccatggcatggctgagcatgcagattcctggacgccacccagccctacagaatctctgaagtggagcccgagaatctgcattgcagtcagttccctgggagggcatcacgggtcctgaacttttgggattgctggccgtggagacaggccgctgcctctcagacccctgtgtaccccgctctcttctcagagcccagaccaggaccaggagggtctgtcaagggcttctgctcacccaggaaccccacagagcagccacg

SEQ ID NO: 649270 - DNA, 550 bp, Homo sapiens
agatctacatcttccagggagaggcagctgagatcagaagggaccagctggaggtgaggagctggaggtggtgagcggggtgtggaccaggtagagggccttcctcccagcctccatgccgggaacacatgtgacttgggctgtacctgtggtggtcccagcttgtgtgtgtgcacgtgcctcagatgtgctcccatatatgttgtgttcccaagagtttctggggagcttgctgtacacccatcctcctgggagtggtgtgtgcctctagagctggtgtccactcatgtccatggcatggctgagcatgcagattcctggacgccacccagccctacagaatctctgaagtggagcccgagaatctgcattgcagtcagttccctgggagggcatcacgggtcctgaacttttgggattgctggccgtggagacaggccgctgcctctcagacccctgtgtascccgctctcttctcagagcccagaccaggaccaggagggtctgtcaagggcttctgctcacccaggaaccccacagagcagccacg

SEQ ID NO: 649271 - DNA, 550 bp, Homo sapiens
agatctacatcttccagggagaggcagctgagatcagaagggaccagctggaggtgaggagctggaggtggtgagcggggtgtggaccaggtagagggccttcctcccagcctccatgccgggaacacatgtgacttgggctgtacctgtggtggtcccagcttgtgtgtgtgcacgtgcctcagatgtgctcccatatatgttgtgttcccaagagtttctggggagcttgctgtacacccatcctcctgggagtggtgtgtgcctctagagctggtgtccactcatgtccatggcatggctgagcatgcagattcctggacgccacccagccctacagaatctctgaagtggagcccgagaatctgcattgcagtcagttccctgggagggcatcacgggtcctgaacttttgggattgctggccgtggagacaggccgctgcctctcagacccctgtgtacccygctctcttctcagagcccagaccaggaccaggagggtctgtcaagggcttctgctcacccaggaaccccacagagcagccacg

SEQ ID NO: 649272 - DNA, 620 bp, Homo sapiens
tataacacgccccgtctcttacattggggatcaaatttcaacataaaatttgaggagaaaacatacaaactgtggcatttggctctagccctccaaaattaatgtccttctcacgttgaagaatacaatcatcccttttcaatagtctccaaaagtcttaacttgtttgttccattatcaactcaaaaaagttcaaagtccaaaatctgagactcaaggcaaattatttagtcgtgaacctgtacaatcaaaaacatattatttactttaagatgtaatggctgtacaggcattgggtagacattcccatcctaaaagcgagaagttggccaaaagaaaggagtaataagccccatgcaagccccaaacccagcaaggcagacattaaatcttaaagtttcaaaataacttgcttcctgggctttactaggtactgctgtagtagaggatttctgaagaggctcttctcttctggmaggctactgctgggcacctatgcattccaatacatcctctgaaatctcagcggaagtcaccaagcttccattctgggcaactctgaagacaataccacatggctgccaagacttactgcttttgttctttggagcagtgcccaa

SEQ ID NO: 649273 - DNA, 480 bp, Homo sapiens
agcaggcaactggattctcatatctgtctttgcatttattctgttgtggtatcatgtgtcatgtagcctctggaaaactccactgtacacttgtgaggaaatgatagtgaaataggcaatttatgtctttgtatagttatagaaatagttttgaccttgtggatctactaaaagagtctttgggaagctcaggagtttgttgaccaaactttgagaactgctgctctaagccactggctttcatttcatttttgaccatgactcccagtaagaaataaatttwataaattatgcccagaacatacacaagtacatatatgagcacacatctgtctgcatatttataactcaaacaaaagtttcatttttactattggccatttactctaacatattctgtatttttcattttgtttaatttcatttaaaaattgctgggttgtgatttaaaacttgatttcacatggattgagacccaca

SEQ ID NO: 649274 - DNA, 480 bp, Homo sapiens
agcaggcaactggattctcatatctgtctttgcatttattctgttgtggtatcatgtgtcatgtagcctctggaaaactccactgtacacttgtgaggaaatgatagtgaaataggcaatttatgtctttgtatagttatagaaatagttttgaccttgtggatctactaaaagagtctttgggaagctcaggagtttgttgaccaaactttgagaactgctgctctaagccactggctttcatttcatttttgaccatgactcccagtaagaaataaatttaataaattatgcccagaacatacacaagtacatatatgagcacacatctgyctgcatatttataactcaaacaaaagtttcatttttactattggccatttactctaacatattctgtatttttcattttgtttaatttcatttaaaaattgctgggttgtgatttaaaacttgatttcacatggattgagacccaca

SEQ ID NO: 649275 - DNA, 548 bp, Homo sapiens
tatttatagcattttccccaaagcttgcttttggggagtgtaactatattcagagttttatttgagargttgacatttatttcttttaaaagtgaatgtaaacttctggccatgagtaaatctattacagccaggttctcccacaaccaagaattctggacaaaatacaaaaagcaaaccaactggggactctgaaaagtcaataataacaggccgattgagagggaagttggaatatgaagaatcactgatatagtggcaggaagtttcctggttttctgtttgtgttttttttcttccttaactcccagctttgactccagggtgggccaaattgagggattgtgtagcaggcatggatggcagaaacttacagagcagcccatctttttggccagagaagtgggagaatggaagaatgtgaggggatttttttttttctttcttggccctgcctctagaccagccccagtggaaaaactatgctattgtggtataagggcagcagttagcgcccatctgtttggctggatcaacagataaaagaa

SEQ ID NO: 649276 - DNA, 613 bp, Homo sapiens
ccagggagaagttgggactgggggtttccacctgctagttctgagctggtgggaggggctatggtcagttactgcatactagtccaaactggaggcttcgttctcagcagttcccaacctgggaccctttcctgtcacagctaagattcaggcaagacagcaacaagtcccttaagtaaccttgcttatggcgcaagaggattccacaaattttcctactggcttcagtgtggttggtttcatgcttgcctggagtacaggagcctctcatctggtctctggatgtctcacaaaggaaattttggtctatgtattgttgttgaatttatgtgtccattgagagaaggagagtcttgctgacatctgacgtcaccccctaaagtaattttcttttacaggaggacatttgattggtcttcctttaggctttatatctatatatctatatctatatctatatctatatatartatcattccttatttctttatctgtacagggataagtttatatttttctagtattaagaatcagcattgatactttgagagtgtttgtgaattcctgttgaaatattttctcattaggaaaaagtgaaagggaaaatttatat

SEQ ID NO: 649277 - DNA, 593 bp, Homo sapiens
aaaaagggagatattttaattgttactaggtgaagaagaatgatttagacatgaaataatttaactgccaggggagagggaaaatatcagaaagtacactgaaatgatttttcctgtttaatgtctgtatctaggaaataattgaaaagtgccrcctgaaatgtctctgaaacagagaagccatagtaaagtcatctcagaagtttgtacataataactgcaacaactaaacaaggtagttacaaaatctttggaagaattttagagggtgtgagtgagagaatcagctaagcattagtaaatgaggtatcaagagattttaagtaaggagtacagttttgataggtaaggagatgtttaaaataccatatacagttaaaggcagaactaataatctaagatgtccatctcttaatcttaagaatctgtaaacttacatgtaaaaaacaaaaaagaactttgcagatgtgattaagattatggaccttgaggtaggggaattaacttggattatccacctgggttcaacctaattacatgaatccttaaaatgaagaacctttcttggctgtagtcagtgaaagagatgtgat

SEQ ID NO: 649278 - DNA, 591 bp, Homo sapiens
agactgcttagtcggccgggcgcggtggctcwcgcctgtaatcccagcactttgggaggccgaggcgggcggatcacgaggtcaggagatcgagaccatcccggctaaaacggtgaaccccgtctctactaaaaatacaaaaaattagccgggcgtagtggcgggcgcctgtagtcccagctacttgggaggctgaggcaggagaatggcgtgaacccgggaggcggacgttgcagtgagccgagatcccgccactgcactccagcctgggcgacagagcgagactccgtctcaaaaaaaaaaaaaaaaaaaaaaaaaaaaaaaaaaaaaaaagactgcttagtcaatctgtaataattctggggagttcagtgaataagtaaccttgagcaatttttcgaatcctctgttgacctcagttttatatccgtacaacagaggtaatgattgtacttgtctcatagacctgttaccaggattgagtaggttaatgtatgtctagctcataaactacacacacaagatgttatctaacctgcctaaagaaggtcttacaacctattaagatactacaaccacacataaaattat

SEQ ID NO: 649279 - DNA, 591 bp, Homo sapiens
agactgcttagtcggccgggcgcggtggctcacgcctgtaatcccagcactttgggaggccgaggcgggcggatcacgaggtcaggagatcgagaccatcccggctaaaacggtgaaccccgtctctactaaaaatacaaaaaattagccgggcgtagtggcgggcgcctgtagtcccagctacttgggaggctgaggcaggagaatggcgtgaacccgggaggcggacgttgcagtgagccgagatcccgccactgcactccagcctgggcgacagagcgagactccgtctcaaaaaaaaaaaaaaaaaaaaaaaaaaaaaaaaaaaaaaaagactgcttagtcaatctgtaataattctggggagttcagtgaataagtaaccttgagcaatttttcgaatcctctgttgacctcagttttatatccgtacaacagaggtaatgattgtacttgtctcatagacctgttaccaggattgagtaggttaatgtatgtctagctcataaactacacacacaagatgttatctaacctscctaaagaaggtcttacaacctattaagatactacaaccacacataaaattat

SEQ ID NO: 649280 - DNA, 541 bp, Homo sapiens
ttccactgtgtacatctccaagcacttctcattgccctgacctatgagctcccctgggcaccggttcgtgtagtccacaggggcctcatctaggtagcagaagtctccagggctgggacccttggccagggccatgtaggcatacatgttgtacttcttcaaaaatcttgcaatggcctcgttttcctctggactcctagggacagcaatgcagctgcctgctctggcacatgcctcactaatggcatctaaatagaccaactgcctgttkgtgaagaagaccttctctcccactgccggtatggagccctgaagactgagggctgagagcagaggagtctgggtcaggcctctgatcactttgtctctaagccacctccctcacctgggctgtctgccatcaggctctctgcagcctctccatctctgcctctgtgtcgtttgtccctcccccaatcctagttttccaaattctcttctaggctctcatccatttattcattaatctatttaacaattacttattgccagaaatggtgca

SEQ ID NO: 649281 - DNA, 541 bp, Homo sapiens
ttccactgtgtacatctccaagcacttctcattgccctgacctatgagctcccctgggcaccggttcgtgtagtccacaggggcctcatctaggtagcagaagtctccagggctgggacccttggccagggccatgtaggcatacatgttgtacttcttcaaaaatcttgcaatggcctcgttttcctctggactcctagggacagcaatgcagctgcctgctctggcacatgcctcactaatggcatctaaatagaccaactgcctgtttgtgaagaagaccttctctcccactgccrgtatggagccctgaagactgagggctgagagcagaggagtctgggtcaggcctctgatcactttgtctctaagccacctccctcacctgggctgtctgccatcaggctctctgcagcctctccatctctgcctctgtgtcgtttgtccctcccccaatcctagttttccaaattctcttctaggctctcatccatttattcattaatctatttaacaattacttattgccagaaatggtgca

SEQ ID NO: 649282 - DNA, 356 bp, Homo sapiens
gcatgtatcaggaatgtcatgtttcctttcagcctatgaaagaaattcacccactggaaacatagagctgtgaycatcaacaaaaaaataaactcaaaaagcttgtttcatttactttgaaatccatttgaaaaattgactgacggatggagggatagatggagagatatgtgacaaggcagtatttagggtaaaatgttaacgacaaaaattagatgatgggtttaacagattcaatgtcaaattctttcaacttgctatatatttgaaactactcataataaaatttggaaggaggagaaacttgctttgatccaagtgtcatctgcctcactagaccattttcattaattttc

SEQ ID NO: 649283 - DNA, 284 bp, Homo sapiens
cacgaggatgccattattttggtttttatgttgmagatgtgactaccacttaattagtactcaaattggagtggcaaaccagaaagtcacagctacagactttcagtggagctgactcgcccgtgtctccttcctgttttcatgtgttgcagcctgttctcttcagagcctgacacactgacagtagacctctgcaggacaactttgacacccagttctctccaagctgccagtgagctccctgtgcagcctcactcctcacctacagcatgagcccttgcagc

SEQ ID NO: 649284 - DNA, 467 bp, Homo sapiens
ttggagatgaaaggatagcaaagaggcctagatgaaaccagatgggccatttgtttctaattatagaagctgagtgttaaatatgtacaaatttattatactatgctccctatttttatgtgcttcagaacgtccataataaaagtggggggaggatatttatggttaagaaattaaaggaggccggccgggcgyggtggctcacgcctgtaatcccagcactttgggaggccaaggcaggcagatcacgaggtcaggagatcgagaccatcctggctaacatggtgaaaccccgtctctactaaaaatacaattgtgccactgcactccagcctgggcaaaagagcgagactccgtctcaaaaaaaaaaaaaaaaaaaaaaaaaattaaaggaggccaggcatgattgctcacacctgtaatcccagcactttgggagggcaaggcaggaggattacttgagacca

SEQ ID NO: 649285 - DNA, 446 bp, Homo sapiens
aaaggatagcaaagaggcctagatgaaaccagatgggccatttgtttctaattatagaagctgagtgttaaatatgtacaaatttattatactatgctccctatttttatgtgcttcagaacgtccataataaaagtggggggaggatatttatggttaagaaattaaaggaggccggccgggcgcggtggctcacgcctgtaatcccagcactttgggaggccaaggcaggcagatcacgaggtcaggagatcgagaccatcctggctaacatggtgaaaccccgtctctactaaaaatacaattgtgccactgcactccagcctgggcaaaagagcgagactccgtctcaaaaaaaaaaaaaaaaaaaaaaraaattaaaggaggccaggcatgattgctcacacctgtaatcccagcactttgggagggcaaggcaggaggat

SEQ ID NO: 649286 - DNA, 506 bp, Homo sapiens
gtattcacatatttagagtcacagtcaatttaatgtgttacccaataaactgatgtaatcataagttttaatatgtataaagaccaggaattggggttttctggtgtaaataagaatctagtaactgtgacttcacaaatgctgtgaatgttttgaaacttaatgggtaagggagtacagtgtgaatatagtttactgtagaccttggctggatatgatgtgtgaatttctctgcttctatctaaaagggtgttttttttttttttttttttttgcacaaaaagaggcgaaggaagatctggaaaacaggaatggataaaattttccaaacaatagctrtctttgttgagtgaagactgactacttgaattttaaatttctattattaggatgtaattaatcttacagtgacactaactgggtttccaaaaacagtttaacccccaggatacaagcaatatcctagtaaagcactagggtcatatgcaacctcccagctgaatcca

SEQ ID NO: 649287 - DNA, 545 bp, Homo sapiens
tgaaaggagtcatcatctaatggaatcgcatggaatcatcatcaaatggaatcgaatggaatcatcatcaaatggaatckaatggaatcaatgaacggaattgaatcgaatcgtcatcgaatgaattgaatgcaatcatcgaatggtctcgaatggaatcatcttcaaatggaaaggaatggaatcatcgcatagaatcgaatggaattatcatcgaatggacccgaatggaatcaacatcaaacggaatcaaacggaattatcgaatggaatcgaagagaatcatcgaatggccacgaatggaatcatctaatggaatggaatggaataatccatggacccgaatgcaatcatcatcgaatagaatcgaatggaatcatcgaatggactcgaatggaataatcattgaacgcaatcgaatggaatcatcgagtggaatcgaatggaatcatgatcaaatggaatcgaatgtaatcatcatcaaatggaatccaaaatcaccatcatcaattggtactgaatggaattgtcatcaaatggaattc

SEQ ID NO: 649288 - DNA, 432 bp, Homo sapiens
ttctagattcttttttctgtattcatttagagatgatttacatttatttaatgatagaatgggaatacaatgggagggaagcaatgactgagacaagccacaaaaacacatctagccttgagakttgcaacgaatattcccagccaaatgagtctgtttaatgtgttttcatgcatgcaagtttatctgcttagctcaaactgtttgaacttacagtcccatcatagttatttccaatatttttgaaaacaaacatatacttacacatattttaaaaaatcaccattctgcaatatttctgttgaatcagaccttacattatgttgtttaataaagtatggtaagttttggcatgtatgatttttatcatataagaagcataatttcttagccaaaaatttagcctttgactctttagtagaaagttgagtt

SEQ ID NO: 649289 - DNA, 439 bp, Homo sapiens
ttttctgtattcatttagagatgatttacatttatttaatgatagaatgggaatacaatgggagggaagcaatgactgagacaagccacaaaaacacatctagccttgagatttgcaacgaatattcccagccaaatgagtctgtttaatgtgttttcatgcatgcaagtttatctgcttagctcaaactgtttgaacttacagtcccatcatagttatttccaatatttttgaaaacaaacatatacttacacatattttaaaaaatcaccattctgcaatatttctgttgaatcagaccttacrttatgttgtttaataaagtatggtaagttttggcatgtatgatttttatcatataagaagcataatttcttagccaaaaatttagcctttgactctttagtagaaagttgagttctgtacattgtgttctaaa

SEQ ID NO: 649290 - DNA, 547 bp, Homo sapiens
ttagtaaataaataactacagttgacccatgaataatgtgggggtgagggactctgatccctgtgcagttgaaaatctgagtataacttttgattccttcaccttagctactaatagcccacaattgactggaagccttcctgataacataaacagttgatgaacacctattttgtttgtgctgcattattatatactgtgttcgtacaataaaataagctagagaaatgaagctgttagaaaggaaatcatcaggaaaaacatattgacttttcataaagcataagtagtcctgacaaaggtcttcatgatcttcaggttgattaggctgaggaggaagaggagaggtggatcttgctgtctctctgttgcagaggcagaagaaaatctgcatataagtgaatccctgcagttgaaacccttgctgttcaagggtgaactgtattacatattgatttgtgtcactaagaaagtaactatctttagaaccgggaactcagcaatccctttctggtaccrtaaataaatggcaataagaactgtagaa

SEQ ID NO: 649291 - DNA, 430 bp, Homo sapiens
aagagtactgggctttaacatgagttcaaatctcatttctgccaattcctatgtctaaaaaaaagcatcctaatctctttgagcctcacattctctatctagagaatcatttgaccagaatgttcaacacaggtaaaaatactagaaggtattttaattcattccaagattccttaaaattctgtaattctatgtcctcttgatactatctatagaaaaacttagaatacatagctagcagagtttgaaaaaataatagaacaaaagaaataccaagaaaagcagagaagaaagttttaaaaaatgcagacaagattatagaaaagtcatggaaaaagcaacaagactaaaaaatgtattatggaagtaagcagaaatacttgmctaaatggaaaaccaaactgggaagtcaaataatttgtctctaaga

SEQ ID NO: 649292 - DNA, 480 bp, Homo sapiens
tgatgcagacgcagttctgatgcaaactccccacctgcacaccgcggccagcctttggtacaccccatcccctgccccttggcgctcatctgggaggggccktagtgaatggcactcacacatgtgccctgttaaagggagcagccacatgacaagtctccttgatgtcagacatgccagaacccaagaacatagcaaccagagttactggctctaaagagaaattagaaatggaagctgacagcagaatcgcttctcgaccaccactgcgcagtttgggggacttgactgtgtctctcggtttaaatcatgcctcaaagcagaaggatgcattagctccctgcggctgccataacaaattgtcccaaacttggtggcttgaaacaacagaactttgttctctcacgtttctagaggccagaagcctgagatgagggtgccagcaaggccatgctccctccgaaggctctagagaaggcc

SEQ ID NO: 649293 - DNA, 553 bp, Homo sapiens
tctcttccccttccctctccctctctgaattagaagaataaacctctgagaatgacgaagacactagcttaaggacaggggtgagagtataggaacacataagtaaatagaacatagaattgctaagtagtacttaagcccagctaaagttgaaaaacacagatctttgttgttgcaaatccacacagttatggcattagaaaaatagaaagattcagtttagaarttgtcaagacaaagttaagcaaggctatagacttaattagtaaaatacagcatgtaatttatacataagagctaaattttttctaactttttttaaatgagaaataagaatctctggaacttttctccacaggcatacacacacacacacacacacacacacacacacaaaggtatggggggatttggtgctaagttagaaaatttttaaaacgtttaaagcaaactgttaaattttgtaaattcagcacaatatgaatttaactccaacccacaattcattgaaagatttataacaggccaataatgcgcagaaggattattcaca

SEQ ID NO: 649294 - DNA, 553 bp, Homo sapiens
tctcttccccttccctctccctctctgaattagaagaataaacctctgagaatgacgaagacactagcttaaggacaggggtgagagtataggaacacataagtaaatagaacatagaattgctaagtagtacttaagcccagctaaagttgaaaaacacagatctttgttgttgcaaatccacacagttatggcattagaaaaatagaaagattcagtttagaagttgtcaagacaaagttaagcaaggctatagacttaattagtaaaatacagcatgtaatttatacawaagagctaaattttttctaactttttttaaatgagaaataagaatctctggaacttttctccacaggcatacacacacacacacacacacacacacacacacaaaggtatggggggatttggtgctaagttagaaaatttttaaaacgtttaaagcaaactgttaaattttgtaaattcagcacaatatgaatttaactccaacccacaattcattgaaagatttataacaggccaataatgcgcagaaggattattcaca

SEQ ID NO: 649295 - DNA, 553 bp, Homo sapiens
tctcttccccttccctctccctctctgaattagaagaataaacctctgagaatgacgaagacactagcttaaggacaggggtgagagtataggaacacataagtaaatagaacatagaattgctaagtagtacttaagcccagctaaagttgaaaaacacagatctttgttgttgcaaatccacacagttatggcattagaaaaatagaaagattcagtttagaagttgtcaagacaaagttaagcaaggctatagacttaattagtaaaatacagcatgtaatttatacataagagctaaattttttctaactttttttaaatgagaaataagaatctctggaacttttctccacaggcatacacacacacacacacacacacacacacacacaaaggtatggggggatttggtgctaagttagaaaatttttaaaacgtttaaagcaaactgttaaattttgtaaattcagcacaatatgaatttaastccaacccacaattcattgaaagatttataacaggccaataatgcgcagaaggattattcaca

SEQ ID NO: 649296 - DNA, 585 bp, Homo sapiens
cctttagaaaaaaaagcatgctaaccactgatttaatttaacacaaaaacaccgtatttatctactcggataggyatgcattcatcaggataattcattgtaaatatttacctgtttgttttttttaataagcaataacttagcaaatacaatttacagctctactaataatttctgtagttttttttattttatactatactattttcccaatttttttaatcaggtacatatattagttttgaaattttaaaagaaatttatcaggaacatctaataatggtgaggtaaaggtcacatcattcgtctcacagaaaacaatgtaaaatctggacaaaagtatttaaaacaatattggaagaacaacaaaatgcgagcagaatttactcatgaaagactgctactgtataatgtaagaacttagtttttgcctttcttgccaaggggtgcgcaccaaactccccagcggttctgacagcagaaaactatatccttaccacatcaaagtggttacatgtcaaagttcaaaaattagagcaactatagtttaagaaggaaattctggaggggaaagatccacagaaa

SEQ ID NO: 649297 - DNA, 567 bp, Homo sapiens
ctgcttttatgttccattatattctggaattagggccaaaataataataataataaaaggaaaaaataatcgctggaaattattaaatccaatgttgattgctctgggaaaaattatgtctgtaaatggtgtttgtatttatctgtcaaaagaagatgagggatggcttacagaaagtaaatgaaataggatcaaacagtcctgaagtctaccaagtttgataaataattgtcatattttgacaaacatgatgaatttttaaatctgtcctgtaaaaatgggtttttgtagaaagacaattcctttctaacctttttcctatttcttgaaaggcttaaaattggtactaaactataccaagagataatatttcaaatgtyttttatttatcccagaaacaaaaactttgccttaagtagtattattatatagaaaaacacatagtctttctggtcagaaacattgccttttacttttaaagcaagcattccttaagaaacatctttctaaatttatatttttaattgtgtttgagttagtcttaggcaataaaagtgaatagatgaa

SEQ ID NO: 649298 - DNA, 590 bp, Homo sapiens
  misc_feature 1, 2, 3, 4: n = A,T,C or G
nnnntgctatgttaaagtaactacattccctgaatataagaaaaaatttgttataaatttgagattttttattgattttatgcatttcaaaaagtatagccttctctgaatggattgcctattaacaaaaaatatctcctgagaaaaattttagaaataacattgcatatataccttagcttagagatttcattttccatttaatgaaaagaaaggtaaatattagaaaattctattttgactgaartttatttttgaccacttgtatcaaagtaaataaattcagatttagttcttttcaattttggttgcttgtgccattgaacttcagatattttaggcaggtaggtagtattttggaaaagaaaaggctgaaaatactgtgtgaacagtaataacaaaagggcgaactaagaaaaagttacgtttgaccttgagtttttaagtttatttgttccaataaattgtttttttcaggatactcttcagtgtatcaaaaaattatttaaccttgtgttaagtcagttggttatgtacatattttatccagcatattggaaaaaattatactcttaactgttaattttctc

SEQ ID NO: 649299 - DNA, 551 bp, Homo sapiens
caacaatcaatttgttaagtactatttttcctacactctttttggaatatagtctgcttatataagtgactttgtatctatccagcattattttatgtggataattttgtgttgttcagtacttgcataatcactgtgagggcaaggaccttgtawgttcttctgttcatcactgtattttcagtacccactagtgcctggcacatggtagataatcagtaaatgttagaagagtgaatcagtaacactgagtaccccacatacgtgccagctatagtatgaagctttgtaattacattgtccaccaaggaaaaagatcttccataaagccacagataagcaggaaatagatttattgaattttgagtctttcgcaggtcagggattccgtgtaggcattaaggttctgaacaaaaatgtagcacaaaacacaaatacttgctagcagaagatacatttccatacctgccctcgtatatcaaactgcaaaacatacagaaaaaaactaatggacaaacaggtgctgttagagtctgtgtttagtttaagcc

SEQ ID NO: 649300 - DNA, 597 bp, Homo sapiens
atctcagcaaaaattatataaaaattgtttaatataaatttttttatttgggacatgtgcatttaaataaatattagatgccattactcacctatcagcatggctaaaactcacaatactcatgatgataaatggtaacatgaatgtggaaaaacaagaaatgtcatgcattgatggtgggaattcaaaacgttacatgcacaaaatgagattttttggcattttttaaatagagataaaagtagagttaaaatgtgaacttgtgcttgtgttccaaagtatttacaacgttgattcagaaattgatgtttacaaagattgattcagaggaagttctgtatcagatttgttaatgtgattcattctacaatccctgaaatttgcttgcagaataaatgttgtatgaaaaatatctcaaataactaaaatcctgtccactcaagcccttgtccaggggcccatcgcaccmagtgcaagtagcagtaggtgaaggtgtatccagaagcctggcaggagaccttcactgaggccccaggcttcttcacctcagccccagactgcaccagctgcaccaggaagtgggcacctgtggggagg

SEQ ID NO: 649301 - DNA, 561 bp, Homo sapiens
ctctcaggtgattatctcagggcacagaaaatatttacctcagtggatatcagtatatttgcatattcataagacaaagcctttcttaactcaaagcccaatccgtgataagaaagggaagataaatgacacatcagccttacaagagtgagatgaagatggtcgaagtcctaatcctgcttgaggaaatgcatgccctgctccatttacaaacatttgtggacagacatcctttcactgaagaataagcccgtatagaacaggctcctcactgtaagcctatatttgattagcatagagaccacctggatcatttttggaaccatcactctccatcacactgagcaggtgccttggtcttttcctggacycatcaggcaccagcacagctcattggtgactctgagaaagtgacgcttatgtcccacatgagtgtccaggagggacctctgagatctactgggtgctcctgagacactgtctccagcacctgactcatgtcctgatcccccaggatcttcaattctattgaacactgttggtttacagatttgccctgtg

SEQ ID NO: 649302 - DNA, 587 bp, Homo sapiens
ttgaaacattcatgtatcatcatagtagattgtagataccagtgttctaaagtttgaggcaataaacatacagaagattggatacataaatagattagatgggtccattaacatgggttaatatatacatacacattttctaggcctgttagcttagagattctagaaacactkacagtacgttaacaacacacacacccaacatcataattttgtgtgttgatataattctttaatatcaaggaccggcaatccttggagaaataactgattctatgtgtagaaaagataatagagataatgagcttagtatttcttgtaacaccaggaaatagggaagtgatcaaaaacaaaaggatggggcatgctgtaaaaatacagaatccaaactaaatgagctcacagaacctaaaaaaaagctgtggtgatttgagcgataaaataaataatgtagcaccagatcttctccatagtaaaaaataaacattcatgagccaacaccgacattaacagattattgaataaagaaaattagaaaaaaggcaccttccattcagaagaattctaaacatcttaataatcttctc

SEQ ID NO: 649303 - DNA, 587 bp, Homo sapiens
ttgaaacattcatgtatcatcatagtagattgtagataccagtgttctaaagtttgaggcaataaacatacagaagattggatacataaatagattagatgggtccattaacatgggttaatatatacatacacattttctaggcctgttagcttagagattctagaaacacttacagtacgttaacaacacacacacccaacatcataattttgtgtgttratataattctttaatatcaaggaccggcaatccttggagaaataactgattctatgtgtagaaaagataatagagataatgagcttagtatttcttgtaacaccaggaaatagggaagtgatcaaaaacaaaaggatggggcatgctgtaaaaatacagaatccaaactaaatgagctcacagaacctaaaaaaaagctgtggtgatttgagcgataaaataaataatgtagcaccagatcttctccatagtaaaaaataaacattcatgagccaacaccgacattaacagattattgaataaagaaaattagaaaaaaggcaccttccattcagaagaattctaaacatcttaataatcttctc

SEQ ID NO: 649304 - DNA, 582 bp, Homo sapiens
atgtgagtgtccagcagggcctatggacaagctgggtgctcctgagacagtgtcttcagcatctgcctgagatcctaagatctttaacagaagacttttagtttactgatttggcctgtgatgtgtgattggcgctgattttctcataagactgacaatarcaatgaagggttggcatagcaattaggagttcttcatgaactcccagctctcagaataatttccaaggaatctgtgttttgaataggcttgggttttatttctcactctattgaaaataattttgtggatgtatttacatcaggaaacaagacactctaacaagagagctgtttttaggtgaggtgcaaagtagtggagagatggaggtgtccttgaattctcagaattgctggaacttgaataccaagttcacctctgaaaggcagtagtctatctgtgaggatatcaatcagctctgccttcaggaatctttggatgtggaaaagatcaggagtgtgatttatttttatccatcgtggttagagggaaacttccggtcccaggaagtgggtgattttaacagaagcacctgagaccttt

SEQ ID NO: 649305 - DNA, 582 bp, Homo sapiens
atgtgagtgtccagcagggcctatggacaagctgggtgctcctgagacagtgtcttcagcatctgcctgagatcctaagatctttaacagaagacttttagtttactgatttggcctgtgatgtgtgattggcgctgattttctcataagactgacaatagcaatgaagggttggcatagcaattaggagttcttcatgaactcccagctctcagaataatttccaaggaatctgtgttttgaatargcttgggttttatttctcactctattgaaaataattttgtggatgtatttacatcaggaaacaagacactctaacaagagagctgtttttaggtgaggtgcaaagtagtggagagatggaggtgtccttgaattctcagaattgctggaacttgaataccaagttcacctctgaaaggcagtagtctatctgtgaggatatcaatcagctctgccttcaggaatctttggatgtggaaaagatcaggagtgtgatttatttttatccatcgtggttagagggaaacttccggtcccaggaagtgggtgattttaacagaagcacctgagaccttt

SEQ ID NO: 649306 - DNA, 624 bp, Homo sapiens
atgggcacactcactgcagtagtgacaccgktatctaaggtgtgaaaatgtgtggaatagtcccagggtctgtggggtctatagagtcattgtagggaactggtagctctggctggaaaagagagaaatggcaggcacagcagcaaatcagcaggatggggaagaaggtgcagctgtggtatctctgctctcagatggggtggggttcaatcaattatttattacttaaactgaaaagccaggtttacattattaataagcttacattttatatactattagctatgtatctggaaggaatgcaggagacactgactacctttttacaaagaaaaaaagagacattatttgtcaaactcctttaaaacattgttttgtagaaatacacaggtaaggctacaaagtttaactcaataataacagttgcaaaaaaatacctagaaaaatcatcaaatcatgacctacctctttcagttattttttaataacctgcagcaaaaaaagcaactttctcacagtaacctatatatattaaatgtgctgccaacccagatctttagaacattacaaacaattttggaaaaggacactttttggaatatatatttaagcctggttaaaaga

SEQ ID NO: 649307 - DNA, 422 bp, Homo sapiens
atattctacattatttttacatattggtagggatatatacaaactatgattaatacattttaaaaaattaagtttacaaggaaacatagctgataggaaatgttaaaacattgaacatgttagtgagtagtattggataggatttgattagctaatattcagacttcctggcaatattagtgtcaaaatcactacacagaatcatggattgaaatcaccaatttgagaattttttagttcccaaacttactatttctgggaacatcamttataggattttaatcaagtatactatgcatataaattattaatgcttattttattggctggaatgatgcattgtcaatagcagacattcaaaaacacacttttaaaacatgacaataactgaaagtaagattgaatgattacgttgtcaccat

SEQ ID NO: 649308 - DNA, 630 bp, Homo sapiens
ggtgacaagaaggacagaagagctgtggccctttggggagcccagacctaagggttccctgaaccagggctatgacaccctctttggggctctatgattcctggtgtctccaagcttccaggtaccagcatatttccctcatccagatatcggtgcccatagtagaagccacttgtagtaaatctgatacagccacagccttgcatggagccggtgcctggagctgcccacaccaccacagccaccggtctgcctggttgtgtgcagtgtctggaccacacacactcgctcacacaccccttgccactacatgcctggctyacccttggcaggcatgggatacaggccagtagcacaagacaggtgcagtctgccaggctgagtgagtggaatgagcccagtgggcccaaccaaaactctgacaaaggcaacactggccacagaggtttctgggtggaaaagttaacaccctaaggatcctgaaacagttataatgtcaaaacaaatcttattttttactatttacttgtttctaaagaaaattatatatttatttaaggtatacaagttattttgatatgctcatacatagtaaaatgattattctagttaagctattaaggtatccat

SEQ ID NO: 649309 - DNA, 634 bp, Homo sapiens
ccccgtgccctgctccaactatgtagcatccacctctgacagtgtcagtgctgagcaccaacacaaattaggagctcctagagaaggaatgagtggttatgccagaagggtcaggggaagcttcttgaaggcagtggcattcaaactaggttttgagtgatgaattgggtcaagacaggaagaaatgaagggaagatgctagtggcctcccatgctggtctcaggactgccttgttaaggctggagacctcctcagcaatctggggttggaatctatttcagaatttcgaggctgactgagaccctaaggatctgctcatccaagctccttattttatttatttatttatttatttttcaagctccttattttagagatgggcagactaagggacagagaggaaaggaccagagcataggccagtctagtgctgttacaaccacacagttcccatttgtgcacttgtcctcatttctaatgggtctctgaaaacattcacttcttctttctgggtttcactcctgtcacctctgactcytgtcatgtgagctctgagagacccaatggtctccacttataaattacccattagagaaggagccctgggtcctgctgactttggattccaaggtc

SEQ ID NO: 649310 - DNA, 609 bp, Homo sapiens
ttataccattaactatgatgggctttcatctaacattactcttaagaaatttacttttcttgtattttacacaatgcttttatcatagattggagacctctaacaaactttgctttttcttctggataaatcatatcatctcaaaatgtatcttcatcctattacttacactcggtggaaagaaatgtctctcgttaactaatgccaatatttaatttcccttccttcctaaagagtgctcagtgaaacatctggtagttggtagactatcaattaatgtgaaatggatactgtaaaaagaactgacattagaaccagtaatatcagtgctcaaatctcaattcttctgcttacagcttatgttactttggataagtcacttaacttttctatgttttaatttattcttatttaaaactaatattggatttattttttagagttgttcagaaatttaaataaattctctraagtatctaacatgttcattaaatgggataccttctttgtatcatcttatttcatctaatttgcttttaattaaccgtttacccttctcttgtgataaaaaaaaagttctgtttttggtaaaatggaaggttttatacc

SEQ ID NO: 649311 - DNA, 619 bp, Homo sapiens
atatctcatcttttaaaattccttactctcattaaaaagacaaaatttaaagatcttaattcatcattctagaatcaggcagctctcagaaccagaacaagttcaaaggactccaacctgccacgtgatcagacagcactgacgaacagaaaatacaaatgaggtacagaaatggaagtgaggtatagagacagcctgattggttactgcttggggtttgccttatttgaacttggtctgaacaattgaccgcctgtgattgaatgaagctctcagctgctatgattggctgagactcagctatatgttacaaaagtatattcctaaattaggcttccagttagtttatgtatgaagttaggctgcagtttgttatgtgaagactcctgtatggagacatcctcaggtcaaatttagtttaatttaacactcaaaagaaaccacatgttttccagaccagagttgactgatattgttttccaactctcattctgtatgtttataacaattttatatcgggatacaacagtgtgcmtataatgtgatacatgtgctgttggaagtgttaagaatatctttcattagtgcatttgaaaaatctttccattttaccctatac

SEQ ID NO: 649312 - DNA, 619 bp, Homo sapiens
tggggcatccaactcatttaactagaggataatgcagaggagtgatttgcaactgacttcttcctcccacaaactaatatttttaaatggtttgcacttttttctgtccccaaagggatttgttaagtgtgattttcagcaggacatgtactttttttatttgttagccataatggaaatgcatagataaactgaatctgtgttaacataataagacaatcaaattttttgtttagttgtggggaagggacgggatagaggaagtagaaaaagctccctcaaacataagctgaatatttatgtggtttttgtttttatttaaaccaacctctttagaaaattactttcttaataagrcattatacaatgaatttttccagtcattttgagggaaaaatatggtactctgggagaacttctagaagaaagaggaaagactcacttaagattcccaggacctacagagggctggtgctgaatagttcccactgaggaccttccatttcggtgttttttgtcttttgtttttttgagacaggatctcactttgccacccaggctggagtgcaatggcacgattccggctcactgcaacctctgcctctggggttcaagcaat

SEQ ID NO: 649313 - DNA, 619 bp, Homo sapiens
tggggcatccaactcatttaactagaggataatgcagaggagtgatttgcaactgacttcttcctcccacaaactaatatttttaaatggtttgcacttttttctgtccccaaagggatttgttaagtgtgattttcagcaggacatgtactttttttatttgttagccataatggaaatgcatagataaactgaatctgtgttaacataataagacaatcaaattttttgtttagttgtggggaagggacgggatagaggaagtagaaaaagctccctcaaacataagctgaatatttatgtggtttttgtttttatttaaaccaacctctttagaaaattactttcttaataagacattatacaatgaatttttccagtcattttgagggaaaaatatggtactctgggagaacttctagaagaaagaggaaagactcacttaagattcccaggacctacagagggctggtgctgaatagttcccactgaggaccttccatttcggtgttttttgtcttttgtttttttgagacaggatctcactttgycacccaggctggagtgcaatggcacgattccggctcactgcaacctctgcctctggggttcaagcaat

SEQ ID NO: 649314 - DNA, 600 bp, Homo sapiens
aattacgactttacagctttttgtagtggaggtgtcaaagaaaaccagaatcagacagtagttaaaaaggtaaaaacagattttattcatgaatttattacaatatgggaaaagagacctcagaatagagctgggcttaattcctaatatggcaaracaaggggggatttgtaaccaaggagcaggctgatggatgggtgaatggaaaattactaagaggagacagcaacagtagcaggattttggctaaacccacccagcaggattcttgctgaaggcaggcaaaggtgatcagatatcatctgggggatgttggaagatgaaaatttgatcagatatcacatgcgatcagagagtaagggtggagaatttcttaaaacctgacttagcaggatttttactaaaactgggaggcaaggcaaggactaagacagaaacctgagattgagaactagtcaagaaaagggctcagaggggcctgactaaagtttgccagagttgaagaatatcagagttgaacagattgaagaaacttgacacctgctggtaggaaaaatcagcagtgtgggtgagcagatggcaaggaaaaggttagaaaaa

SEQ ID NO: 649315 - DNA, 600 bp, Homo sapiens
aattacgactttacagctttttgtagtggaggtgtcaaagaaaaccagaatcagacagtagttaaaaaggtaaaaacagattttattcatgaatttattacaatatgggaaaagagacctcagaatagagctgggcttaattcctaatatggcaaaacaaggggggatttgtaaccaaggagcaggctgatggatgggtgaatggaaaattactaagaggagacakcaacagtagcaggattttggctaaacccacccagcaggattcttgctgaaggcaggcaaaggtgatcagatatcatctgggggatgttggaagatgaaaatttgatcagatatcacatgcgatcagagagtaagggtggagaatttcttaaaacctgacttagcaggatttttactaaaactgggaggcaaggcaaggactaagacagaaacctgagattgagaactagtcaagaaaagggctcagaggggcctgactaaagtttgccagagttgaagaatatcagagttgaacagattgaagaaacttgacacctgctggtaggaaaaatcagcagtgtgggtgagcagatggcaaggaaaaggttagaaaaa

SEQ ID NO: 649316 - DNA, 592 bp, Homo sapiens
acggacccatttccaagacataagaagtagaagccacagcattacaactatacacacacacacacacacacacacacayatatatatattatatataccaaatgtatgtataccaaatgtatatacacacacatatatatacacatacatatatatattttatatatatacacacacatatatatattatatatatacacacacacacacacacacacacacatatatatacacacactaaggaacaattgcgtatataattgttccatataacaattgcataaataattgttccatgtaacaattgcaatatattatattatgaaatgggtctataacattatagagagatgtaatatatatatatatatatatttagagagagatagagagagatagagagagaaagagaccaaaatatatgcattcttaaaactaatcatgctaggcaaaattgtataataaaaaccactagggttacagaaaaaatggggcatgaaactgagaaactttatccatgacacatacaaaaaaggagaaaacataataaaaatggtggcaaagttttacatgtgtttaatgattaagatac

SEQ ID NO: 649317 - DNA, 592 bp, Homo sapiens
acggacccatttccaagacataagaagtagaagccacagcattacaactatacacacacacacacacacacacacacatatatatatattatatataccaaatgtatgtataccaaatgtatatacacacacatatatatacacatacatatatatattttatatatatacacacacatatatatattatatatatayacacacacacacacacacacacacatatatatacacacactaaggaacaattgcgtatataattgttccatataacaattgcataaataattgttccatgtaacaattgcaatatattatattatgaaatgggtctataacattatagagagatgtaatatatatatatatatatatttagagagagatagagagagatagagagagaaagagaccaaaatatatgcattcttaaaactaatcatgctaggcaaaattgtataataaaaaccactagggttacagaaaaaatggggcatgaaactgagaaactttatccatgacacatacaaaaaaggagaaaacataataaaaatggtggcaaagttttacatgtgtttaatgattaagatac

SEQ ID NO: 649318 - DNA, 566 bp, Homo sapiens
cgcgtatagattcacaaaacaattgcatggtcacaacatacaatttgacaactgtgggattaggtgttttatccaaacatatataatcaatagcctgggcaagaattagtcaaattctgccaattctaaatccaaatctctaaactctgcaacctcctcatttgaatatgaatttgtgagccaattaaacattggcatatgtcttctgtgaaatagtcttaggattaggcaatttttgtttagtagcctacattgatataagttggatcatataatattaactgttatatgrcattattattattattaagaaatctaggctgggcatggtggctcatgcctgtaatcccagcactttgtgaggctgaggcaggcagattacgaggtcaggagatcgagaccatcctggctaacacagtgaaatgccgtctctactaaaaatacaaaaaattagctgggcatggtagtgggcgcctgtagtcccagctactagggaggctgaggcaacagaatgaacctgggaggcagaggttacagtgaaccaagatcatgccactgcactccag

SEQ ID NO: 649319 - DNA, 566 bp, Homo sapiens
cgcgtatagattcacaaaacaattgcatggtcacaacatacaatttgacaactgtgggattaggtgttttatccaaacatatataatcaatagcctgggcaagaattagtcaaattctgccaattctaaatccaaatctctaaactctgcaacctcctcatttgaatatgaatttgtgagccaattaaacattggcatatgtcttctgtgaaatagtcttaggattaggcaatttttgtttagtagcctacattgatataagttggatcatataatattaactgttatatggcattattattattattaagaaatctaggctgggcatggtggctcatgcctgtaatcccagcactttgtgaggctgaggcaggcagattacgaggtcaggagatcgagaccatcctggctaacacagtgaaaygccgtctctactaaaaatacaaaaaattagctgggcatggtagtgggcgcctgtagtcccagctactagggaggctgaggcaacagaatgaacctgggaggcagaggttacagtgaaccaagatcatgccactgcactccag

SEQ ID NO: 649320 - DNA, 566 bp, Homo sapiens
cgcgtatagattcacaaaacaattgcatggtcacaacatacaatttgacaactgtgggattaggtgttttatccaaacatatataatcaatagcctgggcaagaattagtcaaattctgccaattctaaatccaaatctctaaactctgcaacctcctcatttgaatatgaatttgtgagccaattaaacattggcatatgtcttctgtgaaatagtcttaggattaggcaatttttgtttagtagcctacattgatataagttggatcatataatattaactgttatatggcattattattattattaagaaatctaggctgggcatggtggctcatgcctgtaatcccagcactttgtgaggctgaggcaggcagattacgaggtcaggagatcgagaccatcctggctaacacagtgaaatgccgtctctactaaaaatacaaaaaattagctgggcatggtagtgggcgcctgtagtcccrgctactagggaggctgaggcaacagaatgaacctgggaggcagaggttacagtgaaccaagatcatgccactgcactccag

SEQ ID NO: 649321 - DNA, 566 bp, Homo sapiens
cgcgtatagattcacaaaacaattgcatggtcacaacatacaatttgacaactgtgggattaggtgttttatccaaacatatataatcaatagcctgggcaagaattagtcaaattctgccaattctaaatccaaatctctaaactctgcaacctcctcatttgaatatgaatttgtgagccaattaaacattggcatatgtcttctgtgaaatagtcttaggattaggcaatttttgtttagtagcctacattgatataagttggatcatataatattaactgttatatggcattattattattattaagaaatctaggctgggcatggtggctcatgcctgtaatcccagcactttgtgaggctgaggcaggcagattacgaggtcaggagatcgagaccatcctggctaacacagtgaaatgccgtctctactaaaaatacaaaaaattagctgggcatggtagtgggcgcctgtagtcccagctactagggaggctgaggcaacagaatgaacctgggaggcagaggttrcagtgaaccaagatcatgccactgcactccag

SEQ ID NO: 649322 - DNA, 558 bp, Homo sapiens
gcttttacctgacattttggacattaatccagaagaaataaatgttctgtgttcaagacctacagttctgttgcccttaatgtccatcaccagttaactggtatagtgtcaagttccttactctttcctcctgttcaaacttactgtaaataactggtcatgctctacttctaacagtgtgataaaatattcacagcctggaagaaaaactttacatgctgagctctttaataagtaatacagcatagtgaagactgtcagctttgcagtgaaacaaactgagactaaattctctcccaccagttgtagtagacagaataatggctcctcaaagatgtgtatgactgaatccctggaatctataaatagattatgttacatgtcaaagggaaagtaaggtagcagatggaattaaggttgctaattagctgactttatggtagggagattygccaggatttttttagtgaggtcaatattatcacaagaattcatataagtaacagagggagtctgaagagttagtgtcagaatgatatgatgtgaaatagaatctac

SEQ ID NO: 649323 - DNA, 622 bp, Homo sapiens
cttcacgggataacagcttctcaggggtcagggytgtggtcagcttagtaccttggtggcttgatcttaaattaactagatatatgggtcagctaaaagcttactggctcacaaacacatgtagggtatttgctattgggaaaaagcaataaatgaaaggcacaggaaaataatttttatagatttttttttaagcaaaagaagcttaagcaagcaccctagaaaatccatgtttttttaaatttttcttttatctgtgatgtaaatttaggtttaaagttctctttggccatttgtctatgaagaagttgaaagtaatttcataatttattgctaaattggacagttagataatagactctgcctcgttattgagttgaaaacctttaaagtgttgtttttcatgtgtgtctccttaattagatcataagctctttggtatcatagactacacctgactatttgaatcctcatattgtttaataaagagttctaatgaaatgtacactttaacaattatatacttttccttagagttcttgctaggatataaggttatagtcacactattatgatgatgaagtaaaagggccaacacaaatgcataggagaaaagaatttc

SEQ ID NO: 649324 - DNA, 608 bp, Homo sapiens
ataatgccttttaataacacagataagggctttctaggtcagctgtacaagagcaaacaacaaacaaagagtcaaccagatatctctgycctggttttaaaattagtgtttttgaacaaatgaaatgaccccaaaccaaaggaaactaattatggcctgataatggtctgatagaggctatattttgacagcataatatggccccatagggcttttcaaaaggaacagggaaaggaggatgggtagaataaataaagagggatatagcttccatttgccaaagttaagcttttctgtttaaaaaaaaaaaaaaaaaaaccaagtgaatcccatcactgcttggaattttcagcttttaaaaatagtcactgactttgatgtttaaattgtggctaagctggccttctttcactagaaagagataaaatttagtttttctttcatctattcatatccacacaccccttcttaatcattattcaaagaaattgctcatgtaactcttggctcttggctgacccaccagccttactagtaaacagtaaagtgctgtgaagctgagctgcctgcccaccatcaggagagggttataaagatggcctcttagc

SEQ ID NO: 649325 - DNA, 555 bp, Homo sapiens
tgcttgcttgcttgttggttgattggttggctgtttgcttgtatggtgacttggttggttggctgaaacagaatcagagtttacctaaggtacataaagttgagatgccacaacttccttggtttatgtgtacagaaaggtatgcaaaaactcagggagactggatttattatgtcagacctgctcactcacactggagggtctacggaacatactcctcacaacgatcatgagaaagaatattgtgagaggagcccagtatcctggaagagctttgagcttgtgctctcagtaggcaaaatgttacagcaggaactgcagccactggactggkatctttaagtaaaatgaggataattgaatcctggggtggcagggaacatgggctgtccttaatcaccaaagatgaggtgggtgtggtcaccacagtggaaagcagtgtcaaagcagcagtcagaatggtttgactcacagacacccacggcattgtgtagtccatggtatccacagggagagctaatgggctgtaccaaagtcttagttgttctttaaaaa

SEQ ID NO: 649326 - DNA, 601 bp, Homo sapiens
ttaataacatgttgatctttttcttctttctgtaaacctttttgagtcttaaaaatactaaactatacaagcaatattaaatagtatataaacttggattaaaatattcaaatttactagaatgtggacattggaaagaatgaaaataaacagaagcataaagcagcagatataaaattaagaaagcaactaagagtgtttaaagtacatattcatctgtagtctaatgtctaccataaacartgactcttctcagtaaaacacaaattgttcatgaagggaaaaagcatgttgtattagagaatattcaacataatttttttagtactaacttgtgcctggagtattattggtttttctattatgaacttatgcacttgttaatttttttcataaaaattatatgtacaactccattcaaaagcagtttttggtgggtttttttttttttttgagacagagttttgctcttttcacccaggctggagggcaatggtgcgaatttggctcacagcaacctagcaacttttgcctcccaggttcaggtgattctcttgcctcagcctctcgagtggttaggactacaagcatgcaccaccat

SEQ ID NO: 649327 - DNA, 577 bp, Homo sapiens
ggtttgcaataattaggtcagagtggagttttaaggtcacggaggggtctgatgacttacaaataatgggctctgattgggcaactactcatctgagttccttccatttgacctaattaagcttgtgaaatttacactaagccatgagctcatctttaaaaagttttattaaaagattttcagctgttccaaatgggacttattactggaatgtgttttaaaggatcatatcagatgaatgaaaggtatttgatccttcgtttccttaataataaaatgatggtttggaaaaataggctacagtctaaccacagtgctattattaggctttcttgttaaacataggtctaagcctaagtatgtcaatacarcaaatacttactgtttcatttctagtaatgaaaaaaaaaaaaaaaacaagtctttctggcataaggatgattttcatctggttattttgaaacatttttgtaaaataaatttccatctataaagaacatttttatttgtaaggaggggtatgtctctgtgcactggaagagagggaggactaaatcactgggaagtcttatgataa

SEQ ID NO: 649328 - DNA, 606 bp, Homo sapiens
aaaccatcattcatccagaacagtgctgcttttctagcaaactgcacttcagttctgcctaccaatgtctccaagttgaaggaaggagcaagagcaytggactcgctgaactactagtctctcttgaaaagcagaaaagaaatcaagcgcttagcacggagccccctgtgaactgcaggctcccaactgctttcccagccaaataatattgattttctggctccatttcattttagtcctttaactgctcacatctctggatggcattggcacagcaagacacaagttccatcatcatggtgtcaattctgccttcaaaactcagctttgttccaactctgtcagggttagaagcagcagaggttgtaatggtattttcttagccaccccctcagcctgctgatctttgttcagctaggggaatgctcattcttaacgagtcagataattccttttctgtgcccttcgttcaatagatccctcattttagacatcctgacaaatgttcaaatgaaatttcctttggctacaacttgtcccaacctttcttgttatcatctcagcccttctatcatctaaacaaggacctgccaacttcttgtgtat

SEQ ID NO: 649329 - DNA, 606 bp, Homo sapiens
aaaccatcattcatccagaacagtgctgcttttctagcaaactgcacttcagttctgcctaccaatgtctccaagttgaaggaaggagcaagagcattggactcgctgaactactagtctctcttgaaaagcagaaaagaaatcaagcgcttagcacggagccccctgtgaactgcaggctcccaactgcttkcccagccaaataatattgattttctggctccatttcattttagtcctttaactgctcacatctctggatggcattggcacagcaagacacaagttccatcatcatggtgtcaattctgccttcaaaactcagctttgttccaactctgtcagggttagaagcagcagaggttgtaatggtattttcttagccaccccctcagcctgctgatctttgttcagctaggggaatgctcattcttaacgagtcagataattccttttctgtgcccttcgttcaatagatccctcattttagacatcctgacaaatgttcaaatgaaatttcctttggctacaacttgtcccaacctttcttgttatcatctcagcccttctatcatctaaacaaggacctgccaacttcttgtgtat

SEQ ID NO: 649330 - DNA, 606 bp, Homo sapiens
aaaccatcattcatccagaacagtgctgcttttctagcaaactgcacttcagttctgcctaccaatgtctccaagttgaaggaaggagcaagagcattggactcgctgaactactagtctctcttgaaaagcagaaaagaaatcaagcgcttagcacggagccccctgtgaactgcaggctcccaactgctttcccagccaaataatattgatyttctggctccatttcattttagtcctttaactgctcacatctctggatggcattggcacagcaagacacaagttccatcatcatggtgtcaattctgccttcaaaactcagctttgttccaactctgtcagggttagaagcagcagaggttgtaatggtattttcttagccaccccctcagcctgctgatctttgttcagctaggggaatgctcattcttaacgagtcagataattccttttctgtgcccttcgttcaatagatccctcattttagacatcctgacaaatgttcaaatgaaatttcctttggctacaacttgtcccaacctttcttgttatcatctcagcccttctatcatctaaacaaggacctgccaacttcttgtgtat

SEQ ID NO: 649331 - DNA, 575 bp, Homo sapiens
tacatggcaatataagcacatgaggtttaacattgttagccattgggacatgaaaattaaaactataataacattctactatgtgcctatttgaattgctaaagtaaaaattactgacaatgtcaagtgctggagaatatgtctgaacaactagatctctcatatattgctggtgaaactgtacagcctcactcataaagttggtcattttaaaataaagttaaacatgaatttaccatagttacaacaatcacactcctaggtatttatcctagaaaaattaaaatttatgctcacacacaaaaacctatagacagattttcatagcaggtttgtaacagccccaactaaaaatgatcraaattttcttctagaggtgaaggaataaatatcatctggtacagccccacagtgggatactactcagcaataaaaaggaatacaccactgatgtacacaaaaatgtgaatggatctcacgggccttatgctgacttggaaaaaaaaagccaatttcaaaaagtttttaaccataaaactatacttattaaatactcttaaagtaaaaaaatacag

SEQ ID NO: 649332 - DNA, 575 bp, Homo sapiens
tacatggcaatataagcacatgaggtttaacattgttagccattgggacatgaaaattaaaactataataacattctactatgtgcctatttgaattgctaaagtaaaaattactgacaatgtcaagtgctggagaatatgtctgaacaactagatctctcatatattgctggtgaaactgtacagcctcactcataaagttggtcattttaaaataaagttaaacatgaatttaccatagttacaacaatcacactcctaggtatttatcctagaaaaattaaaatttatgctcacacacaaaaacctatagacagattttcatagcaggtttgtaacagccccaactaaaaatgatcgaaattttcttctagaggtgaaggaataaatatcatctggtacagccccacagtgggatactactcagcaataaaaaggaatacaccactgatgtacacaaaaatgtgaatggatctcacgggccttatgctgactyggaaaaaaaaagccaatttcaaaaagtttttaaccataaaactatacttattaaatactcttaaagtaaaaaaatacag

SEQ ID NO: 649333 - DNA, 588 bp, Homo sapiens
atgtttatttagaaatagaatgcttgttccttggtaccacaaggaaaaatcagcatttagacaaaaagttttctcagcaaggcaattttaccttctgcagaaagggtgctcctcacagatggaacaatggtgagaccacaccygaacaaaggagggaagcaattttattccttacacagcttgtccctgctaatgtgtcctgtctccattggctggagctggacctcacaatctaaattaaacctgactggctaataacttaaaactttcctaaataggtaaaagcaaagagaacaaagaaaaagaggaagttgcttatgaaaggaaaacaaatatcttggttaaagtacaaagacatagaatgtactcattcccttatatctagcagctacataggatagggcttaaccaagagttattagcataaagcaaggaggcttgagggaagttactctttaaaagaaactattacttctaacacttatgatttattctttaacaagaagggaaattttgaagagaaaactttttactttctacacatcccatctcagcctcccaagcagctgggactacaggcacatggca

SEQ ID NO: 649334 - DNA, 592 bp, Homo sapiens
catatcaataacccatttgttaaaagatttgcctggaaatacaagacttggtggccacccttgaataattcttgctgtcttctgggaaggatgatgaaatttattcctgctgccttaaaaatatgtatcccttcttcacccatcatgactgtccccagtgagtgtcctttactattcttgggagtgactcctgtctaacttttcatactggcgagaagaaaagaggcctattttaacactttagtggtgttgaaacacattacttactctctgaagatgtcccagtgaatcctctgtcaattcactgccatatgtaatctatatgataaggaatgcatcttccaagtactgcccaaactcttgccagctcctctcccattgtcccttcatgtgaatatttcttggctaccttagtggaaatatagatcagtcttctccccatccatcctctcaaacataatgagattgtttactttttagatttatgcagtgaaaatgcccagtcaggtctgaatcgtcartgcattatattgaccctgagcactttagaatttagagttgcaattgaatgccagctgtggagatggggtgc

SEQ ID NO: 649335 - DNA, 607 bp, Homo sapiens
tggcttgtatgttcacgacaaatcactataaaatataaaataagcataaagcttttcctgtgataaagaaactacttctagttttttttttttttcctttttctttttttttttttaatgtctctttgtttgkggaacttttgggatactctgattaaacccctgattaagcaccacggggcgccattcacatcacaggtaaatggtttgcaaatattttcttccattctgtaggttaccttttcattttgtggggggttccttttccttaaagaaagtttttagtttgatgaagccctgcttgtttatttttgcttttgttgcctgtaattttggtgtcaaattcaaaaaatcattacagataccaatgtcaaggagcttttctcctgtgttttctttgagaagttttacagtgtcaggtcttatatttaagtctttaattcattttgaattaatttttgtatatggtaccagagaaaagcccaatttctttctctcttttttttttttttttttttgcgtgtggctatccagttttcttaacatcattgattgaagagactatcctttccccattgtgtattcttgacacatttactgaaaatta

SEQ ID NO: 649336 - DNA, 378 bp, Homo sapiens
gaaaatcttttgaagcacagcaaagtaaagagagaaattcctagacttaatgccatcttcttgtggacagaagcctttagagatccctcactttgctctgatcgtctttcataacttaagagtacccttttgatgtctctcagccccaggactgttagaaggctttgtaaagtgcaaagagccaaacagctaatatgccacctgccagaggaggaggctgggctgggaggtctctctaggtgcccttccagctctatcagcctgggttgtgartcctcacaaaaggggaaaccactgctgatggcttcagcgagattaggaaaggagtgaaatggagaaatagtatccagggacaatctcagcttcttaatgttctcc

SEQ ID NO: 649337 - DNA, 578 bp, Homo sapiens
ggatggtggaggatgaagatcccaattggaactctagggtgaaaagatttcagggatggggcgttcttgctgcactgattcagcaaagattttgctaaaactgagttttacaaggaagtgcacagatgagttgaggagacgtttcagaagcctgactaaaatttggctaagcaaagaatctttgttaatagctgcgaggtcccttgaggcctaaatttggaaatagtatactgcttttaaygcatcgtatacttgttgtcagaccaagttaggccaatcaatgagcagtgaagttacattgcagaattatctgtgtgcagaaatggaagaaagtattgtgaataatttttgcaaacaatgtattattatctatcttagggacaaaataattcttgtcctttgcatatgtgaaatgtgcttttgccccttctctcaaagttttatcccattagccgttcaggcttgaactccaggacctcatgatctaaatcatgtctagaattagatgacacacaaaggtatagctcttgaagtatatctcttcttgatctagagatctctgaacccaaaagaaaagt

SEQ ID NO: 649338 - DNA, 578 bp, Homo sapiens
ggatggtggaggatgaagatcccaattggaactctagggtgaaaagatttcagggatggggcgttcttgctgcactgattcagcaaagattttgctaaaactgagttttacaaggaagtgcacagatgagttgaggagacgtttcagaagcctgactaaaatttggctaagcaaagaatctttgttaatagctgcgaggtcccttgaggcctaaatttggaaatagtatactgcttttaacgcatcgtatacttgttgtcagaccaagttaggccaatcaatgagcagtgaagttacattgcagaattatctgtgtgcagaaatggaagaaagtattgtgaataatttttgcaaacaatgtattattatctatcttagggacaaaataattcttgtcctttgcatatgtgaaatgtgcttttgccccttctctcaaagttttatccyattagccgttcaggcttgaactccaggacctcatgatctaaatcatgtctagaattagatgacacacaaaggtatagctcttgaagtatatctcttcttgatctagagatctctgaacccaaaagaaaagt

SEQ ID NO: 649339 - DNA, 552 bp, Homo sapiens
gaagactagtataaaaaggtcagactagtatatatgccaggtcagactagtataaaaaagattatttaactttcacatggaatgcaggacacttcttagttgtttggagctgtcctttgcaatgcaaaaggtctgtcattcctggctcttgtccactaataacagtagcaaatcaaatgatcccattaaattttaaaacatgccccgtgaccagtattagttccagtgagaagcactgactcattacaataaaatcttctgatggaaacaacatgtgatgttaaaaacaaagaagtctrtagatcctaaagtccgtaagtaaagcaaagccaatgttccagtaactgctctgagaagctgtgatatgctctgggttgcacagaaacgtgggagactatcaaggcccctcccatagttcattctctcccagtgattcaggtagtgagtcagctagtagcggtgttcacaaaaacttggaagttcctagtccacatgtttgtgtgacctctctgtagcctctgtgtctaggttcttgagtatacaatgcactgt

SEQ ID NO: 649340 - DNA, 587 bp, Homo sapiens
caatattttttaaatgcaggtaagataaagacagttacggacaaacaaaacatgggttagcttccaacagacatttaataacataattcctaaagaatatactttagtaatatttataatatttttaataaagtatattctttagaaataagaaagaagaaaataatttcaaatggaaggttagagatctactaatgaatagtgagcaaagaaaataattaaaacgtggataaatctaaacacatttaattgtaaaaacaatgatagcaatgtcccttttgcgtgttaaaatgtgaataaaatacaaaaaagtttttaggtaaaaatatatagattctgggagmgtatttgaaaattaaatatttcaaattttctacattttggggaaaaaggcaattttaaaatttattttagactttattaaattacatacatggtaaaaacttagaggtaccaattaaataaaataaatggaattttaaacctccaaaataattcaagaaaactaaggaaatcatgagggtggggggaacctcacttgattcaaaggaaaaagaaatttaaagctagacaaatggaaagtgtaa

SEQ ID NO: 649341 - DNA, 587 bp, Homo sapiens
caatattttttaaatgcaggtaagataaagacagttacggacaaacaaaacatgggttagcttccaacagacatttaataacataattcctaaagaatatactttagtaatatttataatatttttaataaagtatattctttagaaataagaaagaagaaaataatttcaaatggaaggttagagatctactaatgaatagtgagcaaagaaaataattaaaacgtggataaatctaaacacatttaattgtaaaaacaatgatagcaatgtcccttttgcgtgttaaaatgtgaataaaatacaaaaaagtttttaggtaaaaatatatagattctgggagagtatttgaraattaaatatttcaaattttctacattttggggaaaaaggcaattttaaaatttattttagactttattaaattacatacatggtaaaaacttagaggtaccaattaaataaaataaatggaattttaaacctccaaaataattcaagaaaactaaggaaatcatgagggtggggggaacctcacttgattcaaaggaaaaagaaatttaaagctagacaaatggaaagtgtaa

SEQ ID NO: 649342 - DNA, 591 bp, Homo sapiens
tccattattttttctgacactggtttccttctttttacatacaagcgtacaatagaccctgcttctttcaacgcttcaactgctttgctatgtgttacatcacgaacatctacttcatttactygtaatatacagtcattgaccctgagaaaacaattaaatattaaaaataaaaattaaatataatttaaatataaattttccactttaccaattttttgttacttcttttttaaggtaaagagaattataaataattctggagtaattccagaaaacataaatgaagaaagtatatcaaaaactaatataaacaaatacaaacatttcccaagggccagcaaaaggaacaaaagaaatagtgaaaataatagattatataaaaatgttaaataataattacagctaccatttgcatacttcctgcatgcttattctgtgtaggcattaagacacactttataaaaatagcaaacatttatttagcactaaccacatgccaggcactttcttggtattttaaccctcatgacacctgtaagcttaatatatattttaatccctatttcacagatggagaaactgaggcac

SEQ ID NO: 649343 - DNA, 588 bp, Homo sapiens
aagctaatgtgacaaaatattaatataagtaaaaccaaacaaaaactayagatgcatttgtaatatccttccctgcattttggtatctttaagatatttttcattaggaaactgacagtgaccagtgagatcctcatattaaaacagtaaagctgtgattgaggacagaaaggaaaatgtttagactcctcactggctttctagattcatttcctcagtccccaagtataaccccagacataaataaagcaaatttactccaaggtttaaaaggaagtattatattatctcaggaattagttgcagcactcttcaatttttctcagatcctaaatccccatttttcactttttatgagaaataaaaacatgttcatccatttttaaaagcaggtttacaaatgcaaatacttaagaggatttaaatttttatgtgatggtgtattggtctaagtttaaatgttgatatcaatgtttttgtgttttgattaggtatgggagaactttgaaaagtaggaaggcacattgtatttatagaaaaacaaggttgaaagtcttagatttgaaagcgtggcaaaaagggaggctg

SEQ ID NO: 649344 - DNA, 604 bp, Homo sapiens
tactatgccatatatatatatacacatacacacacacacacactttttatatatacacactatactatatatacatgctatatattattactcaggttcattcacgtagatgatataggccagattaaatcctaccctttcacagcatttccataggagtaggaagcttcctttgatacagatgtacaactgtmcttcaacagtcccagtaaataaaatcttcagggttttcctccccatccagcctgagttaaatctacttataagtgatagactcttttcataaataattaatggttacttaacaagagtttagcattttcctgccattgttttgattacattaggttcacaaggtgactttttgaggaaatgtgaatggcatttaccctagatagctgtgattaatttttgtctgtttttagaaaagcttttgtttcattatcatgaagtaaaaaaatggagcctgaagaaaatcaaaacaaatctgatctcagaatacctgaagctttgattaaactatcttagggatgctaggtctattttgtacttacataatattatttatttatgattttgatttatgtggaacttgcaatgggag

SEQ ID NO: 649345 - DNA, 556 bp, Homo sapiens
tctccagcatacggaatgaagctggacaagatccagaytaattatcatggtcaggaaggaaggtttcccctaaaaatcaggagattacgaattgtccgtttcatgggaaggcagctacacaaagagatggtgaaaatgtactctttttcttacattatatttaaataataacttgaggtggatatttttagcatctgaaaattccacatcatctacaagtgttttaaacttagagtactgcccagagcatcacatcttgtaaagtccagactttcaccctttatccacacattgatgtatttgttcctgaatccaaaaaccacgtgctaactgctcgtttgtgccaagaactgattaggggttaagatgaggtgttgggatacagagatagataggctcttctctcagagagtttaacatatttaaggaataaagcaagaacatctgtaatatgtatatatatatatataatatctgttatatagtgtgatgattcccattaattgaagactgtccccaaatcatgatggctggtgagaaatatgtcctgaattaa

SEQ ID NO: 649346 - DNA, 556 bp, Homo sapiens
tctccagcatacggaatgaagctggacaagatccagactaattatcatggtcaggaaggaaggtttcccctaaaaatcaggagattacgaattgtccgtttcatgggaaggcagctacacaaagagatggtgaaaatgtactctttttcttamattatatttaaataataacttgaggtggatatttttagcatctgaaaattccacatcatctacaagtgttttaaacttagagtactgcccagagcatcacatcttgtaaagtccagactttcaccctttatccacacattgatgtatttgttcctgaatccaaaaaccacgtgctaactgctcgtttgtgccaagaactgattaggggttaagatgaggtgttgggatacagagatagataggctcttctctcagagagtttaacatatttaaggaataaagcaagaacatctgtaatatgtatatatatatatataatatctgttatatagtgtgatgattcccattaattgaagactgtccccaaatcatgatggctggtgagaaatatgtcctgaattaa

SEQ ID NO: 649347 - DNA, 496 bp, Homo sapiens
cttcagcgctgattgaacaactttgggtaagtggtggggtaccagggtaaagaatgagattaggttaaaggcctaacttaggggagytagcgtctctcctaagacaaagtaggttagaggcacctcttaataaaaggcaagaacacttgacccacctcgggttagaggcccgacttaggaaggttagagtcccttgtaaagatttagggggttagaggcctctctgggtaaagtctctcttgactaagaacaggttactgctaattaatctgccttgcactctttgctgatggctgcgggtgacagggttaggcatgtacaggatcgtgggacatggggaactttttccttcataaaacggaaaatgagagctaacgagactgctgaaaaagatccctttgctaccgagaagcagccacctgaacttttcagtgttgctgcaatgagtgggtcttttctctggcttccctataccattcaccttccccaccctgcc

SEQ ID NO: 649348 - DNA, 492 bp, Homo sapiens
catctattggaggagggcgagctcctacacaagtgagggcacggccaggcagggtaggacttggcaggtaatagaaacagggtgttatgagggtgtgggtgaggaacaaacctgttgcctgtgatggagattgggtcaggagagaggtgccaggggcaacttctcaggatgaataacatttgaagagaaacaggcagaatagacagggttttgagaagccagaaaagggatcatagggcattctgggaagaaggaacattgcaaagagagaagtggaggtaagaatgttaatggagcactgcggtggtattccatggctccagtgagaatggcagggatgaagagaygcataaaagactggcaggcagggtggggcctgattgtgaaaggacttaaccatggcagtgagtttccatttattgtaaaggcattgggagccacataagcctttttgagtgaggagctggctttatcagattggtgttgtaagag

SEQ ID NO: 649349 - DNA, 492 bp, Homo sapiens
catctattggaggagggcgagctcctacacaagtgagggcacggccaggcagggtaggacttggcaggtaatagaaacagggtgttatgagggtgtgggtgaggaacaaacctgttgcctgtgatggagattgggtcaggagagaggtgccaggggcaacttctcaggatgaataacatttgaagagaaacaggcagaatagacagggttttgagaagccagaaaagggatcatagggcattctgggaagaaggaacattgcaaagagagaagtggaggtaagaatgttaatggagcactgcggtggtattccatggctccagtgagaatggcagggatgaagagatgcataaaagactggcaggcagggtggggcctgattgtgaaaggacttaaccatggcagtgagtttccatttattgtaaaggcattgggarccacataagcctttttgagtgaggagctggctttatcagattggtgttgtaagag

SEQ ID NO: 649350 - DNA, 589 bp, Homo sapiens
tttattgaccaatcacatgtcccagatactatcaaactgtaaaccattgctaacatcaccattaaggaactgggtaaactctagtacttcttccagttttaaaattattggaatcaaataataaaggaggactccttcctccccttgtccatgaatggtttgcaccygccagctagagaaacagctaaggcagctctgtgcaatagaactttctgtggtgatggaaatactccaaattcacgctaactaaaacagcagccaccaggcacacatggctatccagtgcttgaaatgtagctagtgtcactggggaactggatattttattttattttgaatattttatatttaagcacactcatctagtggctaccatattggacagtacagaactctaagaccttaagcaaagggtggtgcaggcagaaaagggaaatgcagaccatgaagtctaattcaagagatatgtttgccacttggtagaagcatacgtttgactgtagatatttggtgttactgtttttcattattgaaccctggaacttaggtcattgtgattcatctggaagagacttgcccactgccttta

SEQ ID NO: 649351 - DNA, 529 bp, Homo sapiens
agcgggtggaagaggggcagccaggatacgagaactgattcttatctaagcaatcaacgcaccctggctagcaataggcacacacagctcaaagtcataagcataacctctactttaaagtggtctacaatccacattggcctaaattatctggttaatttccatatcattaaacattaattgagcaccatctagaatattagagttggaagaaaccttaggagcatctagtttatcccagttatacaaatgcaaacaggcctaacaggttaagggttcctcctagtggccgagccaggatttcagccccattgattaatttccagacacttgcgctttctcctctcctcactagaaattggattctccctttttatgaagagcctcaaagcatcatgaaatgagttttcagtgtcagttccatgtactagcattgcctaactgttagtctaaaagtgtgrcccctgaagtcagagttcatgtcctctggtagaagggaaaatggactcataatgtcatcccaactctt

SEQ ID NO: 649352 - DNA, 587 bp, Homo sapiens
catgtcaatgaatgtcatcactgggagccgctggagctcagtccagccaggatccaaagcgacagtgcagagcacagctcakaattgtcccagcaagagacctcctgccctgtcccccattgcttgagaggggctcctggaggcactaactcaggacatgcctgggctgcccagtcaacgtgggccagatgagctcttgcaagcagtggtgtaggtgacaagtcatctgtatatgcaggagccaaccatgaggctgcaggtgacctccagcaccagctgaaggactataggcaggatgttgtctgcactgaactactctagccatgcctttagagaccagcaacaaaataaacatccctgggggaacagtgcaccacagccctgtctttcatcagctaccgacgcctgtatcataaatgtgtgcaccctggcttttcacaaattgaacatacttgtggaactggcacacagctcaagaaacagaacctgaccagcgcccccaatcccttttatgcccctttacaggcacaaccacccaaagggtacctgctcccaactttttttttcttttttttgagatggagtct

SEQ ID NO: 649353 - DNA, 660 bp, Homo sapiens
cataaatggtacttgatttatgacagaaatagtgctgaagaacagtagaaaatggatgttctctctcaaatggtgctgagaaatttcctgtccatgtggaaagaaakaaatctgaatcttcagatcataccgtataaggaaagaattccaaatggattaaaagctgaaaggtagaaacattaaatagatagaagagtattgagattaacttcctgacctgaagataggtgctttgctaaacaagactttaaaacagtagcgtaagggaaaacatttttaaaatagcatttacatttaaatcattaacttctgtttatcaacagacactattaaaaaattagaaaggccaataaatgggcagaagaagatatttccaatgcatataactgagtagaagcatgtatcagattgtgtgaagagcttctatcaaaagccctatagagactgagtaaaatacttgactcggaacttttcagtgaggaaattcaaagcttttgaaaagatgcttagcctcattaataatcaggaaaatataaattaaagccacaataaaatatcacttcactctcataagattagcaaaaattgcttcaaaatgtttgttaatgccaagtgataactgagaagtgaagcttcaggagctcttagcagaaatataaa

SEQ ID NO: 649354 - DNA, 543 bp, Homo sapiens
tgctgggctcgggggtcagcccgcgccaagtctggggctgggggcggagcctgccggtccggggcgggagggtgggcaagagagggagtcccggggcctggagactttggaggagtcggggccctgggggtaggagaccgccgggtgggagcggcaggcgcaagccgggcggsggggcgcgcgggccaggcggggccgggcggcggcagggactgcggaggtgcggcgtgagctggggcgggcggcgtcaccggaggcggagggggcggagccgcgctcgcagctgccacccggccgccgggcccaggcagaagccacccgcccgcggccgggcacgcaccgcgcgcagaccttctgcgaacaatgctccggccgggcggctggcggctcggagaccgacggaggggccgggggagcgcagcccagaggtgagcccgcgacgcgctctccaaattcggcctctttttgtctggcgagcgtggtcgcagaggggagctttggaggggcgctgcgatcgccgagcgggctacccccggggtgaca

SEQ ID NO: 649355 - DNA, 607 bp, Homo sapiens
gtaaatcatggcttcatacttgctgtgtgaactttgtaaagttatttgacctctctgtgcttcaggttcttcatctgtaatatggaagtgataatatctacctcataggataaggattgaatgagttaatacatataaagtacttgaagccaggacctggaacttttattaccatttcagtgtaattttttggtactctctgttatgtagctcagggctaggtggacacatttacatatccactaaacatttggtgcatctttgaaccaatattgtcatcagtcacttggaggacaaattgagcccatcttggaggaaaggtgaagaactgctgtcagcagccctctattccttctctattgttctgggtatttctgctttcatatgtcccctacatgtagtgtctttcctaagtgagagctcgcaaagtaccatttctccatttyattctagttgctgggtcattccagcagctcttggcccctggaagctgccggctggtttattccttaagctggcttcgataccctatagactcaactcataccaactcttttgtgctcctaaacataccattttctaacaattttatgtcttcagatgagtt

SEQ ID NO: 649356 - DNA, 587 bp, Homo sapiens
ctcttcagatactatttaatactcaatgtgctaataatgtcaaaaattgttaaatgcgtatatatctgtatttcaaataggatagtttatcaagtcaggttttccaagaagctgatactatgcaattataagtcactcaaaaggttatgagaggaacgttagttaaagattaagaagaaaaagcagatctaagtgcagggagtcttcagtgatgcaagcctggcttctgtcaaaggaggggragaaggatgagaatgaaagagtcacagcctgaaacacagtttaggaagttttggcccggacaataggagtctccagtccaaagtcttctgttggaaggttatcacaaatcttaaaaatggccttcatcaatactccgagcatgctcagtcattggccaggaacagccagagaaaatatggtctgagtgcaaagatagtcatacaaccagaaaaacagtagctggggctgcctgtcatccatgctcactgaagcaagagttgtgagtggtgaccacatatatcaaatatttctatgaaaaaaacaaaacaaaacaaaacccaatcaagtgaaactccaaaatgata

SEQ ID NO: 649357 - DNA, 508 bp, Homo sapiens
taactgaccttccttctttcctccctcttgtaatagtctttgtgtattagaagtaccttgaaatgctgggtcagaaaatgtggcacgaaagagaaaagctggctcactccacatcttgacctgatcatttcctgaacatgattgaggtrgatgactctttgctcctctttggctgacctgcaggaataacattgggaataagcaaatctcctttggactccagagggtggtggtcaggaagtgggccattgagaacctaggtggaaatgcaggccagattattggagtagtttgctttataatgttaaaatatttatacacatgttatgtgggcctctatttccactcttatcttagagcccacacgtattatggagggtctagcagtgtttgtggagtttttggtactatacctttttcaagataaagtaaaaaacatttatggataatttaattgttccctatgtagattccagtgccaaattcctctcttagacactgtttctag

SEQ ID NO: 649358 - DNA, 649 bp, Homo sapiens
aacactaataatctcttcggtgttgagaaataacctactaatcattaacttaataattatcagctcaaccaggaaactacaccacctaaaaggtagttaattttatcactcctagacatctacaggagaccatgattctccattatgtgaatgccttgctgcccatgtgatgcctgcmcccatcaattataagaagcttcagtcatttagtacttaatatgtaatttttaaaaattacataagtaataccttctccttatagagaactgaaactttcagaaacagttaaagcctaatttgaatattgccaaagccctgtctcttcttcagagacaaccagtgtttccagtttggtgtgtattttccccaaatacagtgaatgtgtgtataaacacgtgtagatttacctgtcctagatatgagcatttgctttgtgagtctgctttaagtcaagttctaaactatggctcagtttaaaacttatctttttctatttaataatataccttagaagtcaggccatgatattaagatgaataataatgaaattattaatattagtcaaatttaattagttgcttattacgtagtgggtacttggtgtgatatatggattatctcatttaatcatcatgacaagctaataaat

SEQ ID NO: 649359 - DNA, 480 bp, Homo sapiens
gttaaaaattattaattctgggtctatgtgaccctgtaagaaggctacatcactactatatacttagaacctaaatttctatgccaaaatataggcgaatatagcaaatattgtccaaatttacaaggaaagagaaaatgaattgtgtrttcatcttacagtttctaataaaatccccaacattgaacttaaatgactctccagttgttcattaggagcatatgctgttggttgactgccagcatacattatctcaccttttctttctaaaatagaacatattcaatatatccaaggcttccaaggcttcagtacttctctaagtttactgtctcgtcttcagattcaggtatgatgtgattactctaagtatagcctgattctttgccaaaaataagaacaaaaatacgcatatggcccaattcagtacaaaggcaaatcagggcaaattaccttaagagtttttaagataaatgtttc

SEQ ID NO: 649360 - DNA, 414 bp, Homo sapiens
gaattcgaagattttctgattggcatttgacaactggctaaaataatttatctaaagaccggaatcaatagacaggagtgtatgggttaagataaggtgttttagagaccaaggttcttatgcagatgaagcttgcaggtagcaggcttcactgagaatagattgtaaatgatttttatcagacataaaaaggaaaaaggacttggaatcaggaaaaatcaggaaaaagacttggaaagagaaggggattctctacaaaatggagattttccccacagaaacagccttgtagggccatttcaaaatatgtcaaagaaatgtatttttgtrgtgaaatactttgatttctttcaaggcctgctatctgtcatgttgatatcttattgctacgaagagtctgttttgtcattctta

SEQ ID NO: 649361 - DNA, 414 bp, Homo sapiens
gaattcgaagattttctgattggcatttgacaactggctaaaataatttatctaaagaccggaatcaatagacaggagtgtatgggttaagataaggtgttttagagaccaaggttcttatgcagatgaagcttgcaggtagcaggcttcactgagaatagattgtaaatgatttttatcagacataaaaaggaaaaaggacttggaatcaggaaaaatcaggaaaaagacttggaaagagaaggggattctctacaaaatggagattttccccacagaaacagccttgtagggccatttcaaaatatgtcaaagaaatgtatttttgtggtgaaatactttgatttctttcaaggcctgctatctgtcatgttgatatcttattgctaygaagagtctgttttgtcattctta

SEQ ID NO: 649362 - DNA, 493 bp, Homo sapiens
gatacagtaagaggaactaaactaaattctttacaaaacaaacaaacaaaaaacaaaaacacacacacacaaataaaaactaactgcagacaaaatataatcaacagtgattttttaaccattgacaagaagctgaggatgctgatccctgacaaaagaaaaaataaaatctgacttatcccaagctttctctcagtttccagaaracacagtgaaaggataatccaaagaaaggataactctccctgtatattgagaaattgaagattggggcttagaaaggaaaatttagctagaattgcagaggtaaatagaagagagagagcatttgcacagagatggtgatatggtatggctttgtccccacccacatctcatcttgaattcccatgtgttgtgggagggaccaggtgggagataattgaatcatggtggcaggccatcccatcctcatgatagtgaataagtcccacaagatcttatggttaaagaa

SEQ ID NO: 649363 - DNA, 600 bp, Homo sapiens
tttgagaaaaggaagtcaataaatcccatttgatatgcaacagaaataaagatctcttatttcaattttaaaatgctttataacttacattgctttgtttyatgcattatttgttttgatcagatgcaaaatgagtcagtaatgtcatctaaccacaagtttgatacattttttaaagaaaaatttccaaaatactttaactgagcaataggctaatacttcataaattaaaatatttaaatattcaatctttctgagtggatatttgttgcatatctgataacttggcctaattctgtaattgggatgagaactacccaattttattggtaacctcttttctgctctgcaactttggaaatactatggaggactccaaattcatttgagacaaaaatattaaaaatgtatcccctgattaggatttcagttccaaagctctccttggagggatatagagctggagaaaatcacatttatttttcgtctctttaatattgatatataaaagtcaggttaaaattagtatcaaattgggaagcctgcatggtaaaccggctggaataatacactctgcaatatgaaggaaaaaggaaaaat

SEQ ID NO: 649364 - DNA, 600 bp, Homo sapiens
tttgagaaaaggaagtcaataaatcccatttgatatgcaacagaaataaagatctcttatttcaattttaaaatgctttataacttacattgctttgtttcatgcattatttgttttgatcagatgcaaaatgagtcagtaatgtcatctaaccacaagtttgatacattttttaaagaaaaatttccaaaatactttaactgagcaataggctaatacttcataaattaaaatatttaaataytcaatctttctgagtggatatttgttgcatatctgataacttggcctaattctgtaattgggatgagaactacccaattttattggtaacctcttttctgctctgcaactttggaaatactatggaggactccaaattcatttgagacaaaaatattaaaaatgtatcccctgattaggatttcagttccaaagctctccttggagggatatagagctggagaaaatcacatttatttttcgtctctttaatattgatatataaaagtcaggttaaaattagtatcaaattgggaagcctgcatggtaaaccggctggaataatacactctgcaatatgaaggaaaaaggaaaaat

SEQ ID NO: 649365 - DNA, 604 bp, Homo sapiens
acaacaatgtaacaagactctagtaagttcaaaacttgccctcatcttcctgtcttcttctgatctctccaaacccttccaatctctgcccactatccagtttcaaagccactttcacattttccggtatgtttacaacaatatcatattcctctaccaattttctatattagtcctttcttacattgctctaaagaaatacctgagactgggtaatttataaagaaaagcagtttaattggctcatggttctgcacgttatacagaaagcatgatgcatctgctgggcttctgcgggggcctcagtaagctaacaatcatggcagaaggtgaagggggagccagcacttcacatggctggaagcaggaagaagagtgagaggtggggaggtgctatacacttttaacaaccagactcacaataactcactcactgtcacaagaacagcaccaaggagatggtgctaaaccatttaagagaaaccgcccgatgatccaattgcctcccaacagrccccacctccaacagtgggacttacagtttgacatgagatttgggtggggacacagatccaaatgatatcaatgtgttaaaaggaaaagg

SEQ ID NO: 649366 - DNA, 524 bp, Homo sapiens
  misc_feature 1, 2, 3, 4, 5, 6, 7, 8, 9, 10, 11, 12, 13, 14, 15, 16, 17,18, 19, 20, 21, 22, 23, 24, 25, 26, 27, 28, 29, 30, 31,32, 33, 34, 35, 36, 37, 38, 39, 40, 41, 42, 43: n = A,T,C or G
nnnnnnnnnnnnnnnnnnnnnnnnnnnnnnnnnnnnnnnnnnntcagaaagaatcaaagaccctttccttcccaatctgctctggccttggtcaacatcttagtgccaaatattgctggtgtattatcattattgkcttacaccattttctgcagtgtttcacttaagccaactaatactctgaccttgatttgaaccatccaacagagagtaggaattccctccacaaagcatgttactcattaacatcttcctttacaagtctcttgatgttcattcacaaactcaattacctttttcctccatcaacctcaattatttgcatcattttccatgggcctatgggagtatttaattgaatacatattttttcttctcaaatcaaattttctgaaaaaaatttgtttctatgaactgtattttaggtatattccaggttggtacaaacactaattttcaggggtcattatgtcaaagagcccatccacaccccatggcctacatatgtcaaaggattgttcttt

SEQ ID NO: 649367 - DNA, 589 bp, Homo sapiens
aattcctgcaactcaacattaaagacataatatcccatagtgattaatatatccaatagtccttcctgactaaaggtacaaagttaatcctagtgttgttaataagcatggaagtcattatttattcagtgtcttcggttcaagcattgtcttaaaccaaactgatttcctactacaactgagtcctctaaaaacagcttcctctagtgtccctatttgaagtagcaagtcatttttatcataatgatgggcctcctagaacactacttcaattagatttaatatcacatgaccaaatcctgtaattctttcaaaatgcctggcaaaggggccagtgctgcttaacttgccactcatgtagttcatattatgtgctaattaaatgtgtctagtttgaaagcattgtctacacctacaaataatgtgcttcatgaaattctcarttaggtatatcctagcaccagataccgttttatctggctgtgccataggcttcccttaaatgtcctctacttacctcttgagggagttatttataattttaaagcattaaagcaaacataaaatcacattctctgaggctttctag

SEQ ID NO: 649368 - DNA, 397 bp, Homo sapiens
taggtatatcctagcaccagataccgttttatctggctgtgccataggcttcccttaaatgtcctctacktacctcttgagggagttatttataattttaaagcattaaagcaaacataaaatcacattctctgaggctttctaggttctagttttatattatttaaattaattccatttacattcacactgatatgttcaaagcaacagaccagatcaagctgtgacataccagacaggcagccactatctgctttctatcataaccagggagctgtcttagcaatgtatcattttgatttatggccatatagggtgcagaaattctattctacagcatcctctgctctgtacaattcattggtagtttctctggaaaaaaataatctagaatggt

SEQ ID NO: 649369 - DNA, 460 bp, Homo sapiens
atgtggggaggggaacttccttctgaaccattttcttaattacaacagtagtctcttattgcgcccttggaattctgcattgcttaatatttactactgtggagagcttgagcaattccaaaggatcccatttggcakagctgattaaaatttggtgaagagtgagctcagtcttcatcctctgtggaaacacaaagacgacaatgtcccattcatactgaatgacaattgcaattttgtatttatgtaaaggtagcacaagcaggtaatattctctccaaccacacatttcaacctgtaacttcatctttaccttggtttcctccctgatgttctcttcatgcactccagatttcacttagagcatgtatgagactctttcctaccttccataaggcctactgtaaattctgctctacatcctaccaatgataagaaactttgaataccaccccaggta

SEQ ID NO: 649370 - DNA, 644 bp, Homo sapiens
cacactggtttccttgaaccccttcaaacaagccagatatggggctgtcttgggcttttgcaccgtcttttccctctgcctgggttcccttctttcagatatctacatgtttaatccctcaccacctttaaatttttgcataaatgctatcttttcaatgatgttttctayggcctccctacttagcatctcaacctgtttcttggaccagcattagaaaatgaatatagagagatgaacacaatatatatggccctgccctcatagtcctagcaatctacagggacacaaaataatatgcaaaaaagtatttgaattatcttcagcacctttctaaagaaaaaaagctacttaaaacttacacttagaaatgctcaatatgagtcaatacattatgtcaccacctaaagtaacaagatgttaggctgcaactgctgtatgttttgaatgagactcattacactatgaagtcacatacttgtttaatattataataagacagaactaaatttaaatcatagttataccaaacactagctacactgaatctctacatctcaatgttctcaccagcaaaatcaagcttataataatactagcttcttcaagttatttaaaagataaatgagctaagacatgtaatg

SEQ ID NO: 649371 - DNA, 625 bp, Homo sapiens
tcctgttaattttctgtgttgcttcttggaaaaaatttacagtgtgaatctccacacacaattctgtctttccaaataggagaggcatgctaacaatgactctaatctgccattttgagaaaaaaaaatactggaggtctttatttttttttaatactatagcccattctgagttttcattacaacctccactctagtattgtatctacttttcacaaacccttatctttggtagctggatttaattcattaattttaaaattttgataaaaattatgacataattatattattatgtattttcatttgattatctaggtttatgaaactgactaaactaataattatttgataatatgattatattctgccaattcattctacgtgttccttggatatgttaataaacaatagaaacaagtccaactaaaagacatcacttattctgactcttgttttgaaaaataaaacctgacaaatcaaataaaagtaaatgarttattattcagacatccacttatggtttgggtatatattttgacagtccatgagaaaaattcctccaagggtcttcacctccagacataaaatcactttgttgcttttctaaaagctatttttaaaa

SEQ ID NO: 649372 - DNA, 452 bp, Homo sapiens
atatgaattagtagcaactattaagatgctttgaatattcccttaggtggatgagaacatgtgagcaagtactagcacagtggtagatgctttgtaaattgctcttactttcctaatgattgacaggctaatagctaaataactaagataatataagcactttcttagaatttagagatccacttaaaagacaggttttcattaggaatttctgtactttatttcacatttccataaaaaaawtcctcattgcaagaaccactgcacctattatatgaaaaaactcaagagaaaacaatcaggtgaccattacctctaaaacacctgatttgattcagttatcctataggaatcaagtatcaggctttacaagatcctcttttttcaatgttgttttactgcctaaaacaatgtttaagatgactaattcacgtttctttttgtgacttatt

SEQ ID NO: 649373 - DNA, 565 bp, Homo sapiens
ggtaatatatgagctattaggtagaatctttggaagaatcctgcttttgtgatggaactcactcattcctaaacctaaagcaactctacatcttctctaagaaaattttatagcaatctctaaaagcatcaaactgattccaaataatttaactgtgtttgagaacaaaatacaaatatacaaaaggaattcaacaaaatccrtcacataacaatatagaattcacaatatctggttttgatgaacataataattagtgttgaaacatgttaattcagttgttaaaaatatgctttattttttcaaataagatgggaaaatatgtatattatgagaaaataaaaatggaagaaataaaaacaagcagactcctaaaacagaaaaaataagtatattagattaaaaatgtatgaataaatttaacagcactttaaccattgtagaaaaaataccagtgattttgataacataacaatataaactatccaaaacagaaaacatagacacatttgaaaaaacaaccacactgtgttggacaatatcaagcagcataatacaagaagag

SEQ ID NO: 649374 - DNA, 471 bp, Homo sapiens
gaactgaatgaaaaatgcaaatcgaaagaagaaatacccagacagaccctttcctaaaacatgcatcataaaatatttaaaagcatctgctttaatgcatgggctgagtcaaagtaaggcaaattttcagatatctagaagagcaaaaaaagtctgaatccagaggtgtgagtgtctcatctggcatttgccctgcggtgtctcccaggacctactggcccagacccatgagcacctaattcaggaaacagagactgatgcccatgcaggraggaatataggctaaaatgcctcctgcataaatctaggatttctaaaaagaagcacgttaagtgcctgggctaggaaaatcccacccccataagaaagtgaaaatatgtgcttgtcttggtcccaatagggtagacaaaaaaatgaaaaataaaaaacgtatgataatttctaaatacaaaacaatagccatattggttt

SEQ ID NO: 649375 - DNA, 619 bp, Homo sapiens
ataacatcttatttaaatttgaagatacaaacactacygtatgcggtataaaatattctatacacagacctgtacttaaaaatagagaaatatacaaggggatgctaaacaattttagcctgtagttatcccttgtagaatttcttataatcttgtttctggttatgttgctgtatcaattatttttcagttttgggtatgtgtgaaatatttcataaaaggaagttggacgttttaataatacattgactttaagaggaggaagaataggtgattggggtattttgttatataccaacacatgactgaaataatcatctattctaattctgttcagttcagtggaaagtctttgaagcttttttaacagagttgcactttgtcatatctttgagaacattgtgttagattaagtggaacaggaatgcttagagggaaggagattaaaataatgtgttgtatggatatttgaggtgacatacaatagaactggaaaataaagaaacttcatgaaaaatagtataaaaagagacataaatgacttaccaattgactgctgtgtttgatagatgggaattgtagtcgtaacattggatgaaataggaaagacagactagta

SEQ ID NO: 649376 - DNA, 619 bp, Homo sapiens
ataacatcttatttaaatttgaagatacaaacactactrtatgcggtataaaatattctatacacagacctgtacttaaaaatagagaaatatacaaggggatgctaaacaattttagcctgtagttatcccttgtagaatttcttataatcttgtttctggttatgttgctgtatcaattatttttcagttttgggtatgtgtgaaatatttcataaaaggaagttggacgttttaataatacattgactttaagaggaggaagaataggtgattggggtattttgttatataccaacacatgactgaaataatcatctattctaattctgttcagttcagtggaaagtctttgaagcttttttaacagagttgcactttgtcatatctttgagaacattgtgttagattaagtggaacaggaatgcttagagggaaggagattaaaataatgtgttgtatggatatttgaggtgacatacaatagaactggaaaataaagaaacttcatgaaaaatagtataaaaagagacataaatgacttaccaattgactgctgtgtttgatagatgggaattgtagtcgtaacattggatgaaataggaaagacagactagta

SEQ ID NO: 649377 - DNA, 498 bp, Homo sapiens
actcacaggactgctgtgaggattgattagataacatctggactttacacagacctttacccacggtcaggacttgatgattgatactattattactgtttttattgttctggtatctgcatttgttctccttactgtaatgactgttgaaaaagctttcctgagatattagcagcgattaatcccctgggtcaaactgcatttgcagagtagytgctcagtcatctgtctgggctccaaagacaaaagacagaaatttttggcactagggtctaaacctgggaggaagcacaccatgctgaacagtgctggtgaagggtcacagccactggatattaggaaggctctgggtgttggggtaaagaaagtactagaagtaatttttcactcagaaagtactagaagtcactgaggagagatctatcgatgctgccccttcacttaagtccagcaagaatcactctggaacaaggattgtcaaatataagcacttcccct

SEQ ID NO: 649378 - DNA, 498 bp, Homo sapiens
actcacaggactgctgtgaggattgattagataacatctggactttacacagacctttacccacggtcaggacttgatgattgatactattattactgtttttattgttctggtatctgcatttgttctccttactgtaatgactgttgaaaaagctttcctgagatattagcagcgattaatcccctgggtcaaactgcatttgcagagtagctgctcagtcatctgtctgggctccaaagacaaaagacagaaatttttggcactagggtctaaacctgggaggaagcacaccatgctgaacagtgctggtgaagggtcacagccmctggatattaggaaggctctgggtgttggggtaaagaaagtactagaagtaatttttcactcagaaagtactagaagtcactgaggagagatctatcgatgctgccccttcacttaagtccagcaagaatcactctggaacaaggattgtcaaatataagcacttcccct

SEQ ID NO: 649379 - DNA, 596 bp, Homo sapiens
aatctgtgttagggttctctagaaggacagaaccaataggatacacacacacacacacacacacacacacacacacacacacacatatatgatgggagtttattaagtagcattaacttatactatctcaaggtcccacaatagtccatctgcaagctgaggagcaaggaagccagtgtgagtcccaaagctgaagaacttggagtctgatgtttgacagcaggaagcatccagcatgggagaaagatgtaggctgaaaggctaagcaaatctagccttttcatgtttttctgcctgctttatatcctggccgtactggcagctgattagtggtatccaccaagattaaggttgagtctgcctttcccagcccactgactcaamtgttaatcttctttggcaacaccctcacagaaacacctaggatcaatactttgcatccttcagtccaatcaagttgacactcagtattaaccttcacagtatcagtagaccattcttttttattgtggagtaataatccattgcatgggtgaactgcagttgtttgttccttcacctgttaaagtggtccagtcatgatcacatggggcacc

SEQ ID NO: 649380 - DNA, 574 bp, Homo sapiens
gatgagagatgccagctccctgctccttctggcttgaaactatagccctagacagggatctggaggtagttcaagaygcctgcccctccagcctcgaaactatagccccagactgggtgctggaggcagttggagacccctgcccctcctggtttgaaactgtagcccaagactaggcactggagccagtgggtgacccattttattgttgctcttgctcagtaaacatcttaattttactgaccttgggggtggggatgggagcaaggtgtgattcaaatgtaacagtccctgttttctatttgctgtatgtacttcaggcaatttccagatactttaaatggttggatctttttttttcataattttcaccggttaaatgattgttttgccaccaagctcttcacacttccattttggaagtcacaatatgcctctattcttaaataacaaaaataaatagcaaactggtacaatcacaaatagaggtttcatgcaggaagtttttaagcattacatgttttcattcttgcaataatgtcaaatttatcttttagaaatgggcaaataaata

SEQ ID NO: 649381 - DNA, 574 bp, Homo sapiens
gatgagagatgccagctccctgctccttctggcttgaaactatagccctagacagggatctggaggtagttcaagacgcctgcccctccagcctcgaaactatagccccagactgggtgctggaggcagttggagacccctgcccctcctggtttgaaactgtagcccaagactaggcactggagccagtgggtgacccattttattgttgctcttgctcagtaaacatcttaattttactgaccttgggggtggggatgggagcaaggtgtgattcaaatgtaacagtccctgttttctatttgctgtatgtacttcaggcaatttccagatactttaaatggttggatctttttttttcataattttcaccggttaaatgattgttttrccaccaagctcttcacacttccattttggaagtcacaatatgcctctattcttaaataacaaaaataaatagcaaactggtacaatcacaaatagaggtttcatgcaggaagtttttaagcattacatgttttcattcttgcaataatgtcaaatttatcttttagaaatgggcaaataaata

SEQ ID NO: 649382 - DNA, 644 bp, Homo sapiens
ccccatttcctcccacaattaagtcataattcctataataaattcattatgccataatattcatagwcactctgctcctctggttgaaccctgattggcatgccaggaatggcatgagcgggcaaataaggattctaggcagaaggaacaagagtcacaaaacctcatggtggaaaagagcttgatgtgcttgaggaacttaaacaaacccgtgttattgcactgtcatgtatgaggagtgagaggtatgagtctggcctaacaaggtaagcaatagatagagcttttgggttctcaaaagccataatgaagattctgtattatattataaaggcagtaagaagatcctgaatatttgaagtagaagactgatatatgatattcttgtttttttcttaagaagcatttgcattgatttcaaaagctaataatcatttttcttttttatttcaacttttattttagatacaggggctacatatgcagatctggtacatgagaatattgtgtgatggtaaggtttggagtgcaggccttatcacccatgtagtaagcatagtacccaatacatagtttttaaacctcccctcctccaccctatgctggtccacaatgtctattgttcttatatttctgtccatgtg

SEQ ID NO: 649383 - DNA, 606 bp, Homo sapiens
agaactgaagtccagctcgcgatttttgatagtactcttttaatcattattatttataaaaattagagaagataaagtcctgcatttcattgaataaatattggttaatkgaaacagattctttcaaagtaagaggaattaattttggcattttctatttcaatacgactttagcataatgctactttagcattatgacttacgttcattttttaaaaatatgtacatattatggtgacatttttcatgctgtaatgttgtgattctttatttccatttccaaaaagcatatattttctctcctgtttttcagatgatgacaacttaaagacattaaacttggaaaagtcaaagtcagataataaatttactgcatattgtttaattgttttgaggatggtggcagcattgtaactaattagttaattgttttcaaattaatttgtaaaatatatttatgtttataaaataatccaagagtgtcttggggctgttcagtcctttttttccatttggaatcttacatgattactgtgttaaagccactcagtgtgatcttattctttccatgtacataatgcaaacaggccttctttgcttattttt

SEQ ID NO: 649384 - DNA, 606 bp, Homo sapiens
agaactgaagtccagctcgcgatttttgatagtactcttttaatcattattatttataaaaattagagaagataaagtcctgcatttcattgaataaatattggttaattgaaacagattctttcaaagtaagaggaattaattttggcattttctatttcaatacgactttagcataatgctactttagcattatgacttacgttcattttttaaaaatatgtacatattatggtgacatttttcatgctgtaatgttgtgattctttatttccatttccaaaaagcatatattttctctcctgtttttcagatgatgacaacttaaaracattaaacttggaaaagtcaaagtcagataataaatttactgcatattgtttaattgttttgaggatggtggcagcattgtaactaattagttaattgttttcaaattaatttgtaaaatatatttatgtttataaaataatccaagagtgtcttggggctgttcagtcctttttttccatttggaatcttacatgattactgtgttaaagccactcagtgtgatcttattctttccatgtacataatgcaaacaggccttctttgcttattttt

SEQ ID NO: 649385 - DNA, 633 bp, Homo sapiens
ggtcttcagttaggaaagacctttaaaattgacacatttttttttcttaggggcctttattccagtgacttcagatttactgaatttgatccattgaattctttaccagttgtacttaaaattttgagtctcaataggaagtcaataatgcgtaaataaggaaacacttttcaaaatataaatatgatgacaatttcccccatcaaaagttttcaaataccatctttcattataacagtttcaaaatcagccctctagccttttttggtcacaatctgaagaacttgaaaaaaaataactgaaatgtactattttttttttaactttacaaactattactacctgtccccaggcccaaagccacagagaagattcaaaacagatgagaatttaggtaaaatgagataaataagrcaattctcttattgatatagcatgaaaaattaaaataaaaaattaagtttaaaatgtatttaaaagcctttttttacatcagttcacaaaagttagcactacagtctgctaattttgcccttatgaaatatatataatcaaaatcagtggtgctagaaataagactggtcattgggaagtcactgaagaccagatctggataaggcaggcaacttgcag

SEQ ID NO: 649386 - DNA, 633 bp, Homo sapiens
ggtcttcagttaggaaagacctttaaaattgacacatttttttttcttaggggcctttattccagtgacttcagatttactgaatttgatccattgaattctttaccagttgtacttaaaattttgagtctcaataggaagtcaataatgcgtaaataaggaaacacttttcaaaatataaatatgatgacaatttcccccatcaaaagttttcaaataccatctttcattataacagtttcaaaatcagccctctagccttttttggtcacaatctgaagaacttgaaaaaaaataactgaaatgtactattttttttttaactttacaaactattactacctgtccccaggcccaaagccacagagaagattcaaaacagatgagaatttaggtaaaatgagataaataaggcaattctcttattgatatagcatgaaaaattaaaataaaaaattaagtttaaaatgtatttaaaagcctttttttacatcagttcacaaaagttagcackacagtctgctaattttgcccttatgaaatatatataatcaaaatcagtggtgctagaaataagactggtcattgggaagtcactgaagaccagatctggataaggcaggcaacttgcag

SEQ ID NO: 649387 - DNA, 686 bp, Homo sapiens
ataatttcaaaattatttctaaagaagatatgttgagattattagtatgatttctgaaagcaatcagaatgatgaaataatattttcttaaaattattaagtttagcaaatactaaacaaaatcctcattacatataaagtacaaagaacatctagttgcattgtatagtttttcagtattcctactcaaaactatggaaaaaaatggaaatttacatttktgaacttgagtaggcttaattaagtattgagattcttttactccatttcgactgtaattggaaaatagacataacagctaattaacaataatattctaatatttctgggaaagtaatcatgacttgatatttcttttgtgattagaagttttctgtggcattacaaataggtatataaaatgagacatttttaaacaatattttaacaaaaaattaaatatttaagattaatttcttaaataaactaatgaatttatatttgtagcttataattgtagcttataaaaaaactagttaatttattctattatggtgctgtacatgtttatttgtggagacaagtaaactattaaaatgacttgataaaacaaacaaaaaggacaaagtgtatgaaacaataacttacaaataacttcatcagacagtgaaagaaagcaattcctgagagaagagaaacaattgaat

SEQ ID NO: 649388 - DNA, 548 bp, Homo sapiens
ctattgaacaatctcattgcttttaccagccagttcatggactggcatttgggaaacacccttctagtccagctttccatcctacaggaagatgaggacaacagtttagaggctgagctggaaagaagacacttcttctcattcccaactagctttccttccctcatacccactgaagacctaacacctagygttggcttccaagtcatgttgcctctcagtctttgttttcttatttttaaaactgagttactaatttaagacccactctaaggtcactttgagctaatgtctaagatggaagaatatagatgcttcacccagtggagcatgcttagactcaaagacaacatctggaaaatttcttactaggatataaaccaaatggggagagacatagttgagaatgtgaatcatatttcactaatgggtacttgttgtctatgaaccagctgggtggctccattctgtcagcaagtgaggcggggtcctgtcaggtctaatgagcagctctgctcacaccacacctctctgctccagacatgcaa

SEQ ID NO: 649389 - DNA, 492 bp, Homo sapiens
gattataacttggtttctttgagtccccacccaaatcttatctcgaattagaatccccataatccccacgtgtcaagggagaaaccaggtggagagtagttggatcatgtgggccatttcccccatgctgtttttgtgatagtgagtgagttctcacaagatctgatggttttgtaaggggctctttcccctttgctcagctcttctccttcctgccacctggtgaagaaggtggcttgcttcccctttgccttctgccatgattgtaagtttcctgaggcttccccagccatgctgaactgtgagtcagttaaacctatttcctttataaattacccagtctcaggcagttctttatagcartatgaaaatggactaatacactctcaggcagttctttatatagcagtatgaaaacagactaatatattgtattttcttagggatacataacaaatattctagttctgtttagaatcttatttcctactg

SEQ ID NO: 649390 - DNA, 558 bp, Homo sapiens
attccatgctcatagatagggagaatcaatattgttaaaatggtcataccttgggaggccgaggcgggtggatcacctgaggtcaggagttcgagaccagcctgatgaatatggtgaaaccccctctctactaaaactataaaaattaggcagtcatggtggtggcacatgtagtcccagctacttgggagggtgagatargataactggttgaacccaggaggcaggggttgcagtcagccgagatcatgccactgcacttgggcaacagagtgagactccgcctcaaaaaaaaaaaaagccataacaccttatagcaatttatagattcaatgctattcctagcaaactaccagtggacaatcttcacagaattttttttaaaaagtattttaaaagtcatatggaaccaaaaaagacatcaaattgccaaagctatcttaagcaaaaagaaaaaagcagcagtcaacacataacccaacttcaaactatactacaaggctacagtaaccaaaacagcatggtactggaacaaaacagacacacagaccaatgcaa

SEQ ID NO: 649391 - DNA, 565 bp, Homo sapiens
gacttgctctaccataattaaactgaacttaaattccctataatcccagcactttgagaggccaaggtaggcagatcacctgaggtcaggagttcaagaccagcctggccaacatggcaaaaccccgtctctactaaatacacaaaatcagccaggtgtggtggcacacacctgtaatcccagctacttgggaggctgaggcaggagaatcgcttgaaccaggraggcagaggttgcggtgagccgagatcacaccactgcactctgccctgggtgacagaggaagactccgtctcaaaaaaaaaaaaaattgtgattgaacattagatttatctttattttcaacaaattatccacttgaggccaggagtttgagaccagcctgggcaacatagcgagacccatccttgcaaaaaatttaaaaattatccaaacatcctgatgttcactgtggttccagctactcaggaggctgaggtgggaggatcacttgagcctgagaggttggggctgcagtgagctgaggtcatgctactgcactccagcctgggtgacacagtgagac

SEQ ID NO: 649392 - DNA, 565 bp, Homo sapiens
gacttgctctaccataattaaactgaacttaaattccctataatcccagcactttgagaggccaaggtaggcagatcacctgaggtcaggagttcaagaccagcctggccaacatggcaaaaccccgtctctactaaatacacaaaatcagccaggtgtggtggcacacacctgtaatcccagctacttgggaggctgaggcaggagaatcgcttgaaccaggaaggcagaggttgcggtgagccgagatcacaccactgcactctgccctgggtgacagaggragactccgtctcaaaaaaaaaaaaaattgtgattgaacattagatttatctttattttcaacaaattatccacttgaggccaggagtttgagaccagcctgggcaacatagcgagacccatccttgcaaaaaatttaaaaattatccaaacatcctgatgttcactgtggttccagctactcaggaggctgaggtgggaggatcacttgagcctgagaggttggggctgcagtgagctgaggtcatgctactgcactccagcctgggtgacacagtgagac

SEQ ID NO: 649393 - DNA, 448 bp, Homo sapiens
gagggcctgctggacggcccagcagaggtcaccaggcatgtttgagtcatacacctgtcactgtttgattaactgcctttgttctgcttctrtaagcttgctaagcccaccctgtgagtttcacgcagctgcatgcttaaaaaccaggccccatctttgttccaggctcagccttttggatgcgaatctactaggccagtggccactttaataaaatcctcctgtctcatccattggtctctccagtctcttgaatcccgcaacactacaatggctccaagacagcatgtgggatctaagtaataactttttattttttttattttttttatttttgtacaagactgggtctggctttttcactcaggctggagtgcagtggtgcaatcacagctcactgtagccacctcctggtctcaagccaccctcccaccttagcctcctaagt

SEQ ID NO: 649394 - DNA, 589 bp, Homo sapiens
acagttctgtgggctgtacagacttatgcttatagggaagcctcaggaaacttacaatcatggcagaaggtgaaaaggaagcaagcacatattcacatggctgaaacgagtcaggggaggtgctttttaactttttaaacaagcagatcttaggataactttatcatcagacagcactagggggatgaggctaaaccattagaaaccacctccatgatgcaaacaccttctactaagcctctcctccaacactggcaattacaattccacatcagattggggatgggggggtgcacaaatccaaaccatatcaagaagcatgttaaaaattgagggaagttctaatcaaatgacaagtcaggacacggcattccatcaacataacactcctctcaatacattccaaartgggagaaaggaaaaagtgcaaggatgaagaagggacacagcaaaatgacaagatgactaacaagatgacccctgtggaaagcatttactgattcaacaaccaaataatgaagacaatagagcaaatttgctgagtttctatgctcttgatgtttattagggaagggcaaaagccagtccc

SEQ ID NO: 649395 - DNA, 654 bp, Homo sapiens
ctgagcttattagagcccaccgttttgcatgaataaagcagccctggagtctctcaggggagggtgtttgtaacatctgttcaggcacggtttcatttgctatatacccagagactagcacggtacaagttgtggggagatactcatgtgagttggcggactttgggtcaaatattttccctaaacccaggtctctatggcattctacagtacactctgcatccttctaagggacactggaagagcaaatggattgtacagtgagttacaaataaaatggccaatctcagcatgaaaggctgggggtgttacctgaatgaggatgcagaccactccatctacatacaagcaaacctaagygaccatgagcctgccggaaagaaatcacatgctatgtaaaggcttagtaacagtgatgaatatttgaacttgaactccagctccagagcagttcagtggcctctcttccaggaacagaagccaaagcagctcaggattcttgaaggctctgaaaggtcaatgacaatcctggtatatgtcaagactttcccaccaaagaagggctccatgtgtagagacttagaaaggattcccaacttccgccccttcaaaaccagaaacaaaggtgggggacagcccaattaagtggcccta

SEQ ID NO: 649396 - DNA, 606 bp, Homo sapiens
cagagtgcccattcctgatgtccacaaagtacagtaatgcacccaggcttgatttggagccactcttgccttcctgactgttttcaaagatatgtcgcatggcctctgagccagtgcaacaagccttrcaggcattggtatttgcacaacaaatagtatttttttttttttttttttgcttaaataagggaaatagggaatatttatcacagctatacatttattcatcatttaattcccatttatttattcattaatttattcaaacacttcttaagcatgcaccatgtgtcatgcccatcttagaggccacaaaggttctaaaactattacttgtggacagaaaaagagacccatatacatgtagcattatgtcttattggaattcagagcaggaagagaacacatctggctgggggcaggatgaggaaggacctgataaattttctattgaacaattactctaaataagtgtgctttctttagatggtaaggattagaccaggattcaagattactggattttgagtcaaagtttgagctccttgggggaaaatctgcatatatgcagagtcatggtggtaattacagtattaagccccattt

SEQ ID NO: 649397 - DNA, 606 bp, Homo sapiens
cagagtgcccattcctgatgtccacaaagtacagtaatgcacccaggcttgatttggagccactcttgccttcctgactgttttcaaagatatgtcgcatggcctctgagccagtgcaacaagccttgcaggcattggtatttgcacaacaaatagtatttttttttttttttttttgcttaaataagggaaatagggaatatttatcacagctatacatttattcatcatttaattcccatttatttattcattaatttattcaaacacttcttaagcatgcaccatgtgtcatgcccatcttagaggccacaaaggttctaaaactattacttgtggacagaaaaagagacccatatacatgtagcattatgtcttaytggaattcagagcaggaagagaacacatctggctgggggcaggatgaggaaggacctgataaattttctattgaacaattactctaaataagtgtgctttctttagatggtaaggattagaccaggattcaagattactggattttgagtcaaagtttgagctccttgggggaaaatctgcatatatgcagagtcatggtggtaattacagtattaagccccattt

SEQ ID NO: 649398 - DNA, 571 bp, Homo sapiens
acatgttatgggtatatgtgtgtgtatgtataatgctttctacaataaaaatgaacatttctgataacctgttccattataggctaatctraatgttggaacaatctctctttattgaacagaagtttctctttgtaaccgccagtgctcctatttggtttagttaattctggattggatgctataatgcaactatttttataacttctcaggtattatttccaaatatggttagccatgtcacattatagtacttcttaaaaattatgtattctgtcaccacataaaattaatatatagatcaaattccagggcttacattttctatgagatttaaattgttccatctaaaggttacagatttataactataaattatccaagtgtagatctgtttttaaagtagttttacttgagaaaatgaaaacaaataccaaaatataaaaatattttgaaactgttaatcaaatgaaatacatttaaaagcagagttagaatcttctttcttctcttcccaggctttgttttttcctacctattctattcttactccatttttgaatttgacatt

SEQ ID NO: 649399 - DNA, 571 bp, Homo sapiens
acatgttatgggtatatgtgtgtgtatgtataatgctttctacaataaaaatgaacatttctgataacctgttccattataggctaatctaaatgttggaacaatctctctttattgaacagaagtttctctttgtaaccgccagtgctcctatttggtttagttaattctggattggatgctataatgcaactatttttataacttctcaggtattatttccaaatatggttagccatgtcacattatagtacttcttaaaaattatgtattctgtcaccacataaaattaatatatagatcaaattccagggcttrcattttctatgagatttaaattgttccatctaaaggttacagatttataactataaattatccaagtgtagatctgtttttaaagtagttttacttgagaaaatgaaaacaaataccaaaatataaaaatattttgaaactgttaatcaaatgaaatacatttaaaagcagagttagaatcttctttcttctcttcccaggctttgttttttcctacctattctattcttactccatttttgaatttgacatt

SEQ ID NO: 649400 - DNA, 571 bp, Homo sapiens
acatgttatgggtatatgtgtgtgtatgtataatgctttctacaataaaaatgaacatttctgataacctgttccattataggctaatctaaatgttggaacaatctctctttattgaacagaagtttctctttgtaaccgccagtgctcctatttggtttagttaattctggattggatgctataatgcaactatttttataacttctcaggtattatttccaaatatggttagccatgtcacattatagtacttcttaaaaattatgtattctgtcaccacataaaattaatatatagatcaaattccagggcttacattttctatgagatttaaattgttccatctaaaggttacagatttataactataaattatccaagtrtagatctgtttttaaagtagttttacttgagaaaatgaaaacaaataccaaaatataaaaatattttgaaactgttaatcaaatgaaatacatttaaaagcagagttagaatcttctttcttctcttcccaggctttgttttttcctacctattctattcttactccatttttgaatttgacatt

SEQ ID NO: 649401 - DNA, 323 bp, Homo sapiens
atgacataaatagtataaaggagagaggaaacagaaatatacattttaaggtttttataccatagttggtatagtacaaattataggttactgtaataagctagaataggtattgaaatctctagagaaaccatgaacattttwaaaaaatggtatgtgcattaatgttttcatagaacttccagcttttatttatttgtttgtattcatttaattttatttattttttttgagatggagtctcgccctgttgcccaggctgcagtgcaatggtgtgatctcagctcactgcaaccacctccgcctcccaggttccaatggtt

SEQ ID NO: 649402 - DNA, 323 bp, Homo sapiens
atgacataaatagtataaaggagagaggaaacagaaatatacattttaaggtttttataccatagttggtatagtacaaattataggttactgtaataagctagaataggtattgaaatctctagagaaaccatgaacatttttwaaaaatggtatgtgcattaatgttttcatagaacttccagcttttatttatttgtttgtattcatttaattttatttattttttttgagatggagtctcgccctgttgcccaggctgcagtgcaatggtgtgatctcagctcactgcaaccacctccgcctcccaggttccaatggtt

SEQ ID NO: 649403 - DNA, 323 bp, Homo sapiens
atgacataaatagtataaaggagagaggaaacagaaatatacattttaaggtttttataccatagttggtatagtacaaattataggttactgtaataagctagaataggtattgaaatctctagagaaaccatgaacatttttaaaaaatggtatgtgcattaatgttttcatagaacttccagcttttatttatttgtttktattcatttaattttatttattttttttgagatggagtctcgccctgttgcccaggctgcagtgcaatggtgtgatctcagctcactgcaaccacctccgcctcccaggttccaatggtt

SEQ ID NO: 649404 - DNA, 323 bp, Homo sapiens
atgacataaatagtataaaggagagaggaaacagaaatatacattttaaggtttttataccatagttggtatagtacaaattataggttactgtaataagctagaataggtattgaaatctctagagaaaccatgaacatttttaaaaaatggtatgtgcattaatgttttcatagaacttccagcttttatttatttgtttgtattcatttmattttatttattttttttgagatggagtctcgccctgttgcccaggctgcagtgcaatggtgtgatctcagctcactgcaaccacctccgcctcccaggttccaatggtt

SEQ ID NO: 649405 - DNA, 628 bp, Homo sapiens
ggatttttcacagatgccttttatcaggatgaggaagctcccttctaaatgttccaaatgtaaatatatgacttcatcaaatgtatttactgcatctattgacatgatcatttattaatatggtgcaatacattgattgatttgaggatgttcaaccaaccaacytttctgagatacattatatttgtccacggtacaatataatttttatgtattgttggaactgatttgctaacattttgtaaagaacttttatatctaaattcaaaaagaatatttgtttatagtttttttgtaatatcttagtctagctttggtatcaaggtgatactagccttataaaataagttggtaaccagttcctactcttcaattttctgaaagagtttaagtataattggtaatatttcttccttagaggtttgaacaaaaaacttcagagaagcaatctggggttagagtttcctttgtaggatgagcatttaattaaaattcaattacttcaataaatatagagttattcaattatctgattcttcttgagtgagctatagcaatttgtatctttcaaaaaaaattctcatttcatctcagttacaaaatttattaggtaatgctgtacacagta

SEQ ID NO: 649406 - DNA, 600 bp, Homo sapiens
cagcatctggtgcttagaaaactctcattaaaacatttattgaattcatacagattgaaagagaaaacatagcctatcaactgatctaaggtagctttagaaaatttccagtcatataagagttactgagcaaagactgtcaaaacaaagcaaagtctttgttaaacaaagactgtcaaaattatgcctcttaaatgtttcaaaagggaatcatacattctcactggcctgtgacggtttaaattttctatgattcagaacaagaacaaagatatgtttcttttaactctcatactaaactattatttgaaataataaaaaggatgtcagcaatgaaaagctgtacaggttgtacagaacagattgatacaaataaaaagctaataaatatttatgtggccgygtgtgggaggtgttgcctggagtgtttcccccacatccctgactatggagtgaaaaaggaaacttaggaaaaaatatacccaaagagggagatttaaatagcacagtgggcagtgggggaagtgatgactaatattgctgttagtagtggtttaggaacaaaagagacaagtcagctggaaaccttctggtgtcttc

SEQ ID NO: 649407 - DNA, 447 bp, Homo sapiens
actgtggcagtggagacagagcatcctagtcagacttctagaaccagcctggtctactttgctagtctcccttggattctgctcataccacaagcatgcttctttttaagcttcattgattctctgaattcttttcagctgaagttatctagtgttggtacagttgctaatgaaattgcctttgcaaagattaagagggagagaaatctaacatggctgaccccatcttgcatctaacttcaaaggctggctgtctttgctcatttctgggcatcagccaggctgatctaccatgggtagaatttgatttgtagtttamctttgaagtaaggatgataatagcccctccctaaaactgattccctctccatctttgtaagactaatgaaaggccacgggattaggattatgagcaagacctcaattctgctaaaatgtaggcatagt

SEQ ID NO: 649408 - DNA, 606 bp, Homo sapiens
gatcagccatacatatcaagtacattttgacaaacttgattcatactgttttcaaattatgaacaaccaaggctcttctatccaaaaatattgattatttaattctgaatatcattacagagcagtaatatgctctcagcatttggggatacaagagtcagaagatggacaagcttccttcctaacaacaattaccacttaattacaatataccaagtagtattttatctgctaggtatattggacttacttttcacagatagtttatactaacaaaatttctaaccaaaatatttcttgaaaattactgattttatttgaaattatgtgcaggaaaaatacaagcatatctctgaatttctatttgtctgttaaacaaaaggggataaatatgactaatgtcatttaacaagaggaattacagactatgaaaagagtagcttatttatatcaactcacaayactttccagagagagaaagaaaaaggctattatgtggcctgaacaagaagttggccatccttttccctttctttgtggaagatggtcctgataggatagagacttaaagaagggattgatttgttttctccagctgtcctaata

SEQ ID NO: 649409 - DNA, 608 bp, Homo sapiens
gcaagaaagtctgtacaaggtctatatcaggaaactacaaaactctgatgaatgatatcaaaaagaaactaaataaatggagagatattccatttttaagataggaagattcaatttgtcaagaaatcatttcttcctaacttgatctataaattcaatgcaatytaaatcaaaatcccaacaagttattttatggataccaaaaaattctagtttaaatggagagaaaaaagacccaaaatagtcaactcaatatttaaaaagaatgtcagcggactgacactacccaatataaagacttacattgacagtaatccagatggtgtcaattaatgaaaaattagacaaatagattagtggaacagaatagaaagccccaaaatagaacacacaaacatgatctactcatttttgccaaagaagcaatgacaataaaatgaagcaaagatagtcatttcaaaaattgtgatagaacaattggacaccctcatgaaaaaaaaaaaaaaaaaaactagaccttatatcatttaccaaaactaactcaaaacagggcataaacctaaatgtaaaaggctatactataaaactcccataaaataacgtaaaaa

SEQ ID NO: 649410 - DNA, 608 bp, Homo sapiens
gcaagaaagtctgtacaaggtctatatcaggaaactacaaaactctgatgaatgatatcaaaaagaaactaaataaatggagagatattccatttttaagataggaagattcaatttgtcaagaaatcatttcttcctaacttgatctataaattcaatgcaatctaaatcaaaatcccaacaagttattttatggataccaaaaaattytagtttaaatggagagaaaaaagacccaaaatagtcaactcaatatttaaaaagaatgtcagcggactgacactacccaatataaagacttacattgacagtaatccagatggtgtcaattaatgaaaaattagacaaatagattagtggaacagaatagaaagccccaaaatagaacacacaaacatgatctactcatttttgccaaagaagcaatgacaataaaatgaagcaaagatagtcatttcaaaaattgtgatagaacaattggacaccctcatgaaaaaaaaaaaaaaaaaaactagaccttatatcatttaccaaaactaactcaaaacagggcataaacctaaatgtaaaaggctatactataaaactcccataaaataacgtaaaaa

SEQ ID NO: 649411 - DNA, 608 bp, Homo sapiens
gcaagaaagtctgtacaaggtctatatcaggaaactacaaaactctgatgaatgatatcaaaaagaaactaaataaatggagagatattccatttttaagataggaagattcaatttgtcaagaaatcatttcttcctaacttgatctataaattcaatgcaatctaaatcaaaatcccaacaagttattttatggataccaaaaaattctagtttaaatggagagaaaaaagacccaaaatagtcaactcaatatttaaaaagaatgtcagcggactgacactacccaatataaagacttacattgacagtaatccagatggtgtcaattaatgaaaaattagacaaatagattagtggaacagaatagaaagccccaaaatagaacacacaaacatgatctactcatttttgccaaagaagcaatgacaataaaatgaagcaaagatagtcatttcaaaaattgtgatagaacaattggacaccctcatgaaaaaaaaaaaaaaaaaaactagaccttatatcatttaccaaaactaactcaaaacagggcataracctaaatgtaaaaggctatactataaaactcccataaaataacgtaaaaa

SEQ ID NO: 649412 - DNA, 608 bp, Homo sapiens
gcaagaaagtctgtacaaggtctatatcaggaaactacaaaactctgatgaatgatatcaaaaagaaactaaataaatggagagatattccatttttaagataggaagattcaatttgtcaagaaatcatttcttcctaacttgatctataaattcaatgcaatctaaatcaaaatcccaacaagttattttatggataccaaaaaattctagtttaaatggagagaaaaaagacccaaaatagtcaactcaatatttaaaaagaatgtcagcggactgacactacccaatataaagacttacattgacagtaatccagatggtgtcaattaatgaaaaattagacaaatagattagtggaacagaatagaaagccccaaaatagaacacacaaacatgatctactcatttttgccaaagaagcaatgacaataaaatgaagcaaagatagtcatttcaaaaattgtgatagaacaattggacaccctcatgaaaaaaaaaaaaaaaaaaactagaccttatatcatttaccaaaactaactcaaaacagggcataaacctaaatgtaaaakgctatactataaaactcccataaaataacgtaaaaa

SEQ ID NO: 649413 - DNA, 557 bp, Homo sapiens
agaaagaacagagccagaatgtagaagcagttgatctcttgggcctagatacttatttcttcctcagttgtctcttccataaaatgggggttattatagtaataataaaaacctacatttaggtttgttgtaaggatcagattaggtaatacatggaaagctctcagaacaatgtctggcactttataattattatgatattgttattgtttattattatttcatctatattatgcttcattttgcattgttggctagaatcttaagagatgctgtcagaccacgtacttggaacatgaagaatatgaaaccctggttaatttggactttagtaactttgaaatytatgacaattgtgcaacccaaggtcccaatgcagtttacatttctcctatccatgatgaaagagaatttgctgagtaaacaggcagagctagtgtaatggcttggagacatatttaacctccagagtattttggaaggtcctatgtgccagcaacattgtatttgttggatttgaagcaatcttacttttacattaaaatagatcccccaaa

SEQ ID NO: 649414 - DNA, 622 bp, Homo sapiens
atcctttggcacttagcggtcccaaacacctggctgccaaacagtagtggtccatggccgattaggaacccagccacacagcaggagatgagcagtgggcaagcaagcattacctcctgagctcagcctcttgtcagatcagtattggcattagattctcataggagcgtgaaycctgttgtaaattgcacatgagagggatctagtttgtgcactccttatgagaatctaactactgcctgatgatctgagctggaacagttttatcccaaaaccattccccactctctgcacagtcggtagaaaaattgtctttcatgaaatctgtccccagttccaaaaaggttgggagttgctgctttaaactattcctcactgaaaatgatgttggctaagggtttgtcatatatggcttttcttattttgagttatgatctttggatggttgtttattgagggtttttattaggaaggaatgttgtatgttatcaaatgctttttccacatctattgagatgattataatgtttttacttttaattctgtttacctggtgaatcacatttattgattctcatgtgttgaaacatccctgcaccccaggaataaaacccacttaatc

SEQ ID NO: 649415 - DNA, 525 bp, Homo sapiens
tttaaataaatatttaaatgattcttttaaatgtaattattgattcacaagtgtttgtcttcataattattcatgaaaaagtctagactaccagaatttgtactaataacattgataaaagaagagtaataatgctaatgtgaaataaaattgattaattaattaataagaacaataagaaaaaaacaaagttatcatttcatttgtgttccacatttactggcattataagttacaggacaattttggaggcaaygatatggggaaaaattaaaccagaaaaaaagcaataatatgtttgtgttatacctgtggcttttgagataaatgtaacctaaaatcatttaggtatgtgttgagcatttgcacatattgaatagaggctaatcacagaaagagtgccccattgtctttctaaagttcacattacttggtgaatatagttctttgcccaccagcctacattcatgggtacctacaaacctatttgattcagacgtcaggtagatatttgatatgaacaga

SEQ ID NO: 649416 - DNA, 521 bp, Homo sapiens
agtctggattgtacaggtggatccaatataatcacaaagattcagatcatagtaatgtgacaggaaaagaactctgtttgctccscatcctcacccaatgcatctcttcatttttctttgattttatggttgtcctgatttgtatccttgataagaaaatataatcattaattatagcactttctgaagttctttgggtcattacagaaaactatcaaacctggagggtattatgggaacctctgaatttgtaggcagtctgtcactagtgcaggtggcctgtggacccaacttgcagctgggatttgaagtgagggtggtcctgcagaggaaagagtccttgtgaagtctgtgctaagtctggatggtcagtgtacaagttggatttcagtacacactggcatttgaaacaggacactatcaaataaaatttgaaaagggtagtattaagataaaaatatcattttataaacatccatgtaacatttttacaagctgtattagttagaaatggaaaatga

SEQ ID NO: 649417 - DNA, 521 bp, Homo sapiens
agtctggattgtacaggtggatccaatataatcacaaagattcagatcatagtaatgtgacaggaaaagaactctgtttgctccgcatcctcacccaatgcatctcttcatttttctttgattttatggttgtcctgatttgtatccttgataagaaaatataatcattaattatagcactttctgaagttctttgggtcattacagaaaactrtcaaacctggagggtattatgggaacctctgaatttgtaggcagtctgtcactagtgcaggtggcctgtggacccaacttgcagctgggatttgaagtgagggtggtcctgcagaggaaagagtccttgtgaagtctgtgctaagtctggatggtcagtgtacaagttggatttcagtacacactggcatttgaaacaggacactatcaaataaaatttgaaaagggtagtattaagataaaaatatcattttataaacatccatgtaacatttttacaagctgtattagttagaaatggaaaatga

SEQ ID NO: 649418 - DNA, 583 bp, Homo sapiens
agggaggtcgaggcagcagtgagccatgrttgcgccactgtactccatcctgggggacagagtgagaccttggtctcaaaacaaacaaacaaacaaacaatacaaatgggcaatcaatctttacctaaagagatgttttacattatttgttactcagaaaaggcaaattcaaatcacattgaaatacctctataaattcattaaaatgactaaaattaaaaagacttacactctcaagtgttgacatggatttggaactatttagatgtctcgtatattgctggtgagagtgtaaaatagtgtaaatactctggaaaaagtttggcattttcttatatggttaaatatatagttaccttttgacctagtaattatattcctcagcatttatataagacaaatgaaaataaatgtccgcatgaagactcgtatatgagcattcatagcagattcattcacaacagccccaaactgctaaaaaataaagtacttattaaattatgaatggtaaacaaactggggtatagtcatacaatgtagtactactctgcattgaaaaatgatgaactattgatgcacacaa

SEQ ID NO: 649419 - DNA, 583 bp, Homo sapiens
agggaggtcgaggcagcagtgagccatggttgcgccactgtactccatcctgggggacagagtgagaccttggtctcaaaacaaacaaacaaacaaacaatacaaatgggcaatcaatctttacctaaagagatgttttacattatttgttactcagaaaaggcaaattcaaatcacattgaaatacctctataaattcattaaaatgactaaaattaaaaagacttacactctcaagtgttgacatggatttggaactatttagatgtctcgtatattgctggtgagagtgtaaaatagtgtaaatactctggaaaaagtttggcattttcttatatggttaaatatatagttaccttttgacctagtaattatattcctcagcatttatataagacaaatgaaaataaatgtccgcatgaagactcgtatatgagcattcatagcagattcattcacaacagccccaaactgctaaaaaataaagtacttattaaattatgaatggtaaayaaactggggtatagtcatacaatgtagtactactctgcattgaaaaatgatgaactattgatgcacacaa

SEQ ID NO: 649420 - DNA, 554 bp, Homo sapiens
gaattctaagtgctacatatttgtacactctgcaccacactgatgtcacttctgcctctaactagtctttaagctcatcctcttgctccactccagtcaacatggaagccagcatgatccttctaaaacacaagctagtctctccctaagcctccttatcccctgtgagaaggtgtcaaagttctttactatgatttgcaaggtcctctgtgaacaggaccctgctcactctgcctcacctctccccatcctcacttcatcctttatcctctggccttgtgatgctaggaataatgacccccaaaggtaaccaagtcttaattcctggaacctatgaagcattaccctacattgcaaaaggcaccttgcaggtataattaaggatcttgagatagggaaattatcctgggttayttcagtgggccctaaatataatcacaagtatctttatcagagggagattagactacagaagaaaagaaggtcatctgaccagggagacagagactggagtgatgaggccacagcctaaggaatttggtcagctaccagaa

SEQ ID NO: 649421 - DNA, 547 bp, Homo sapiens
tagtaaactttgattgaatgccaggcattgtaaattttaccttattgggtaccagatgctaatatttttatgcattttcttcagtttcattctggaatgaagttaaaatgcttggaaatctttttatccttttgggtctttgagttttttaaggagagatcagacctgcgtttagtgcagaactaattattctccactactattgctagtcttttctgaatattttatccattgctttgtgaaatattaggttttgctatgttagtggtacaaagaggyacaattcatggtcatgtgtgagagtcaggcagtgttccctctaatctctgatgattctttccttagccctggttattttccacacacacgtgacaataagtactgctgcatactaaaaggagactcctcacagatctccagagttctttctctgtgcagcagtctcttctctggtactctgttctgtgaacttttgctaattttgtcttccatatcagtcctatctcctcaagtgagggcatctgctgtactccacctgagttttccc

SEQ ID NO: 649422 - DNA, 555 bp, Homo sapiens
tcagttgaaaaggcagtcacagagttgtttaaaaaaaatgggatttggaatctgacagatgtgagagtcattcctagctgtgttacatttaccaaatctctgccggtttgaatttgtttccctgtctataaggtggaaataataagaccygttttatcacctcacatagcggagtcttaaaggaaagaagggaaatgaaaactatttatgacatatcaaaagttgtgtttgctgtcctgattgacgatcctctcatttacacttacacagccaggatgaaaataagtttcatttcacaggccacgtacggtggcacgaccaaatggtgcacagaggagggtgagagactctatgaaatttcaacaggaaaatgtgccctagtcaaatagtgatgtctaccgtgtattcttgtgggtttgggggcagtggtcatggcaggacatactatgaggcagtgtcatccctattcccatcctggattcttagacaccgaactctgtgtcccctaagcacaaacccttccccagctcccgctgccagataggatgaagatgg

SEQ ID NO: 649423 - DNA, 410 bp, Homo sapiens
gaattcaacacacagtatttataagggctcataatgcaatgacagtatactgcttatgactacttatttagagaatgtaaagtgagcagcttctatgttatctgagaatcacctcctcaaatgccaactggaggttgctggtaaggagtacccaaatcttcataataggtctataagtttatacatctgtaaatggaaactcamtgagaggtgaataatagagggaaggctaaaaatctacacagtattccagctatcttctctggattgtgattattggttcctatggtagataattaggaataaagtcatttatttgaatttgtttctagcttggataccaccgattgttatcatggtgactgagatcacctcattgtaacagtgagaatattcattttgtcattgtc

SEQ ID NO: 649424 - DNA, 560 bp, Homo sapiens
ctgtctttttacagggcaggtgctgagagcctgaagtggctctggagccttggccaaatggtatatccctgactctgggctgggtgctggcagcggacattggtctttggctttcactaggtggtctcaagctaaaacccacttakaaacttgggggccagatgtccaggggctctgatctgcaaagggtcaaaatggcataatcaaatggcatctgaccttgggggtcagatgcaactgccatctgcctcctttccaaggcacaaagaacatttcctgagtgcctgggaaacatgacttagacccaagccatacttgatacccaggtgctattctatgactttggaaaagtttctactcagactcagtttcccttgtatccctttttgtgggtttccttctttttgtcaggttctgatgtctcttttattttcatctggacttagcgtagtagggaaaaaaagtgtgtgctggagtcagtcttagggtcaaatgatgctcctgcttaatacaaggtgcgtgaattttgataagttacttagcccactggaaccccaatc

SEQ ID NO: 649425 - DNA, 560 bp, Homo sapiens
ctgtctttttacagggcaggtgctgagagcctgaagtggctctggagccttggccaaatggtatatccctgactctgggctgggtgctggcagcggacattggtctttggctttcactaggtggtctcaagctaaaacccacttagaaacttgggggccagatgtccaggggctctgatctgcaaagggtcaaaatggcataatcaaatggcatctgaccttgggggtcagatgcaactgccatctgcctcctttccaaggcayaaagaacatttcctgagtgcctgggaaacatgacttagacccaagccatacttgatacccaggtgctattctatgactttggaaaagtttctactcagactcagtttcccttgtatccctttttgtgggtttccttctttttgtcaggttctgatgtctcttttattttcatctggacttagcgtagtagggaaaaaaagtgtgtgctggagtcagtcttagggtcaaatgatgctcctgcttaatacaaggtgcgtgaattttgataagttacttagcccactggaaccccaatc

SEQ ID NO: 649426 - DNA, 622 bp, Homo sapiens
aggggcatccgccattactgaggcttgagtaggctgttttcctctcacaatgtaaacaaagccactgggaagtttgaactgggtggagcctaccacagctcagcaaagcccctgtagccagattgcctctctagattctccctctctgggcagggcatctgggaaagaaaggcagcagcccagtcagggcgttatagataaaactcccatctcatgggacagagcacctgggagagggggtggctgtgggcccagcttcagcagacttaaatgttctttgcctgttggctgtgaagagagcagtggatctcccagcacagcacttgagctctgctaagggacagactgccttcttaagcaggtccctgaccctcgtgattcctgagtgggagacacctcccagcagggtcgacagacacttcatacaggagagctctggctggcatctggtgggtgcccctctgggacaaaccttccagaggaaggaacaggcagcagtctttgctgttctgcagcttctgctggtgayacccaggcaaacagggtctggagtggacctccaccaaattccagcagacctgcagcagaggggcctgactgttagaaggaaaactaacaaaca

SEQ ID NO: 649427 - DNA, 378 bp, Homo sapiens
taaacctttcagtgatatgaaatcatgctttatgtcaatagttttcaatagaagcagtcccacccctgggrtaatgttttggaaaattgtggggacattttttattgatttgagagagcaatatcaacatttattagacaagggtcagggatgccaggtactttgaaaagtataatataatcttgccaagtaaaaaactgttagtgttccacataattttctaatgttccactcattattcatatacgtgagaaagaaacatagctatatttatctgagtctaacatcaaattccattttgcatatataaaaattcatttattttcaaggttttaatatacactaaatgttccaggaacacaatttccatgtaaatca

SEQ ID NO: 649428 - DNA, 579 bp, Homo sapiens
atataaaaatattttaaaaactcccagaagcactgtttcagtattcactggttcattttttcatggggcactgcatagaaaatagctaccatgaatgatgagaattaagtgtctattcttgagatcgttgactgtgagaggaggggaggggaagctttcctcatagaacagctgaagtttccatggatattttatcctwcaaaatggctacaactctcttcaaatttctttctttattaataatccattattgtatgtagaagtcatttctaaagttcaaaagtaagatagagatagagaagaaatctttggaaccataccaattaagaacttgttttgctgcaagtattacaaatctgagtgatagggcttgaacacaggtatttgttattctcacatacttagaggtttgagttgtgaggttttagtatttgcttgggtgctgggggtagaaaccaaggctcctactattttctcctctgtcatcctcagtggatggtttgcaccatcgtgtatttgtctcatatacaggagacagctgcaccagtgcctgactgtgagaagggaggagagggagta

SEQ ID NO: 649429 - DNA, 503 bp, Homo sapiens
ggaaggtgttcaggggcatagagctagggagtaatggagttgggtgtccccctggtctaccatgcccaagctgtgcctcagcttctgtgctgccatctcctgcagcacttaaacagaacccctaagaacaactagcagcacttgcctgatcaatgtagccaacagaaggaggacaacctatttttcatagattttttkggggattttctatttaaataatcatgctgcctaaaaaaggagacagtttcatttcttattttccaatgagcatgacctttattcccttttcctgccttattgcagtggctagaacttctagtactgtgtttaataagactgatgaaagtagaaatctttgccttgttttggattgtataaggcaatgtattctgtctttatcatgaaatacaatgtctgatgtagttttttaatagatgttctttatgaggttgaggaagtctccctctattcctagtgtatttgagaggattttctattttcat

SEQ ID NO: 649430 - DNA, 503 bp, Homo sapiens
ggaaggtgttcaggggcatagagctagggagtaatggagttgggtgtccccctggtctaccatgcccaagctgtgcctcagcttctgtgctgccatctcctgcagcacttaaacagaacccctaagaacaactagcagcacttgcctgatcaatgtagccaacagaaggaggacaacctatttttcatagattttttgggggattttctatttaaataatcatgctgcctaaaaaaggagacagtttcatttcttattttccaatgagcatgrcctttattcccttttcctgccttattgcagtggctagaacttctagtactgtgtttaataagactgatgaaagtagaaatctttgccttgttttggattgtataaggcaatgtattctgtctttatcatgaaatacaatgtctgatgtagttttttaatagatgttctttatgaggttgaggaagtctccctctattcctagtgtatttgagaggattttctattttcat

SEQ ID NO: 649431 - DNA, 614 bp, Homo sapiens
gccccacaaaaccaacttcatgcttaaatctgctgctcagacacactttggggagaaagcagtttttccaggagtgagctggagacagcacttccatgggagggaggtcaaatccaagactacccgctatttccagccatattcactatggatgaagaagggatggctctacccatgaccgtgcaaagcttccttgggaaccctgctgtcccttccacatgcaacctgtccaagatgcaaccctcagttcaccatgaaaacccactggccctgccgctccccatttcctttggttaatattaggcacaaatttttctgtaaaatgagatgaaggcatgtgattttggaaaagcttcatccttcctcttgagattcattcacaagatacagtagcacacaaaatacccagagaagttaagaaataagaaagctgtttaaattattgtgcacttcccaaacatatatagggcataacattttttgcacactgrcctttgctggcagggctctgctgagtggtgttaggaaatgtggccgacgaggctgcccagcctgcagggcctggcggagctctcctcctcctagggtctcttgcagtgctgcaggccagggaa

SEQ ID NO: 649432 - DNA, 402 bp, Homo sapiens
tgtatgtttttctcttgttaatcggtcttttgttwtaagtgcctctgccatgccctagcgatgggtgtggaaaagacacttcccctcacctatggaattttacagtcaagtatatgtgcggatacttgcccactaggaatctcacattgctccttggaaatggctagatctgtgcagctaataaaccaggcaatgcactaggaagttacatccacatctcatttaattctcactctactcttgcaagggcaatattactatcaaaaccattttataagtcacaaagtcaaggatgaaaagttaatgtgatcaagttgcaaggtaagcaaggttgtgtatccagtcctgctcactcctattccaccacacagtctagtaatttttaaaacttccatgccaaat

SEQ ID NO: 649433 - DNA, 569 bp, Homo sapiens
cttttttacacagcatatgttgcccagtttgttttcttccttttgatgtagttgtacttgttargtttctagatttagcctgtgagcttagtgtgtgtgtgtgtgtgtgtgtgtgtgtgtgtgtgtgtgcgcgcgcgtgtgcgcacatttgtgatcttctactttggtaatgtaattgggtagttgccagaattgaaccctggtctgtgtcagtcctgtggttttaaggaaaaggtaagagggaaagcataccacctgcacaaaagaactggaagccttctagacctctcccacttgctgctaccccaaaaggaaactgcccttatcaaggttttatttttatacctttagaaagaaacagaatggacaagcagaattctctttgtttataattcgccatctctgcatgctcataatggaagggtgtagagaggttcattctccatctcaattatttctgcactggtctaaacccatattttaaaaagttattatacttctttcattatcaataggcaaccttaaaatagaaaacctatttctttggtttgcattactactcctaaatg

SEQ ID NO: 649434 - DNA, 411 bp, Homo sapiens
atgtggaaggtagatagtgatagggtagggtaggtgaagcagggcagagtggggtggagcaagactggaagacaggaaggtattgtgcaagacagaatgatgaggttctattcttttctctgctaatgaccctttcccccttactattgctacataacaagttactccagtgcttagcagcttaaaacaattgtgggtcagaaatctgggaagggctctgctgggtggttcacacttgaggtctccctcatagttgtagttggatgttggttggggctttatttatcttgtctgtgctaaggtaaataaagatgcatggttggcagttgatgccagctgtcatctgctgtacacagcctctccagcagggtagtctgggkgtagtcagacttcttacatgacatatggctt

SEQ ID NO: 649435 - DNA, 543 bp, Homo sapiens
tgcattgctggtgggaatgtaaaacggtgtagccactctgaaaaatagtatggcaattcttcaaaaatttaaatgtagaactaccatatgatccagcaattctattcatgggtatatgtccaaaagaactgaaagcagagtctcaaacrgatgttcgtacactcatgttcatagcagcattatttccaatagccaaaaggtagacgcaaccagagtgtccattgatagataaaaggattttttaacatgtgtatatacatacaatggaatattattcagcctgaaaaaggaggactattttgatacatgatataatatggatgaatcaaagacattatgctaagtgaaataaaacagactcaaaaaaaacacacaaatgttatgtgattccactaagttcctagagtcatcaaattcatagagatagaaagtaaacagtggttgccagagcctgggggcaaaggaggatgggggagttgaaatttaatgatatagagtttcagctggggaagatgaaaaagttctggagacagatggtagcga

SEQ ID NO: 649436 - DNA, 543 bp, Homo sapiens
tgcattgctggtgggaatgtaaaacggtgtagccactctgaaaaatagtatggcaattcttcaaaaatttaaatgtagaactaccatatgatccagcaattctattcatgggtatatgtccaaaagaactgaaagcagagtctcaaacggatgttcgtacactcatgttcatagcagcattatttccaatagccaaaaggtagacgcaaccagagtgtccattgatagataaaaggattttttaacmtgtgtatatacatacaatggaatattattcagcctgaaaaaggaggactattttgatacatgatataatatggatgaatcaaagacattatgctaagtgaaataaaacagactcaaaaaaaacacacaaatgttatgtgattccactaagttcctagagtcatcaaattcatagagatagaaagtaaacagtggttgccagagcctgggggcaaaggaggatgggggagttgaaatttaatgatatagagtttcagctggggaagatgaaaaagttctggagacagatggtagcga

SEQ ID NO: 649437 - DNA, 487 bp, Homo sapiens
agaccatcttgactaacactatgaaatccygtctctactaaaaatacaaaaaattagccgggcttggtggcacatgcctgtaatcccagctactcaggaagctgaggcaggagaatcacttgaactcggcagacggaggttgcagtgagctgagaccacgtcactgcactccagcctgggggacagagcaagactgtgtctcaaaaaaaaaaaaaacaaaaaaacagttttgttaaagaagtgtaactcacttgcttctatcaattcttacttagatttcgaagcaaaaacttgactaaaacaggaaggaaattttgggctttataaagaaattcacttgtaaaatttaggaaacagaaactagttagccaagaaaactgtgcatctgaaaaaacagtttatagtagtgcttgtgacaattcagttctgcaataattttattatttattttatctgtaaataacacttcttatctaattgttccagg

SEQ ID NO: 649438 - DNA, 511 bp, Homo sapiens
aatctcatttacaatagccataaataaaattaaatacctaggattaaccaaagaagtgaaagatctctatagtgaaaattataacacaatgatgaaagaaattgaagacaccaaaaaaaggaaagatattccatgttcataaattagaagaatccaatattgttaaaatgtccatactaccccaaaaagcaatgtcaatgtcaatgacattcctcagaaatagaaaaaaaaaacttaaaatttatacgaaaccgcaaaaaccccagaatagccaaagctatccggagcaaaaagaacaaaactggaggaatcacattacctgattagaaattatactatagagctacagtaaccaaaatagcatggtgcttgcagaaaaactgacacacagactattggaacagaatggagaacacagaaaccaattcataaatctacagtgaactcatttwcgagaaaaatgccaagaacataccttgggataaggacagtctcttcaataaatggtact

SEQ ID NO: 649439 - DNA, 416 bp, Homo sapiens
gaattcaaatgagtttatgaggcaggtttgttggacttgaatgtaagcwtttgtcaatatcgattcctgcactgatgacctaacaccgcccatgtattcttacctgattctcactgcatctctaagaggtaggtagggatttttcatattctgaggaaaaagaaattatcagaatttaagtaaatgcaaagttacacagctagaaaatgaagggatacgttttaaaaaaacccttgctcttttctctccaacagctgagaaaacagggaccggagccaacgtggatctacagtgtttgttgatactgtactgggaaggatgcagacttctagtgaggaaagagaagaaatcacagtttggagtagaatccccaattataaactatctcggtggctcccaactattttgatatgata

SEQ ID NO: 649440 - DNA, 560 bp, Homo sapiens
aaccagatttttttcacagcagcctggtggaactagagtagcatgcttgtctttttttctttttttctcttttttccaagttttgaatagaatccattggcttgattaacagaagactaatattttgttttctaattctaccacggacttcactttactctctattctttttcttctttcttctttatatttattcgtgtcctattatttatatctctacaggccacttaaaactggcatggggatgaataagaggacactttattaagtcacaagataatattgtcattaacaaaatttgtatcataataaaatacaatatgtaagaagtagagttaaacacattagcattaagcctgagagatattgttctacaagataattagcataaatttgttcaacaaatacgtctcaagcacctcctactctwagggtgcctctccgtgctgggtcaatggcagtgcacagaatgcatggcctgccctcccagagcggacattccagctgggggtggggtggtggaggggagacaggcagtaaatgcatatgtaaccagagca

SEQ ID NO: 649441 - DNA, 535 bp, Homo sapiens
gtttggggagagtggatataagagagtaaatgaagggcatgatgtgggatgagacaggtgaggctattaaaagtgtcatggaattaatcacatgaatttttaaaaactgcaacttgtttttgcatattctataatgtagtggcttcaattagtttgacaaaatatttaaaatatgtatagtgtactattttctaacaattaaacaaccaaatttcattctcttcaaaaagcatagggcaatttcctattttctaagaatatcaytgtgaaaattacatttaattaattcttgaccttggaatacatcatgcaccatttaatctatcctctagttttatttggatttcatatccaactcatattcacccccaaagtatagagaatatgcaaacctgacctcttatttttagtaaactatcgttttttactgctttggaaaaaagtatatgcatgggcctggaagaaaatgttattttaataatctgacatagaaactataaacttctcagtccattttgtactggtttcaatggag

SEQ ID NO: 649442 - DNA, 543 bp, Homo sapiens
ccttgaggctctcaagccattttctaacctgcctgagagcctgcccagctctcctcagagagcttcgatttgtgagtaacagatctttttataccttcttagtgcacaggtgcaccctcagcctcaatatcacaactaaattttaggtcagaggttgacacctgctcccttctacaagggcaatcacaagacaaggatcgcctgagcagaaacctaatcaaatgaggggatgagggaagagcaaagagggcatgacctacaatcccctctaaactcaaagcaacaatttaggactgggaaccccaggaattcagatgatggatactgaaccaaagggttgtggatttgttcatgattactgccatctccagaccagcaaaggacacaactgggaaaagctgcactacaaaatttaaawtacctaaaatatggaagtggaacatgaacaagtacttcatcagggcccagatttacatgtgccccgaatgagtcaacatgaattctcccgacacccactgataccttcgtgtgtaacagcacaag

SEQ ID NO: 649443 - DNA, 410 bp, Homo sapiens
gttttcctggctttggtttgaacattttcagggacaggcactcactacccctgatacaacctctctctattgtcagttggttctaactcaaaatgcctctccttagcttagcatacactaagggtcagtaggataggaagaacttagaatcaggagcgtgatgtagtggaagatgagaaaagtggtttggagccagattcatggaagttctcaaatgtcatgmtaaggagtttggatttattaggccacaggacacattctgaatcaggcgacaccatgatgggtctcgtgggaggacaatgcctgccacagcttagagtatgacctggagaagagggagattagtgacagtataaggggatatcagggtgaagggatgttttgaattttaggaggcagggacagaattc

SEQ ID NO: 649444 - DNA, 568 bp, Homo sapiens
accctagtaattgctccatcctctaatttaatgaaaacccattaaaccgaaacaataattaaaatgagacatcatctctgtaggaggtttgcatattaaaatcactgtgcctttcaatgcaggcagatttttattcttgaaaaacagcatttgaagtaacatgtaaaaatgatttataatgaataatcataaattacagagcttggcagttgaacatgatgccctactgtttactattgaatctgagtagatgtggcaaggtcagggccaatacarcatttaaaaatgtctctttcatgcctgagaattaggaccgtgcacaaaagggaatgaattataattagatcagcccaccaaacttttaaagcaggctagagatgacacccttaatatacagagtagtttagactctgggaggaggagtgttgctacgtaggggaggcatagcattggagtagagaagtaatgatgctctcgtgttggggactagggaagccaaacagaaatatacacaataagctacaaagttggagtcagagacacatctctgctacttgctagaggtgag

SEQ ID NO: 649445 - DNA, 512 bp, Homo sapiens
ctagacgtattcttgaaaaaaaaaaaatttaaaaaaaagaacgggaagagttctggattatctggaccaaggatgatattgtgagattaatcccagaaggaggttttccccttttgtagaagagaaaatttaagaagactttagtagtaaaagatgtggcttataaacagactttataaacagaaaaagaacagttatctacaaaaaataaagttactctgatttaacaggttttgtttaattagctttcttccattttaattccctttcaatgcagagaataactgtctgtttatgtatcatcacacttgatcatcaaaactatcctacaaggatgttgttattgttgtcccagtttgtattagttatccatcactgtataacaaattaactccaaacttggagtcttataacaataagcatttattatcgcacaattcctgtggattaggaaaactgagcacratttagctggggaccttaggctcatgttcttggttattagcaggcct

SEQ ID NO: 649446 - DNA, 571 bp, Homo sapiens
acctgggatatcttcacatctctcctgatgtactactttggtctccattttatctgcacatccagttttctctgcccctctctcagtgtcttgtgtgtatcaaatgtcattaaagtttaatagaaaacagatgactcttgccctgttctttcaaaggacagtcacatgaacaccagtactccagaaggatgaaaccacaccttttctgagcacatggactcaggcctgggtagaggccaggacccagagccagtgagggataggcccgtaggaagkccagcaggaagaagaggctgaggagagaaagccaggataatgaagaccacttcaagggcaactggaagctggtaacaggacatgccctaaggcagcaggccccaacctttttggcaccagggcctagtttcgtggaagacaatatttctacggaggcaggggaatggttttgggatgaaactgttctacctcggatcatcaagcattaggttctcatagggagcacgcaactacatcccttgcatgtggagttcaccgtggggttcatgctcctgtgagaatctgatgctgccac

SEQ ID NO: 649447 - DNA, 589 bp, Homo sapiens
gcttgagttatacttggtgaaagaacagtcttgtccctggatcattcactgctcagattttttcttctgaatgttagtggacagagtcacctataggctacaagctttgttaaggtcaccataatcccaagaagctctcaaaagtggaaacgtagcagtctcatgttgaataaaaatttactttgaatatgtcgagtttaactactgcatttttaaaggtaggtgagaaaccaataccaacctagaggaaacaacaaaaatcattacaaggaaaggaagtaggctctccaaaggagatgaaaagatctttggatatttagttagtaaacatctcttgtttaggaaagttttcctttttattcartttaattaaattaattttctctctctctctctctctcttttttttcttgagacagagtctcactctgtcacctaggctggagtgcagtggcatgatctcagctcactgcaatctccacctcctgggttcaagcgattctcctgcctcagccatctaagtagctagcattacaggggcctgctaccatgcccagctaatttttgtatttttagtagagacggggtt

SEQ ID NO: 649448 - DNA, 506 bp, Homo sapiens
aggggaactaactgtagattagagattcaaacaaagaagaagccaagagtttttccataaaatgtgactgcccaaaagctctcagtccacagtactcacaaggagtkatcactactgaattgctcatcacagaattcctggtgatttctacagcaatgtatttttctaaatgtggtttacttaaaaggatgaagtatttataatattaaccaagattataaaatcttctttcaaacctagattaaatagatatttctatagttctctttggataatgattttctcttttcaacttttctttttttttttccttttgacagctagagtccccaaaggaacaaatgagaatagcatttcatggatgagaaatcatatcaccttcatcacacatctcacctcttgacattacttgcaattggataaacatgggggacagtcctattgaactgattccaactttggctggacaattacaattcacctgctacgtttctgaaccaaagtga

SEQ ID NO: 649449 - DNA, 652 bp, Homo sapiens
cacaattctgtaaatatactacttaattttaccatttaaaagagtgaattttatgctatatgaattatattttgataaagttattacagtatgtttgaaagggaagggatcaatggctttgatttggacactttatgttttaacatacccattaaacacccaatacaatatgttaagatgcatatctaaaagactgcatctcaaaagagaggtcacagctaaaaatggaaatttaggcaccatcatgatatagctttaaattctaatttaaaacatgggagtagtcagtcttctaaacgtggagttgacaaaattttctttcaaaaaacagcaaaatatatatatatatatatatatatatatatataaatcaaaaatataaatatatataattataaaatatatataatatataaaataatatataatatatatataaatatatctacacttatacacagaaagagaccaagatgtaaaataagaatattatgtaggtacttatatatgtattgatataattaataatagaataataagtatatatatttgtaatatagatcaactgataagaaaaatggaatctttcgtgrcatattctgttacttaattaagattaaaagttagtgttctttatctccaaaatcaactg

SEQ ID NO: 649450 - DNA, 496 bp, Homo sapiens
tgcttatatagtcatcttattattgaactttatctactctaaatcacatttttttcacacatctcaaatatgcacatggtttataatcagtgtcatgtcataatttgtttggccacactgtttaatctcctggtgatacacaatataatggtatatgttacaatagatcttaaatmcagtggaatatggtgacagccttttattcagcatgattttctgggagtgctgtgttataattggtactgtagggatgtagttgctgagctaaaacaagctgtccctaacttaggacgttgactttcaaagtgccacaccgattttgtgctctagagtttcttgtggtaaggaaacaggtaggtcaccaggacagcagctctgtccttttgttctttctttttaaacaaatgagacttctatataagctttccttaagagagaagctgtgttgccaaaccaaacagaattttgaaaatcaatgacgagagacattgactct

SEQ ID NO: 649451 - DNA, 496 bp, Homo sapiens
tgcttatatagtcatcttattattgaactttatctactctaaatcacatttttttcacacatctcaaatatgcacatggtttataatcagtgtcatgtcataatttgtttggccacactgtttaatctcctggtgatacacaatataatggtatatgttacaatagatcttaaatacagtggaatatggtgacagccttttattcagcatgattttctgggagwgctgtgttataattggtactgtagggatgtagttgctgagctaaaacaagctgtccctaacttaggacgttgactttcaaagtgccacaccgattttgtgctctagagtttcttgtggtaaggaaacaggtaggtcaccaggacagcagctctgtccttttgttctttctttttaaacaaatgagacttctatataagctttccttaagagagaagctgtgttgccaaaccaaacagaattttgaaaatcaatgacgagagacattgactct

SEQ ID NO: 649452 - DNA, 555 bp, Homo sapiens
aatttccaattagtgtaaacagcgtgaagatattgatactaatttataatgagagttaaatcttaaagggacactgaactgtttagggtaagatttcatagtgacagcttygaggaccagtgatgtgttcaacatgattctgaagcagaggaaaaggcactagattccactttatgtctggcatagaggaaagaagttataattttataactttcaaattaaataacattatattctatgttgtagaatattacgtaattttcctagaatgtgttcaatttgggacatttatatttatgggcataaaggtgcttccttccctcggtagtcattttccagttacctactatgcaaaattttatcccaacactgtataactccatatgaactattgtaacagccttcccattggtcttcctggtcacctcctctctcccagtctggatccattctatatgttatgattatagaacaatactgatcatatcattcaggtacttagtcccttaatgatgttgcatcacccacctgggaacactacagccctcagcctaa

SEQ ID NO: 649453 - DNA, 545 bp, Homo sapiens
aatgatttgattattcataagcgtgctgatataactgagatatctgttaacttctgcacatgcagaagttagcatacacaaaggtttcaagmcatgcctgagaaagggaattttgaactgaatcaaattacttattagtttacttgtttatgccatagcaactctttactctaaaaagtatttgaaacaataaggacagaaatatgtatattgcaacaggatataaaattaaatgtggcaaataaatataaaggggaaaataaaggtaagataattgaaatatataatatatgacacagagaaaatttggaatagagtcttaaagttctaatagctgatgcatttaatctgtgcttgaacccagagaatggatggccagacagcacatctcaatttattccctaactcatatgagattatggtttaagactaagccttctacagaggaacaattacatgtttcttcaaaagatggccagatgacaccttcagacatctaagaccttcaaaaagaccttcacaattctattgtctgtctctaagcc

SEQ ID NO: 649454 - DNA, 558 bp, Homo sapiens
tattccacatatattattgagttttttgtgctaggtgctgaggatttaaaatgaattgtagctcctcccattatgttgctcagtttctcagaggagctcaaagtctagctcacttctaagactaaataaaataaatgtgtgcttcagttaatacagtataaaataatagttgatataaaacatatatatgttctacctttaacaaattacagataatcaataaaacttaccccatacctattatataacataaccttatgagatattttggagaattaattcaaagcatgggttccagtctcaaggtgcttgcatttgcatagggagatgattcatacatttatagaaccaaaacaaaaatttaaaaaactaaattaaataaaataacaatagatatgaaaagtcacagcagactaaaatttactgcatcatgtcccagcaaataagaggtacaaatctgataagaaacaacattttgcgttgwcttacatgagaagtttcatgcaagaagaaaacaatcttcaagtataaatactttgggaatagaaggagagaaaa

SEQ ID NO: 649455 - DNA, 571 bp, Homo sapiens
cccttaggccacgttatatttcagaatttcttcccacatatacattccttggaaaaattcttaaatcatacaaaacacataagcattytaagcactgatcacactcaaatcagtgtaaacattatcacctcttgtcataaaatctccctgtagattttttccccaaaacattttctttattttcagagtgttggttgatgcctaaaagctaggtaatactgtaattccagcaactcaggaagttaaggtaggaggattgcttcagcccaagagttcaagtccagcctgggcaaaatagcgagaaccccatctctaaaaaaaaaaaaaaaaaaaagaaagaaagaaaaaacccagctaataaagtgtatagctaaagaatccatgcaaccttcttcatggaggacttcaatattttaagacaaaatatagggaatttgatagacatttctttcatataggattttaataattttaaatttaagaggtcacaaagccaaattaacacatcttcaaaactacagatttacaattgttttaatgattagatccattattgcaataaaataaattt

SEQ ID NO: 649456 - DNA, 626 bp, Homo sapiens
actgatttcagataaatacaaatcagttcatgaattgtcttccatcaaggctgtgggaggtttttggcatgatatattacaaaacatctgtctttttayatacttgttcatttttttattttagaagaaaatcatcctcctgcttttttttatacctttgtaaaaatgtttgataaatatattaatataaaaatagcattttattattgggatagagtaattataaaatccaggcaggtgtctcactcccatcttaacagtattgtagaaaaacaagtgtgtagatgacatggaatcttgtttttaggagtgcacaatcaagacttaaaaaaatactataaatagcaaccttcatgagaaaaagagattaattatatcattctgagttatttagaaaatattttaccaggcagaatcctcgtcaagctaccaatgactttctttacagaattggaaaaaactagtttaaagttcatatggaaccaaaaaagagcctgcattgccaagataatcctaagcaaaaagaacaaagctggaggcatcacgctacctgacttcaaactataccacaaggctacagtaaccaaagcagcatggtactggtaccaaaacagagatatagacca

SEQ ID NO: 649457 - DNA, 638 bp, Homo sapiens
ttggtttatggctgaagacaaattatacacagtaatatcaagaaaatttgtatttttaaattgttggacatttggacagcttccaagattttttatcatagtaagaaaccaacgaatatcttaatatttgtaacattttcttcttttaattactttctcagaatatatattcccagaggtaaaataagtttatttacccaaatcataagaatattggaagtcactgttcaaaatgtttttaaaaaaacttttatacatacgtgtgtgtgtgtatgtatgtatatatgtgtgtgtattgcatagtgattgtgcatatatgtatacacacacacamacacacacacacatgaatatacacagttggctttatatatcctaggtcctgcacctatggattcaatcaatcacaaattgaaaacattaggaaaaaatggcatctgcactcaaaatgtacaaagtttttttgtcattattcccttaacaatatagtataacaactattaacatagcatttatattgtattagatattataagtaatctagagatgatttagagtatacaggaagatacgtgtaggttatatgaaaatactataccactttatggattttggtatctataagaagtcctggaacc

SEQ ID NO: 649458 - DNA, 638 bp, Homo sapiens
ttggtttatggctgaagacaaattatacacagtaatatcaagaaaatttgtatttttaaattgttggacatttggacagcttccaagattttttatcatagtaagaaaccaacgaatatcttaatatttgtaacattttcttcttttaattactttctcagaatatatattcccagaggtaaaataagtttatttacccaaatcataagaatattggaagtcactgttcaaaatgtttttaaaaaaacttttatacatacgtgtgtgtgtgtatgtatgtatatatgtgtgtgtattgcatagtgattgtgcatatatgtatacacacacacacacacacacacacatgaatawacacagttggctttatatatcctaggtcctgcacctatggattcaatcaatcacaaattgaaaacattaggaaaaaatggcatctgcactcaaaatgtacaaagtttttttgtcattattcccttaacaatatagtataacaactattaacatagcatttatattgtattagatattataagtaatctagagatgatttagagtatacaggaagatacgtgtaggttatatgaaaatactataccactttatggattttggtatctataagaagtcctggaacc

SEQ ID NO: 649459 - DNA, 638 bp, Homo sapiens
ttggtttatggctgaagacaaattatacacagtaatatcaagaaaatttgtatttttaaattgttggacatttggacagcttccaagattttttatcatagtaagaaaccaacgaatatcttaatatttgtaacattttcttcttttaattactttctcagaatatatattcccagaggtaaaataagtttatttacccaaatcataagaatattggaagtcactgttcaaaatgtttttaaaaaaacttttatacatacgtgtgtgtgtgtatgtatgtatatatgtgtgtgtattgcatagtgattgtgcatatatgtatacacacacacacacacacacacacatgaatatacacagttggctttatatatcctaggtcctgcacctatggattcaatcaatcacaaattgaaaacattaggaaaaaatggcatctgcactcaaaatgtacaaagtttttttgtcattattcccttaacaatatagtataacaactattaacatagcatttatattgtattagatattataagtaatctagagatgatttagagtatacaggaagataygtgtaggttatatgaaaatactataccactttatggattttggtatctataagaagtcctggaacc

SEQ ID NO: 649460 - DNA, 638 bp, Homo sapiens
ttggtttatggctgaagacaaattatacacagtaatatcaagaaaatttgtatttttaaattgttggacatttggacagcttccaagattttttatcatagtaagaaaccaacgaatatcttaatatttgtaacattttcttcttttaattactttctcagaatatatattcccagaggtaaaataagtttatttacccaaatcataagaatattggaagtcactgttcaaaatgtttttaaaaaaacttttatacatacgtgtgtgtgtgtatgtatgtatatatgtgtgtgtattgcatagtgattgtgcatatatgtatacacacacacacacacacacacacatgaatatacacagttggctttatatatcctaggtcctgcacctatggattcaatcaatcacaaattgaaaacattaggaaaaaatggcatctgcactcaaaatgtacaaagtttttttgtcattattcccttaacaatatagtataacaactattaacatagcatttatattgtattagatattataagtaatctagagatgatttagagtatacaggaagatacgwgtaggttatatgaaaatactataccactttatggattttggtatctataagaagtcctggaacc

SEQ ID NO: 649461 - DNA, 661 bp, Homo sapiens
atttctttgttgtaaagcaaaacaaatgtcaaagtgtaattagaagtgacttttcaagaatgggtcctgagtgccattcaaagaaacttgtattagatggagaatcatttcatctgagtctcagaccctagctctggacatctaaccaaaggcaattaagttatttgttggatatataaggcttagagggagatagattcagggctgcaaatatagaaagtaatgctttctaatacacttggaatttcacatcaggttctaaagcagtgaactggttcttgaattcaacccatggaaagaatgtcaaagacttaaattcctcatatgtagtagtaggtggtaaggagacggatctaggttgaaatgccagatccctcacttagtagctgggtaagtttgcacataaaaaaatctctttgtgtcttactaattttatttgaaaatgagaatatttctatatacctcgcatggtagatagtagagcaaaataacatagggaaagcacctggtacatggtaagttctacatattcattaacctttgyattttaaaatcactattatttggagaaatatattaataagcatgtaattttgttgttttcttcttttgtttactctgtttttgagctaatacaaaatattgtatccttaaatctgac

SEQ ID NO: 649462 - DNA, 605 bp, Homo sapiens
ctttttagggaagattgagttttgagctattctcacaaggagaagtaaaattcaactatgtattatcacattctgaaaatgttcaaggtcattacagtaactacccagggaaagtgagtaggaaattaagccctctaaagagtctgattacatacataaacaaccaccacaacttgtaccctacacctgcgtgttataataaattaaaataatgargatcaaggggcaagagaggtggagacaaggttgcattttttaggcagataaccaccatgtttttactattcatttgggtatgagctgggtctaggtgatatgatacatgaatatttccaaatttccttaatatccagatttctccaaccacagtagagttgtgtttaagactatatccattacaccatggtttggagagtattacaagttcccccaaatattggtgcctatctggaatctcttgaattaaaaaagaaaatgtatgggaaacacatacccggcacaagaagaatattgaatggaagttaacagactctgaagaaaaccaaacaacatgtaaaacttgtatattaagaacaagcaatataacataaataaaagaatgcagg

SEQ ID NO: 649463 - DNA, 578 bp, Homo sapiens
atgtggtagacacagaattcatagggttgccaaaaagctacatgtgcaggagggctgcccaaaggaggggagaagcatgctctattgggggttttagactgtggatcaacagtgagggtgttcagtgtgtgcttttatccagacttagcagatgatcacttagacaatcagtctccagttcaatcctggcatgtaagaatttaaattgtgttttaaatatcaaccagtctggtgagataggcctcagaggatgctcttggagggctagtaaattgatacacagagtctgtttaggaacaatgtggtgatatatcaagaaccacaaacataatcatagccattgacctggaagtcccaattctgagaacgtattctaaaaaagaaaatttaaagatattttatatrtgttttaaccacatgcctatttaacctctcaactatatactgcaatacctgggtgaccacgaaagtatagttcattatcagacaacattcttattctctgttggctgattataaacgtttccatagtgagaggacaggacaacttcgaatgttaacttttaatatcgtataat

SEQ ID NO: 649464 - DNA, 579 bp, Homo sapiens
atgtgaaatcacaagtgtcatagtaagctctcattccaagtttttgtattaatcaaaacaaccttagtttcatttattgactatatactgaggaaatttattcaatttgaacttataaggttattttatgaataaaatatcgtttctatgtagtaaaattccatttacatttttatttaagaggaattacttctgcaaaaaaaaacgctagaaataacttgaaatgtacattccgaaacaaatagtatatgaytctccacacaaaacttagcttgataacaaaagcataaaacagttaccttgtttcctgagattttataaaatcacacactacacacaccatatataaggcaactaccagaatctgcttactagttaaaaatacttgctcttcccacttggttttgcacaacacctgcaatttaatcaggatgtttttgggtgtgcctgtacttccctgtcaacatttcagttttgggcaaacgccaacctgtaagagattttcatctggagactgtttcccttcttgcaacatcagttgtactgttgccaaaaacatcaccctactaagggaacatc

SEQ ID NO: 649465 - DNA, 631 bp, Homo sapiens
acccagagtcctaatgatgttaattgagcatctggatcccactgtgcctgaagctccatctttacactttttggaagaagagccttggtgctgatgcaaactgaagcaagtgtgatcatgaggttctgtgayctggggaggagacctagggtggaggctacagtggtgagggtagaggtcaagtaagtcatcagagagagaaaatgtcagagaggtcaggaagggccttgaatgcaaggcttaggagctgagcagatttgtgttttggcaagcttcctcccatggcagcaaaggggtggaggccaggccagggaggagactgggcaaaggcccaggcagttgatgctgaccctgggccgaggtggaggtcacaggcccatgaggagggggagacacctccctggcagtgccccaggtaaggtctccagggcactgctgcctttgtggccctgaccacagcagaccaaggtgaccccactcacctgggccttgggttgaaagaacagatgtgtccaggccaagaaggcagagcctccatttacagtgcagttgccaaggatgggtgggcccatcgggtcaaatcccagctttgtcacttctggctatataaccctgaacaagtcacttagca

SEQ ID NO: 649466 - DNA, 615 bp, Homo sapiens
ctgttttcatcagtgccataatctacctttatctttccctcttcaggcctataaaagtttttttccatcatatcaaattccaaatcttctttttatgcattctagacccttgctactcaaagkgcatctacagaccaacagcactggtgttactgttagaaatgcagtatcttgggcccgcaccaggcctgtgaaaacagaaccaacattgtaacaagatgattcgcagatatgctgtgctagagaagcactgtgctagatcactcatagctggaattgctttgcttttccagtcttcgtctattccccatgtgtgtcctctaatataagcaagctaatcttgagagaccttgccattttgtgccttcccccactgtctgctgagtatctttgccccttttctatgactgtccaaattttactagttcttcaaaagtcacctctaggtcaatgttttctttgaatgacaagtcttgccaggattgttttcttgactgacctcagcccccattgtgttgctcacatacactggcacttaattttattcagtctaccatattattacaaactgttgtctttgttttgttttatatctactagtttcatgtagaagtt

SEQ ID NO: 649467 - DNA, 574 bp, Homo sapiens
caaccacccattttattttggcttgtagcgtttctgatgaaaggttcactgttagcgtggtggagttccctatgtaggtaacctacccattctctcaagctgtctgtaatattttttctttagcattgactttagagaatttgatgactatgtgtcttgggattgtcaatcttttatcatatttctcagggattctctgaatttctggaatgtgagagtctacctctcatgaggttagggaaatttctgtggaccatatcttcagatacattttacaagttatttggtctctctccttctctctcagggatgccaatgagttgtatgtttggtctctttatataatcccatatttccaagacattttgttcacttacaaatttttttctctttatttttgtctgattgagttgattcaaagggtcttcaagatctgagattgtttcctcagcttggtccatgctggtgttaataattccagttgtattatgcaatttttgttgtgagtttttcagctctatcagatcagttttgttctttcctraaaacgctgttttgtctttcatgtctggaa

SEQ ID NO: 649468 - DNA, 583 bp, Homo sapiens
caagagcaggagcaaatggggtggggtaagtgccacactcttttaaacaaccggctctcccatgaactaccagagcaagaactcattcatgaccatggggatggaaccaagtcattcataagggatccacccctatgatctcaaacacctcctactaggcctacctccaacattgcaggtcacattttaacaagaggtttggaaacgacctacatccaaactatatcagaagcagaagtcrgagtgatacaatttctggaattgatccactagtgaaggaatgcagaaagcctccaggaggagctataaaatatgagggaatggattatctccagagcctctagaatgaatgcagccctgtcaacttcttgattccagcccagtgaaaaccatttccgactactgacatccagaactgtgaggtcatacatttgtgttgtttgaacaaaccactatgtttgtggtcatttgttatagcaacagtaggaaactaatagcagcccctagttgctttccttgctctaaaccgttcttctccatgatctgttctcaatctagcaaccagagtgaccctggtaaaacc

SEQ ID NO: 649469 - DNA, 562 bp, Homo sapiens
caggacttgagaaatgagaatagtataataaatgtcagtagttatggattttagcttttcagcttttattaaccctaccagtcccagtcccatagttgagtgaaacaataaatgtctgtcttctctttgctctcaatttctatgccaagtgcagttcccttgattgtgagtgcttcagactcccagctcttacctttacctacctargtccaatctaaagtttccgactttgaggaggtatgactaggtactgtatgggaaaaggataggatagaaaggggcatagaattcctaggaaatgaccactgattctggttcagaggcctagcagttgaaagctagagctggaaatctggaagctttattaatggtatttagtaggtatctggcagcacatctggtagcctgcatgtgcattatttacacaggtattcaggtagatgaagtgactaaatgaagaaatatctttatcacacacaatgaatcatgttctaacgtaagggcaaagaaggaaggtgaagtggtggaggaatagtttctgagttactggaaaatatgaatg

SEQ ID NO: 649470 - DNA, 465 bp, Homo sapiens
ctgtatatttctaagttgaagcagttcatctgaaaaggatacataccatacattcctgttatatgacatttttaagaaaggcaaaaactatagcaatagtaaaatgttagtggctttccaggggtttggtagggaagcattaatcgcagaagataattttagggtggtgaagctattcggtatgagactttaatggtagacacatgacactatgcatttttcaaaacccatagaattttacagcacagaagtgaactttaatgtatacaaatttaattttaaaaaattaggaggctggtagttcccaggaaggatggcacactgcgacaasataatttaactgtatcataaatgaatgaaataacctcactgaattgggtgggagggtaggtactgaccttagcacctttgaaaataagtgaagtctataagactaacagcaaaaggaattgcacataagcactg

SEQ ID NO: 649471 - DNA, 465 bp, Homo sapiens
ctgtatatttctaagttgaagcagttcatctgaaaaggatacataccatacattcctgttatatgacatttttaagaaaggcaaaaactatagcaatagtaaaatgttagtggctttccaggggtttggtagggaagcattaatcgcagaagataattttagggtggtgaagctattcggtatgagactttaatggtagacacatgacactatgcatttttcaaaacccatagaattttacagcacagaagtgaactttaatgtatacaaatttaattttaaaaaattaggaggctggtagttcccaggaaggatggcacactgcgacaacataatttaactgtatcataaatgaatgaaataacctyactgaattgggtgggagggtaggtactgaccttagcacctttgaaaataagtgaagtctataagactaacagcaaaaggaattgcacataagcactg

SEQ ID NO: 649472 - DNA, 465 bp, Homo sapiens
ctgtatatttctaagttgaagcagttcatctgaaaaggatacataccatacattcctgttatatgacatttttaagaaaggcaaaaactatagcaatagtaaaatgttagtggctttccaggggtttggtagggaagcattaatcgcagaagataattttagggtggtgaagctattcggtatgagactttaatggtagacacatgacactatgcatttttcaaaacccatagaattttacagcacagaagtgaactttaatgtatacaaatttaattttaaaaaattaggaggctggtagttcccaggaaggatggcacactgcgacaacataatttaactgtatcataaatgaatgaaataacctcactgaattgggtgggagggtaggtactgaccttagcacctttgaaartaagtgaagtctataagactaacagcaaaaggaattgcacataagcactg

SEQ ID NO: 649473 - DNA, 602 bp, Homo sapiens
ttaatatttctcgcatttttgaagtgtcaagaatttggctaagtgytttatatttattactcagaatagtctattgctgtattattgcctccattttacagatgggaaagttgaggcaaagagattgagttactagcccaaagtcacaaagctagtaagtgtggtagagctgaaatttgaatccatctaaatttccttcttctaaccactatcctacaataatcatttgctcagtggaaatgcttttgatcatatcttctggtagttatataatatttattgaaaaaaatatttcattttataaattgcacattgtaaaaagaccttgtgaaggaggacagatgaattgaaaattcaaggtattttagatttttaaataagtacccaagagcttatatctgtagtctaaggcttaaatgcagctgagggagggagagagagagagagagagaaaaaaaagcaaaacattatggaggagatgggcagcaaggactgtgcttccagaattaatgcagggcactctgaccttgctgtgaaactgaccagacagggtagaaaccaagggctggaaaggctctgccttgtaaaaatgagatggaaca

SEQ ID NO: 649474 - DNA, 632 bp, Homo sapiens
gaacacatctataaaactacaaaagtcatagcaacactgggctttattatctcccaatgcagatagagcttcagcgaccaaagatttagaccacaacattcaattcccttggaatacataaaaagcccttcttaagaaggacagatacaaacaagcccagactgagagtattagaattaatacctatcacttcaatgcccagaaatcaacaaacatccacaagaccaagaccatttataaaaacatgatttcaccaaatgaactgaataaagcaccagcgatccatcctggaggaacagagatatgtgacttttcaaacagaattcaaaatagactttcagacagataagtcaaaacagttattttgaggaagctcaatgaaattgaagataacacagagaaggaattcagaatcctatcasacaaatttgatgaaaagattgaaataattttaaagaatcaagcaggaattctggagctaaagaattcaaataacacactgaaaaatgtattacagtctctcaacagcagaattaatcaagcagaagaaagaattagtgagcttgaagacagactatttgaaaatacacagtcaaaaatgacaaaagaaaaataataataatgaataaagc

SEQ ID NO: 649475 - DNA, 560 bp, Homo sapiens
ctgttagccttgtaccagagtgaggacatggtgggcagacccctagatgatgtgtaaaagaaacgtagtgcaaatgagaaattgagctctgctgttttaagggcctaagactgggggttgtttgttactgcagtaaaactcaacttatcctgactgatgcagtgatgaggcactacaaactggaccataggaatcttcatttttcaaataaatgttttggggagtcacactttcataacattttacaatgattccattgtacagattcaagtaaacrtgaggggaaagaaagaaaacttcgttagcttttggggagatgttctactcagttttttaaataccctgaaatggattcttaccaaaatgggcttgatggagagtgggcaacttttatatgtaataaaaacagaagctgatgtcattgtacatgtgaaaaggaaatctacaaaaaccacagagtgttttaagaggttaaaggtaaaagaaaattgacttattatgtctcagttaaataaacaaaggcttcttgaaccagaaaatcagaatgggagagtttctgg

SEQ ID NO: 649476 - DNA, 614 bp, Homo sapiens
tttgttttctgtagtgctgtacgagctaaacattcatttatgtggacgattccctgagtttcagttgttgaacttcagactaagctgtgagataatgatggttgtaccctgaggtaagcactaagaaacgacctgtttactgaagtagagagggaaaacacagcattyggcactcctagaagaaaacatgatcaaacccaatttctaaatatatggaaactattaaatttccaggatttaaaacattttatcatttattttaatttttggaacctcaggaaatactcctaatggtatagcagaatacgatataatttttggattctgtgttaacacataatagattaaaaacaatcttatgtcactctgagtacctcttgcctttatatctttttagcatttatttatctagccttatactttattattttaccttaaaattatttttattttctctgtatatttactctttaaagatagtggtatcctttcctatcttgttccttttccttcttttatttcttgtaaggacattctatagtaggtccttttctttttctacctgcatattttgagaagaatcaggcccttttacaaacattaaatttgtacca

SEQ ID NO: 649477 - DNA, 573 bp, Homo sapiens
ccaggtccaacagtcaccaaaggccaaagccacctagaggagcatggtgatccttgtgagatgggcatccctsgccatgctccactgtaactgttctcatgccaaacgatctgggctctgcacaggctgtagtcctgtcactgctgactctgcaagcagctctgccttccagctcaaatgtccatggggttcatggggccccctgcagctaggattcctgaggtctgtggcaagagtgtgctactccacacctgcttaactcaccccttccctgagatttgctcaggaccagggacaagtccctgtgtttagcaatcccatgcagggttcctagcttcctcccccatgatcccaggatctgcatcttccctccatccactctcaatgccttccttccaaggatttactcagaatgtgccagtcttcttgatggtctggtctctaggtgggggcagctcttcctggctgcttctagtcagccatcttgctgctccaatagcaatttttagagatacagaaaaataatattagaagaccccaaatagccataggaattttgagcaatatgaatga

SEQ ID NO: 649478 - DNA, 573 bp, Homo sapiens
ccaggtccaacagtcaccaaaggccaaagccacctagaggagcatggtgatccttgtgagatgggcatccctcgccatgctccactgtaactgttctcatgccaaacgatctgggctctgcacaggctgtagtcctgtcactgctgactctgcaagcagctctgccttccagctcaaatgtccatggggttcatggggccccctgcagctaggattcctgaggtctgtggcaagagtgtgctactccacacctgcttaactcaccccttccctgagatttgctcaggaccagggacaagtccctgtgtttagcaatcccatgcagggttcctagcttcctcccccatgatcccaggatctgcatcttccctccatccactctcaatgccttccttccaaggatttactcagaatgtgccagtcttcttgatggtctggtctctaggtgggggcagctcttcctggctgcttctagtcagccatcttgctgctccaatagcaatttttagagatacagaaaaataatattagaagaccccaaatagycataggaattttgagcaatatgaatga

SEQ ID NO: 649479 - DNA, 597 bp, Homo sapiens
gaggctgtttttgccctttttttaactttctstttttcctagtgaattaaataagatctttatatattttagatgtatcaatattgtaaataggtcaatattacaaatattttattctactttatggctgccttttcatcttcttcttcatgtcccaaaagtttttaattttaaggtaatcaaaatttataaattatttttgtcttgtgaaatgctgtgaccttcagtttgcataagtagtttggattcatataccttgaaatatacagatacagtgaaatatactatctcattcaattgtgtgatgagacgatatcttgtgctatttttcctaaaaaagcattttgagtgtctggaaagagaaatgatttgctttgcaagataaatttaccttcattttaacttcaggttcttttcattttgaccattgaatacacatggatatggaactagttatttaaacaaaagagacctgcaaagatataaaaatgtacaaattcaaattcaactgatttttcaaagttgcaatctcttttcagtagacatgatcatttcagtagttgaggaaaaaaaattaactcagcaggaggcagaaaa

SEQ ID NO: 649480 - DNA, 577 bp, Homo sapiens
gcagttgacatcccgtagtgccaaccctgttcttagccaaaagggactttaccaagagccctcatttgtaaatgtacttcagtgcattgttgttcattcggaacgttccactgtaagttacctttagtaagattttgccatttctgtaagacttcrctgcctcccaggcctaaagtataagccagaaggaactcagttttccagaaattaaggattccatttttacctaaaatattggctttactctcaggctctcttgattaacttatccaatgattttttttcctaccgatgcaggcaagaaaaatgaacaaaagggtagagcacaaaaatccttgtgaattttcaaaagccaaactctataacccctgaaatattactgcttactaccagttcctttctgacccagtcagatgtaagaggcctctaactggatccaagccagttaattcccggatcaaatctgttcctggacccagtccagtttctgtcacaactccaaacccagtttggatcagaaatttgcccaaagaaactcagagagctcaaaacacaaatccgtggagctccaaaatcc

SEQ ID NO: 649481 - DNA, 577 bp, Homo sapiens
gcagttgacatcccgtagtgccaaccctgttcttagccaaaagggactttaccaagagccctcatttgtaaatgtacttcagtgcattgttgttcattcggaacgttccactgtaagttacctttagtaagattttgccatttctgtaagacttcactgcctcccaggcctaaagyataagccagaaggaactcagttttccagaaattaaggattccatttttacctaaaatattggctttactctcaggctctcttgattaacttatccaatgattttttttcctaccgatgcaggcaagaaaaatgaacaaaagggtagagcacaaaaatccttgtgaattttcaaaagccaaactctataacccctgaaatattactgcttactaccagttcctttctgacccagtcagatgtaagaggcctctaactggatccaagccagttaattcccggatcaaatctgttcctggacccagtccagtttctgtcacaactccaaacccagtttggatcagaaatttgcccaaagaaactcagagagctcaaaacacaaatccgtggagctccaaaatcc

SEQ ID NO: 649482 - DNA, 577 bp, Homo sapiens
gcagttgacatcccgtagtgccaaccctgttcttagccaaaagggactttaccaagagccctcatttgtaaatgtacttcagtgcattgttgttcattcggaacgttccactgtaagttacctttagtaagattttgccatttctgtaagacttcactgcctcccaggcctaaagtayaagccagaaggaactcagttttccagaaattaaggattccatttttacctaaaatattggctttactctcaggctctcttgattaacttatccaatgattttttttcctaccgatgcaggcaagaaaaatgaacaaaagggtagagcacaaaaatccttgtgaattttcaaaagccaaactctataacccctgaaatattactgcttactaccagttcctttctgacccagtcagatgtaagaggcctctaactggatccaagccagttaattcccggatcaaatctgttcctggacccagtccagtttctgtcacaactccaaacccagtttggatcagaaatttgcccaaagaaactcagagagctcaaaacacaaatccgtggagctccaaaatcc

SEQ ID NO: 649483 - DNA, 577 bp, Homo sapiens
gcagttgacatcccgtagtgccaaccctgttcttagccaaaagggactttaccaagagccctcatttgtaaatgtacttcagtgcattgttgttcattcggaacgttccactgtaagttacctttagtaagattttgccatttctgtaagacttcactgcctcccaggcctaaagtataagccagaaggaactcagttttccagaaattaaggattccatttttacctaaaatattggctttactctcaggctctcttgattaacttatccaatgattttttttcctaccgatgcaggcaagaaaaatgaacaaaagggtagarcacaaaaatccttgtgaattttcaaaagccaaactctataacccctgaaatattactgcttactaccagttcctttctgacccagtcagatgtaagaggcctctaactggatccaagccagttaattcccggatcaaatctgttcctggacccagtccagtttctgtcacaactccaaacccagtttggatcagaaatttgcccaaagaaactcagagagctcaaaacacaaatccgtggagctccaaaatcc

SEQ ID NO: 649484 - DNA, 620 bp, Homo sapiens
agatattagatgtaatagatgtaatatgaataagaatagtatcacaaaaatggggggaagggaacaaaggtatatagaagtaacatttctgtatctcactagmattaatttagtataaatctcaaactgattattataagtcacagtgtatatagaaaaaccctagagtaaccactaataactcaaaaatatagtgaaaaaataatttaaaaaattaaaatgctacattataaaatattcacttcatgcaaaagaaagcagtaaagcagaaacagaggaacaagagaaacatgagatatataaaaaacaaaaatggcaaacataattccaactatatcaataatagcattaaaggtgaatggactaaataatccagtcaaaaggcagagattctcagactagatcaaaaaacaagagtcaatacatgctatctatgggaaacacactttagattcaaaatacaaatagacttaaagtaaaaagatgaaagagaaatatcatgcaaacagcaaccacaagaaagttggaatggttatacaattacctgacaaaatataccttaaaacaaaagatattactatagataaaagaagatgttttttaaaaggtcaattaaccag

SEQ ID NO: 649485 - DNA, 467 bp, Homo sapiens
atgctgaattattgaaaatacataactttttctcatcatttctttccactacaacctcttccacctcctgtattctctccctcaagtaattgaatscctacctcttcatctctttctcccacacacataagcatcatcaggtgcagtctgttgcatgctctatttctcaaatatgttcatttatttccaactctactgccattttcctggtgtaggccactattctgttttagctaaattgctacaatcaccttgtccctgacaaccctacctctaatcttaccatggccccatccattctgtactctgcagtccagctcaaaggacactctgtattaggatgatctgtcctgttctttctgttatccaatctcttttgaaaactctggttcaccactcaagacccaacagaaagaatgatctacctaaatcataaatgtaaacatgccccctcactaccactcaaa

SEQ ID NO: 649486 - DNA, 541 bp, Homo sapiens
cccagtaacatcctcatctggttggaaagaattgatggggaagtgaagttgggagttctttcatcttttgtgctaaatgtgaatgacaaaaggtagacctttttagaaggaaattgctcctcctcttttttttctctatattatagcacagagaaaataagttcctgtaatttctctaccttacagggaagggcagagaagacatattacttctctctgttccccaaagcaggatgagtaaataatctgacctgtgttgggatgcatttcaatagagaatagaagcactgtggaaaggtcatgctcttggccttctgaccactcgtactggcctgaacccagactragtggatgctcacatgattttgccttcttgcttgctcttaaattttcttttttctgtatgttatactcatctggcctgtcagggcttccaggatctctgcaactttgcaacattttactggtgtagacattttgtaaaacatgcattgtgcacctaggggcattgaagctggaggtaaaaatagctttttgtttt

SEQ ID NO: 649487 - DNA, 494 bp, Homo sapiens
ccaaaaaaccaacagagtccaggggtatacctcacctcctaccccatatacgcagttggttatgtcatgtaggctttctccctcatggacccttcagggaaaaaacatgtggagaagaggaaaatacctgagagatggagcacttctattcttttttaaaattattttgttttaaattctggggtacacgtacaggatatgcaggtttgttacataggtaaacatgtgccatggtggtgtgctgcacccatcaacccatcacccatrtattaagcccaacctgcattaggtatttttcctaatactctccctcccccgactccacccaacaagaggccccagtgtgtgctgttccccaccatgtgtccatatgttctcattgttcagctcccacttataagtgagaacatgcagtgcctggttctttgttcctgcattagtttgctgaggataatggcttccagacccatccatgtctctgcaaaggacatgat

SEQ ID NO: 649488 - DNA, 539 bp, Homo sapiens
tgactttgtgaagcagcaggctgggtggtttaggctcaggtcagaggctcttgatgtagrgtccagagagagcactgatctctaagtccccagagattaaatgtaatgctttatatactgatgcacacacatttgtgggaatcaagttccacgcctttcatcagattcacaaagtgtacagtgtcctaaaaaaacttatgagttattggtgcacaacttttcaggcataggagacataaagttgagcatatccatgattcttgtatatataataagaagtactaaaattattttatgtaccaaactcaaacacaaataactcaataagaccacacagagcaagaaaaaacctgaaagcctctaaagtatataaaaaaaaaacccacacccaaaccatttctttttcttcttcttcttttttttgagatagggtctggctgtgtcacccaggctggagtgcaacagcaccatcttgcccacgagaacctctccctccagggctcaagccatcctcccacctcaacctcttgagtagctga

SEQ ID NO: 649489 - DNA, 539 bp, Homo sapiens
tgactttgtgaagcagcaggctgggtggtttaggctcaggtcagaggctcttgatgtagagtccagagagagcactgatctctaagtccccagagattaaatgtaatgctttatatactgaygcacacacatttgtgggaatcaagttccacgcctttcatcagattcacaaagtgtacagtgtcctaaaaaaacttatgagttattggtgcacaacttttcaggcataggagacataaagttgagcatatccatgattcttgtatatataataagaagtactaaaattattttatgtaccaaactcaaacacaaataactcaataagaccacacagagcaagaaaaaacctgaaagcctctaaagtatataaaaaaaaaacccacacccaaaccatttctttttcttcttcttcttttttttgagatagggtctggctgtgtcacccaggctggagtgcaacagcaccatcttgcccacgagaacctctccctccagggctcaagccatcctcccacctcaacctcttgagtagctga

SEQ ID NO: 649490 - DNA, 547 bp, Homo sapiens
gtatgtgttctatattttatacatttaaatgtgggtttgaaatgagaattcagaattatacagaagtttcacctcttaatacctcttaatattcattttaagtaagaataagctactatgggaaaattgattttagaaaataccaagatattatttaacatgctaggaatttttaccatgtctagttcctttttgtcgtctctatcaggtttatataaatcttgaaacacatttacaataaaatataatagttataaaataaatcttgttttatggtggtcagtttcgatcaatatttttgtttgttttctaattttggaagttgtattgattcttctgctatgctggtggaattggcaatatctccctgcatttataatctgaggctgtgctattaggcatgtacaagtttataattataattttctcatgctttatatcttttatttcttgtggtaaccatccttatccctgataatgtgttaatcttaccttattgtttgctattgatrcagttcatttggcttattttggttaatatttgacc

SEQ ID NO: 649491 - DNA, 520 bp, Homo sapiens
agtattttaattgtaactcatgcctcactttgttacccaggttggactggactcctggcctcacattttcaaataattaatgcttatttagatttacccttacatttaacaggtttacagttgccacttgcttctcacacttgtcttttttagtgttttcttttttctttctttgttactttaaaaaggttgttcaatgaatccatgagtgtgctttcttaaaattctgtagacccaaaaagtctcagcactgtgtatagtattctatcttgcactgtatattttgcatttggaacttggtatgccattgcattattgtattagtttttcagtgaactagcttctttttaaaatattcaccaaatcagtgttctttctagtttggatttatttttatcaawtctgttcagaacttgtccaattcctgaatgtgaaaattttttttctttaatgacttacagaaaatttccagttattacctttagatattgcctcaataccatcttaaatgcacccaaag

SEQ ID NO: 649492 - DNA, 577 bp, Homo sapiens
agaacttgtccaattcctgaatgtgaaaattttttttctttaatgacttacagaaaatttccagttattacctttagatattgcctcaataccatcttaaatgcacccaaagtatctaatataataataatttttgtccatcttgctctatattgataactttatttctctgtgatatatatttattatattaattttaatcatccatatctcataggtttttaaattcaattactatatttttatttttggatatcctttgccaaatctgctcttcatttctttttaaatgtctttagtgtttatgtatgttcattagatattattaattttrtaatttttttcaaattattcatctatttttacacatacttttaattctgctgttttacatctgctgactcttattgctggttttttttttttttttttgagacagagtctcactttgttgcccaagctgggttgcaatggtgcaatatcagcttgctgcaacttccgcctcccaggttcaagcaattctcctatttcagcctcccaaatatctgggattataggcgcctgccaccatgcctgg

SEQ ID NO: 649493 - DNA, 532 bp, Homo sapiens
cagcagaggcagctgtggtactccctgcaacattactcctacagccagaggaccactatctgatccccactggggacagtgcttttgcccacacatggcagacaaaagagagctagaatgtgaacttgcctgattcagcccccagctggctttgcccctccatctgccctggtagcttaacacaaagaatagaaaattttgagagctcaatggccctgcccattgcctgagtcatcagcttacctcccctgcgtaacataaggcaagcacaaatcccactgctaccagctggtgctctttttcaagtgccaccttgtggctggaggcctactgacacaatccattacagcatctgcaggcacactaacagtgcacaggaaagagaaaacttgtgtgtgacctaagctatcacctttgcctatataaccttggctaactaggaggtcctgagtctgtccatgcgaccagttcattactactacaggtggcattacagaaaarccaatgcaccaaggctacttataatcaagaa

SEQ ID NO: 649494 - DNA, 569 bp, Homo sapiens
aagtgaaaaaaaaaaaagtgaaaaatcacagtcaaatcaaaaaataaattcaaaaataattagaagatatagtctcaaaagtaattagaagatatactctatccaaatgagaagaaaccagaaaaataattctggcaataggacaaaatagggttctataacacctcaaaaagaacacactaagtccccagcaatggatcccaaccaagatgaaatctttgaaatgccagaaaaakaattcaaagaaataagcaaagtctcttagaaataggtgactatgtaaaatggccaaatatagcaattgctgttcctgagggagaagaaacagcaaaactttttgaatacttatttgagggcataattgaagaaaactttgctagccttgctagatatttagatgtccaaatacaagaaactcaatgagctctggggaggttcactgcaaaactgacattacaaagccatatagtaatcaagctatctaaagtcaacatgaagaaatgaattctaagaacagtgagacaaaagcaacaagtaacctataaaggaaaacctattagactaacagc

SEQ ID NO: 649495 - DNA, 548 bp, Homo sapiens
tgtgaatatgttagttgcatggcaaaggaaaattgaaattgtagactaaactaaggttgttcrtcagttgatattaagataggaaagttattctggattatcctgatgggaccaaaataatcagaaggacatttacaagtggaaggaggcagaagaagttagagtgatgagatgggaactcacaaactgccattgctggccctttaaaacaatttaaatcttgttttatgacacataattattgtacatatttatgggatacagtgtgatgtttcaacacgtgtatgtatagtttaaatattgaatcaggatattcaacatattcttcacttcatacatctttgatatctttacggtgagagaattcaaaaatcctctcttctagctattttgaaatatacaatacaatattgctaaccatagtcaccctgactccattcctcattttaaaaatggaggaagggacagtgatcaaaggaatgcaagcagcctctgggctgtggaaaaccaaaggaaacaaactcttcccacagaccccccccaagaaa

SEQ ID NO: 649496 - DNA, 472 bp, Homo sapiens
acagtggcctggagtgtgacagccctatagagtatttgtttgggaattggttagtttgtatttgtaaagcccatcttcatgmgaagttcaggggagacttcgtagccagaagctgaggcaaggtgactccagcatactatccatcttcaagaacaagatgtgtctgaattgctgtatgttataaagtttcgatgtctaatagagcaaatctttcatcctgttggttctctttgatttaatttgcttttttttctctctaagtactgttctcggaataagccaatctgatatgtgtgtcactattccaaggaatgagtagatcacactttatttttctgcttcttgtgaacattaattagttcagttttctgaaattttcaatgctattgtgattttttaaaattaacaatgctactttgcttattgtgtacttgtcaccagaaatgcaagagctaagatgtctctggaaatg

SEQ ID NO: 649497 - DNA, 641 bp, Homo sapiens
aggtaaaataggagtctatagcactaatctaaagtggtaagtgaatggaagtcaaagctatttagtggagtaggttgaaccaaaattgatgactaagtaggtggtatctaaaggaaaggaaaagtttgagtcttgggtatctggcatgcatagtatactaacagtgatatacacagttactttcaggctcactgaatgagttagtggtcaatgaaatacagaacaaagtcatgcaattcactttcaagttgtgttcttgaaacttcccatggcacccatgaagatttcaagagtcatttgttattatatcccatcttgactaataccaagttgttagaaaaaaatgaaatactattgtaacaataagctaaaataagtggtattgtcttaacratgagaaagagcatgaggaaacttaagatcatagatgatgaaaactgtttcccctatctccactcccaagaagggagaggttgggattatacaaagtgattaatctatgtgttcttcccagaaaaaaaaaaggcagagtttaatcaaataacttttccaacctttagtatatggttcattcaaactgtctgacctgtagtgtttcagaattaccaatggtcagtggtttctatgtactgtaccttata

SEQ ID NO: 649498 - DNA, 457 bp, Homo sapiens
ccaaaattgatgactaagtaggtggtatctaaaggaaaggaaaagtttgagtcttgggtatctggcatgcatagtatactaacagtgatatacacagttactttcaggctcactgaatgagttagtggtcaatgaaatacagaacaaagtcatgcaattcactttcaagttgtgttcttgaaacttcccatggcacccatgaagatttcaagagtcatttgttattatatcccatcttgactaataccaagttgttagaaaaaaatgaaatactattgtaacaataagctaaaataagtggtattgtcttaacgatgagaaagagcatgaggaaacttaagatcatagatgatgaaaactgtttcccctatcyccactcccaagaagggagaggttgggattatacaaagtgattaatctatgtgttcttcccagaaaaaaaaaaggcagagtttaa

SEQ ID NO: 649499 - DNA, 465 bp, Homo sapiens
ttcaaactgtctgacctgtagtgtttcagaattaccaatggtcagtggtttctatgtactgtaccttatattttgcctttctaaatgggctatgagcattacatatcttagctcatttatcttttaaataactttaagaagctagtattattattagcttgattttgctggtgagaacattgagatgtagagattcagagtagctagtgtttggtataactatgatttaaatttagttctgtcttattataatattaaacaagtatgtgactttgtagtgtaatgagtctcwttcaaaacatacagcagttgcagcctaacatcttgttactttaggtggtgacataatgtattgactcatattgagcacttctaagtgtaagttttaagtagctttttttctttagaaaggtgctgaagataattcaaatacttttttgcatattattttgtgtccctgtagat

SEQ ID NO: 649500 - DNA, 418 bp, Homo sapiens
tgagtttaagcaaccagaggaaggacttgccatcaaatgaaatggataagcataaacaggtttggtagtagctgggagatggaaatcarcaatttctcttgagtcatactttctttgagatttccattaggtatctgaagtaatcagaaactagccaggaaaactgaaatcattgagaatttaaaacaaagggaattgatacaggtaattgatggtagaaataactttaaaaaaattaaagccaaccaggggacagtgaggcaacctacaatttagcaacaatgggaggctactatcaccttcccttggagaacagggataggaggctgtactactggagctgcagggagggatatttgggggaagctggaaccacagtgggcctatgtaaaggagcaggagcctggaaaaaatgtaa

SEQ ID NO: 649501 - DNA, 418 bp, Homo sapiens
tgagtttaagcaaccagaggaaggacttgccatcaaatgaaatggataagcataaacaggtttggtagtagctgggagatggaaatcaacaatttctcttgagtcatactttctttgagatttccattaggtatctgaagtaatcagaaactagccaggaaaaytgaaatcattgagaatttaaaacaaagggaattgatacaggtaattgatggtagaaataactttaaaaaaattaaagccaaccaggggacagtgaggcaacctacaatttagcaacaatgggaggctactatcaccttcccttggagaacagggataggaggctgtactactggagctgcagggagggatatttgggggaagctggaaccacagtgggcctatgtaaaggagcaggagcctggaaaaaatgtaa

SEQ ID NO: 649502 - DNA, 599 bp, Homo sapiens
tattgaaaagtatctgtctatagcctgtgtagtcagaaagagttgatgaacaagtaaaggtgtaagcttgaggtaggtgtataaacatttcatttctggcagtggttttctttaaggagagatttcactctgcaaggagccaattggcaatgtttggagatgttttctgttgtcacaacttgtgaatggagttactactagcatcgaattggagaggccagggatgttgctaaacatcctgcaacatacaaggcaacctttccaacaccccatcccaaacatagaattatctggctcagtttgtccatagtaccagagaaaagaccctgctctattaatatgcaggatgagtagtgtgtaattttagatactggcgttaagtatatgtagtagtgggagtctgcatacatttcctcttsattgttatttatctatctatgtatttattttttgacacaggaaacaaggtcatcagctggcattgagattgaagaaaagtatgtgaggggtgtgaaatgaggaaagaatccataagttaatcttacataagaggaagaaggcaatggctaacaaaagaaaaatgggcttgtttggccgcc

SEQ ID NO: 649503 - DNA, 578 bp, Homo sapiens
tttaaaaagtaagccttgatagaatttttaataagaaaataaaagcacattatcaacttttgaatcagaggagaggagtactgtagcccccaccaatcccttaaagaatcatagaaaatttgctttatttattgtggctgaaagagttcaaatccaattatgaggatagtgatatagaacagaacatacttgaacagggggctgggtttactgccttaattaaagccgtagaatctgaaaacaattaaataaagaactgaggtctggatctgaggccatatatataatttgaacaaagttacctggggtggtattcaaagtttcttatcattggtaggatgyagagcagaatttacagtaggccttatggaaggtaggaaagagtctcatacatgctctaagtgaaatctggagtgcatgaagagaacatcagggaggaaaccaaggtaaagatgaagttacaggttgaaatgtgtggttggagagaatattacctgcttgtgctacctttacataaatacaaaattgcaattgtcattcaatatgaatgggacattgtcgtctttgtgtttccacag

SEQ ID NO: 649504 - DNA, 578 bp, Homo sapiens
tttaaaaagtaagccttgatagaatttttaataagaaaataaaagcacattatcaacttttgaatcagaggagaggagtactgtagcccccaccaatcccttaaagaatcatagaaaatttgctttatttattgtggctgaaagagttcaaatccaattatgaggatagtgatatagaacagaacatacttgaacagggggctgggtttactgccttaattaaagccgtagaatctgaaaacaattaaataaagaactgaggtctggatctgaggccatatatataatttgaacaaagttacctggggtggtattcaaagtttcttatcattggtaggatgtagagcagaatttacagtaggccttatggaaggtaggaaagagtctcatacatgctctaagtgaaatctggagtgcatgaagagaacatcagggaggaaaccaaggtaaagatgamgttacaggttgaaatgtgtggttggagagaatattacctgcttgtgctacctttacataaatacaaaattgcaattgtcattcaatatgaatgggacattgtcgtctttgtgtttccacag

SEQ ID NO: 649505 - DNA, 578 bp, Homo sapiens
tttaaaaagtaagccttgatagaatttttaataagaaaataaaagcacattatcaacttttgaatcagaggagaggagtactgtagcccccaccaatcccttaaagaatcatagaaaatttgctttatttattgtggctgaaagagttcaaatccaattatgaggatagtgatatagaacagaacatacttgaacagggggctgggtttactgccttaattaaagccgtagaatctgaaaacaattaaataaagaactgaggtctggatctgaggccatatatataatttgaacaaagttacctggggtggtattcaaagtttcttatcattggtaggatgtagagcagaatttacagtaggccttatggaaggtaggaaagagtctcatacatgctctaagtgaaatctggagtgcatgaagagaacatcagggaggaaaccaaggtaaagatgaagttacaggttgaaatgtgtggttggagagaatattacctgcttgtgctaccttyacataaatacaaaattgcaattgtcattcaatatgaatgggacattgtcgtctttgtgtttccacag

SEQ ID NO: 649506 - DNA, 544 bp, Homo sapiens
ccctccccacattaacttcctttttgtagttctaactggtcaataagtaggtagcccctggacatttacagtagagtatcaaggtggttcatttgcatgcttcatctgtacctgatatgatgaagaatgtacagaaaataaagtagacaagaggctctgatatgttatcaagattaactacataattcatagagctgagtataaaatgaaaatgcatggatacttactcaaaaattattaagaatttccagatagctacaacagagcattaaaccaatctcaggggcctcctaagagttttttttttgttaatttcaagtaggaarattttaagctttgcagaatagaaacaagtatatgtttactgtcttatcatggatttaaaaaaaattcattatcacatttccataatctggtaaagaataacctaaaagatagagttcatctactactttcatggtatgatgataattttcttctcagagcaaaaattaggagaggagttaaggaccatagtcacccatattacaaatagaagctggct

SEQ ID NO: 649507 - DNA, 613 bp, Homo sapiens
tctcaggggcctcctaagagttttttttttgttaatttcaagtaggaagattttaagctttgcagaatagaaacaagtatatgtttactgtcttatcatggatttaaaaaaaattcattatcacatttccataatctggtaaagaataacctaaaagatagagttcatctactactttcatggtatgatgataattttcttctcagagcaaaaattaggagaggagttaaggaccatagtcacccatattacaaatagaagctggctgayaaatccagctagaatttaaggcacagcccaaggtgcaaattaattcctggaaattagtacagatcaacttaggacattccttaaactccaactaaatcctataaattagtgcagatcaacttaggacattccttaaactgtgagaagtaatttatctttcataggacccaccaataagcaataaactcagagactgtcaagactgttctaagaatcttgtctacccatactcacaaaataactggaaagagttcagaacgtgaatacagcattgtagtactttcctagggctgctggaacaaattaccacagactgggtagcttaaaacaactgaaatttatt

SEQ ID NO: 649508 - DNA, 613 bp, Homo sapiens
tctcaggggcctcctaagagttttttttttgttaatttcaagtaggaagattttaagctttgcagaatagaaacaagtatatgtttactgtcttatcatggatttaaaaaaaattcattatcacatttccataatctggtaaagaataacctaaaagatagagttcatctactactttcatggtatgatgataattttcttctcagagcaaaaattaggagaggagttaaggaccatagtcacccatattacaaatagaagctggctgataaatccagctagaatttaaggcacagcccaaggtgcaaattaattcctggaaatkagtacagatcaacttaggacattccttaaactccaactaaatcctataaattagtgcagatcaacttaggacattccttaaactgtgagaagtaatttatctttcataggacccaccaataagcaataaactcagagactgtcaagactgttctaagaatcttgtctacccatactcacaaaataactggaaagagttcagaacgtgaatacagcattgtagtactttcctagggctgctggaacaaattaccacagactgggtagcttaaaacaactgaaatttatt

SEQ ID NO: 649509 - DNA, 613 bp, Homo sapiens
tctcaggggcctcctaagagttttttttttgttaatttcaagtaggaagattttaagctttgcagaatagaaacaagtatatgtttactgtcttatcatggatttaaaaaaaattcattatcacatttccataatctggtaaagaataacctaaaagatagagttcatctactactttcatggtatgatgataattttcttctcagagcaaaaattaggagaggagttaaggaccatagtcacccatattacaaatagaagctggctgataaatccagctagaatttaaggcacagcccaaggtgcaaattaattcctggaaattagtacagatcaacttaggacattccttaaactccaactaaatcctrtaaattagtgcagatcaacttaggacattccttaaactgtgagaagtaatttatctttcataggacccaccaataagcaataaactcagagactgtcaagactgttctaagaatcttgtctacccatactcacaaaataactggaaagagttcagaacgtgaatacagcattgtagtactttcctagggctgctggaacaaattaccacagactgggtagcttaaaacaactgaaatttatt

SEQ ID NO: 649510 - DNA, 613 bp, Homo sapiens
tctcaggggcctcctaagagttttttttttgttaatttcaagtaggaagattttaagctttgcagaatagaaacaagtatatgtttactgtcttatcatggatttaaaaaaaattcattatcacatttccataatctggtaaagaataacctaaaagatagagttcatctactactttcatggtatgatgataattttcttctcagagcaaaaattaggagaggagttaaggaccatagtcacccatattacaaatagaagctggctgataaatccagctagaatttaaggcacagcccaaggtgcaaattaattcctggaaattagtacagatcaacttaggacattccttaaactccaactaaatcctataaattagtgcagatcaacttaggacattccttaaactgtgagaagtaatttatctttcataggacccaccaataagcaataaactcagagactgtcaagactgttctaagaatcttgtctacccatactcacaaaataactggaaagagttcagaacgtgaatacagcattgtagtactttcctagggctgctggaacaaattaccayagactgggtagcttaaaacaactgaaatttatt

SEQ ID NO: 649511 - DNA, 586 bp, Homo sapiens
aaccaattagggctaaaggtgaaggtagctccattatcaagcagaggasagacttctgaggtcctttgtctgtcacttataacatttgtttgacaacaaaccccatgacacaagtttacctgtgtaacaaatctgcacatgtacccatgaacttaaaataaaagttaaacaaacaaacaaataaaacccaaacatttgtttgggtgtgctagtaaggttcttgttattgattgtgcgggcaaacattatgcatgatgagttatacagcctgatattgggaggaagcatttggaaatagggtaaaatcatagcagatgggaaaggtgtttataagtagattacattaccgtggagggaagccactacaatattttcatgcaaacagctcagagtgaggatatcatacttaactatcttttgctattgtcatccaaacaaatgggctttgttggtgaaaatctcttggcctgcttactgcagaaaaggaaaattggactcctactgatttggatgttctacctgtataatttgaataaaacagatgacaaagtgccccctgacaactcagcttgtgtgtagttgacta

SEQ ID NO: 649512 - DNA, 586 bp, Homo sapiens
aaccaattagggctaaaggtgaaggtagctccattatcaagcagaggagagacttctgaggtcctttgtctgtcacttataacatttgtttgacaacaaaccccatgacacaagtttacctgtgtaacaaatctgcacatgyacccatgaacttaaaataaaagttaaacaaacaaacaaataaaacccaaacatttgtttgggtgtgctagtaaggttcttgttattgattgtgcgggcaaacattatgcatgatgagttatacagcctgatattgggaggaagcatttggaaatagggtaaaatcatagcagatgggaaaggtgtttataagtagattacattaccgtggagggaagccactacaatattttcatgcaaacagctcagagtgaggatatcatacttaactatcttttgctattgtcatccaaacaaatgggctttgttggtgaaaatctcttggcctgcttactgcagaaaaggaaaattggactcctactgatttggatgttctacctgtataatttgaataaaacagatgacaaagtgccccctgacaactcagcttgtgtgtagttgacta

SEQ ID NO: 649513 - DNA, 619 bp, Homo sapiens
tttgtttaccattctagattatttttttccagagaaactaccaatgaattgtacagagcagaggatgctgtagaatagaatttctgcaccctatatggccataaatcaaaatgatacattgctaagacagctccctggttatgatagaaagcagatagtggctgcctgtctggtatgtcacagcttgatctggtctgttgctttgaacatatcagtgtgaatgtaaatggaattaatttaaataatataaaactagaacctagaaagcctcagagaatgtgattttatgtttgctttaatgctttaaaattataaataactccctcaagaggtacgtagaggacatttaagggaagcctatggcacagccagataaaacggtatctggtgctaggatatacctaattgagaatttcatgaagcacattatttgtaggtgtagacaatgctttcaaactagacacatttaattagcacataatatgaactacatgagtggcaagttaagcagcactggmccctttgccaggcattttgaaagaattacaggatttggtcatgtgatattaaatctaatcgaagtagtgttctaggaggcccatcattatgataaaaatga

SEQ ID NO: 649514 - DNA, 553 bp, Homo sapiens
cagcttgatctggtctgttgctttgaacatatcagtgtgaatgtaaatggaattaatttaaataatataaaactagaacctagaaagcctcagagaatgtgattttatgtttgctttaatgctttaaaattataaataactccctcaagaggtacgtagaggacatttaagggaagcctatggcacagccagataaaacggtatctggtgctaggatatacctaattgagaatttcatgaagcacattatttgtaggtgtagacaatgctttcaaactagacacatttaattagcacataatatgaactacatgagtggcaagttaagcagcactggaccctttgccaggcattttgaaagaattacaggatttggtcatgtgatattaaatctaatygaagtagtgttctaggaggcccatcattatgataaaaatgacttgctacttcaaatagggacactagaggaagctgtttttagaggactcagttgtagtaggaaatcagtttggtttaagacaatgcttgaactgaagacactgaataaataatg

SEQ ID NO: 649515 - DNA, 523 bp, Homo sapiens
ctgataagtctaatgtcacaatccaatcagtttttcctatctcaaggaatcatgtccatataatggaattaatccwgaaactctgaaaagttttaatattctggggtcagggtagatgagaaggagtctccatatgacttataaacatgtaaggagaaatagtaaaattgttgtaaaattaaaagaagaacagaaattcataaaataagctataacaatcaggttaaacaacaaaaacaaaaagcaaagcgtctatcagtaacatgattgaatagaagagccgagagagagttgtcagtggtaaaggaataaatattatctcatttgatagagtgattgtattagtccattttaacactgctgataaagacatacccatgactggacaacttacaaaagaaaatggtttattggacatacagttccacatggctggggaggactcacaatcatggcaaaaaggagcaagacacatcttatgtgggtggcagcaggcaaaaaaagagcttgtgcagagaaaatc

SEQ ID NO: 649516 - DNA, 523 bp, Homo sapiens
ctgataagtctaatgtcacaatccaatcagtttttcctatctcaaggaatcatgtccatataatggaattaatcctgaaactctgaaaagttttaatattctggggtcagggtagatgagaaggagtctccatatgacttataaacatgtaaggagaaatagtaaaattgttgtaaaattaaaagaagaacagaaattcataaaataagctataacaatcaggttaaacaacaaaaacaaaaagcaaagcrtctatcagtaacatgattgaatagaagagccgagagagagttgtcagtggtaaaggaataaatattatctcatttgatagagtgattgtattagtccattttaacactgctgataaagacatacccatgactggacaacttacaaaagaaaatggtttattggacatacagttccacatggctggggaggactcacaatcatggcaaaaaggagcaagacacatcttatgtgggtggcagcaggcaaaaaaagagcttgtgcagagaaaatc

SEQ ID NO: 649517 - DNA, 492 bp, Homo sapiens
ccatgtgggacaagaatgaaaagccctataatatcttccttgctcagcattggcagggagcaacctaaggagagcatggcacctgcatgtaagccaaaaataaaattcaatgtccgttaaccaactaaatgggccctttatcttggccaagggcattttaaactaaacctgaaacagtaatggaggccatgacggaaatgggtrgttgaacatgcctcgttatttactttcatcctttcggaattcatgcatagctgaacagtgttaacattaaagtagagacttaagaatgacaaaacagactcttcgtagcaataagatatcaacatgacagatagcaggccttgaaagaaatcaaagtatttcaccacaaaaatacatttctttgacatattttgaaatggccctacaaggctgtttctgtggggaaaatctccattttgtagagaatccccttctctttccaagtctttttcctgatttttcctgatt

SEQ ID NO: 649518 - DNA, 630 bp, Homo sapiens
aagccattaagggaatcccacaatttttgttgtttctaaaacctaatataatttaagattatgaacagccttctttctcagaagaaaaacatatcaccaacccaccayattaaaaaaatgcattattccaatcaatcttgttaatataccatagaaattgaattttttaaaaaaattcagaactttaaaaataaatactaaccataatagctcaattaaaattatatctatattcttggaggttttcaaatgccatatctaaaaacaggatatagtaaggtatatccagggataaactagctgttaaaaaataattgattgagacctgttattattggctaagtaaacttctcttaccttccaaaacatgttccattatttcataagatctagaaatgatatcaagtttgaaatttgttgaaatgttttcctattgacctacttataaatgggttatttacatattcagcgtaattacttgtgcttaaaactgttttcaggataaatttgaactatgtcattgttcatataaaagaaagatgcttcttttcaattaatttgtattagttaataattctacaaattgtgtttatttcaatggagattaaagaatataaaaagaataatgtt

SEQ ID NO: 649519 - DNA, 630 bp, Homo sapiens
aagccattaagggaatcccacaatttttgttgtttctaaaacctaatataatttaagattatgaacagccttctttctcagaagaaaaacatatcaccaacccaccatattaaaaaaatgcattattccaatcaatcttgttaatataccatagaaattgaattttttaaaaaaattcagaactttaaaaataaatactaaccataatagctcaattaaaattatatctatattcttggaggttttcaaatgccatatctaaaaacaggatatagtaaggtatatccagggataaactagctgttaaaaaataattgattgagacctgttattattggctaagtaaacttctcttaccttccaaaacatgttccattatttcataagatctagaaatgatatcaagtttgaaatttgttgaaatgttttcctattgacctacttataaatgggttatttacatattcagcgtaattacttgtgcttaaaactgttttcargataaatttgaactatgtcattgttcatataaaagaaagatgcttcttttcaattaatttgtattagttaataattctacaaattgtgtttatttcaatggagattaaagaatataaaaagaataatgtt

SEQ ID NO: 649520 - DNA, 537 bp, Homo sapiens
tatcaatgaaaacactaaatctagaaaacaatctaacttctgaaattattctaaaatagtataagaatatattttatayatgcttgtaatgtaggaagggctctttaaaagtgtgacacaattcataaaggaaaaaatgtttaaagataaatactgattaattcactattaagccagattcaggtaaccctactactaatttacacaattacatagtgaatctttgaggcttagatgctaatatatatgaagtaactaaaataaaaactaataaattccttgtaattggtttgcatttatttcagcagaaatgatatattactattttatttataattataaaagcatgtgttaattttcagtatgctattctgtaagtgaaagtatgtttgaaaattgtaatggtggagaaaaatttagctgcactctacttaaaactaaacatacacacattacagatagagtccaatgagtttttaaaaaatttattgagctataattaacatattaaaagccaaaaatatgtaagatagatta

SEQ ID NO: 649521 - DNA, 568 bp, Homo sapiens
cataaaaacattcagtaaaatccagcattgctttatgataaaaaccctaaacaaactagacatagaataaacatatctcaaaataataaaagctatatatgacaaacccatggccaacatcatattgaatggggaaaagttgaaagtmttcccactgagggctagaacaagttaaggatgcccattttcaccacttctacttaacatagtactggaagtcctacccagagcaatcaagcaagaggaagaaataaagggcatccaagctggaaaagaggaagacaaattatctctgtttgctgatgatttaagcatatacttagataaacctaagaattccaccaaaagactcttctatttgatgaatgaattcataaaatcttaggttacaaaatgaatgtacacaaattagtactactgcatagcaccaacaatgatcaagctgagaatcaaatcaagaactcaatttcttttacaatagcagcagaaaaaaaattgaaatacacttaaccaaataagtgaaagatctccataaggagagctacaaaaactgctgaaataaattaga

SEQ ID NO: 649522 - DNA, 561 bp, Homo sapiens
tatttattgctgccaccttgttcccacttcaccgttgcatatttgtacacaggacacatatttattcttttaagtttagattttactgagaaatgaggaccttatctggacttcactgggagaattatgagtggccagagatactacattttgagctggatgccagaccttgaaagaactctgcatttttcattttgagagaagtcggtgtgttttataatgggaggaagattaaagcaggtattttggcatcagaaggactgaccttgacagagattggtgagataacattatttctttctttggaccacaaggaaatgctgtatttttcagcctcaattgcaggtaggatgagaccatttcactggtgaatgaaatgtaggtagaagttatatttcccacttttagactgagctataagatacctcacgcaatgcttctcatactcctctttatattaaatgcagaggattcagtgaaaacctttaaggaatttcagaaagttaatcctctacagaattattatatgaatgagaakaaaaaaaattctgttaagtcaca

SEQ ID NO: 649523 - DNA, 524 bp, Homo sapiens
ctcttgaattcaagtgatcctcacacttcagcctccagagtagctttgatgacaggtgtgtgccaccaggcccagctacttttctttactttttgtagagacatggtcttgccatattacccaggctagtctcagatccctgggctcaagtatcctcctgcctccacctcccaaagtgctgggattataggcataagccaccatgcccagctaatgttttctatttaccatagcttttcacatatatatgttattatatatgtaatatacatatataatatagtatggatgtgtatatactatattattaacaattagatctaaaatatagaaagaattttaatacctttattttctgtaccttcatagttaatctcatattttcyaaatctgttaatgtggcactggtcacagttatagctccaaagaatgagcatccacttaatctcataaccaggacccaacctgcaacattagtattacaaattaatttctaattccagtctcactctttcatcaccagt

SEQ ID NO: 649524 - DNA, 524 bp, Homo sapiens
ctcttgaattcaagtgatcctcacacttcagcctccagagtagctttgatgacaggtgtgtgccaccaggcccagctacttttctttactttttgtagagacatggtcttgccatattacccaggctagtctcagatccctgggctcaagtatcctcctgcctccacctcccaaagtgctgggattataggcataagccaccatgcccagctaatgttttctatttaccatagcttttcacatatatatgttattatatatgtaatatacatatataatatagtatggatgtgtatatactatattattaacaattagatctaaaatatagaaagaattttaatacctttattttctgtaccttcatagttaatctcatattttctaaatctgttaatgtggcactggtcacagttatagctccaaagaatgagcatccacttaatctcataaccaggacccaacctgcaacattagtattacaaattaattyctaattccagtctcactctttcatcaccagt

SEQ ID NO: 649525 - DNA, 582 bp, Homo sapiens
taagtgtctggcaacagatgaatgcaaaaagaaaatgcactatctgtatacaatgaagtactctttagccataaaaaataaaatcttgccatttatgacaatatggatgaatctagaggacatcayggtaagtgaaataagccagacacagacagacaagtacagcatgatctcactcataagtggagtctaaaaaaaaaagaaaatacaaacatttaaaaaagttaatagcatagaagcagagagtagaaaaatgttaccagagactaaagacaggaggacgaaaagaaggatgaggaaactttgattggtggtataaaattacaactagataagagcaaaaaattctggtgttctgttgcacgtagagtaagtatggttaacagtgaaatatcgtatattacaaaatagcttgaagagttgtcttcgaatgttctcaccacaaagaaatgataaatatgtaagataatagattcactctgaatggatcattatacaacatggataggtatccaggtatgaaattataccccatgaatatgtacaattattacatgtcaattaataaataaataataagat

SEQ ID NO: 649526 - DNA, 582 bp, Homo sapiens
taagtgtctggcaacagatgaatgcaaaaagaaaatgcactatctgtatacaatgaagtactctttagccataaaaaataaaatcttgccatttatgacaatatggatgaatctagaggacatcacggtaagtgaaataagccagacacagacagacaagtacagcatgatctcactcataagtggagtctaaaaaaaaaagaaaatacaaacatttaaaaaagttaatagcatagaagcagagagtagaaaaatgttaccagagactaaagacaggaggacgaaaagaaggatgaggaaactttgattggtggtataaaattacaactagataagagcaaaaaattctggtgttstgttgcacgtagagtaagtatggttaacagtgaaatatcgtatattacaaaatagcttgaagagttgtcttcgaatgttctcaccacaaagaaatgataaatatgtaagataatagattcactctgaatggatcattatacaacatggataggtatccaggtatgaaattataccccatgaatatgtacaattattacatgtcaattaataaataaataataagat

SEQ ID NO: 649527 - DNA, 421 bp, Homo sapiens
caaacctgaacccatttggacaatacatcaaataatcattttgcatcatttcactattggggaaatgataacttcttacattaaatgaaaaaaaactgaaaaagtagtattactttgtcttttaagtggcragatagggttgatatgatgccgaagtacaaacagtagggactaagtgaggatggaggatatatgaataaatgtatcaaaagtcaagagaaatgataaaacagacaattctggggaacagtagtagaagatatgcatggaatatggttagacagacagtgatatttacttttgagttttgcttatatatttctaacatttcttgataggactggcattctaacagttattcttattgttataaattcttttaaaaatactttttctccaaacatctcagttcaaattatag

SEQ ID NO: 649528 - DNA, 421 bp, Homo sapiens
caaacctgaacccatttggacaatacatcaaataatcattttgcatcatttcactattggggaaatgataacttcttacattaaatgaaaaaaaactgaaaaagtagtattactttgtcttttaagtggcaagatagggttgatatgatgcygaagtacaaacagtagggactaagtgaggatggaggatatatgaataaatgtatcaaaagtcaagagaaatgataaaacagacaattctggggaacagtagtagaagatatgcatggaatatggttagacagacagtgatatttacttttgagttttgcttatatatttctaacatttcttgataggactggcattctaacagttattcttattgttataaattcttttaaaaatactttttctccaaacatctcagttcaaattatag

SEQ ID NO: 649529 - DNA, 421 bp, Homo sapiens
caaacctgaacccatttggacaatacatcaaataatcattttgcatcatttcactattggggaaatgataacttcttacattaaatgaaaaaaaactgaaaaagtagtattactttgtcttttaagtggcaagatagggttgatatgatgccgaagtacaaacagtagggactaagtgaggatggaggatatatgaataaatgtatcaaaagtcaagagaaatgataaaacagacaattctggggaacagtagtagaagmtatgcatggaatatggttagacagacagtgatatttacttttgagttttgcttatatatttctaacatttcttgataggactggcattctaacagttattcttattgttataaattcttttaaaaatactttttctccaaacatctcagttcaaattatag

SEQ ID NO: 649530 - DNA, 421 bp, Homo sapiens
caaacctgaacccatttggacaatacatcaaataatcattttgcatcatttcactattggggaaatgataacttcttacattaaatgaaaaaaaactgaaaaagtagtattactttgtcttttaagtggcaagatagggttgatatgatgccgaagtacaaacagtagggactaagtgaggatggaggatatatgaataaatgtatcaaaagtcaagagaaatgataaaacagacaattctggggaacagtagtagaagatatgcatggaatatggttagacagacagtgatatttacttttgagttttgcttatatatttctaacatttcttgataggactggcattctaacagttattcttattgttataaattcttttaaaaatastttttctccaaacatctcagttcaaattatag

SEQ ID NO: 649531 - DNA, 539 bp, Homo sapiens
tggggaacagtagtagaagatatgcatggaatatggttagacagacagtgatatttacttttgagttttgcttatatatttctaacatttcttgataggactggcattctaacagttattcttattgttataaattcttttaaaaatactttttctccaaacatctcagttcaaattatagagttaaaggaaactatagtaataaaataaaatattaattatttcaaaagaaaaagagaaaaatttgtacacttaatttaaaattgttttcagtcttattttygcaagcaatttaccaatagatttgtaatgcacagtaatgttgaatgagtattgaagctattgaaatacagaagtaagtcagtttttcattatgctgtgagtgatgtcctgaaacacattaacttgatattttatctattgtttaatatcattccccatgaattacttataatggtaatagattaatatctttgggagtactgtaaataattatataattcagccaggaattaccttgttcatttgctaacattgtt

SEQ ID NO: 649532 - DNA, 392 bp, Homo sapiens
aggcacagaagaaaactaaagatagtatttgactatttatagttgtacagttatttgtaccttatttggtaccaaagttgtacgttattaggtctatcccactggaaagtcttcagttgtatgattatgtgtgttggctacttctgattggttgaacttaagttctgtttttctttaatatagaaattgataagaatrgctcaagtttcccttatatctgtagatcaaacaaggtttagatcacttatgatgcctaactggttttgtctgctcagaaattcttcaggcctggactccattttaatttactttaatgattgttactttaaatttggattaaacagtggattcatatgtactgagtgaaaaaaaatggaaatagatgttataaa

SEQ ID NO: 649533 - DNA, 570 bp, Homo sapiens
ctttaatatagaaattgataagaatagctcaagtttcccttatatctgtagatcaaacaaggtttagatcacttatgatgcctaactggttttgtctgctcagaaattcttcaggcctggactccattttaatttactttaatgattgttactttaaatttggattaaacagtggattcatatgtactgagtgaaaaaaaatggaaatagatgttataaaatttatttgaaatcattcagccaggatgttttaaacagcataaattagcagaattaccaaaaacacattttgaaaaaaccttgaagcaattttaatgtattgcaaaatgtgaaggagactagtaggacaaaaacttaaaggttgagtttgagatatgatgcagggttttttgctccttagcccagctaggcctaagttctgaagaagtaggcacatggacactcaaagrgtaagtgtagtagaatttatttagtgaaaggaaagctctcagcaaagagaggggtcctgacatgaagttcttggttgcccccttaacagttgaatacaagggcattttttttttcttgaga

SEQ ID NO: 649534 - DNA, 570 bp, Homo sapiens
ctttaatatagaaattgataagaatagctcaagtttcccttatatctgtagatcaaacaaggtttagatcacttatgatgcctaactggttttgtctgctcagaaattcttcaggcctggactccattttaatttactttaatgattgttactttaaatttggattaaacagtggattcatatgtactgagtgaaaaaaaatggaaatagatgttataaaatttatttgaaatcattcagccaggatgttttaaacagcataaattagcagaattaccaaaaacacattttgaaaaaaccttgaagcaattttaatgtattgcaaaatgtgaaggagactagtaggacaaaaacttaaaggttgagtttgagatatgatgcagggttttttgctccttagcccagctaggcctaagttctgaagaagtaggcacatggacactcaaagggtaagtgtagtagaatttatttagtgaaaggaaagctctcagcaaagagaggggtcctgacatsaagttcttggttgcccccttaacagttgaatacaagggcattttttttttcttgaga

SEQ ID NO: 649535 - DNA, 568 bp, Homo sapiens
cataaaaacattcagtaaaatccagcattgctttatgataaaaaccctaaacaaactagacatagaataaacatatctcaaaataataaaagctatatatgacaaacccatggccaacatcatattgaatggggaaaagttgaaagtcttcccactgagggctagaacaagttaaggatgcccattttcaccacttctacttaacatagtactggaagtcctacccagagcaatcaagcaagaggaagaaataaagggcatccaarctggaaaagaggaagacaaattatctctgtttgctgatgatttaagcatatacttagataaacctaagaattccaccaaaagactcttctatttgatgaatgaattcataaaatcttaggttacaaaatgaatgtacacaaattagtactactgcatagcaccaacaatgatcaagctgagaatcaaatcaagaactcaatttcttttacaatagcagcagaaaaaaaattgaaatacacttaaccaaataagtgaaagatctccataaggagagctacaaaaactgctgaaataaattaga

SEQ ID NO: 649536 - DNA, 608 bp, Homo sapiens
tggaagtaggttgaatggttttacagatgaattacagtgaaaactttgaaacactaataatctcttcggtgttgagaaataacctactaatcattaacttaataattatcagctcaaccaggaaactacaccacctaaaaggtagttaattttatcactcctagacatctacaggagaccatgattctccattatgtgaatgccttgctgcccatgtgatgcctgcmcccatcaattctaagaagcttcagtcatttagtacttaatatgtaatttttaaaaattacataagtaacaccttctccttatagagaactgaaactttcagaaacagttaaagcctaatttgaatattgccaaagccctgtctcttcttcagagacaaccagtgtttccagtttggtgtgtattttccccaaatacagtgaatgtgtgtataaacacgtgtagatttacctgtcctagatatgagcatttgctttgtgagtctgctttaagtcaagttctaaactatggctcagtttaaaacttctctttttctatttaataatataccttagaagtcatgccatgatattaagatgaataataatgaaattattaatatt

SEQ ID NO: 649537 - DNA, 323 bp, Homo sapiens
cctgtccttcattaaattttaatgaataatcagtcaattwtaaaactcttgaaaaattcatattaaaaaggaaacatttatattattaaaaaataataattacaaaatgcccatataaatattatttagggccaggcacactggctcacacctgtaatcccagaactttgggaggctgaggtgggcaaatcacttgagcccagggtttgagaccggcctgggcaacatgacaaaaccctgtctctacaaaaaatttaaatattaatcagatgcggtggtgtgcgcctataatcccagctactcaggatgttgaggtgggagtg

SEQ ID NO: 649538 - DNA, 519 bp, Homo sapiens
tgtggtaaacatacaccatgacatactactcagccctaaaaagaatgaaataatgtcatttgcagcaactccaactggagctggaggccattattctaagtgaagtaactcaggaatggaaaaccaaatatcatatattctcacttttaagtggtagctaagccatgggtatgcatacagagtggtataatggacattggagaccactaatggggagagtaggaggtgggtgagggataaaacactacatattgggtacaatgtacactacttgggtgacaagggcaccaaaatctcagactttaccactctgtaaccaaaaaccacttgttccccaaaagctattgtgttatgtatgtayattacatatgtctaagtatagccatagatatccaggattttttttatccttaaaaaaccatatgatttaagagaacttaaagttattaaaaatatattattattttaattctccatctcccctggtagtgtgctatgcaaataataatgaggagatat

SEQ ID NO: 649539 - DNA, 585 bp, Homo sapiens
tgagactcttcacacactgagagaattaratctgtagccctttgtccagttaatttctctgatttgcaacaataggaaaacttcttttactcccctaagagggtcaaatttttaaaatccttagattactaggttcctaggttaagtactagggtaagaggaagactaggtttttgtattcatatgtcaaaagatatgatgttccagaatttggagacagctataggtcataaaaacttggagatacagggttatttggttccaggagagattttacaacattccaaaagtttggaataaagaagatatcctcttagaaggacagaaaaacagccgtttccgtcctagtataagtataaaaacaaagacaaggaaaaaaaccattgttcttaacttcttgctttcagagagtctggcctctcactaggatgatctggatctctttatactgtccaaagataagaactgggaaaaggagcagccaacacacattattaagaaatctgtttctgactgagaacactgtgtggacatttaaaataaaattaacaaacttgagcccaggagtttgaggctgccatgagc

SEQ ID NO: 649540 - DNA, 585 bp, Homo sapiens
tgagactcttcacacactgagagaattaaatctgtagccctttgtccagttaatttctctgatttgcaacaataggaaaacttcttttactcccctaagagggtcaaatttttaaaatccttagattactaggttcctaggttaagtactagggtaagaggaagactaggtttttgtattcatatgtcaaaagatatgatgttccagaatttggagacagctataggtcataaaaacttggagatacagggttatttggttccaggagagattttacaacattccaaaagtttggaataaagaagatatcctcttagaaggacagaaaaacagccgtttccgtcctaktataagtataaaaacaaagacaaggaaaaaaaccattgttcttaacttcttgctttcagagagtctggcctctcactaggatgatctggatctctttatactgtccaaagataagaactgggaaaaggagcagccaacacacattattaagaaatctgtttctgactgagaacactgtgtggacatttaaaataaaattaacaaacttgagcccaggagtttgaggctgccatgagc

SEQ ID NO: 649541 - DNA, 468 bp, Homo sapiens
tctcctcatgtaatttcttcttcctgaacgatctcaaaaaaatataatttcaggtctagataattgaaataaaagtgcatccctgaaacaaattatttagctcttactttttataaatactctaattgctaaacttatcaggatcatgacctactttgtatagacaaattaaattctaattctccagatcacaatatataggctttaagtcaccataatttttycccatttgcctcatttctgcctttctttgaggtctctaccttttgtaactagtttttaatttgtaaaatatttacttaatattagctgatttataatgaattagtttagactagaatggcatttgaatacttgttgaaaataatatcacttgtagacccagaatactttggtagctacttcattttctctgtctctttctgaaaagttagccagcttgctttaggcagacactaagggaagggt

SEQ ID NO: 649542 - DNA, 427 bp, Homo sapiens
gcagcgcatgggtaatggtggataactcgcaccctgtaagccccctgttaacataggtgaaagctgcaytggcacccatgggtggtaacctgccaagatcaccaggactcagggatataagaacagaagaaagaaagaggacacttttctcctctccctcatgtacctcaggtatttactaggaaaaagaagaaactagggatgccttgctcccctcttcttaggtgagtaaccaatcatctgcagcccatatttctcttgattgcctcctgaatcactaggactcttctgaaaaaacacctcctttctcctttttcctcctctgtcctctctttgtgggtgggtcattgtgtcgctgtaccacaggacactccctttggatgcatctcttaaactgggaaaagttaatttctccaaaccttaaact

SEQ ID NO: 649543 - DNA, 427 bp, Homo sapiens
gcagcgcatgggtaatggtggataactcgcaccctgtaagccccctgttaacataggtgaaagctgcactggcacccatgggtggtaacctgccaagatcaccaggactcagggatataagaacagaagaaagaaagaggacacttttctcctctccctcatgtacctcaggtatttactaggaaaaagaagaaactagggatgccttgctcccctcttcttaggtgagtaaccaatcatctgcagcccatatttctcttgattgcctcctgaatcactaggactcttctgaaaaaacacctcctttctcctttttcctcctctgtcctctctttgtgggtgggtcmttgtgtcgctgtaccacaggacactccctttggatgcatctcttaaactgggaaaagttaatttctccaaaccttaaact

SEQ ID NO: 649544 - DNA, 427 bp, Homo sapiens
gcagcgcatgggtaatggtggataactcgcaccctgtaagccccctgttaacataggtgaaagctgcactggcacccatgggtggtaacctgccaagatcaccaggactcagggatataagaacagaagaaagaaagaggacacttttctcctctccctcatgtacctcaggtatttactaggaaaaagaagaaactagggatgccttgctcccctcttcttaggtgagtaaccaatcatctgcagcccatatttctcttgattgcctcctgaatcactaggactcttctgaaaaaacacctcctttctcctttttcctcctctgtcctctctttgtgggtgggtcattgtgtcgctgtaccacaggacactccctttgkatgcatctcttaaactgggaaaagttaatttctccaaaccttaaact

SEQ ID NO: 649545 - DNA, 427 bp, Homo sapiens
gcagcgcatgggtaatggtggataactcgcaccctgtaagccccctgttaacataggtgaaagctgcactggcacccatgggtggtaacctgccaagatcaccaggactcagggatataagaacagaagaaagaaagaggacacttttctcctctccctcatgtacctcaggtatttactaggaaaaagaagaaactagggatgccttgctcccctcttcttaggtgagtaaccaatcatctgcagcccatatttctcttgattgcctcctgaatcactaggactcttctgaaaaaacacctcctttctcctttttcctcctctgtcctctctttgtgggtgggtcattgtgtcgctgtaccacaggacactccctttggatgcatcycttaaactgggaaaagttaatttctccaaaccttaaact

SEQ ID NO: 649546 - DNA, 531 bp, Homo sapiens
ttctgctagactgttattactgagcaatcctttggtggagaaggaggttcatgctgctacaggccacaatttgcctcatttgcagtcagatcaggctttttgtcagagagaggacatgcccattaggcaakatgtattcagatacttccaactgatcgctgccttttctttctgattcaaattcccattctcaatatatttacctaatgtatgcctccattttgcctttttaagcaagactaaaaaatcaatacccttgaaaaaaattgattaatttggctaacttaaatttaaagtcttcacttctagcaaaatagttttactacatattttttactatgagaaaatatgtaaactatgtatatgaaagcaaatctataaataatttagaaaaataaaaatatttcaatagaaaagtgggaaaatgtaaaaataggtacttactggaagaatcaagagattagttctaaagaccttaattatttatttaaactaatttaattaaaattttaaaaataattaaatttttca

SEQ ID NO: 649547 - DNA, 531 bp, Homo sapiens
ttctgctagactgttattactgagcaatcctttggtggagaaggaggttcatgctgctacaggccacaatttgcctcatttgcagtcagatcaggctttttgtcagagagaggacatgcccattaggcaatatgtattcagatacttccaactgatcgctgccttttctttctgattcaaattcccattctcaatatatttacctaatgtatgcctccattttgcctttttaagcaagactaaaaaatcaatacccttgaaaaaaattgattaatttggctaacttaaatttaaagtcttcacttctagcaaaatagttttactacatattttttactatgagaaaatatgtaaactatgtataygaaagcaaatctataaataatttagaaaaataaaaatatttcaatagaaaagtgggaaaatgtaaaaataggtacttactggaagaatcaagagattagttctaaagaccttaattatttatttaaactaatttaattaaaattttaaaaataattaaatttttca

SEQ ID NO: 649548 - DNA, 593 bp, Homo sapiens
atgtaaactatgtatatgaaagcaaatstataaataatttagaaaaataaaaatatttcaatagaaaagtgggaaaatgtaaaaataggtacttactggaagaatcaagagattagttctaaagaccttaattatttatttaaactaatttaattaaaattttaaaaataattaaatttttcaataatcaagtaaaacaaattaaacttaaacaatagaaccttttattttgagatgcaaaagcatgaatcaaagacatctgtaaagcttaaacgtattcagattgtaaagctaacccatgtaaaccaaactaggccaggaattagactatattagcgccccagactcccccaagtgtcccttcctaaaagaagctcctctcaccctaagttttatgtataatttttttgctgtgcttcaaaaaggtatagcatgtatgcatctctgaacaacataccttagtgttttttggcctgctttgataattactatgaaatcctctttctgtattattttgtgccacactccttttgttcaacatatgtttatgagtgacagccctgttgttgcaagcagttgtaatttatttattt

SEQ ID NO: 649549 - DNA, 603 bp, Homo sapiens
attctgtaggtaagatattccttcctggaaacttcttagtttgtttgccaagaggttagccagttatatggttaccaaaaaacctgccttctttgtctccwgcatgtttcttattaaagagaatgaatgaattgcagaactattgtttgcacatttacttttaaatggtttatcagtaaaatatgtgagaatacatttttaaaataaacttatgtgattgctttggaaaatgtctggaaatacgcaaaccacactgataataatggccttctggggatgaaccaacacacaatagatttactggtaatcgtttgattttttcaaaagtactacattcctgtataatttgcatgattaaaatgtatttaatataatttccacctgtgataattttcttgtgtataaataggacattgctcttgctattagcagctatatactgtaatatttatagttgaaccacagggtttagcagacttcagcccatacactgaacctgtcctattgcctgtttttgtacaacctgcagctaagaatgtttttatattttttgaataatacaaaaatatcaacagaataatagttcgtaaaacaaaattaaca

SEQ ID NO: 649550 - DNA, 603 bp, Homo sapiens
attctgtaggtaagatattccttcctggaaacttcttagtttgtttgccaagaggttagccagttatatggttaccaaaaaacctgccttctttgtctccagcatgtttcttattaaagagaatgaatgaattgcagaactattgtttgcacatttacttttaaatggtttatcagtaaaatatgtgagaatacatttttaaaataaacttatgtgattgctttggaaaatgtctggaaatacgcaaaccacactgataataatggccttctggggatgaaccaacacacaatagatttactggtaatcgtttgattttttcaaaagtactacattcctgtataatttgcatgattaaaatgtatttaatataatttccacctgtgataattttcttgtgtataaataggacattgctcttgctattagcagctatatactgtaatatttatagttgaaccacagggtttagcagacttcagyccatacactgaacctgtcctattgcctgtttttgtacaacctgcagctaagaatgtttttatattttttgaataatacaaaaatatcaacagaataatagttcgtaaaacaaaattaaca

SEQ ID NO: 649551 - DNA, 603 bp, Homo sapiens
attctgtaggtaagatattccttcctggaaacttcttagtttgtttgccaagaggttagccagttatatggttaccaaaaaacctgccttctttgtctccagcatgtttcttattaaagagaatgaatgaattgcagaactattgtttgcacatttacttttaaatggtttatcagtaaaatatgtgagaatacatttttaaaataaacttatgtgattgctttggaaaatgtctggaaatacgcaaaccacactgataataatggccttctggggatgaaccaacacacaatagatttactggtaatcgtttgattttttcaaaagtactacattcctgtataatttgcatgattaaaatgtatttaatataatttccacctgtgataattttcttgtgtataaataggacattgctcttgctattagcagctatatactgtaatatttatagttgaaccacagggtttagcagacttcagcccatacactgaacctgtcctattgcctgtttytgtacaacctgcagctaagaatgtttttatattttttgaataatacaaaaatatcaacagaataatagttcgtaaaacaaaattaaca

SEQ ID NO: 649552 - DNA, 414 bp, Homo sapiens
cattctgaccatggtatggagaatgagtagaagcagtaagacactttaggaggctatctcagtggtctaggtgacagatgatggtaggttacrctgtgaaatcataatgaagaataagtggtggcattcagggcatattttggaggtagtgtctcaccagacttgctaatggatataggagggtgaaagaaagaactcaagagtagcccctaaatttttggcctgaacagctggttggatagtggtgccttttattttgggaagtttgggggacaagcaggtttgggatactgtaaattactgctattgagaaaataaagtatcccacacatcttagtcaagatgctccacatcctgctccacagatactccacattgaagtggagatgttatgtaggcatttgaatgtatgaa

SEQ ID NO: 649553 - DNA, 536 bp, Homo sapiens
tatttctttgggtttttatttttatgactatatttttattttgtttttatgatcatgtaacaggttgaatagtatacctccaaattgctctgtactcggaacctcaaaatgtgaccttatttgggaatagagtctacataaatattagttatgataataatggtgatgatgaggatatagtctgtattagctttacayggttgctgtaacaaattgccacagaccaggtggcttaaggccacagaaatgtattctttcacagtaccagaggccagaagtctgaaatcaaattgtcagcaaggttagtttcttttgaagtctctgagcaagaaaccaacccagacctctctcatagcttctgatagttgccagcaatccttggcgtccttggcttgtgggtgcatctctctaatccctgcctccatcttcccacggcagtctcctctttgtgtatcactctgttgctattgtcttgtaaggtcaccagttattggatttagggcccactctaatccagtatcctcatcttaattaca

SEQ ID NO: 649554 - DNA, 537 bp, Homo sapiens
aattgttttcaggcaacagggatgaatctaacagaaaaaattgaataataaacaataaacaatgtaaaatttaaaaggaaaataatacagaacttctttacttacgtatatttactggctgcttcctataagtatgcgtcactctcctgtttataactcatgaatagtaattcttttgagagagaaaaactgcggcaacgaaaccacaaaacacgttgttagggcaaatgcatttggtaataatgagagctttgttttccacttttctttaaaagtggaactttttctccctttatactaatccacttatttcactcttttctgttttgtctatccctctatgtatatatgtgtctatctatctactatttgccatctgtctaccaatctatttatttatctacctaccatctctctatcctctatctatccatctatctactatctatctatctwatctatctatctatctatctatctatctatctatctatctatctatctatctatctatcacctatctatttctagttccag

SEQ ID NO: 649555 - DNA, 540 bp, Homo sapiens
cacacctgtgaacccagttacttgggagcctgaggcacaagaatcatttgaaccctggaggtgaaggttgcaatgagctgaaatctcactactgcatttcagcctgggcgacaaagtgagactctgtctcaaaaaataaaataaaataaataaataaatttagtgtagcctaagtgcacagtgtttataaagtctatrgtagtatacagtaatgttctagaccttcacattcatttaccactcagtcactgacccacctagagcaacttattcatggtaagtgttctatacaggtatatcattaaaacatattttgtactgttttcttaatgcactttttctatatttagatatgtttagatacacaaataccactgtgttacagtctctaaagtattcagtatagtaacatgctgtacaggtttataaactaggagcaatagtgtataccatattgcctaggtgtgtgataggctataccatctagatttgtgtaaacactctataatatttacacaatgactaaatcacctaacaata

SEQ ID NO: 649556 - DNA, 605 bp, Homo sapiens
actttgttgttaactacagtcaccctactctcctgtcaaacattagcacttattccttctatctaactgtgcgattgtacccattaaccaacctatctttatcccccatccctctccacacacaaactttccagcctctggtatctatcattctactctctatctccatgagattagcttttaaggctctcatgtgagtaagaacatatgatatttgtctttctgtgcctggtttgtttcacttaacataatgatgtctagttccatccatgctgctgcaaattacataatttcattttttatggccaaataatatttcattgtacatataccatattttctttatccctttatcygttgatggacacttaggttgattccacatcttggttattgtgaatggtgctgcaataaacatggaagtgcaggtattcatttgttattctatttttcttttcctttggataaatacccagtagtgggattgctggatcacatggtaattctaattttagtattttgaaaaatctctatactgttttccatagtgtctctactaatttatgttcccaccaaaagtgtataaaagttcctttttctctgca

SEQ ID NO: 649557 - DNA, 554 bp, Homo sapiens
aaccttgggcaagttacaacacctctaaaccttagatactattacgatctctattctacagttaagaagctgacttcatcggatgctatgttattgttttctttttattatttttttgtttttacccttacagtaatgcttggtacatatgcaatgtctgtttatgtgcccatgtatgcactacaaaattgcataatagcccagcacctcttgacttgtaaaccagagtaaacaactgaaaaatctcagtggtttgacataacaaagtttatttcttgctaatgccatatatgtccaatgcagatcaaaaggtagaatctgctcatcattgtcactctggaatataggttgatgaaaaaaatttctcaatactttagaatcaacakggcaagagcataaaaatatagaaaatcatggcttggctcataaaatttgagcctgatccttctcacatccacacacatttcactaagtaaagcaaatcatggccatgcctaatttcaaagtttgaagagaagtacaattctaccaagtcccagaaagagagccagagt

SEQ ID NO: 649558 - DNA, 620 bp, Homo sapiens
ccagtccaggaggagaagcttcctggccataggctatttcagacctggaatgctgtgtgcacttaataaatatcaaagaaaaataagtgatgatgcccaggagaaaggtttcctctttgtttccctatacttttgaagaaaccagtatttttcatttttctagtatccactggtgtaaatattccctctgacgtcccatgataattaaactaagtaaagtctgtaaaagtcttgacagattatcagagattgtcaatgtctaaccacaatttgttatttctcacttgacactccaatattatgagaagactattcttatttccaaattaaaatcatgataagcatttaaagataaatcaatrcaatggggaagtatcagagcaacaacaaattaatttaacaagatgatatttggtgcctactgtatagtagacattgtatgctagtgataaggatttctgatctttcttgtaaggtcttcattcctttacttcattcataaatagagtaataggtctttcttacaacttccttttaaactagttctcctagttctggtcggagattgagcaactctctctgctctactctgggccttgcagaatccctcttcagaaact

SEQ ID NO: 649559 - DNA, 574 bp, Homo sapiens
tctacactcatacttgttgagatgttaaaacacagagtaaagtagagatttgcagaaaattggttaattagatcaacatggtatagcaatgctcaatgtsttttataaggaacaatggtgttgtggagtgctaatggatgtcattaaaaagaggggttcttggagactaaaatatgtcatttgcagtgggagtcccaagaagcaggtatggtaaggtgtgtttttgaagtgtattcagttgttggccttttatcttttctgagcatttggtaggatcaatgttgcttctaacagtctttggggagtgctggtataaataatcaatatagaaatgaggattgaatttttcatgtagtccatttactttgtttaaattatttgcataattgttgctacatcactaaagtttgcgatatgagtgagtattgcaaaataaaaggttttttggaactttgtaatcaagtaaatctggtgagcatttttctgacatttgaaatagaaaaactttatactctaagtcatctttgctgtactcattttataaatctgaggttttttgttctttgtttctgac

SEQ ID NO: 649560 - DNA, 558 bp, Homo sapiens
ttacgagcacctgttctgtggtaggccttaggctagcaaacatttgtgagcatcggtgttgcttagtttcttgttaagaatgcagattcctaagcacatcctacaaattcactaagtccagggtgatgtacaatattaaaccatggctttatgggaaaatgttgtaagtggctggcaggctgcattttgggaagaagaaaaacacctgctgacaaaatggagactcaaaacaacatcaaacatgtaccctgccctaatgtatttgcaatatagttggagggacaatgtacatgcagagatagaataacaatacatgggaactaaaatcatgccaacaaaattgcagagaaaacaactgaagagagtataggagtagataatggagtctcaatgaaaagaggtagaaattgaggtcagctttcaataaatagagtaaatttcttttatgaagagatacatttacctttgckattagccatggccattattcattttatattttccttttggcctttcttctacattctctaatttgcttagttcacactacagtctcct

SEQ ID NO: 649561 - DNA, 639 bp, Homo sapiens
aatctatgctttctagtccagcatacagggttttctttggtctgggactgtagcaccccagccaaatcttgtgatgttctaacacttgttccccaacagccaatgtcaacgtggcctttatatagttcaatgactatacaaataacttttcagcactaaggctatcagacaggctggtcatttgtctggagtgcacttctatagtgataaatcattctggaggtttcaccttatatatcatctcctcagttaactaacstttgtgtaatacctttgaatgtgcacttcccacaatcctctataatagcctccaataagtttcctccatctgcactttacattttgcagttatctgtgcatttataatttctataaattttaggactttgactttttttccaaccccatatgaggagaggagagattatatctgttgctttcactaccttgtacatggaacccaatagggtggttaggcatgtaataaatttttgtaaatagttgtcaaataaaataatgaataaaaacacgattaaagacaatgccttataaagtttcctaagtgttttttacctctgtatgttaagtaattaattatctgatttgattatcatcagagaaatcatttaaaagctccca

SEQ ID NO: 649562 - DNA, 611 bp, Homo sapiens
tttgatttctaacagatatgttcctccacagtatgtcacattcacttagatttagaataacatatatatcacattatacatatatgtgtatatacatatgtgtgtrtatgtgcatctgtgtatatgcacactcacagacacatatgcacacacatagctacatatacctacatttacaaatacattcaagtattatttctgcagcagagtttataattacccagatgtttaagtatttactaggatttttctttaaaaagtaagacaaagaaaaaggtcctcagagtttctatgagtttttttccaagagcgctgatctctacctgggcactttatttgttagtttacatgtctctcatttacactaatagtgtatattttatgttctagtgaatacaccccatacctcttcatctcgtattctttttagtcagccgtagaattttaagtaagccagtcttccaagattcatcctttgtgaaagaatattcttggattagtggttctgttgacattttttcttactcggtgttaatacccatcaactttccaagtttatacatatttgttactggccaggtccagatccatcccacttgcctgcagcaagt

SEQ ID NO: 649563 - DNA, 523 bp, Homo sapiens
ctaatgcatgcagggcttgaaacctagatgacgggttgataggtacagtaaaccaccatggcacatgtatacctatgtaagaaacctgcacattctgcacatgtatcccagaacttaaagttataaaataaaayaaagaaatagctagaaaattatcttcattcctattcatgtaatctgtccacctggtattttatagtttgaggtgagctttgggaagatatactaaattctattcttctgtttcatttggaattcccaccaaacaccccctttgttcaaggacatggattcactaaaaagaaaagttctgaagaataacagaacttgccagatcccatcagggatgtgaatagtcccagtgacggttttgaatttgggcagagcacttccatcttccatccttcctatctgagccttttgacaagtgagtacatttctctgtctctctctttttatttaacaacatcaaaagtgttaatacgcaaatgaactaaaaattacttgtaaagtgtgtacaaaa

SEQ ID NO: 649564 - DNA, 555 bp, Homo sapiens
agggcagggcacattttaaaaacagtcaatactctgccaagctgaattgtcatcattgtgtgtgacctggtgacctagagtgtcagaggagcacagggactatgcattacccaaaagctggtgcatatcttcatcccctacacttccagtgatccatgtgtattatgaaggtatgttggcagatagatgagagagagaaagagatgtgtgttgggttggggggtggagcggggattaatcaatttaatgcatatcattcttatacaagtgtttgcttttaatattttttcatttacttaaaatgtcccagaatgccacaaaataagtatayatttttacattctcatcttcaataacatttttgtcttttttaattcgctttgagtgtccactttcttacaagcactgttttaagtcctggagttaaagagtaaactgaaaaatatcctggttttcatggtttaccctcttattaggaaaacagacgataaatcaatagattagaatatacatatatagagagtatatcagatgaggataatttctgtgagaaag

SEQ ID NO: 649565 - DNA, 555 bp, Homo sapiens
agggcagggcacattttaaaaacagtcaatactctgccaagctgaattgtcatcattgtgtgtgacctggtgacctagagtgtcagaggagcacagggactatgcattacccaaaagctggtgcatatcttcatcccctacacttccagtgatccatgtgtattatgaaggtatgttggcagatagatgagagagagaaagagatgtgtgttgggttggggggtggagcggggattaatcaatttaatgcatatcattcttatacaagtgtttgcttttaatattttttcatttacttaaaatgtcccagaatgccacaaaataagtatatatttttacattctcatcttcaataacatttttgtcttttttaattcgctttgagtgtccactttcttacaagcactgttttaagtcctggagttaaagagtaaactgaaaaatatcctggttttcatggtttaccctcttattaggaaaacagacrataaatcaatagattagaatatacatatatagagagtatatcagatgaggataatttctgtgagaaag

SEQ ID NO: 649566 - DNA, 592 bp, Homo sapiens
cagcactgctgtttacaccagtagactcctgagccccggccacagagacaggagcttggagccggaagggatcttcataatcatatattgtaattgcccagtattatggatgagaaggaagatgcagaggagttaaggaccctatccaatgggactctgagcaaactgcagcatcacaaaggggaaggcagacccaggtaggcatctgggctctatttcttggcctgtgyctaggggatgtgacgtgcttctgctgtgttagtaagttattaaaatcccaacacaacacacagcataccatcaatgtggcaaaactactttcattaccttcattctcacttctaaatcccaataaacaactcttagaattcaagattgccaaaggccccaccagtctgagcctcagtgtccctggtataaacaaaacatcccagtagcaattcctttcctaggtcccctgaagttctttgtctgaagagccaatgaaacttgtgttttctggctactttttcacagccactcagaccctggctaaattctccagaattgccccaaattggagagaagaaagttgcctaaagcccagcagggt

SEQ ID NO: 649567 - DNA, 556 bp, Homo sapiens
ctacaggacttgctgtctctgcaaattatcatcttgttgggcaaatcacttaacctccctgtgccttagtttcctcttatcaaattagggataaaacaatacatactataaacagtttgtgtgcagctgaaaggcatttaaaataatacccattccataagttctcaataagtattaactgtattagcagtagagatgatgatgatgagatgatgagataatgaaggtgatgatgatgacaattgctgtcatctgtgatagcaatgatttgtgatgcttgttctaactcacacagatgtaagtggtctagagctgggatctaccgtcttctcccagctttccaccatttcaaagctttttatgcattaatrtaatatagtggttctgaatcttttgtcctgcctagctcacgtgtctacagcactctcatggccatgcccagattttgaaaatgctctttttatgccatgtgataggcgttcaaactaatgttccttttggtaagcgtaaaaagctcaaacctcacctcttttcctaacattgtattcagattcct

SEQ ID NO: 649568 - DNA, 555 bp, Homo sapiens
  misc_feature 545, 546, 547, 548, 549, 550, 551, 552, 553, 554, 555: n = A,T,C or G
ctaatcttgctttcccctacaatccattctccattcgacagatagatcaaagaaacatatcaaaaagtatcttgcctctgactaaaacttccagtggcatttaactgtacttggaataacatttagctctttacctcagcctacattttcaatggtctaatccctgtgtggcctttatggttttctccctaagatatactctttctttgaataattagcctgaatgggttgttctcaaacttgaaggttaaatggcctaattcaaggactgggactacaaatgtataggatgagcctggarcatcttgccttgccataaagtgcacacacacacacacgcactggagggggtatgttaaagaggcataggagccaactgaaataactcccaatgaccaaagctagaatcggttgaggtacaaaatcaagtagtattggattataacccaatccatgagtctaaaaatccatgactccataatgatataaatgactgaatacattaaaaaatggagacaagagacaaatctcccatgtagacttcnnnnnnnnnnn

SEQ ID NO: 649569 - DNA, 628 bp, Homo sapiens
caagtgaaacctgctattttttctgttacttggttttctgtttcacaacagaataaaagcagaaaattagaaggaaggggtgtaaacacgtaagagaaatcagtgaccaaggatagagaagaaattgttacaattaatctggggctgctctgtatagctccacaaatttaacagtcccgaagtgctgagagctacagcacaggacagcactgccgtcagcattaacatccaaaagaaaacaactagcattctgcttacactgtttgaaaaagcaggaaggtatgtgtgacaatacatttttaaatttgtatttgagtgactattataattccttctcttaggaagagatatgttgaggaaatgtgtacattgttccaataaggatacgttarttgctagaggtcatgggtttctgctgggctctggactacagagtcatgtaagacaaaaacaaaacctactcttttcaacagaaagagaaagttgttcctgaatgggaggtgacacaaatggggagtgatggaagggagaaggcagaaaagtgagcaagattgtggaccaagattatgcaaagaactcctgagattctcccaatcttcaataaagtctacaaaaatcaaatacgtta

SEQ ID NO: 649570 - DNA, 628 bp, Homo sapiens
caagtgaaacctgctattttttctgttacttggttttctgtttcacaacagaataaaagcagaaaattagaaggaaggggtgtaaacacgtaagagaaatcagtgaccaaggatagagaagaaattgttacaattaatctggggctgctctgtatagctccacaaatttaacagtcccgaagtgctgagagctacagcacaggacagcactgccgtcagcattaacatccaaaagaaaacaactagcattctgcttacactgtttgaaaaagcaggaaggtatgtgtgacaatacatttttaaatttgtatttgagtgactattataattccttctcttaggaagagatatgttgaggaaatgtgtacattgttccaataaggatacgttaattgctagaggtcatgggtttctgctgggctctggactacagagtcatgtaagacaaaaacaaaacctactcttttcaacagaaagagaaagttgttcctgawtgggaggtgacacaaatggggagtgatggaagggagaaggcagaaaagtgagcaagattgtggaccaagattatgcaaagaactcctgagattctcccaatcttcaataaagtctacaaaaatcaaatacgtta

SEQ ID NO: 649571 - DNA, 560 bp, Homo sapiens
gctctgactggataaacctgtgaacaagtaaccaacctttcatagctactttctcaccttgtaataaaaatacataaatttacaattattttataatggccttattggaattgaatggccacgtgtaacctaaagccatcattcacttttaatttacaataaatcaaatgtgtctttcattcatatagactgttgctagccacaaagggctttcacataatctcatttaatttaaaaacaactctgaatagcatcattagactcattttacaaatgaggttactgaagctcagagaaagtataatttttctattaatagcatttattataaattctatgtcacaaaattacrtataactagaatttaaacctcaaaacctaattccttgtattccagtaagcttggtacactcaatactttgcccaaacttcccacatgcagagccataggtactatattaaatgctcccttccttcgacctctgctttctgctggtctataagcctgtgcttgctcctcttcgccttgctaaccccaagtgcaaagccttcagtgctga

SEQ ID NO: 649572 - DNA, 590 bp, Homo sapiens
tgtttcaaagaagaataaatgaccaagatgaagcctagaaaagaagtcagagaaaggtcaactgtcaggatgttttcagtatgcctagagaaagtcctaaaatattccaattctcattggcaaccctgcttttcccaatagttagatgaatacttcacatcagcccccagtcccaaggtcataccaatgtcctatgcattgagtcaggcccacagaacctatatagccgtagactcacacagtcatgaaccaaaggactctacctgagaggtagaatatgtgagagaccgatcctccacacattctacctcatctccccaaaagttacaaactatcatcattttatgccacagtgtgactaccacatgtttgttgatttttactgttttactcagagtggtgagcattaaagccctttaaattaaaaagacttgagtatttacttgggggaatagcaagaaagtcaaaggtttcactgctgtttctcagctggcrtaagaagagaggtactggatgaagaaagagggtgaggcagctctaacaggagaaggaaagttagctcagcccttggtcacacaccggggaccgaa

SEQ ID NO: 649573 - DNA, 601 bp, Homo sapiens
caaacattctacctaagaagaaaacaaaaaggaattgagggacattgagggtacctagaggcaggagagagtctggggtctggttgcttaaaattatttaaattaaatcttactaagagaggagagttctagattttaaattatcactgtagtcttgtgaggtctctctcctacctgctatgaatttccacagaaaatctattacgttcaattggcttgtgggcttgtcattaagggtgagtacagacatcaatagaaaaatctttttcacatagcaaatacatgaataaatacgcgaatgaattgattattatattcagatgcattctctgtgaccactggtcataattacacaagttatgttctaatattgaaagaccattcaggtcccagaaatacctaggccagttcatgtcttcattgaatggcacctgctcrgcttttgtgaattctgagatttgccttttgcagtcttctacctctgtctttccactgagctgtcagtcacacttaggcctttagctgttctatctattgggtggccagtgttcttcactacactgaaattgctgctgtgagttgcgaaaatagaaagtgaaag

SEQ ID NO: 649574 - DNA, 564 bp, Homo sapiens
actggctgaagactcaatggcacaaaagggtttctactgtcatggatatcttagtctaagtgtgttcatatttttctcctttttattatgaagaggcaaaaaatatataaataaatattcagtgatgctcaaaatagttattattaaatatttgattgagaacatacaatcttacttaaataatgttatgtagtatagatatgatattcctggtcttcagtttcaaaacttatttttaaaatgagaaaatttaaaytagatgattatatctaaagtttcttctatcagcaaaagtctatagttctttgggtcagattgatatttacaacaccctgaatatacctttagcattcttatacattttggatgctttattaatgatgcctatgttttaattctgcatatattgacctattgtcagtggggaagatatttgtttagatacattatacaaaattagaagtctaggacttttgtagaagcttgtctgcaacactactgcctaaaataagacaaaactgttagctgtttaaactggactggcctattcttagaacagagaga

SEQ ID NO: 649575 - DNA, 571 bp, Homo sapiens
taggtacatgatgtatggctgcttggttatacgtataagtagaccctgttgggcttttttctttataatatttttctaccttgaaatatcccatagtttcctttaaatatgtctgaagataacataaaatcaaagtagtccagacaattggaacaaagagataaacgtgcatagctcaaaagcagtgtcaaatatatccttaaacatatttcaccagtatctgttactgcctgttttgcgcagttcattgttcaagcactagaaatgtcttcctacaggtgtagaagttgaagttttttgggcaattgaacactgcattttcacagcaagttgacatcaaattctttaacttaggtctgtgttttgtaatrtggtacatgaggaacatttactgttcaatagccctcaaaacttttacttccttttggatagaaagccataatgcaaaaatgtcagtaagacctgacaccagtcccagagtcccctgtataaatagtgtttgcaactgtgcagcagaaatagtaaacatcatgttccatgcaggtaagcaggtgaaacatagatggcaagg

SEQ ID NO: 649576 - DNA, 532 bp, Homo sapiens
tattatttgcaatctactgatatgtcaagttcttatttcctaggtttttatttctcttggactattgagtagggctcttgggggtgtgggtgggagcgcagtgctgcctaatggaaaaagggtagtgtctggatgctgacaactcaatttctccatctgtaaaatggggctaattatacatatctggcagtattattaagaattaaacaaaatgttgcgctcccaagctcagtgctgggcacacagcaggcacagtacacaatggctatatcattatcatcgttaccataattttcaaccactcgcattgttaaaatccgtctgctgtagttaaaacatagttgtactggatggatttggatgtgggaaatagaaagtgctcttttatcctgaatatggattaatcttgtgtgctgttgtggttgacttagaagaagattaaagtattctactgcatttccaaaacatacccaggtttttctttatcacctrtttcacgaataaatatatgtgcattatccattttacctga

SEQ ID NO: 649577 - DNA, 572 bp, Homo sapiens
ctggagggcaagaagacttggatatatgttgtaaatagagatagagataagaaataatatcaataataaatacagcattttgcaatttagaaaatacttcttattggattctcatgattattaccagtgtcatttccaacttttacacctggggtcctgggcccagatgtatttgtcagctgagttgacagaagactagatagacggagaagctgagagagtttaagagacacatgcgggtatacacaatcagtaagtgcgcaaccacatcatgaatactcatctgaagatttcaaatactatcctattatcttcactatctgagcaggtagagttacctttccggcatggttcaaccctatgtcattcttctaaagatttgttctatagagtaaattctagttcagatttgtgttttaaaagagtatcactgaatatgatgtgttgggacatttatgtgataatgtatccttatggagctgggggcccatcttagtagaaagggcacaactgtttatatgtatgaagtgtaaagtgaagactaatayaatagttagttgtcatttatttct

SEQ ID NO: 649578 - DNA, 640 bp, Homo sapiens
ttctttggccaatggcattgctgactgacatgatacaagcagaggtgtgaaaaagcatttataccattgggccagtgctcttgcagttttgccacatccattaaaagggcctgcttcccctagcttgttggtaccagtacaaggggaagaaacatgcagagcagrgccatgcaaggtaaacttctccagccaacccacatatgcatgagcaagcccagccaggatcaacagagccagcccctgctgacacacagacacgtgagttataatcataaatgattgttattttaaacccctgaattttgggatagtttgtcaggcagcaatagctaactgataacaaggtatcattgtatacattttacgaaggagaaaactgaggcttagatagattcaagtttatagccaacctgtgttacatacttacttattttatgacaggcacctttctaagttcaaagcttatgttatcatgttaaatctcctcataacatatgaaatagattctattactattattgccatgttacagatgaggaaacaagtaacttgcccaaggttatgcacttagtaagtggtgagtctggcattgaagccaggcctctcttattccaaattccatatgttatccacctcatta

SEQ ID NO: 649579 - DNA, 629 bp, Homo sapiens
ctacaccctgtcttcaacctctgacaaccactaatattttctccatctctatagttttgtcatttcaagaatgttatacaaatggcaaccagagtatgtaaccttttgagactgactttttttcacccagcataatgcccaagttgtggcatgtgtyaattgtgcctttctattgttgaatgatattctttatatagatgtaatcacagtttatttaaccattcacctatcgaggggcattttgtttgttgacagtttttgacaattacaaataaagaaagtaggaacaattgtgtacaagtttgtgtgttaacataagtttccatttctctggaatagatgctcaggagtgtgattgatgagtcatatgggaagcatatgtttagttttttaaaagaaactaccatgatatacccatctgtgagtaatatatgagagatccagttctgtgcatactcaccagcatttgctattttattttttaagctgttttgtagttgttgttgttgtttgtttgtttttgagatggagtcttgctctgtagcccagactggagtgcagtggcgcgatctcggttcactgcaacctccgcctcctgggttcaagtgattctcccctgcctcagcctc

SEQ ID NO: 649580 - DNA, 629 bp, Homo sapiens
ctacaccctgtcttcaacctctgacaaccactaatattttctccatctctatagttttgtcatttcaagaatgttatacaaatggcaaccagagtatgtaaccttttgagactgactttttttcacccagcataatgcccaagttgtggcatgtgtcaattgtgcctttctattgttgaatgatattctttatatagatgtaatcacagtttatttaaccattcacctatcgaggggcattttgtttgttgacagtttttgacaattacaaataaagaaagtaggaacaattgtgtacaagtttgtgtgttaacataagtttccatttctctggaatagatgctcaggagtgtgattgatgagtcatatgggaagcatatgtttagttttttaaaagaaactaccatgatatacccatctgtgagtaatatatgagagatccagttctgtgcatactcaccagcatttgstattttattttttaagctgttttgtagttgttgttgttgtttgtttgtttttgagatggagtcttgctctgtagcccagactggagtgcagtggcgcgatctcggttcactgcaacctccgcctcctgggttcaagtgattctcccctgcctcagcctc

SEQ ID NO: 649581 - DNA, 580 bp, Homo sapiens
cagtaagtgtgtggcaaatatcagcagtcgtggtgactaacgacagaaagtgttagaggtgcttggagtccaggttcatctttaatggtactagctgccctctctggctctcatgaatcttgcagatcttccagctcatcctttcaatattaattwtgaggaatctcagtccctgcagagctaggaaagagcataggtcccctcatccccaggggtggtcagcacgttccttcctgagccttgggcccctgcgagaacgagaaggagagtggagatcttcagcagaaaggagggcatggtgctggtggctgggcccaccgtggccatgtaagcatgctagttggcaagttcttgctctgagccttgctttagaaaatatttagcaataaacaaagccttctagtaaatattgcactaactagaaaattagattaccaaatcccccattccaagggtccttgccaatctcagcttggttgtcagtgggatactttccccccaggacctaccaatcacgtgattcccagggtttcttaaattggatgaaataatgaatgtgaaaggtggaacctgcaaatgt

SEQ ID NO: 649582 - DNA, 483 bp, Homo sapiens
ctttagccccgaggtacataaaatccattacatcatgatttgatgcagtgaaaaattcattaaagaaatatgaactctgaataaaagtatttcaaacaagaattattttaaataaatmattgtgtggcagagaagtgaatttaatttttctaataagataacagagagtgatccatcagtggaaagatgatagactactagtaaagagacgtatacttcaagagtatcaattagtgacaaccaaaaatgactgtatcatacatataaataaaaataatttaaaagaaaaacacattcaaatgatgttgcaatatacctgtggacccaaaattttgttttgatagggatttcacaattttcaatgggttctctgagaaaagagtttttaaaaataattatttaagatttttgtaatttgtagatctatatatttatagggtacatgagatattttgatataggcatgcactgtgaaataagcac

SEQ ID NO: 649583 - DNA, 643 bp, Homo sapiens
aaatttagccagggaagtgaaagatctgtacaccaaaaattgtaagcattgatgaaagaaatgtaaaaagatacaaatgaaaggaaagatatatgttcttgaattagaagaatgaatattgttaaaatgtccaaactgcccaatgcaatctacagattcaacacaatccttatcgaaattcctatgacattcttcacagaaatggaaaaaatatcctaaaattcatgtggaaccacaaaagcaatcttgagaaataagaacaaacctrgggacatgacatttctgatttcaaatagtattacaaagctgcagtaatcaaaagagtttggtactggcataaaaacagacacatacgctgatgaaacagaatagagagctcagaaatcagaaatcacccatgcatatatggtcaactaatctttggcaactgcactaagatcacacaatgggtaaagaatagtctcttcaataaatgatgttcagaaatctggatagtcacgggggtgtcagggggtggggggagaaaataaacacttttcttatactatacacaaaagtcaattcaaaatggcataagacaaatgtaagacctgaaactgtaaaactccaagaaaaagtcttatggaaaaagattcttgatatt

SEQ ID NO: 649584 - DNA, 480 bp, Homo sapiens
ctaccacacacacagtctgataatttccaagccrctaacatcaactgcatttcatttgttttgtgtggttttaccctcctggagaattttgaagaaaacacctcctaactatcaaatccttaccctgccttcttgcttatattcttagacaatgcaaaggttgtagataagggagtagggggcatgtgtttaggcaaaacttgccttaggaaaactcagagtctttgtatgtaaaatttcaagctgtcttgattgattttcttaatgtaaactttttatcgatgcataacatacatttggtaaaaggcacaaatgaagacagatttaatcaaatgaacacattggtgtaaccagctctcagatccagaaatgatggtaccagtaagcccaggagctccccctgttccattcgagttactactcactgtctcaagggcaaccacaaatctgacatctaacagcacaaatcagttttgccta

SEQ ID NO: 649585 - DNA, 606 bp, Homo sapiens
catacaactttatttactttctactatctggaaaaattattaacattttagacatgagcttgtcmaattaaaaaagctcacagcaactgtttcacattagttgcaaaagtcatcacttggccaacatttaaaactagttgtcaaaataaagacaaaaacttaataaagaatgatatactgccaatattataccatgcataagagtgcataattttagctgtctttgatggacccaagaaaaagattttgaataaaataaagtagtaaaatgtattgcagggacaattagcttcataattaggagcatttgccatgatgtacatggggttctaaatttttgaattcatattaaaactgataaaacgaagagtgtttttctcactaatgccacaacttaggactaatttgtagaagaaactacctataaaaggcttttgttatggtagttgccattatgtcaccaaataaatgcacttggattgcatccaagactgactacccagtcttcaccactttgcaaaacaagttttctttatgaaacaaaaatgtcgaggcaatttctaacttgcagtgagttgtattctaaaatatattttgcaggtggct

SEQ ID NO: 649586 - DNA, 626 bp, Homo sapiens
tttataaatgaactgcaaaaaatatggataggatgagagtgaaattatacaataatggtcacctctggggaaaagtggaagaggactggaccagggaaggtgatttcaactgaatgtgcaatgttttacctcttataaataaatctgaggcagtataataacatgttaagtagtaataaagctcctaggtggccgctacattatattattctctataaatttctttaggtttaaataataaaaatttaggtgaaaataggcgactctatcatggctcaacaactgtggccatgggagtgctggttaataaatcaatgttaaccaatatattgggaggtgggtgctttttggttctgccttggacaatgcttttaaaaacaacttggaaaaacgtaaagaagccatgaaatttgtgaatgaaccaagatgctgagatcaatagcaaatgtgttgaataaaatgatcgcatacaaaaagatgttggcaaagtggaattatgggctgaatctcaccggcttaaaaaaaaaaaaaagagaaaggaaaactctactttgtgtacttcktacatgacaagcactgttttaagtattttacatatattacttaattattgtaataaccttata

SEQ ID NO: 649587 - DNA, 502 bp, Homo sapiens
aattcaaacaaaaagtttgcaattttattaatagaacattttttccatgtgcttattaaatgaatggtgaatgaatatgtgtaaaataagcatttaaggagagtcaactcactagcctgtccaggctgtccaattgttctgcctccccctcggcctgcccattaggaaatctggactgactttaatgactgttgctgccctgaggtcctasatctacttcagtccatgaatattttaaatcaaaggaaaatgcaaatggtatataatgatgcagcctttctctccagcatcttctcctcatcacgctgtgtctgggcacccttagcacattaagaattttagctgaatggtgctctctcaatgcaccaagaaccttcccacacactagcatttccaattgagttcaataactatattagatatgtgtttgctatgaccattcaagtattgtgtgcttcagcacctcaagggtaacagttatgtctaacttggtgtcacacaa

SEQ ID NO: 649588 - DNA, 585 bp, Homo sapiens
tttttgtgtctatttttcccacttaataccgtatgtctgagattcatctatgttgtttcaaatgcagtcagtattttactttttactgtctaatagtataccattgtatggatataccatttgtttatccattctatcctgttgataggcaggtgaatttgggttgtttccagtttaaggatattgtgaataaagctcctctgaacattcatgtgaagtttttgtgtgaacatacttttatttgcggggggatcaatctggatcataagggagtgtgtatttatttcataggagaagaatttcccaatgttygtgtaattttatactccatagctggtggaaatttaagaagtatcagatgatattttaggccttctctcaaatcgaccccagctaaataaaagagagttactggcagggctaagagaaataattcacgtatctatctcttctagccaaagcatgcagatgctccaataccccattttatgatagcaaacagatttcaggaaatactaaatattgcccaaagtcaaacagctgataagtgcaaccagaattcaaacccagctccattccctctac

SEQ ID NO: 649589 - DNA, 588 bp, Homo sapiens
aaaagaaagagtattcttatctcttaggcacctggtcattgttttcagcttgagactataaggaaaaactaaggtagagagggggagatgggaaaaggaggagacgagatcacagttcctayataaataagcacagtattacagtttatgttcagactttaaaagaaaaatcaatctaaacagaaaataactgtggccttcctgtgcatttcaacatcagcagtatgaacatcaataatatagaaattgatatgtaatgaatatatgctacatgctggttgctctcctaaatattacattaatatattctctcacctaatcatcacaaaaattcttctctacaacaattttacagatggggatactgagactcaagaagtttacccaagatcacctatatagtacgtggaagagtacgaattcaaactcagaaagactcctccagaagctacatctttaattgctgggcaatactgccttaaaatggactgaggtgtttttgatcaatcagggtgtttgatacatcttaataaggtagcataagactgtgttcaataacaaatgcttcttttgatcgggggaataaat

SEQ ID NO: 649590 - DNA, 594 bp, Homo sapiens
caaaaatgtttatttagaaatagaatgcttgttccttggtaccacaaggaaaaatcagcatttagacaaaaagttttctcagcaaggcaattttaccttctgcagaaagggtgctcctcacagatggaacaatggtgagaccacacccgaacaaaggagggaagcaattttattccttacacagcttgtccctgctaatgtgtcctgtctccattggctggagctggacctcacaatctaaattaaacctgactggctaataacttaaaactttcctaaataggtaaaagcaaaggagaacaaagaaaaagaggaagttgcttatgaaaggaaacaaatatcttggttaaagtacaaagacatagaatgtactcattcccttatatctagmagctacataggatagggcttaaccaagagttattagcataaagcaaggaggcttgagggaagttactctttaaaagaaactattacttctaacacttatgatttattctttaacaagaagggaaattttgaagagaaaactttttactttctacacatcccatctcagcctcccaagcagctgggactacaggcacatggcac

SEQ ID NO: 649591 - DNA, 565 bp, Homo sapiens
atctcacaagatctgatggttttattaagggrgagtttccctgcacaaattctctcttgtatgtcaccatgtaagatatgcctttcgccttttgccatgattgtgaggcctccccagtcacatggaactgagtccattaaacctccttttctttataaattaccctgtctcaggtgtgtccttatcagcaatgtgaaaatggaataatacgcccctcctccttgattttttgtagtaatttcaggacaattgataccagttgtttttgtacatctggtagaatttgactctgaatccatctatttccagggcttttattggttggtattttttttattatgcattcaatttcagagctcaacactactctatttaggatttccaatctctttctgattcaatcttgggagattgtatatttccaggaatttatgcatttcctctagattttctaatctgtgtgcataaagttgtttatagtattctctgaggatcttctgtatttctgtggaaccagttataatgtcatctttgtcatttctgattgcgcttatgtggatcttcc

SEQ ID NO: 649592 - DNA, 504 bp, Homo sapiens
taccaacctacagagaacctatgaatcctgactcagtattaaatgagtgaccttgcatttctgtttgcaatgggacagttactgtactttctattgttcctggataattctttttttaaaattaaaatagagtttattagcttttcttttaatataaacatgagaaataaaaaccacataaattgtaggattcttttcaaaataaaactgtaaccaatacttgaatctccaagctctgaactccataaataatgtgatttttttgtttttgaggtggtaggttgtaatatttttatacctttatttatcgttcatgtctctgtcstttaagcatgatggaaactgcagcacaatatgatgtgaagcattgctatcctggcccagaaatgctttgtttataagcacattcctaggattatatttgagacagtaggagaaatagatttcacatagttgagagcactaatctctttttagtatctcaaatttaggtgacatcgttat

SEQ ID NO: 649593 - DNA, 570 bp, Homo sapiens
gtaaaataaagacattttcagacttgttagtctcagaaagtttaccatctaaatactctttgggagaattccttgaggcaggaatccagaaaaatccaggaaaagtaaaaataaattgaaaaaaggggaatttatgatataaaaataatataaaaatattattaaagcattcagaagagaaaaaagtcaaaaccccgtgatttttttccctcaaaacatgctcgttaatgtcttttgataaagaaaagagagagaaacaaagacacaaaaaaagaaagtaaaaaagggaaatkgccagaaatagaatgaataaccagagaaaacaaagaaccaacgaatagcccccacctcatcccaaagtcctgattaatccaacatgaaagaaaaaagagagcaaaacataaacaatcagaacatgaaacaaaatggcaggaataaggcacaatttagacattacagtgaacaacgatgattaaatcacagaaattgtcaaatagttaacaaacaaatgagcaggaagtttgaaaataaaaacaggtaacaataaaacagcaaaatgataataaagtt

SEQ ID NO: 649594 - DNA, 578 bp, Homo sapiens
attcagtttttaatttttaaaacagaattgataatagaacaaaataatgtgctatgttaatatatgtagaagaaaacgtatgctaacagtagcacaagaaagtgaacaggaatgtaaaattaaatactgtgaggtttgtaaattatatctaaagtggcataatgtaatttgaaggcatattctaataagttaatggtttatatagtaaatcctagaggaaacagaagaataaaatgaaatatgtgtcacctactaagaatccactttataaagatacagataaagttgaaagaacggaaagatgacactagacactaatcaaaatccttgaaaaagtagtttagcacaaarggacatttaggacccccactcacaagactgcaaaagtttgagagatatatggagaatcatcttctaacaaaaagcaagctgaagactaggacaaaatctattcaaatatatatctaagataggacctataccgaaatatataaataattgttgataaaactcagtaataatgagacaaacaaaaagtgggcaagagtttttgacagatatttcaccaaagatgatat

SEQ ID NO: 649595 - DNA, 578 bp, Homo sapiens
attcagtttttaatttttaaaacagaattgataatagaacaaaataatgtgctatgttaatatatgtagaagaaaacgtatgctaacagtagcacaagaaagtgaacaggaatgtaaaattaaatactgtgaggtttgtaaattatatctaaagtggcataatgtaatttgaaggcatattctaataagttaatggtttatatagtaaatcctagaggaaacagaagaataaaatgaaatatgtgtcacctactaagaatccactttataaagatacagataaagttgaaagaacggaaagatgacactagacactaatcaaaatccttgaaaaagtagtttagcacaaagggacatttaggacccccactcacaagactgcaaaagtttgagagatatatggagaatcatcttctaacaaaaagcaagctgaagactaggacaaaatctattcaaatatatatctaagataggacctataccgaaatatataaatamttgttgataaaactcagtaataatgagacaaacaaaaagtgggcaagagtttttgacagatatttcaccaaagatgatat

SEQ ID NO: 649596 - DNA, 552 bp, Homo sapiens
cccaaagagggggtcatagccctggtttggggagcacctaggtctgagatccccaaagggctgcaactcttttttccttcccattgcctgcaatgcagtgagcaaaggaggtgtgtgacagccctgtttctgttacagctctttcagttccaccatttggcaggtcccaagttttgtcccacatccaggaagaacaaggtatgcagacaactggagggtgagcaaggtgaagaagtgctttattgagcaacagtacagctctcaggagacctgaagtgggtagctccttttgacaggcaggttgttccaacaagtgtgcagccctcagtggagaggagtccagtagaacytatccacaggtaggtcatcccatcatctgcccgaatctggctgagtctggggtttttatgggcttcagagggaaggaagtacatgctgatttgttcatgggtggccatgggcagcctggaaaaagcaccataagttctcactccaggccctggactccatctggaactgagtgccaggctaccaggcttcaggctgtccctg

SEQ ID NO: 649597 - DNA, 576 bp, Homo sapiens
ctcttttttccagctttttgtggtagggtgcagagagaggaggatccttatactcagttgctggaatcctgagcgaggcaaggagaaggacagaaaaaagagaaaagaaagtggagaraagtttgcatacctcactgtatttttcattcacatactctctcctgctctctgctgtgctctgttacaaagtccagagccttcctgaggatagccgactattctcctgccagtgaagatgtatgtgagaaataatcttctggctacaggcatgtaggagaggatctgggtgttccaactcccatgtttacagtcatctaactaatcttagtcttttcagacctcaacccaccccaccttccttggcatctggtgctcccaatagctgaggctctcaaaggctttgggagattacctgatggtttaagtttaccttcagcacctggatttccttactttgcccaagagagtctgttaccatgactccttctgcactacaaggaccctatttgtcactgtaggttaataacaatttttattttcttcagtatcatttctgcattttactgccaatacctc

SEQ ID NO: 649598 - DNA, 566 bp, Homo sapiens
gaattctgttcatggtttgactctgaaacgaaattgataatagccctttccccaaagacccccwtcttgcctggggaccagtctacctttgcaggactaacaaattagctacaagattagaaattaagtttaggggtcacgcagcctctggctcccccaattgctcctggggataacatcattactgtaacacctaagatgagtgcttgagatagtttgcagaccctgcactggatggatcagctgacaccacccagactgtagtctggctcaaccagttctgccatcccacccaggaacagaaaacagcaagaaaaacctcacttccaacccctgtgattccatctccaacctgaccaatcagcactccccacttcccaagcctctacccaccaaattatctttaaaagctctgatccctgaatcctcgaggagactgatttgagtgataataaaactgaggtctcccgcacagccggctctgcgcgaattactctttctccattacactttccttgttttgataaatcggctctgtctaggcagcgggcaacgtgaacccattg

SEQ ID NO: 649599 - DNA, 616 bp, Homo sapiens
aagacctcgctgaaaactacaaaacaatgcgaaacacttagagaattttaccatgttcatgagttggcaagttgaacatttttacaatgtcaattatccccaaattgatctacagattcagggcaatcttaaacacaaaatcccatattgttggttttttggaaacagacaagctcgttctaaaattatatggaaagccaaagaccttagaatggctaaggctatcttgaagaagaccaaagttggaagacttaacttaccgtggacttatcttattatcttaagatttactctaaggctacataattaaaacaggaggggaggggcgggggagatgggggaggggctggagagaggggtgggagtgtggtgttggcaaaggataataaatagatcaatggaaaagagagtccataaatatactccagcctatgtggtcacttaatttataatagaattgccactgtgattgggtggygatggatggtcttttcaataagtagtgccagaataatgatatctatgtagaaaataagcttgagcccacctcacatgacacacgaacattaattcaagatgaatcatagatataaatgtggagggtaaaacaaaagag

SEQ ID NO: 649600 - DNA, 586 bp, Homo sapiens
gaaagaataaagaggcaggtgcagaattgagacttgagcagcagatagctggaaggcatatttggcatcatgtagacaacaaccctgccaacacctagaaatcatcctgggctgtcccccacctctactcaaatgcaataacctccctcaggtgacacaccccggaagtgcacgtggacgatctgatggttctccagacacatccacagcactggggcgggtcctcaggctgcccgtggaatccccgcagtaaccagacgcctctgtcataacccaggggccatatttttagaatcaggtactaagtgccatgtgcacagactttgagttctggcagtttcacttctttatggcacgtggacgatgggtggcagctgctgccccaggtgccctgccgtgtcatccaatcatctcygtctccttgtggggctccacttctgggatacctgcacccaactctgcaaggccatcagcagaagtgtcagtggctagcacagcaggtggatctagaaccagctctcagctctgtgcccgccacgccatttgttaaatactttgaaaaccatccttaggcagaaacattctg

SEQ ID NO: 649601 - DNA, 411 bp, Homo sapiens
gtgatattgaaaaaagttttaattaattacacaaataaaaccataatgttctggagatatttgacccaaccagctgcttggcatggaagaaataatttcttctcaccatcacaaagaaacgtacagagaaaattaagatatttttcgatctttcttcttggtctggcatctatatatagacaatcagcaactttgaccatggaaattgttaaaataaagataactaacgtttattaattgctaactatgggtcaaacattgtggtgagtgctctggatacttacctcctctgatgtacctttcttttgtacatatgaaagacaggcgtggtggacatctttatagcatccctgtgcaaccccgcctgtttcygtttacagcactgaggtagtttgcatcactaacctcaat

SEQ ID NO: 649602 - DNA, 616 bp, Homo sapiens
caaagcactccataaaaaaatgggcaaacactttacaaaagaagacatacatatggccaacaatcatatgaaaaaagttcaacaacactgatcattagagaaatgcaaatcaaaaccacgatgagatactatctcacatgagtcacaatggctattattaaaatgacaagaaataacagatgctggcattgtcgtagagaaaatgaatgcttatactcattggatggactgtaaattagttcagctgtcgtggcagacagtgtggcaattcctcaaactcctaaacacagaaattacattcaaccctgcaatcctattactgaacatatacccaaacgaatgtaaattgttctattataaagacatatgcacacacatgtatattacaacactattcataatagcaaagacatggaataaacmcaaatacctatcaatgatagactggataaagaaaatgtgtacatgtgcactgtggaatactacgcagccataaaaaagaatgagattatgtcttttgcagggacacaaatggatctggaggccattatccttagcaaactaaatcaggaacagaaaatcaaacagtatatgttctcacttataagtgggagct

SEQ ID NO: 649603 - DNA, 616 bp, Homo sapiens
caaagcactccataaaaaaatgggcaaacactttacaaaagaagacatacatatggccaacaatcatatgaaaaaagttcaacaacactgatcattagagaaatgcaaatcaaaaccacgatgagatactatctcacatgagtcacaatggctattattaaaatgacaagaaataacagatgctggcattgtcgtagagaaaatgaatgcttatactcattggatggactgtaaattagttcagctgtcgtggcagacagtgtggcaattcctcaaactcctaaacacagaaattacattcaaccctgcaatcctattactgaacatatacccaaacgaatgtaaattgttctattataaagacatatgcacacacatgtatattacaacactattcataatagcaaagacatggaataaacacaaatacctatcaatgatagactggataaagaaaaygtgtacatgtgcactgtggaatactacgcagccataaaaaagaatgagattatgtcttttgcagggacacaaatggatctggaggccattatccttagcaaactaaatcaggaacagaaaatcaaacagtatatgttctcacttataagtgggagct

SEQ ID NO: 649604 - DNA, 616 bp, Homo sapiens
caaagcactccataaaaaaatgggcaaacactttacaaaagaagacatacatatggccaacaatcatatgaaaaaagttcaacaacactgatcattagagaaatgcaaatcaaaaccacgatgagatactatctcacatgagtcacaatggctattattaaaatgacaagaaataacagatgctggcattgtcgtagagaaaatgaatgcttatactcattggatggactgtaaattagttcagctgtcgtggcagacagtgtggcaattcctcaaactcctaaacacagaaattacattcaaccctgcaatcctattactgaacatatacccaaacgaatgtaaattgttctattataaagacatatgcacacacatgtatattacaacactattcataatagcaaagacatggaataaacacaaatacctatcaatgatagactggataaagaaaatgtgtacatgtgcactgtggaatactaygcagccataaaaaagaatgagattatgtcttttgcagggacacaaatggatctggaggccattatccttagcaaactaaatcaggaacagaaaatcaaacagtatatgttctcacttataagtgggagct

SEQ ID NO: 649605 - DNA, 508 bp, Homo sapiens
tgggctcagctaggtggttattctgttccacagggtgttgactgggagtcaactggaggctcaatggagccagaatgtccagaatatccaaaatagctcattcacatggttggcaattggtgctgacagttagctgagagctcactctatatggcttaggcttctcacagcatggcagttggattccaaaagggagttttcaaagtgtgcaaaagtgggagttgcaratcttttgcagctcagccttggaaatgatacagcattgcttctgcttctttctatttttaaaagtaagtcagagagtaagcccagattcaaggtgaaaggaaggagaccacctcacaatgggaggtgtggcaaagaagtttcagccacctttaattgactgctgttaccaatctgcttttatatgacttgtagctgaaagcatgtctctagatctagtcttgccactggaacaagaaatattcaaagactgagactcctctattggacaagctgccttgca

SEQ ID NO: 649606 - DNA, 622 bp, Homo sapiens
tggggtcaaattaaaatgaaaattttaaaaaattctattctactttccatatccctttaaagaatatcaaattattgtagtgacaattattaagtttctacacatgtgcaaacatagcacctataaaatagcactttggtgtttatgaagtatcaatttctaagacaaatatagaaacccagcaattatcacaagcactcttcaccatttcattgcagaagtgtatagaattagtgaaaataaaggaaaacagtatattgcttaataatagacaaccagaaatgtttacttgttaatgctttgctgattctagccaaatgaagagtattactgagctgggctccagattcacatggcaggaataccacagagccacaggaatcatttaactgccacaacttcaggttctgaataaaagtcatttctaaatcctacatttttactttacttaaaaaactcattattctcatgttgttctttgatgatgataacatggaattttctcatattctctaaatttttcttcacctacaaaaccaaagaagttttctcatttgtagaaggaagtgggarttgtggtgttggaggttctagaaagcccactgtcttattcttttcccta

SEQ ID NO: 649607 - DNA, 568 bp, Homo sapiens
catcttcccttaccttctcaccctaccatgacactgtgaacactacacttcttgtctaatctgattactcaatgcttaacacaaactgggcttccctttttaatgtacaatttgtttgtatagtttttaatctcccccaaataaattcagaacccgagggcagagtgaatacctttctggggttttgtttgttgtagaggaaaaaagatgtatctttcattacatctagctgttcactttacttacttaaattagtttaaaatcacacgttgatttaattcattctgtgtgtcatatatcatctgcacatatttaactgtctcaattatattggaaatttgatgtcttyatacatagcccatgtcacaagaacatattataggtgatatcatgttataatggtatatataacatatataggtgacatcatgttataatgaaattctttcccattctttcattgacaggtgtccaaaacttttctgaaaaagctctaggatagacatatgtattagtccattttcacactgctgataaagacatacccgagactgggaagaaaaagagg

SEQ ID NO: 649608 - DNA, 551 bp, Homo sapiens
aaggtcaggagatcaagaccatcctggctaacacagtgaagccccgtccctactaaaaatacaaaaaattagctgggygtgctggcgcacacttgtacttgggaggctgaagcaggagaattgcttgaacccaggaggcggaggttgcagcgagccaacatcacaccacggcactccagcctggataacaaagtgagactccatctcaaacaaagagagacagagagaaagaaggagagagagagagagagagagagagagagagagagagagagagagagagagggcataggccccttctgaacttattattttagctatattctctttgagatagtacatgcatacaaaaaagtacaaaaatctttagtacacagtctatgacacattcatctactgagttaacaaccatgcatatcaagatatagaacatttcccaaattccagaagacttccttatttactctttcacataatagccctaaaggtatccactactctgagttttatcagcgaattttccctgttcctgaaacttcaatataacgaat

SEQ ID NO: 649609 - DNA, 562 bp, Homo sapiens
gtttttgtgggcttcagaagggaggaggtgcatgctgattggtctatgggtaaccatgggtgggccctaaaaagcaccgtaagttctcgctcttggcacagattccacctgcaactggcagcctgggccccatgcttcaggccatccctggcttgaagatggggcttcactcacccctttctgcccaggagcctgtctgcttcctgctgccatcaatcatgtcatccacagcatccacccaggctgttcaagtggagcgcatgtcaagccaccctcacccaccctgtgccccccaccatgctcctcagcgcccaaagtccggagggggctgaggaggcagggggctgatgtgtcagcactgccctgagcaagcatacacccagccaggttgcgacagtgcctgcctgggctcagcctcaactttgctccaaaatcagagcaggcactgggagagaggagaggccagtccacggggacagacacttctgagactgtgggggaagaggggcttcctggccygagagtacaaggatgcctgggtctggaactgcaacagggcagc

SEQ ID NO: 649610 - DNA, 617 bp, Homo sapiens
ttctcctgtgtcacactgcatgccagaaaaaaatatagccaagattttcaaagggaggattgatgggacttgacaaatgaccagatgaagagacttaaaatagagaactcccagttcattctaaaatccttggatctatgcagctgaggaaatattgctaccagcttggacaaattaggctatagacctagaaaatatttttactgcatataagaaggtgtgacctcagctgcttagcattttgagcctcagtaagaccagaagattctcattctcttattagcatcttgttatggcccaactccatatctaaaayaaagcaaatattttgcacataggatataacagtctgcttaaattacatgcagaggataatactgtctcaactgacacttgtgattaattctactaaggacttgctttagaaggtttttggcagaacattctaagctgacagttcacaaaagacaaggacttcattgtttacaacaacaaatatgggaacaataatgagattgcacatctttcctcattttcctggatctgtttaagaagaatgtttgaataacattacagtatgtccatatcttgacaattttatggattttatggaagta

SEQ ID NO: 649611 - DNA, 509 bp, Homo sapiens
agcttgacataggtacatgtttgaaatccttcttacttcttaccactccttactatgcaccacatgctcctactacattgaagtcccattacttctgaaatgatctcagcctttatgatatgatgcctttgctcacagagtctcttcaaaagttcaaggaggcctacaaggtttgctttagtgcttgtaagaaagcgtcctgccagtgtgaaaataaaaaatggttataaccttcccttatattcagtctggatttcccccatcatatatactttcttttggttataaaagggagaagcattagttcagactgtagcttagcaattgtaaagtacatgagctttgaaaccacagtacytagtttcaaatcctaactctgccactcatcagctgatgaccctgggcatgtcacttcccctgtctaagcttcagtaatctcacctgaaatgcagataataattatccctacatccctacatcagagggtatttgtgcggataaaatgagtt

SEQ ID NO: 649612 - DNA, 599 bp, Homo sapiens
ccaaaatcaatgagattaaaacttaaggcttacacgaaactcttgtgccacttgatcccagagcagaaattcctcaaccaggagttagtattaacaaatatgcatgcccctaagagagggatatattaacgtaaccttataaatcagatctaattctcccacatataactctaactatccatgcatcacatatacttaaaaaaattgtgagtacacagtaggtatatatatatattaatggggtatatgagatatttgatatatatatacacgcacataatgcataataatcacatcaagtaaaataagatattcatcaactagagcrtttatcctttgtgttacaaacaatccaataatacactttcagttattttaaaatgtacaattaaattattattgaccaaagtctctctattgtcctatcaaatactagatcttattcattctgtatttttctatccataaaccaggggtccccaatccccaggggccagggactggtactggtccgtggcctgttaggaactgggccacaaagcagaaagtgagcagcgggtcaatgagcattacagtctgagcgctgcctcctgtcagat

SEQ ID NO: 649613 - DNA, 619 bp, Homo sapiens
tctctgtctaaaagatcacatatctctgtctctccaggactggtcactggtgccttatttagttcaactggtgaggtcatgttttcctgggtggctttcatgcttgaggatatttgttagtgtctgggcattgaagagttaggtatttattatagtctttgcagtttggttttatttgtacctgtccttcttaggaaggctttcyaagtattcaaagggacttgggtatttgatgtaagtttttgatcactgccgcacatttgcatgagctgtcaccccaagtccagtaacactgtggctcttgcagactcatagaagtagtgccttggtggacttggataaaatctggaaaaattatctgaattaccagacagactcttactctcttcccttagtttctcccaaacaaatagagtttcaccctctctgtgctgagctgcctggagctggggcagggtgacacagcacccctgtggtcaccaccactggaactgtactgggtcatacctgaagtcagcacagcactgggtctcattcaggcccgtggtaaccactgcctgactaccatctttgttcactcagggccgtagggctctacaatcagcaagtggtgaagcca

SEQ ID NO: 649614 - DNA, 499 bp, Homo sapiens
gagctgagtaaatatcttgaaggagtaataattttcccattggttgtttgacctcttagtttgacttctagcacattattacctgaaactttctgattcaaggtattaataatctccttactgattgtctaatccaattgtatatccagtcatttccctgacatttgctatgacctactgtagtggtttgaattgtgtcccacaaaaacatatatccaagtcctaacccctggcacctgtttacataacctcatttggaaatagggtctttgcagatacaattaaggatcttaacatgaaatcatcctgcattcaggatgggctctaagtccaatgactgatttccttataaggaaaacaagagggagatttgagacacaaagacaaagagaagcagctcatgtaragatggaggcagaggttgaagttgctcagccacaagccaaggaacaccagaagccaccaaaagctgaagaggcaggggaaaattctcccctag

SEQ ID NO: 649615 - DNA, 499 bp, Homo sapiens
gagctgagtaaatatcttgaaggagtaataattttcccattggttgtttgacctcttagtttgacttctagcacattattacctgaaactttctgattcaaggtattaataatctccttactgattgtctaatccaattgtatatccagtcatttccctgacatttgctatgacctactgtagtggtttgaattgtgtcccacaaaaacatatatccaagtcctaacccctggcacctgtttacataacctcatttggaaatagggtctttgcagatacaattaaggatcttaacatgaaatcatcctgcattcaggatgggctctaagtccaatgactgatttccttataaggaaaacaagagggagatttgagacacaaagacaaagagaagcagctcatgtagakatggaggcagaggttgaagttgctcagccacaagccaaggaacaccagaagccaccaaaagctgaagaggcaggggaaaattctcccctag

SEQ ID NO: 649616 - DNA, 484 bp, Homo sapiens
ttttctaaatataaatcatgacatctgcaaacagagacaagttgacttcctctcttcctatttgaataccgtttataatgttaatagtcctacatctattacataaattgaattaacttaaaactgtttttaaaagcccagacccaaaggacttaactggtgaagtttaccaaatgtttacaaaaaaaaaaaaatagaccaattctgcataattttgtctagaaaattgaagaagagagaacacctcccaactaattttatgaggttcacattactctaatacctaaaccaagtaaagatattacaagtaaactacagaccaatgtctctcatgaatgtgtatgtcaattccttaataaawtattggcaaatttaacccagccagacataaagaggattgtgccacacaattttgcaagactggttcaacattagtaaaccagtgaaacttattgtattaacagactaaataagaacaactgta

SEQ ID NO: 649617 - DNA, 387 bp, Homo sapiens
gaatttctgaatgtatgtccgtaacttaggattccagaacactcactctgttgttggaatgtttgtccctcacatacgattccagaacactgctgttgtagtctgaatgtttctccctcacataggattcgagaacacagctacgattgtctcaatgtttgtccctcacataggattccagaamaatgctacaagggtctgaatatttgtcacttacataggattccagaacactgctacaagtgtctgtatgtttgcccctcacataggattccagaacactgctacgattgtctgaatgattgtccctcccataggattccagaacactcctgctggggtctgaatgattttccctcacataggattccagaatactgctgctgg

SEQ ID NO: 649618 - DNA, 581 bp, Homo sapiens
  misc_feature 323: n = A,T,C or G
atgggtatatctcataatgctgagttttggggtatgaatgatcccaatcatccagatgctgatttggtatggtttgactctgtgtccccacccaaatctcatgttgaattgtaattcccaawgtagggggaatgacctggtgggaggtgattagctcaagagggcagatttcccccttgctcttcttagatggtaagtgagttctcatgagatctgatggtttaaacatatggcacatcccccctggctcacttgctctcctgtcaccatggtagaatgtgccttgcttcccccttcaccttctgccatgattgtaagtttcntgaagcctcccagccatgcttcctgtacagcctgtggaactgtgagtcagttaaacctcttttctttataaattacccagtcttgggtagttctatatagcagtgtgagaacagattaatacatgagcatagtacccaatagttagtttgtcaaaccttgccttcctccttctcccctctagtagtcccggtgtttattctttccatctttatgtccatgagtacccagtgtttagctcccacttataagtgagataa

SEQ ID NO: 649619 - DNA, 581 bp, Homo sapiens
  misc_feature 323: n = A,T,C or G
atgggtatatctcataatgctgagttttggggtatgaatgatcccaatcatccagatgctgatttggtatggtttgactctgtgtccccacccaaatctcatgttgaattgtaattcccaatgtagggggaatgacctggtgggaggtgattagctcawgagggcagatttcccccttgctcttcttagatggtaagtgagttctcatgagatctgatggtttaaacatatggcacatcccccctggctcacttgctctcctgtcaccatggtagaatgtgccttgcttcccccttcaccttctgccatgattgtaagtttcntgaagcctcccagccatgcttcctgtacagcctgtggaactgtgagtcagttaaacctcttttctttataaattacccagtcttgggtagttctatatagcagtgtgagaacagattaatacatgagcatagtacccaatagttagtttgtcaaaccttgccttcctccttctcccctctagtagtcccggtgtttattctttccatctttatgtccatgagtacccagtgtttagctcccacttataagtgagataa

SEQ ID NO: 649620 - DNA, 581 bp, Homo sapiens
  misc_feature 323: n = A,T,C or G
atgggtatatctcataatgctgagttttggggtatgaatgatcccaatcatccagatgctgatttggtatggtttgactctgtgtccccacccaaatctcatgttgaattgtaattcccaatgtagggggaatgacctggtgggaggtgattagctcaagagggcagatttcccccttgctcttcttagrtggtaagtgagttctcatgagatctgatggtttaaacatatggcacatcccccctggctcacttgctctcctgtcaccatggtagaatgtgccttgcttcccccttcaccttctgccatgattgtaagtttcntgaagcctcccagccatgcttcctgtacagcctgtggaactgtgagtcagttaaacctcttttctttataaattacccagtcttgggtagttctatatagcagtgtgagaacagattaatacatgagcatagtacccaatagttagtttgtcaaaccttgccttcctccttctcccctctagtagtcccggtgtttattctttccatctttatgtccatgagtacccagtgtttagctcccacttataagtgagataa

SEQ ID NO: 649621 - DNA, 581 bp, Homo sapiens
  misc_feature 323: n = A,T,C or G
atgggtatatctcataatgctgagttttggggtatgaatgatcccaatcatccagatgctgatttggtatggtttgactctgtgtccccacccaaatctcatgttgaattgtaattcccaatgtagggggaatgacctggtgggaggtgattagctcaagagggcagatttcccccttgctcttcttagatggtaagtgagttctcatgagatctgatggtttaaacatatggcacatcccccctggctcacttgctctcctgtcaccatggtagaatgtgccttgcttcccccttcaccttctgccatgattgtaagtttcntgaagcctcccagccatgcttcctgtacagcctgtggaactgtgagtcagttaaacctcttttctttataaattacccagtcttgggtagttctatatagcagtgtgagaacagattaatacatgagcatagtacccaatagttagtttgtcaaacyttgccttcctccttctcccctctagtagtcccggtgtttattctttccatctttatgtccatgagtacccagtgtttagctcccacttataagtgagataa

SEQ ID NO: 649622 - DNA, 476 bp, Homo sapiens
ataagagtcctggctctcctgcactgccacaggatgggatttcttgcttctcactgcctatgacattttctcaatagggtttttaccaataggagtctccttcactctctggagattcctatatggctaacatgtagataaacttcactaaattctggagttaactacacatcctctgttgctgtattacctaaaacagacrctatttcaaattaaggccttaacatctatacaaatcatcaactcacataccctttcaaaacaaccattgcatttctagaacatcatccaaagattgtacacgtattcacaatgaagtttttgcaaagatattcattactactttgtcaagacctggaatttggaaacaacctaagtctttattagtaggaaaccagtatattttgttctatgcccacataaggaataatattgagaccttaaaatgattagacagttctctaaatatataataa

SEQ ID NO: 649623 - DNA, 629 bp, Homo sapiens
aatagggtttttaccaataggagtctccttcactctctggagattcctatatggctaacatgtagataaacttcactaaattctggagttaactacacatcctctgttgctgtattacctaaaacagacgctatttcaaattaaggccttaacatctatacaaatcatcaactcacataccctttcaaaacaaccattgcatttctagaacatcatccaaagattgtacacgtattcacaatgaagtttttgcaaagatattcattactactttgtcaagacctggaatttggaaacaacctaagtctttattagtaggaaaccagtatattttgttctatgcccacataaggaataatattgagaccttaaaatgattagacagttctctaaatatataataacatcaaaaatctccataataattcttgggtaaaaaacaagatgaagaactaggttgatatgtgtgggtgtgtaygtgtatataaataaacagtcaatacttacatatatattgtaaattttgtgtcattttgaattttaatttgctgctatgtgcaagtattgtttattcaaaaataaataaatttgggagaaataaagtaaaataaaaataaacaaaaagtgag

SEQ ID NO: 649624 - DNA, 424 bp, Homo sapiens
ttctttaataatagtctatgaccttaaagtataggttctgtaaatccttcatattttgataatctgaaattatatgttttataatttcaacgtttgagcctcatgatatcccagtgaaggagggcttcttgtcctccttttwcggatgggaagacaggctcagaaaagttgaataactaactcaagtccatttgagtagtaagtgattgagccagggctcaaatacagcccaagaaagaagtgatggagctgagtttttttttgtttgttttgttttttgtttttttttgtttttgtttttgttttgttttgtttttgttttttttttttttttttttttttgaaacggagtctcgctctgtcgcccaggctggagtgcagtggcgggatctcggctcactgcaagctgatggagctgagttct

SEQ ID NO: 649625 - DNA, 424 bp, Homo sapiens
ttctttaataatagtctatgaccttaaagtataggttctgtaaatccttcatattttgataatctgaaattatatgttttataatttcaacgtttgagcctcatgatatcccagtgaaggagggcttcttgtcctccttttacggatgggaagacaggctcagaaaagttgaataactaactcaagtccatttgagtagtaagtgattgagccagggctcaaatacagcccaagaaagaagtgatggagctgagtttttttttgtttgttttgttttttgtttttttttgtttttgtttttkttttgttttgtttttgttttttttttttttttttttttttgaaacggagtctcgctctgtcgcccaggctggagtgcagtggcgggatctcggctcactgcaagctgatggagctgagttct

SEQ ID NO: 649626 - DNA, 456 bp, Homo sapiens
aaaaactgggaagatgttgtctgtaaaactgctttgtgatgttggcattcagctcacaggttaaacttttctttttattcagcagtttgtraatactcattacatagaatctgtggagagacatttcggagtgcagtgaggcctacagtgaaaaactgaatagctagggataaacactagaaagaagctatctgtgaaactgctttggattgtgtagattcagcccacagagttaacctttcttttgattcagcagtttggaaacactcttttcatagaatctgcaaagggacaattcacagccccctagccctatagtgaaaaaccgatatctcttgataatatctagaaataagctttctgtgaaactactttgtgatgtgtggtttcagctcacagagttaaacctttcttttgattctgcaggtaggaaaccctcttttttttagaatatgc

SEQ ID NO: 649627 - DNA, 456 bp, Homo sapiens
aaaaactgggaagatgttgtctgtaaaactgctttgtgatgttggcattcagctcacaggttaaacttttctttttattcagcagtttgtgaatactcattacrtagaatctgtggagagacatttcggagtgcagtgaggcctacagtgaaaaactgaatagctagggataaacactagaaagaagctatctgtgaaactgctttggattgtgtagattcagcccacagagttaacctttcttttgattcagcagtttggaaacactcttttcatagaatctgcaaagggacaattcacagccccctagccctatagtgaaaaaccgatatctcttgataatatctagaaataagctttctgtgaaactactttgtgatgtgtggtttcagctcacagagttaaacctttcttttgattctgcaggtaggaaaccctcttttttttagaatatgc

SEQ ID NO: 649628 - DNA, 600 bp, Homo sapiens
ttgaaacactgtagaatctgtgaagggatatttgggacccatccaggcctttggggaaagactgaatatccctagatataaactagaaaggggctatttgtgaaactgctttgggatgtgaagattcatctaacagagttaaaccttccttttcattcagcagtttggaaacaattattttggagaatgtacaaagggacatttgggatcccatggaggcttatggagaaaaaccgaaaatccccagatgaaaactagaaggagctatctgcgaaattgctttgtgatgtgtggattcatctcacagagtaaaaactttcttttgattaagcaggttgggtataccctatttggagaatttatgaatggacatttggaggccattgaagcctayattaaaaaaatgaatatctccagataaaaactagaaagatgctatctgtaaatctgctttgtgatgtgtagattcatctcacattgctaaactttcttttgattcaacaggttggaaatactttttctgatgggtctgtgaagggacatttaggagcccagtgaggcctattgaaagaaatggaatatcttcagataaaaacgaga

SEQ ID NO: 649629 - DNA, 623 bp, Homo sapiens
cgaattgtgatgtgtgcattccatctcgcagacttaaacctttcttttctgaaacatttttgaaacaccgtttttgtgcattctgagaatggacattgggaatctcattgaagccaatggygaagaagggaatattccatataaaaactagaaggaagctatctgagaaactgctttgtgatgtgtgtattcatctcacagagttaaacctttcttttcatgcagtattttggaaatactgtttttgtaaaatctgtaaagggatattctaaatgcattgaggactatggtgaaacaggaatcatcctcagataaaaactagaaagaagctttctgagaaactgctttgtcatgtgtgatttcatctcagagagttaaacttttctttggattcagcaatttggaaacactgtttttgtccattctgtgaatggacagttgggagctcaatgaggtcaaaggcaaaaaagtgaatatccaaggataaaaactagaaggaagctgtctgagcaactgccttaagatgtgtgcattcatcctgcagagttaaaactttcttttcattcaacagtttggaaacactgttgatgtagactctgcaataggataattgggggtgcatt

SEQ ID NO: 649630 - DNA, 576 bp, Homo sapiens
acacttcactatcagaaagtagtgtagagtttttgtatgttatcaaagttaagtttttgactgggcatggtggctcacacttgtaatctcagcactttgagaggacaaagcaagaggattgcttgagcctaggtgtttgacatcagcctgggcaacatagtgagacctcatttctaaaaaaaaaaaaaaaattagcctagtgtgtgcacctgtagtcctaggtacccaggaggcttgggtgagaggatcatcyctcaaggagttagaagctgcagtgagttatgatcacgccactgcactccagcctgggcaacagagcaagcctctgtctcaaaacaaacaaacaagtttttatcagcttaaactgttataactataatatgctttatgtaagcctcatggtaatggcaaagcaaaaacatatagtagatacagaaaagatgaagagaaaggaatcaaagcatactgctacagaaaattgtcaagtcacaaaggaagacagcaagagaggaagaaaggatcaaggcatcctcaaaacacccagaaacaaattaacaaaatgacaattgaaagttc

SEQ ID NO: 649631 - DNA, 541 bp, Homo sapiens
tgtagcactttcttaagcatttcttttaagttcagtctacttgttatgaattccctctgcttttgcttgtctgggaaatacttaatttttccttcatttcagaaggatagttttgctgtatacagtaatcttggttggtgggcttctttttatttttcttttcttttttttcttagggtctcactctgtcaccaggctggagtgcagtggtgcaatcttggctcactgcaacctctgcctcctgggttcaagtggttctcccacctcakccctagtagctgggactacaggtgtgcaccaccacacttggctaatttttgtattttttgtagagatggtggttttatcatgttgcccaagctagtctcaaattcctggcctcagcctgcctcggccttccaaagtgctgggattataggtgtgagccactgcgcctggctgacagtttttttttttctttgagcactttgaaacattctctcctggcctgcaatgtttctgctgagaagtctgctgatagtctaatgagatgcttttctct

SEQ ID NO: 649632 - DNA, 541 bp, Homo sapiens
tgtagcactttcttaagcatttcttttaagttcagtctacttgttatgaattccctctgcttttgcttgtctgggaaatacttaatttttccttcatttcagaaggatagttttgctgtatacagtaatcttggttggtgggcttctttttatttttcttttcttttttttcttagggtctcactctgtcaccaggctggagtgcagtggtgcaatcttggctcactgcaacctctgcctcctgggttcaagtggttctcccacctcagccctaktagctgggactacaggtgtgcaccaccacacttggctaatttttgtattttttgtagagatggtggttttatcatgttgcccaagctagtctcaaattcctggcctcagcctgcctcggccttccaaagtgctgggattataggtgtgagccactgcgcctggctgacagtttttttttttctttgagcactttgaaacattctctcctggcctgcaatgtttctgctgagaagtctgctgatagtctaatgagatgcttttctct

SEQ ID NO: 649633 - DNA, 571 bp, Homo sapiens
ttgccatcatatatttactcaaactcaaagaatatataatgcgaagagtgaacackaatataaattatgaactctgggtgataatgttttgtcaatagaggttcatcaagtataacaaatgtaccattctggcaggagattttgataaggacggaggcatcgatgtggtaaggctaagtgtgtagagaagttttctgtatcttctgcttaattttgctgtgaacctaaaaatagtctgaaaaagtaaagcccatttaaaacaatctaccagtctaattcacctttttaacaatataaagattcaaatttcatataaattcatatttatatctcaatgaaaattactaacaaaaagttaaaaataaagactactaaaaattacaaaacagtcagaaaataacaaaatggcaatagtaaatttttacctatcaataactttaaatgtaaatggcttaatggattttatgaaacagaattcaactatatgctgccaacaagatattcactttatctttaaaaacacatatacattgaaagtgaagggatgagaaaaaattccatattaataaaa

SEQ ID NO: 649634 - DNA, 530 bp, Homo sapiens
ttatcatgtataagaattttttttgcacaagtaggtgatataaaatttaaagctcctcttacagttattcaaaaatgtataatgttcaacatatgttgagtccaaaattctttctatttcattaataaatataatgatgaaatttcttgtgataatgtgaatggattgtgaattttatcacagtatttttatatcaagtttttcaaaataaagatcaaacttaatttgcagaaaatccatgtgattgttaaagcagtcactttagagctggcttggatgtcactaaaaggtcatayccattgcaaaaggatagatatgattagtgtatgtgaacacagagatttggggctccttcctggacctgcagggagagcctgcctttatttcccacttacctaagccatgttttctgatcctcaagaacctggaaaattaactccttcatggctccgtgtccacagtggcagcagtgtgatctcagctggctgccgaactgcatgttcacatggtcatcttggccagtgctatcg

SEQ ID NO: 649635 - DNA, 558 bp, Homo sapiens
atgcttgcagaaaataatacttgttttgaaattccttataaacctttactataatttcagtgcaaatcttaatctttcacctttagtttttgtttccctttggaaacctattcaacaaatatttattgaagacctgttataaccctatcattttgctttgtcttacaattataggtgaacaagacaatcaggatttctaccctacaaagtgttaaggaagacagaaaataagcaaatcaatacacaacacattgagataagggccacgatgaaaatgtaaacaagtggatgtcataggaagagtggaagaagtccttcatgttgggagtttagggaatagatatttcagaagatgtggtttaaggtgaatgagagagtaagctagctatgagaagcatgtcayagagaaagtgtattagtgcattctcacactactaataaagacacacctgagactgggtaatctataaagaaaagaggtttaatttgctcacagttcagcatggctgaggaggcctcagaaaactttcaatcatggtggaagaggaagcacacatg

SEQ ID NO: 649636 - DNA, 544 bp, Homo sapiens
catatagtcccatttattccctgctagttctctaatacgcttctacgggccctttattaagtgatagctagttccctccttaaatgattataaatcaaatttcaactttttcaagtacattttctcagctttctttgtgtattcttgctgtgactcatcttacagactmtcattaaagcctggttaatttacgtttgctaagtgattccattgctaaattatctattcttacattatcgaccatttcattttccttttgatttcccacctttcaaatcctctctttttcaccattatctcatggtttggaataaattctccttaatctgctgactagaagatgtaattattaaatgtaaagtgtatgtgtagttttaaaaatgtgaattcatagatatttacattttaataaaatttgtcataattattttaaatgacagaaatgtatttatcaaggttgcatatttgcaatattatctgaattatgggctaaatcctactgattgtacatgactacagttaaaatatatttaaaagaaaaatt

SEQ ID NO: 649637 - DNA, 567 bp, Homo sapiens
tatgctgtgcctcactgcccccgtgccccacattaaatcttatctcactgttgttaaaaycttttagaatgatacttctagaagtaaggagagggtggttgatgggcaagggggaagaaaaggctgagatcagacacctggggtagcaccaccttttttttttaggtctctcctggctcttccactcccgaaagggtcacaaatctggtaaggagaggttatattaagccactaggtcaacacatctgatagaagatactaaaaccagtcaattattttttaacagcaacatggaattcttcctactcatcattttgaattaggagtgacatcaagatggttggccagaagctcctagtgctctccctctgatatggtttggctctgtgtccccacccaaatctcatgtcaaattgtaatccccacgtgtcaggggagggggcctggtgagaggtgattaaatcatgggggcggatttccccctcactgttcttgtgataatgactgagttctcatgagacctgatggtttaacagtggcatttccccctttgctgcctctttctct

SEQ ID NO: 649638 - DNA, 655 bp, Homo sapiens
ttttgtttgtttgtttgtttatgcaaacattgttaagttgttatcagcttamaataatgggttataagatagtatgtgcaagccttgtggtggcctcaaatcagaaaacatatagcagttatacaaaaaataagaaagaaattaaatcataccaccagagaaaattaccttcactaaaaggaagagaagaaggaagaaaagaaggaagagaagaccacaaaacaactagaaaacaaataacaaaatggcaggagtacttccttacttatcaataataatattgaaagtaagtggactaaactctccaatcaaaagacatacagtggctgaatggataaaaacaacaacaacagcaacaacaacaaaaacccaaactaaaaccaaatgatctgttgcttacaagaaacacacttcatctaaaaagacacacatagactgaaaataaaggaatggaaagaggtattctatgccaaccggaaccaaaaaaagcaggagtcactatacttataccagacaaaatagatttcaagacaaaaactataagaagagacaaaaaaggtcactatgtaatgataaagaggtgaattcagcaggaggatataacaattgtaaatatatatgcacctgacactggagcacccagatatataaagca

SEQ ID NO: 649639 - DNA, 634 bp, Homo sapiens
tattttgttctaaaatttccatttattttttatagccactatatctctgttgagatatcctatctttttactcattttgagaatcttacctttatttcctcaaacatagttgttatagtggctttaaaatctttttctgctaattttaacatctgggtttgttatctcacagtcttcattgattgctttttctcttgagtatggrtcttgttttcctatttcctgatatatcaggtaagtttgaagtgtattttggacatgactaataatgctttatagtctctgaaattagtttgtccctctgaagaatgctgatgtttgtttgttcatttatttatttatttatttattttttgagacagagtcttactctgttgcccaggttgaagtgcagtctggtgatcagagtttactgcagcctcaaccctctgggctcaagtgatcatcccgcctcagctttttgagtagctggaactacaggcatgcatcatttttttaaaaaattttttgtagagacagggttgattgtttttatttgagctttagctattaaccctgtttcccttgagatgacagtagcttaaaatataatttaattgttttaattttatctgagcttttattttttgtaaat

SEQ ID NO: 649640 - DNA, 634 bp, Homo sapiens
tattttgttctaaaatttccatttattttttatagccactatatctctgttgagatatcctatctttttactcattttgagaatcttacctttatttcctcaaacatagttgttatagtggctttaaaatctttttctgctaattttaacatctgggtttgttatctcacagtcttcattgattgctttttctcttgagtatgggtcttgttttcctatttcctgatatatcaggtaagtttgaagtgtattttggacatgactaataatgctttatagtctctgaaattagtttgtccctctgaagaatgctgatgtttgtttgttcatttatttatttatttatttattttttgagacagagtcttactctgttgcccaggttgaagtgcagtctggtgatcagagtttactgcagcctcaaccctctgggctcaagtgatcatcccgcctcagctttytgagtagctggaactacaggcatgcatcatttttttaaaaaattttttgtagagacagggttgattgtttttatttgagctttagctattaaccctgtttcccttgagatgacagtagcttaaaatataatttaattgttttaattttatctgagcttttattttttgtaaat

SEQ ID NO: 649641 - DNA, 602 bp, Homo sapiens
aaatgtaaatctgatgatgaaaatacacatagagaaatgtgtgctttaaaaactattaccatatttcccatgaaacacacacagctaaggacattcttatttgtattttttagtgttggcattgcaacaaatgtatagatgagcagtttcaatgaaaagtggtaccacagtttgatagtacagtgcaaagattatatggaattgttcacctgcatgagcatatgaatcttttaattttctctacgtattttttatgacggttaatacaaagaagattcattactttataaaaygcttaatgcaaatacactatatgttagttgtctattgttgtctaataaattaccatagcttagtgggttaaaacactccacctatttactgtcttgcagttctataggtcagaagtccaggtgggcttgtttgagttctctgcttagggtctcacaaggttgaaatcaaggtgtggactagcattggcacttatctgaaagctcttgggaagaacgtacttccagacaattcagattgctgccagaacccagttcttcgcagttatgcactgatgtcactgttaccttattggcttttagctggggaca

SEQ ID NO: 649642 - DNA, 587 bp, Homo sapiens
ctaggccctgtctatgaatatcaaaaataaacacttttttctgctaggtgacatatgtcattactgttttgaccctatatttaaatgaatcatgagggccagcctagccttactgagcaaaatagtcctgctcttattaaatacccctcacagacttaaagcaaaagcagccagtcaggtagttttgctaccttgctgcataaaaagtaggaaacttaattgggattcagactatgaccgttcttaaaatacactttaatttcagcttcatttcattctgtccacaatcaattattgaatgacagctttgtctaagctacattgcttaatagtatagacaaggcagtaaactctgggagggaaggaaccagtcctgttttattctttagcccatgttggcacatcatgggtacatcataaatatttgtaaaatkaatatgtaaatgaatgaatgacaggagagaaggaagaagaaaagaataggtgaacactaggaatactaaaataactaagacatttccttaccttcagagagcttacagtctcacaagagggatatgcacataaatagccattattgaaataaa

SEQ ID NO: 649643 - DNA, 549 bp, Homo sapiens
cattatccttaactgagggaaaaaatgtgytatggaagtatttttgattctggttaatgcactttatataaaatgccaaaagtaaattattagaggtaaagatgaggctttgaaatttttatgaaatatttcggtccagaacttggttaacccaaatcctgtcctgctgatcatgcattctccatctggagttcctgagaggctctacatctgagtatcagagtatcactttgataatcactatttaatgtcttacggtatagtacagacctttggacaaaggatgaggtggtacaaatggagtagacacaaggcctgatgagaactttttaatttattttccccttaatgtgtgtcttactactggtataaacaagcatgcttgcaggaaggagaaagagatggctaaaacaaaatcaatttatccattatggattagagtccatgtataacagagagaaagagctattttcactatagatagcttcagatttatggctcaaaaactatgctgctggattgtgtcaaacagtttagtaaaaatgaaat

SEQ ID NO: 649644 - DNA, 549 bp, Homo sapiens
cattatccttaactgagggaaaaaatgtgctatggaagtatttttgattctggttaatgcactttatataaaatgccaaamgtaaattattagaggtaaagatgaggctttgaaatttttatgaaatatttcggtccagaacttggttaacccaaatcctgtcctgctgatcatgcattctccatctggagttcctgagaggctctacatctgagtatcagagtatcactttgataatcactatttaatgtcttacggtatagtacagacctttggacaaaggatgaggtggtacaaatggagtagacacaaggcctgatgagaactttttaatttattttccccttaatgtgtgtcttactactggtataaacaagcatgcttgcaggaaggagaaagagatggctaaaacaaaatcaatttatccattatggattagagtccatgtataacagagagaaagagctattttcactatagatagcttcagatttatggctcaaaaactatgctgctggattgtgtcaaacagtttagtaaaaatgaaat

SEQ ID NO: 649645 - DNA, 549 bp, Homo sapiens
cattatccttaactgagggaaaaaatgtgctatggaagtatttttgattctggttaatgcactttatataaaatgccaaaagtaaattattagaggtaaagatgaggctttgaaatttttatgaaatatttcggtccagaacttggttaacccaaatcctgtcctgctgatcatgcattctccatctggagttcctgagaggctctacatctgagtatcagagtatcactttgataatcactatttaatgtcttacrgtatagtacagacctttggacaaaggatgaggtggtacaaatggagtagacacaaggcctgatgagaactttttaatttattttccccttaatgtgtgtcttactactggtataaacaagcatgcttgcaggaaggagaaagagatggctaaaacaaaatcaatttatccattatggattagagtccatgtataacagagagaaagagctattttcactatagatagcttcagatttatggctcaaaaactatgctgctggattgtgtcaaacagtttagtaaaaatgaaat

SEQ ID NO: 649646 - DNA, 565 bp, Homo sapiens
ttcttcttggcatttcctaatgcaattattcttactccacagaaaccaaggtgtgggttctgtcaactactagagatgttcattcaaattatatatttgtgaaatagggctttggatgtagtggatcttctgtgagtcagatccgggccaagactccctttatgactgggccgtatgtgcttattgtctaccatagcagagagaatgagaatttaggtatctagtatctgtgtccatagcatttttttttttctaactagccattgaaatatgagatcttcctttacctctgtgtaaaattacccaagtaaattgccatataaatgtgtttagtaaaggaaggtgaaaaatcactgctgtgtacacttgctgtgctattaaagggtccttcttcatggggccctgttcccctcataacsagttgttcttgggctaaaaaatgtctaagctatgaaaagtggggaatgggccatgaaagttcactgaggtaactgacttcaaccttttgctcattcaatcttgatgtatttttatcatagatgttaagaaatatacttttctgtgg

SEQ ID NO: 649647 - DNA, 600 bp, Homo sapiens
ttgttggagctacttctcagtaaaatgtaaatgttttcaaagaaaagaaaggagattttccaggtaattcaataacgtgaaaaagacagaagaacattaaagagctacatgtattcaaaggggaataaatgggtcttattgattctatggcactggagggaattcaagagcttgtttgtttaaagttttgaatataaagttgagatgttttgaccttatactgaaagcaatttggggccaggaaaggctgataagacagacaagtaacagagctatacttatgagaaactactccckcagcaatgagcagataggaaaacggtaagaatgaaatcagaaagaccagttgtgaagttactgcattctggtaagaggatatggaggcctggaattgggtagtgacaatatagaagagagaacgctgtgagctatgtataagattatgattcagtagtgtttacacatgaaaattaatagagtaaagaagtcaaagatgtacatgttcttgtcctgttgcttgagcaactgcatgaagagatgcactattaatatttgccaagttgaaaaagtcacattgaatgtagaagtattagggagaat

SEQ ID NO: 649648 - DNA, 631 bp, Homo sapiens
aattctttacctcacagttaatagctctccatttctatagggtcagtttgtgattctttgttttgttcttttggtggtgtcatggtttccttgcttattcrtaatttttgaggccttgcattggtgtctatacatttgagaaagtagacacttctttcagtctttatccattagctttggcaggaaaagctatttgccaatcagtgtatccaagcattctaggtgggctggccattgaggtccactggctagcttgctgctggagtccttgggcaggctgggctggtgcttggatccatgtgggtggactttagagtctcagttcatggatgtggacctgggttctgggttcacaggtgccaagttagtgcttggggctgtgtgagccaacctgaagcttaagactgtagggactggcctaacactgggctatctagaagcgtgagtctgcaagggtgggcatgggttcttgttccacaagctctggcctggaatcacagttcacaggtgcaagcctggttcctgggactgcaggggctggcatcgcactggaatttacttcttcagcaatgggtaattttttatttttcctttgtgctacattttaagttacatcagaaccagtgaggta

SEQ ID NO: 649649 - DNA, 631 bp, Homo sapiens
aattctttacctcacagttaatagctctccatttctatagggtcagtttgtgattctttgttttgttcttttggtggtgtcatggtttccttgcttattcataatttttgaggccttgcattggtgtctatacatttgagaaagtagacacttctttcagtctttatccattagctttggcaggaaaagctatttgccaatcagtgtatccaagcattctaggtgggctggccattgaggtccactggctagcttgctgctggagtmcttgggcaggctgggctggtgcttggatccatgtgggtggactttagagtctcagttcatggatgtggacctgggttctgggttcacaggtgccaagttagtgcttggggctgtgtgagccaacctgaagcttaagactgtagggactggcctaacactgggctatctagaagcgtgagtctgcaagggtgggcatgggttcttgttccacaagctctggcctggaatcacagttcacaggtgcaagcctggttcctgggactgcaggggctggcatcgcactggaatttacttcttcagcaatgggtaattttttatttttcctttgtgctacattttaagttacatcagaaccagtgaggta

SEQ ID NO: 649650 - DNA, 600 bp, Homo sapiens
aaccttctagcgctgggaaagaattcttagattggacaacaaaagcacacacacacacacacacacacacacacacacacacacamaaaacagctgggtacagtggctcgcttgctcacacctataatcccagcactttgagaggtaaaggcaggagaattgcttgaggccaggagtttgagaatagcctgagaaacagtgagactctgtctctacaaaaaattttaaaaacaaaaaaaattagctggtggaatgcaactgtaatccatgcgcctcgggaggctgaggtggaaggatcacgtgagaccaggagtttgaagttgcagtaagctatgatcatgccactacactacagtgtgagcaacagagtgatattctatctctgatgatgatgatgatgatgatgatgatgatgatgatgatgatgaaaaagaagaaggaggaggaggtagaggaggagaataataattatttatgaattggacctcatcaaaatctaaaaatattggaactcaccaaaattgaaaaagttttcctctgagaaagcccacatgaagaggctgaaaagaaaagctacagactgggagaaaatgtttgcaa

SEQ ID NO: 649651 - DNA, 633 bp, Homo sapiens
agggttttctcaacatgaatgtaaagtggatctaaaatagtcatttacatcaagattgtatgtagtcagtatgtagtracatgtttatgcaccctatttcaagctccttacttcattttgttctcgctagtttatgctagaggctttgagacttggtacagcaactgcagatgacaatgtcaatgctcaacaaagatctcttttctgagccctactcatctgtaagggcgttaagaccattttaggaatagacttctttaggatatggggtggggaaactatttctttcagtgattatatcttgtactagtgacagttctgggtaacaaaacaacaaaagtgaatgacttttattaaatgtaggggttttatgttaatttgttagtaaaccaattgtaagctggcacccctgcggattcagaaacctagttaaacttgatttgtaatcttggagaatcaggagggctccttgtaactgctgaagattagcttgtagttaacatgcctatgttatcctctgtttccaccctgttctccatcagtctggaacaaataagcaggtgcttcaccattttccacaaaatattccttgcaccttgatatggtttagctgtgtccccacccaaatctcat

SEQ ID NO: 649652 - DNA, 337 bp, Homo sapiens
gtctgttttttccccatctttgtggctttatctacstttggtctttgatgatggtgacgtacagatggggttttaagtgtggatgtcttttctgtttgttagttttccttctaagagtcaggaccctcagctgcaggtctgttggagtttgcctgggtgtcagcagttgaggctgcagaacagcagatattgttgagcagcaaatgttgctgcctgattgttcctctggaagttttgtctcagaggagtacccggccatgtgaggtgtcagtctgcccctacgggggtgtgcctccagttaggcaactcgggggtcagggacccacttgaggaggca

SEQ ID NO: 649653 - DNA, 650 bp, Homo sapiens
cttctagctgggtttaaaagctacaaataaacagaggaaatatacastattttgaaagtaccacttgagtgttctgtatgtatttcaatattatgttgctaattttaattgttcaaggttaaggagcttaaacctcctcctcatacattcctgaatcatccattactcccacacatacattgtttgatacagcataatcctaagtaagtaaagaggtagcaaaatgaaaaaaaataaaataatgtgataccattctcatctaggaatggcatcagtggacagatgtgaataaaagtaatgtgattataattttaaaaatcatatttaataggatccatttattattaaatgaacattaaattacttaatgtataataaatccttaacacaatgaaaactcttaatgcagagtgagaccaaaatgaaggtattaactgttttcttcctaatccttgctttacttgttatttccaccagaccgtcactttatttgaaggatattgtaataacacaaagccctcagctttgccattagagagatcttccttaaattatctttgttgtaataaaggtcatctggaggaaatactggtctgaatacaataataaatgttaagctttctagtattttccacttttagacacaaatt

SEQ ID NO: 649654 - DNA, 650 bp, Homo sapiens
cttctagctgggtttaaaagctacaaataaacagaggaaatatacactattttgaaagtaccacttgagtgttctgtatgtatttcaatattatgttgctaattttaattgttcaaggttaaggagcttaaacctcctcctcatacattcctgaatcatccattactcccacacatacattgtttgatacagcataatcctaagtaagtaaagaggtagcaaaatgaaaaaaaataaaataatgtgataccattctcatctaggaatggcatcagtggacagatgtgaataaaagtaatgtgattataattttaaaaatcatatttaataggatccatttattattaaatgaacattaaattacttaatgtataataaatccttaacacaatgaaaactcttaatgcagagtgagaccaaaatgaaggtattaactgttttcttcctaatccttgctttasttgttatttccaccagaccgtcactttatttgaaggatattgtaataacacaaagccctcagctttgccattagagagatcttccttaaattatctttgttgtaataaaggtcatctggaggaaatactggtctgaatacaataataaatgttaagctttctagtattttccacttttagacacaaatt

SEQ ID NO: 649655 - DNA, 514 bp, Homo sapiens
aggctgtagatgagaggcactgggcagacagatccatacccacctcctgagtctcagaagtctggtgtgcatggaacattaagcccctagcctactgaaacttcacctcccagctggtcttgtaccatctgattcttgagccccatsatgttagtgtcatctccatactggaattgccaacaatgtctgatggagggtttcaccctgggtacttggtaccagcaatgtatgaaataccagaagggaggctccagggcttccatagaagacacattctaaagttactcaggtgatcaaatggtcatctcagagattttcagtagaactgcagcattttgtcaatacctgagtgaatgcagaaactatccagaggcacgggcattctaggaagctccctgtgtaaatcaaatacaaggaatatctacttctgggctcaaaatctaacttagagaaaaaaaaattgaagtgctggcagaagacaaataactccacttcagttctcaagagaaaaatg

SEQ ID NO: 649656 - DNA, 485 bp, Homo sapiens
tctccaaagctcctctagtttctttcggcaaaagttagttatcctaagaactggcataagagctatgccaaaggtgtggtaggctcagaaagaagggattggtggaagaagtctctttgaaaatattattataatctaagaaatctttaacctattgctccccaawactgttggtccctggggcttgacttttccccttaaggctccatctccatccctggctttccctcttccttctcagcatctagtcttgtagaatttaaacacaggaaccagggatgaccccacaccagagcatagcctactgcattcagcatgcgaacattaatcacaggtataaggccccttgcacagacatgctttggagaagtgtgtataggacttcttggatttgcccaaggtggttaccagacacccaaagtagattcgaaaattttctggaactcctgaacatgtgtattcaaggatgaataagcaacttattg

SEQ ID NO: 649657 - DNA, 623 bp, Homo sapiens
tgagaaccgctgtttatttcttcattaaggctgcgtagatgagctccatttaataccaagtctagttcttctgtacattaagatagcaactcaagtcagtttgggccatccaattcttccacataaagttggctaaaacatctggatgattgatcaaacatctggatgattgattaaatatgtgactgaactgatggaacacttgggcatcataaaaacaaaccaagagctatttttgcctgactctaagaaatgggaaaataaatacttctcttcaagacttttcttcacctggctaataatctaaatgtggctcctaagaagatgaacattgtgtgtgttttatattcctctcatctctagaggggttttgtttatttagtttctgtggctgaatgttaaaacaaaatgaaaagaacaaattggaaagagttttacaaaaataataggttmaccccacccttattacaacattaatttatttagccagttttttaaataagtagttttgcaataaaagcaataaataaaagatataaaaacctagaatttcccagattataaaaattcagaaagaaaaacttgagtaatacttaatatatcaacatgaaatatagctacat

SEQ ID NO: 649658 - DNA, 599 bp, Homo sapiens
tatattttaacagaatttcaaaatagaaaaagagcattttacttttttggattcatgggaattttcaaaatcattattcaaaaataatgcttctcaaatttattgaatcatagtatatgctctttgctggcacactcaaatctgactttgaatgtcaaaactaattttttattgtttctctgtaattttcagcaagattacagaccaataatcaaaggaaataaggagattatgtgacacagtgtcctttattcttttagagcaaacttggtattgttaaatctacctgtaaccatttggcttttctttttaatgagtgaatggtcttgtaataattttaattctagtaaagattttatgtatcagtgataaattagtgctrctaagatttgatttataattttaaatatatgtagacagtaaagaaaatctgcacataggaattgtttcagaaagaatgagttcactttcttttataattatttgtgattctatgtgtgatggtatgtgtatttaagcctacttatatacaatcatataagttttaaaatataagattatcatcaatttttcaactaagataaattatatttaatttg

SEQ ID NO: 649659 - DNA, 563 bp, Homo sapiens
gttctcaagttggctcattttcctctaaaatgaatactattggctatttggagtttcttaaattcatgttcattgaatgttctgttacctctttatgtttctttttatatagatgctgataaaatcctggtcttttagctgtagaatttatcctctgcagtttgtattttgtggtctgtagggctgtcatgtaaattagtgttgctgttcatgttatccacaggttttcaatttgtattcagttgttctatttttatataaggattcagaaggattacaaatttgctgctgccatcttgccagagtctctctggtcttaatgttcttgttagtctatgactcttacccaaacttgatcttcttttataaacatactgtaattatctcatctgacctgtgcctsccggtgatagcttaccttatttctctcagtacttttgaactccattgcctcatatactatgtgggtgtatgtctattaatttgctactttgaaaatgggatttgattgtttcctgctgagtgatacttagtgttcttatgctgtggacaatgactgcatt

SEQ ID NO: 649660 - DNA, 563 bp, Homo sapiens
gttctcaagttggctcattttcctctaaaatgaatactattggctatttggagtttcttaaattcatgttcattgaatgttctgttacctctttatgtttctttttatatagatgctgataaaatcctggtcttttagctgtagaatttatcctctgcagtttgtattttgtggtctgtagggctgtcatgtaaattagtgttgctgttcatgttatccacaggttttcaatttgtattcagttgttctatttttatataaggattcagaaggattacaaatttgctgctgccatcttgccagagtctctctggtcttaatgttcttgttagtctatgactcttacccaaacttgatcttcttttataaacatactgtaattatctcatctgacctgtgcctgccggtgatagcttaccttatttctctcagtacttttgaactccattgcctcatatactatgtgggtgtatgtctattaatttgctactttgmaaatgggatttgattgtttcctgctgagtgatacttagtgttcttatgctgtggacaatgactgcatt

SEQ ID NO: 649661 - DNA, 574 bp, Homo sapiens
ttgtctattgttggtgtataagaatgcttgtgatttttgcacattgattttgtatcctgagattttgctaaagttgcttatcagtttaaggagtttgggggctgcgacaatggggttttctaaatatagactcatgtcgtctgcaaacagaaacaattttatttcttctcttcctatatgaataccttttatttmtttcttttgcctgattgccctggccagaacttccaataatatgttgaccatgagttgtgagagagggcacccttgtcttgtggtgattttcaaaggaaatgcttccagcttttgcccatttatatgatattggctgtgagtttttcataaatagctcttattattttgagatatgttccatcagtatgtagtttattgagagtttttaacatgaagagatgctgaattttatcaaaggtcttttctgcatctatagagataattatggttttttgtcattgattatgtgatggattacatttattgattgtgtatgttgaaccagccttgcatcccagggatgaaactgacttgattgtggtgaataagtttttgaatg

SEQ ID NO: 649662 - DNA, 574 bp, Homo sapiens
ttgtctattgttggtgtataagaatgcttgtgatttttgcacattgattttgtatcctgagattttgctaaagttgcttatcagtttaaggagtttgggggctgcgacaatggggttttctaaatatagactcatgtcgtctgcaaacagaaacaattttatttcttctcttcctatatgaataccttttatttatttcttttgcctgattgccctggccagaacttccaataatatgttgaccatgagttgtgagagagggcacccttgtcttgtggygattttcaaaggaaatgcttccagcttttgcccatttatatgatattggctgtgagtttttcataaatagctcttattattttgagatatgttccatcagtatgtagtttattgagagtttttaacatgaagagatgctgaattttatcaaaggtcttttctgcatctatagagataattatggttttttgtcattgattatgtgatggattacatttattgattgtgtatgttgaaccagccttgcatcccagggatgaaactgacttgattgtggtgaataagtttttgaatg

SEQ ID NO: 649663 - DNA, 511 bp, Homo sapiens
cattgctaagtgaagacaccaatctgaaaagactacataatttatgattctattcatatgacattatggaaaaggaaaactataggaactataaaaagaccaccacaattttcaagggttgataggtgaagcaaagaacttcttttttttttttttttttaggtagtgaactattgtttacagtaaggtaatagtagataaataacacaatgcatttgtagaaacctattgaaatgatagcatagagagcaaactttagtgcatgtcaactaaaaaaaaaaaaagaaaatgaaggatttaaggatggaatgcaaactttgacaaaataacccaactgtagtttaaatgtatgaaataaccactctgaagagggtgagagaaatctgtaagactaaaggcaaaaaataactgtataaaagctatgtattctagttgaaaagttgtttcccccaggagtacargttaacaattctgacaccattgtacatttatgctggaattgaataattaa

SEQ ID NO: 649664 - DNA, 608 bp, Homo sapiens
gatagcactgaattaagccctggggcaatataggcatggagtacatggttctcatcatcarggatatagaagcccatgttaaagaagcccttatttgcactagaacaggcagttgtataagaactttgctctcaggaattagaattctctgatagatacttaatgaatacatgccatacaatcttcatgttaaacttgtattaagtcatttaagctgaggtatcctaactgaggaaatgtgtaccactgagggtaggtactcaaacaccttctgaggacgtgagggcaaggatagatttcagcttatcaatgtttagacccatgacacccataggtgctctttcctaaaactgacctgcctaggaggatacctggggtctacctgttctcttatcccacacgcctttgataattgtccttcgactgcaatcaaaatatgcccattctgaatctttgcatggtgcattggtccaaagtgtaaaaatattccaacaaaagaatattataacataagtggaacacgcatctctctgaaggaagcatccttctaggacaaagtaaagatggcatccataaaaaatactaggcttattgaatccaggtaacag

SEQ ID NO: 649665 - DNA, 665 bp, Homo sapiens
cccagtatcaggttattggacctcaagtaggtgtgataaactcatacccacctgtgtacaggaggtatacaggaggcatctgtcagacctcctatcttggatccaatgtcttttgtctcctgcagtgatgtaatttgtgtccctgaacaatgtccttggagtatgcctgtcaaaggtcattggcagccttgcctttagatttggggacgtcattaccttggttttattgctctcagctgcagtctccattctcctttaagttggcttatctttaaattggctaatcttagcttagcattcacctcaaaacctgaacataaacmcttctatctttgccttgcttataagttcccgtaaagcaagctgaggcctgagttctccaccctactaatggccaatttttctgtgtaacactgtagaatattttttattatgcgaggatttttagaatttatccttcatttcagtcttgtgtataaattcctctaaacattcaacaaccatgacatccacagagacaagtcaatattgtagcaacacttctagaaagtagttaatccagttcctgaagatcttggggaaatgttttgtttaactgcttaacagacacagcccagagaatatgcaattatgatgtaccagaagaggaagattctgccccatgg

SEQ ID NO: 649666 - DNA, 486 bp, Homo sapiens
gtaagatgtagcggcagatcagggatggcagggcaccaggcaggagtagtccagcagccgttaagcctcaaggctggtagggggtcatgccacttgccctcagagcaggacrcattccagcagtagtttatgttccaagatgacatagtgcagtagccttgtaggccacagggggaagggcacactgttggcttctactctggggtagcacagctgtgtggacttcaggcaactccctcagctggttcagtgcctgtgaggactgtaggtgtccagggtgttgatgggggctgctggggtcctcttgcttaccttttccccacaaggagacatcctcttggttctaagctgatcctggctagagagtggggtgttggatgccagatatttcctgggatgtggagtactataatagaaaccagtatgtggccatactggttttctgtgctctacagggtttctgctactcctttgatgtattctgac

SEQ ID NO: 649667 - DNA, 659 bp, Homo sapiens
gaattctaagaaagagaataaagctggaggcctcatactgtcagacttcaaaatatactacaaaactatagtaagctaaacagcatastactgaaataataataggcccatagaccagttgaacagaatacagaagccagaagtaaatgcatttatttacagctaactgatttttgataaagttgccaagaacatacattggagaagaaacagtatcttcaataaatggtgctggtaaaactggacattcatatgcataaaaatggaactagacccatatctctcagcatacacaaaaattaaccaaaatgaattaaagacttaattttgagacctgaaatgatgaaactactagaagaaaacataggagagagatttgtcaggagcaagacagtagaatagaaggatctgccaatcatcattccctcaagaacaccaatgtaacaactatctacacagaaaaaaacaccttcataagaacagaaaatcagatgagccctcatggtacctggttttaactctgtatcactgaaagaggcactgaagagatagaaaaaacagtcctggagtgcatcaccacccctttcccatccctggcaatggcaggtggtgcccagggtagctctggaggaaaagggagggagagcacagcaatagtg

SEQ ID NO: 649668 - DNA, 608 bp, Homo sapiens
attgtgaacagcaggatgtaaatggcatgacctaaaccaactgggctcgaaggtgttaactccctcagaacttaactaaaatgtacaccgtatgcacgtgtgtacttagccttatgctttttacatcccgaccttgagtctttttcttctttttaagagatyatacaatttagttttgtatttttgtaatgattttttttcaattgacaaatgttagctacatgtttttcaataatcatcctcttatctgagttcatcactaagagagaaaaattgcttcacgttatcttgagtaacatttggatgagctatcagtcatcaactgaaattaacctgaacatgtctccaatgacatgaagaacatttaagcatgccagctggaaggcatttacagtttcatttttccagcttccacagaaaatctttcccatgaacatctgtgaaggttttataacgattagactgatgtgagctttgtttggaattagggcactcagagccatttaaaccagcctgaagtgtcagaaacatacccaaaaattaagaccaagaagcatttcaattcacacattgcagctctgtcctcttgtttatgattgatttaaaga

SEQ ID NO: 649669 - DNA, 608 bp, Homo sapiens
attgtgaacagcaggatgtaaatggcatgacctaaaccaactgggctcgaaggtgttaactccctcagaacttaactaaaatgtacaccgtatgcacgtgtgtacttagccttatgctttttacatcccgaccttgagtctttttcttctttttaagagatcatacaatttagttttgtatttttgtaatgattttttttcaattgacaaatgttagctacatgtttttcaataatcatcctcttatctgagttcatcactaagagagaaaaattgcttcacgttatcttgagtaacatttggatgagctatcagtcatcaactgaaattaacctgaacatgtctccaatgacatgaagaacatttaagcatgccagctggaaggcatttacagtttcatttttccagcttccacagaaaatctttcccatgmacatctgtgaaggttttataacgattagactgatgtgagctttgtttggaattagggcactcagagccatttaaaccagcctgaagtgtcagaaacatacccaaaaattaagaccaagaagcatttcaattcacacattgcagctctgtcctcttgtttatgattgatttaaaga

SEQ ID NO: 649670 - DNA, 608 bp, Homo sapiens
attgtgaacagcaggatgtaaatggcatgacctaaaccaactgggctcgaaggtgttaactccctcagaacttaactaaaatgtacaccgtatgcacgtgtgtacttagccttatgctttttacatcccgaccttgagtctttttcttctttttaagagatcatacaatttagttttgtatttttgtaatgattttttttcaattgacaaatgttagctacatgtttttcaataatcatcctcttatctgagttcatcactaagagagaaaaattgcttcacgttatcttgagtaacatttggatgagctatcagtcatcaactgaaattaacctgaacatgtctccaatgacatgaagaacatttaagcatgccagctggaaggcatttacagtttcatttttccagcttccacagaaaatctttcccatgaacatctgtgaaggttttataacgattagactgatgtgagctttgtttggmattagggcactcagagccatttaaaccagcctgaagtgtcagaaacatacccaaaaattaagaccaagaagcatttcaattcacacattgcagctctgtcctcttgtttatgattgatttaaaga

SEQ ID NO: 649671 - DNA, 615 bp, Homo sapiens
gagttttagtttgcacgatataaaagttctagaggtcttttgcataacaatgtgaatatagttaacactattgaactgtacactttaaacgatttaaaatggtaaattttatgttgcgtgcgtttaccaaaattaaacgcaaacatgtaactaaaaaaatgctataaaagagtaaaaatgtgagtcatagaatgagagaaaacatataaatctaactgaaatctcatattaggactacaytaaaaacttctgcaaactaatatgaaggagagatgactatggtaaaaagcaaaaaagaatggacaggaaacttgaaaagagaattccaaagagagacatcccaatgacttgtaaacagaaaaagattctcaacctcattagtaatcaagaaaatgcaaattaaagacaaactatgttctcactacatatttatcagaatgagtaaaattaaaacaatgaaaattctcacacactgctggtgggaatataaattggtcaagaatttggaaaattatttgacattaactgccaaagttgaacatacacagatcctatcctcagcaattcagcttctaagtatgtcccctgcatgtgcaacaggagacatgtaccaag

SEQ ID NO: 649672 - DNA, 531 bp, Homo sapiens
ataaaattttttcttaaaatgcaccacatggagcaataactaaccaagttattttkcaccaatatacccactgataacaacttaaaaaaaaaactaaattaagtataaaacatgtttttttgaggcatcaaacaactaacaagccagtaataaattgcagagacaaaacctaggattgaaagaaagctcagagaggtaagtctgacatttgagactactcttttcttacaggagtctgctgactttaaaagtggcagctaagagtctgagaagctgagcatagctttgagcagactacagaggctgctgggacagaagttgggattctgggatttaccaaggaaagataaccatgacaaaaaaaaaaaaaaacaacacagggatttgactgggacatgtaagggttgcatctggaagttagggtgaacaaaaaatagaccagcactaacagagactgaagcccagttttgagtcattactgcacacaactgaatgaatgttcagctaggactgctagttctgaccacttgt

SEQ ID NO: 649673 - DNA, 612 bp, Homo sapiens
acacttaaccctaaccatattaataataatattaagtataaatggtccaaatagtgtaagtaaaaggtgaagattgtcagatcagacaaaaatgcaagatccaactctacagtgcctgtaaaaaacatacttcaaaaatgaacacacaaatagaaagaaactgcstcattctgacaaaggacatacatgaaaataactacaactgacatccttgacagtgaaaaactgaatgatttccccatgaggtcaggaacaagaaaaggaggcccagccttatcatttcagttaaacattgtacgagaatttctagccacaatgggagggttataaaaggtatttggattaaaacaataaagtaaaattgttttatttacagatggcatcatcatctatgtagaaaatctaatggaagcttcaaaaaagatatgagaacactaacaaatttgcaggatacaagatcactttgaaaatcaatttatttctatttaccaacataaaacaagcagaaattgacatttgaacacattatttacaatagcaacaaaaatatgaaatagagataaatctgataaccatttgaaaaatcgatacactaaaaactataaaacatta

SEQ ID NO: 649674 - DNA, 653 bp, Homo sapiens
tattccttggttgggtggcaaactgttaaggtaaattgattgtaagaccaccaggcaatgctaaagacataaaccagccttaacatttaaataataggaacatcctatgaccacttcgactcattgatttgtcatgttcacttattgcttctttttctccttccaggcaattttctggaaagactgaaaagtttttgttctcattttcttcaatatggcagtaatcctaaatcttaaagcaataaaaatagscattataaattcaaggaaagagttggaatatttttttataaaaatctgactatgtcctctcactcaagtcacttaaggagttatttgtacagctcctgctgctattcaaagtagccagagctctaattcaagtaatatcctttcttcttcaattccgcatacttcctcacccctgtgggtcagcactttgttcagtatttgtgactggattactggtctttccccaacaaccactatttttcttccatttctgggtttcttctcttctcacgttatgaaagccatacttttgtacttagcttttacactttcgagaacattcggtctttaaaagcaagaacactgtcttagctatcttttgatctccaacagtgattgtctttacaaatggaagcaatggt

SEQ ID NO: 649675 - DNA, 551 bp, Homo sapiens
ggcagtcaaattgtaaagctccaaaatgataccgtttgactccaggtctcacatccaggtcatgctgatgcaagaggtgggttyccatggtcttaggcagctccatccctatggctgtgcagggtacagcctccctcctggctgctttcacaggctggtgttgagtgtctgtggctcttccaggtgcatggggcaagctgtgggtggatctaccgttctagggtctagaggaaagtggccctcttctcacagctccactgagtggcactccagtagggactctaggcagagtaggcggaggtttctaaacctgaattcttgacttctttgcaccacaggctcaacaccaggtggaagcttccaaggcttggaacttgcaccctctgaagccatggcccaagctttaccttggccgcatttagtcatggctggagcagctgagatgcaagacaccaagtccctagactgcgcacaaaacagggaacctggtcctggcccacaaaaccatttttcttcctaggcctataggcctgtgatgggaggggctgctg

SEQ ID NO: 649676 - DNA, 636 bp, Homo sapiens
acagactgatgcaacccatgtcagatgagcttcatcttcttagaaatgctgtcagtagaatcattttctaagagtgagagaggtagcggaggggagtgaaaccttgggaaactgagtagaatgggaataagcaacagatgtctttgagggtccttttgagagtcactagtttaagctgcatgttgactgccagctcctgttaaataaggacctgtttgaagcacacagcaggaacctttgtatggtccaggaaaatagcatgctaagcaaattaataacaatctaagggtgaaaactttgaactcataaagctatactataataaacatggcaatagacaatgcttatgttcatktcggctgattctgtggtttgaaacacctaggcaggatcctcaagattctaggaaatataggtatatatccacttttctctattcctgtaagcagtgtatgtatttcaagatagagataatttcttcaatgtttgatagctcccactatggcacgttatctcccaccaatgcacacatacacacatacactgactatttgttatatattcgcttttattcaatgagtttaaagttatcacctggtgactcaaaacttaacgtatgcatatctactttccaca

SEQ ID NO: 649677 - DNA, 617 bp, Homo sapiens
tggtttcagagggtgcaagctccaaaccttggcagcttccatgtggtgttgagccatgtggtgttgatgcacagaagtcaagaattgaggtttgggaacctccacctagatttcagaagatgtgtggaaacaccaggatacccaggcacaagtttgctacacaggcaggtccctcatggagaacctctgctagggcagtgtgcagaagggaaacataggctcagagaccccttcccctcccacccacagagtccccactggggcactgcctagtggaactgtgagaagagggccactgtcctccagaccccagaatggtagctccacccacaacttgtaccgtgggcctggaaaagctgcacacactcaatgccaacctgtgaaagcagmcaggagggtggctataccctgcaatgccacaggtgcagagctgcccgagactataggaacctatctcttgcatcagcgtgatcttgatgtgagacatggagtcacaggagatcattttggagtgttagaatttgactgccctgctggatttcagacttaaatagaccctgtaactcctttgttttggccaatttctcccatttggaatggctgtatttacctaatac

SEQ ID NO: 649678 - DNA, 604 bp, Homo sapiens
tgataagtttttcttagctttaatttggtagggctttcccctggaacaatggcccatgactgtggaggtggcaacactttgactygggtataatgagtccatcctttctctgctgtctggatgatggttacagtggtcaggagcactaggtaaggtccttcccaagctgatttgagctttgcttctttccatcctttgatgaggacatgaactccagggctggtgcctgtgctaagagacttttggttttaagagaagagaaagtggaagatagaacaagtatataaattttgaggaactgatctattgtttcaaatgtaggaacatcagtagtggaatgtaaagaaggcagcccatatagcatttcataaggggataagccaacatcattccaaggggaggttctgatttttaacaaggcaatggggaggcatttagtccagggtagctgggtctctaggactaatttcgttaggtggcttttcagagtctcgttcattctttctattctttctgaagaagatggatgccaagggttatggtattcccatttcatgtctagcacctgggctaacattttaatgacttgtgcagtgaaatgggt

SEQ ID NO: 649679 - DNA, 622 bp, Homo sapiens
tcttcaaaccctacataatctggtctgacattaactgttgggcttcctttccaaccattgtttctctttcttacatatttccaactacaatggctttcttgttgttcatagcatatctctagaatattcctaccttaagatctttatrttccttttccattccatggaatgcttttcctctagatattggtataaatttttcctttgtcttctttgcatcttgattctttaatcttactctttaaaattgcaactctcagcactcctgccctgcttagtttgtttttattgcactcagcaccttatacattgcatcatttattttcccaactagaatgtaagctccctcagggtaaacagcctggcctgtcttattcactgttctatttccagaacagtgactgacatttaacaggtgattaatatttattcatggaataaatgaatgaataaaaaaagcactttgtgaaatagaaagcagtataaaagtagagtttattatgtttattcctgatattacaagaaatactattaaaatcactaagcatccatgtaactaaagtagtaagaacataactactcttgtctactatatttgcattcaattattaatagcctacct

SEQ ID NO: 649680 - DNA, 585 bp, Homo sapiens
gtgtccttgaaaaggtgatccaagaacaaaattaattccagtggattaaaaaaagaatgcataaaatatttcaagatgaatcttgataggttcgtcatatggagaatagtctttgtcccctaaaaagcctggggagaaagctataatcttcctaaaacaaagaaatggagtgtattttattgtratgaaaagacacattctacaaaaaatcagaatcatacattactaggtcgagggctttgaggatgaaggggaactgcttttgagaagcagatatgtctggcgcctgatggttttcatgatggaagcaaaataatgtatcatttttctatataatggcagatgaccatcccagataaatgactataagggatagcttgatttaccctttccacaatgtatgtatatttcaaaacaacatgtggtacatgataaatatatacaatttttattatcaattaaaaataaatttaaaaatgtttagaaaactaatgataaggaaaaaaatcttagaacagtatcattggcctgtcaatagtcaatggaagtattgcctaagtttctttccaaaatattcaggacaac

SEQ ID NO: 649681 - DNA, 540 bp, Homo sapiens
ctttccaccttctgcctgcctttattctggccttgctggaagcctattagattgtgcccacccagattgagggtgggtctacctcttccagtccactgactgaaatgttaatctccttgggcagcaccttcacagacacacccaggaacaatactttgcatccttcaacttgattaagttgacaatattaaccatcacaagatttattatactattccctatttttaaatatgtttcagtttgttctatagtaaagtgaggaaaaaagctgctcactatcactcagctagtgtattagttacctattgctgcatgacaaattaccccaaagcttagcagcttaaaacactgcacttttattatcacactttctgtggatcagaaatctgggctcagccggttcagrgtctctcacaggctgcaatcagggtcctggctggggctgcattcatctccaggttgagttggggtggggaggatcagcttgtaaactcatgcatgtcagggcctccctggctgttgtccagagatatcagttct

SEQ ID NO: 649682 - DNA, 562 bp, Homo sapiens
tccactgcatgaatacgctgacctcaaaactttcaactcattgaagcccatttccatctgtaaatcaccccgtcttcacttcccactttatccatctttgcttgcttattacataactttagtcaatctattttaaaataaytccaaatcatttgttgcttactttctttccatttcacttaccttgaaaaatgttaattctgacagaaacaacccactttctcttgtccacacctgagcagctgggcataggaggaaaacatagaagtaggaacatagatatagctataaaataatgaacactgtcttaggtcaagcttcctggaaactgattctgagctggagatttgtgtgtaggaggattgttggagaatggtcaccggaatatctcaaagagagagagaaaggcaggagtgagcagagggagaatttgacctatgacacagttgcagcaaaggccttgccaacctcacaagaagctctggaaccacgatggctcttcagagttgtcactgattcaggcaagagggctgggcctttgaggatatgggatgcctctggg

SEQ ID NO: 649683 - DNA, 570 bp, Homo sapiens
aatgagatctttcatcatgataaggatataacagtcattaatgtttctgttataaatatcatagtattgaaaatttaaaaatgactttggaacacatgaataatcccatcacagagaaagggaagcyttaacatagcgctctcagtcttttaatagatcaaaatgactgagataaatggggatagtaatgattgaataatataacaagcaagattaattttacatattgtatatcaaaatgtgtcacctgaggaaatacacttatttcaaatagtcatgacatgtttacaaaaaattgttcatagtcaaggtcacaaaatctataataaattcttaaaagtagatttgtatgatcatatctttgaattgccaagttgtaaaggtaaactcgaatctcaattgcttttataaaataagaaacagtaaaaataaaaaataaagaatccaagaattaagaaaatagaaaaaaattaaaaatcagtagaaaaacaagaagttatacatggtaacagtagcatgggaattaatgagttagaaaatgaagaagtaatggaaattggaaataaaaat

SEQ ID NO: 649684 - DNA, 570 bp, Homo sapiens
aatgagatctttcatcatgataaggatataacagtcattaatgtttctgttataaatatcatagtattgaaaatttaaaaatgactttggaacacatgaataatcccatcacagagaaagggaagccttaacatagcgctctcagtcttttaatagatcaaaatgactgagataaatggggatagtaatgattgaataatataacaagmaagattaattttacatattgtatatcaaaatgtgtcacctgaggaaatacacttatttcaaatagtcatgacatgtttacaaaaaattgttcatagtcaaggtcacaaaatctataataaattcttaaaagtagatttgtatgatcatatctttgaattgccaagttgtaaaggtaaactcgaatctcaattgcttttataaaataagaaacagtaaaaataaaaaataaagaatccaagaattaagaaaatagaaaaaaattaaaaatcagtagaaaaacaagaagttatacatggtaacagtagcatgggaattaatgagttagaaaatgaagaagtaatggaaattggaaataaaaat

SEQ ID NO: 649685 - DNA, 505 bp, Homo sapiens
acaatttgggattgcagttttaacttgctgttaactgacctgaatgcccgtgtgagacccagcaaaagaaggttctacaggtggtccagtgtgtagggcaagctcctctgctgcttggcttttagaatataactgattcaaaagtagtcacaatgtttgtggcagatctgggtgctatattgggtctttccacagaatcacagcagtgattgtaaattgggataatgtcacagccatgctatttttgctcaactatttttcgctattgctattacccatattaaagaccaaaatatgcgacatattatagatcaacaggcaacaaagatattctctatttgccccactaaatccttaagttaaacattcctagacaggtccaccatgaaatgtgagtggtctttaggagattaagaccctgtacatcctaagaatacaagtaaattgcaatactaggtggtttacactactaacgcatttrtatcttacttacattgaagcctca

SEQ ID NO: 649686 - DNA, 470 bp, Homo sapiens
tacatttggagtaattctatagcagggcaaaggagatggatattctagaaatactaataatttggcttgaaagtcaagttgaaattcacttaatgatatttgagaaacgtattttacctagatataggtgagacataaataacatgatgcctagtataattaaaacactgaatatattttctttgtagactatatgtacacagaaaagtaaggtagtaagtcagttaycctggttatttatgttaaataaggactttgcttggtttggactattggaacaatttctagttttgaatgcaaatataattctctattttctatttcatttttgaagtaactttttactaagaaaacaatgaaaccttaatagattgacccactctgctatgcaaccttttaatacctatagtaaagccagtgaatttgaattgaaacaattggtaactaaggcataaaactcattttatata

SEQ ID NO: 649687 - DNA, 579 bp, Homo sapiens
tgaattagaatgatgaataatggctaatattctttgagttctccttaaatggtagatattgttttaagggcttcayatgtattaactcaattattacaacaatcttataaaataacattatgactactttcattttacagatgtggcacaatggggttagtgacttgccccaggtcacacagtcagcgtgatcagtagttcaggcagtctgatctcagagcctatgtccttgtcagtatgctgcctctctgcagtagcatccgtttagtgaatacatagtatgtgccaggtcaatgctgagaactttgtgtatcaaattgtatttcatataatctaacctctttaatatctctataaagaatgactattgtactcattttacacataagtaaaaggaggcttatagaaatgaggtcatctgcttaattcttgttatttttttggtgctgctcactattctgttgccttatttggtatctttgctgtttctgatgcttctgttggggaggctcccaaaattaagccaccatcatgtatatctctttgctcatttggtcttagttatattgactttttctc

SEQ ID NO: 649688 - DNA, 579 bp, Homo sapiens
tgaattagaatgatgaataatggctaatattctttgagttctccttaaatggtagatattgttttaagggcttcacatgtattaactcaattattacaacaatcttataaaataacattatgactactttcattttacagatgtggcacaatggggttagtgacttgccccaggtcacacagtcagcgtgatcagtagttcaggcagtctgatctcagagcctatgtccttgtcagtatgctgcctctctgcagtagcatccgtttagtgaatacatagtatgtgccaggtcaatgctgagaactttgtgtatcaaattgtatttcatataatctaacctctttaatatctctataaagaatgactattgtactcattttacacataagtaaaaggaggcttatagaaatgaggtcatctgcttaattcttgttatttttttggtgctgctcactattctgttgccttatttggtatctttgctgtttctgrtgcttctgttggggaggctcccaaaattaagccaccatcatgtatatctctttgctcatttggtcttagttatattgactttttctc

SEQ ID NO: 649689 - DNA, 577 bp, Homo sapiens
tgatttccttttctttggatacatacccagcagtatgattactggatcatatggtagttctgttggtactttcttcaggacagcaccctccctgccgttttcmataataatggtactaatttacatccccaccaacatggtaaaagagatcccttttcaccacattctctccatcatttattacattttgtcttttagataagagcgattcttgctgggataaaatgctatcattgcatttccctaatgactagtaatgctgagtatttaaaaacaaaatttgtttgacaatttgtagattttcttttttaaaaagtctgtttttatcaacattcaccaatttttaaataatatttatctgttttcctgttgaattgagttccctatatattgtggatattaatcgctggtcaggttactagtttgacaacatctcctctcattctataggttgtctttacactgcggtggtagattttttttatgtgcagaacattatccgtttataaccacaattgtttgtttttgttttagtgcatctgcttttgaggtcttatctatgataaaattgtttccc

SEQ ID NO: 649690 - DNA, 577 bp, Homo sapiens
tgatttccttttctttggatacatacccagcagtatgattactggatcatatggtagttctgttggtactttcttcaggacagcaccctccctgccgttttccataataatggtactaatttacatccccaccaacatggtaaaagagatcccttttcaccacattctctccatcatttattacattttgtcttttagataagagcgattcttgctgggataaaatgctatcattgcatttccctaatgactagtaatgctgagtatttaaaaacaaaatttgtttgacaatttgtagattttcttttttaaaaagtctgtttttatcaacattcaccaatttttaaataatatttatctgttttcctgttgaattgagttccctatatattgtggatattaatcgctggtcaggttactagtttgacaacatctcctctcattctataggttgtctttacactgcggtggtagattttttttatgtgcagaacattatcmgtttataaccacaattgtttgtttttgttttagtgcatctgcttttgaggtcttatctatgataaaattgtttccc

SEQ ID NO: 649691 - DNA, 556 bp, Homo sapiens
actatgtttttaattagttgaataaaatttgcatagcttgcatgttgaagatgacaactctgaacctagtgatccaattctcaaaaataaacaatcaagggttaaaatataaggaggcataacaggttgcaaaaaagaaaccatgaagtttataagcagaaaaatgaaaaaaatgactgtcatatgctttctctctaagaaaaaccaacggagtctcaagagaagcctgcagtgcagataattgtatgcatggtagtttagaaagggaataacgaggctagrctgaggttatttttctgttctatcaggcagatagagactaacggagtagtcagtgaacaatgggtaggaaccagcaggtttgtaaattatgcctggatgcctcacaagcccgcctctgacaggaaacgacaaatgctcatcgctgagttacttattactgtggaaaaatcactcatttgtttgacattgctctcccaccaagggggccttctgttgttatatccctttacaatttaaaaatttatagtgaaattaaattctattacttattgtg

SEQ ID NO: 649692 - DNA, 588 bp, Homo sapiens
ttttaacagttcacaacactgtactctattcataaaaccacacatcttaaaattactgacaggctcatagactatgctggctacattagattaatttcataggagcatatttagtcttatctacaaaattagaatgttcacaggggtaaacactgctttgaagttcaagagtgtgaatgaatagaatcttttcctaagagaaaataaggaaattgacagcattcagagaactatatttgttcctaaaataagtctattcattcagtcacagccatgtaaattggcagctgctctgacttagagaacaagattcatgctttacatgacatttatcttagcccctgtggacagagttcacatgagtaagcctatattgaccatggccctttttaaagatttagagtatctatgaaatgaaatgcttacagcaaaaaatgtttttctaaacagaaattttagttatatgtttwtctaaacagaaattttagttatatgtttatcaaaataaaaatcattaaaacttattataacttctgtagtatgttgatttggtgtcccccaaccccccaaaaagatatttctacctgg

SEQ ID NO: 649693 - DNA, 412 bp, Homo sapiens
aaaagcagaatggttgtatgggtactcaccacttaggtacacagctgaaagcacgctgctcctgaagattgtttgaagcattgaataaaaattaattgccgaatgacgggatgcgacagtgacagggtcattaatttctctttgaatgaggcttgagaatagctgacagaagccatcaatacttgacggattarcaggcatagtgttcttcaggacgataccaaattttgactacagttttcttattttcattatatatttctctatagcaagcattagcacctgtaactgcctgtcaattatgagtccctcatacttggcatccattttgtctaacacccataagccactgatgatagtagcaaatgcctctgctagtttccttgttgtgagctttcttggtgcctcaggt

SEQ ID NO: 649694 - DNA, 575 bp, Homo sapiens
tggtggaggatgaagatcccaattggaactctagggtgaaaagatttcagggatggggcgttcttgctgcactgattcagcaaagattttgctaaaactgagttttacaaggaagtgcacagatgagttgaggagacgtttcagaagcctgactaaaatttggctaagcaaagaatctttgttaatagctgcaaggtcccttgaggcctaaatttggaaatagtatactgcttttaatgcatcgtatacttgttgtcagaccaagttaggccaatcaatgagcagtgaagttacattgcagaattatctgtgtgcagaaatggaagaaagtattgtgaataatttttgcaaacaatgtattattatctatcttagggacaaaataattcttgtmctttgcatatgtgaaatgtgcttttgccccttctctcaaagttttatcctattagccgttcaggcttgaactccaggacctcatgatctaaatcatgtctagaattagatgacacacaaaggtatagctcttgaagtatatctcttcttgatctagagatctctgaacccaaaagaaaagt

SEQ ID NO: 649695 - DNA, 575 bp, Homo sapiens
ccacacattatattagaactatattcgaagtggtcgggcttgggaccactttaggaggccaaggtgagtggatcacctgaagtcaggagttcaagaccagcctggccaatatggtgaaaccccatctctactaaaaatacaaaaatgagctaggcgtggttgtgggcacctgtaatcccagctacttggaagcctgagacaggagaatygcttgaacccaggaggcggagggaggttgtggagatcatgccactgcactccagcctggatgacaatgagactctgtctcaaaaaaaaaaaaaaaaagaactgtattcaaagtgaccatatctctcaatgtacccattttatccacagcaaagccatatgtgctcctgctccatgtgttgctgactttttggggatcatatagctctttgctgatctgattaaaactgtggataatcactctggaaaaatacacatatacaggtaaaatttttgtgtacaattttagagtgtccataaattgctgaaacccatctagggagaaaaacccctatttgaatgattgcccctgtggtttgtaagaattc

SEQ ID NO: 649696 - DNA, 583 bp, Homo sapiens
taattatattaggaggtccgtcattcagtgctcttgtaaaactgtcttgcccttgttctaattgcgtattgatcaccgaggttcttggcatcgggcttttctttgatgtgtgcatgatcagaacacactaagagacagcctgtgtgctccttcctgtcctcgtgggcatttcctaaagcttcagccctaagctggtatatgtttctctgttacatcaactgccaaggcaattactttacatctgatatttaatggaaaagcttctgaggacagggctatactcacatacctccacacctggcacagtagatgagctcactatctgttgaataagttcgtgacagarcagaagttctactgcagccacaaaggcctattcacagtctttaagcctgatgaagttctgaataagtaaacccttagctacatcaggcagtttatgaatggtgttttttgttactgtcatttgtaatagcttttgacctatgtgtttgtattagtccgttttcacactgctataacgaactacccgagactgggcaatttatgaagaaagaggtttaactgattgacagttccacag

SEQ ID NO: 649697 - DNA, 581 bp, Homo sapiens
tttaatttcaagttatctatgttattaatcatmctagtcaatgtggcttaaattgttgttctaaaatcaataataaaagtacccaggttacagtgctcaacaagccagatgtcgaccaggcacctcggagtactttcaattacaggggtgacatttttattcatcaatattattccatgatgccccttctgagcatgaagcagtcaaatagatatgaccagatttaccatgattgagggactgataaatttaaaggaggtgctgaaaccaacccaattgtcttatagaactgattttacagtcttaaagcttgcaacttgcatgtgtcttatctcagttccttcctcagaccactgatcctcaggcctcccaggtagtatcaagggactaaaactcaccagatccactatatccagacaaggagaagccagacccttcatccctcatgatttacttgctcctccctaattcctgtttacccacgtgtagttacattccttccctactatataatattgagctgtggattaaccatatttgggttaaaccaatctctctggcatacctttcaggggaaatag

SEQ ID NO: 649698 - DNA, 581 bp, Homo sapiens
tttaatttcaagttatctatgttattaatcatactagtcaatgtggcttaaattgttgttctaaaatcaataataaaagtacccaggttacagtgctcaacaagccagatgtcgaccaggcacctcggagtactttcaattacaggggtgacatttttattcatcaatattattccatgatgccccttctgagcatgaagcagtcaaatagatatgaccagatttaccatgattgagggactgataaatttaaaggaggtgctgaaaccaacccaattgtcttatagaactgattttacagtcttaaagcttgcaacttgcatgtgtcttatctcagttccttcctcagaccactgatcctcaggcctcccaggtagtatcaagggactaaaactcaccagatccactatatccagacaaggagaagccagacccttcatccctcatgatttacttrctcctccctaattcctgtttacccacgtgtagttacattccttccctactatataatattgagctgtggattaaccatatttgggttaaaccaatctctctggcatacctttcaggggaaatag

SEQ ID NO: 649699 - DNA, 563 bp, Homo sapiens
ccttttcacaagtctcttgaaggagtcaagagaactattctgtttcaattttattcccaacttgagactgaattacactaatacattttttgaggctacttttcatcccacttgggataaatgactgactacaaagtctttgtatactgaagttggattcagagactgctgcttctgtgttttaggaacacttttaacctacttgtttgcttctggaaagaactcagtgtggtgaatgggtgagtggtccccattgtgagacccatgaaagtatttatgcaattcaatggacctgtatttaataagcatattcataaactagtaaacagtaatgaatagaaagcaattagggcagccctggactcctatagctcctttagctttccagggagcacataggaaattttaaaaaatgaactaatttttcatctaccctatgctktgggaacatgtgctgggctctgggataccaaggacttatgccaaatcctcattttttcttctttacctgatattaagggtatacttgtcttagaaacaaggaaaataaatgacaatttatt

SEQ ID NO: 649700 - DNA, 609 bp, Homo sapiens
gaacgattacagattatgtggtatcactttggcgactgctactcatgatgtttattcacatttaatagaataaatctacagacatttgattctaagaaaagtaagctaatgaagcatgtaatatataactgacgacttttctcaatgtaaacataggatgtagatgtcaaactgtcatgaatattagaagaaatgcaaatgatgttatgcaaattttcccacaagatgctcactcattgtaatgtatcttttgattatgtgtctgagcatctaatrtctgtagatgatactctaaagatatgtgtcacttttcaacttttaatttttacaatacatatgtctgcattggaatagaagcttctgccatcacacctacatgtgtaagtgatagcatctgtgactctatatgctatcttctctctttttattatagatgacctgtctgtctaaaagtctcattattctttcctctatgatcatcagcataaaaggatgatatttatccagtattttaaaaactttctttggaccccaatttttcccctggctacatcctgatttctttcctttccaagaaaaaacaagtcttagaagtctagctgaatttca

SEQ ID NO: 649701 - DNA, 617 bp, Homo sapiens
tgttgcattggagatacacgtgaactgtcatttccatattcagagcatgggattaagagaaggacccagagaggtcagttaatctacatttacagagctcttggagacagcacatatctaagccggctcccatagaggatcatctatttgcttttaaagactctcctgaggttttcaaaggaacactggcagatgcaaagcctgttgactcaggatgcctacatcctttgaaaattacaccccccacaacatttaacttagccatagaaatcatttaaaatacattatccctgaatttttctcccatctcccttttgtaaatagtgagaaggaaaggggagtatctcagagagcacaagaaaaagagcaaagggctcttttgggatttttctctttccttgacaagccgctgtaagcaaggtgagggccaggttataagattggcagcacaatccagatttctctctggataggaacattgacagttgtttyctaaactcttggaaacagcagttgatatcaggccttcgtgacattctcaggatgtttttccataatgggaaaatcatttgtgattctgtgatataatttcaccttttacagtagaattaaacctt

SEQ ID NO: 649702 - DNA, 564 bp, Homo sapiens
gtattagtttgcctcttaatgtataacaatattttygatttaacttgattttccccctctaaaaagcttgttatttaattcctttaggattagagttctgacaggataaaaacattcttgtctttctcttgcttttgtttttatatattagcataattttctatttcatacctctttatgtctgaaggaatataccacattatcattacaaaaacctcctaataaagttgaattgtgctttcaagtggagacagacctgagattatgaataaaagcaatcctctccagcaaggaagtactttgaatagatttcagctcagtcagatagcttgagagtaataagtagcagtgggactggaagccacattaaaaatttctcactagttcagaggaagatgatgaaaattaccttcaggagtagctttaggaacacgactgaggtagaaatcactattttgataatattttggatggtgatttactccctacaaaacactttgctacaaattgtaccatgtaacattcacacaaccatgtcagaaatgtagggcatatgcaattact

SEQ ID NO: 649703 - DNA, 564 bp, Homo sapiens
gtattagtttgcctcttaatgtataacaatattttcgatttaacttgattttccccctctaaaaagcttgttatttaattcctttaggattagagttctgacaggataaaaacattcttgtctttctcttgcttttgtttttatatattagcataattttctatttcatacctctttatgtctgaaggaatataccacattatcattacaaaaacctcctaataaagttgaattgtgctttcaagtggagacagacctgagattatgaataaaagcaatcctctccagcaaggaagtactttgaatagatttcagctcagtcagatagcttgagagtaataagtagcagtgggactggaagccacattaaaaatttctcactagttcagaggaagatgatgaaaattaccttcaggagtagctttaggaacaygactgaggtagaaatcactattttgataatattttggatggtgatttactccctacaaaacactttgctacaaattgtaccatgtaacattcacacaaccatgtcagaaatgtagggcatatgcaattact

SEQ ID NO: 649704 - DNA, 562 bp, Homo sapiens
aaatctgtaaattagcactaagacaactgttacaagtataaggtgtttgaaatttctctcaatgactttttatggtagttttggctgctcaggaacctccttatttgcttcctcatttatactctgttctagataaatgagattgcgagatatttaacttcattgagtaatgaaattatattttaaatttgggacacaggattaayaacaggaaacatcagacaaatgtaaaatgataccatctgaattgataatattccaataacattcaatctaaattcatgcattcacttattcttccatgttagacaaacaatttttgaatgaatgaattcaaacatcttcccttcacgttctaggcagaccacacagagccctgttgttttctgtttttagtcaaaaataaataaataaataagattatggtgaaaaaaaaccatgctatcagttcacaagggtaaaaagtaaaagaggaaaagccctgctcccctgttttcttatttccatttgtcaaaattaaatactactaacacagttatttttaaaaagattttcacaaata

SEQ ID NO: 649705 - DNA, 648 bp, Homo sapiens
gctaatttaaagtcctaaggaggggattaagagcctattatctgaaggtatctcttttatcctgttggtacatattccctattgcattttgcagaccagggaaacattaaatatctaaaatcctaaccctggtaggcaagaacctatttcattgtagagggtagagctgagatccatgttgtaattaactgagggttttcayagaatctcagaggcacaagttgatacttagtaaatagtccatgtagagtttgtgtatccttttactaggtaaaggatttgtaatattgctctgcaatttttatttttttccccaagccattcatttgctgagagcaataatctttgtgtggcttgatttaactctgtatattctattgtcagtagcttgaggtatttgggtacattcttttagatgcacacatttgcatgaaaattgtattaaccactagtcattgcacacatttgaaataaaatgaaactcaaaaaagcaaaaaataaaatgactttatttcttatatgaaggaaaatggcatcctctaaaatgtttatatggttttgtggccttctttctagctataagaacacactataatttatttctcaagcaagtaacacacatctgtatacattttagcataagaaagt

SEQ ID NO: 649706 - DNA, 549 bp, Homo sapiens
atattaaggatagggactgcattgacagcattgtgaagaattaaaagtgcctgataataatctaggaccttaaaccattaaagaggaaagaaaacagatggaatgatagagagatacagaatatacagaactaagaacacacagaacatacaatatgtggcctggttagctggctcttgtttcaagtgtatttgaaggatgatgtmtacttcatgctgtcatctgcaggtcctggataaaaaccatcttgtcattttgtatagtttggctctttgtccccatgcaaatctcatctcaaattctaatccccatgtatcaagggagggacacggtgggaggtgaccagattatggggacagtttcctccatgctgttctgtgatagtgagtaagttctcacaagaactgatggatttaaaagtgtttggcagttcccccttcaccctccctctctcctgccactatgtaagacatggcttgcttccccttcaccttctgcaatgattataagtttcctgaggcctccccagccatgtgaaactgtgagtca

SEQ ID NO: 649707 - DNA, 519 bp, Homo sapiens
ctaacatggtgaaaccccatttctattaaaaatacaaaaaattagccaggcayggtggtgggtgcctgtagtcccagctactcatgaggctgaagcaggagaacagcatgaacccgggaagtggagcttgcagtgagccaagattgtgccattgcactccagcatgggtgacagagtgagactctgtctcaaaaaaaaaaataagaataatttatataaagtgaaacagcactcactctctatttccaagaatgccagattgttggtaaccatgacatttattttgtatttttcagcatagtctctgccttaatttgaactatacatcaagtggcacatactgtgttgtattaaatatgtttctttaattaaaatgtatgctgattctgatgtaattaagaggtagtttttttctcatgagctacctatctttggacccaactgaaactaactttgaaatagggcacagtattcacagatactcacataaactaagcctcttttgctctatttcaatag

SEQ ID NO: 649708 - DNA, 519 bp, Homo sapiens
ctaacatggtgaaaccccatttctattaaaaatacaaaaaattagccaggcacggtggtgggtgcctgtagtcccagctactcatgaggctgaagcaggagaacagcatgaacccgggaagtggagcttgcagtgagccragattgtgccattgcactccagcatgggtgacagagtgagactctgtctcaaaaaaaaaaataagaataatttatataaagtgaaacagcactcactctctatttccaagaatgccagattgttggtaaccatgacatttattttgtatttttcagcatagtctctgccttaatttgaactatacatcaagtggcacatactgtgttgtattaaatatgtttctttaattaaaatgtatgctgattctgatgtaattaagaggtagtttttttctcatgagctacctatctttggacccaactgaaactaactttgaaatagggcacagtattcacagatactcacataaactaagcctcttttgctctatttcaatag

SEQ ID NO: 649709 - DNA, 519 bp, Homo sapiens
ctaacatggtgaaaccccatttctattaaaaatacaaaaaattagccaggcacggtggtgggtgcctgtagtcccagctactcatgaggctgaagcaggagaacagcatgaacccgggaagtggagcttgcagtgagccaagattgtgccattgcactccagcatgggtgacagagtragactctgtctcaaaaaaaaaaataagaataatttatataaagtgaaacagcactcactctctatttccaagaatgccagattgttggtaaccatgacatttattttgtatttttcagcatagtctctgccttaatttgaactatacatcaagtggcacatactgtgttgtattaaatatgtttctttaattaaaatgtatgctgattctgatgtaattaagaggtagtttttttctcatgagctacctatctttggacccaactgaaactaactttgaaatagggcacagtattcacagatactcacataaactaagcctcttttgctctatttcaatag

SEQ ID NO: 649710 - DNA, 560 bp, Homo sapiens
atggggaaagacatataatatatttttccatgtgtaaaataaatttattattttagtaataatgaggtaacacccttgcttggtcacagtctagtagtacaacatgaggcccctaagaccatgtctgtaggaaacaaagaggtatcttatcaggcagtgaaaaagaagagaaagccaagagtaaatgttgcctgaggacccaaaatggtgtcctttcctctctgatttattagtaaacttttattttcctacatcttgagtgcttaaaaatagttttccaaatgaaaaaaagagtgagagagagaaagagataaaagaaaaaggaaggaaaaggaaagtaggaaggagaaagggaaagaaggaaggarggaggaggattaagatggcctcaacattcccctcaacttgactaaactttagataggcctcttcctgtctataggtcccagatctccttttcttacaggatttacttcagaaaacttgcagttgtgaataatttctctgcacctttgagatgtaaatcttttagaacccaggaatgactttcacaagaacct

SEQ ID NO: 649711 - DNA, 578 bp, Homo sapiens
ttctatacctcctgtcttgattccagatacttgataagctgggaatttacaatttgatcagaattcttaaatgattagtttttttcattacataaattttctgttatggatattatttaacatttgtattcactcttgagctcacaactttactttttgcttcttaacatggctatcaccagaataattctggtgtggtgcagggctgagcataccagaagagccaattagtactcctcatgatatttaatgaaaaaagtccgttacaaggcactggaagacacatctctgcaggcagtctcctacatttctcctaataatttgtgtttctaactggagagaagagactatagtagatgcttttatttcagtatttcagcttccctaattgtggtgtcagaaagaatcttggaggcacagagataaattgcagactaatgtraagggaagctgattaattcttgaacattcaataagttgagtttgcagctagatttttatatgctacaaaagtggaaagtggtaggctgattttcatgagcaaatccgtgtctctatctcaaactcaaggagccttg

SEQ ID NO: 649712 - DNA, 507 bp, Homo sapiens
acgtagcatccaggcatttgcaactttccaattgccgggctccacttgcggtccgcgctgctggttggagcatactgtaaaggaaatataaacagtttaaattaagtaccagagctaaatctctcacatgactttctgaaaagatgaggaatgaaattatcagcacaattagaagtcttgagtctgctgggtcaggggacaggagaggaattcttggcacaaaagaacaggaagcacagcaactcggccatatatggaggaggggtgagcctttcaagcaaaattactatgacctcaaagcttctgctactcagacmgctgtattgaattctgttcaatgccaaagtagtaccttaagccagtttatctggtttggctttgaagtggcaataaaaaccaggagcctcctgacctgggtcatttctaaaaggagttgttttctttcagcttttccaattttaagagcagttacacttacaggtgtgtgtgtgaaagagtgtggtaaag

SEQ ID NO: 649713 - DNA, 539 bp, Homo sapiens
ttaataaattcagaacttttaaaatattaaacaatttgagggaatggcacagctttcatgacatgaccttcccatcccctagaagccatacctgataaatcccaggttctattttcctaggcaatccctagcttgggrcatcctagtaaaagcagttaagagttaatgtgtttcttactagcaaataacgttagttttttactcagcagttaagttgacagggagattttaaggagtcacctatcttcttttctttcctccagtactgtttctaccatccaccattctaccataaagggagtgaaaagatctcaggccatcgactttaacaccttcctctcagctgcttaatgctagaattcactactggggggaaagaaagtgttagtttacctgtagggtataatttacaaactagtttaatgcaacaaaaataaaaaatcagggggattaggtgaaagtaaatgactcataacattattagaagtctccattttaaaattaaaactaggttctcaagtaaaataatgaaaaaaagt

SEQ ID NO: 649714 - DNA, 566 bp, Homo sapiens
ccttttctccatttttctgttaaattttttttgttctgtacaagattgtccttttatgtttgccagtatttaagttgtttgggggaaatatttatatctccaggatgtttttcatttcaagaaaagtttagtgtacctcaactggatctgaggctggaatctaggaaaaacagagaataatccagggacttactttcaccagcttaaaaatactataaaatcatcctctctattctccaacatctgtacatagagtagaggaacagcaaggagcactgggaaaagcctgtgtagccacatgcagcctcctactcaaagctgcctttggtcttcttctctgtatctcccaagttaagcagcttatatttaggaggaaaaaaaaaaaaaaaagaaaaatgaaagatgatctgctcaccactgattamgttaccaatacttctcatcttttgggtactgtgaggattaatagtatgtatctgtatagctggcccacattgcccagataatctggctaagcattattctggatgtttctgaaagggtgattttgggtaagattacattta

SEQ ID NO: 649715 - DNA, 567 bp, Homo sapiens
gtttaaatatatctgttttgagatcactcttttgtttaagattctgtaaaagttaaaaaagcctacatacactcacaggagaagaaaaatcaatcatccctcttggaagggatagaaaaggctgaaaaagcaacatctgttagtgatgtcacttgcttcaacacttgaggctcagagagcatgggcttagcactgagaaaataatctgttgtayctgaatcttctacatccttgcccactgtttttattaagctaagtctcttcctaatgacgacaatatgaccataaattatatagccatggaaaacgtataagctcaaatgcatgaacttttgatacccgcaaccctccaatgaggtagctattaccttgattttatagataaggaaacagaggaacagaaaggtttcttgacttgtccaaggtcacacagctaagcggcaaggctgagactgaaatgcaggcattctgcctcccactgtttaatttacagatcccacgagtgaagtcacttccctcccatctgttcatattcttcaggggcttacttcatgtctaccattgcct

SEQ ID NO: 649716 - DNA, 613 bp, Homo sapiens
atcaaatgagaatttttatggaaaattccaattgttctacaaataggatgtttgggaacttcaggtgttcgacgtctgagcattttgttgttgtcgttactgtttttaagtaggaccatggttctccatgtgcaaggaaagctgcctcttcatgccaccttatcttactgattctatggtgactcagcaagatcagttttagcaaggtagacacttggtagttattatccacggcttctgaatttgcttgggagttcaactttgaggcttctgagtggcccccagctgatttagcttccataaccagatcagaatttcaacctgagtggtatgccattagtttgataatgccttaaatttgcatgtttggtctttgatgacagtcctgtgagaaaagaccctttcccccatcccccagtatttggcttatatgattgatcttttgtatctcttccgaagtaagtaaaccaaactatcacatattcacattcctacmtgggtaagtttgtggtttgctaacatatgatctcatctgagatttttaaatatcagaacaatatcatggttttggtgttggttgattaaatccaattaattaataagtgtgggcatg

SEQ ID NO: 649717 - DNA, 577 bp, Homo sapiens
agtggcattccacaacccagcataaacaacaaaggtaccttgtcatattctttcttacttgtgtcacttccctgttattaagtcaatgacttatactcaaagcgatgacatagaaagaaaaagatagggcaatttgtacttccttttcttttcagttctttcttactcatcaataagttgaaagcaaagaattggtagaatgtgtgtgtatcacaaaatgaaatcaaacctggtgaatcagtttcattcaatgtttccattactaagaacaaaattccactattctgttgagaaaaaaaatatagtcacaaaagaatcccaccattctgttgaraacaaaatatacatgcaagtatgaactatgaaatatgaattctatgcttttgttaattttgcctacaagttaaatgttcctatttaaaataccattgtacaatacaaagatgataattattttaaatttaaatttttctttacttaaaaagtcattaaatagcaacaaaaacactataagaagtcaaaagtgagacctcagatgaaaaaaactctgttaatacccataatggcactttatttt

SEQ ID NO: 649718 - DNA, 574 bp, Homo sapiens
atggaacagaataggaatcccagagataaatctatgtatacatgatcaactgcatttcaaaaaggatgccaaaaatacacaatggggaaagaattgtctctttaataagcggtgttgggaaaactgaatatccatatgccaagaatgaaattggaatcttactttacaccatccacaaaaatcaactcaaaactgattacagatttaaacgtaagacctgacgctataagacatctagaagaaacacaagggaaaagcctcacracttggtcttggcaatgattttcatagataaaacaccaaaagcacaggcaataaaagcaaaaaatagacagatggaattatgtcaaatgaagaagcttctgcacagctaaggaaacaacagagtaaagtgtcaacccgtggaatgagagaaaatgtttgctaatcatatatttgataatgggttaatctccgagatatataaggaactcctacaactcaatagcaaaacaaatgtaataacccaattaaaaaatgggataaggacctaactgatatttctccaaataagacatataaatggccaacaggt

SEQ ID NO: 649719 - DNA, 574 bp, Homo sapiens
atggaacagaataggaatcccagagataaatctatgtatacatgatcaactgcatttcaaaaaggatgccaaaaatacacaatggggaaagaattgtctctttaataagcggtgttgggaaaactgaatatccatatgccaagaatgaaattggaatcttactttacaccatccacaaaaatcaactcaaaactgattacagatttaaacgtaagacctgacgctataagacatctagaagaaacacaagggaaaagcctcacgacttggtcttggcaatgattttcatagataaaacaccaaaagcacaggcaataaaagcaaaaaatagacagatggaattatgtcaaatgaagaagcttctgcacagctaaggaaacaacagagtaaagtgtcaaccygtggaatgagagaaaatgtttgctaatcatatatttgataatgggttaatctccgagatatataaggaactcctacaactcaatagcaaaacaaatgtaataacccaattaaaaaatgggataaggacctaactgatatttctccaaataagacatataaatggccaacaggt

SEQ ID NO: 649720 - DNA, 605 bp, Homo sapiens
gcaatctataaaatgaaggataggtctaaatttttttcttaaaytccttccatgctaatattgcctgtgagtcacaaggaatcaaaagtttgttaaaaatgtcaattcaggctgggtgcagtggctcacacctgtaatcccagcactttgagaggctgaggtgggtggatcacttgagtctagaagttcaagaccagcctgggaaacatagtggacactctccctcctaaacccccgctcctctacacacacacacacaaattagccaggcatggtagtgcacacctgtggtcctagctactcaggaagctgaggagggaagatcacttgagcctgggaggttgaggctacaatgagccatgattgcatcacggaaaattcactttaatttactggcgcatcctacaaaatcttgggaatttagtgttaattcaaattataaccagttttaactaaacttgtgatttaactagaaagttctcctctgaaatggagtcatatgacaatgcaaacatcaaattatctgttccgttgtcattacaattattttgatcaaaaccataaaaattcattcaaaaaggcctcgactatttatgctgagaatt

SEQ ID NO: 649721 - DNA, 491 bp, Homo sapiens
tagtgtggtattgcatgatcatactgctgaaggaaatttttggactgatctatatgctaatatgtatttgagaaaattatagraaatttaatgttttctttaaattaccttcagaagaaacctcaacacaaaatgttccctcccggacgtccatcaaattttcagtcttgtcttctgttctatcaagtctgcatctatcatcaagacccaggaagctccacctgctcttactcaactactaaagtcctctaaacaaacaaggaagaaggtcctgaagtttcattcatgggataaagaaaaaattcttcctattctaggttgattttgctagcgccactgagtggtaatagcttaaaaaattgtttctgggctgtcaattacaaatgaagcttagtgagaacttttgtttaaaagttgtacattccaatgttaatatggtgcttcttagaaaagcagctgccttttatggattttgaaaagcaacttagttt

SEQ ID NO: 649722 - DNA, 579 bp, Homo sapiens
tgtttttcctccttgtctatacaaggattcaaattgtacaaccatgggacaactctcaatctcatatctaagctcaatctgaaatattaaaggtatttagagaacttttatttttagctgttacatcatatgtttggaaagtaaggaaggcatcaaacagaaacaaaaacttaaatccaaaacaagcaaacaaaaagcagaaacaaaaaaaggtttaagcactatgttgacactgaggcaaacaataaaagaacagctagatgatttgaaatgttttcctsttttgaaaatgattcatattttgatcaaattttcaaaatcaatctgactcatatatcacttcctaaagggtatttagcatcattagcaaaaatcattattttgtatacactcttatgataaacattatttttacagtgtttgggttaaaaggaggaggcagaatttatctgcatgtggaaaaaaaatcacctgacacattttgtgtttataaatagcaccgaacacagtaggggaaaatctggaccactacccacagaagacacagtgtgtacttcctatcaaagcattttggtgctg

SEQ ID NO: 649723 - DNA, 619 bp, Homo sapiens
tgtctccagggcatgtcagaggacttcacagtagctcctctcaccacaagcctagaggcctaggagagaaaaatgcttttgtgggctaggtccagggcccccttctgtgtgcagccttagaacttggtgccttgcatcccagccactccagccatggctaaaaggagtgaaggtacagcttaggccattgcttcagagggtacaagccccgagtgttggcagcttccatgtggtgtttgtcctgcagatatgcaaaaagcaagaactgaggtttgtgaatccctgcctagatttcagaggctgtatgaaaatgtctggatgtccaggcagaagttaactgcagggcagtgccctcatggagaacttctactagggcagtgsagaaggaaaatgtgggatcagaggcccacacaatgtcctcactggggaactgcctaatggagttgtgagctgcctaatggagttgtggggaactgcctgtggagttgggtcttctggaccccaaatggtagttccatcaacagcttgcaccatgcacctggaaaagccacagtcactcaatgctagcccatgaaaccagccaggagtggggctgttccctgcaaagccagagaagcag

SEQ ID NO: 649724 - DNA, 553 bp, Homo sapiens
  misc_feature 1, 2, 3, 4, 5, 6, 7, 8, 9, 10, 11, 12, 13, 14, 15, 16, 17,18, 19, 20, 21, 22, 23, 24, 25, 26, 27, 28, 29, 30, 31,32, 33, 34, 35, 36, 37: n = A,T,C or G
nnnnnnnnnnnnnnnnnnnnnnnnnnnnnnnnnnnnnatttatgtttcatatataccttaagatatgtagcctaaaggtaattttatacactatttttacacgtagtcattrgagactaggacacattaggtctgtgccttagcctttcagtctgttcctccatctcaaatacttttagatttgggaacatttcgaattttcgcattagggatgtgcaacctgtattactaaacatcattaaaataaaaccacacgttttaaaagagcaaatctcttaccagttgaaattctcgacgccggtcataggcattctgtatgccgctgtctgcccataatgctcttatagcaggaagatattgtaagaaaacccttgtttccaccattccttgggctgccatgggggcccgggtatcaaacgacatcatcttatctccatgttgttggtttgagttgtctccccagggaatatgaagcttctctcgagcatcaaccagcaccctcatacctttgtttaaaaagaagaaaaaaaatgtatggagaggagtcattaca

SEQ ID NO: 649725 - DNA, 602 bp, Homo sapiens
tatattactgaccagtcattaattattaatgtattgtttcaaacaaataataataatacaagttacaacattatcagcaaatgtgttcatgttgtaaaacaggaatggtatatttaattagttgtaagtaatacaaatgcttgacataaactcttgagacttcagatgtggagatgttttgtgagaagctttgaaatccactggcatacaccattcttttattcaagacaaatatgcgagagaatcagcaggagtccattctgacttctagagagtgccctggagcggtccacaggaaggtgctggaaaaggcagccgcagatagtccaggtacacgattatttcagcctgaaatgcagcagaataatcagactagtgttaaagtattgctacagtgtacatgacctggaaactgtttkatgaaggttgcagagacatcctagacctcctttgataattataaagaaaagatgctttctctagaaaataaggagaagattcaaatacaaggcataatttatttagtcttagagatataaatgacattcctaataagtacttggatgaattgttaagtaactgacattttaccccagaacatt

SEQ ID NO: 649726 - DNA, 564 bp, Homo sapiens
caacctcaaggagctcaaaatataatacaaagacaaatacataaacaatcaattagaagaacgtgtgaagggtacagtaagagaagtgttttcaggatacaatgggcttggcataaacgttaggaagcagagaaaagataaaactactgattattgaccacctgtgtaattttcataccacctttaacaacagcgattattgaatccatttcagagttaaggacaccgagaattagggggctggtgacatttttaaattcagttgtctagccaacagcaaggctaagaaaagcccccgtgtcagtcaaaattcactgcttcaagatcacttagtgcctgcttggcagaaagaagctcagaaccttacatctgaactcagctaaacctcatgtgtttcctctgcagtgacttctgcatctgccaccaggtaattcctgaaaagtccattaacatccataggaaggggcattacatttttttcaagcactctattatgagtattgatattatatcatatttatgccttctcttgccaagygtattaaatttggcacatttactgta

SEQ ID NO: 649727 - DNA, 602 bp, Homo sapiens
gtaacttctttttaacagtacctgaagccacccccactgaatggtagagatctcctggggttccagagcatctgagttcatcaagggtgatggtctctcccagctggctgttaaccagcactctttttctctcctctccatcaactgggacatattcctagagcagagaaatctatttttaagtgcgaygagatatttattgactggcttcattgtctcaaaatacttgccttagcctttccttatgcctgggcaaattctgacaccaaatggttgttttctgcagctaggccttagcatacatcctgcaatgactttcttacaaaaagtggtaaaaacaacttaaagcacagctgtactaagagaaaaaaaaaatgaatagtaatttagcaatagatcaatagcccatcatctctgaatttcattttatagaagagggctgtctttctttgctcagtctatgccacggagttaatttgtgtgaaaacacgcaggtattagactagttattagagagctctgcccaaatgaaataacataataaataattctaaaatataataaaaatggattaacagactgaaaaatgcaatgaaaactct

SEQ ID NO: 649728 - DNA, 581 bp, Homo sapiens
atttgaggcttcttggagtgtgtttgttcctttaagctctcaactcactctttgccaagttccaatctgcttttaattttatatctataaacagatgatcaagtctgatgtttcctacaaccttgtccaacaacccagtattccaacccaagtcacagtggtgaaaagctagacagcagtggaagataaatgaaggtggatttaaatgagtctktatgtacagaaaaaaaaatgacaaaaatcttgagctcaggagtagttttgtcatcgtcaaagaaagaagttatcaaggtgaaagtctagaatgaattcagtcctgaactagagtgtagatattagcataaatatgtttatgttttaatctatatgtgtacataaatttagacatagatagatacagatataaatacagatatacaggcttacataagtacatacatacatttcccagatttttttgctgagaggtccaagaaacactacagtgtcaacaagcacatctagttttgaaataccattctctaattaaaaacaaacaagaacaaaagacagagctacttggagaaatacttcattctagg

SEQ ID NO: 649729 - DNA, 608 bp, Homo sapiens
tacggcttattaaatgcacttaacagtaattgagacagagatgctttccaatgactcacttcttaatcaaaaacgtgctttttaaccggaagtaatgataatatcagaagcacaagggtaaatctaagacaccagaaaaggctggtttgagtacaaacctaataataaagacaatatccatgtgactgacaaaaagctccaaccctagctcaagccatcatccaccttctccaggcggatagctgagcagatgaggactgaggaggacattttaccccatagaacaacagctgcccactcatctttctatgtttctctagtcagccaatgattaaatttctgtattattccacatcttttccattctcttcaaaccttcaacgattcaatgaacttccacttctgagacaggcctgtgaaaaggagttttagaaatgaggttaatggattaatccaagtcactcccgagagcttggaacatgttatctctagyagcgtttttttttttttttggagacaaggtgtcacccagtgtcacacaggctggagcgcagtgtcacaatcttggctcactgcagcctccacttcccaggcttaagcaatcctcc

SEQ ID NO: 649730 - DNA, 546 bp, Homo sapiens
ttatgatctttaatactcaggcttgacaattttgagatggtactctttcctttgtttagaataaaaaggcaaacataaataaccaagagacaattccttattcctgtagtttaaacagaactaaaacaagtgtgactcattcaactataacaaatcaggccctaccatttgtctagtagtggtttattctagttagattcctctactcaatgaatatttattgagattgagttacctacaatgtgccagatacaaaggtaggatggtgaagacagatgcaaattccacttccgtagaatttactggagtttactggagaagataaaaatttaacaagtaattacaatacaaaatgagygttaagactgtacaggaaaagggcactatggtggttttcaaataggatcacaaattatttgatactcctcctattgagagtttggatctaaatgccttctacttgaatcttgatgggccttataattactttgaccagtggataaaacagaaataacactatgtgatttccaagactaagtcatgaaa

SEQ ID NO: 649731 - DNA, 546 bp, Homo sapiens
ttatgatctttaatactcaggcttgacaattttgagatggtactctttcctttgtttagaataaaaaggcaaacataaataaccaagagacaattccttattcctgtagtttaaacagaactaaaacaagtgtgactcattcaactataacaaatcaggccctaccatttgtctagtagtggtttattctagttagattcctctactcaatgaatatttattgagattgagttacctacaatgtgccagatacaaaggtaggatggtgaagacagatgcaaattccacttccgtagaatttactggagtttactggagaagataaaaatttaacaagtaattacaatacaaaatgagcgttaagactgtacaggaaaagggcactatggtggttttcaaataggatcacaaattatttgatactcctcctattgagagtttrgatctaaatgccttctacttgaatcttgatgggccttataattactttgaccagtggataaaacagaaataacactatgtgatttccaagactaagtcatgaaa

SEQ ID NO: 649732 - DNA, 660 bp, Homo sapiens
tctccggtggccaaaatgacatgactcttggctagaatcgtggctgttcatttggaaaattgccaagaactgggaggaattgagtggtggtggtttttattctcatcttacggatgaaatcctgagatggaaggaggactggagagggtgcaaactccttccamccctagtcctaaggctctgactagggagatcccagctttagagctgatgagattattggatacagatttctgaacaaaaagtagttgtgctaggcagagtcaatgattgcattccttcctcagggttaaataaaaagtgctaccttccagatggaagtcagagggtatcaggattgatggtagcattccatagagcataccctacactctgcttctgttttctcttctcaacagcaacagggcctgctctaggaagcaggaaacccaggaacccaagtgactgaggcctcggcttcacctctttcagagggagtggtctttatttcacatgtaaaacaatagttgctattaatatttgggtttaaaaattggcttcatgtggtctcaaattatcacagactacttattcattaaaaagaggcaaagtgtctttacaatggaaaaatggggcagatatcacctttaaccaaataataaaatttaacatcacttacag

SEQ ID NO: 649733 - DNA, 596 bp, Homo sapiens
ggaaacttctcagtcccaggcaaactgagacagttgttcactgtgaaattacctcaacatataggcaaagtttccagcctgggaatatgtccctgggctcaggtctcttaagttgtcccagcttatctcctccytctacttccattcttttaaagctgcagagctttgcacagcagctgtcaaggtagtggaaatgctggctctgatggtggggacgtgggccgtaagtatagctccagctcccctggaaattgggaactttgattacctaccttggatgctcacttgggataattcactcaaattaacaatgcaacctaaactgtaagataatgagtctctgaaaatcaacacatatgtatatgtcatcctataataaataagcacattttattgaaaatacattctaatttataagaagtggtatgctgttctgcaaagaataatttgatacttgatgtttgaaggccacagcaaaagctatttgcttgtttttcagtttacatcacagatgagtgaataccttttattcattgagaaggtaccataactgtgtaagagaagcatcagctatactatagcaccagttaggagag

SEQ ID NO: 649734 - DNA, 520 bp, Homo sapiens
acattttagtctggaaatcccatgagttctaataaggtagttatttggcttgtgcaggaagattgcagaacaaaacaatgtagaaatagattcctgtttagtattaccttgtcatagaaaataacagtaaataccacaacaatacttcagctgatgacaggagctaagcaagcactgcagtagagaagttacttggcagatacaggactcaagacataaaacattaatatttctgctctataaaatataaaactctggatcacatcttcctgacattttcagcaaatgcagagacacttgatgagaagaggacagagcatgaagttataaattaaaaagcaagggacaatcctggctgatggaaaagtcatttctcctctatgttcttgtcttacagagctcargaaatgcttgctgtggttaatgatggcagtggcagcaccataacttcctcagtgaatggttatcctcaatttaagttggctgctccaattcttcaacatcccatgctgtgtaattt

SEQ ID NO: 649735 - DNA, 570 bp, Homo sapiens
aaggcaaaagaaagtggctttgactatgaattatgactatgaaatgtaagaagtacattttacattgtgacccaatgtgtgcatgtaaacatacacatatagtactgaacatttcaagaagggaaaattatacttactatatgctatgttatcttacctattttgtaattagtaaagtttatttttatagcagtttcaggttccagacaaattgaacagaaagaatagagagtttctacatactctctcccttcacacaggcacaacctctcccactatcaacattctgcacatttcttacaactgatgaactcacattgacatatcattatcacacgaagtrcacaatttccattagcattcgctcttggtgttgtacattctataggttttggtaaacatacaaatgacatgaatccaccattgtagtattgcacagaatagtttcattgacctaaaaatcctcagtgctctgcctatacatccctccttcaccactaactcctgacaagcactaatatatttacttcagtttttgcctttgctggaatgttatatagtagaaatcac

SEQ ID NO: 649736 - DNA, 595 bp, Homo sapiens
ttcctgtgttttcatttctctgatactccataaatggtgtatatgtgattatggtgtcaagggtagaaaatgaagacactgatrtaaaaaaaaagatcatgagacatttggagaggcaatataagctaaataggatttgacaaaatgtaatatttttacctgaacttgaattcatagcaggtactcttgaatcatctgcagggactgaaacgttaagaaagctttttgcaaatctgtaaactaaaattagcagttgtcattacgtataatattacttagaggccttgcttactaaaatgggtatggggaaaggaggctccaagtactgggtaaaaactaatacctataaaattaccacttgattgataaatgtactgatgattataaagatatttagtcattatgtatttttaagctgtaaggatctattatttaggtgataaattatttggcactatttcattagtatctgtgactataacactacaaggggagaaaaatattttaggcaaaagacaagacatgttaaaccagtgggagataataccatttgaaggcaacccctggaaagcagatacaatgaaaaaagtaaccc

SEQ ID NO: 649737 - DNA, 595 bp, Homo sapiens
ttcctgtgttttcatttctctgatactccataaatggtgtatatgtgattatggtgtcaagggtagaaaatgaagacactgatgtaaaaaaaaagatcatgagacatttggagaggcaatataagctaaataggmtttgacaaaatgtaatatttttacctgaacttgaattcatagcaggtactcttgaatcatctgcagggactgaaacgttaagaaagctttttgcaaatctgtaaactaaaattagcagttgtcattacgtataatattacttagaggccttgcttactaaaatgggtatggggaaaggaggctccaagtactgggtaaaaactaatacctataaaattaccacttgattgataaatgtactgatgattataaagatatttagtcattatgtatttttaagctgtaaggatctattatttaggtgataaattatttggcactatttcattagtatctgtgactataacactacaaggggagaaaaatattttaggcaaaagacaagacatgttaaaccagtgggagataataccatttgaaggcaacccctggaaagcagatacaatgaaaaaagtaaccc

SEQ ID NO: 649738 - DNA, 595 bp, Homo sapiens
ttcctgtgttttcatttctctgatactccataaatggtgtatatgtgattatggtgtcaagggtagaaaatgaagacactgatgtaaaaaaaaagatcatgagacatttggagaggcaatataagctaaataggatttgacaaaatgtaatatttttacctgaacttgaattcatagcaggtactcttgaatcatctgcagggactgaaasgttaagaaagctttttgcaaatctgtaaactaaaattagcagttgtcattacgtataatattacttagaggccttgcttactaaaatgggtatggggaaaggaggctccaagtactgggtaaaaactaatacctataaaattaccacttgattgataaatgtactgatgattataaagatatttagtcattatgtatttttaagctgtaaggatctattatttaggtgataaattatttggcactatttcattagtatctgtgactataacactacaaggggagaaaaatattttaggcaaaagacaagacatgttaaaccagtgggagataataccatttgaaggcaacccctggaaagcagatacaatgaaaaaagtaaccc

SEQ ID NO: 649739 - DNA, 568 bp, Homo sapiens
agaacagccagatcaatggcaaaatctctcatcatcatttcaaggctacatagagtagccacacagagctcttcagagaccctgggaagactctcgccaatctgtttctctttgctttgctatggggtgaggttaggaggtagctaagcgtgttgcacatgagaggtccactctcccatgtccatctacttaagcctccagtttccttaatttacaatatgccaaggaagcttccatctcaactgtgcttacaggccaccacagatgcaggcttcaactaatcaaacaaccaaatcgttagagccactcccagctatgtgagctaaacaacaaatccmaaatttttgaggtagtacatccatctttctctttctttctctctatgcatatatagatacacacacacacacgtatacatatacagtgtcttccttgagaatattttccataattcttttcacatttatagaatatacattacatgatttatataagatattaatatcttatatatcagtaatatatactatgttaaaatatgtatacatatatgcatataattataaat

SEQ ID NO: 649740 - DNA, 568 bp, Homo sapiens
agaacagccagatcaatggcaaaatctctcatcatcatttcaaggctacatagagtagccacacagagctcttcagagaccctgggaagactctcgccaatctgtttctctttgctttgctatggggtgaggttaggaggtagctaagcgtgttgcacatgagaggtccactctcccatgtccatctacttaagcctccagtttccttaatttacaatatgccaaggaagcttccatctcaactgtgcttacaggccaccacagatgcaggcttcaactaatcaaacaaccaaatcgttagagccactcccagctatgtgagctaaacaacaaatcccaaatttttgaggtagtacatccatctttctctttctttctctctatgcatatatagatayacacacacacacgtatacatatacagtgtcttccttgagaatattttccataattcttttcacatttatagaatatacattacatgatttatataagatattaatatcttatatatcagtaatatatactatgttaaaatatgtatacatatatgcatataattataaat

SEQ ID NO: 649741 - DNA, 600 bp, Homo sapiens
tagccaaatagctatcacaagattacaagcaacagaagatcagattctgagaccaaaaaggcttgggatcaacgcctgatttcaccttggattttccaattataaaattaggaaattaacaagtaccttcactgggctgcttggacttgcaggagttcatatacatgtcaagtacaatgctgagacactgaaaatattcctttcccyctcctcttcctaaagacgcatatctcatttcattcttttttttttcttttgagatggagtctcactctgtcacccaggctggagtgcagtggcacaatctcagctcactgcaagctccacctcttgggttcaagtgattctcctgcctcagcctcccgaatagctgggattacaggtgcctgccaatatacccagttaatttttgtatttttagcagagatgaggtttcaccatgttggccaggctggtctcgaactcctgacctcaggtgatttgcccacctcggcctctcaaagtgctgggattacaggcatgaaccactgtgcccggcctcatttcattctaacaataactctattaagtagatactctagtgatgcccagatgagaaaa

SEQ ID NO: 649742 - DNA, 573 bp, Homo sapiens
gatccacctttgaagtttatagcaatgggcgaggaagccggcaatttagaattatttctttccgtttttaccaatcaataatactaccttgaaagcccgggcttcagagttcctgttagcaacagtctgagccaacaaactttgccatcccattggatcttctttgtaggagagctgacccgcccggagtttaacatataaaaccccatccttggaaaggatggacctgaaagaaaaggaatgaatttaatataaggtattactggcagttcttggctggaaatagtgttttcccaataccatgttcacaggagatgaagcttttaccattttccactaaggtaaatgattatttactgtgtctaagattaaatcagtccctatgagaaagcctagaataaagttctgtttttctttggtgtctagattcatggaacttgttaaatgaggaggcactttgactattggctcaattaygagcttcgaagatagcattttgtctaacatttctttgtattccctatatcccctagctctatgcctagggtacatgaggtactaaatatctattaa

SEQ ID NO: 649743 - DNA, 415 bp, Homo sapiens
gatgcaaagaagcacagcagcttttgcacacatgcgtgggattagatggaaaacaagtggattgagggtctgccaatgaaagcgacccatactgaagtccactggctctggttgagacccagaagagtcatgcatcagaataaaggtggacaggaaataccctggcctttgtagggactgagcctgcaccgaygacttcaattgcagcctgtatggaggacccctgaccatcccccagaagtagactcccatctcttctgcagcaagataacatgctactaggcctcaattcattgctaaacattttttaacaagtatctcacatttaacaaaaaaagatcagtcatatggcagcaaaatacaatgtcatatgaccaaaacatgaaagactgtgaaaatgaatctggaggtgacc

SEQ ID NO: 649744 - DNA, 415 bp, Homo sapiens
gatgcaaagaagcacagcagcttttgcacacatgcgtgggattagatggaaaacaagtggattgagggtctgccaatgaaagcgacccatactgaagtccactggctctggttgagacccagaagagtcatgcatcagaataaaggtggacaggaaataccctggcctttgtagggactgagcctgcaccgatgacytcaattgcagcctgtatggaggacccctgaccatcccccagaagtagactcccatctcttctgcagcaagataacatgctactaggcctcaattcattgctaaacattttttaacaagtatctcacatttaacaaaaaaagatcagtcatatggcagcaaaatacaatgtcatatgaccaaaacatgaaagactgtgaaaatgaatctggaggtgacc

SEQ ID NO: 649745 - DNA, 611 bp, Homo sapiens
tactgcaattcctgacacaacgtctggctcattcgacaaagttgataactgtttgctgtattaaatggacaaatacacaaattatcctatttggccaaatgtagttcataaataaatatctgttcacttgcatggaatataaaaatgaaaaacttaggcaaatataaccaaagtaggaggaaaaagtgacattttaaatatctttggtttgttagatatccaaaacttttctattaatgaatgtttggatatttttccagattgttgagataaattgaattaaaataaattaaataatagttgctaacatttgtgagtgcttatatgtgtcacgaattcttcccttaagcctttgtatttatcatctcacttaattcttatatcatcccttagatatctactactattattattattattatactttaaagatgaggacctgagccacagagatggtaaggaattgccctcagattagacagcagctacttggtggcagagttggaattgaaacccggacaayttctctccagagcccaggtaactagtcactttcaggtcttctaaaccccaatctagtactccttagttatttaaaaagtgaagaataa

SEQ ID NO: 649746 - DNA, 611 bp, Homo sapiens
tactgcaattcctgacacaacgtctggctcattcgacaaagttgataactgtttgctgtattaaatggacaaatacacaaattatcctatttggccaaatgtagttcataaataaatatctgttcacttgcatggaatataaaaatgaaaaacttaggcaaatataaccaaagtaggaggaaaaagtgacattttaaatatctttggtttgttagatatccaaaacttttctattaatgaatgtttggatatttttccagattgttgagataaattgaattaaaataaattaaataatagttgctaacatttgtgagtgcttatatgtgtcacgaattcttcccttaagcctttgtatttatcatctcacttaattcttatatcatcccttagatatctactactattattattattattatactttaaagatgaggacctgagccacagagatggtaaggaattgccctcagattagacagcagctacttggtggcagagttggaattgaaacccggacaacttctctccagagcccaggtaactagtcactttcaggtcttctaamccccaatctagtactccttagttatttaaaaagtgaagaataa

SEQ ID NO: 649747 - DNA, 610 bp, Homo sapiens
ccacagggtctggctggctgaggactttgtgcactggaccatataccaygagcagtgagttatttcaaactccagctatggggccagaaactccttaggagtccgcaccagaatgtctagaggagcacgtatattaacaagcatattttacacttaaaaaaaaaattaaccacagaaactgagattccaccagacttccttgataggaagataaattgtaaaagttttactgaaggacttaatttttaaaattaagccatttaatttaaaaaaataagacttttaaaacaatgttgagaaacacacccttcaccagaagaagaaaggggcgtggccagggaagcagagcagttccgcctgtacctggtttatgcagtgcacttctgaatattgccttcgaggaaaggttaggacaggataaagcctccagacaccaccgttcgagtataatttgagccaggaaagctgtcagtgcagctttttactgtgttctagaatcctttgggaaagaaatcttttcttgggttcctctgagaattccgactgaggcaaaaccagatttatcagggattttgcagatatcctgaaacaaaccgtctctcagcgtgag

SEQ ID NO: 649748 - DNA, 610 bp, Homo sapiens
ccacagggtctggctggctgaggactttgtgcactggaccatataccacgagcagtgagttatttcaaactccagctatggggccagaaactccttaggagtccgcaccagaatgtctagaggagcacgtatattaacaagcatattttacacttaaaaaaaaaattaaccacagaaactgagattccaccagacttccttgataggaagataaattgtaaaagttttactgaaggacttaatttttaaaattaagccatttaatttaaaaaaataagacttttaaaacaatgttgagaaacacacccttcaccagaagaagaaaggggcgtggccagggaagcagagcagttccgcctgtacctggtttatgcagtgcacttctgaatattgccttcgaggaaaggttaggacaggataaagcctccagacaccaccgttcgagtataatttgagccaggaaagctgtcagtgcagctttttactgtgttstagaatcctttgggaaagaaatcttttcttgggttcctctgagaattccgactgaggcaaaaccagatttatcagggattttgcagatatcctgaaacaaaccgtctctcagcgtgag

SEQ ID NO: 649749 - DNA, 605 bp, Homo sapiens
tttcgggcatattgtcaggtcatcccacatctgccagactttgtgataatggctaaactgtgacttataaagaaagaacttgggaaataggaaactgaccctgatctggggaagaaatgggaagactactaacaaccagcttttattgagcatgtaccatgtgacagcacatcttcccaggcatattactcacttttctcattttaccttctcagcagtcccgtacrtaagtgctattaccatttccattccgtaagtaaggaaatcaaggttttagagagattaagccactttctcatttttttccattttcttggctagaaataactgagactagatttgcgcctaagctcatctgaatctgaagcccattttcttaactactttagataataaaggttaggttggagggaagaaaggacccatctgaaaagtgtggcatggcaactgcttcctcagagcagtttatcgggtcaaggatcttaaagataggatcttgtcctgtggtggataagatggcttggaagacccagtgctaaataaacagctatagcgtggtcagcactcagcaatggcccaagttgagaccagatcagagaggacat

SEQ ID NO: 649750 - DNA, 579 bp, Homo sapiens
tatttcctacttgcacatctgtttataggctctctgcaagaagaaaaatatggctctttttgcccaaccccgcaggcagtcagaccttatggttgtcttcccttgttccataaaaattgctattattctgttctttttcaaggtgccttgatttcatattgttccaacacacatgttttacaatcaatttgtacagttaacacaattatcacagtggtcctgaggtgatgtacatcctcagtttatgaagataacaggattaagagattaaagacaggcataagaaattataaaagtattatttaagaactgataaatgtccatatcaagawgaaatcttcacaatttatgttcctctgccatggctccagccggtccctccattcagggtccctgacttcccataacagtgttcttgaaaagcaaatagataaaagtattatttaatccaaacaagtaaaaattattatcctagactgggcttttagctgtaagtatgtaggaaaaccatattaagtatatatacctcagggggtaaacatctttttctgatacatggcacgaaaaaaaatttggtga

SEQ ID NO: 649751 - DNA, 579 bp, Homo sapiens
tatttcctacttgcacatctgtttataggctctctgcaagaagaaaaatatggctctttttgcccaaccccgcaggcagtcagaccttatggttgtcttcccttgttccataaaaattgctattattctgttctttttcaaggtgccttgatttcatattgttccaacacacatgttttacaatcaatttgtacagttaacacaattatcacagtggtcctgaggtgatgtacatcctcagtttatgaagataacaggattaagagattaaagacaggcataagaaattataaaagtattatttaagaactgataaatgtccatatcaagatgaaatcttcacaatttatgttcctctgccatggctccagccggtccctccattcagggtccctgacttcccataacagtgttcttgaaaagcaaatagatmaaagtattatttaatccaaacaagtaaaaattattatcctagactgggcttttagctgtaagtatgtaggaaaaccatattaagtatatatacctcagggggtaaacatctttttctgatacatggcacgaaaaaaaatttggtga

SEQ ID NO: 649752 - DNA, 630 bp, Homo sapiens
cacaccagcaggtgcaaaaaagcttttgtaaactacatttgtatcacatattgaaaatgcagcttttatatgggtgcagaattcctataagaaaggcacaccagtagactataatatcattcaagaaaaaatgaagttattatatgacaactaaagcaaaaggaagatgaagaatctaaagttggataatttaatgccagcaaaggatggtttgatcrttttagtgagatgttttggcttaaaaaatgtcaaggtaacaggaaaagcagcttctgcctaccaagaggcagcagacaagctcccagactctgttaagaaaattattgaggagaaatgatatcggcctaaacagatttttaatgcagatgaaaatgtcctcttcttaaaatcatgccacaaaagtcatttgatattaaggaaaagaagtgagtactagaatttaaggcaggaaaggataggctaactctactgtttgtgaaaatgtagtcagcttgatgatcaggattgcctttttataaagttgctaacccctgacccttgaagggaaaaattaaacatcagctgcaagtcttttggatgcgctacaacagctcccaggcaatgaaaacccttcttctggattatttccat

SEQ ID NO: 649753 - DNA, 636 bp, Homo sapiens
gtaatttttctgaagatgactgttgcattaaaattgttctgatacaatagtcccctccacaaagtattctgggaaaaatagttttcctgaggggacatgtttgagacacagctgtaccagcttagatcacattatgcagcatgtagttataaatctaattaatatgacttaaataattaaggttttcttccctcatataagtctaaagattgacagaacaaaatcattacaagggtcttacaatttcataaaaggttctgttttcctctatcttttcaagaccaccaactttagcgcctggctttcaagtatgtggttgcaatatagctactgctccttcagtcatcacattgacattccaggtcagaaaaagggggaagcaccaaaagccttctccttgtgaagtcttgtctttgtatgaaaaaggggaagttcccctcagtgacatctgcctatatamtattaagccaaagcttttcacatggctacaacaaatcaagcaatattttagcttttcaaccacttcagtagaggaagataaagaatgggggctgttaataatgcttagttacaaaacttttgtaactaaagtgtctacacttaactgctttgtaactacagtgtctgccacagtag

SEQ ID NO: 649754 - DNA, 604 bp, Homo sapiens
tctacctctattgaattggatagtgtcccctcaaaattcagatccttcccagaacctaagaatgtgaccctatttagaaacatgctcattgcagatattattagagtagatgacatcattcaatatgattggtgtgctttaaagaagaagagaaacacagggagaacaccatttgtcaatggagggagaggttggagtcatcgatctacaagccaaggaataccacagactgtcagcaacaccaagctaagagagaggcgtggaacagattctcctctagagccctcagagaaagcatgcccctgccaacactttgattttggacttgtggcctccaaaactgtgagaaatttctattgttttaagccactctatttgyggtacattgttaagaacagccctaggaaactaatgctctattttacagagtttttgcaaagactacatttgttaataatacatgtgaagtccacagaccataccctgcatattattaataaaggatagttattattgtttcatttcataagtattagccttattatcattgaatttaaaaatgcaaatttcagccatttattgtgtgcctcccagcactgttttt

SEQ ID NO: 649755 - DNA, 601 bp, Homo sapiens
agcatggagtcaaatttcacatatgttatataatatatatgcctataaatatatctaatatatatattaaatatagaaatagacccttctgatcataaggcttaaaacttgtggtggctcactcctgtaatcccagcactttgggagaccaaggcgggcagatcatgaggtcaggagtgcgagaccagcctggtcaatatggtgaaaccctgtctctactaaaaatacaaaaattagcaagtcgtggtggcacacacctgtagtcccagctatttgggaggctgaggcagaagaatcgcttgaacctgggaggtggaggttgcagtaagccgagatcrcaccactgtactccagcctaggcaacagagcaagacaccatctcaaaaaaataaaataaaataaaatatttgttttatctgagtttcttcctcaaaaaacaaccttcaggcctctcaaaaaaagcatcaatgaactgaaactcatcaggtcaccacatccagacaatgacatcctggagccctcatttatcatgattgcttctttgcctgtagtagtctgttttcacactgctacaaagatactacttgagactgggtaattt

SEQ ID NO: 649756 - DNA, 601 bp, Homo sapiens
agcatggagtcaaatttcacatatgttatataatatatatgcctataaatatatctaatatatatattaaatatagaaatagacccttctgatcataaggcttaaaacttgtggtggctcactcctgtaatcccagcactttgggagaccaaggcgggcagatcatgaggtcaggagtgcgagaccagcctggtcaatatggtgaaaccctgtctctactaaaaatacaaaaattagcaagtcgtggtggcacacacctgtagtcccagctatttgggaggctgaggcagaagaatcgcttgaacctgggaggtggaggttgcagtaagccgagatcgcrccactgtactccagcctaggcaacagagcaagacaccatctcaaaaaaataaaataaaataaaatatttgttttatctgagtttcttcctcaaaaaacaaccttcaggcctctcaaaaaaagcatcaatgaactgaaactcatcaggtcaccacatccagacaatgacatcctggagccctcatttatcatgattgcttctttgcctgtagtagtctgttttcacactgctacaaagatactacttgagactgggtaattt

SEQ ID NO: 649757 - DNA, 531 bp, Homo sapiens
agatgagaagaatttacccaactcataggtatttgagggtattgttttgataaaaatgaggactggagggagaaaaattatgtttcaaatcttatcatatacttgtaattaaattctagtttcattagttgtttttaagtttttgcctaccttttaaactaaycttgcttatttctgtgaaccaaccagtgatctctggctgtagttcagaagaaacaaaagggatgggtaatgtaaaaatctagatcaatattctcattctggccaattatcctgcaaatcctgccaggtagggtgctcataatccagaggtttctttgtttgggaaaataagaccaacggagctaaccaaagtcaagccccatgcttggcttacccccttgtttccttttgatacatgtcttctaataacctggtttgtcttttctcaccttcaggccatcaaactccaaagagtcatgaaaccagagcctcaaacaatgcctctgttttactggggacccttagataggcctctgagagagatctgac

SEQ ID NO: 649758 - DNA, 597 bp, Homo sapiens
actgactcttattttagacttgtaggacaagttgtcaatgtaacattttgatttatgtccagtgggaacaagaatgaactgtgtgacattccaaatgtacaatcaacaatcacattacgtatttggtaatgaagatactgcttcactgaactaacatctccctatcttaaattctaatattaggtttttcagataactagacaagatatttatgtaaaataataattataacttaatcagaaatatgaatctatgtatttatgttaccacaagtgaggcatgggtrcttccgggttgtggtatacaagatttgggaaaaataccaaacagtactaagtaacctctcatcagccaactttaaaacaatagaaaattgtgaaatatttacgcagatgcattgttttggtggagggctaggtaatgaaattctcaagagtctgatttttttaaaaatgaagatatacacacagacagcataaccagtgtgactttaaattttcacatcttctctttaggtaagagacatacccatccacttcattaaacgtcaggctatattgctatttcacagtcattatcttaagggctttcattaca

SEQ ID NO: 649759 - DNA, 597 bp, Homo sapiens
actgactcttattttagacttgtaggacaagttgtcaatgtaacattttgatttatgtccagtgggaacaagaatgaactgtgtgacattccaaatgtacaatcaacaatcacattacgtatttggtaatgaagatactgcttcactgaactaacatctccctatcttaaattctaatattaggtttttcagataactagacaagatatttatgtaaaataataattataacttaatcagaaatatgaatctatgtatttatgttaccacaagtgaggcatgggtgcttccgggttgtggtatamaagatttgggaaaaataccaaacagtactaagtaacctctcatcagccaactttaaaacaatagaaaattgtgaaatatttacgcagatgcattgttttggtggagggctaggtaatgaaattctcaagagtctgatttttttaaaaatgaagatatacacacagacagcataaccagtgtgactttaaattttcacatcttctctttaggtaagagacatacccatccacttcattaaacgtcaggctatattgctatttcacagtcattatcttaagggctttcattaca

SEQ ID NO: 649760 - DNA, 597 bp, Homo sapiens
actgactcttattttagacttgtaggacaagttgtcaatgtaacattttgatttatgtccagtgggaacaagaatgaactgtgtgacattccaaatgtacaatcaacaatcacattacgtatttggtaatgaagatactgcttcactgaactaacatctccctatcttaaattctaatattaggtttttcagataactagacaagatatttatgtaaaataataattataacttaatcagaaatatgaatctatgtatttatgttaccacaagtgaggcatgggtgcttccgggttgtggtatacaagatttgggaaaaataccaaacagtactaagtaacctctcatcagccaactttaaaacaatrgaaaattgtgaaatatttacgcagatgcattgttttggtggagggctaggtaatgaaattctcaagagtctgatttttttaaaaatgaagatatacacacagacagcataaccagtgtgactttaaattttcacatcttctctttaggtaagagacatacccatccacttcattaaacgtcaggctatattgctatttcacagtcattatcttaagggctttcattaca

SEQ ID NO: 649761 - DNA, 505 bp, Homo sapiens
gcatcatttatgtcagaagtgtttgaaaaaagctgttacaaagttagtccttattttcatagatcactttctaagtaaacatggtctaaattataggatgagagttttgatcaatagcatgcctgtattgggtgctaaaatagtgccttgggtacttgacggcagaggacatcagtaatgtgaagaaggctatagaaagaagcaacagtagacacagaataaaactgtgcttttctaattttgtctaaggttttcgttacaaagagtcaggacaacatgaataactttattatttccaggaataccaaaataattggtatttatacttaatttctagttgttttgtgtcttgtggaaaaagcatgatcagttaaatatggtgaagtaattaaaaatrtggagataagtatagtgagaatcatcattacataatttggtaggtggtgtcatgttgttactactgtggttccatattgagcaaacattcaagtctcatgaaatgtac

SEQ ID NO: 649762 - DNA, 656 bp, Homo sapiens
atataaatatatttttttcattatgtcagcaatctgtagttgaaattgaggagattgtatcttactcatcacatacattaaaatgattacrtcatatgagctgaataactcagaactaatcaatgcagtctcgttctctgaaaaggtggggagaaatggaaggagaaggaaaagagggaagaaaagagatgggaagaaggagaaaaataagctttgtttatggtcatatgctgcccaccacaaaagcttgctcaggagctggactctgtacaaatgtggctctgcggtataaatcatacatagaccagaaaataaataacactacttatataacaagagataaggcatgggtttctttcattcatttttttagtgtcttttggcctcttattcttttttttaattatactttaagttttagggtacgttcacaatagcaaagacttggaaccaacccaaatgtccaacaatgatagactggattaagaaaatgtggcacatatacaccatggaatactatgcagccataaaaaatgatgagttcatgtcctttgtagggacatggatgaagctggaaaccatcattctcagcaaactatcgcaaggacaaaaaaccaaacaccacatgttctcactcataggtgggaattgaacaa

SEQ ID NO: 649763 - DNA, 581 bp, Homo sapiens
gcagtttcccccatactgttctcatggtagttaataagtcttggaagatctgatggatttataagaggtttctccttttgtttagctttcattagctcttgtttgctggcatgtaagatgtgactttcaccttctaccatgattgtgaggccttcctagccatgtggaaccctgagtccaytgaacctctttttctttataaaaaaatcattttctttatagaaaaataaaggcataccccaatctcaggtatgactttatcagcagtgtgaaaatggacaaatacaaaaggctagaagtgcaaaattaaggcgtcaacaaggctggttcctttgactacagtgaaggagaatatttctatgcctctcttctaatgtctggtagttataggccttgcttggcttgtagatggccatcttgtccctgtcttcacttcgtcttccttctgtacatgtcagcctctgtgtcatgtaggattaaccctaatgacctcatctcaaattgatcatttgtaaagactttgtacttcaacttctttcaggaggacacaattcaaatcataacaatattttgcagaggat

SEQ ID NO: 649764 - DNA, 581 bp, Homo sapiens
gcagtttcccccatactgttctcatggtagttaataagtcttggaagatctgatggatttataagaggtttctccttttgtttagctttcattagctcttgtttgctggcatgtaagatgtgactttcaccttctaccatgattgtgaggccttcctagccatgtggaaccctgagtccatygaacctctttttctttataaaaaaatcattttctttatagaaaaataaaggcataccccaatctcaggtatgactttatcagcagtgtgaaaatggacaaatacaaaaggctagaagtgcaaaattaaggcgtcaacaaggctggttcctttgactacagtgaaggagaatatttctatgcctctcttctaatgtctggtagttataggccttgcttggcttgtagatggccatcttgtccctgtcttcacttcgtcttccttctgtacatgtcagcctctgtgtcatgtaggattaaccctaatgacctcatctcaaattgatcatttgtaaagactttgtacttcaacttctttcaggaggacacaattcaaatcataacaatattttgcagaggat

SEQ ID NO: 649765 - DNA, 581 bp, Homo sapiens
gcagtttcccccatactgttctcatggtagttaataagtcttggaagatctgatggatttataagaggtttctccttttgtttagctttcattagctcttgtttgctggcatgtaagatgtgactttcaccttctaccatgattgtgaggccttcctagccatgtggaaccctgagtccattgaacctctttttctttataaaaaaatcattttctttatagaaaaataaaggcataccccaatctcaggtatgactttatcagcagtgtgaaaatggacaaatacaaaaggctagaagtgcaaaattaaggcgtcaacaaggctggttcctttgactacagtgaaggagaatatttctatgcctctcttctaatgtctggtagttataggccttgcttggcttgtagatggccatcttgtccctgtcttcacttcgtcttccttctgtrcatgtcagcctctgtgtcatgtaggattaaccctaatgacctcatctcaaattgatcatttgtaaagactttgtacttcaacttctttcaggaggacacaattcaaatcataacaatattttgcagaggat

SEQ ID NO: 649766 - DNA, 569 bp, Homo sapiens
aaggtacccaaacagacttccagttcagaagacagatgccaaggtctaataagttaaaattaaacgccytaccttccccatgggctttcccaacaactctaattgaaaggcacttaacagaggcaggcccacaattctgtgtattgtatactggctctcatactgaagctccctcccatgcagaatgtgaaaaatcagattccaggtcccttgccctttaattcctataatcttttgcagttaaacttaaaatctgagttttatagtaaagaccaacatccaagactaaatttcgtggagttggcaaatatgttattctacatggaaagtgtttgcgtagcagcaacaggctgagtgagacagctgagactaacaaaaaaacttacttctactaagatttatataattactgtacttctacataaatacagatcttcattatttttctcataaacctggtatttaggaatttaacttggttcattcttatcctaatcatttatagacttgatccaattttagggtttgtctaattaactgccaaaagtatgttaaggttgaacaactat

SEQ ID NO: 649767 - DNA, 426 bp, Homo sapiens
ataaataaataaatacaaataaaaaaataaatttattcatgttaaaggagaaatgtaaaccaattgtataaatccagattatgcaaaatgcaataattatagggaagtagcgggcctctaaataattattttaatcaatgaatatggatgttcatagttttgccacctttgatatgacacaatttggaagcaaaacaaatgtaagcttatgtgtgcatattccaaaatgtattttctttaggatttttgyatctatgttcatattggtatgtagttttctttttttgttgtgtccttgtctggctttggtattggggtgaaacctacttcctagactgaattagggagaattccttcctcgttgattttttggaattttcaggaggattggtaccagttcttccttgtatgtttggtagaattttc

SEQ ID NO: 649768 - DNA, 569 bp, Homo sapiens
  misc_feature 412: n = A,T,C or G
gttgctgccttccatctgtgacatctgagggcagcaggaaattttgctctgtaccccatagtttggacacccagagcactcaccatgcctcctctacaggctctgctccctttcaggcagtcctccagagttggctgcacctatcttctccaagggttttcaagactgttgttccacaaagccaatggcctattgggtcaacgtccttccttcccatcaatggatgtgctgatatcgtgttctctcaggtcagtcttaatccaccatacttgggcctgagcctatctactggtgtgaaaggaaagggtgcagtcaacattcaaagcaatcacagtttaggaatatattgattayagcctagagagttcaagagaagacagggttggaagacatgttgcatgttgtactacanaattctaaacagtaaatttaacatgaccagaacatggagtctcattcatagtttccagcatactctggataagacttgcacttgtagttgtgatggttagttttatgtgccaactcaattaggctatagacctacctcagttattccatcaaacaca

SEQ ID NO: 649769 - DNA, 569 bp, Homo sapiens
  misc_feature 412: n = A,T,C or G
gttgctgccttccatctgtgacatctgagggcagcaggaaattttgctctgtaccccatagtttggacacccagagcactcaccatgcctcctctacaggctctgctccctttcaggcagtcctccagagttggctgcacctatcttctccaagggttttcaagactgttgttccacaaagccaatggcctattgggtcaacgtccttccttcccatcaatggatgtgctgatatcgtgttctctcaggtcagtcttaatccaccatacttgggcctgagcctatctactggtgtgaaaggaaagggtgcagtcaacattcaaagcaatcacagtttaggaatatattgattatagcctagagagttcaagagaagacagggttggaagacatgttgcatgttgtactacanaattctaaacagtaaatttaacatgaccagaacatgsagtctcattcatagtttccagcatactctggataagacttgcacttgtagttgtgatggttagttttatgtgccaactcaattaggctatagacctacctcagttattccatcaaacaca

SEQ ID NO: 649770 - DNA, 593 bp, Homo sapiens
caggtatgaggcagctagatgcatctttgggaccaagcttgagccaaggggaggtgagtggaagtgtcctttccaggtgattgtcacatgaaaggaaagccatttttctggaattcctctttccttaccccataagctcaaacacaggtgctagatgtgcctgtgacttggctttgaccatacagccgaggactgtggagcagtaaggtggagggaactgaggttctgggatgaccacgtgaagcaaagctgctcacccactcaggactgttacatcagagagaaaatataagctttttaaagccaaagcttcttgggagtctttttattacmgtggcttaacctttcctctaactaattcaaaagccaattccaaaacaaaccaaccaatcagcagaaaatcagaatgttgaaagtgacatattccaactgatgacaaaagcctgcaggatcagaaacttttggtgagtatgaaatggcaggaacccaagggaaaaggggcatccagtagctggaagcacccacagaaggccatgattttaggtgggaatggtggagacagatttatactggcaaaagtgagtaggaagaca

SEQ ID NO: 649771 - DNA, 537 bp, Homo sapiens
atatcatatccatggagtcacatagtagataacctttcaaattggcttttatcccttagcatatatccctggaaattgattaagattgttacgttttattgttgagttgtattccagggaatagatgtaccacagtttgtttaaccattcacccattgaaggacatctgagttgtcttcagttttggggttattatgaatgaagctgctataaacatttatgcacaggtttttgtgygaacataagtttttatttctctgggataaatgcccaagaattccagagttgtatgataattgcatattttgtttttaaggaaactaccaaactgtttttcagagtggctctactattttacattctcatcagcaacatatggctgatctggttttccagaacttctacagcatttagtgttgtcactattttttttattttagccattctgacatgtagtatagtaatatttcattgtggttttaattggtatttcactaatgaataatgcatctcttttcttgtgataatttgccatct

SEQ ID NO: 649772 - DNA, 592 bp, Homo sapiens
tatgtgaatattccaaataaatatattccacagatgtttaaaaatacctatttatctgatatgtcagccttgtaaatattattattccactctttactctttatatatgtatatattttttaacttttgacasgttgataaagggacaataatatatcctatcacaatagaattcttttctatttctttttttatttaaactttgtaatatacaagaaggttaagatttttcctggttcaaaggagagcactaaattttaattgcttccattgtcagttattaatagaggccatacataatatgtgctccagaaaaaataatcctcataaactgagattttataaatttattgatacaaaatatttagtaagaatagtttgttttgtagatgaaggaaaaatatttatgatgcaaataatcagatataaagtagatacttcattgaagtatttctctaaagcagatgccaaaatcaatagattttaaaaagaagctcttaaaaatcagctgcaaaaacaaaagaagagagaatactgaaaatttaatggtttgacaaagaaagctacatgtcaatatacatttgtccaaacc

SEQ ID NO: 649773 - DNA, 588 bp, Homo sapiens
tgctacattgattgacccttttttaaatgaaagatttctctgtagcaattgatgctgttgtctagtattttaccgatcatagaacttttttttttttttgagagggagtctcactctgtcacctagtctggagtgcagtggtgtgatctcggctcactgcaacctctgcctcccgggttcaagcaattctcctgtctcagcctcctgagtagctgggactacaggctcatgccaccatgcccagctaatttttgtatttttagtagagacaggttttcaccatgttggccaggatggtctcgatctcttgacctcatgatccgcccacctctgccttccaaagtgctcgattacaggcgtgagccactgcgccyggccagaacttctttcaaaattagagtcagtcttctcaaaccctgctgctgctttatcaactaagtttatgtaacatttaaatcctttgccgtgatttcagcagtatttacagcatcttcaccagcagtggattctatctcaagaaaccacttttttgctcatccataagaagcaactcttcatttgttcacatttgatcatgaaattgaatcc

SEQ ID NO: 649774 - DNA, 576 bp, Homo sapiens
cactgaaggttgttggtttaccagaatgagggcaagaaacacctggcccacccagggcagaaaaccgctacaggcattcctgaaccacaaacaatagcatgagcgatctgtgccttaaggacatrttcctgctgcagataactagccagacccgtccctttatttcagcctgtccctttatttcctgtaaggaatacttttagttaatctataatctacagaaacaatgcttatcactggcttgctgtcaataaatatgtgggtaaatctctgtttggggctctcagctctgaaggctgtgagacccctgatttcccactccacactctatatttctgtgtgtgtgtctttaattcctctgacgccactgggttagggtctccccgaccgagttggtcttggcacttctggagacttctgggaaactctgtaagttgatgtcttgctgacaaatgaggaactggggaatttatccttgaactcctgcttgttactaattgagggctgcccctgggataccatctcccagccacttctagccagctcctgacaccgtccaagcacacacctgcaaca

SEQ ID NO: 649775 - DNA, 631 bp, Homo sapiens
atgaactgtgatggagccaggatttctttcctgaagtcgctcccttgatctccacacaggagcgcctgtttctccagtctctagcacaggtccccagcatgggcccctaggaagcctcttcccttccctccatgaggataggatcaccctggtattgccactggctcaggtatgtcaacatattctccctgtctggtctgaattgcaggctgagcttaaggcctggaaggaagtgacctcttattaataaggaggctttggaaaggtggataggggtggargctactcctgggggcagagtggtcagatgttaatattctcatcacttgggaaaaggagcaggagtgtagaattcctgcactctttgtcaaaccaaagaagtgaaatggttggaagatgaatgttgttggctctgaacagcatattatggaacatgaaccttttcattcaggtgtatttatgggtttatatttacccaataaatataacaatggatgaacagctgttgagaaggggagacctgggctcctagggaggaaaaatagagatctgtcatccaggaagggagctaggtggtctcaaaaggatttttatcatgggtggtttatttgtcttcttgaaattcgtgcta

SEQ ID NO: 649776 - DNA, 289 bp, Homo sapiens
gaattccatcagcattatctttttgtctttcttatcaagattcatatttgaggtaaagaggatggaagggtgggtagyacatctgaacatggtgataagccaatgtaaacctgtaggggaagaggtaattccctaaaagaaaacctgagtgctgttatgaagtaaagaaatgtttgccaggcagccccaaataaacaaataggctcaataatgacatggacagttgcttcaagaaaaaataatcgggatatcaaaagttaaatcatcatagatcaattctgtagataga

SEQ ID NO: 649777 - DNA, 289 bp, Homo sapiens
gaattccatcagcattatctttttgtctttcttatcaagattcatatttgaggtaaagaggatggaagggtgggtagcacatctgawcatggtgataagccaatgtaaacctgtaggggaagaggtaattccctaaaagaaaacctgagtgctgttatgaagtaaagaaatgtttgccaggcagccccaaataaacaaataggctcaataatgacatggacagttgcttcaagaaaaaataatcgggatatcaaaagttaaatcatcatagatcaattctgtagataga

SEQ ID NO: 649778 - DNA, 559 bp, Homo sapiens
tcactgttttttctcaaaaacgccaataggtatgctgattaatccctcygcagaaggctgatctcgccctgcatatgatgttctgaaaaatatctactgatctgtaaaatttaccaccagcttcaagagagaaaatgtatcattagttcctaagtgttagtagctagcttttccaagaaagtctaataatactggagatttatcttgtccactaaaaaatattttttaaaaactgatacaattttattttaaccttgcccacttattaccatagggagtgtaataattagatgttgtctgttagggtcttgtcaaaatatgttattgttataagatataaggatgaatttgtattgggaacaatacagtaaaaatcatgactaccaagttggggtactaaaaattttttattatagatttcaggcagtttcatctcttttgattgtgttattctgtatcaggggaaaaaagaaggaaacacgagttttgagagatacaggcacagttaaattacattctatgttgttcattttaaaacatgaacaccatgctcaaaatc

SEQ ID NO: 649779 - DNA, 541 bp, Homo sapiens
tatataagtgggcgtgggggcatgtttgtaattatacaaaaagttttaaatattaaagtgaatgtcctatagctggtagttatcagtgaccatattattgtatttttctgtttgttttctcttttattttctaccttttctacaatgagtatgtaaaattcctaatcagaaatacacattcatcggtcatagactcttttacacacctatttgacaaagctggaaaatgagatgttatggtaggctgcccaaggagaatccaacccacaggccaaggttataattaacaatatagttaaaacctactacccactgttaccaccaattattatctcattgccaacaagaaaaaatatttgacccagctcaaaatgtcctcctaggtttgagagcttgacactgtagtctcaaaatttaatatgtattttctctgttgctatttagatacttattggtgattggaatcctaccttgcatatttttttgaaaakcttaaataaaagaacataggaaacacacatagctagtggctgccttatga

SEQ ID NO: 649780 - DNA, 612 bp, Homo sapiens
tacttgcatttttattcttcttcactgatttaaatagcaattatgtaagattatacatattatatagatagattatacacagattttatatagatctatatatagattatatgcatttttgtgtgtgtgtgtgcatgtgtgtatacatacatacagtatacatatgtatgtgtgtatacatacatacagtcattccttattttccatggaagatttgttccaggacttctcagggatgcaaaaattcacagatgctcaagttactgatataaaatggtatagtatttgcagataacctgtgcacatcatcctgtatactttaaatcatctataaattacttgcaatacctaatacaatgtaaatgctgtgtaaatagttgtcatattatamtatataggaaataataaccaaaaagtctgtacatcttcagtacagatgcaattttttttcaaatatttttaatccacagttggttgaattcacagatacaaagtccacacaatatagagagggttaactgtgtgtgtgtgtgtgtgtgtgtgtgtgtagaaatgcattatatatatgtattttatgtagatatacttaatgtatagctatgctgaaacata

SEQ ID NO: 649781 - DNA, 618 bp, Homo sapiens
acaagaagcttctctggaagcaggttaggagaaggttgcactcagcaaagaaagcatctgggatgggctccatccaggagcatctcagaggagaagtgagaggccacagagaagggattggaagaactcagggacatttcgacacctgtgccacatctcctttgattcctctgttacagtcttttattttcctttggatatgagagaaataataactaaaataaaaatggcccaaggagtgatttctggagcaagtcttcatgcgctctgccctgcctgggctcttcctagcaggtcccattgagttcctcccctctccagctccctttccctaattttcctctgccagcacctgggctgtctrctttccagatccagggtctggggaaagcaagatcactcagcagggtgaccctgaggctgcaggttctggactggagagtaagtccacttcagcacagtagctgtaaggacagtcagacccttttctagagtccactggacccctctatttgctttgcagcggcttccattgtgccacttgtattccacaagttgctgaaatattttatacactaaatgagttaaggtcattaaactttcttgggagatagtttc

SEQ ID NO: 649782 - DNA, 469 bp, Homo sapiens
taaggcatctgaaattgctgccataccttggttgcaataatattagctatcattwtgtgcacttcttatgtgctaagcactgtttttaacaccatacatacattaactcatttaatgctcataacatcccaatggtctcgttatctttacattaaagaagaagagactgaagaatagagagacaaaatagcttgcccaaggaaaccaatctagtaagcagtggagcagggatttgaactcaggaggtctaaattcagagcccatggtcttaggcactatactgttttggaaaactctggatttggagttaagatgttcaaattctagccaaaattatttcattaataaaataagtttcttagtctgggcaaaatttgtctgattttcttaaacatagcatcctccttttcttattgtaatagactgttaaatgaatctatagctttgttcacacctccttgcatccgtg

SEQ ID NO: 649783 - DNA, 616 bp, Homo sapiens
gtttgtagttgtggtttcttccagtatcattaagaactcactaatatgaacatatttgatggcttcaatccgctgctattattactcttattctgattgaattaccctacctttggcagggagagtgtatttagtttggctcctgagtccttctgagatgatccttctgttgtcatcgctaacagatgatccttgtgtctggtgtggcaagatgttccagacttatgtatacattcctgccccaaacctagaatttaggcagtttatttctttaagaggcgctggtttgtttttgtgcaaaatagtatttagagatgacaatctgggggctaagggtacttattgctactgagttggtaacwgtttctagacctttttagaggacagaactataaaaagtgctttgtttttgaagaaaatatgagtttatatcatatttctaattcaaattctggactacagagttcttagttcattggttttacatgtgtaaactctcgtgttaaaaaaagaaatctgtttataattattcatttgttttatcccatacaacacacaatagtctccaaagatggtatcaactactatcaacaatatgattactgaaaacagttta

SEQ ID NO: 649784 - DNA, 520 bp, Homo sapiens
aagccagtctagtccttccacattcctctgcctgcttttattttggctgtgctggcagctgattagattgtgcccacccagattgagggtgggtctgcctttcctactccactgacccaaatgttaatctcctttggcaacaccctcacagacacacccaggaacaatactttgcatccttccatccaatcaaattgacactcaatattcaccatcacaccacagttttatcaaaatcaggtatgagtaatactyaaggtaagattctaaagcaaatacccagactcaagtctttcgttttaacagcacaaggactctcctaagccaaataactgtctagctgtgaacctgtgagattaaaaatgtatatacttccaaaatacgctgatgggacaggcatagggtagacattcccatttcaaaaggaaacaggagaaaagaagaaagagataacaggtccaaagtacatccaaatcctaataaggcaaacaacatcaaatcttgaggtttgagaataatc

SEQ ID NO: 649785 - DNA, 542 bp, Homo sapiens
aaaaaaattcaccatgcttaagtgggattcatccctgggaagcttattagtcttatttgattcgtgtaatcagaaaatttctatgtctagtgaagagaaatgagagcaatagagactcatagcacctcaacaaatktccaggcttgagccagttaacaaatacaagtccttcaaatacaaaaaagactgtgaaagaaaatagaacagatcaatgagactaagaatttgttctttgaaaagataaaactgacaaaccattagctagactagaaaaatgagagaatactcaaagcaataaaatcagaaatgaaagaggaaatattgcaactaataccacagaaatacagaggatcataagaggccactataaacaattacaagccaacaaattggataacctagaaaaagcagataaatttctagaaaaatgcaacttacctagagaaagtcaagaagaaagataaaatctgaacagaacaatactgagtatggagagtatatcaataataaaacatctcccatcaaagaacatcccaggacca

SEQ ID NO: 649786 - DNA, 542 bp, Homo sapiens
aaaaaaattcaccatgcttaagtgggattcatccctgggaagcttattagtcttatttgattcgtgtaatcagaaaatttctatgtctagtgaagagaaatgagagcaatagagactcatagcacctcaacaaatgtccaggcttgagccagttaacaaatacaagtccttcaaatacaaaaaagactgtgaaagaaaatagaacagatcaatgaractaagaatttgttctttgaaaagataaaactgacaaaccattagctagactagaaaaatgagagaatactcaaagcaataaaatcagaaatgaaagaggaaatattgcaactaataccacagaaatacagaggatcataagaggccactataaacaattacaagccaacaaattggataacctagaaaaagcagataaatttctagaaaaatgcaacttacctagagaaagtcaagaagaaagataaaatctgaacagaacaatactgagtatggagagtatatcaataataaaacatctcccatcaaagaacatcccaggacca

SEQ ID NO: 649787 - DNA, 542 bp, Homo sapiens
aaaaaaattcaccatgcttaagtgggattcatccctgggaagcttattagtcttatttgattcgtgtaatcagaaaatttctatgtctagtgaagagaaatgagagcaatagagactcatagcacctcaacaaatgtccaggcttgagccagttaacaaatacaagtccttcaaatacaaaaaagactgtgaaagaaaatagaacagatcaatgagactaagaatttgttctttgaaaagataaaactgacaaaccattagctagactagaaaaaygagagaatactcaaagcaataaaatcagaaatgaaagaggaaatattgcaactaataccacagaaatacagaggatcataagaggccactataaacaattacaagccaacaaattggataacctagaaaaagcagataaatttctagaaaaatgcaacttacctagagaaagtcaagaagaaagataaaatctgaacagaacaatactgagtatggagagtatatcaataataaaacatctcccatcaaagaacatcccaggacca

SEQ ID NO: 649788 - DNA, 603 bp, Homo sapiens
atatgcagaaaaagcatttgactaaattcaaaatcctctcatgactaaacctctcaacaaattgggcatagaaggcatgtaccttaacacaaaacaggacatatataacaagctcacagctcacatcatacccaacaatgaaaaagtgaaatcttttctgctaagatcaaaaacaagacaaggatatttattctcactacttctattcaacttatttctggaagtcctagccagagcaattaagccaaataaagaaataaaagattcagattgaaaaggaagaagtaaaattgtctctgtttgatgacatattatatataggaaaccctaaaaactccaccaaaaagctattagaaatgataaatgaattcaataaaattkcagaattcaaaatcaatgtacaaaactcagtagtttctttacactcacaacaaactatatgacaaaaataaagaaatcaatctcattcacagtagcatcaaaaaaaacgtattttttttgtttaggagcacatttaggattgtacttaggagtacatttaaccaaggaggtgaaagatctgtattctgaacactataaaacattgatgaaaaattgtagatg

SEQ ID NO: 649789 - DNA, 642 bp, Homo sapiens
tttttgtgtttagtttttcttttgtgattggggaggggggtttatcgtactgattcaaggtgtgaaggtaacatcattttgattttatacatcttcttcagtccatttaagcatgttacatagcgttgtttgttcttttcatgatattctttacagtagtctcctaaatgttccctctgcttctgccakgagcccctacaatctatttcaactcagaagctatagagtttgtttaaaacatgtaacatattatgccacctttcttactgtaaaacatcccatggtttctcgtagtatttatagtaaaagtgaaatttttatgatggcttgagaaacttttcccattagatgcccaagtgctggtctggtctgatcttctcatcttcccttgggtgattctgtggcagtcacactagcctccttgctgctccacaaaaactccagcatgatcctacttcaggatatttgccattgttactgcatctgcctggaaccttttctcccatataaacatagagattgctcttgcctgtccttcaagtctattcttaaatgtcccattctctgtgaagctttcctgcccaccctatttaaattacagacttcactcccaattccccatctactttaagagtcttcctt

SEQ ID NO: 649790 - DNA, 596 bp, Homo sapiens
agaaaaacaaacattaaggaggaaaaatgaacatatgactacatcaaaatataaagcttctctatttggatgatatcataaggtgacaaatcataaactgtaatatttacaacatatatataagtgaataaatatacatttagaatatatatgaactcccaaaaatcaacaggaaaaataagacatagaacaagcaaaatgcataaacaaaagaaggcaaaacaaaaataatgactcataattatatgaaaagaagctcatcttcatagatgagcagataaatgcaaattaaaaccaccctgagatgctttttacatccatgagcctgataaaagttagagtctaaaagtaataattaacaaagatgggaagtaacagaaaatcttgtccrttactggttaaagtataaactgatacagctactttacagaatattacattatagaataaagttgtgagtatgtatatgcagtgactcagcatattcattgctagtatgtactcaagagaaacttacaggagtggcctaggaagtaaatacaaaatgattacaacattgtttgttatatcaaaaaataaaaaagacacccaatttt

SEQ ID NO: 649791 - DNA, 515 bp, Homo sapiens
tgttttagtttgagatcttataggcctgtctcatcaggttggtgtcagcccagctaggattaggcagaattgggtgggggctgtagtgcatttttggcacagcatgtacctgtctgactaattctctgtcttttctttcctgttgcaattcatgggtcttagcatcttctgaatggtgtttagtaggtcatcctgttgatttcctgctagggagtagcatactctggccctgtaccattggccaagggacttaaggatagatgaagggctgcagttttgttaaatggaacaatatgaagagatggcattgytaaaaaaaaaaaaaaaggcttggcagcagggcccatttgaatggttggtccttggctcctttgttgatataggcagatccttgatgggaatttggaatgatcccaaatattgtagatcactggtacatcaagtcatcctcaaggttgtctgtgtaacagtcttgaatgatattttgtcagtctttggagattctctgtataggg

SEQ ID NO: 649792 - DNA, 602 bp, Homo sapiens
aatgtggcacctgctgaagcctgctgcctcatttaataactctttgtctctttcccagatccagccactctaacattttttagctcctggaccaagacaagctcttcccagaacctgacctttgtacctgttctttattcctggagtatttttcccctgacaaattacttatcatctatcataattcaggttaaatggcactaactcagggaaggcttccctaactgcctcccttctccaaccaaattaggaacaattatatggccacatagtatcgaatcaagtttataattttaaaataattgggagattttgttgtttaacacttgttttcactataagactgtaattacatgcaagtaagaaccatgcctgtttgttcactcctgccacagtcagaatagtgcctggaatatgcagtaagggctgaacaawcactaaataaatgaacaagtgaataaatggatattgtctcatttttagaacagagtactgaatggatcatgaacactatctggtatgtcacgtaggtaatttacaagggctacaatttcagctcagatttaccttttcctggatacaggtcttgataggtctcttga

SEQ ID NO: 649793 - DNA, 581 bp, Homo sapiens
tgtgggccaggcacggtggctcataccaggtgtggtgactcatagcactctgtcacccaggctggagtgcagtggcacaatctctgctcactgcaacctctgcctcctgggtacaagcgattctcctgcctcagctttctgagtagcaaggactacaggtgcacaccatcacgcctggctaatttttgtactattagtacagacggagtttcaccatgttggccaggctggtctcraactcctgacctcaaatgatccgcccacctcggcctcccaaagtgctggaattacagatgtgagccacaatgcccggccttattttctacaactttggtaactttagcatataccccaaatctgtaagacataatattataattcaaatgcaactcatggcttctctttgtactctttctctagcttttgaattatttattctaataccagttttaattctgacacaaaatcatgggagttctaatcaaaatccaaccttttatcataaaaactatgaagaaattatgagtagaatttaaaaaggaaaataggcctattaattagatttgtctttgtagcattta

SEQ ID NO: 649794 - DNA, 581 bp, Homo sapiens
tgtgggccaggcacggtggctcataccaggtgtggtgactcatagcactctgtcacccaggctggagtgcagtggcacaatctctgctcactgcaacctctgcctcctgggtacaagcgattctcctgcctcagctttctgagtagcaaggactacaggtgcacaccatcacgcctggctaatttttgtactattagtacagacggagtttcaccatgttggccaggctggtctcgaactcctgacctcaaatgatcygcccacctcggcctcccaaagtgctggaattacagatgtgagccacaatgcccggccttattttctacaactttggtaactttagcatataccccaaatctgtaagacataatattataattcaaatgcaactcatggcttctctttgtactctttctctagcttttgaattatttattctaataccagttttaattctgacacaaaatcatgggagttctaatcaaaatccaaccttttatcataaaaactatgaagaaattatgagtagaatttaaaaaggaaaataggcctattaattagatttgtctttgtagcattta

SEQ ID NO: 649795 - DNA, 581 bp, Homo sapiens
tgtgggccaggcacggtggctcataccaggtgtggtgactcatagcactctgtcacccaggctggagtgcagtggcacaatctctgctcactgcaacctctgcctcctgggtacaagcgattctcctgcctcagctttctgagtagcaaggactacaggtgcacaccatcacgcctggctaatttttgtactattagtacagacggagtttcaccatgttggccaggctggtctcgaactcctgacctcaaatgatccgcccacctcggcctcccaaagtgctggaattacagatgtgagccacaatgcccggccttattttctacaactttggtaactttagcatataccccaaatctgtaagacataatattataattcaaatgcaaytcatggcttctctttgtactctttctctagcttttgaattatttattctaataccagttttaattctgacacaaaatcatgggagttctaatcaaaatccaaccttttatcataaaaactatgaagaaattatgagtagaatttaaaaaggaaaataggcctattaattagatttgtctttgtagcattta

SEQ ID NO: 649796 - DNA, 581 bp, Homo sapiens
tgtgggccaggcacggtggctcataccaggtgtggtgactcatagcactctgtcacccaggctggagtgcagtggcacaatctctgctcactgcaacctctgcctcctgggtacaagcgattctcctgcctcagctttctgagtagcaaggactacaggtgcacaccatcacgcctggctaatttttgtactattagtacagacggagtttcaccatgttggccaggctggtctcgaactcctgacctcaaatgatccgcccacctcggcctcccaaagtgctggaattacagatgtgagccacaatgcccggccttattttctacaactttggtaactttagcatataccccaaatctgtaagacataatattataattcaaatgcaackcatggcttctctttgtactctttctctagcttttgaattatttattctaataccagttttaattctgacacaaaatcatgggagttctaatcaaaatccaaccttttatcataaaaactatgaagaaattatgagtagaatttaaaaaggaaaataggcctattaattagatttgtctttgtagcattta

SEQ ID NO: 649797 - DNA, 452 bp, Homo sapiens
gacggagtttcaccatgttggccaggctggtctcgaactcctgacctcaaatgatccgcccacctcggcctcccaaagtgctggaattacagatgtgagccacaatgcccggccttattttctacaactttggtaactttagcatataccccaaatctgtaagacataatattataattcaaatgcaactcatggcttctcwttgtactctttctctagcttttgaattatttattctaataccagttttaattctgacacaaaatcatgggagttctaatcaaaatccaaccttttatcataaaaactatgaagaaattatgagtagaatttaaaaaggaaaataggcctattaattagatttgtctttgtagcatttaactctataataaataatattttatgcctatgagtccccagactaaacctccagcttctatttagatataaac

SEQ ID NO: 649798 - DNA, 452 bp, Homo sapiens
gacggagtttcaccatgttggccaggctggtctcgaactcctgacctcaaatgatccgcccacctcggcctcccaaagtgctggaattacagatgtgagccacaatgcccggccttattttctacaactttggtaactttagcatataccccaaatctgtaagacataatattataattcaaatgcaactcatggcttctctttgtactctttctctagcttttgaattatttattctaataccagttttaattctgacacaaaakcatgggagttctaatcaaaatccaaccttttatcataaaaactatgaagaaattatgagtagaatttaaaaaggaaaataggcctattaattagatttgtctttgtagcatttaactctataataaataatattttatgcctatgagtccccagactaaacctccagcttctatttagatataaac

SEQ ID NO: 649799 - DNA, 414 bp, Homo sapiens
acaccaaggggaggaagggaggttcttccagacggaagcaatcatcggcacggtctgcagacaggcccccagggtttcctcgtgccggtgggttttctgcagcttgttacgcagctgcggctcagagcaagcggtgtctcagggtccctttccacagttctcattgcctgctttgccttaggtcagctcatcagcagccctggggagctggggtgaacggaggaaagacaytgacttgtagaacctgagaatctgggaagggagggccttagccgaagactgtttgcccaggagggtggcacgcagtaaacagttcaacccaggagttcaacccgggagctggcattggggcatggatgtgcgcgctggtggccattcattactgatcctccagtttcctttgtcgtctgtgag

SEQ ID NO: 649800 - DNA, 597 bp, Homo sapiens
ctttttcttcccagtctcaggtgtgtctttgtcagcagtgtgaaaatggactgatatagccactatccatgagatcagtaaatgcatttcagtgcaaacaaaccaagtttaatggcagctgtattctttttttttttyttttgaaatgcatcctaggtctgtcacccaggctggagtgcagtggcacgatcttggcaacccccgcctcccgagttcaagtgattctcctgcttcagcctcccgagtagctggtattacaggcacatgcctccatgcttggctaacttttgtctttttagtagagacagagtttcgctgtgttggccaggctggtcttgaactcctgacttcaagtaatccacctgcctcggccttccaaagtgctgggattacaggcatgagccaccacacctggcctatagcagctatattcttattcctactatccgtttcatgtccgtatgttgttttggatgtactgaatagaggaaattcacattcatccagaagtaggctaaggggaactgcagttcaagggcatgtccctcaagcaaagcaaaacgcccaagacatgacgggtgcccagtgaatacttcc

SEQ ID NO: 649801 - DNA, 597 bp, Homo sapiens
ctttttcttcccagtctcaggtgtgtctttgtcagcagtgtgaaaatggactgatatagccactatccatgagatcagtaaatgcatttcagtgcaaacaaaccaagtttaatggcagctgtattctttttttttttcttttgaaatgcatcctaggtctgtcacccaggctggagtgcagtggcacgatcttggcaacccccgcctcccgagttcaagtgattctcctgcttcagcctcccgagtarctggtattacaggcacatgcctccatgcttggctaacttttgtctttttagtagagacagagtttcgctgtgttggccaggctggtcttgaactcctgacttcaagtaatccacctgcctcggccttccaaagtgctgggattacaggcatgagccaccacacctggcctatagcagctatattcttattcctactatccgtttcatgtccgtatgttgttttggatgtactgaatagaggaaattcacattcatccagaagtaggctaaggggaactgcagttcaagggcatgtccctcaagcaaagcaaaacgcccaagacatgacgggtgcccagtgaatacttcc

SEQ ID NO: 649802 - DNA, 564 bp, Homo sapiens
gagttaaacttgtagctatgaaggcccgtgccatttatgtaatccctggaaacacagatatacttctgacttccatgttctgttattatttctctatgctaaaatatgttttttatactacccaatatggatgctacccaattttgatgaagaagatagtcatgtggtatatttctgcatgttaacataaaaaggactctgagaggtactttaatgaaaataaaaatgaagagaaaattatttctgattaatagtaaccatcttatgacacaacgtcttgagagtttcaagaaaacattgaagcacgttaagtctgaggcaagaaaaggaaatctactgaaataatgtaagaaatttcaaagtaatttcatgaatttcacaaaagatgtacctttctatttaaaagagttaccttaatgctctgtgtacaatactwgattacaattatataataaaatccaaaagtaccaaaattcagtcaacaaccattcattcaaatgtgttaaagtataattttcacaaaagtaaaattatttctctcatacaaatataatataaacaagt

SEQ ID NO: 649803 - DNA, 581 bp, Homo sapiens
aagcttcttcatatttttcagaaagggatcttgtgggttgttgagagaatccaagttcactccaaataatgtgccagtgattacatccatggtgtaggccccaaagaaactgagtagagtaaaacatggaaaattaaaaccagcacctctttactttccttctgctatacacacagcaagaagtgctatgccagagcaagacaggtgaaaacccacacacaatcagaacaacctgctgcatcatctcccatcatactcatgaggcatttattgggtatcagtgatgcagctggccctgtgctgggagtgatggagacactaaggtgagttagacccacctctgagctcaaggacctcagtcatagggagacacagacccaataatcagacaattacagtagtttgtgttgagtgtggatggtaaaaggtgtgtcaacactgtgcttctgcaggacaagaataaaataattaactcyttctcggccaatcaataaatttgacattgccagaccccacagtctacgcccagagctgatgtctcttcagcactttatagaacagccacaccctgttcagacttg

SEQ ID NO: 649804 - DNA, 548 bp, Homo sapiens
ccagaaatgtcttacggggaattttggtcactgcctatttcaattctgggtttctctaacaatgagaaatggtctccttgtactgattcttagaagctatttctacacaggggaaaatgagatagagattattaaaattgtgaaaaatgaaacagaattaagttaaaacaaaaaaaagcagaggaagggaagaaactaccacctgtttttctctagtctttgagtggcaagagagaaaataactttatatataaaaatgcctctggccgggtgtggtggctcacacttgtaatcccagcactttgggaggccgagacaggccgatcacctgaggtcaggagttcaagaccagcctggccaacatggtgaaaccccatctctactaaaaatacacaaattagctgggagtgtgattgtgcacacctataatcccagctacttgagaggctgaagcrtgagaattgcttgaactcaggaagcagggggttggggggttgcagtgagctgagatcgaggcactgcactccagcctgggtgaaagagcaaga

SEQ ID NO: 649805 - DNA, 579 bp, Homo sapiens
ctggtcaacatagtgacagccagtttctacgaaaaataaaaaaaattccaggctatgtggcatgcacgtgtagtcccaactacctgagaggctgaggtgggaggattgcttaagcccaggagtccagggctgcagtgagccatgaatgcactactgcactccagcactccagcctgggtaacagagcaagaccctgtctcagaaaaagaaaaaaaaaattgtatcaataaaatacgtggaatatgtgaatagagttctttacctgatttatctttaacttcctaaaaataagttttaatcattatatatgtaacactttataaccagtaaattctatatgataataatttatttmaagttttacatctatagaaatatgttaaatttacctccaattttattttatttcttatatttgtattagttctaataattaaggttctatagcctagaatgtgttaaaccatattgaagttatctgtttcttaaacattagattgcagccaattgcaaaatcatcttgtcctgatgtctatgttaaaattttcacaatggctgattttaatgagagtaaaaacg

SEQ ID NO: 649806 - DNA, 607 bp, Homo sapiens
cccatcaccttctctgtgcttttactagtaaacattatatttttctatgttatagattctacaatacaataatatacacattgttttttaaagttgcctttcaaatcagttaataaaaggggaataaatgtgaaaaaaagaaagaagaaaaagaagagaaagaaagaaagaaggaaggaaggaaggaaaattttcttatsttgaagtgtgattgtattcacagcaactccttctttttcaaccttaatgtctgtttcaaccttaatgtctcattttgaaatatattttcactgaatatattattctacaaatagtatcttacaatagattctgtgcctggtaaaggcttactccttgcttccaagatggtgcctgtttcctggtttgaggcaaagtaacattagtagtgagaactaaaatacaatctaaaagctactggtgagttggtaataggtagtgcagatgttgacaaaaccatagttttctactgtcaataacaaacatgtttctatattgcaacaaataaaatgctataatgtaaatactgaagagtgatcccatttataatgagttgggccctctaggaaaactcttgtcaaagcagcaa

SEQ ID NO: 649807 - DNA, 513 bp, Homo sapiens
caaatgactgcaaatgatcataatatttacttttatttctataatttaaaaaacaaagattgagtaagaaagatagaacatagttttgatactcgtgtccctcaggwgctatcactaggaactaacaagacagatgattttttccagaattttctctctagagctggtagtaggatctgtgtgtaaggcactggttccaggaaaggtgagattagcagatatctttcattataactatacctttatgtcaaagccagctaaatgaaactatacactaaagttaaaagtttaaaaatactatgattatgattgaaggaccacttataaccacctttaaagaatagttttgtggctgggtacagtggctcatgcccgtcatcctagcactttgagaggctgaggcaagaggattgcttgaacccaggagtatggacaatgtagtgagaccctgcctctatgaaaaaaaatgtaaataaataaagaataactttgagttgatattaactctgggga

SEQ ID NO: 649808 - DNA, 573 bp, Homo sapiens
tgacttgcaacaaaaggtgcatgcacagcctcacccagtgtctactgttaaaggcattgattggaaaagaatgggaccctgcaacttggaatggggatgtgtggaggaccctaatgaagctggggatactgagtttgtaaactctgatggaccttttttgccagaaggaacagcttccccatccccagtagtggcaacatctcctccctgacccacactgccatagcctttccacatctgtctgaggacataaaccctgtgctgcctgaggcaacagtgatggcctccctgaggcactcaccaggccaaataatgttgattctcctcaggagccaccccaacacccctgtttgcttctagacctgtaactagactaaagtcccagtggacccctagagatgaggttgagagtgtgacccaataggaggtgtgctacacttgaaaataaytgtttgaattctctaatttatataaacagcattctggagaacaggcataagaatgcatattaagggtatgggacaatggtggaaggaacatagagttggatcaggctgaatttattgatttggg

SEQ ID NO: 649809 - DNA, 402 bp, Homo sapiens
ggcagctccttcacttctggcactctgtcctgaaaatgctagctgcctccgtttccccagactctcaactctgtctcctcaacatacagagttctaccagaccctgcctggggtccccctctctttgtcacaacctgggatctctctcagttcaggwggctgtgtaatcacagggctcatttgtttcccattttccaacattactgcccttcattgcttgatgtcttaaaaattggttttatatattttttgtctattatttggtttttttctatgttttttcagagaagactgtaaactccagtaattcttattccatcttggtagtaagatatttgcatcttaaatttgtgctgtggtataggtttttgagctctgagatataagcaccagaccaactcc

SEQ ID NO: 649810 - DNA, 567 bp, Homo sapiens
ttttctagctctaggtaaggttaaattcttctcctgtgatttggattttcagattcctcagtggrgaatatgtgttcagaggcaaacttttcctcctctcacacttcagggactcacagttttttgtttgtcttgtgaagtttgcagtggcatgctattcctttcaaaggatctgtgaattcttttgattttcctggtccattcctgcagtggttcttggaagaaaagttcacaatgagagcctctacactctgttctgtccgtccaaatgggagatgcacagtagccctgcctcctatccaccatcttgctcctggcatattatggtttttaattaaattgtactatctttttctctcataaatagaaataaaaatagcttatttgtacagaatcaaacatatcaagaattcataatttaactaactttatggatgtaccaagttatcttagacttccaaaatctcaattttcttatttttttaatgagtataataatgtatctctcacaacgttgttggaaaacttaaataataaatgggaaagaagctagcagtatgtatatga

SEQ ID NO: 649811 - DNA, 637 bp, Homo sapiens
ttgagctaccatatgatcctgccattccactgctaggtatatacccaaaagaaaggaaaacagtatatcaaagagatacctgtattcctgtgtttattgcagcactattcacaatagctaagattcggaagcaatctgtgttcatcaacagacaaatggataaagaaaatttggtacttatacacaatgtagtacttttcagccataaaaaagaatgagattctgtcatttgcaatcacatggtaggaactggagttcattatgtaagtgaaataagactggcacagaaagacaaacttcacattttctcacttatttgtgtgaactaaacarttaaagcaatatgactcatggagatagagagtagaaggatggttaccagaggctgagaagggtagtgggagggtgtgtgtagggggaagtggggatgattaattggtacaaaaaaatagaatgagttagacagtatttgctgcacaacagagtgactatagtcaataataatttaattatacatttataaataattaaaagaggctatttgggctgacactaagaataaatgcctgaggggctggataccccatttaccctgatgtggttattacacattgtatttctgtatcaaaatatctca

SEQ ID NO: 649812 - DNA, 603 bp, Homo sapiens
tggatatttggagccctttgcattctactgtgaaaaggaaatatcttcacatcaaaactacacagacgcattctgagaaacttctttgtgatgtttgctttcaactcacagaattgaaccttttgtttgagtagttttgaaactctctttttgtagaatctagaagtggatatttagaacgcttggaggcctatggtgcaaaaacgaataacttcacacaaaaaatacacagaagcattctgagaaacttctttacgatgtctgcattcacctcacagatttgaatgtctcttttgattgagcagtttggaagcactctttcggtagaatctgcaagtggatatggagagagctttgaggcctgttgtggaaaactaaatgtcttcatataaaagctacacagaagcattctgagaaactcctttgttatgtgtgcattcatctcacagagttgaaccttkcttttgattcggcagttttgaaacacggtttctgtagaatcttcaagtggatatttggagcacttttctgcctattgtgtaaaaggaaatatctttacgtaagaactacacagaagcattctgagaaacttctttgtgatgt

SEQ ID NO: 649813 - DNA, 527 bp, Homo sapiens
aggtatgaggtgtcacataaaatactcattaataatgcttcagtgcaagattattttcacatccttgccaatgcagtaaggcaagaaaaagaattaagagtataaatactggctagtagaatactaggttttacttatctgtagataatatgagtctttatccagaaaacccaaaagagttaactgaaaaacttttcgagttattaaaaaaaatccagtaaattgatcagacaaaactaatatgcaaaaatgaaaagatcattaatcagaacccttttaacttccagtcccacccagctgcaaacttatttgtatccacattcaaccttacttctttcaccgttcaactttaggatatactgcaagcagttttccaaaattgttgtattaagtacacttctggcagggtgcagaggctcacacctataaccccagcattytgggaggctgaggtgggtggatcacttgagaccaggagttcaagaccagcctggccagcatgatgaaatcctgtttctactaaaaat

SEQ ID NO: 649814 - DNA, 597 bp, Homo sapiens
tttgctaagtaagataacttttgtgtgaaccttcttggtgtataaagtattttcatgtgtcttatcattgtttatcctcactgggactggggatgaaggagagtgtatatggggggcaggggtggtgggggtgactgtgagttagatactttcattattctcatcgtacagatgaggaaactaaaattcatgaagttacatggcttgcacataatcacaggctcataggtgaaacaagaagtctatctggatttcctgactctaaatctacactcggttattttctaatcaacagccaaagtttgttcccatctcttaaccacaagtcctatctcccagttatactctcctatcaaccggctatgaactaatgtccatttagaggttaactcattgcagcttaagggttgagataaagcacatacaggggagtttgactttcragatgatgatactgaaaattgatgttcagaaaggaatgagcttcaagtgcaagaattttagacacatggccaggtgaggagaagttgatgaatagctataggcagtaacctgagagaccaggttagccatttttatgtatgttatgtaaaatga

SEQ ID NO: 649815 - DNA, 616 bp, Homo sapiens
caaattgatagtcttgccatctttctaggggacagaggtttgtgtagtgtgtgtgtgtgtgtgtgtgtgtgtgtgtgagacagagagagagttgtcctgtctcatcctgggtgtccttcctgaggacagaaatgctgttttacaggccattgtgctgatcctggccccaggattttattttcagaatgttatttggcaaaccagaattcaggactcagggttattatttaatcttaagaaagtttcttgttttctctccctgaggtattttgaagatatcattgaggatacccaagcctttaaagagtagacttgttgtggaagtagaaatgttttatcaacattccttgaatagtgaaagcccttggcagtttttcttttatttatttaaatctcaagttcattgatttttacatctgctctggaaaacttgctgtccactggaatacaagttagaggtttctaaaaccatagactattctgcctaamagcagaattatatcagttctttattatttttgttctaccttagatataatttgctctaagttaaccaatttgtgcttgcccatataggtgttatctatgcaggtgataatgtacttgatttggtttc

SEQ ID NO: 649816 - DNA, 616 bp, Homo sapiens
caaattgatagtcttgccatctttctaggggacagaggtttgtgtagtgtgtgtgtgtgtgtgtgtgtgtgtgtgtgagacagagagagagttgtcctgtctcatcctgggtgtccttcctgaggacagaaatgctgttttacaggccattgtgctgatcctggccccaggattttattttcagaatgttatttggcaaaccagaattcaggactcagggttattatttaatcttaagaaagtttcttgttttctctccctgaggtattttgaagatatcattgaggatacccaagcctttaaagagtagacttgttgtggaagtagaaatgttttatcaacattccttgaatagtgaaagcccttggcagtttttcttttatttatttaaatctcaagttcattgatttttacatctgctctggaaaacttgctgtccactggaatacaagttagaggtttctaaaaccatagactattctgcctaacagcagaattatatcagttctttattatttttgttctaccttagatataatttgctctaarttaaccaatttgtgcttgcccatataggtgttatctatgcaggtgataatgtacttgatttggtttc

SEQ ID NO: 649817 - DNA, 329 bp, Homo sapiens
aatttgcccttgtattgccaagatacaaggtagtaataaggctgtgatggccagacaaaaaggaagagtgagtctgaccaggaacacaaagttctggggctcttaactccacatggacaatgatttttacatactagtacatgtgtgtaataaacttacatctctgagtattgttaaagcagcagcaatgcatycttcataattttatcttgttttcttctatttttcaaagaataaattccagcttcataatctgacatggtgatttccacatctgactctagaatatttttccttttatatttttcttctcaggttcaagttcttgc

SEQ ID NO: 649818 - DNA, 581 bp, Homo sapiens
ttgaagttttatttctgctatatctgctatagtgaaagccattagttaccaggatgaccagaaaaaaaaaaaaaaaaagccttgtgtggctgttttaattcttcacatttgcattctggaaggaactgttttaagagtagaaaatctgccaaaattttttctggagcctaaatttttacaatgaaatcaacaaaaaggtctttcaaacatgcttgaatcacaacagaactacatcttgaaagcaaggtgaagaataggtaaaggggacctcttcccracattttaactcagagaactacacatgttttgtagtctaaaactatctatttttgtgactaccaggccattggaaatcactgtacttttgattttgagaatacagtgaaataaaaaaaaagaataatctttaaagatctttgagtttgatttgagagctcaaaataataattatttgtctatctagtgggtaaagagagagtaaagaaaggctaattagtcctcatgcaaataaaattacaacattttagagctggaaatatttttataaaccctttaaaagaaacacagacataattgtgacc

SEQ ID NO: 649819 - DNA, 508 bp, Homo sapiens
gtttgattataattatttttttataattatamcccactctaaactgaattaaagaaggaaaaagtacattttaaaaatattgttttaaagcttattttaaagggtctataactaatatactttctctggaataagctagttgctgcttcattcatcatcatatttagttcagaacttcttgacaaattagggaaactgagaagtttattaggtaatctagttctcaatgtccaataaaattacttatttatattcttctgttgcctagaggggatcctaggccaaccagcctcccattaatctgccggctgactgcagccacatgaataagtacggcagaaaagattaggaaaataattgccctaatcaaattgctgactcagaaaatcctgaataaataaatagtcgttgttgaagtcctatgttttagcatagtttgtttatacagcaaaagttaactgatacatggcatttaaaccagtctcttttgtttttaccaatatcagtg

SEQ ID NO: 649820 - DNA, 508 bp, Homo sapiens
tatatcatataaggaaggggtccagcttctgttttctgcatatggctagccatttatcccagtaccatttattgaatacggaatattttctccattgcatgtttttgtcaggtttgtcaaaggtcagatcattgtaagtgtgtggtcttatttctgggttctctattctgttccattgatctatgtgtctgtttttgtaccagtaccatgctgttttggttactggagccctgtaggatagtttaaagtcaaggtagagtgatacttccagctttgttctttttgcttagaattgccctgtctattcaggctctttttttcttccacataaattttaaaatagttttctgcaattctgtgaagaatgtcaatgatagtttaatataaayagcattgaattaataaattgctttgggttgcataactaaccattttaatgatattgattcttcctatccatgagcatggaatgtttttccgtttgtttctgtcatctctgatttatttg

SEQ ID NO: 649821 - DNA, 585 bp, Homo sapiens
gagttggaagaggactaaatataacacactagagaaaagtcatataattgctgggcattattagggggtccatgtgaggttataatcataagtttaaagtgttaktaatatctttttgtgttttcttgatttagtaattttctttttatattcataatagttttcttgacctggcttatttatttttaaaaatgactgatcaaattttatacatgcaagtcttagttgaaaacctgaattagaacatctttcaatgtctttgttgttattgctgtgaatttatttcagataattggttttctgcttcttcagagtcatcagctcccaactccactttttaaaacatctatgttaattacaaatatgcttgcaaatacactgattttcttttgatcattctaatttttggagggctctgggctctccagtgtatattagtagaactcttttatcatccagttaattttctttatttaaatgtaaattgtagtttcactggcaggagaatggtgagtgtgcccactaggatttctttaattctgaggtttatatattagaaattttctgaaagaactgtaataatgt

SEQ ID NO: 649822 - DNA, 600 bp, Homo sapiens
gtgatttcacaaacactgcctcagcaagcctaaacatcatcttcaggtggacttattagtgtctccatttcacaaaggcaaaactaactgaagagtacctgaggtggagtgacttttctagcctagagattagactcttgacttccactttctgcagtatggcagtgtagaaggaccctaccatgacgatataactaattcttacatgtatttcaacaaattttataataaattgcaaaaaaaaagcaagtaaggaaaataaagggggggaagaaaagaaagaaggaaggaagaaagaagagcagcaacaaaaacaaagagctaaaataaaagttgagartggtaagctgttaagagaatatggaagtcgggttaccctagggtaaatgcctgcatcagtgcgaggctgttttgagtcaacatgaagttagaaaagataaacctgggcagtcccccactttaagctcagcacctcagagggaactaatgtagtactaaatcaaaagtgcccaccagccctcaacagaaacaataaaaccctccaaaggaaagcatcatcaatttatatcctcaggttgcacacagattaagttgaaccaa

SEQ ID NO: 649823 - DNA, 475 bp, Homo sapiens
aatcgcttgaaccagggaagtagaggttgtggtgagctgagagcgcatcactgcactccagcctgggaaacaagagtgaaactgtctcaaaaaaaagggaggaaaaaacatatttattctctcgtattttctgtgggtcaggaatttgggcacaactcaactgggttcactgcatagggtctcacaaggttgcaggcaaggcgtcagctgagctaggttcaagctcattcaggttgttgacaaaattcatttccttatgtctgtatgattgtgtagctatgttttttattgggtattgrccggaggccaccctcaggtcctagacaccacctgctgttgggcttcctcaatatggtcacacacttcatcaaatcagcaaggagaatcttgtgtgcatgccagcaatatgtctatctcatatcctaatgtatgtctctctcctcctcctcctctcctcttccctctcctttcttct

SEQ ID NO: 649824 - DNA, 549 bp, Homo sapiens
ttttgtgcagcataaatctactgcggcactatgggctatgktgggggacagataatgtatgggggtgagggaatggcctgagctggaaatgccctggtttagaacagggcctgggatgggcccatcagggagtttcccaaaatcgggttcccttctttatcaaacttagagtgacactgattagcccaaagttttccttttttacattttagacatatttcaggatcagcagttttcttttttcacctatctggtggcctgacttgctgatttctttttttacattctttttagtatgaccatgcttcccacagttaaaacaagctccaggaaatagagtatttcctttatccactctcagtcctgccatcgcctgtgccaacaaagtatctctgatatcatcacaggccttgttataatcaactaaatgtgctttccctctgataggtcacagagcagcctggcaatagggattagcattgtcaaaactaataactgcaacactatatcctaagcagccaaatctgcaatcatctttttcagagactc

SEQ ID NO: 649825 - DNA, 576 bp, Homo sapiens
acccccaaaagttggtctgcagttatattaatttgaggttgggcccaggcattgagagcagcctgaatggaagcttcatctgccyactaagttttaaattgtaagaactgagcaggagttagacaagctagagtaagagtgtcccagtcagtaggaatcatccgactggaaacagcaacattctttaacagtcccatttcaaaaggagaacctggtccatactgatttatagcttgtttaattttttgagtaatttaaaaggaaaaggctcaaatgtagctataatatttccctgttgatctgggggggtgtattcaaacagggaactgccaagcctctaaatcccacttttgtctagcttgctgaattcctgcctgaatagaactaagcagtcgctcaagtcaccagggcaactacttttcacccagtgtcctccagaaaagaaagatctggagggtcgttttcttcaaaataataatgagggggtgcagaagggtagggatgaacctctccctccttttctgctttagctttaggtggcaaataaacctggtctgtaacctctactgttacttt

SEQ ID NO: 649826 - DNA, 579 bp, Homo sapiens
gcagcctgaatggaagcttcatctgcccactaagttttaaattgtaagaactgagcaggagttagacaagctagagtaaragtgtcccagtcagtaggaatcatccgactggaaacagcaacattctttaacagtcccatttcaaaaggagaacctggtccatactgatttatagcttgtttaattttttgagtaatttaaaaggaaaaggctcaaatgtagctataatatttccctgttgatctgggggggtgtattcaaacagggaactgccaagcctctaaatcccacttttgtctagcttgctgaattcctgcctgaatagaactaagcagtcgctcaagtcaccagggcaactacttttcacccagtgtcctccagaaaagaaagatctggagggtcgttttcttcaaaataataatgagggggtgcagaagggtagggatgaacctctccctccttttctgctttagctttaggtggcaaataaacctggtctgtaacctctactgttactttgttatactctccttcctcctcattatcagtgtgaaaaagttccaaggtagaacgaaccac

SEQ ID NO: 649827 - DNA, 415 bp, Homo sapiens
ctgctcctcacacagaatttgaagttagttttttacactcatcctcctcttcctcatctgaatctgcctcatcatctgtttgaaatggctcaagggctgcctttattagtgcccacactgaccatatataaactggaatttctgctccatctttatatgcctttcaaaaatctcttccaattctctcccattcatccaacttcatagtccctttgctctggaaaccatgggcaaaactgctttactgtactaaagagtrataacaaattctaagtactaaatttcactccccatctttgtatgtcctcgggtgtcttttgatgatgtgtcctctgctttcatatgctctagccttccttcaccgggtctttgtcaccccatgttgggcaccaggaatgttggggtgatcagaccc

SEQ ID NO: 649828 - DNA, 415 bp, Homo sapiens
ctgctcctcacacagaatttgaagttagttttttacactcatcctcctcttcctcatctgaatctgcctcatcatctgtttgaaatggctcaagggctgcctttattagtgcccacactgaccatatataaactggaatttctgctccatctttatatgcctttcaaaaatctcttccaattctctcccattcatccaacttcatagtccctttgctctggaaaccatgggcaaaactgctttactgtactaaagagtgataacaaattctaagtactaamtttcactccccatctttgtatgtcctcgggtgtcttttgatgatgtgtcctctgctttcatatgctctagccttccttcaccgggtctttgtcaccccatgttgggcaccaggaatgttggggtgatcagaccc

SEQ ID NO: 649829 - DNA, 482 bp, Homo sapiens
gtggtagggcaggtgcttaaagtcaggcagtatgatctctgcttaaccccagttaagtgtatagtgtatatgcttaaccatatatccatactgcttcctgactatgttatayattgcttccagactacattttaaaaaataggctcacgttgaatcactgggggttgaagaaatacttgacactaatggagatgtcaggaagagaggtctggaagaaataccataaaactaaaaaacatggtaaagatagatttgtaaatctttttatagatttgaaaaacatatttctaatacaaagttacagtcaaatatttaatacactttatctctcaagcacggtatgctttaattgaaacaatggacctaatcattactaggacttttagaaggtcacttctgtgtttgcctttgttttaatagcctcaaatctcccaaaaatatatcctatttggtttccagtatcaatttaaagtctttctggg

SEQ ID NO: 649830 - DNA, 482 bp, Homo sapiens
gtggtagggcaggtgcttaaagtcaggcagtatgatctctgcttaaccccagttaagtgtatagtgtatatgcttaaccatatatccatactgcttcctgactatgttatatattgcttccagactacattttaaaaaataggctcacgttgmatcactgggggttgaagaaatacttgacactaatggagatgtcaggaagagaggtctggaagaaataccataaaactaaaaaacatggtaaagatagatttgtaaatctttttatagatttgaaaaacatatttctaatacaaagttacagtcaaatatttaatacactttatctctcaagcacggtatgctttaattgaaacaatggacctaatcattactaggacttttagaaggtcacttctgtgtttgcctttgttttaatagcctcaaatctcccaaaaatatatcctatttggtttccagtatcaatttaaagtctttctggg

SEQ ID NO: 649831 - DNA, 434 bp, Homo sapiens
tcataattatattgatgtctgtaggttctgtagttacatcctctatttaattcccattatctacattatgtagcttctctaatttttttcgagataaatcttgctagccattgtttattaaaaaaatttttttcaaagaaccaatttgtgggtatattaattagctccaccttttgttatttgctatgttgttggtttacatttttatctttatcatcttccttcttcttaatttggatatactttgcttattttttagcctcttaaaaaagarcctaaaggtcattgattgaagccttttattttcaatatattacatctataaatgtacctttaaggaacgatttatctgcatcccacattttattaagtttttaaaaaattttctttcagtttaaactatttttgtgtgtgtgaaacttttcttggccaat

SEQ ID NO: 649832 - DNA, 602 bp, Homo sapiens
tctaagtgcctaaaatagcaagtggtctgaaatgatggcagcagtttattaaagactgaaaaaagaggccaggcacggtggctcacacctgtaatcccagcactttaggagtccaaggccagtggatcacaaggtcaggagttcaagaccagcctgtccaacatgctgaaaccccgtatctacagaaaatacaaagcttagctgggcatggtgacacatscctgtagtcccagctacttcagaggctgaggcaaaagaaatgcttgaaccctgaactgggaggcagaagttgctgtgaattgagattgtgccactgcactcgagcctggtgacagaggaagatgctgtctcaaaaaaaaaaaaaaaagaaaaagaaatggcatcttcaagaaccacaagagagtaccgcgctgaagaagctctgattctgcatttgctgaactactgatttgagttagccaatataacattatcttagataaagtgtacaaacaactcaatttcatctcctcactaataactgattagtctaatatcaattctgatttttaaaaagctaattagaaaaagaattaattatagaaccaataagaggtttgaat

SEQ ID NO: 649833 - DNA, 585 bp, Homo sapiens
caaaacttgggggaaaaaaaagaggcagagagaaaacaggttatatcagccctatctcacaatccacaacttcatcctrttagaggagtaactatgtaaaacaaattttatctgttgaatgtcctatttagttaatcgcaaaactgtacgagaacacacttgtgacttatttagcagcttgtttgttcgctttccactggcttcacaaatgtcctttggaaatagaatgtacatttggaaccttgtacaccttttctttctccagtaccctcttgtcacttccatcactaaggtgacagaagcaactaggggcaatacatttgtagcacacctgggtcagaggtatcctccaggggaaggatcagacctgcttgaaagcatgtcgttggaattgggaggcttctagtagctataacataagcactgatgtttactgttccctgccctccactttgatcactctgggaaacgtttttttttcttaaaaaatcaattgtattgaaacataatttacataaaataaatactattttaaagtgcacagtttgctgagttttgccagatgtaaccatccaggtgaataaa

SEQ ID NO: 649834 - DNA, 585 bp, Homo sapiens
caaaacttgggggaaaaaaaagaggcagagagaaaacaggttatatcagccctatctcacaatccacaacttcatcctattagaggagtaactatgtaaaacaaattttatctgttgaatgtcctatttagttaatcgcaaaactgtacgagaacacacttgtgacttatttagcagcttgtttgttcgctttccactggcttcacaaatgtcctttggaaatagaatgtacatttggaaccttgtacaccttttctttctccagtaccctcttgtcacttccatcactaaggtgacagaagcaactaggggcaatrcatttgtagcacacctgggtcagaggtatcctccaggggaaggatcagacctgcttgaaagcatgtcgttggaattgggaggcttctagtagctataacataagcactgatgtttactgttccctgccctccactttgatcactctgggaaacgtttttttttcttaaaaaatcaattgtattgaaacataatttacataaaataaatactattttaaagtgcacagtttgctgagttttgccagatgtaaccatccaggtgaataaa

SEQ ID NO: 649835 - DNA, 589 bp, Homo sapiens
ttttttaattgggatcttagaaattctgttgttgagttgtgggatattaagcttttatcagatacacattttgattttatcagatacatattttctcacatattatgggttgtcttttcactcccttgatagtatcctttgatgcataaagggttttttattttgattaaatctaattttcgtgtattttcttttgttatctgtgcttttctgtcatatttcaaaatacacttaaaactcaaaggtcataaaggtttaccgtgtgttttcttctaagagttacatatttttagtccttacatttaagtcttttattaatttagaattaatttttgtatatactgcaaggtaggggtctaacttctctcttgtrcactgacatccagctgttgaagagactgttctttcctcccttgactagacttggccaccttgttgaacagtcattgaccatatatgtgaggactaacttgtaggatctcaaatctgttctgttgtattggtctgaaagtctattggtcttattccagtaccacactctcttgattactgtagatttgtagtaggctgtgaaactgaaaaatgtgag

SEQ ID NO: 649836 - DNA, 594 bp, Homo sapiens
  misc_feature 1: n = A,T,C or G
nctatttttttaattgggatcttagaaattctgttgttgagttgtgggatattaagcttttatcagatacacattttgattttatcagatacatattttctcacatattatgggttgtcttttcactcccttgatagtatcctttgatgcataaagggttttttattttgattaaatctaattttcgtgtattttcttttgttatctgtgcttttctgtcatatttcaaaatacacttaaaactcaaaggtcataaaggtttaccgtgtgttttcttctaagagttacatatttttagtccttacatttaagtcttttattaatttagaattaatttttgtatatactgcaaggtaggggtctaacttctctcttgtacactgacatccagctgttgaagagactgttctttcctcccttgactagacttggccaccttgttgaacagtcattgaccatatatgtgaggactaacttgtaggatctcaaatctgttctgttgtattkgtctgaaagtctattggtcttattccagtaccacactctcttgattactgtagatttgtagtaggctgtgaaactgaaaaatgtgag

SEQ ID NO: 649837 - DNA, 468 bp, Homo sapiens
gctttatacctataagatcatgtgtagatataattttacacctattttttatttctratttagatgccttttatttctttgtcttgcctaattgctctggctagaactgccagtgctacgttgaatacaagtggcaaatgcaccatccttttcttctagatgttaggaaaacagctttcagtgtttcatcattgatcatgatattaactgttgggtttttgtacatcccattgtcatgttgcagaagatcccttctatgcctagtttattgagtatttttattatagaagggtgttgtatttcatcaatgttttctctgcatcaattgaaataatcacgtgcttattcattttactgttacagcatattacactgattgattttttatatgttgaaccacccttgcattttggggataaatctcaaagggtgatagtttacaatcctttgattatacagtattgctgc

SEQ ID NO: 649838 - DNA, 494 bp, Homo sapiens
cctgaatctggccagatatttttctttttatggctgaataatactctgtgtatgtatatattacattttctttatctattcacctactgatgggcattaggtttgggctaccttttggccrctgtgaataatgctgctgttaatcgggtgtacaaatacctgtttgagtccctgctctcagttcttttgggtatatacgtttaaagggtattgatggatcatataattctatgcttcatatttttaaggagctgctaaaccattttccacagtgggctgtaccattttacattccaaaaagcaatgcatacagcttccaatttctctatagccttgctgacagttaatattttctgtttatgtattgtatttttatagtgtttgaaattaatctgaggctttttgctgataccaaaatattaggaaaggttttccaaaaataatactgcttattataaaggattttacgtgttacttgatgccctgtgatctgt

SEQ ID NO: 649839 - DNA, 494 bp, Homo sapiens
cctgaatctggccagatatttttctttttatggctgaataatactctgtgtatgtatatattacattttctttatctattcacctactgatgggcattaggtttgggctaccttttggccactgtgaataatgctgctgttaatcgggtgtacaaatacctgtttgagtccctgctctcagttcttttgggtatatacgtttaaagggtattgatggatcatataattctatgcttcatatttttaaggagctgctaaaccattttccacagtgggctgtaccattttacattccaaaaagcaatgcatacagcttccaatttctctatagcmttgctgacagttaatattttctgtttatgtattgtatttttatagtgtttgaaattaatctgaggctttttgctgataccaaaatattaggaaaggttttccaaaaataatactgcttattataaaggattttacgtgttacttgatgccctgtgatctgt

SEQ ID NO: 649840 - DNA, 494 bp, Homo sapiens
cctgaatctggccagatatttttctttttatggctgaataatactctgtgtatgtatatattacattttctttatctattcacctactgatgggcattaggtttgggctaccttttggccactgtgaataatgctgctgttaatcgggtgtacaaatacctgtttgagtccctgctctcagttcttttgggtatatacgtttaaagggtattgatggatcatataattctatgcttcatatttttaaggagctgctaaaccattttccacagtgggctgtaccattttacattccaaaaagcaatgcatacagcttccaatttctctatagccttgctgacagttaatattttctgtttatgtattgtatttttatagtgtwtgaaattaatctgaggctttttgctgataccaaaatattaggaaaggttttccaaaaataatactgcttattataaaggattttacgtgttacttgatgccctgtgatctgt

SEQ ID NO: 649841 - DNA, 378 bp, Homo sapiens
ttgctgctattctgttgaacgtcaaccatagcctttagaaaggagcaagtctttgtggaatagacaggatttgaagtgcaacaaaggggtggaaacccagctgaccatgatactttcaagkgagtttttccactgaatttgattattttctcatttggcacttctttctgggttttttaatcagcccaaaaactctaggtgattttacttttgtaattgtattctcttgggaattcctgattcctcgtttcaccaaataggtgtgtaactttcttgtttctgcctataataattctggagtctttaaacaaaacgactgtgacttttcatgatgagtagaagataggttttactcatgctacaatcaatattaattcc

SEQ ID NO: 649842 - DNA, 506 bp, Homo sapiens
actgattggaatttccactgggattaaattgataggtcatttttgggagacttttgcaatattgaactttccaatccgtgaactttacttatctgcccatttattatgtttgtttttggtagattacaaaattatatgatcactccaaaaattaccttgccctttatagtaaagccttccattgtaaattctggcaatcactgatctgtgttcctctagcattgctttttttcagaattttatacaaatggaatcgttcagtatgtagccttttgagtctggctactttcatgtactttatcaacagttattccttattattgccaaatagtaatccattgtataaatactacatggtttgcttattggtttgtcattggaggaatatggactattttcactttttggtaaaytataagtggattggaattcacaaagtgctttttgtctgagcataggttttcatttcacttgtgcaaatgcctaagggtaggattgccgagtca

SEQ ID NO: 649843 - DNA, 704 bp, Homo sapiens
gtctgagcataggttttcatttcacttgtgcaaatgcctaagggtaggattgccgagtcacatgtacgtttgactttatcagaacctgccaaattgtcttccaaagtgctgtgccacttctgtttctttaataaatacaggggtattcaagctgtctgtttsttcttgagttttggtagtctgtctttcaaggaattgatctatttcacctaatttgtagaatttagaagcacatacttgtttgttttgtttttgtagtatccattatagccttctagtgtctacaggatttgtaataatattcctttcatttctggtattggcaatttgtgttttctcttcttcctttgtcagtctgctagaggcttcctcatttgattgatttccacctcccaccacccctgcaaagaaccaactttggatttcgttgaatttttttcctttactgtttttgtttaaatattactgatttagtctgttttccttatgcctgatttgagtttatttggttctttttttacttgaagtaaataaattgccctgtaagcacatattttgataagatgatgtcatatttattaagttcaaactgttttccaatttgtcttaagttactctctttgacctatgggccatttagaagtacgccatttaacttctcatattaggggatgttctagaaatgttctagattcccagtttaa

SEQ ID NO: 649844 - DNA, 441 bp, Homo sapiens
aaggatgcaatctgagaaaccagtttgtgagatgtttattcatctcacataattaaacttttctttccaatcaggagtttggaaatgctgtttttgtagaagctgtgaagggatatttgggagtgcattgaggcttatgttgaacaatggaacgtcttctgacaaaaattagaaagaagctttctagaaactggtttgtaatgtgtccattcatctcacagagttaaaactttctttggattcagcagtttgggaacactatttttgtccattctgtgaatggatatttgggagctctttgaggccaaagtcaaataagcaaatatcccaggataaaaactataaggaagcaatctgaggaactgctttgttttgtgtgcatttatctcacakagttaaactttcttttcattcagcagtttggaaacacagttttcctag

SEQ ID NO: 649845 - DNA, 466 bp, Homo sapiens
tctgttgcaactactcaactctgtagttgtaacatgacagcagccatagacaatacatgaaagaatggacacaggtgtgttccaataaaactttacgtacaaaaccagacagcatgggccataatttatcagccctgtctcatggtatgtagtattgtgaaatctcttttagcttttgatgcctactgycattagatgtattagttgttgatactattatatatctgaagtcccttcagggctagcaacaattttgaagaagtgaattaaacacacacacagttccaagttttgcgagatacataattctactgtatcctaaatgttatgcgttaacaatgaagaataaattgtatatcaaaagttaggtactgtttctctggacttaaattatataaacgtttatattatccaaattaagactcaatgaaagtaatgtatatttttacagataactctgcattct

SEQ ID NO: 649846 - DNA, 466 bp, Homo sapiens
tctgttgcaactactcaactctgtagttgtaacatgacagcagccatagacaatacatgaaagaatggacacaggtgtgttccaataaaactttacgtacaaaaccagacagcatgggccataatttatcagccctgtctcatggtatgtagtattgtgaaatctcttttagcttttgatgcctactgtcattagatgtattagttgttgatactattatatatctgaagtcccttcagggctagcaacaattytgaagaagtgaattaaacacacacacagttccaagttttgcgagatacataattctactgtatcctaaatgttatgcgttaacaatgaagaataaattgtatatcaaaagttaggtactgtttctctggacttaaattatataaacgtttatattatccaaattaagactcaatgaaagtaatgtatatttttacagataactctgcattct

SEQ ID NO: 649847 - DNA, 643 bp, Homo sapiens
ccatctgccaactctttcctacaagtccccaccaagagcatcattagcatactaagggctgggggcaacagagctgagagagaaccccttgagttgtgttgggcctccactaagttcaaaacaactacattccagaggcagggaacagaaaatagaaaggagttttgtctattcaaggttcaccaaattttcagctactgaaggtagagggcatggcaggaaatctgagataaatccatccaaggcactctaggctactgaaaataggggacaggaaagctaagaggaatcattctggaacacttgggccttcagctactgaagtcaggtgcaggagagtttaaagaaatccctctgggggcattccagccctttgaaaaatttaaagtagctgccttccaaaatccgtggtaaaagcaaagcaaaatctcttgaggtgcagaaagctaggaacaggactataaagggaaattaccagtgaccctgatgggcaaatagacagtaaattttttttaatttcctatggttcagaaakctggcaacacaaagagatcttaagaatcttgctaatactcaggtcccaagccctgctgaagggaaagtcttgagcctgtcctcaaaacgtttaaagcccagtgcaaat

SEQ ID NO: 649848 - DNA, 542 bp, Homo sapiens
cctactctcagttgatatctgcataccaaattaaactgaaatccaacaattcttcactctagctcttgctgatctgtggtaattatgcagtcacatgtgtcttcatggttcaaaaattcttaacacatatggtttgagagatattttacaaaagcacaaggtccgtgattaatatggtttggatgtgtgttcctgcccgaatctcatattaaaatgcagtctccaacattggagattggacctgtggggaggggattggatcatggggggaggtgattggatcatgagggaaggtttctcatgaatggtttagcacagtccctcttggtgctgtcctcgtgatagtgagtgagttatctcgagatytagtcattaagtgtgtagcacctccctcctcgctcatatgctcctgctctggccatgggatgtgcctgctctccctttgccttccaccatgattgcaaatttcctgaggcctctccagaagctgagcagatcccagcatcatgcttcctgtacggcctgcagaaccatgagctagt

SEQ ID NO: 649849 - DNA, 565 bp, Homo sapiens
tagggagaaggaagagattttggatggctaatgttsacaaatacttgtagttcatacacagtttattccattaatatcacagcaatggaaatgtttgagatttcgacttctacccttagacacaactcccaggctatatttgacagctattttctgccgtcaaggttccccatgactttctttctaacgtgaatacatttgaataaacatgtgttttggttgggggatgttctaatgatctagaaagaatgatagctatagaatcgtgaagagagcatacagtgcctgaggcaaaaaattctattggttatttaccatttggctgaagacttaatgctttgctttccctgaactggcctactgttaactggaagccttaccaataatataagtagtcaacacattttaaatattacatgtattttatactgtatttttacaacaaaaataagctagaggaaaatgttattaagaaactcgtaaggaaaataaagtatttactattcattgggtggaaatagatcctcataatgaccttcatcctcattgtcttcatgttgcatag

SEQ ID NO: 649850 - DNA, 529 bp, Homo sapiens
aagaagaaaaaaactccaccacagtttaacctagaatgtctgcttcttttgctctgattctagtgctgctccctctctctattttcttatgttttatatttatttttatagattcagggagtgcatacataggcttattatgtggacagatagtcaaatggtaaagtttgggcatctagtgcacccatcacctgaagagtgaacattatacccagcaggtaatttttaaatagaggataaagcagaggaaacaagtgacaaatgaaataccctaataacttggtaagyccaggctgcaaaggctcagaagtttgtcttcttgataagcctgggaatgttctcaaaaatgctatccagtgttcaacaccctcttctaaaatatggcagagtagaaaactagatccaaaggcctcacaaccttactctccattctggaatctattatttcaaaggaaccagctccctcatgtgtaagtgtctaagacttcttgctctcttcttaggcaaaggtgggctccgtattctgttt

SEQ ID NO: 649851 - DNA, 597 bp, Homo sapiens
tggttggggttatcagctttggattggttggttttcgtatgaaaggtgtaactcatagacaagttgtttgctatctctagacattggtttgctctgacgggacaatctgactaggatcagttaggcccacagatgacaaagcatcagtaaacacagaaaataaaagcataattaatacaaaggcaggccgtggtaagtcaaagaaaaagccctgtgttttataaaacttaaagcaaccactgaaatataacaacaaagagttatacctaataatccaatgaaggaaataaaatggaatcattagaaataatcaatacaaaagaaaatattaaaagaagaaaaagggaacaaaaacaaaagtacaaatagaaaatgaacagctagatgatagatttaaatccaacaatagcaataatcacattaaatataaatagtctaaacactccaattaaaaggcagagtttgtgcgattggataaaaacacaagaaccaacagtatagtgcttataagaaacacactttaggtaccatgtcgttaagcagatctctagagcttattcaycttgctggacttattgcctgttgattaccagctct

SEQ ID NO: 649852 - DNA, 612 bp, Homo sapiens
catgtgacacaactgcacttgtatccataaatccacacacacacacacacacacacaratttttgcgatggtgtctcactgtcacccaggctggagtacagtagtacaatcacaactcactgcagactcaatctcctgggctcaagctatccttccacctcagcctctcaagtagctgggactacagtgcatgccatcatgcccagttaatttttgtattttttgtagggatggggcttcatcatattgttcaggttggtctttaactcctgagctcaagcaattcacccgtcttggcctcccaaagtgctgggattacaggcatgagccaccaggcccggccaagagaaaaaaaaattaagaaaagtaaaaataaaattttcaattaattatggatcatttaaattatacacagagaagggcagagcaagatggtagaaaagaagcctacagcatttgtccctctagtaggatcaccaaattttaacaactacgtgcacacagaaaagcatcatcacaagaacaaaaatcaggttgttcgaacaatcacagtacctggttttaactttatatcactgaaagaggcattaaagagggtagaagagacagcct

SEQ ID NO: 649853 - DNA, 612 bp, Homo sapiens
catgtgacacaactgcacttgtatccataaatccacacacacacacacacacacacagatttttgcgatggtgtctcactgtcacccaggctggagtacagtagtacaatcacaactcactgcagactcaatctcctgggctcaagctatccttccacctcagcctctcaagtagctgggactacagtgcatgccatcatgcccagttaatttttgtattttttgtagggatsgggcttcatcatattgttcaggttggtctttaactcctgagctcaagcaattcacccgtcttggcctcccaaagtgctgggattacaggcatgagccaccaggcccggccaagagaaaaaaaaattaagaaaagtaaaaataaaattttcaattaattatggatcatttaaattatacacagagaagggcagagcaagatggtagaaaagaagcctacagcatttgtccctctagtaggatcaccaaattttaacaactacgtgcacacagaaaagcatcatcacaagaacaaaaatcaggttgttcgaacaatcacagtacctggttttaactttatatcactgaaagaggcattaaagagggtagaagagacagcct

SEQ ID NO: 649854 - DNA, 593 bp, Homo sapiens
gatctaccattctggggtctggaggacagtggtcctcttctcacagctccactaggcagtgccccagtagggaatctgtgtggggactctgacctcacatttcccttccacactgccctagcacaggttctcaatgaaagaaagccccacctctacagcaaacttctgcctggacatccaggcatttccatatatcctctgaaatctaggcagaggttcccaaacctcagttcttgacttctgtgcgcctgcaggctcaacaccacatcgaagctgccaaggcatggggcttacaccctctgaagccacggcctgaacygtaccttaggcccttttagtcacgactgggatgcagggcactaagtccctagaatgcacacagtatggggaccctgggcctggcccacaaaaccatgttttcctcctaggcctctgagcctgtgatgggcagggagggggcactgctgtgaagacctctgacatgccctggagacattttccccattgtcttggtaattaacatttggctcctcattcctaagcaaatttctgcagctggcttgaatttcttcttagaaaatgggatttttttt

SEQ ID NO: 649855 - DNA, 593 bp, Homo sapiens
gatctaccattctggggtctggaggacagtggtcctcttctcacagctccactaggcagtgccccagtagggaatctgtgtggggactctgacctcacatttcccttccacactgccctagcacaggttctcaatgaaagaaagccccacctctacagcaaacttctgcctggacatccaggcatttccatatatcctctgaaatctaggcagaggttcccaaacctcagttcttgacttctgtgcgcctgcaggctcaacaccacatcgaagctgccaaggcatggggcttacaccctctgaagccacggcctgaactgtaccttaggcccttttagtcacgactgggatgcagggcactaagtccctagaatgcacacagtatggggaccctgggcctggcccacaaaaccatgttttcctcctaggcctctgagcctgtgatgggcagggagggggcactgctgtgaagacctctgacatgccctggagacattttccccattgtcttggkaattaacatttggctcctcattcctaagcaaatttctgcagctggcttgaatttcttcttagaaaatgggatttttttt

SEQ ID NO: 649856 - DNA, 639 bp, Homo sapiens
ctggttgcccatttttatggttacttcttgaatatatgctaaacaaggggtggattattcatgcctaccctttttacaccatgtagggtaacttcctgaygttgctatggcatctgtaaattgtcatggtgctggtgggagtgtagtagtgaggaccaccagaagtcactcttgtgaccatcttggttttggtgggatttagcggcttctttactgcaacctgttttatcagcaaggtctttatgacctgtatcttgtgctgtctcctgtctcatcctgtgacttagaatgctttaaccgtctgggaatgcagcccagtaaatctcagcctcattttacccagcctctattcaagatggagttgctctggttcacacgtctctgacaataccagctttcaagatttgttatacaattatagtaactaagacaggtttctacacagggagaggtaaacagaccaagggaaaataagagagaaacaaatccacacatatatggaaacctggcatttgacagacatggtattatagatcagtatggaaaggatgaaacacccaatatatggtgctgagacaactggtaatccacattgaaaataacaaagcaatctctacttcttgccacatccaaaaacta

SEQ ID NO: 649857 - DNA, 545 bp, Homo sapiens
agaatcacacgtatgaagaacagtttaagtgaaggtcccagggcaggaagagcttgcctcttttgagaaactgaaagcagtcagtgtggatgggagtttagtcaacagagagcagtggcagttggagttaagtgtgaagagttacaaaggaccccatggtggctgttagaacatggtttacaaaatagtatttcaaacaagcccttatctgatttcaatatgtgttttgtttcctctccattaatttcacaccctctggccgttttcatatctctcagatggcttctgcctttatcatggtgttgtggtaggtctcagttcctccctgggcctgtcattttatatgaattggtaactgaatgctgattatgcctaaaggastgctgctatataagcaatgctgttttcattgatttgttgtgatttataatttgaaaagttgagggagaatgttgaagagaaattgagtggatgagacagaagtgctaaagggcaaagaatatcagtatctgaatttccaaacgatacaagttgttatgttgttt

SEQ ID NO: 649858 - DNA, 639 bp, Homo sapiens
ccctgcaaaagtaagagaaattatgtctcctctgtggagcaagtgagggtttagccttccctgtgtcaagagtgcagtactctccctgcactcattaccatggttcattgcaagccagcactccacaatgtcagatggccaccgcagctcagccttctgacttcaatattctcaaaggctgggcagtcttccttttgagaacattaagcaggaagaagaaacgtgagactaatttatgcaaatgtatgcaacatcaatcagatggtctctgccagatagcacaaatcactgggtgatttagtgctttcctactatgcacaaaaagacttccagacaccagctctttagtatggtggcagtgtacctcggccaccagctaggctttgccatggtaatttgtttstttatctttaaaaataaacagcacaattcaatctaacatctcagttaaataagtaaaacccaaaaggcaagcttcagtgtctcgaataaattacccaagcctactgaaagttagaatcaggccgaatttaatctaagagaaagtagaataagaaaaaattttttaaatgaagagtttcaaggagagtgagagctcaattgacactgataaatatcacagagagatgggaaaggagg

SEQ ID NO: 649859 - DNA, 585 bp, Homo sapiens
tccttcctttgaagactccaactattatggcatgtaccattcaatgaattcatatgaattcaactcacatttagttcccgatgtgmtaattccattttctatttcctcattcttcacttagtactgtctcctgcagtttcttgctttaacttagttaagctctcttcgtttagcatcatttttttcttgacgttttcctccatctttttagttttctattttgtttgattttggatcaaggagacctgctttcttttctaacccagaagcacattcattgtatagtgtttactaccttataagcacataatcagagaaagcctttctgtattctgtgaattcaacaagttaatcccttatggggcaatcctcctgcaaccctgttattacacaaaggttttatgtcacaccatccattccccagtcttctcttctgcagagttctaataatcagaggtttcagacctaataagaaaatctgaacaattccacatttcactttccctgtaacttgaggatagttcccattaatttattcagcaaataagctgagtgcctatgtgttagacactcctctgaattaat

SEQ ID NO: 649860 - DNA, 585 bp, Homo sapiens
tccttcctttgaagactccaactattatggcatgtaccattcaatgaattcatatgaattcaactcacatttagttcccgatgtgataattccattttctatttcctcattcttcacttagtactgtctcctgcagtttcttgctttaacttagttaagctctcttcgtttagcatcatttttttcttgacgttttcctccatctttttagttttytattttgtttgattttggatcaaggagacctgctttcttttctaacccagaagcacattcattgtatagtgtttactaccttataagcacataatcagagaaagcctttctgtattctgtgaattcaacaagttaatcccttatggggcaatcctcctgcaaccctgttattacacaaaggttttatgtcacaccatccattccccagtcttctcttctgcagagttctaataatcagaggtttcagacctaataagaaaatctgaacaattccacatttcactttccctgtaacttgaggatagttcccattaatttattcagcaaataagctgagtgcctatgtgttagacactcctctgaattaat

SEQ ID NO: 649861 - DNA, 585 bp, Homo sapiens
tccttcctttgaagactccaactattatggcatgtaccattcaatgaattcatatgaattcaactcacatttagttcccgatgtgataattccattttctatttcctcattcttcacttagtactgtctcctgcagtttcttgctttaacttagttaagctctcttcgtttagcatcatttttttcttgacgttttcctccatctttttagttttctattttgtttgattttggatcaaggagamctgctttcttttctaacccagaagcacattcattgtatagtgtttactaccttataagcacataatcagagaaagcctttctgtattctgtgaattcaacaagttaatcccttatggggcaatcctcctgcaaccctgttattacacaaaggttttatgtcacaccatccattccccagtcttctcttctgcagagttctaataatcagaggtttcagacctaataagaaaatctgaacaattccacatttcactttccctgtaacttgaggatagttcccattaatttattcagcaaataagctgagtgcctatgtgttagacactcctctgaattaat

SEQ ID NO: 649862 - DNA, 515 bp, Homo sapiens
ggtggaggacaaatgtttagttcataacaggctcacattagttttaattttctgtactaattcacttttatacttcatatgcccaaccatatcattacataaggtaaataattttctttggttcaaaatcagaggaaatacagacagtttaatgctgtaatcatgacccaaaaagctcctatttgaacctaaaatcctctttctatacctggctgaaatcctaccttctttaagaaaaggattcagttaatataaagtgtcacattaagaaaatgaactctatagatttttaccagcatccagtaatgaatatccctaacataaataacacataagccttttcatgtttatgctgaaatcagctttattggctgcctttctgtaagacatattttttttttttactctatacttaaaagttttaaaataacagtttaatatcaaaattccactgtcaacagacagattttgtattcttcatcatgcaaacakaaaatgggtatattttgattaaa

SEQ ID NO: 649863 - DNA, 630 bp, Homo sapiens
cttccctctgattaattccttactaactggcatgtttgttctttatgtgtaggagtaattgctgtcactggaggattttttcttcttaagagggaaagatacaacttcaagttggtggatggaagatctatgaataatgccaaacacatctgcaccttctttcttccatggtagtttcaataggcatgaagaaaaacagcaaaacagcacttccttcctgagtttgtaaaattccctacctcctatctattgctcaatacggctcagtcccacagtctatgagtcacaaccactgagtagggaaaatgattgaaataattatttaaaaataattcttccattcagccagctaagatcttactttaaaatgctaatggcaccaagaaaaaaagtaatatgacctactttttaatatatctatactattgttagcaggcaagaataaaatcaccctctttcaaggaaaagtaaccaataaaaaccataagaacatgggaactataaaatattctgcagtrtacactaataacagtatgttagaactgaaatattagcttacttaaacttgtcaagatataatcaggaataatgaagtaatgactcccaaagattctttcctccaaaaataca

SEQ ID NO: 649864 - DNA, 630 bp, Homo sapiens
cttccctctgattaattccttactaactggcatgtttgttctttatgtgtaggagtaattgctgtcactggaggattttttcttcttaagagggaaagatacaacttcaagttggtggatggaagatctatgaataatgccaaacacatctgcaccttctttcttccatggtagtttcaataggcatgaagaaaaacagcaaaacagcacttccttcctgagtttgtaaaattccctacctcctatctattgctcaatacggctcagtcccacagtctatgagtcacaaccactgagtagggaaaatgattgaaataattatttaaaaataattcttccattcagccagctaagatcttactttaaaatgctaatggcaccaagaaaaaaagtaatatgacctactttttaatatatctatactattgttagcaggcaagaataaaatcaccctctttcaaggaaaagtaaccaataaaaaccataagaacatgggaactataaaatattctgcagtgtacactaataacagtatgttagaactgaaatattagyttacttaaacttgtcaagatataatcaggaataatgaagtaatgactcccaaagattctttcctccaaaaataca

SEQ ID NO: 649865 - DNA, 483 bp, Homo sapiens
gcgttagctccaagatcctcatatcttgatgctggatgaggtcatcttgtcctaagtgaaacagagcaaaaacaaggtcaaaagttaccatggaaaactaaatattcaaaatactcagtgtttcctgtaggtagttctaaagatgattagaagttccatctctggcaaaatgttaaatgaaaaaagcaaaaagtttacaagtactatggtaactggtaaattttactgtatatggcgtctctttaaaaaaaaaaaatttttttttttttttttggtgacacggtctcactctgtcacccagactggagtgcagtggagtgatcacagctcactgcagccttgacctcctgggctcaagtgatccacccacctcagccttccaagtagctrgaatcacaggcatgtgctaccatgcccagttaattaaaaaaaattgttttagagacagggtctcactatgttgcacagataggtactgaattc

SEQ ID NO: 649866 - DNA, 574 bp, Homo sapiens
ggaattaaaaagaagaaaggaaagaaaaggaaggagaaaagaaggaaaacaacaacaaagccagtcaaacccggtttgtcactttgatacaaagttgttaaataagagtatcagtgaaattgttgaccaaagccgtctgctgtttcttcaaactgaaacaatagaattgattggaaacagatcctagatactaactctctcttaaacaatgttcaaaaccactggttaaccactatttacccctgagccattaagatttcatactctgatcaaaatgtacacaacaaaacatcactaattgccttttcaagaaataactyggcccaagataagtaacatctgattcctttcttgtattttaagcattattgattagaaataccaaagtattaaaatctcattaataaacacttttttcatgatccattactaagtccagtaagtcacaataaaattattcttcagacaaaaataactgttcaaatcctgtgattgtttaaacaaagcgaaaaaaaaatatcttaaaagaacctgcttgtgactggtgggtgttatttcattttagaaatcctac

SEQ ID NO: 649867 - DNA, 426 bp, Homo sapiens
gaattcttttcttgtcttgtggttatagtagcttctctttgtgagaggtttgacttttattttatcttcatttccttgacattactttttttctttattcattttctatcttccaagttaaaggctttcctcacatatcttatcatctttgtatctgataatatttaagagtgagatactgaaacactggctggaagccctgagaatatgagagctggkctggtctgatgtgggtttcactgtaagagcatcacggtgggttgggtctactgagggaacttccaatgtcaatatctttccaaggtcaggtctttcatcatggaccaagcatatttcccagagaagactccatgtcctgcctggagggtgaaggtctaactttcagtgttcttggcccagagaaggaaaagatggatatgtattggg

SEQ ID NO: 649868 - DNA, 338 bp, Homo sapiens
ccgagaaactgctttggaatgtgtgmattcatctcacagagttaaacctatgttttgattcagcagtttggaaacactgtttttgtagaatctgcaaaagaacagttgggagctaattgaggccattgttgaaaaagtaaatatgcccagataaaaactagaaagaagttgtgtgagaaacagctttgttatttatgcattcggctcacacctttaaatctatgttttgattcagcagttggaaacactgttcttgtagaatctgagaaaggatatttgggagctcattcaggcctatggtgaaaatgttaatatctcaacttaaaagctagaaagaa

SEQ ID NO: 649869 - DNA, 507 bp, Homo sapiens
gcagtttggaaacactgttttcatagaatctgcgaaaggacatttgggagcgctttgaggacaatggtgagaaagcagttatctcaaaacaaaaactagaaagaaattatttgagaagcagttwtgttatgtgtgcattcagctcatacaattaaaactatgtttaattcagcagtttggtaacaccatttggaaacactgttttatagtgtctgccaaagaacatttgggagctcattgaggacaatgttgcaaaagcagttatccccagataaaaactagaaagaagcttatttgaggagcagctttgttatgtgtgcattcagctcacacaattaaactatgtttttgattcagcagtttggaaacactgttttcgtagaatctgtgaaaggacatttgggagcactttgaggattatggtgaaaaagcaaaagtcttcagataagctatctgagaaacagctttgttatgtgtgcatccagctcacacagttaaaactatgtt

SEQ ID NO: 649870 - DNA, 476 bp, Homo sapiens
agtaaaatttaaaaatatagccaaggcaggtggatcatttgaggccaggaatttgagaccagcctgagcaacatggctcrgcttaccacaacctctccctcctggttccagtgattgtcctgcctcagcctcctgagtacttgggattataggcatgtgccaccacactgggctaatattgtatttttagtagagacagggtttctccattgttgctcaggttggtctcgaactcccaacctcagatgatccacccaccttgacctcccaaaatgctgagattacaggcatgagccactgagcctggccattagcactcattcctaatctccaacaactattaggctacaactgttcttaaaaattgttattgttatcttaaaaattgataaaggacccactgtggtcctttatcttgcacttctatgagccatctaagaaagtgaatttaaatgatatcttgtggctgtataact

SEQ ID NO: 649871 - DNA, 476 bp, Homo sapiens
agtaaaatttaaaaatatagccaaggcaggtggatcatttgaggccaggaatttgagaccagcctgagcaacatggctcagcttaccacaacctctccctcctggttccagtgattgtcctgcctcagcctcctgagtacttgggattataggcatgtgccaccacactgggctaatattgtatttttagtagagacagggtttctccattgttgctcaggttggtctcgaactcccaacctcagatgatccacccaccttgacctcccaaaatgctgagattacaggcatgagccactgagccyggccattagcactcattcctaatctccaacaactattaggctacaactgttcttaaaaattgttattgttatcttaaaaattgataaaggacccactgtggtcctttatcttgcacttctatgagccatctaagaaagtgaatttaaatgatatcttgtggctgtataact

SEQ ID NO: 649872 - DNA, 584 bp, Homo sapiens
aacctttctctggattcagcagtttggaaatactgtttttttccattctgtgaatggagattcctgagctcattgaggccaaatgtgaaaaggcaaatatccaaggatgaacactggatggaagctatctgagaaactgctttgtgatgtgtgcattcatctcggagagttaaatctttcctttcattcagcagcctgaaaacactgtttttgtagattctgcaaagacatatttgtgagcacaatggggcctatcgttaaaaacgaaatatcttcagataaaaactagaaggaagctttttgagaaactgctttgtgatgtgtgcatttgtctcacagagttaaacctttctttggattcagcaatttggaaacactgtttttgtagaatctacaaagggaagtttgggaactcattgaggtcaaagatgaaaagttgaatatccctagataaaaactagatggaagctatctgagaaaccactttgttatgtgtgcattcatctcgcatatttaatccwatcctttcattcagaagtttggaaacactgtttttgttgaatctggaagggatatttgagaat

SEQ ID NO: 649873 - DNA, 584 bp, Homo sapiens
aacctttctctggattcagcagtttggaaatactgtttttttccattctgtgaatggagattcctgagctcattgaggccaaatgtgaaaaggcaaatatccaaggatgaacactggatggaagctatctgagaaactgctttgtgatgtgtgcattcatctcggagagttaaatctttcctttcattcagcagcctgaaaacactgtttttgtagattctgcaaagacatatttgtgagcacaatggggcctatcgttaaaaacgaaatatcttcagataaaaactagaaggaagctttttgagaaactgctttgtgatgtgtgcatttgtctcacagagttaaacctttctttggattcagcaatttggaaacactgtttttgtagaatctacaaagggaagtttgggaactcattgaggtcaaagatgaaaagttgaatatccctagataaaaactagatggaagctatctgagaaaccactttgttatgtgtgcattcatctcgcatatttaatccamtcctttcattcagaagtttggaaacactgtttttgttgaatctggaagggatatttgagaat

SEQ ID NO: 649874 - DNA, 424 bp, Homo sapiens
ggattcatggagttcccaataagacccctttggccgggcacagtggctcatgcctgtaatcacagaactttgggaggccaaggcaggtagatcacctgaggtcagaagttcaagaccagcctggccaacatggtgaaaccctgtctctactaaaaatacaaaaaaaaattagctgggcatggtggcacatacctgtaatcccagctactcagaaggctaaggcaggggaatcacttgaacccaggaggcagaggttacagtgagccgagattgcaccactgcactccagcctgggcaacagagcgagacwccgtcttaaaggaaaaaaaaaaaagaccccttccccaagaactgctcaaaggtgggtgacatggctaccttcagaggtagcctgggtaacatcaacaatgagagcacacctgtc

SEQ ID NO: 649875 - DNA, 621 bp, Homo sapiens
  misc_feature 544: n = A,T,C or G
tattatttagtccaaaaataaagaaaacatgtcacaactctgcaaggaatgcacaaactaatgtgagatgtaaatctgtaattaaataactgtacaataaacatattatcctctatcttacgccctttcaatctgcttcatctcaggaaatggtgccactgttcactcagctgcccatgtctccagcctagacttcatcattcattcctgtttccctcattgcccaaatccaatccatttgaagtttaycagcatggctactgctcttaattcagctcaattatcacttccttagaaagaccatccctgacctcttgatttaatgcagccagcctccctgctgtggtttgaatgtgttccctccaaaattcaggtgttgccaatgtgatagtgttaagagggagggcctttgacaagtgattaggtcatgagaggtcctccctcatgaatggaattaatgcccttataaaagaggtttccagcagcatttggctagcttgcccttctgctttctgccatgtgtgccacagcattcctctcctcncagaggatgcatcaacaaggttccctcttggaagcagtgagtaggtctcactggaaaaccaaacctgccaatgtctt

SEQ ID NO: 649876 - DNA, 621 bp, Homo sapiens
  misc_feature 544: n = A,T,C or G
tattatttagtccaaaaataaagaaaacatgtcacaactctgcaaggaatgcacaaactaatgtgagatgtaaatctgtaattaaataactgtacaataaacatattatcctctatcttacgccctttcaatctgcttcatctcaggaaatggtgccactgttcactcagctgcccatgtctccagcctagacttcatcattcattcctgtttccctcattgcccaaatccaatccatttgaagtttaccagcatggctactgctcttaattcagctcaattatcacttccttagaaagaccatccctgacctcttgatttaatgcagccagcctccctgctgtggtttgaatgtgttccctccaaaattcaggtgttgccaatgtgayagtgttaagagggagggcctttgacaagtgattaggtcatgagaggtcctccctcatgaatggaattaatgcccttataaaagaggtttccagcagcatttggctagcttgcccttctgctttctgccatgtgtgccacagcattcctctcctcncagaggatgcatcaacaaggttccctcttggaagcagtgagtaggtctcactggaaaaccaaacctgccaatgtctt

SEQ ID NO: 649877 - DNA, 588 bp, Homo sapiens
  misc_feature 145: n = A,T,C or G
cgtttgtcagtgtttcctgtatgatatttgacacaaggagactaatctaatttttctttggccagaacaaagtttattattattttttttaaaacttcagtgtccttccttttctccttccttctttccttagtattttcttctntgcaggtttttcaaagcatagataacctaacactgtcatttattacagaggaaaactgaatataaagaagtttcatatcaaatactgccaggaagatacatttaattactaaagtttataaggccctgttttaatgtaatttcactcatttaaagtgatattatgtattgttttataatttaaaaaatgttttttcatgtactttatcatttcaattcagtgttgtgaggcagatacatatctctatcacaaatgagaacattaattttccatgctttaaaatgtacacatttatattgttttcagtagtagaagtaggactcaagccccagggttgcaatctaggtcctgcgttttacscataatacattatttttcatgtaagggaccttgggcccagggtggaagcaatgtttattggaggcttctgtcatgccctcagt

SEQ ID NO: 649878 - DNA, 577 bp, Homo sapiens
ctgacattctgccattctcagaagatagccctcatattgggagctgaggaaattgrgattcctacattcttggctgtgccattctggcgtggaatttctgtcttgctgagttgggaaggggaagtaaaagaatagattttggttcaaataccacaaactctcataattcttacagagttttgtagattttcttgattttttttttgtttttgctgtatacccttaggatcatttcaaaaagcattaatttagttttgatagttttcatcaatttcactggcaagtggctcagcagagatcctcactgtgtcatgccagaagtggaactcctctctattattccttccaactacaatctacctgatctcaaaagaaaataacttaaaaaactgaatagtgtcttagattatctccaagacaggatatttttgtgcaagtgatttttggggagaggcttttaggaaaaggggagtgaggaaaggagaaggggcagggaaacgcactaagcaaggttgtggtctcagctagaacccagcttcaggctgatcccctaagaattatggaacacaatttttca

SEQ ID NO: 649879 - DNA, 604 bp, Homo sapiens
tcagttctggccaatatggcatagaggaattcttcctggggcttcttttttcctccttgattaaaaagaaaacatagcccccttccttcctgcttgagaccctgaagtgaggatgtgattctttgaagtacagcaaccatcttgcaatcatggggtagcaagcacgaggaagaaacggccatgccctgtgcatggtagagcagaaggatgactggcctgctgcactcagtcacatccctctgcaataagatatggtcccaggkagtgaggttgaagaggtagaccactgcaggccacttagatacgtcatgagagaggaagcctaaggtgcttcaagaataagcaaagatagcacaaatgaggggcacccatctcaaagttccgaaagatggtgcaggcagatcaggagttagccagacaaagatggatggaaaaatcccaaaaagaaaggaacccaagcagagagaccagcatgtcaaaagcaatgctataagagagaacatggcctgattgctgagtttctggggtgtagttcaggaagatggagcatcaatggccaagcaggtagtgaggacagatgaggctagagagcagggcagcatcc

SEQ ID NO: 649880 - DNA, 664 bp, Homo sapiens
ttcataagggagtgatccataaagccaaatgtcacagacaagtcaagtaaaaggtatttagtgatgtactaattatatttatttttattttttgagagtgatgaaggagtaagaaagatgatagcaatctgaagggcaartgtgtggtattaaagattcatcatgtactctgatatctctttaattcagatttctcaaatataaatagtaacagtttgggaaattaccatgtgctaatttgtactaagaaaatctttgtcataattcatcaactcagcgtaagagctctaataaattagttataaaataaatatacattttccaatttacagaggtggaaaccaatagagtcacgaaaagtctaagaaccttgtaaggaaaaccctgtaatacaaaggtaacatgtttgagaaacaatcaaattttcttaccacaattgactaagcatgcaggtgtggtacatcccttgctggacttttccctaattattccatatttgtgatgctattttaaatgctattgtggttttcatttaatttttaattatttgattccagcatataggaacaaaattgattttatatattgatattgcatctggaaaccttgctaaacaaacaattttggtagcttttcattgttattgttctattagattttatac

SEQ ID NO: 649881 - DNA, 591 bp, Homo sapiens
gtactctcttcatgtcttttcccttgtcctttctgagatatttgttctgctctcttgcctagtttctacttattttccatgattcgcttatttcataaaatctattccagcctaagcatttcatttctctcaaattgtgtcaagactatattacacygaactctactctcctaaagagagtcaaaaaatcatatttatacttgttatatatcctccacatgtcatagctctaagttgggaacattgctagttaatatataagatacagatggtttgtgagaaaagatacaagtctcttactgatgaattagatcagagataggcaaactatggtctatcagccaaatttggccggatgcctgtttttataagtaaaatttcattgggacacaaccacacccattcatttatgtattgtgtatggtggctttcctgctataacaatcagttgagaccatttggcccacaaacctaaaatatttactctctggtctactacaaaataagtttgccaactagcagttgagatcagcggttttccagtgtgggttccagattttattggcctactcacactcttaagcattgtgg

SEQ ID NO: 649882 - DNA, 620 bp, Homo sapiens
tgttattcaggtgattttgattattaaccaatctgttaaaataggataaaaaggttaaagctaaaaatattaagaaatgaatcaaacactatgagaaaatatcaacgagaggagaaaaaaacaaaattctataattaaatacatatgtatatagacatatgtaggcaaacatacatttaaacatttacatataaaatatgtaaagtcatcgatgatgtaaaagatatatttaaggcaattatttagagatatgaatttttaaatattaaatacatgagaaaatttgagagaagtggagaggaggacgtagtaataaaacttaactgtgtctaatgagtgttgcatgacaagagaatgcagttaatggaagcaaaacagtattcaaatatttatagaaaaaggcatacacyattctagaattgaataaaaagcataaattcttagatttacaaagcataatgaatctcgagcatagtaaataaaaatgaatttactcctaaggaaaagtgtagaatactaaaataaataaataaataataaatatttaaagggaggaagtaaactagattacagaaatgatacagaagatatctccaaagcaaaaaaaaaaaagagtcaaa

SEQ ID NO: 649883 - DNA, 551 bp, Homo sapiens
aaacaaagagccatcattcatgtaaatggcaaaattattatgcagttctctctcagtcttagaacttcatgatctctcatttttgcatttctgtgaatgtgtgctccacactcacctctgctcatctgccttctttaacagtttatgatttttttcccattatttgtttcctaattgtttatgttccagtttacccaccacatcgtaacatctgtgagaacaaagacattgttctaccttatcaccattttaatatttaaaataatgctggcacatagtttgtgctcagtaagtatttgttatagaatgaattaattcatatattaataacagatggttttttaactattaattaaaagaagcacatttataggtatgggtcatttataagtcagggaatggcaatatttagaaatctgctaaatagggctgggcgcggtggctcacrcctgtaatcccagcactttgggaggccgaggctagcagatcacgaggtcaggagattgagaccatcctggctaacaggatgaaaccccaccagtagtcccagc

SEQ ID NO: 649884 - DNA, 498 bp, Homo sapiens
ctcagataatccactctgaaatccccttctacagctgcctcctccaccaccatcacctctaaagcctacttcttctcctctaaatgcctagatatgtttactgttccactaatatactgcattgcaatttgtttatttttaaatctgcctgttaaatcatgagctcctygagatcaaaaactgtgctttagtttcactgattctccaagacctataatagcaagcaaaaaaaaattggcaatagaaatagtaatgtagttgtagtttgcatttactaagtgttcactgtgtgcttaacagcagcaatagtactatttttttcataaactgccctaatccataaataggtattgaatgaagttaattaataaaggagcaatagaatgctaatttatatctccataaagattaagattattattattcacatactacaaaacctcagtaaataattattgagtcaattagttaatagattagtcacataggaagcaaata

SEQ ID NO: 649885 - DNA, 599 bp, Homo sapiens
actaaccccaaaacatagctttgttctgtatggatctggaccacagactttctgtaggacattttgtgattttgttttaaaattaaaaacaaaaagagtgaattaagcatgtttaaaggtttttaaaaaaaacggtgaattactaggtttaatttgtataataaatactttaaaatttaagtttttggggttgttttggattctttaaacaattgtgatggttagtagatatttctaatacaaaagaaaaactattgagaattattgagtaaccctctagttagttttgcatataacaacaatttggtcatatagcacagcaatgtcaaagacaaaatatactgtaaaattttgtttggccattttcttacaggtagtgttgaagccacatacctaaaatctcctgatgacaatcaatactataattttatcrgtattcaaattatccatgagttgcttgaagaaacctttcaataaaaaatcttttattgaacttctaagaggcatgttcatgcatttgtatgcccaagtattgaacaggattttttcttacagaactgaagagagtaatatgttagactttacaaagttgccatgct

SEQ ID NO: 649886 - DNA, 569 bp, Homo sapiens
aatttggccttgtaggtcctcttacagcatgcccatcctaccaattaagaaaccatattcaaaggaatatcacttcattcaagacttgagggcagctaataacatcgttcagggtattcacccgacagtgccaaatccatacattcttttgatggctaaactgggtgattataattggtttcagttcaggatgtaaaagacactttcatttgtattctaatagaatagaaggctcaactattatttgccttkgaatggcaggatccagagacaaaaatcacccttcagtattgttgaactgtttttgtcacaaggatttaaaaattcttcgaccattttcaatgaaatcctatccaaagatttaagacatttgcaattgattaataaaattttattacaatgcttcatgaactgttaatagctagtacaatttataagtatctgacaaacaccatctaagtatgaaattatttagcacatggtggatatgaagtgtccctacaaaaggctcaaatttgcaaagaacaagtgacttaccttgggttccaattaaaaccaggaactcaaag

SEQ ID NO: 649887 - DNA, 569 bp, Homo sapiens
aatttggccttgtaggtcctcttacagcatgcccatcctaccaattaagaaaccatattcaaaggaatatcacttcattcaagacttgagggcagctaataacatcgttcagggtattcacccgacagtgccaaatccatacattcttttgatggctaaactgggtgattataattggtttcagttcaggatgtaaaagacactttcatttgtattctaatagaatagaaggctcaactattatttgccttggaatggcaggatccagagacaaaaatcacccttcartattgttgaactgtttttgtcacaaggatttaaaaattcttcgaccattttcaatgaaatcctatccaaagatttaagacatttgcaattgattaataaaattttattacaatgcttcatgaactgttaatagctagtacaatttataagtatctgacaaacaccatctaagtatgaaattatttagcacatggtggatatgaagtgtccctacaaaaggctcaaatttgcaaagaacaagtgacttaccttgggttccaattaaaaccaggaactcaaag

SEQ ID NO: 649888 - DNA, 528 bp, Homo sapiens
catgttattatacacaagcttctgaggtttacatataatcgaagtttaatcaaaatgttgagttgaaccactttcttgcattcattttcgaatgtgagtgagctcattctctggaatgatctccagggaggtaaattgcttactctaaataggcagattatgtgtatctgcagattcccatgattctctgctctactcagatattccagtagtgacaactaaagtcatacagatgaagaactcttctggatggaaaggattgtaaaggatatgaccagtcatgagagatataggtaaaatgaatgagttttttacaaaatagcctttaatgtcattgtcagagacaagcctcagaatgattggttggttgttctgacttggtgtgacatgtgtcttgttcctatgagacttgtgtgcaartaagccctttgggcatcccagtttaggaaagaaaaacaaaaggaaaaattattttacgaatggtaactttatagagcaaataatttactgacagattctggtagatag

SEQ ID NO: 649889 - DNA, 601 bp, Homo sapiens
agcaatggtgaggtattgaactcagtgctgccctgttatagcagaaagtaaaaccaaaccaaactcagctgatgcccacccacagagggagcatttaaactagtcttactacagtcacacagtcctagtgatgatagccaaagacaggcttgtgtcaccgcatcccaagcttcaggtggctcagaacaaagaaagagagaccctgtttgtttgggagaaagtaaggaaatagaacaagagtctctgccaggtaatccaaagaactcttacagattttgtccaagactatcaaggcagtatctctactagtctgcaagaaccacagcattggtgggctttggcccctaaagtagatacagtttagatcacaacactcgagttttctgaaatatctggaaagtcttgccaagaagaaygggtaccaacaagcccagacagtgaagactaaaataaatacctaactcttcaatgcttcaatgttcaatgaacatctacaagtatcaagaccattaggaaaacatgaccttaacaaatgaactaaataaagcaccaggaaccaagcctggagaaacagagatatgtgagcatacagacagagaag

SEQ ID NO: 649890 - DNA, 597 bp, Homo sapiens
aaacaatttcatagtggaaacagtatattagcattcctaagaccccacctctgaatccccactttcttacttccttatgtcaaagcagagaaaaataaagttttagattggactgtgtgcctacagacttcagaaggaatttctgtgattccagtttcctttagtggtgtttctggtaactaggatcagttgtcctaaggttatagctttcatcctgaaatttcccttacatttatataaagcacatctcttcagttataactagagtgacctttcagctctcttgtcttggtgtcgtgcagttttaaaaatgggattatactctttaatctgaatatatttaaacatattaygtatatttatattaacatatttaaacatatttgaatatgaaattgaagggctttttgataggacttaagaagtgatttctgaatagttccctgggaatccaggtcccctgagaattgagagaggagcttttcttattggcccagctggggagctggttttgggaatcccccacagataacttagaatcagcaaagcaaacttacattttgaccctgtaagaagcaaacacccctttcccctttc

SEQ ID NO: 649891 - DNA, 589 bp, Homo sapiens
gttcactcctcaagctgtctacactctaaaaaaatgcaacattgtatttgctatgtcatcattgatttaatgtattgccttatggatccaggctgcaggggccaacatttgctaaaaattgaacacgtgatctttggtgacatatttgtgctcttaattataaccataaaacatgcttcaaatttgaatagaatagtgccaaagcaatgctgcctgaatttataattctctttcacatagtgtgttggcccaactcatccagtgcctagtggttttgtggtttagaagtttgttttctggaatttgatgcagctgttctctccgagtgacgatccttggggaaaggtgggtaaacacataaagcttccgaaagccatcccwgatctctcaaaggcagccctcagcttaatgtctgggtcagaagtataacaaagttagtcttggtaattgttcatgtgttttcaaagagactcatcatcaacactcacaacctggtttcaatccaatagagctttatgaggctaaattctaaacagcatcaaaatacataagagtaaaaagctcagcctggagaactgatacttacaac

SEQ ID NO: 649892 - DNA, 596 bp, Homo sapiens
gcctcaaaaacttgcaaccttggggaagtcactcaacttcctgtgcctcagtttcctcctgggaaaaatggggatgaggataatcttggcagaggattgttgagaaggttgagtacatttggagcctaacagctttagcgggcacttggccactgtgagaactcagtgagggttagcgatttcacacaagggccttctcaccaggctccggcagacgggacrttcctttgctatttgagatgtttttggactcttcctctccctctttgcccctttcccttttcctttccccttcttcccttctttcttcttatggggagctagctgggaggtgctcagttggggccctcagtgactggagtctcaagggctctgctgccatcggctgtgagctcagcagcccctgtcctttctgggccccagcctctccatccaaaaaccagaaggctgcctggaaggttccagaagttgctcttggtcctgacccctgcccacatctctctgttgagaagactggtgccactctggggacagctggcttcccgcctcttcccgggtccctggggaagtaactcctctcccaggaggagacagac

SEQ ID NO: 649893 - DNA, 504 bp, Homo sapiens
cctggagcctgctggcactgttctactcctcagggtgtctgggaaggggcattttggacccctgtgtttctggaggtgcatctgaacaagactgggcagtttgggaggctgctacaggcttagtagttggctctgaaaaaaacaaaagaacaaaatatagactgtgtctgccaatttccatggtgtaaatgctctcastacagccaatttcaagctaccaatatgatgacattgaacttggagaggggaagtgatgcacaccattgtgtctggtgggaaccacttgagtgcgtgccctcatcggctgagccaccctaggtcctcagctgttcctgattcaaagagaaccagagaagaagctgggcaggacagccaccttcatccaaacgtgtgtccctctggaggcacagcaactgtcttcccaaaagagaggaggctttgactgggttgggtgtccttttccatgtgtgtggcacactatggggcagggtttgcctcaggcca

SEQ ID NO: 649894 - DNA, 486 bp, Homo sapiens
gagaaatctgttaagagaattgttgagatttttccctttgtatggcttcaaggtaagaactggcatggctttatatggagtttattacagcctaccacaaacttattaataagaaatagtgttccatatattaggtcatcaaccaaagataagtgcaagatatttctctttttttttttttaacgatggccctaagaataaacattccttacttgatttaatgacaaactgagacatagaagtagtrgttggtgagagggagatcaaaaggccccccttttgtagctgataaatatgttggaagaaatgtaatttatttattattatactttaagttttagggtacatgtgcacaacgtgcaggtttgttatataggtatacatgtgccatgttggtttgctgcacccctcaactcatcatttacatcagatatttctcctaatgctatccctcccccaggcccccaccccacaacaggccccagt

SEQ ID NO: 649895 - DNA, 569 bp, Homo sapiens
atttaaatctctttcaccaggaaaagcccagatgatttaagagatcacctgatttggttatgctctacttagataatttgtcattaaacaacagcattagttgctggcataaacatttgctacaaacttgaaaaccccaaatgttcatcaataatagattaaataagttgcatattttaatgcagtgaaataataaatgtcaatgaaagtggcataattatatagctaccaggaagcaaaacagatgaatgtcaaacacagcttactgaaaggagacttataaaaagagtacatactatatgattsctttcacaaaatgttcaaaaacaggcagaggtgtaaggactgggagacagtggaagagaggcttctggggtggctggtagtgttacattctttaatctggtggtgttcacattgttcgcattgtgataattcgctgacctgttcctgcaggatttatgtagttgtctgtagctatttctttctccaaacaagatttttaaaaattactggttatatcagccattattcttcctctttatcaccttggccttcaagacttcccc

SEQ ID NO: 649896 - DNA, 591 bp, Homo sapiens
acagatctgaggctcgcctttatctggccataacgacagaatgctttcggcatattctgcatgtccgtgtgctgtctgctgcagtctcatctccttgcttctctgtgacgctaaaaatggtccagaaaagctcctaccagctatcctaccattctggagatttattccgaagttacaattttatccctcaggatggcaaactaccttaaagaattctccatgccagcgttattttatggtacagctgtagatttcttttctcagcatttccttgcatcatattattttcgctagtcttagcaggcctcatttgtctattttttagagctacaggtagtttttagtttcaccaaagatagagctgtgctttcatctcttcttttacaattctctcrttgttttggaatgatttcagagagaagaggcaaagaccacagaaatgttattattatgccattgtaaaccagaagttaattcttaaaatttattttgttatcaacttctgtgtcttctgtcaactttggacttactcattaaccaattgagggttaatgtggggagatatctgaataatagtaacattaataggac

SEQ ID NO: 649897 - DNA, 467 bp, Homo sapiens
atcagagcaactggtgaggatgtgccaaatctagattaaacttgaaaatatgcttgaccattgtgtttcctggtcctttcagatcagcttgctgcaattttgattcatggagccctcaaatatagctgtgaaattaagttagaggtataacaatgccttaaaatgtgccaggttatgaggtaattaggttggttgtctccagagttaaactgccaggaatagatgttactcttatactgtaaaacactatgaaatcagattactttcaaatgatgtatcacaaagtcatgggattggggggaagcagttgtgagtatggaaacccarggcttacatcacatcactgtcttggttttttaagagacaaggtctcactccattgcctaggccagagtgcaggggcatgatcatatcccagcttgtcttatactaaatatgagaacaatgtttccactctcgcctgtaaa

SEQ ID NO: 649898 - DNA, 467 bp, Homo sapiens
atcagagcaactggtgaggatgtgccaaatctagattaaacttgaaaatatgcttgaccattgtgtttcctggtcctttcagatcagcttgctgcaattttgattcatggagccctcaaatatagctgtgaaattaagttagaggtataacaatgccttaaaatgtgccaggttatgaggtaattaggttggttgtctccagagttaaactgccaggaatagatgttactcttatactgtaaaacactatgaaatcagattactttcaaatgatgtatcacaaagtcatgggattggggggaagcagttgtgagtatggaaacccaaggcttacatcacakcactgtcttggttttttaagagacaaggtctcactccattgcctaggccagagtgcaggggcatgatcatatcccagcttgtcttatactaaatatgagaacaatgtttccactctcgcctgtaaa

SEQ ID NO: 649899 - DNA, 626 bp, Homo sapiens
caatattgtcaagaaggcaattcttgccaaattgatctataaaatcagcacagtccttatcaaaatccagtaggtatcttgtagaaactgacaagctgatcctaaaattcacatggaaatgcagaacacccagaattactataataatttttaaaaagaatgacaaagttggctgggtgcagtggctcacacctgtaatcccagcactttgggaggccgaggcgggtggatcacctgaggtcagtagttcgagaccagcctggctaacatggtgaaaccctgtctctaaaaactacaaaatttagctgggtgtggtcatgggtgcctgtaatcccagctaattgggaggctgaggcaggagaattgcttgaaccygggaggcggaagttgcagtgagccgagattgcgccacggtactccagcctaggtgacagagcgagactccatctcaaaaattaaaaaaaaaaaaaaaagaattacaaagttgactttcattactaaatttcaactcttgctctaaagacacagtaatcaatacagggtggtactgtcccaagaatatagatgaaagaaactgaactgtgagtccaaaaataaatcttggcatttatggtcaatttactttt

SEQ ID NO: 649900 - DNA, 626 bp, Homo sapiens
caatattgtcaagaaggcaattcttgccaaattgatctataaaatcagcacagtccttatcaaaatccagtaggtatcttgtagaaactgacaagctgatcctaaaattcacatggaaatgcagaacacccagaattactataataatttttaaaaagaatgacaaagttggctgggtgcagtggctcacacctgtaatcccagcactttgggaggccgaggcgggtggatcacctgaggtcagtagttcgagaccagcctggctaacatggtgaaaccctgtctctaaaaactacaaaatttagctgggtgtggtcatgggtgcctgtaatcccagctaattgggaggctgaggcaggagaattgcttgaacccgggaggcggaagttgcagtgagccgagattgcgccacggtactccagcctaggtgacagagcgagactccatctcaaaaattaaaaaaaaaaaaaaaagaattacaaagttgactttcattactaaatttcaactctygctctaaagacacagtaatcaatacagggtggtactgtcccaagaatatagatgaaagaaactgaactgtgagtccaaaaataaatcttggcatttatggtcaatttactttt

SEQ ID NO: 649901 - DNA, 587 bp, Homo sapiens
actcgaatagacatttattttaagaagatatacaaataatcaataaacacatgaaaagatgttcaatattattagtcattaggagaatgtaaatcgaaaccacaatgagattctactccacatccactaatatgtctataatcataaagacagacaataagtattagtgcagatatggagaaattgctggtgggaacgtaaaatgatgcagccactttgaaaaatagtttggcaggtcctcatcgagttaagcatagagtcaccacataacccagcaattccactccattccacctaagagaactgaaaacatgccgatacaaaaacctgtccatgaatgttcagagcagcattattcatgatagccaaaaagtggcaacaacccaaatgtgcaacagctgatgaggagagaaacaaaatgtggtatatccatacaakggaatattattcagccataaaaaggaagaattctgacacatgctacaacatggatgaaccttgaaaataccacgtcaaacaaaagaggctactcacaaaagatcacatattgtatgattccatttatatgaaatgtccaaaataggcac

SEQ ID NO: 649902 - DNA, 622 bp, Homo sapiens
attaagaaaatctggtacatgtacaccatggaataccatgcagccataaaaaagaacgagatcatgtcctttgtggggatatggagggagctggaggccattaccttagcaaactaacacaggagcagaaaatcaaataccacatattctcacttgtaagtggcagctaaataatgagaacacatggacacacagaggggaacaacacacactggggcctattggagtgtggaggttgggaggaaggagaggatcaggaaaaaaaactaatgggtactaggcttaatacctgggtgatgaaataatttgtactacaaacccccatgacacaagtttacatatgtaacaaaatccatgtwcccctgaacttaaaagtttaaaaaacaatcagtggcttccaggggttgggtgggtggggaggaatgaatatatggagcacaatgaagttttgggatagtaaaactgttctgcatgatactaaaatgttagatacacaacattatgcatttgtcaaccccacagaactagaaaaggcaaagagtgaaccctaatgtaaactatggacttcagttagtaacaacatatcaatgttggttcatcaactgtaaaaatataccacacc

SEQ ID NO: 649903 - DNA, 550 bp, Homo sapiens
taatgaaatatctgtggtttcacattcacttctattttgagggtggttcactgtgaatagagtcggcctagagctttacttttactatgtaaaactcagatagaaaatatgcttttatacctgtgaaagtgaaagtaaacccaccatgatctaaagtgatctatatgaagattgtggcatgccttcatggaaaagagagatgaaattggaaaaaaaaaaaaaaaagccaaaaataatggctaygtgtcagcattcccagagccaaaggcaccctgtgaaaaattttaattgtggaattataacaaatgacatatcctatatgtatagaagtcaatggggagatggggttgacccctgaaggggtatctgtcaaggtttggatccatttttagttgtcgcaactggaggagagactgatattgtcagctggttgatagaagccagggatgccgctaaacatcctaaaatgcccagaacatcctcctgaaaacaaataattatccaccccaaaatactacagtgttgagaaaccctaatatagatgtaaaat

SEQ ID NO: 649904 - DNA, 615 bp, Homo sapiens
cacaaggaaatttggaccaatcttatctatgtcttatctagacttcagttgacatctggctaatgttcaaaattacttacttgtatgttgagtcatctttgtttttcttattaagtagagaatgttctgttgggtctaaacaagattcctccttagaaaataaagaaatttccttttgaatctcactttccactaaattagtatctcttttaggaaggaaaaggcagttttcaatatgccagtgctttgcctgaaaaaaacgaaaacatctgttttatttttatgaaatttattttcttcaaacatttacgtgtgtttaccatgtgctggattactaattaaagtcctggggtgggacacacaagaagatgaaaaagatatgactccggtccacaagaagcttacagttttacatgggaaatgaaagagtttcatgtaactttaataaaggtagaaaatgagatatgtcataagaaacaaaaattctctgaagagataataatgaactacaaaaatttttttaccattcccattttaaaattctgaatagccagatgtayatttactaaaaacaaaacaaagcttttgttaaagaattgccacacttatttattc

SEQ ID NO: 649905 - DNA, 514 bp, Homo sapiens
tatgtgcattcatctcacagagttaagcttttctatggattcggccatttgttaaaactgtttttctgcattctgtgaaaggacatttgggagttcatagaggccaatggcgaaaaacaaatatcccagaataaaaactagaaggaagctacctgagaaactgctttgtgatgtgtgcattcaggtcacagagttaaaactttgttttcattcaatagtttggaaaaactgttttcgtaaaatatagtaagtgatatctgggaacgcatagaagactatggtgaaaaaggaaatgccttcagataaaaactagaaagaagctttcagaaaaactgctttgtgatgtgtgcattcatctcacagagttaaacctttctatggattcagcaatttggaaatacttttgttgaagaatctgtraagggatatattggaacttaatgaggtcaatggcaaaaaagcaaatatcccaggaaaaaaactagctggaagctatctgagacactgctttgtg

SEQ ID NO: 649906 - DNA, 547 bp, Homo sapiens
gtgatggatgtctgtggagtttcatcacaccaggagagctgtcacaccacttgcttcattctatatgctctactggtttgctagttaacagttatacaatatatatttgctcactctccatgcaaacagataaagactaacaattaggagctcattattatttgggaaaaaatccttagcaactcagcaatatacactttaaaacaaactggtatccaaaagatgaatgatgctctcactctttctcagtagtaatgccctctttctttgagtatgtgattcagtttcaaaatatcactagcctactaactctttatgctaaaagaaaaagtctagtatwagagaagaaaaacaatgaaaaaatgaagtttcatgattacttttgttaaactcttacgtaattattttcttatctgcaaagcaagagtgaatgtcagttgcaggaaaaaaaaaatgtgtccaaaactttctccaaccttaacaattcatcagggccaatgtacccgagaactagagaccaacagcccaaacagataggagtgagtaa

SEQ ID NO: 649907 - DNA, 538 bp, Homo sapiens
gagcagggttagaagaggatttgagaggagagaggaggctggggcacaggtgggcccaccgacgagggaggacccttctttatctttctgagaagatgatttagagactcccacctgacagaggactccatgatcagtgactaacttgctgtgtgaccttaggcaagtcacttaacctctgcgcaccataatgctctcatttgtaaaaccgggcaaagcatggctgccctgcctgccacccggctgctttgtgggctcaataagcgagcgcgtgtgaaagcactctggtgaaagccccataatagcgccacggaaatggaaggtgttattattatgtaaccgcgctgactcccgtcagacagtgtggagtcaattggagkcttgagggatgtcagggaattggctgctctctgaagcttgtcatagagacctgtcttttcattgtactcctttcatgtcactgttggcccgatgaaagaaggggagagaatctttgatatgtctaaatattccgctcccaccaagatgggaggaattc

SEQ ID NO: 649908 - DNA, 568 bp, Homo sapiens
atcttctcagcttgaggctgcatgttttttgaatcccagatatacatatacatatatatatgtgtgtgtgtgtatatatatatgtatatatatgtgtgtgtgtgtgtgtatatatatatatatatatatatatatatatttttttttttttttaaatcaggcagcagctcccagttttctcacctaggggtagctggtggccaagaggaaacgaggagttgtcgtaagtcaattttttccctggctttcctttctaaagccacccctgaggggatgatgctggaagtgggagaaggaggaaggggagagggagagctcyaagggaaacaggaatagggagaaaaggtgcttcctggcccctggagatgtctccaatgggtgcaggtttcgtaagtagtgggaccccagctttccctgcagcaaaccaggaggaatggctcggtgatttccagtaaccctgaaggtttccagccccagtgtgggacaaaagcagagtgcagggcacctaaaaagactaaggctgggaacagtgattgtttctgaagtaagcagaggggttcgaggaccc

SEQ ID NO: 649909 - DNA, 562 bp, Homo sapiens
ggagaaggaggaaggggagagggagagctctaagggaaacaggaatagggagaaaaggtgcttcctggcccctggagatgtctccaatgggtgcaggtttcgtaagtagtgggaccccagctttccctgcagcaaaccaggaggaatggctcggtgatttccagtaaccctgaaggtttccagccccagtgtgggacaaaagcagagtgcagggcacctaaaaagactaaggctgggaacagtgattgtttctgaagtaagcagaggggttcgaggacccgaggtcttcccaaagcctacattttgtgtaagactccgtgaccttcacataatttttgcctggggggaagagcacctggccgtgatgcactagggttacrtttccaggcagcattgcagaaggagggctccagaattcaaagctacaatgatttatggaaaaggctaaatgggattcttcctgtaagcttgagtttgaagactgaggttcttgcctccagagtagatattgaggcagattagttccagaattgggttacggtgttcagagatggctaatgtg

SEQ ID NO: 649910 - DNA, 624 bp, Homo sapiens
ttttttttttttttttttgcaactctgagctatggagtatcttttctctcccacttaatgtcattggtggactgaagccagtacatactggytcatgagagccaattcttagcatctctttccaattctgcattcagtgatatcacattggtaacttgatattggcagtggtgggaatattcacgtcatagaaattggcaaccactataaataggctttttcccccacagataaccaagaaccagttgttgaacacttaccagcacaccaatgcataagttctccacacatttgtttgtttatatacatacgcagaggggccatggggaaagagaaagagacatgattacttcatgactgtaacactctttttctaggcagtcctgttttgctttaagaaatgtttaagtttgcttttccaataatgatatcctacagaagcctataagctttgccctgtgtgcacaagataatgaatttaggcctttggaaattggtcacctgctggtcatgacaaaggctctattaacactcggtcatgtaaatttgctctgccttggctctttagaagatgaaagtgtctgctggaccatgcatacacctgcatcagttttatcctattga

SEQ ID NO: 649911 - DNA, 624 bp, Homo sapiens
ttttttttttttttttttgcaactctgagctatggagtatcttttctctcccacttaatgtcattggtggactgaagccagtacatactggctcatgagagccaattcttagcatctctttccaattctgcattcagtgatatcacattggtaacttgatattggcagtggtgggaatattcacgtcatagaaattggcaaccactataaataggctttttcccccacagataaccaagaaccagttgttgaacacttaccagcacaccaatgcataagttctccacacatttgtttgtttatatacatacgcagaggggccatggggaaagagaaagagacatgattacttcatgactgtaacactctttttctaggcagtcctgttttgctttaagaaatgtttaagtttgcttttccaataatgatatcctacagaagcctataagctttgccctgtgtgcacaagataatgaatttaggcctttggaaattggtcacctgctggtcatgacaaaggctctattaacactcggtcatgtaaatttgctctgccttggctcttyagaagatgaaagtgtctgctggaccatgcatacacctgcatcagttttatcctattga

SEQ ID NO: 649912 - DNA, 576 bp, Homo sapiens
acaactcattctgatcatttagtacctcttcctggtgattgctttctggaaagtgtcaataagcaaagatctttacgttttcttccccacttaatatgtcyatccatgccatgtgctattttcccattcctcctcctcctaatttttctctctctcccatttcagaactctagccaaacaaacaagtcagtcaccattaccctgtgttcatatattgttctaatcactgacaatttccctttccaaacaaggtggatattcaacaagggcattgcctgcaactctgccttttggtaacatttcccttccacccttcttcagagccacctaatagtacaattatcatgtagcagcaggatcctttggcactagtggatgctgcagtgtgccactcaggcttctcttcatgtgtgaagtactcctttctctgccacaagtgttcactactgttcattgcccagaacagcctggtacattcaccctcaacggacaagccatgcctgatcaaataaccaaacagcccctacccacatttgacctgtgaatcagcccagcatggaggctgtgtctaagaaa

SEQ ID NO: 649913 - DNA, 627 bp, Homo sapiens
tctcagctcattgccaacacaaaaataagggggaccttaatcttatgacaatgagctgaactacaccaataacttgaatgagcaaggtaatcaactcttccctagagcctccagaagatatcatattctgccatcaccttgatgtcagcccatgagactggtgttgtactgctaacctacagtactgtatgataattagttcagtttgttttatgcccctgagcttttgttgaattgccaccccagcaatagaaagctaattcttatacccaagatgttatccggtgatgttccctgcctagaatatgttttctctcatattcacaaaactcgtattcgttagatttcaagtttaaaaattcgatttatcttccactttttaaaaagttatctttcagttagaaaaaaaaccctcctatttctgaataatttgggcagtactatcaatgtacattcttgcacagctgtaaatatytcagtgctatttttaatagtagattgcaaacccctaggagccagatatataacttcatactttcttgcatttcttcttgtaagcagtatattttaattttgtttactttgaacactttgcaccttttatccagtaaaaaacagataaaagga

SEQ ID NO: 649914 - DNA, 615 bp, Homo sapiens
aaatagtattctgatcaatactttgcaaatatcttgtttctgggcctaaggtctactttttgcctgagaatatatgcattcatttatgtgtgtgtgcatgtgtgcatgttggtgtgtgtgcatacgtatgtatttggaacttagtccttgaacatttttttggagttccctagtcatattttataaaggtgtatatagtaccattttttaaaattttaattttatattgatattttcctctaccttatatatgttttctttgaaagcattgcattgaaatgagattgcacttatatgagaaacaaagtgaataattacaagtataatattaaattgccttttaatttgcctttttattattggctttttgattaacaatagagcaagaatctgttaacagctgctccaagcagaacatttgctgaagtccagaacaactaattgggtacacgtgttaaaactatcacaggctccttcttccactgaaccaaaaacatggcttaacatttttctaaaaacaaacccatgagagagacttyttacaatacttatgggaatgctttttttggtatccttcttcttgaatactgttgggaaaaaaaattaagagcaaaa

SEQ ID NO: 649915 - DNA, 610 bp, Homo sapiens
ttctctcctcttttctttggttagtctagtcagcagttaatcaattttgtttatcttttgaagaaccagcttttcattttgttcatcctttatattggattttttggtctttatttcatttagctctgctttgatttttttatttattttcttctgctagctttgggtttcatttttttgtttgtttgttttactagttccttcaggagtgatgataggttgttaacttgtgatctttctatttttttaatgtatstatttaatgctataaactgccctcttgttactgcttttgctctatctcagaggtttaggtacatagtttcaattttcattcatttcaaaaattgtttaaagttctgtcttaatatgataattgatccaaagatgattcatgaggatgttatttaatttccatgtatttgtattgtttccaaagtttcttttggaattgatttctagctttattccactgtgacctgagaagatacttgatatgattttcattttaagtctattgagacttgttttgtggcctaatatatagtctaccttgaagaatgtttcatgtgttgatgacatgaatgcatattctgtagtttctgggtag

SEQ ID NO: 649916 - DNA, 549 bp, Homo sapiens
acattgctggtagtaatataaaataaaatggcacatctattttggaaacagtttggtagttccccaaaatgttaaacatattactgtgtgatcttaagtatatatgaaaacaaatgaaaacttatgctcacacaaacaattgtatataaatgttcatggcagcattattcatgatagccaaaatgtgggatgaacccaaatgttgactgattcttagaaaaataaaatatgttatattcatataatggaatattttgcagccttaaagaggacagaaaattctgacatgtgctacaacatagatgaagcttgaagacattatgcaaagtgaaataagtcagtcaaaaaagtcaaataccacatgattctacttataggaggtacttagagcagtcaaaattgtagaaacataaagtagaatggtggytgctaggtattggggcagaaggaaatgtagatttattgtttaatgggtatggattttcagctttacaaagtcaaagaattatcaagatagatgttgatgatagctgtgcagcataataaatg

SEQ ID NO: 649917 - DNA, 615 bp, Homo sapiens
gagtggttctctacgagatgatgttaaataaattaagaaagtaagctcaaacttctctctttgagagacagcaaaaaaaacaagaggaaacaaaataaaagtggttggaartgttccctgagttccatgagccataaagctgtccatgtacacaccctctgaggttagtcactgtgagagtggacatcaatcactgtggtcacactggaagactccctccaggaaagttaaaaggagaaataaagacctaaacagtgccatacatcaaacccatgaatctgagaacagggtggtaaaagatgcatttatggtacaaattaatccaaatgaccaagaagggcaaatgttttccacatgtacactgtgtgtcataacgtactctgtgactgtgcataaaataatagcacactttgccagaaaggtcattttatttatcaattcaaaacatatccatgcagatttgcagcatgccaatatattcaacattttacttaacattaagacattttattcactcctgttctcaggccctttgatgaagtgacatttcctgacattttctgacactttctcacagtggagtaaactgacattaagtcagatttcgctggatta

SEQ ID NO: 649918 - DNA, 615 bp, Homo sapiens
gagtggttctctacgagatgatgttaaataaattaagaaagtaagctcaaacttctctctttgagagacagcaaaaaaaacaagaggaaacaaaataaaagtggttggaagtgttccctgagttccatgagccataaagctgtccakgtacacaccctctgaggttagtcactgtgagagtggacatcaatcactgtggtcacactggaagactccctccaggaaagttaaaaggagaaataaagacctaaacagtgccatacatcaaacccatgaatctgagaacagggtggtaaaagatgcatttatggtacaaattaatccaaatgaccaagaagggcaaatgttttccacatgtacactgtgtgtcataacgtactctgtgactgtgcataaaataatagcacactttgccagaaaggtcattttatttatcaattcaaaacatatccatgcagatttgcagcatgccaatatattcaacattttacttaacattaagacattttattcactcctgttctcaggccctttgatgaagtgacatttcctgacattttctgacactttctcacagtggagtaaactgacattaagtcagatttcgctggatta

SEQ ID NO: 649919 - DNA, 476 bp, Homo sapiens
agctctgacctatcctattgggctgcttccttcctccatgtgagtgtactgactctaaaacgtcagtttcctccaggagtaacatggagagcctgactgtgttgtgtccttgtcacttgtgtcttcttccctctgtttgtgaaaacaatcttgaaatagattccygtaacgattcttgctaagttttaaagttgaaataaatctttatgtgttagcttaataaatctttacttattttcaaagcactttcctataaattatctcatttgatcatcaataacgttctgaatagtataactcagttgggatgctatcaggaagaagtggttgtattgaacggtctgcatataagatagaaagatatccattggagagagggaaaaaaaataagaaaaagaaataaatatgagtggagtataaaaataacagcttgatggaaagtgaaagaaataaaaagatataggaggttcaacata

SEQ ID NO: 649920 - DNA, 503 bp, Homo sapiens
ttttttgatgcattacaaagtaagttgtaagttgcaggtatcatggtgtacgggaggcaggactagattgcagttctgactcagacagagcagcatgtagaggattgtgtcgtgaatttttgccccataacgactgcaggaataaatcagaaaacctgagaggacccacagaccccctgaaggaagcagattgcttctgtagggcccgggagacccccaaatactgtgagtgcccaaactttgtaagtgggaaagggagaytgtccacccacgaacacacacctccactggggaaattgaaggcctagattacaggagaacattttcaccttacctggagctgagtcaatttagagagccgaacgaaatatagggttagaggaagcagcaggaaaatcacttggagttcgctgggtcccttaggaagctgtttttgcctggcctcaggtgggttctttaggagggcggccaaaggtgctgggaaaacgccacagggagaagga

SEQ ID NO: 649921 - DNA, 388 bp, Homo sapiens
gtattttgttaaggatgttagcatctatgttcatcagagatattggtctgtagttttcttttgtgcttatgtcctttcctggttttggtattagggtgatactggcttcatggaatgatttaargagggttccttctttctctatcttgtggaatagtgtcaaaaggattggtaccaattcctctttgaatgtctggtagaattctcctgtgaaacttctgatcctggacttttttttgttggtacgtttttaattacagtttcaagttggtctgttcggggtatgtaattcttcctgatttaagctagaagggttgtatttttccaggaatttacccatctcttctaggttttccagtttatgtgcataaaggtgttcatagtagcc

SEQ ID NO: 649922 - DNA, 586 bp, Homo sapiens
tttgtttactttattaaaatgccctctaaactgcaaggtcaaagaaggtaagtatgatatttggatattaatatctaccacttaatacagaaactattctagcacttgtataggcagtataagacataattttagaactctaaaataaaaactcataaactgaagttaaatatccatttcccactgctatctccttttccttttaacacattgatatcatttggatctgtgtccccacccaaatctcatgtcaaactgtaagtcccactgttggaggtggggyctgttgggaggcaattggatcatcgggcagtttctcttaaatggtttagcaccatctccttggtgctgttcttgtgacagtgagtgagttattgtgagtctggttgttaaaagtgtatagcaccttcccacctctcactcttcttcctgcttccagcccatgtgaagtgctggctcccccttcaccttctgccatgattgttagcttactgaggcccctgcagaagcccagcagatgcatcatgctttctgtataacgtgcagaaccatgagccaattaaactgcttttctttataaattacc

SEQ ID NO: 649923 - DNA, 585 bp, Homo sapiens
aggttatcattttggagtttcacttgattgggctttgttttgttttgtttcttttcatagaaatatttgatatatgtggtcaccactcacaactcttgcttcagtgaccatggatgacaggcagccccagctactgtttttctggttgtatgactatctttgcactcaggccatattttctctggttgttcctggccaatgactgagcatgctcggagtattgatgaaggccatttttaagatttgtgataaccttccaacagaagactttggactggagactyctattgtctgggccaaaatttcctaaactgtgtttcaggctgtgactctttcattctcatccttcttccttctccccctcctttgacagaagccaggcttgcatcactgaagactccctgcacttagatctgctttttcttcttaatctttaactaacgttcctctcataaccttttgagtgacttataattgcatagtatcagcttcttggaaaacctgacttgataaactatcctatttgaaatacagatatatacgcatttaacaatttttgacattattagcacactgagtattaaa

SEQ ID NO: 649924 - DNA, 567 bp, Homo sapiens
tggtataactatgatttaaatttagttctgtcttattataatattaaacaagtatgtgacttcgtagtgtaatgagtctctttcaaaacatacagcagttgcagcctaacatcttgttactttaggtggtgacataatgtattgactcatattgagcacttctaagtgtgagttttaagtagctttttttctttagaaaggtgctgaagataattcaaatacttttttgcatattattttgtgtccctgtagattgctaggactatgagggcagrgccatatatattgtgttcatctctctatattcattttctaatgctggtccaagaaacaggttgagatgctaagtagggaggccgtagaaaacatcattgaaaagatagcatttatgcaaaaatttaaaggtggtgagggattaaacatgtagatatctgaaagaagggaactcaggcagagggaaaagacagtgcaaaagcccaagacagccccatatctggcttgtttgaaggggttcaaggaaaccagtgtgactggagatgagtgaggaaggggagttaacgatgagca

SEQ ID NO: 649925 - DNA, 241 bp, Homo sapiens
agtttaaattagctcaattagaaatgaaaatggaaacattttaaccaatatcacagaaatataaaagatcatttgagactactatgtaacctctatgcacataaaaataaaagtaaagaaaatagatagattccrggaaacatacaaccctactagcttaaaccaggaagaaataggtatccttacagaccaataacaagcagtgagattgtataagtaagaaaaaaaaaatgctgactaa

SEQ ID NO: 649926 - DNA, 241 bp, Homo sapiens
agtttaaattagctcaattagaaatgaaaatggaaacattttaaccaatatcacagaaatataaaagatcatttgagactactatgtaacctctatgcacataaaaataaaagtaaagaaaatagatagattccgggaaacatacaaccctacyagcttaaaccaggaagaaataggtatccttacagaccaataacaagcagtgagattgtataagtaagaaaaaaaaaatgctgactaa

SEQ ID NO: 649927 - DNA, 566 bp, Homo sapiens
gtattttatcaaaacagctttctgagtatgtgatactgtgatatataagtaaaaaaatatgctaattcatgatattctgtccctggaagaatatggacagaggtttacatttaacatcaatgtcaataatagagtcagaattgatatcaaacttgagaaatatttttgccaaaagtaggtctttcataattaatatgaattgatttctgccaaactatyatatttagccatgtggtcagtaatataatgtaaattatatgtagatatatatttttaaagttgaggacacctaaataaaacatgtaaattattttaattacttgacaatctattatatacaaagtatttaagtatattttaaacatattcaatttaactaattttttgagtgatttgggcaaaattctgttttagttcatttatagacatgcttatatttgagttactgaaaatacaaacatttaagtagtctactcttagcatattaatatgtcctgtattcattacaacattaattgcattaaattcaactactatgaataaataatctatcacatatacatttt

SEQ ID NO: 649928 - DNA, 667 bp, Homo sapiens
cagaggctttccatttttcgagagtggctagaaaaaaaagctatgtttacaacatgactctactaagaaacctgaatattatttcattacttcttatcaagctaatatgagaaaggaagcaataagattaaaataaatgacagtcacttcttgractggaagcaaagaagtttaacaaaagaaaaaaaagcattcttccccactttcttaaaaattgagaccacattttaaaataattttgcttgaggtctaattaaaaatattatagtttctattttctggaagattatagtttttcaaaactgcaaccagtaggcagataaataaatataaattacgataaacataatgtagatgtatctttacagaaaactttagatcaaatattagctttttctacaaagcgtcagattttaagtatgttaggctttgacaatcatacagtttctgttgcaaccactcaactctgacataatagcctgaaaacatctatagaccacatgtaagtgaatgatcttgtgtccaaaaaaaaaaccttgttatttatgaaaacactgcagtttttactttatgcaatcgttatatgctacaaaatgttattttaaaaaattgtttcaatcatttaaatctctaaaaaccattattaccttgcaggctgtaccaaaac

SEQ ID NO: 649929 - DNA, 633 bp, Homo sapiens
tccatgttggtatatccttatgcatataactagaaatatattgctaattttaataaacttactttcaaaaatgtattctgtgttattatactttaacatgtgttcagtaactgygtgtgttcctaaaccttgtcatatttggatatgatttttagccataaatagtggggcaagatggaaaatctgaagttttacaaaaactaaatataagacaaaaacaatatatattcaactaaaaaggagttggcaacaaacttctctgattctatatcaaatcccaaaaaacaatggaatatgtatcagtaattattgactaccatagggtaataataataataaatggtcataaaataaattagttaatggaaaatgatagatattaattattgaatgataaagcacaatgtaaaacaaaatgatagaaataatcatactcacaaacataacaatctgtatgtagaagtctaggttttccaaattaaagctggttactcacaaaatccttgaaaagagtgagaagttggtggggtgattatatttttaagctatgaagtcagatagtgtgatgtttcatctcagtaccactataaaataaagttttaatcctgttcatgtcactcttaattttcacta

SEQ ID NO: 649930 - DNA, 633 bp, Homo sapiens
tccatgttggtatatccttatgcatataactagaaatatattgctaattttaataaacttactttcaaaaatgtattctgtgttattatactttaacatgtgttcagtaactgcgtgtgttcctaaaccttgtcatatttggatatgatttttagcmataaatagtggggcaagatggaaaatctgaagttttacaaaaactaaatataagacaaaaacaatatatattcaactaaaaaggagttggcaacaaacttctctgattctatatcaaatcccaaaaaacaatggaatatgtatcagtaattattgactaccatagggtaataataataataaatggtcataaaataaattagttaatggaaaatgatagatattaattattgaatgataaagcacaatgtaaaacaaaatgatagaaataatcatactcacaaacataacaatctgtatgtagaagtctaggttttccaaattaaagctggttactcacaaaatccttgaaaagagtgagaagttggtggggtgattatatttttaagctatgaagtcagatagtgtgatgtttcatctcagtaccactataaaataaagttttaatcctgttcatgtcactcttaattttcacta

SEQ ID NO: 649931 - DNA, 642 bp, Homo sapiens
tccgtatattcaattccttactatatatttctcatttgatattctatacccaattcaaacaaaaccatttcatgtatacaatgtacttttatttatgcttttctctatcattaagtagaaagccatttgcaccttagtctaaatctgaaatgtgcctctacctaacctttctaatacattttcactatttcttagttattagaataaatttacataatttctgaaacaactttctctatggagtattccctttrgtttcttttcccttccaaacaatttaatgaattacaaatatgggggagatattttttcaatgggtaagacttgacttctacaaatacatgtttaattccttctcaaaattatttctacttcctcttattcaacactgtgctagattttagggatatataataagacaatatatgaggtccttgctgttgtgaaaggtacattcttatctttggcaaattgtagaatctttagctttggtatacaagggcattggtgtttggtacatgcttggctctttgccttaagaattgcctctttccaccatgcatatttcacctgtgtgggaattcttgcagatctctatattattgatagccattttgctctgacattttatacaaagctgaa

SEQ ID NO: 649932 - DNA, 503 bp, Homo sapiens
gttttcattgataccaaatttatttttatgtacataaatgtatgattttaagttagattatttcaaactggtatccctgtaattatctgaacaaaatttttaagtagtcacattgacttttttttcaaaagttagttttaagctatttgataacatatggatmtacttcactaaagttgtatttttgtgtgtaattctttaatccatctggagatattttggttgtttttcgatcagatagccagttaaaccagaaagaaaaatcttaccaaaaagtttccacttagaaaatttaatagccaaaaaaactaatatatgcaagaatgaacaaaaacatattgataaaacttatacatcatatttttattgaaatatttcataatgaaatgtttcacatggttaaagaactacaaattcatccaatgtaaataaaaacttcatgggaaatgtataatatatgagggattatttgatatctgaaaaaattagatagaaaataaatg

SEQ ID NO: 649933 - DNA, 588 bp, Homo sapiens
ttagtatcctgcttgttgccttattagttgtttttctctcattgcaatcagctgttgccatgtaccttttgcatttrgtggtcagggtcttcggaattgtatgaatctgatatcaaatcctagttgtattgctgactagctgtgaaaaaagattttaaacttattattttcagtttactcatttattaagtaccaatattaatattgaaactagagaaatagattaaatggcatacttgtatagtaattgttacataggaaaactctcaataaatcaatgctgttattattaccattaatattccctagatgtgaagattgccttcagaggaaacatactggaaaaaaaaatgagttttacagaagtttttcagcagaagttgattggttttacacacacacacacacacatacacgcacacatatttacacacatataaatatgtatattttatatatatatgcacacacatttgtttctatttaaaatgaataaagtacgttagtcatgtgtgcccaattttctgatacactaaaaaatggaaatatcttggcagacactattgataggctatgcaaatgtaaact

SEQ ID NO: 649934 - DNA, 588 bp, Homo sapiens
ttagtatcctgcttgttgccttattagttgtttttctctcattgcaatcagctgttgccatgtaccttttgcatttagtggtcagggtcttcggaattgtatgaatctgatatcaaatccyagttgtattgctgactagctgtgaaaaaagattttaaacttattattttcagtttactcatttattaagtaccaatattaatattgaaactagagaaatagattaaatggcatacttgtatagtaattgttacataggaaaactctcaataaatcaatgctgttattattaccattaatattccctagatgtgaagattgccttcagaggaaacatactggaaaaaaaaatgagttttacagaagtttttcagcagaagttgattggttttacacacacacacacacacatacacgcacacatatttacacacatataaatatgtatattttatatatatatgcacacacatttgtttctatttaaaatgaataaagtacgttagtcatgtgtgcccaattttctgatacactaaaaaatggaaatatcttggcagacactattgataggctatgcaaatgtaaact

SEQ ID NO: 649935 - DNA, 569 bp, Homo sapiens
agccacctagtgggactgccacactccaggttggtgctggggaatgtctacaaggggtccagtgatgtgacctgttctcaaggctccgtagtgagtagcaacaacagctctcatgggggtgacaggagaatgacayagactctgtgagatttcttgattataagtagtcttggtgcattggtttttctgtaatgccacctgtagtagtaatgaactggtcacatggacagactcaggacctcctagttagccaaggttatataggcaaaggtgatagcttaggtcacacacaagttttctctttcctgtgcactgttagtgtgcctgcagatgctgtaatggattgtgtcagtaggcttccagccacaaggtggcacttgaaaaagagcaccagctggtagcagtgggatttgtgcttgccttatgttacccaggggaggtaatctgatgactcaggcaatgggcagggccattgagctctcaaaattttctattctttgtgttaagctaccagggcggatggaggggcaaagccagctgggggctgaatcaggcaagttcacattctg

SEQ ID NO: 649936 - DNA, 462 bp, Homo sapiens
ctccagtgctgggtgggattaaggcctttccctgtggcctggattgcttggttccccagtaggagtatatgtcctagaggcagtttatccctatctgacattctagggacttatagttttcctcctggctcatgatgtggacagcaacctgacacttctttcaaaargtctgtgctttctttcagttttttcctgttaattttctgtgttgcttcttggaaaaaatttacaatgtgaatctccacacacaattctgtctttccaaataggagaggcatgctaacaatgactctaatctgccattttgagaaaaaaaaaatactggaggtctttattatttttttaatactatagcccattctgagttttcattacaacctccactctagtattgtaactacttttcacaaacccttatctttggtagctggatttaattcattaattttaaaattttgataa

SEQ ID NO: 649937 - DNA, 462 bp, Homo sapiens
ctccagtgctgggtgggattaaggcctttccctgtggcctggattgcttggttccccagtaggagtatatgtcctagaggcagtttatccctatctgacattctagggacttatagttttcctcctggctcatgatgtggacagcaacctgacacttctttcaaaaggtctgtgctttctttcagttttttcctgttaattttctgtgttgcttcttggaaaaaatttacartgtgaatctccacacacaattctgtctttccaaataggagaggcatgctaacaatgactctaatctgccattttgagaaaaaaaaaatactggaggtctttattatttttttaatactatagcccattctgagttttcattacaacctccactctagtattgtaactacttttcacaaacccttatctttggtagctggatttaattcattaattttaaaattttgataa

SEQ ID NO: 649938 - DNA, 462 bp, Homo sapiens
ctccagtgctgggtgggattaaggcctttccctgtggcctggattgcttggttccccagtaggagtatatgtcctagaggcagtttatccctatctgacattctagggacttatagttttcctcctggctcatgatgtggacagcaacctgacacttctttcaaaaggtctgtgctttctttcagttttttcctgttaattttctgtgttgcttcttggaaaaaatttacaatgtgaatctccacacacaattctgtctttccaaataggagaggcatgctaacaatgactctaatctgccattttgagaaaaaaaaaatactggaggtctttattatttttttaatactatagcccattctgagttttcattacaacctccactctagtattgtawctacttttcacaaacccttatctttggtagctggatttaattcattaattttaaaattttgataa

SEQ ID NO: 649939 - DNA, 419 bp, Homo sapiens
aagctgctcagtctatggcattttgttatagcagcccatgctaatgaatacagatgaccgtgwgtctgcagaccttcctaggaaattattgagtccttcattgaatactaaactgtgaatacatgagagaaaataactgaagcctggggtaaaatgccaacacaaagtgtttgaagaacaattctcaaagctcagaaagctctgcaaatattattgttgccacaaaccaaagtagaagacagggtaatatatgagctattaggtagaatctttggaagaatcctgcttttgtgatggaactcactcattcctaaacctaaagcaactctacatcttctctaagaaaattttatagcaatctctaaaagcatcaaactgattccaaataatttaactgtgtttgagaacaaaatacaaat

SEQ ID NO: 649940 - DNA, 495 bp, Homo sapiens
tgttcagaaaaactccctcttctttaaccataagatcttgtggaacttattcactatcatgaggatgggatggcctgccaccatgattcaattatctcccacctggtccctcccacaacacatgggaattcaagatgagatgtrggtggggataaagccataccatatcaccatctctgtgcaaatgctctctctcttctatttagctctgcaattctagctaaattttcctttctaagccccaatcttcaatttctcaatatacagggagagttatcctttctttggattatcctttcactgtgtcttctggaaactgagagaaagcttgggataagtcagattttattttttcttttgtcagggatcagcatcctcagcttcttgtcaatgattaaaaatttttgtctgcagttagtttttatttgtgtatgtgtttttgttttttgtttgtttgttttgtaaagaatttagtttagttcctcttactgtatc

SEQ ID NO: 649941 - DNA, 495 bp, Homo sapiens
tgttcagaaaaactccctcttctttaaccataagatcttgtggaacttattcactatcatgaggatgggatggcctgccaccatgattcaattatctcccacctggtccctcccacaacacatgggaattcaagatgagatgtaggtggggayaaagccataccatatcaccatctctgtgcaaatgctctctctcttctatttagctctgcaattctagctaaattttcctttctaagccccaatcttcaatttctcaatatacagggagagttatcctttctttggattatcctttcactgtgtcttctggaaactgagagaaagcttgggataagtcagattttattttttcttttgtcagggatcagcatcctcagcttcttgtcaatgattaaaaatttttgtctgcagttagtttttatttgtgtatgtgtttttgttttttgtttgtttgttttgtaaagaatttagtttagttcctcttactgtatc

SEQ ID NO: 649942 - DNA, 495 bp, Homo sapiens
tgttcagaaaaactccctcttctttaaccataagatcttgtggaacttattcactatcatgaggatgggatggcctgccaccatgattcaattatctcccacctggtccctcccacaacacatgggaattcaagatgagatgtaggtggggataaagccataccatatcaccatctctgtgcaaatgctctctctcttctatttasctctgcaattctagctaaattttcctttctaagccccaatcttcaatttctcaatatacagggagagttatcctttctttggattatcctttcactgtgtcttctggaaactgagagaaagcttgggataagtcagattttattttttcttttgtcagggatcagcatcctcagcttcttgtcaatgattaaaaatttttgtctgcagttagtttttatttgtgtatgtgtttttgttttttgtttgtttgttttgtaaagaatttagtttagttcctcttactgtatc

SEQ ID NO: 649943 - DNA, 542 bp, Homo sapiens
ttaactcttataaatcctattaaaggacacacaaggttttaagatgacattttgttgttgttgttattgatgctaagggtagtgaagcaggatatttccctgacccctttgagggacatgcaacaggggtgcctcatttattcagccactgctctcaactcttcatgggagggagggattgtgtggctgaatgaggcagaaactggagtgcatgagtgctggaactggccagccacttcagtgctgccagaagcaaactctgtgtgggtcccacagcagcatccaggttgctgrgggcaggggtgcctgtgacccctgaagccccagagggagtgttacagtgctcttttagctctactgtttgcagatggctaaagcgtaaacagctgagtgggccctttgcctcattgggtgaggtggctaccctccaccagcgaaggcaaaaggccagtgtgacagccttttgtgtccacacttgtggttgccaagctcttatctggcatccaggaaaaatgaggtcgcatgaatgaattcaaggatgg

SEQ ID NO: 649944 - DNA, 641 bp, Homo sapiens
ggcggctgctcgtggccagacgttgtggaatcactgctccgattccacacacgctggccagctgccctgatggccgaagggaatccataaatggatacttataatccatatgccaaatgattgagaaactatgctaaacaagaccataccaatcatttcacaaacataaagcaatacatttaaagactatcccaacattatcaattcattaaacactgacttagcatgcagtgccataccctggatagtgaggatgacgccgcagaggatgatgggttcagcagcccagatgcccctcatgaccacacactcatttccccagtgcagggaacattggctattagcagctctcagatgggyccatttccagggaattgcccacagcagaaggaagctgcctcactcacagctatgccacttcttctctaaaggcagctccaatgcagtgtttgtttaacagaggagggtgggataaagtttgtgaatttagtcaactctgatgggtcatgctagctctggagctcttcaagggatcaacggagctctctgttgtaactgcagcatggtgcagcttctccctctgcccaatcctacttccctcattcacttaaagaatttgttgcagagagggctccccagca

SEQ ID NO: 649945 - DNA, 641 bp, Homo sapiens
ggcggctgctcgtggccagacgttgtggaatcactgctccgattccacacacgctggccagctgccctgatggccgaagggaatccataaatggatacttataatccatatgccaaatgattgagaaactatgctaaacaagaccataccaatcatttcacaaacataaagcaatacatttaaagactatcccaacattatcaattcattaaacactgacttagcatgcagtgccataccctggatagtgaggatgacgccgcagaggatgatgggttcagcagcccagatgcccctcatgaccacacactcatttccccagtgcagggaacattggctattagcagctctcagatgggcccatttccagggaattgcccacagcagaaggaagctgcctcactcacagctatgccacttcttctctaaaggcagctccaatgcagtgtttgtttaacagaggagggtgggataaagtttgtgaatttrgtcaactctgatgggtcatgctagctctggagctcttcaagggatcaacggagctctctgttgtaactgcagcatggtgcagcttctccctctgcccaatcctacttccctcattcacttaaagaatttgttgcagagagggctccccagca

SEQ ID NO: 649946 - DNA, 564 bp, Homo sapiens
atatctgtgatggcagtggctcagagtacagtttagttctttaaatcttaactcctgattgctttcagcttgcttattcacgcattcatcagatatcaacattttaggtgttaggtttcttcttctctggattcttccttttcagaagctatttttgtattttaactctcttccttgattcctctgccaagaagaggatgaattattttctatcagacctagagccacctcatgcccaataccactgctgtgattgccttctgtgtagagcagttaaaaaataacgtacacactccaaatttcaattcccacrctggttacaggctccaagtttcaattccgtttcaaaaaattcttgctcagcttccatctccagtgtccagtgccttcaggtagttcttttttgagagtcaatagctcttatttgtgggaagattaatttattaggagctcactcctctatgcttcaagcagaaatcctcatacacatatcatgataaagccaataaaaactccattttctacatattttcagccctttttgatcaaacattcttttaaatc

SEQ ID NO: 649947 - DNA, 571 bp, Homo sapiens
atacctacatcaggcctccagagccaggagttggggcattcaccccctgagtgaactatgtttggagatgacgccattacctccccatccccagctgctyttttgggacttccgtctgcatgtaaggcagctgggcagccctgcttctggctgggaacaacttttctgggtgtagagccagcagcacatgtgggtatcaaagctgcaacctttgtttcgttaatgtcataatctaacaaaaccagctgactggccaagattttgaaaaataataaaatgatggtttagtgccaaaacattccagccgatgcaatagggcctacgaagaaaagttaaaatgtaagggatcaccaaaactttttgtttagagtgagtttgggggtgagggagcaaagcacagtattgagatatttacttgttggtttggttttgtgttttgtatctctctgacaggtaggcgaaaagtgacttttcttacatcaaaaaatatttaggttaattttttaaaaaattagactaaaatctagtaaataataggcaaagaatataaatagttcacaaaaaagaagat

SEQ ID NO: 649948 - DNA, 571 bp, Homo sapiens
atacctacatcaggcctccagagccaggagttggggcattcaccccctgagtgaactatgtttggagatgacgccattacctccccatccccagctgcttttttgggacttccgtctgcatgtaaggcagctgggcagccctgcttctggctgggaacaacttttctgggtgtagagccagcagcacatgtgggtatcaaagctgcaacctttgtttcgttaatgtcayaatctaacaaaaccagctgactggccaagattttgaaaaataataaaatgatggtttagtgccaaaacattccagccgatgcaatagggcctacgaagaaaagttaaaatgtaagggatcaccaaaactttttgtttagagtgagtttgggggtgagggagcaaagcacagtattgagatatttacttgttggtttggttttgtgttttgtatctctctgacaggtaggcgaaaagtgacttttcttacatcaaaaaatatttaggttaattttttaaaaaattagactaaaatctagtaaataataggcaaagaatataaatagttcacaaaaaagaagat

SEQ ID NO: 649949 - DNA, 561 bp, Homo sapiens
gagactagaatgcaagacattataccactggctggtcagtgaaatgagaataaaaatggactgaagcggtagtctgtattaatgaaataaaactgacttaaraaaaatgattggaggccaggtgcagtggctcacacctgtaattccagcacttaggtcaggagttcgataccagcctggccaacatggcaaaaccccgtttctactaaaaatacaggaaaattagccaggcgtggtagtgtgcacctgtaattctagctactcgggaggctgaggcacgagaattgcttgaacccaggaagcagaggctgcagtgagctaagatcacgccatagcactccagcctaggtggaatgagactctgtctcaaaagataaataaataaaaattttaaaaattataaaatgattggaatatggtagctggggatggtggcaggcacctgtaatcccagctacttgggaggctgaggtgagaggatcacttgaacccgggaggtggaggctgcagtgagcggagattgtgccactgtactccagcccgggtgacagagcgagactc

SEQ ID NO: 649950 - DNA, 561 bp, Homo sapiens
gagactagaatgcaagacattataccactggctggtcagtgaaatgagaataaaaatggactgaagcggtagtctgtattaatgaaataaaactgacttaaaaaaaatgattggaggccaggtgcagtggctcacacctgtaattccagcacttaggtcaggagttcgataccagcctggccaacatggcaaaaccccgtttctactaaaaatacaggaaaattagccaggcgtggtagtgtgcacctgtaattctagctactcgggaggctgaggcacgagaattgcttgaacccaggaagcagaggctgcagtgagctaagatcacgccatagcactccagcctaggtggaatgagactctgtctcaaaagataaataaataaaaattttaaaaattataaaatgattggaatatggtagctggggatggtggcaggcacctgtaatcccagctacttgggaggctgaggtgagaggatcacttgaacccgggaggtggaggctgcagtgagcsgagattgtgccactgtactccagcccgggtgacagagcgagactc

SEQ ID NO: 649951 - DNA, 563 bp, Homo sapiens
acgcacgagttgctgctgtctgtgccttgtggaatcttaagtagaatgaaacaggcccccgacaatcaatattactgacaaataaattaatctcggcaaataaactgttgttagcttcaaggctgtcccagtacccggaataattgcttaaatgaagctgaggccttttcaccagtttgtggctattttttctggtcatctacctgtgggtagsactcaggttgtccagagggaattggttttataaaataaaatcatacagtggccctgaccttgctccattagctccctcagtgctagagctctgtcctggcttcagaacaaacactgttgccaaatgctgagaagatgcctgcccttcacctaccttgagggaggcaggaggcaagagagaagtaggcagtgattgtctacattgctgcccaaaccctgaagtttatcagaagtagtttggaagcttggggtaagcaaggcactcaatgtcaagattgcaaaattctagtttttcttaaggaatataaagggcacatatactcctgtgacttccaagatccctaagtttg

SEQ ID NO: 649952 - DNA, 613 bp, Homo sapiens
gacgtttaataataataagcctgggcttggactacatatgtctttttttttttttttcctgtttcattcttctggtaactcattttgattatttccttctttaacaaaagtattggtctgcaatraattgggagggagaggggaggaactagttcttcactatagacaaatgtcagtttagaagatctatgctgtttggtttgggaaatgaaaggtttgggctacatttattgtttgaatttggagggacagagagattactagggactagagtggtttgagcaggatttatggaacaagtgtgacttcacattgttacaaattataggtgaagaatgaaggaacattccaggatcaagtttcctaaaatttggaaataaactgtggaaattctcctaaggtttgtatctttcttgtctgaatctaagaatctttttctattatgatgagtgagatcaggaaatgaattaaaatattttaatttcctccttggttttgaagttctttaaagaagggatttagaatttaaatagtatggttattagtatctttgagtgaaggagaaagcgtaaattaaatgtcgtctcattttttaaattaggtagaaaagctt

SEQ ID NO: 649953 - DNA, 534 bp, Homo sapiens
atctcccagtaaatgaagagagtagattacaggcaagctgctaatctctttctatcaaatactgggtgaggtcataaaaagtgatttttgtcttagtggtttagcagggcatcttctcaagagcagctgtgagtttcttggttagattcctgtttagtatakagtcatgaagtttagccatagaagcctttgatgagtgactccttcatttgcatttagaatctgggatgtaagtaaagatgatcattagattttcatgctttttaattagacacactaaaatcagtaaaactagttctctctctaaatttattaatactttaaattttcttaattgtctctaccttcattaatggatatacccttacattctatttgaaggaaagtcattttctctcacccaatgtatatttcttttaccttgttttttgaggttgacaattggtgaattagctttgtcattcaggagtgtgtttaaaggtttaggagactgatatccaaattaacataacttccaagaacaatttaaaattt

SEQ ID NO: 649954 - DNA, 657 bp, Homo sapiens
acaaatatagcttgataactagttaatakaagcatttaggcatacctttatgtctttcaactaaagtagaaatagccctgcttttaactttgaatgcatatctaaagccacatacacacacacctaaacagtgacactaagaaacttatggcctggcactctttgctagttcctacagaattgccccacatgtgagatcaataatggtataaaggctgttctctatagactgaggctcaagagcgcagagatttgatacaactcaatatgtcccctgatgtagtcaaggtttcaagttttaaatatatcagttattgtagtttactaagttagaaagctaactccaatttctcaaaatttctcaaaattattccatggtattctacacagcacatgactttgagggatgtagtagtgtcccaaaagattgaccaaaaataaactgccaattatttttaattatagctactgttatgtctttatattactataatttggggtaggagtatgcattcacaatgaggagctaggatttttgtagaatggaagtctccagctccactttttgctaattctggccttgttcaaaactataaatttagtaaatcattgattgcatttttatgtgtacatctcaactcatattcttctgtagag

SEQ ID NO: 649955 - DNA, 560 bp, Homo sapiens
aatatttcttggaaatgtattttttgtatcctcaaatacaggaatatgcaaaataaaaatgttaaagaaattacataagcagttatattttcccttttcatcaattttaaccaatattggcttgaaaataatgtacttcagcctgaagacaaatactttgaaggagtagttataattcatatattttatttaagtagaattagaaagttcatattgcttccacgtggtttacatagaatctraaaggaagagacaccatatcttttattgtaggtgtttcataagtaagatttttaaatcttcaagaaacctaggccaaagtgtcttaaaaaaaatcttagaaatttttttcctagatgttgtcttaaagattgccattcagatcttagggtgagataataggatgaggaaaattcaaagctcataaggatcaagtaagtatggtgaatttcaaacatttttcttaatatacctcatgggaaaatacaaattggatcaaatataatctgagaaaaataatgcatagaagaaagaaccttttttaagttaaggggagggtt

SEQ ID NO: 649956 - DNA, 623 bp, Homo sapiens
atagcacatgtttttcaaaacctaaagtatgcacaacaccaatagtgagttataatgttaactatatatttgggctaacaggcgtatatcaacgtatgtatgtcaatgtctcaattgcatgtcaacaaatgtacccactagaatgaatggtgtccatagcaggagagattgtgtgtgcttggggacaccgggtatatgagaactctctctactttctgcrcaatttttctgtgaccctaaaacttctctaaaaattaagtttattaatttttaaaagatgatacaaaaggttaaaagactgtttatttaattgcttagtaaaatgcatgtttcgaaaaccacagatagtttttaatagcatttgtgtagctcttcccatcttatagaacacatttgcatgcctcatctaacaatcctcacaataaatggaaaaaatcagatttattctcattttttaaattaatgaactaaagcatggaatagcatttgtaaaattttgagataattttcaccactattaaaaattaattttgttaaaacaagatggaaattattatttgcagacttgtaaaggtatgcagatttgagtttcattaattctagaccctctttctactatacag

SEQ ID NO: 649957 - DNA, 623 bp, Homo sapiens
atagcacatgtttttcaaaacctaaagtatgcacaacaccaatagtgagttataatgttaactatatatttgggctaacaggcgtatatcaacgtatgtatgtcaatgtctcaattgcatgtcaacaaatgtacccactagaatgaatggtgtccatagcaggagagattgtgtgtgcttggggacaccgggtatatgagaactctctctactttctgcgcaatttttctgtgaccctaaaacttctctaaaaattaagtttattaatttttaaaagatgatacaaaaggttaaaagactgtttatttaattgcttagtaaaatgcatgtttcgaaaaccacagatagtttttratagcatttgtgtagctcttcccatcttatagaacacatttgcatgcctcatctaacaatcctcacaataaatggaaaaaatcagatttattctcattttttaaattaatgaactaaagcatggaatagcatttgtaaaattttgagataattttcaccactattaaaaattaattttgttaaaacaagatggaaattattatttgcagacttgtaaaggtatgcagatttgagtttcattaattctagaccctctttctactatacag

SEQ ID NO: 649958 - DNA, 486 bp, Homo sapiens
ggcccaaatagccaaagcaatcctgagcagaaagaacaaagctggagacttcacactacctgacttcaaaatatattccaaggctataacaaacaaaatatcatggtgctagtattaaaatagacatatagactgacagaaaagaatagagaatcagaaataaatccacatatttacagccaactaatttttaacaaaggcatcaaaaatctatattgggaaagagacaccctctttaataaatagtgctgggaaaactgaatatccatatgcagaaaaataaaactagaccgctaagtctcaccacataaaaaaatcaacttaaaatggattaaatacttaaatgtaaaacccaaaactataaaattattagaactaaacatgggggaaacactccatgacattgatctaagcaatgacttcatggttaaaccccaaaagcacwagtaacaaaaatacaaaatagacaaatggggctaggttaaa

SEQ ID NO: 649959 - DNA, 623 bp, Homo sapiens
tttacttcgaccttccactgagctgattctcaggatactggcgaggataaatgcataagagatacaaatgagtagcattggcatggggagaagaagtacactgatcaccagcatgattaactgcaccagggaggtgtccacacaaaccaatttcaagatggccagaatttcacaagtgaaatgattgatgatgctattaccacagagagacagtggcagcacagacatcatttccaccatggcagtgagacagcctgtcatccaggagccagctgcaatctgcacacaggttctcctattcatgatgacagggtatctcagggggttgcagatggccacataccggtcatatgccatcatgggcaggagcacacactcagtggagcccatggcaagggagaggtacatctgagtggcgcaccctgagaatgaaatagtgtttctccctgaaacaaagtttgccagcattggagagagsgcagaagaggagtaccagatgtccagaaaggagagattgctgaggaagaggtacataggggtgtgcaggtgggaatctagaatggtgatggagatcagaaaaatgttgcccagcaaggtgatcaggtacatcagcaagcacaccg

SEQ ID NO: 649960 - DNA, 538 bp, Homo sapiens
aaattttcacttaatccttgaaataatccagaaaaacaagtgtttccctgttacagtttaggaaactgagtcttcaaggatcttgctaaaacactcaagtcccaaatctagtgaacaggttgcctctaactaacgtgcttcccacctctagatgtatttcaggcacataccaaatggccatctgtcagcaatgttagccaagacaccctaaagttccttccaaattcaactctttagaaatactggtggtcaatgtaaacaccatgaaaagattatgtgttgaacggtcctccagaatgcaagctctatgagsgcaagtaactttttctttcctgctacatcccaatacctaaaacagtatatggcatacaatacagggtcaaaaaatacttgctaaatatgaatagtcctagtcatacataccacgattatatatttcatatatgtatataaaaaatacataccactattatacaataaaggatctcgctgaagtatccagcaactaaaaaacctgataagtacaaaatccattctt

SEQ ID NO: 649961 - DNA, 575 bp, Homo sapiens
atttttctaagattatacacaattgtaatgatgttataactcaacccaacgactcactgatctgcaattgaatattacatgcagttagcattcagaaccattattgtctcactagctcagttttaacattcacttgttggaaaaagtgttggaaatatcatttttattattatttcttttattgtatttcatgagatttaattaagaataccaaatgaaatttcatggtattttgctaaatatgctctttgcattcataatgaaatccaaggaatataaactatctatttatagtagtttcacatccgattcctattcctttttcctactaacttatcagaagtgttcaagtctcacagaagtaaataaaatgagattaatctgaactctttaaaggtctgctcaaacaaacaagaaataatctgaccaacccttgaaactattttatttatttccattttactctctggtcttactaagtctcataattgwagggccttttctacttttcctttacacaaaacttttatggagacattttaaaaaattgaaatggggtcttgctctgtcaccca

SEQ ID NO: 649962 - DNA, 594 bp, Homo sapiens
ctaagaacttaaaccaagactactattcaacccagcaatcacattagtgagtatatacccaaaggaaaacaaatcattctactgaaaagacacatgcactcacgtgttcataagaacactattcacaatagcagacatggaatcaaccaagctasccatacatagtggattggatttaaaaatatatatatagcacatatacccacccatagagtactatgcagccataaaaaagaactgaatcaggtccttcacagtaacatgtgtggaggtggaggtcattaacttaagcaaattaatgcaagaacagtaaaccaaataccacatgttctcacttattagaggaagctaaacactgggaacacatgacacaaagatggaaacaatatataatggggactccaaaaacaggaaaaggggaaggggtgaaagggttgaaaatgtacccattgggtgctatgctcatgacctgtgtgacggatcatttgtagcctaaacttcaacatcacacaatatactaatgtaacaacttgcacaagtacccctctatctataataaaagttgaaatttttttaaatgtctttttaatttta

SEQ ID NO: 649963 - DNA, 636 bp, Homo sapiens
tttaacttaacccagtatctctccctaactgtagaaaaggaatctccattatttcttagggtggtggctccaaatccatataaactcttccttcttctyttgagctaaattacaccatggatgccctgtgcaagctcattttccttctattcttagaagggatgagaaatatgaatcctcttaagtactaattctgatggattgggaatggctatttggaatgctgtgttaagaaggatttgcgtgctgcacggagcttagtgaaaaagagtgccatattgattagtagtatctgacagggattaccatgtagagtgctgatgcaggtaaaacaaaatcttcctcctttaaattaataggtgggtggattggagtgatgttgatcaaataatataaaatgtcagaagacataggttcaagaaatctattaataccatgatgactatagttattaacaacatactgtatacttgagaattgctgagagaatagattcttttttaaaaatgtgtattttatttatattgatacctaacaacagtacatatttatgggcacatgtgatattttgatatatgcatataatgagtaataatcaaatcagggtatttaggatacctatgacctcaaacatct

SEQ ID NO: 649964 - DNA, 636 bp, Homo sapiens
tttaacttaacccagtatctctccctaactgtagaaaaggaatctccattatttcttagggtggtggctccaaatccatataaactcttccttcttcttttgagctaaattacaccatggatgccctgtgcaagctcattttccttctattcttagaagggatgagaaatatgaatcctcttaagtactaattctgatggattgggaatggctatttggaatgctgtgttaagaaggatttgcgtgctgcacggagcttagtgaaaaagagtgccatattgattagtagtatctgacagggattaccatgtagagtgctgatgcaggtaaaacaaaatcttcctcctttaaattaataggtgggtggattggagtgatgttgatcaaataatataaaatgtcagaagacataggttcaagaaatctattaataccatgatgactatagttattaacaacatactgtatacttgagaattgctgagagaatagattcttttttaaaaatgtgtattttatttatattgatacctaayaacagtacatatttatgggcacatgtgatattttgatatatgcatataatgagtaataatcaaatcagggtatttaggatacctatgacctcaaacatct

SEQ ID NO: 649965 - DNA, 568 bp, Homo sapiens
agcagaaagatgatttgggaatctgagggtaatcgtagcagagaagttcaaaccattgcagatagaatcttgcctggtagaagaagtgatcagaagcacattgattgatgcaggaaaaaaataagagggttaagaggttggaaggctgtcctgataaggctggtgagctgctagaaagaaattgtaaataagaaatgatgtttctccaaaataacaataatatatcaacaataataaatagctcttcattattaagcaattactatgtggcaggcagtgtattaaaatttttttaactttacatttaattgtaatgacaaccctgtgaggtaattactattattatatcctttttgttttcttttaaacaagtamattaaagtactgagagtttaaataacttgctaagactgtagagccagtaggtggtggagccctctttcttaatcactgtacaggccaaaggcaaagacataaagatatagtttatttaaaaaggagtaaggtttcacggaaaacagagggaaatggacagtaagaaaataagtggagactagagaagcagagt

SEQ ID NO: 649966 - DNA, 575 bp, Homo sapiens
tgcatgggacaacttagcaaggactgcgtattcagattctcctctgtgtcccagtgtgtttagagatcaaaggacattcctttcctgcagcaatgtaacctgcttcaagggaaagggtgaggaggtaaacrtgactttcctgcttctgctgctttctcaaatgccaaggtgccatattttaaagtagtgtgtcctgacggcatcagcataatccagccactgtctcctatcagttctatgggagattgataacatacgtagaaacaaagttgggccaaatttcacttcagaatgaatatgaacatcagtgagtggcagtgaagacaaagaaaggcacaaggttcagacccagagaatcgtgtaactcctgcatgtaatatgtgctcagggcgtgctgagctgttggcatatttagaaatcatataattagtatggattttttttttagtttttaaaaacaaaccctatggcttgaatattaaacacactgtgatttcccaaaatagaaactgctctaatttgtcatattttatttttaggatgatatgcgaatatcaaagtcagaaaacaacttc

SEQ ID NO: 649967 - DNA, 550 bp, Homo sapiens
gactgatgatttgttcttggtctcagtgagacctctggaggacactacactgaagatcctgacatcgcaagaatatatttacattaccagcagggtataaaaaaccctgttcaagatttcatcttgggttccttggtttcagggttccccatgtaccttgaaagaatgagatagataaataaagagagagagagagagagagagagagagagagcacatacatccaatatatctatccctgtagagaggacattttgagttggcactggcctctcagtaccccttgctgtgaggcaccacagctctggtacatatgcttactttaatgctttcactatattttattcttttttcttcaatgaggcatccmtttgtccgcattgctttgcgattcctgtgagtcccttttagcaatggcaccctggctacctcgttcagttactgccggtttctgacagtatggtgtgatacaacatagacaatatattgtatcacaaatattgttgtctattacatgaatataatgtgaatttttgaggaaaaactgcta

SEQ ID NO: 649968 - DNA, 646 bp, Homo sapiens
aatatttgcagttccatttttggtaatgaatgcatatactcccacagataataattatacattttattcaaaatatctataaacaactatttgaagcactggtgagtgactaaaaacaggcagaaactgcagcataaaatagataaaaactccatttagtgacatttgtgcttatgtaaatttttttcctgaagacacttaccagttcacaagatgaagatagctgaaaktcaaacagacatccgtcattttactgatttgaggcattagaggataaagttataggatgccaaacagctgaaaagtgaatgaagaaattttggaaaggagaaagagatagagaaaggagccctaatgtttgtctttaaactccacctaaagtctggagtttaaaacaagcatgcttattactactgtttgtattcaaatttgtggcagagatactaactactgcaataaggtaataaaaaggaacaaaatgcatactattttacagacactaaaaagatgataaagatgataatgaaatctttttaaaatgttataccaacaaatttgatgacttatattatacaaaaaaagtccctgaaagagtccaactagtaaagctcactcaagaagaaatagatactctgaatggtactgt

SEQ ID NO: 649969 - DNA, 646 bp, Homo sapiens
aatatttgcagttccatttttggtaatgaatgcatatactcccacagataataattatacattttattcaaaatatctataaacaactatttgaagcactggtgagtgactaaaaacaggcagaaactgcagcataaaatagataaaaactccatttagtgacatttgtgcttatgtaaatttttttcctgaagacacttaccagttcacaagatgaagatagctgaaattcaaacagamatccgtcattttactgatttgaggcattagaggataaagttataggatgccaaacagctgaaaagtgaatgaagaaattttggaaaggagaaagagatagagaaaggagccctaatgtttgtctttaaactccacctaaagtctggagtttaaaacaagcatgcttattactactgtttgtattcaaatttgtggcagagatactaactactgcaataaggtaataaaaaggaacaaaatgcatactattttacagacactaaaaagatgataaagatgataatgaaatctttttaaaatgttataccaacaaatttgatgacttatattatacaaaaaaagtccctgaaagagtccaactagtaaagctcactcaagaagaaatagatactctgaatggtactgt

SEQ ID NO: 649970 - DNA, 455 bp, Homo sapiens
aatggtctgatgtccagaatctataaagaagttaaacaaatcaataagcaaaaaacaaataacaccattaaaaaatgggcaaaggacatgaacagacacttctcaaagaattagcatttgagtcagtaaactgagtagagaagatctgccstcaccagcatgggtgggcattatccaatctgtagagggactcagtagaacaaaaaggcagatgaagggcacattctctctttctcttcttgagctgggacatccatcttctcctgcccttagacactggagctcttttttcttgggtcttcagactaagatttacaccagtgactgcccccctcaggtctttggccttggactgaattataccaccaatttgccttgggtctccagtaagaaagtggtatccaaatagcataataagggacttctcagccttcataatcatgcaagccaattat

SEQ ID NO: 649971 - DNA, 463 bp, Homo sapiens
ggaagcaagcttgaacctcacatggcagcaggagagagaagagtaaggagcgaaggcataagaaccccttataaaactgtcagatcttatgagaactcactcactatcatgagaacagcatgggggaaaccacccccttgatccaaccatctcttaccaggtatctccctaaacatgtggagattatggtgattacaattcgagatgatatttgggtgaggaccaaagcctaaccatatcagatagacagtctggaaatacaaagtcttacgtgcgtgtatttcttcagcttatttaagatataagcaatcgttttatttctaattattctcattagtttgcctrttgttaagctagtgccaactctagaccaaaccctgtggctgcttgtcccatttttgttactgtgcaatcaaatgttaatatccagtcattgactatttacttcagctccattttgatt

SEQ ID NO: 649972 - DNA, 547 bp, Homo sapiens
gaaatgggataaatgtcaggtggatcagagagatacagtmatgggggtcaggtgtggtatcaggaataatgtgggaggccggactgaagtcgtgccgggaacaatggtaattgtgggacttaacaaagagtgagtacagctgaaggagccgggggagcagaaagtacatgcatcaggtatgaggaaggaaatagattttggaagttatgagaaatgtagagagtaagttgagcatagtttgtgattttgagggcctctaaaagtattagggcagcaggagccgctgcacggagacatgaggcctaggctaaaacagtaaggtcaagttgtttggacagaaaggctacagggtgaggtcctggctcttgtgtaagaattctgaccgcactaaccatgcctaggaaggaaaggagttgttgttttgtaagggattgaggtttgggagattaatcggacatgatcagcagggagagcacgtgtgtttttatgagaattatgctgagataggtaacagataaggaagaaatttgggcttgactgaagtaat

SEQ ID NO: 649973 - DNA, 547 bp, Homo sapiens
gaaatgggataaatgtcaggtggatcagagagatacagtcatgggggtcaggtgtggtatcaggaataatgtgggaggccggactgaagtcgtgccgggaacaatggtaattgtgggacttaacaaagagtgagtacagctgaaggagccgggggagcagaaagtacatgcatcaggtatgaggaaggaaatagattttggaagttatgagaaatgtagagagtaagttgagcatagtttgtgattttgagggcctctaaaagtattagggcagcaggagccgctgcacggagacatgaggsctaggctaaaacagtaaggtcaagttgtttggacagaaaggctacagggtgaggtcctggctcttgtgtaagaattctgaccgcactaaccatgcctaggaaggaaaggagttgttgttttgtaagggattgaggtttgggagattaatcggacatgatcagcagggagagcacgtgtgtttttatgagaattatgctgagataggtaacagataaggaagaaatttgggcttgactgaagtaat

SEQ ID NO: 649974 - DNA, 547 bp, Homo sapiens
gaaatgggataaatgtcaggtggatcagagagatacagtcatgggggtcaggtgtggtatcaggaataatgtgggaggccggactgaagtcgtgccgggaacaatggtaattgtgggacttaacaaagagtgagtacagctgaaggagccgggggagcagaaagtacatgcatcaggtatgaggaaggaaatagattttggaagttatgagaaatgtagagagtaagttgagcatagtttgtgattttgagggcctctaaaagtattagggcagcaggagccgctgcacggagacatgaggcctaggctaaaacagtaaggtcaagttgtttgracagaaaggctacagggtgaggtcctggctcttgtgtaagaattctgaccgcactaaccatgcctaggaaggaaaggagttgttgttttgtaagggattgaggtttgggagattaatcggacatgatcagcagggagagcacgtgtgtttttatgagaattatgctgagataggtaacagataaggaagaaatttgggcttgactgaagtaat

SEQ ID NO: 649975 - DNA, 547 bp, Homo sapiens
gaaatgggataaatgtcaggtggatcagagagatacagtcatgggggtcaggtgtggtatcaggaataatgtgggaggccggactgaagtcgtgccgggaacaatggtaattgtgggacttaacaaagagtgagtacagctgaaggagccgggggagcagaaagtacatgcatcaggtatgaggaaggaaatagattttggaagttatgagaaatgtagagagtaagttgagcatagtttgtgattttgagggcctctaaaagtattagggcagcaggagccgctgcacggagacatgaggcctaggctaaaacagtaaggtcaagttgtttggacagaaaggctacagggtgmggtcctggctcttgtgtaagaattctgaccgcactaaccatgcctaggaaggaaaggagttgttgttttgtaagggattgaggtttgggagattaatcggacatgatcagcagggagagcacgtgtgtttttatgagaattatgctgagataggtaacagataaggaagaaatttgggcttgactgaagtaat

SEQ ID NO: 649976 - DNA, 525 bp, Homo sapiens
agtggggtgtaaaccactcttatcctaaagtataaaaactaaatggtgaaccaataaaaagaaaataactacaatgactttttaagacagcacaatatagtataaatagaaacaacaaatattaaaaaggagggagatgaagctaaggtgtagagattttggaggttatttttgcttgtttttttgcttgtttatgcaaacagtgttaagtttttatcaggttyaaatgatgtgttataagatagtatttgcaagccttatggtgacctcaaaacaaaaaagcatacaatgcatacacaaaaaataaaaagaaagaaactaaatcatatcaccagagaaaaatcatctttactaaaggaagacaagaaggaaagaaggaagtgatagcaataagaggtagaaaaatcctaggcagacagaggcaggtcctgggtgaaaccccaccttctagccaaagacagtttaaagcctgaaagccagggaccttcttcacaaggtggcaggaaggagaagggcagactgaag

SEQ ID NO: 649977 - DNA, 525 bp, Homo sapiens
agtggggtgtaaaccactcttatcctaaagtataaaaactaaatggtgaaccaataaaaagaaaataactacaatgactttttaagacagcacaatatagtataaatagaaacaacaaatattaaaaaggagggagatgaagctaaggtgtagagattttggaggttatttttgcttgtttttttgcttgtttatgcaaacagtgttaagtttttatcaggtttaaatgatgtgttataagatagtatttgcaagccttatggtgacctcaaaacaaaaaagcatacaatgcatacacaaaaaataaaaagaaagaaactaaatcatatcaccagagaaaaatcatctttactaaaggaagacaagaaggaaagaaggaagtgatagcaataagaggtagaaaaatcctaggcagacagaggcaggtcctgggtgaaaccccaccttctagccaaagacwgtttaaagcctgaaagccagggaccttcttcacaaggtggcaggaaggagaagggcagactgaag

SEQ ID NO: 649978 - DNA, 517 bp, Homo sapiens
ctgtgttaatagtcataatgtaaataattaaaattgcagttgaagtattttaatgttaaaattttaaccaaattataattcattacaatatatttatatgtattattatatataatataatgtataatgtctatttttatatatatagtagtattggaraagaaaatttttaaaagtagtatgagcaaatcaaatccttattgtgcacactgggaagaaagtagaaattttgtacaattgacagatcaagaaatagttgtataattatattacttaagatttttagggtttttcattctaaacagtggaacacaagttgaagaagagggaggcaataaactgtagctttttaatagtgagtttttctgtacagttttgattagttatcagggccatctattactccagtaaatattgaaatagaaaaaaaaggatggaattatatgaaaaaataataatggcctttattgctttatggtgagattacagattttttaatctactttttgcattgaaa

SEQ ID NO: 649979 - DNA, 585 bp, Homo sapiens
ctccagcctgggtgacagagcaagactctgtctcaagaaaaaacaaacaaacaaaaaacaatgattggtacatccaaaacatttcacaccaattaggtattttaaaggtataattatgcaaataagaatcgtagacataatgattaaacataaaggttaacagaaaacaaaaaattmtctttgattctctacgacgtgttgggcactgtgttctttgttagattttagagatatactgatatgtcttaaaggagctaataatttaatgaaagagaaagataaatagatcagaaattaaaatggaatatggtgcatgctaataactttatgttctacttgttatgagaacacgccaacgaggtgcaacagatttttcttttaacttggaaactatctattgttactgggtgtgatattttctttattactctatggtagagaaattgttcaattaaaccaatgaagtgatttttaccaaggtctgactgtcctgtcacttctccttatcccattcctcctcacctagcactttcttgcccagactatcagatggatgctttcaactattacattttatagatggat

SEQ ID NO: 649980 - DNA, 585 bp, Homo sapiens
ctccagcctgggtgacagagcaagactctgtctcaagaaaaaacaaacaaacaaaaaacaatgattggtacatccaaaacatttcacaccaattaggtattttaaaggtataattatgcaaataagaatcgtagacataatgattaaacataaaggttaacagaaaacaaaaaattctctttgattctctacgacgtgttgggcactgtgttctttgttagattttagagatatactgatatgtcttaaaggagctaataatttaatgaaagagaaagataaatagatcagaaattaaaatggaatatggtgcatgctaataactttatgttctacttgttatgagaacacgccaacgaggtgcaacakatttttcttttaacttggaaactatctattgttactgggtgtgatattttctttattactctatggtagagaaattgttcaattaaaccaatgaagtgatttttaccaaggtctgactgtcctgtcacttctccttatcccattcctcctcacctagcactttcttgcccagactatcagatggatgctttcaactattacattttatagatggat

SEQ ID NO: 649981 - DNA, 585 bp, Homo sapiens
ctccagcctgggtgacagagcaagactctgtctcaagaaaaaacaaacaaacaaaaaacaatgattggtacatccaaaacatttcacaccaattaggtattttaaaggtataattatgcaaataagaatcgtagacataatgattaaacataaaggttaacagaaaacaaaaaattctctttgattctctacgacgtgttgggcactgtgttctttgttagattttagagatatactgatatgtcttaaaggagctaataatttaatgaaagagaaagataaatagatcagaaattaaaatggaatatggtgcatgctaataactttatgttctacttgttatgagaacacgccaacgaggtgcaacagatttttcttttaacttggaaactatctattgttactgggtgtgatattttctttattactctatggtagagaaattgttcaattaaaccaatgaagtgatttttaccaaggyctgactgtcctgtcacttctccttatcccattcctcctcacctagcactttcttgcccagactatcagatggatgctttcaactattacattttatagatggat

SEQ ID NO: 649982 - DNA, 615 bp, Homo sapiens
acaaaaacaaaaatattccaagtaaatacaaaaataaatattccaaatgatttatgacaaggtggtagacataaaagtattaattgagagatatatatgaaaatgtgatttttaatcagagttataaattatcaatgtacaataccttgccacatggcaggaaaagaattgttttagatatgaataggtgaaactgcatgatgggctatgagttatggcatttcaaaattgctgattgacctagattagaagctatttgaatttaagccactaggatgkgcgatatttttgagaatgagttttctttttttattaattctagttatcccaacatcaagcatggtatctggatgattgctttaaaaatgttgttaaaagatacaaaattacatctagatgggaagaataaaactttggccttccatagcactgtaagatgactctagttaacattaatatatagcttcaaacagctagaaggaggatactgaatgttcccaacacaaagaaatgataagtgttcaagatggatatgctaattgccctgatctgatcgctgtacatcatatgtatcaaaacattactgtgtaccccataaatatgtataattattat

SEQ ID NO: 649983 - DNA, 615 bp, Homo sapiens
acaaaaacaaaaatattccaagtaaatacaaaaataaatattccaaatgatttatgacaaggtggtagacataaaagtattaattgagagatatatatgaaaatgtgatttttaatcagagttataaattatcaatgtacaataccttgccacatggcaggaaaagaattgttttagatatgaataggtgaaactgcatgatgggctatgagttatggcatttcaaaattgctgattgacctagattagaagctatttgaatttaagccactaggatgtgcgatatttttgagaatgagttttctttttttattaattctagttatcccaacatcaagcatggtatctggatgattgctttaaaaatgttgttaaaagatacaaaattayatctagatgggaagaataaaactttggccttccatagcactgtaagatgactctagttaacattaatatatagcttcaaacagctagaaggaggatactgaatgttcccaacacaaagaaatgataagtgttcaagatggatatgctaattgccctgatctgatcgctgtacatcatatgtatcaaaacattactgtgtaccccataaatatgtataattattat

SEQ ID NO: 649984 - DNA, 551 bp, Homo sapiens
  misc_feature 1, 2, 3, 4, 5, 6, 7, 8, 9, 10, 11, 12, 13, 14, 15, 16, 17,18, 19, 20, 21, 22, 23, 24, 25, 26, 27, 28, 29, 30: n = A,T,C or G
nnnnnnnnnnnnnnnnnnnnnnnnnnnnnnatttagcatgtacacatggagccttcagatgaagacccaaagacacaggagaaattgatctattttatgcttaggtttaacaaagtatggacagccatgtagaaatatgattgcaccaaaaaggtatgatctaatgctaataaactgagcaaggaagcccagccaggtctgtctgcctagattctccttcgcctctctgagcagcattccttccttctggggatgggacatgaccttctctggaatgggggtcttatgatctacaaacaaggtatgtcagataatttctttatggcctgttttcacagaaatagggcagaaggaawgttggagtaatatttttaggttttatgtctggctttggagaaaaaggcattttggtttctatgacccgccctggggaagagggattctagtttctgaggctagcctcagtggggcatgggactgagggacaggagggcaggagaaggtcagagaacaaacctacacctctgaggctgcttctgaggccttcattt

SEQ ID NO: 649985 - DNA, 556 bp, Homo sapiens
ataaatatagagatattccctgtttaaggattggaagactcaatatagttaaactgtttatcttcccaatatgatctacagattcacacaatccyaaaccaaattctagcaagttactttgtagttattaccaaattcattttaaagcttacaagaagagacaaaaagaccctaaataaccaacacaatagttaagacaaagaataagatcagaggactgacaactgcatttcaaagcttactataaagttacagtaatgagatcaatggaagacaataagctcctgcaatatatagccaattgatctctgacaaaggagcaaagacaatttatggacaaaggatagcctttccaacaaatggggcttgaacaattggagatctatatgctacaaaattaatctagacacgtatcttatacataataactcaaaataaagcatagagctacatgtaaaatgcaaaaccataaaacttctagaagaaaatataggagacaatcttggtgatttgggacttggcaatgagtatgtagttataacaccaaaaacacagt

SEQ ID NO: 649986 - DNA, 556 bp, Homo sapiens
ataaatatagagatattccctgtttaaggattggaagactcaatatagttaaactgtttatcttcccaatatgatctacagattcacacaatcctaaaccaaattctagcaagttactttgtagttattaccaaattcattttaaagcttacaagaagagacaaaaagaccctaaataaccaacacaatagttaagacaaagaataagatcagaggactgacaactgcatttcaaagcttactataaagttacagtaatgagatcaatggaagacaataagctcctgcaatatatagccaattgatctctgacaaaggagcaaagacaatttatggacaaaggatagcctttccaacaaatggggcttgaacaattggagatctatatgctacaaaattaatctagacacgtatcttatacataataaytcaaaataaagcatagagctacatgtaaaatgcaaaaccataaaacttctagaagaaaatataggagacaatcttggtgatttgggacttggcaatgagtatgtagttataacaccaaaaacacagt

SEQ ID NO: 649987 - DNA, 556 bp, Homo sapiens
ataaatatagagatattccctgtttaaggattggaagactcaatatagttaaactgtttatcttcccaatatgatctacagattcacacaatcctaaaccaaattctagcaagttactttgtagttattaccaaattcattttaaagcttacaagaagagacaaaaagaccctaaataaccaacacaatagttaagacaaagaataagatcagaggactgacaactgcatttcaaagcttactataaagttacagtaatgagatcaatggaagacaataagctcctgcaatatatagccaattgatctctgacaaaggagcaaagacaatttatggacaaaggatagcctttccaacaaatggggcttgaacaattggagatctatatgctacaaaattaatctagacacgtatcttatacataataactcaaaataaagcatagagctacatgtaaaatgcaaaaccataaaacttctagaagaaaatataggagacaatcttggtgatttgggrcttggcaatgagtatgtagttataacaccaaaaacacagt

SEQ ID NO: 649988 - DNA, 258 bp, Homo sapiens
tcttatgaacctagttggagatagaagtaatttagggaaaatgatatttcagcactgccttaatctagcagggattttcttcatgggaaaattaaaccaaacacaaactgaagtatgacttaactgggcctgcttctgcatttagggtcaccaaagcatactgtaaatggaaatcagattgctttagaatccaagaacaaactctacttttgacctttagraagctcatgatgtatatgcccaccaaataaacaaaat

SEQ ID NO: 649989 - DNA, 543 bp, Homo sapiens
ttcttggagaccatcagaactgtttcaccatgtcaacctttcaacgtctaatgagctacataaatacagtaaatttgagttttaagaatcatagcattagtacataaaatgcacatggagcctcatttctaaatgtccataatttaattcaagaggtaggctggcatggtggctcacacctgtaatctcagcaatttcakatactgaggcaggtgggttgcttgaggtcaggagttcgagaccagcctggccaacatggtgaaaccctgtctctactaaaaacacaaaaaattagctgggcatggtggtgggccctgtaatcccagttactcaggaggctgaggcaggagaatcgcttgaaccctgggaggcagaggttgcggtgagctgagactgcacggcgctccagcctggacaacaagagtgaacctctgtctcataaaagaaaaggtagttgtggctatttgagcataattatgtatattttatgcacaggaattatttaagccatctcagtttggaaattgaaagttacctactatt

SEQ ID NO: 649990 - DNA, 542 bp, Homo sapiens
tggtttaaaccttgatgaggaatacatacacacatttgcttttgtcttctaaaaatctcattttcaaatcaaaccaaatgcaagatggatctaaaatctgaatctcaggctcttagacaaggcaatactgctttgttattttgcttagatagcccatcaaaatacaaaccattcaagaagtcagctgctgctataaaggtcatctggaaagcccagggaaggaccatgtgctgctgctgggaaaggaaaattgtcctctgggctcgtgagctggtgtgtttgtctgctgagtggcttcagtggttttatctgttgctgaaagagccagagaaagggataaaacaggactgtaatctacaccacaatgagctggaggagaacaggagccaagtgagtgttttgtttgtgtgctgccycctctggcacattgaattggtgcaggaattgtatgagtttttaatcatcattcagatatgagtgatccaagcttggcattcattgggtttttatacagcttgctaataaccccaaagtgctagcat

SEQ ID NO: 649991 - DNA, 630 bp, Homo sapiens
ccaatcacatgagtaaagctgtcacctctcactttaataagattattttttgtttacatttgtatgtttttgagatgctcattatgagatttaaaaatctttctatttctaatgtactatgtatgagtcactatgaatgtgtgttgaattttaccatgcttttcctgcatacattgagaagactatataatttttttcttgttaattgcaaaattacactgcttgattgtcaaatgttaaaccaacatcatatgctcagaataagtccttcttgcacatgatatattatcctttttatatatagctggattgtgtttgcaagtgttttgtttagaatttttacctaagttgaagaaagagccttgtctttaattttcctttttagaaaagagaatgtctttgttgggttgtaggaatcaagaaaatgtttagctcttaagtaagttagaaggcgtttcctcttttttattttctggaagaccttgagtaaaattgatgttatttctcagtgtgtgaagggtttaaatttcaaattgaatttctttaatagatatagaggtatttataacttcytttacttcatatgacaatagcaattgtttttctagaaatttgaccgttttgaaaaat

SEQ ID NO: 649992 - DNA, 597 bp, Homo sapiens
ggcaggttttccgataccagatccttgattgcacttacattcgtatcaccttttttcatgtgtgtctctgcatttttattaactgtcctaatcttctgtatcctaagaaaaatactaagttctggaattcaggtcttaatctacctccccccttgccagggttggcactattcatcttctatcaagtgcagacatccaggccatgtgtacagatgccacatgtgagtggcctgttgagaagattggctttattccaattttggccactcctcttgtgtgtaaactgytcctaaattagttgtttgagataggcagtaccaacaatgcattatgaaatgagaacatgtcgaatggactctggggaatatcagtatgtgtaagctacatagacactgactacatcttttctttgtaaatgttttccctatagttagtcactaaaaattacagagctttggtcaccaaaaatgtatttcttatgcataatcattgaccagaaatgtaacctgattctgaatttgaaacagggcattttattctggttttcttcatgggaagtggctgaatttggtagagtagaaatagaaagttaggagt

SEQ ID NO: 649993 - DNA, 616 bp, Homo sapiens
ttcctggacttccaaggtcccttttggaaggtccaaaagttagtttgatgtcaatagacttaatttataatgtgaaatttgatattgggcagtatgtcaaatacatcaaaggtgtaaaacacttgatcaaaataaaataattataaaataatagtattttagccaaggtaataatgaaaatatttcaaaaactttactctttgataaggaggagatagttgcctaaataattatagacctaacaagrgtagcattactaatataaaatctatatttccttttctccttttttctctttctttttatttgcagtttactcaaaagttaaataagaaatctttactattgtgttaatatttacacaaaaatctggttcaaaagagaaaatcaaattctaactttgcattagtgtatgttaaggttcaattttaaaatctatatgataaatttattaaattttggtcagtttaacaacactaaactttgaaatactcttttccttttactttctggacctatttagttctatctacattatttttatttctctgaaacagcaatttgaaacctctaatctggacaaaattaattttcctttaacaaaagccaaaacttt

SEQ ID NO: 649994 - DNA, 654 bp, Homo sapiens
acactattttatttttcttttactaaatatattaagaatatatatgatgatgaaagctctgacatttcatagtggttccttttctgagtttaaaarcttattttttccttttgttcggtttttaggcttgcttaatatttaccagtactgatttatattaaatttgatgaagtcttataaaaatgacccttcacaaatttttcacaaaatgatcttcaagtctagacaaaaagaaggatggagaaaaaaaaatcaccagaatcaatctgcagttcagaaattcagtagctttgggatgctgggaatctctaatgattattgtaaaaactggagatatgaataagcaaccaagtaaagcagccattgcacatcttattcctatttcccacttctcaactttgtctggaaaactcttccagtaataaactggtaattacatccaacatgatctttttcttattcctacctctcctccctactcctataaaatcttttctgcaatagcaacacttctttgagggacagaaaatgtgtaagactgaatatcaagtaaactgtcaaagagtgaatacgccttatctaaattgctctattataatcttgaagtataaagcagatcaagaataaaagtccaagaagcagaataaacaaata

SEQ ID NO: 649995 - DNA, 585 bp, Homo sapiens
atagcagtgtctactttaatcctgagaagagttatcagatatttactaacactattttatttttcttttactaaatatattaagaatatatatgatgatgaaagctctgacatttcatagtggttccttttctgagtttaaaaacttattttttccttttgttcggtttttaggcttgcttaatatttaccagtactgatttatattaaatttgatgaagtcttataaaaatgacccttcacaaatttttcacaaaatgatcttcaagtctagacaaaaagaaggatggagaaaaaaaaatcaccagaatcaatctgcrgttcagaaattcagtagctttgggatgctgggaatctctaatgattattgtaaaaactggagatatgaataagcaaccaagtaaagcagccattgcacatcttattcctatttcccacttctcaactttgtctggaaaactcttccagtaataaactggtaattacatccaacatgatctttttcttattcctacctctcctccctactcctataaaatcttttctgcaatagcaacacttctttgagggacagaaaatgtgtaag

SEQ ID NO: 649996 - DNA, 567 bp, Homo sapiens
tttttgactgagatgcacagtaacaaatactttggtattgcaacccagtacatgtcacatatgtaacagaaataaagctgagtgatacttaactttttaatatgtaatatgctgatattttcttattttactctattttattttatgctttttttatttttaatgccagtcttgatgcactctattgctttcatgacccaccaatgggtcacacaactcacagttggaacaacactgccctaaagggttattattgcagcctaaggagataggatccattcaattacttagataaggcacwgagagagtgacaccagatgctgctgtctttgtttggaatcaaccaaaatgaattatttataattaatcaaccagtatgcattatttgtaccttgcatataggaggttcagctccacctgaggctttttgggtagctgagaagacaaaacacttgctgtattcacagagtcatgtgccattaactgatcttccaaaacattaactgagcacttactatgtttcaaatactgtgtgaaagcctgaggttacaaagataagtcacagac

SEQ ID NO: 649997 - DNA, 495 bp, Homo sapiens
tcaatccctattcataccacrttactcctccccatggctctctggtcctcctgtactgttccaaagcctggaatgtcttttttccattatttctgtcaaatttccactcatcctttaaaaccaagccaaatgacactttctccacaagctttttcactctttcatctactcagattgtaacttttcatgtctattctggtttgcatctcattcttgtgtgctaactagtcggtcacctaggcctgaaaatccaagccatcttatgcatatttttctagacttagttccagaaatactctctggtgcactgtagtgctccatgaaactgttatcaaataggtaaggagatttatagactgccatgtgcaatgtcacatgtacattaatttaatcctcaaacagccctgcaaggcaggagatattattaagaacactgaagctgatttttttttttttttgagatgaagtttcactcttgttgcccaggctggagtg

SEQ ID NO: 649998 - DNA, 614 bp, Homo sapiens
gttacagctctttcactcccacagttcagtgagttccaggctcttgtctagtgaccaagaggaagaaggtacacggatgctggaaaagagttaaggcagagtagaatttattgagtgacagtaaagctctcaacaactaggggagacctgaaagtgggtagccatctgtgaggctgagtctgagtttttttataggcttagaattggggagtacrttctgattggtgtatggatgggcttggaaaaggcaccattcgattagttaaaaggcatcattcagaaaaatcaaataaagagatagtgggtaagacagggatggaaattctcactctggtccttggattctatccagaaatggtagctctgttttcaggcattagactgtccttggcttgaaggttgagtttcactaaagacgtatctctgtctgtctaggaatttgtgtcctatcactattagtaccattacatttttcatattaaagatgcaaatcaaggcttagatgtattaagtaacattcccaaggtcacaactagaaagggatacagccaggatccaaaactacacattgtgcttcagagctgtgccctcctccattatgtcattctgactat

SEQ ID NO: 649999 - DNA, 565 bp, Homo sapiens
gttgtctgacatttgtgtggcaaggacagaccactgactgcttagacatggcctacgtctacaaaatcacatttatgggtggttacaaattccatttcttttattaactgcttgaaatgttatttacttgattgaattacagttctggccattaacactttggaataacaacccagttaattaacatgggagagcagtgacaatgccaccaccatccttaagagggccacatcagcacagagagctcctggtgctgggcgctccacagcgaactctgagatggagcaggcgcaagccttgtttgagtgggctgaacagcrtgactccttggggctcctcattcatccacctcctccagaagggatgatgaggcttccttcagggctgctcaatgcccttgtatttgactccaggaatgaaggaggggcactcagtgtttctggagtgcctgatgtgcaccaggggcttaggtacattatctgatattaccttgttattagagggtgagtcacatgtttctagtccatacttgcaatagagcaaactaaagttagtgtgatcaatg

SEQ ID NO: 650000 - DNA, 581 bp, Homo sapiens
gattttcagttaatggtccttagattagctgaggcagatactgaaccactkaaaatggacagttagcaaaaattggaaactcttagaatctcagatctcactctgggtaaaaaatcacagataatatgtactaatagagacacctgaaggtctcccatagctctatgccctttcaaggtaatacataaataaatgagactttgtaatcattctactgatttaataaagccaatttatgtattttggaaaaaaatgattaaagcaccttttaataaaataatgtcccaattgcacatgatagtttattcactacttaagctatagtaaactactattaaacaatataaaatatatgtatgtttatgtttattgagtgcacttagttgacatttagcttgtcacctagagaattcattgacaggctgttatatgtattcaatatcatcactttcttttcttgcaataagcgaaaataagaaatgaaatgtcctcattaatgtttaaatatcccataaataatttaatttacgccttaataagtaaatgcaagtggataagaagctaaatcaatggcattttct

SEQ ID NO: 650001 - DNA, 581 bp, Homo sapiens
gattttcagttaatggtccttagattagctgaggcagatactgaaccactgaaaatggacagttagcaaaaattggaaactcttagaatctcagatctcactctgggtaaaaaatcacagataatatgtactaakagagacacctgaaggtctcccatagctctatgccctttcaaggtaatacataaataaatgagactttgtaatcattctactgatttaataaagccaatttatgtattttggaaaaaaatgattaaagcaccttttaataaaataatgtcccaattgcacatgatagtttattcactacttaagctatagtaaactactattaaacaatataaaatatatgtatgtttatgtttattgagtgcacttagttgacatttagcttgtcacctagagaattcattgacaggctgttatatgtattcaatatcatcactttcttttcttgcaataagcgaaaataagaaatgaaatgtcctcattaatgtttaaatatcccataaataatttaatttacgccttaataagtaaatgcaagtggataagaagctaaatcaatggcattttct

SEQ ID NO: 650002 - DNA, 580 bp, Homo sapiens
aaaaataaatttagagacaaatgtcakaaaattatcaatttaatgtctgggataaaagcagatgtgtttaataaagatgctcctcttgtatagctggaagacagactatgctaaataacaggcacataacttgattataaaaccatcagaatttcagaaaagcctgtattcagggcctcaacatgtttctaccttacaagctggatcctcacatgaaagtagttaagccctaagagttgggagggggccatatgggtaaatagcttgaatatactgaccccctgattcccatccccaatgttagaaaatagcagggtcctctttgctgatgtctgtgtagttgctctaccatataacacttgtactcctcaatattttctcccactttaattcttggataattacttcgcaaagcatcactagaagtgatcttgaatgtcctgaactaagaaaagcaaagtataaatctgaagaaagggaagattgttgacacagagacaatccatatcccaaagtttaatgttcctggaacctgtcttaacacaatgcaggaatacaacttgaaatattgggaaaagat

SEQ ID NO: 650003 - DNA, 578 bp, Homo sapiens
gtggcctggcatatgtggggccaacctcagcagaaatccacgtgcacctccgcaggcagygcgtcccccgcacacccgctgcccgcccggctttcactccagaatggcgctgcccgtgcctgtacagacagctggcaaagcgtcagatggcattacaatatttttacttataatcgagaaagcaataaaaatacgcatttaagtagaatattgctgttctaaaggggctggggaaacctggggaggaaaccaggttttgccataaattcagagtccaggttgagcgtgggaggggccatcccaggcacgtgggctgctgcggctgtgcctgagccacacctggcgggcagggtggggttctgtttgtaggtggctttggggagatggtttcctcatctgcgaagggggtctgcctgctccagttcttcaggggttactcctgggaagtggccctttagaggccagagaccccttagaggagctggggagggctgagaacgcttacccctcaaaatgccaacatggcatttggtgacaaccaaactcagggagttcttaggccctccataggacctcga

SEQ ID NO: 650004 - DNA, 539 bp, Homo sapiens
gtaacagtatatttaagtagtttctctttttggatgagsaggttccttgcctttgtttaactggacagagaaggtttatcaggaagctggggcaaaggaagtgaagcaggcactaagaagtgaaaacccctgagaagtcacagaaattctaaggagggcttaggacttctacaggtagtggaatttgaggagatgaagaggcaggctggcttttgagcataactcacatctttgaaaggttgagaaccccagctgacacctgtttgagacatttttaactcattaatactgaggaagggtcaaagttaaggacaaggtaaaagtcaacaatgcacttacaggtcagcaaattctctgttcgctatagtttagtgaatgcaatgcctatgttttcacatttgccactaccaaataataaacaccacacttctgaaaggtgttcacatcagagtcatattaggacatttcttcaaataaatcactctttttcactactcaaaataaaacttttaaaagtgatactagtaatatcaaaaatt

SEQ ID NO: 650005 - DNA, 593 bp, Homo sapiens
agtgttttctgaattcgattttcctattgtttttcacagaactgggcagttacagaagtttgtgtaaataatttccatttgtctattagtctcataactatttcagccatcttttattgaacataacactacctttgatagtattcccctaaacgtttgccccatcttgatagacttttatttttcacaatctatttttttcacagtcccttactgttttacatgtcttactggggagtcttcatctatactctaaacaatgtcagcagcccaaagaagagaaattgattcgattcttgacacaaaatgtatggtctcagaatgtcactcaaaacccaccaagcagggcaaggcataactctaatattcctacattttttaagactttgaagcatcaaaaaacactgtctctcgtttctaaggaaaataggttttccyctacaaatcttttatgctgctcaaaaattttaaagcattcaatccatgataaaatgctgacaatacagctattgacagcaacaggtaaccaatggctgtaaaatatacagtgctttctccaagcttgaatcaaacaggatctcacatatctcaga

SEQ ID NO: 650006 - DNA, 577 bp, Homo sapiens
tgtgtgtgtgtatagatatatatatatatgtctatataaacatcatgttatatattaaaataatacacataatttttctgtcaatttaaaaaattagaaagtacatatagaataaataactgtataactttaaaagcagtattgttataatggttgacattatttcacagttttatggtagatattttagttctgagatggaaacagatccaaagggacatttgacatttagcatctttctttgggctctccttacaaatgatgttatcctgacatcttgtcagctttttaaggaacccactaaaatgtttattctattattttcatatgaaagatcttttcttctggtaacatatagatcctcagtcttgtttatagatacagttggctttggaatttctaatttgtttacatccttatatctttttccatagctaagctgttagttttgacaatttccttcagtcaaacagtattatcattgttgtgccagttaacaagatctgatgtgtagtaamcactaacgaatttcaaatgtcacttgtaaaaatattttgtgacccactataccacttag

SEQ ID NO: 650007 - DNA, 644 bp, Homo sapiens
agtagggcatggtggcagttgcctgtaatcccagctactcaggaggctgaggcaggagaattccttgaaccagggaggcagaatccgaagtgagccgacatcgcaccactgcactccagcctggacgatagagtgagactgattctcacaaaaaaagattaaaaaaattttaaaaagaatttcagaactgaatcacctagtctaaccttagagatgtagaagtcaagcttagagtggagagtgacctgctccaggtctcacaactggcaggggaaagaactggccttggaagagtgcttttctgagtcccagtggaggcccctttccactgcagaccatagccttttagaaatcccagaccaagcattctcttttctcttctcaaggacaatatgatgtrttgtcactggtgtttttacctctatactacacccgaggaaacaccaaccactaggcattcattgccctttctaaaatattttaattgatgcagtagttttgttgttttgtgccaaagaggtatgatcataagatagaaaacagctgagcaatgtgttctgttttttaaaagtgtagaataaaataacaaaactttttgtggtaaaagcaacaagtcaccatttcattattaaccatctgttatt

SEQ ID NO: 650008 - DNA, 606 bp, Homo sapiens
cattcaaatccagtttgataggtgcatgacatggaatcaataaaaagcctgtggaatgcttttagtagcgtttcactcacatgagatgctcaacttcaaagatggcttatgtaagttgaaaaatgcagccccctttctcaattcctacatccataagaaaaacacttgcttttctcctaattttctccatgttctattttttcttaatatcctctaaattgtccaacaattttcaaaatacaccatacagtatagtgtattagagttgcctccttcctagtctatagtggatcctggaaagggacaagagaatgcacagagattcgtcgtttggtggtaatacattcttacagagtctccaatattatgtcattatatcagtaargttactttttctctagactaaagatggattaaaccagttataactcaattgctatgtacctactgggtgaagaggtctgctatttctcagagagagtttatagaggcgaagaagaaagttttccacttcccttttacctattttgtcactgttttattttttccaaccctaccctctctaacatctgaaatatgctctctgaatcataggatatgaagaca

SEQ ID NO: 650009 - DNA, 626 bp, Homo sapiens
attcacagcaacccggctggagtaggagataattattccaagtgaagtaactcaggaatggtaaaccaaacatcgtatgttctgacttataagtgggagctatgatacgaggacgcaaaggcataagaaggatataatgagctctggagactcgcagggaagggtgggaggtgggtgagggaataaaagactacatactgggtacagtgtacactgctcatgtggtgggagcaccaaaatcaccaaaatctcagaattaccactaaagaacttatccatgtaaccaactacctgttccmccaaaactattgaaataataataataatattaataaaaacacttgagcttttgggaaagggcagattgatagtaactagcattggtactgcccactcatgattagtccaagaagtgatcattgcccagaagaaagaaactgtctacgaagcatttctttccccagccatggtcacttctggcagtgctgctatatcacttctattcatctttcccccaaaaaaccccacatgcattcctgtgccttctgtttttgtagtacaagttctcttaactaaccatgttactgccttaccaggtaaactatggctctctatctcttctttaa

SEQ ID NO: 650010 - DNA, 539 bp, Homo sapiens
aagacccatattagagtctccttgctattcttgaggaggactctctcctgaggtactcccctgggggaagtcttgcggcttccagcctgtgcaggctggtcagagaatcacccagtgtcttgaagaccgccatatcttcatatgtccaggaagtgacttccgaggaattcacacagaagagcttattcaggcacagcaaggtttgattcaggttcttctcataccatggaagcctttttggcatccaggttattcttccatcagtgatggcctatgagctgcttggaagatggtacagctgccctgcatgctttggagcttcgggaaacactctgactttgcttttgccagctaacaactgtccctagacctccaggcatgatgttgaaataaaagcttagggaagaaatataggaggccctctcttccttttcaggcaagcayattacatgagtttcactctcaggtatatctaacaatattctggtcagagttcacttccaggattatctaacaatattctgaagacaaacacaatc

SEQ ID NO: 650011 - DNA, 567 bp, Homo sapiens
tgcagtctacaactcctttcatatctattaatacttgttttttatatttaggtgctccagtgttagttgtatatatgtgtacagttacattcttgctacactgacccttttgtcattatttaattaccttatttcactctttcatttttgacttaaaatctattttatctaataaaagtatagctcctcctgctctttcttgctttccatttggatggaatctctttttcctttccttcactttcagtcyatgtgaaagcaactgaagggggctgagtttcctgcaggtagcattcagtcgggtcttgtttttttactgctgttgtggtttttttgtttcttttgcttttttaaaaatccttttatccactctatcttttgattgaagaatttaattcattttctttcaagataattattacttttttattatactttaagttttagggtacatgtgcgcaacatgcagttttgttacatatgtatacatgtgccatgttggtgtgctgcacccattaactcgtcatttaacgttaggtatatctattattactaataggtaaggac

SEQ ID NO: 650012 - DNA, 530 bp, Homo sapiens
caaattactaaaataagaaatgaaatacaggataccactaccaaccttaccgaaataaaaaataattataagggaatattattaacagctgtatgccaacaaattaggtaacctaaatgaaatagacaaattcctagaaagacacaactactaaaactgacttaaaaagaaatagaaagcctgaataaacctataaagagtagagacagaattastaatcataaaattttccacaaagaaaatcccaggcccagacagctttattactgaatacttcaaaacatacattaatagaaaggaatgacaccagtcctttacaaacttttccaaataatagaaaaggaatcctgtctcattctatgaagccagcattgctcaagaaaactatttactgatatcccttatggatatagatgcaaacatccttaacaatacacttggaaacaggatctaaaagcatatgaaaagaattacacaccatgaccaagtgagatttatcccacgaatgcaaacttggtttaacatatgaa

SEQ ID NO: 650013 - DNA, 530 bp, Homo sapiens
caaattactaaaataagaaatgaaatacaggataccactaccaaccttaccgaaataaaaaataattataagggaatattattaacagctgtatgccaacaaattaggtaacctaaatgaaatagacaaattcctagaaagacacaactactaaaactgacttaaaaagaaatagaaagcctgaataaacctataaagagtagagacagaattagtaatcataaaattttccacaaagaaaatcccaggcccagacagctttattactgaatacttcaaaacatacattaatagaaaggaatgacaccrgtcctttacaaacttttccaaataatagaaaaggaatcctgtctcattctatgaagccagcattgctcaagaaaactatttactgatatcccttatggatatagatgcaaacatccttaacaatacacttggaaacaggatctaaaagcatatgaaaagaattacacaccatgaccaagtgagatttatcccacgaatgcaaacttggtttaacatatgaa

SEQ ID NO: 650014 - DNA, 622 bp, Homo sapiens
aaaaggagaacaaagatcacaggcttctgaggaaacaggacaagggcaaaatcacaaactcttgataagggtccaacaaagatcacaaggcaaagggcaaaagcagaattactgataagggtctctgttcaatggtgcacatattgtyttgataaacatcttaaacaacagaaaacagggttcgagagcagagaaccggtctgacttcaaatttaccagggtggggtttttacgcatcctagtaagcctgagggtactgcaggagaccagggcatatttcagtccttatttcaaccgcagaagatagacactcccaaagtggccgtttatagacctccccacaggaacacattccttccccagggtattaattattaatattcgttgctaggaaaagaatttagcgatatcttccctacttgcacgtctgtttataggctctctccaagaagaaacatatggctccattttgcctgaccttgcaggcagtcagaccttatggttgttttcccttgttccctgaaaactgctgttaatctgttctttttcgaggtgtactgatatcatattgttcaaacacacatgttttacatcaatttgtacagtaaacacaattgtaaca

SEQ ID NO: 650015 - DNA, 659 bp, Homo sapiens
agatgaaatgatgaaatgaacaaatgatatgaaatgatgaratgaaatgtaatgaagtgatgaagtgaaatgatgaaatgaggaaataatgaaatgaaatgatgaattgatgacatgaaatgatgaaatgaaatgacgagattaaaaggtgaaacgaaatgattaaatgaaatgagatgaaaagatgaaatgatgagatgaaatgaaatcatgagatgaaatgatgaaatcatgagatgaagtgaaatgatgaaatgaaatgataagatgaaatgagaaatggaatgatgatgaaatggtgaaatgaagtgaaatgaaatgatgaaatgatgaagaaatgatatgaaatgatggaatgaaatgatgaaatgaagtgaaataatgaaatgatgaaataaggaaatgaaatgaattgacgaaatgatgaaatgaatgacgaaatgaaaagatgaaatgaaataaatgagatgaaaagatgctatgaattgatgagatgaaatgaaatcatgagatgaaatgatgagatgaaatcatgagatgaaatgatgagatgaagtgaaatgatgaaatgatgagatgaaatgatgaaatgaaataatgaaatgaaaggatgaaatgatgagatgaaatgatgaaatggaatgatgaaatgaaatgat

SEQ ID NO: 650016 - DNA, 613 bp, Homo sapiens
gtgaaatgattaatgaaataatgaaatgatgaawtgatgaaatgaaatgatgagatgaaaagatgaaatgatgaaatgagatgaaaagatgaaatgaaatgagatgaaatgaaatcatgagatgaaatgaaatcatgagatgaaattatgaaatgatgagatgaagtgaaatgatgaaatgaggaaatgcaatgatgagatgaaatgaaatgaaataatgaaatgaaaggatgaaatgagatgaaatgatgaaaggatgaaatgaaatgatgaagtgatgaaatgaaatgataagtcaaatgatgaaatgatgaaatggaaagatgaaatgatgaaatgatatgaaatgaaatgatgaaatgatattaaatgatgaaatgatgaaatgaagtcaaatgatgaaatgatgaagtaaatgaaatgaattgatgaaataatgaaatgatgagatgaaatgaaatgatgaaatgatgaaatggaatgatgaaatgaaatgatgaaatggtgaaatgaaatgaggaaatgaaatgaagaaatgaaatgatgaagtgaaatgatgaaatgaaatgaaaagatcaaatgatgaaatgaagaaatgatatgaaatgatgaa

SEQ ID NO: 650017 - DNA, 613 bp, Homo sapiens
gtgaaatgattaatgaaataatgaaatgatgaattgatgaratgaaatgatgagatgaaaagatgaaatgatgaaatgagatgaaaagatgaaatgaaatgagatgaaatgaaatcatgagatgaaatgaaatcatgagatgaaattatgaaatgatgagatgaagtgaaatgatgaaatgaggaaatgcaatgatgagatgaaatgaaatgaaataatgaaatgaaaggatgaaatgagatgaaatgatgaaaggatgaaatgaaatgatgaagtgatgaaatgaaatgataagtcaaatgatgaaatgatgaaatggaaagatgaaatgatgaaatgatatgaaatgaaatgatgaaatgatattaaatgatgaaatgatgaaatgaagtcaaatgatgaaatgatgaagtaaatgaaatgaattgatgaaataatgaaatgatgagatgaaatgaaatgatgaaatgatgaaatggaatgatgaaatgaaatgatgaaatggtgaaatgaaatgaggaaatgaaatgaagaaatgaaatgatgaagtgaaatgatgaaatgaaatgaaaagatcaaatgatgaaatgaagaaatgatatgaaatgatgaa

SEQ ID NO: 650018 - DNA, 613 bp, Homo sapiens
gtgaaatgattaatgaaataatgaaatgatgaattgatgaaatgaaatgatgagatgaaaagatgaaatgatgaaatgagrtgaaaagatgaaatgaaatgagatgaaatgaaatcatgagatgaaatgaaatcatgagatgaaattatgaaatgatgagatgaagtgaaatgatgaaatgaggaaatgcaatgatgagatgaaatgaaatgaaataatgaaatgaaaggatgaaatgagatgaaatgatgaaaggatgaaatgaaatgatgaagtgatgaaatgaaatgataagtcaaatgatgaaatgatgaaatggaaagatgaaatgatgaaatgatatgaaatgaaatgatgaaatgatattaaatgatgaaatgatgaaatgaagtcaaatgatgaaatgatgaagtaaatgaaatgaattgatgaaataatgaaatgatgagatgaaatgaaatgatgaaatgatgaaatggaatgatgaaatgaaatgatgaaatggtgaaatgaaatgaggaaatgaaatgaagaaatgaaatgatgaagtgaaatgatgaaatgaaatgaaaagatcaaatgatgaaatgaagaaatgatatgaaatgatgaa

SEQ ID NO: 650019 - DNA, 416 bp, Homo sapiens
gaattcaagtgtttcaaagatatcttatttttaaataccaaaataggaatagaatatgaagggctggttatgagtaatatgrtacacttttatgagaggatgagattacaataacaatacctcctctcatagaataaccagcaagtctccactaaataacagtgccttgattttatagatgtttaatcttggatattgagttaatgtgaaccatttgtagacacaggagtttattaaagagttatataatatctttcaagtatttagaatagtgttgaaattaagcctgcatccccacgattttcagcggtgctgatgcctaataaactcaaccccttgcatgccaaaattggcttaaagcccacccgttacccaagctacacttcaagcatcaaggctcaaaaatgtaattttaa

SEQ ID NO: 650020 - DNA, 416 bp, Homo sapiens
gaattcaagtgtttcaaagatatcttatttttaaataccaaaataggaatagaatatgaagggctggttatgagtaatatgatacayttttatgagaggatgagattacaataacaatacctcctctcatagaataaccagcaagtctccactaaataacagtgccttgattttatagatgtttaatcttggatattgagttaatgtgaaccatttgtagacacaggagtttattaaagagttatataatatctttcaagtatttagaatagtgttgaaattaagcctgcatccccacgattttcagcggtgctgatgcctaataaactcaaccccttgcatgccaaaattggcttaaagcccacccgttacccaagctacacttcaagcatcaaggctcaaaaatgtaattttaa

SEQ ID NO: 650021 - DNA, 384 bp, Homo sapiens
atgaagggctggttatgagtaatatgatacacttttatgagaggatgagattacaataacaatacctcctctcatagaataaccagcaagtctccactaaataacagtgccttgattttatagatgtttaatcttggatattgagttaatgtgaaccatttgtagacacaggagtttattaaagagttatataatatctttcaagtatttagaatagtgttgaaattaagcctgcatccccacgattttcagmggtgctgatgcctaataaactcaaccccttgcatgccaaaattggcttaaagcccacccgttacccaagctacacttcaagcatcaaggctcaaaaatgtaattttaaatatgcaagagtttgaggaattc

SEQ ID NO: 650022 - DNA, 384 bp, Homo sapiens
atgaagggctggttatgagtaatatgatacacttttatgagaggatgagattacaataacaatacctcctctcatagaataaccagcaagtctccactaaataacagtgccttgattttatagatgtttaatcttggatattgagttaatgtgaaccatttgtagacacaggagtttattaaagagttatataatatctttcaagtatttagaatagtgttgaaattaagcctgcatccccacgattttcagcggtgctratgcctaataaactcaaccccttgcatgccaaaattggcttaaagcccacccgttacccaagctacacttcaagcatcaaggctcaaaaatgtaattttaaatatgcaagagtttgaggaattc

SEQ ID NO: 650023 - DNA, 416 bp, Homo sapiens
gaattcaagtgtttcaaagatatcttatttttaaataccaaaataggaatagaatatgaagggctggttatgagtaatatgatacacttttatgagaggatgagattacaataacaatacctcctctcatagaataaccagcaagtctccactaaataacagtgccttgattttatagatgtttaatcttggatattgagttaatgtgaaccatttgtagacacaggagtttattaaagagttatataatatctttcaagtatttagaatagtgttgaaattaagcctgcatccccacgattttcagcggtgctgatgcctaatwaactcaaccccttgcatgccaaaattggcttaaagcccacccgttacccaagctacacttcaagcatcaaggctcaaaaatgtaattttaa

SEQ ID NO: 650024 - DNA, 362 bp, Homo sapiens
atgaagggctggttatgagtaatatgatacacttttatgagaggatgagattacaataacaatacctcctctcatagaataaccagcaagtctccactaaataacagtgccttgattttatagatgtttaatcttggatattgagttaatgtgaaccatttgtagacacaggagtttattaaagagttatataatatctttcaagtatttagaatagtgttgaaattaagcctgcatccccacgattttcagcggtgctgatgcctaataaactcaaccccttgcatgccaaaattggcttaaagcccacccgttacccaagctacacttcaagcatcaaggytcaaaaatgtaattttaaa

SEQ ID NO: 650025 - DNA, 356 bp, Homo sapiens
atctttcaagtatttagaatagtgttgaaattaagcctgcatccccacgattttcagcggtgctgatgcctaataaactcaaccccttgcatgccaaaattggcttaaagcccacccgttacccaagctacacttcaagcatcaaggctcaaaaatgtrattttaaatatgcaagagtttgaggaattcactactcacactttcttgaacagtctatccaagtgcatcaagcaaaatgtgagtaaagaaattttgaccaaaggattgatagtaatgttgaatacttttaatagtagatctaagattaaaaggtgagagtgagggtgagaagagtgtatgaatgctttgtgttctga

SEQ ID NO: 650026 - DNA, 384 bp, Homo sapiens
atgaagggctggttatgagtaatatgatacacttttatgagaggatgagattacaataacaatacctcctctcatagaataaccagcaagtctccactaaataacagtgccttgattttatagatgtttaatcttggatattgagttaatgtgaaccatttgtagacacaggagtttattaaagagttatataatatctttcaagtatttagaatagtgttgaaattaagcctgcatccccacgattttcagcggtgctgatgcctaataaactcaaccccttgcatgccaaaattggcttaaagcccacccgttacccaagctacacttcaagcatcaaggctcaaaaatgtaattttraatatgcaagagtttgaggaattc

SEQ ID NO: 650027 - DNA, 356 bp, Homo sapiens
atctttcaagtatttagaatagtgttgaaattaagcctgcatccccacgattttcagcggtgctgatgcctaataaactcaaccccttgcatgccaaaattggcttaaagcccacccgttacccaagctacacttcaagcatcaaggctcaaaaatgtaattttaaatatgcaagagtttgaggaattcactactcacackttcttgaacagtctatccaagtgcatcaagcaaaatgtgagtaaagaaattttgaccaaaggattgatagtaatgttgaatacttttaatagtagatctaagattaaaaggtgagagtgagggtgagaagagtgtatgaatgctttgtgttctga

SEQ ID NO: 650028 - DNA, 356 bp, Homo sapiens
atctttcaagtatttagaatagtgttgaaattaagcctgcatccccacgattttcagcggtgctgatgcctaataaactcaaccccttgcatgccaaaattggcttaaagcccacccgttacccaagctacacttcaagcatcaaggctcaaaaatgtaattttaaatatgcaagagtttgaggaattcactactcacactttcttgaacagtctatccaagtgcatcaagcamaatgtgagtaaagaaattttgaccaaaggattgatagtaatgttgaatacttttaatagtagatctaagattaaaaggtgagagtgagggtgagaagagtgtatgaatgctttgtgttctga

SEQ ID NO: 650029 - DNA, 523 bp, Homo sapiens
actctaagtgtggtctgtgaacgttggcatcacctgagaatttgttagaaatgtatcatttaaagccccatcccagacctagaaatttgcatcttaaatcccagggtggggtgggcatggtggctcacgcctgtaatcccagcactttgggaggccaaggcaggtggatcacctgaggtcaggagttcaagaccagcttggctaatatggtgaaaccccgtctctactaaaaatacaaaaaattagctgggcatcgtggtgggtgcctgtaatcccagctagctgggaggctgaagcaggagaattgcctgaacccgggagaggcagaggtttcagggggctgagatcacgccactgtactccagcctgggcaacagcaagactccatctcaaaaaaaaaaaaaaaaaamaaaaacccaggtgatttgagtggttaagggcactgagccagggacttgtggcacgaagggattgttccgcgggtgagccgttagcggcctaagcaggttgtggtgtgatctgt

SEQ ID NO: 650030 - DNA, 614 bp, Homo sapiens
ttgatcattgcagcaatttttatagtagctcaaattggagacaaaataaatattcaacaacagtagaattgctaaataaattgtgatctcatygtacaaaataattttacaaaacagagataacactgaaatgcaacaaattaatgaatctcaaagagaagttaagaaaagaattgaaacacacaaatgttatattacagtgttttatttagataaattgtgaactccattaattgatgctagaagttagaatattgcataaagttttggaaggtaatggttatgaaacttaaaaattaaccaggataagatgcaggaagcattgaaatcaatgagagaaactataagcatttttcatgcagaagagaattatatatatatatgtatgtattaagtattttaacgtatataataagtttgaaataaattaatttgatgttttgcctaatttttcaaatgcatatacatataatttaatttatgataatttaacatcaacattaagacataacactttttttattattatactttaagttctggggtacatgtgcagaacgttcaggtttgttacataggtttacacgcaccacggtggtttgctgcacccatca

SEQ ID NO: 650031 - DNA, 614 bp, Homo sapiens
ttgatcattgcagcaatttttatagtagctcaaattggagacaaaataaatattcaacaacagtagaattgctaaataaattgtgatctcattgtacaaaataattttacaaaacagagataacactgaaatgcaacaaattaatgaayctcaaagagaagttaagaaaagaattgaaacacacaaatgttatattacagtgttttatttagataaattgtgaactccattaattgatgctagaagttagaatattgcataaagttttggaaggtaatggttatgaaacttaaaaattaaccaggataagatgcaggaagcattgaaatcaatgagagaaactataagcatttttcatgcagaagagaattatatatatatatgtatgtattaagtattttaacgtatataataagtttgaaataaattaatttgatgttttgcctaatttttcaaatgcatatacatataatttaatttatgataatttaacatcaacattaagacataacactttttttattattatactttaagttctggggtacatgtgcagaacgttcaggtttgttacataggtttacacgcaccacggtggtttgctgcacccatca

SEQ ID NO: 650032 - DNA, 489 bp, Homo sapiens
gaattcttctcaagtccttagagttctccttatattaaatactagttcccatatttctcagatatttctgtcttcatcaagacacaagtctacatttcttgccacttttcccattatgtgttatgacttattcaattttaattagtgctgatatttaatttcatgctttccctaaggttgcactcttgctccttctgcctraaatttagctcacatttcaatatgcttgcccaccaggattcaaattcatactgactcagccttagaagggtcacctgaaatttccatgactgacaaataactcttgtgtccagaatttatccaggcagcccattgggaagcatgtgaaatggctcagtttcttgtatttgttgggggtattgctataggtttgtatggaaacagatgagcatgcttgggtaacatctgtggtctgattagaaatcctaccaaagagtcacactaacttatataaaaaattagggtgtg

SEQ ID NO: 650033 - DNA, 489 bp, Homo sapiens
gaattcttctcaagtccttagagttctccttatattaaatactagttcccatatttctcagatatttctgtcttcatcaagacacaagtctacatttcttgccacttttcccattatgtgttatgacttattcaattttaattagtgctgatatttaatttcatgctttccctaaggttgcactcttgctccttctgcctaaaatttagctcacatttcaatatgcttgcccaccaggattcaaattcatactgactcagccttagaagggtcacctgaaatttccatgactgacaaataactcttgtgtccagaatttatccaggcagcccattgggaagcatgtgaaatggctcagtttcttgtatttgttgggggtattgctataggtttgyatggaaacagatgagcatgcttgggtaacatctgtggtctgattagaaatcctaccaaagagtcacactaacttatataaaaaattagggtgtg

SEQ ID NO: 650034 - DNA, 521 bp, Homo sapiens
gtgattcttctcacatgcccaatccactgctgctacaacatacaaacaatagtatttgagaaaaccattacactaaggctatgtatcatcaaaaaattcatagatttggctccctgaaagtacccagaaacaaagtcaaaggaccctacacaatatatcctatagtcacaccctcaagaggggaataaagttctatccaaacaaaagtaaatccaaaaagaaaccagcctaagatttctgggaccatagaaaaaaagagtgttgcaatacacccaaaggatcacactacgtctctagcaatggacactgctccccacatcccaggctgctccagcttctgccacagctcaaagggatcctggcacwgctcaggttgccactctagagggcacaagccataagctttggcagcttccatgtggtattaagtctgctggtacacagagtgcaagagtgaaggtggcttggcagcctccatctacatttcagaaaatgcacgagaaagcctaggtgcccaggca

SEQ ID NO: 650035 - DNA, 591 bp, Homo sapiens
gcgcagtttcatattaaaataaacacgagtttatacagatttctctaactacaatttacagtcacagagtttgttctagccttccttctttctgtgacaatgagaagcctggctctaattttctactctatatttaataatttgttcaatmctagtattatctttttacataatgctggatttaatttgcttacattttgttgaggaattttgcatctctgtttataaaggatattggtttgtagttttcttgtaatgtttttgtctcctaaaatgaattggagagtgacccttgctctctcattttctggaaaagtttgtgttttggatgggtgttatttctcaccaatgaaaccataatggcctgaaatttttcttgatgaaatgtctttaagagtttagtttatttaattgctacagggatattcaggttatacatttattctttaatgaatttcggcagtttgtatctttgaagggactggtctacttcgtctaagttgattttgtggaggcagaattgtttgtagtatctccttatcttccctttaatgtctgtggggtctgtagtcagtctgctttttcatttat

SEQ ID NO: 650036 - DNA, 534 bp, Homo sapiens
aaatgactcaccacaaaaagatagaaacataagtcaggtgatagatatatcaattaacttgttctaagtatttcacagtgaatacatatattaaaacatcatgttgtatcccatacttgtatacaattatgatttgtcagttaaacaaaaaaaatttgaatattaaattaaaataattttacttaaaatgctgagatttttttctattgaaaaattctattagaccttattagataatttaagaaaaatcaaaaygttcacaatgtgatgttagcattcatccatctggttgccaatgtaaaaaatcaatattgtgcttcacatgctgtgtcttagtaggtagatagctacttaagagtaatatgaattatttaataatttaaaatgttcctcgattccatgtgcaactttcccaaccccacagtcattcatatgcctccaaaggtgggaatttgaaggagaagaagagcaagatagcaggcattgagcactgtggggaaatgcgacttgatgatgcaagaatccatggcatct

SEQ ID NO: 650037 - DNA, 534 bp, Homo sapiens
aaatgactcaccacaaaaagatagaaacataagtcaggtgatagatatatcaattaacttgttctaagtatttcacagtgaatacatatattaaaacatcatgttgtatcccatacttgtatacaattatgatttgtcagttaaacaaaaaaaatttgaatattaaattaaaataattttacttaaaatgctgagatttttttctattgaaaaattctattagaccttattagataatttaagaaaaatcaaaatgttcacaatgtgatgttagcattcatccatctggttgccaatgtaaaaaatcaatattgtgcttcacatgctgtgtcttagtaggtagatagctacttaagagtaatatgaattatttaataatttaaaatgttcctcgattccatgtgcaactttccsaaccccacagtcattcatatgcctccaaaggtgggaatttgaaggagaagaagagcaagatagcaggcattgagcactgtggggaaatgcgacttgatgatgcaagaatccatggcatct

SEQ ID NO: 650038 - DNA, 574 bp, Homo sapiens
taaaatattttggacctcaccattatagcaatatttaaatgttaaatgtgaatttttactaagttgcttaacattgcacatcttttaaagctaatatttagtttaaaacaacgaccatttctatttatgtgaaaatagaataaattacttatacaataattgagacaagattgcctgacactgaaaatgtatatgctgctgtctgaaatgtatctatgttccttttatacaatgttcatttatatttttctatgccatacaaaagaggagattcataatttccttagaatatgggagtttatattgtcaatgttttcagtgaaagatttttttaattccagaaagtatatgcatagacagataatttactgtactatgattttcttgccaataaggatacatatatgaaaaacaatatctaatccaaagtttcttacagaagaattaaaggaaattgaragaagttacagggtggtacctcttttttgttctaacagaacaaagagaaaaagtttttagaaatatgctatccaataggaaaatttgtcttttgcattgagtttaccttagctga

SEQ ID NO: 650039 - DNA, 525 bp, Homo sapiens
acaagttaaatcaaggtgattatacactaatactcaaacaaataaagggagtggctaatgagtagagagtgtttgtcttttcagctttgactattattgtatccttggtgcctagcacagtagctggtataagtatatacactagaaacatttgttgtgtatatgaaagatattaatctaactacccaaaccttctaccttaattacaacgaagtaaaattagaaaataaaaattcctaatgttctcattctgctcttctaatcaactaatgcttctaatggctaccattgaaacttacaggaggaccctttgaatatgraaagttattgaagaaaaaggcatctaatctattgagtccatggggaaaaaaagatgagagagaataaaataatttcttctagccaacatagcagctgggcgatcaaattcaaatagcaagcatcggagtccatgctattcaaccagtcatgggtaactgggttagcaaaggagggagcaattgtaatagctacccaagtagaagg

SEQ ID NO: 650040 - DNA, 593 bp, Homo sapiens
catatgtttagcctttgtatataattagctattaatactacttataccatgagctgctttagtccctaaagtgtattcttgatcttggtagtatgtttcactggacacagagttgagtgaatcaagaattaggtttttggtgctgtttcttacagcattctttgattttaattaatttttttagtatttttgcttttagttttttttaatgccttgtataaagaatgcagatttcattggaataagctgattgctggagaagagttaactaaagagatgcacacctatccttttacgattgcattttcctcatcttcttatataaactatatatagtaaattcaaatctggcatattgctgaggttatagtagaaactactttwgaacactatgcaaaattacagtgctaaattgaaaagaagagctgggagcagttccaacgtgtaaccccaactctgagaaaaaagaccctgattttaaattatgaaaaaaatagtatgacttatggagaataatacatattagatactacatgaatggttttccaggcattcaatattgtaaagtggccattgttcaaaatattatttag

SEQ ID NO: 650041 - DNA, 621 bp, Homo sapiens
cgatgggactgcgcaccgtggagcggggggcggcgcttgtaggggaggctagggcggcacaggagcccatggacggtgtgggggaggctcaggcatggcggactgcaggtcctgagccctgccccacgggaaggcagctaaagcccagcgagaaattgagcacagcagctgctggcccaggtgctaagcccctcactgcccggggccagtggggccggctggccgctctgagtgcggggtccgctgagcccacgcccacccggaactcccgctggcccgcaagcacagtgggcagccccagttcccacccacgcctttccctccacacctcctcgcaagctgagggagccggttccggccttggccagcccagaaaggggmtcccacagtgcagtggcaggctgaaaggctcctaaagtgccgccaaagtgggagcccaggcagaggaggcgccgagagcgaacgagggctgcgagggctgccagcacactgtcacctctcagcatgtcccccactactgtacagcacacagagtacaaggccatcaaatttaatgtgactttaaattttgcaaacttaaactaatgtgatacaaaatatattacaaaagtcttacattat

SEQ ID NO: 650042 - DNA, 534 bp, Homo sapiens
gcagtaactaaccaaagaaattctagatggctttaggatgaggaagaggaagcaggggaaagtcaggaagtatggctttttaaaggagagtctagggctgggatatagtagcagagccacctggtttcagtccttgtatcccaaagatcttggggcacacgaacctgggccatcccatgggaaatacattagtccttcccattacatgtggctagtgtgagttaatagaggagtgttgtacatctataaaactcagttaataaccttttaaaattagagaatgtgtttcagttactcactttgtatcagaatttgttaggttgccactcaaactggctyaaactataaagcagctttattggctcatagaactgaaaagaccaatagttgagtgtccttcaggtgtatttattctagagattcaggaagtcatcaaagctgcagctttggctgggtgtgatggcacaaacttacagtcccccagctacttgggaggctgaggcagaaggatcccttgagttcaggagtttgaga

SEQ ID NO: 650043 - DNA, 534 bp, Homo sapiens
gcagtaactaaccaaagaaattctagatggctttaggatgaggaagaggaagcaggggaaagtcaggaagtatggctttttaaaggagagtctagggctgggatatagtagcagagccacctggtttcagtccttgtatcccaaagatcttggggcacacgaacctgggccatcccatgggaaatacattagtccttcccattacatgtggctagtgtgagttaatagaggagtgttgtacatctataaaactcagttaataaccttttaaaattagagaatgtgtttcagttactcactttgtatcagaatttgttaggttgccactcaaactggctcaaactataaagcagctttattggctcatagaactgaaaagaccaatagttgagtgtccttcaggtgtatttattctagagattcaggaagtcatcaaagctrcagctttggctgggtgtgatggcacaaacttacagtcccccagctacttgggaggctgaggcagaaggatcccttgagttcaggagtttgaga

SEQ ID NO: 650044 - DNA, 458 bp, Homo sapiens
cgatttcccagtgactccagatgcagaaaaaaatccttagcccaagtactgagtcttctccaagtcccctctccactcttctccactcttctgtgtatgtcccagaagcctcacttctcaggatgaacactaggagctcttgctttctgactttcagttgggtttaaccaaagggatrtatcagcaccttgagtgaagtgtgggaaaagagaaagccaccttattctcttctgccagaacatggttttagaagcagctgtatttctctacataaggccacattcctgccaggcatccttctcccacagcacagctctttccaggttctggtaacatgatcctcttgcccattcaggactaaaggtgacagtagcttccctcattaaactcttcaattttatcccgtttttaaagtgtgccgtctacttcttgccaagaccttgactaatatagagtag

SEQ ID NO: 650045 - DNA, 568 bp, Homo sapiens
tccaactcctgtactgctctggtattgactaactattaatagtgtttctagaagtgaaattgatatgaagcctactgcattccttcttaatttatataggcagaaaaattctaggttgaatagacagaagactaattaaaattgtaaaaacagagaatcacgattcctcaatcaatttctaggcttgtgccagtttacagacccagaaccccttcartgaaagggaggctgggtcgtcttgaggaaggatctcacaacattactgaaaacttatgctgtcagtctttctcccatcattacctaaggagacctctggcctttaacagggtgactgtgcaatggggaaagggaaatggtcagacattttggagactatggatactggttctgagctgaagttgattcccagagaccccaaatgtcattgtgatcctccagttaaagaaagagcttatggaggtcaggtgattaatggagttttagctcaggtctgacttacagtgattccctgaactcatcctgtggtcctttccccagtgccagaatgcataattggcatagacatact

SEQ ID NO: 650046 - DNA, 568 bp, Homo sapiens
tccaactcctgtactgctctggtattgactaactattaatagtgtttctagaagtgaaattgatatgaagcctactgcattccttcttaatttatataggcagaaaaattctaggttgaatagacagaagactaattaaaattgtaaaaacagagaatcacgattcctcaatcaatttctaggcttgtgccagtttacagacccagaaccccttcaatgaaagggaggctgggtcgtcttgaggaaggatctcacaacattactgaaaayttatgctgtcagtctttctcccatcattacctaaggagacctctggcctttaacagggtgactgtgcaatggggaaagggaaatggtcagacattttggagactatggatactggttctgagctgaagttgattcccagagaccccaaatgtcattgtgatcctccagttaaagaaagagcttatggaggtcaggtgattaatggagttttagctcaggtctgacttacagtgattccctgaactcatcctgtggtcctttccccagtgccagaatgcataattggcatagacatact

SEQ ID NO: 650047 - DNA, 250 bp, Homo sapiens
ttaagaaaagtgtttttatatttttattcttccayaaatatatataacctttgaaactaggggaccagaaaaatttatttgttgtaccaagaaatattaataatcttggattaatatagatgatgactatttaaaagacaaattgagttttccctttaattgggtaaaatgattttttatattcttagaaggataagattataatatgcatttctctcatggtctgttcctttcagtgcctaatattcca

SEQ ID NO: 650048 - DNA, 510 bp, Homo sapiens
agtgacaaaatgtgaatcaatgttaatgtaggtataaggaggtctattatacttaattccttccttartatattaatagaaaattcgctgttaaaagcatgaaagaaggtgattctgtgtctttgcaattgtgaatagtgctgcaatgaacacacgcatgaatgtgtctttatgagagaagaatttatattccttggtagactggataaagaaaatgtggtacttacacaccatggaatacggtgcagccataaaaaaagagtgagatcatgttctttgtaggaacatggatggagctggaggccatcatccttagcaaactagtgcaggaacagaaaacaaaatatggcttgttctcacttacaagtgggagccaaatggtgagaacacatggacacaaagaggggaacaacagacactgtggcctacctgaaggcaaacagtggaaatagggagaggagaagcaaaaatagctaatgggttctaggcttaatacctcggtgatgaaat

SEQ ID NO: 650049 - DNA, 530 bp, Homo sapiens
tactttaaatcaaaagtgtccacagtgttcaatttcatgggccaggaaaatttcaataataagcctggaatctgatataggtttgtcaagcaaaaaacaacaaaacaacatatgaacatataaacaacatatacaatttaccayttattatcactataattgcacaagtgaaagaacattttacttttaaaaagtaggaaaaatcagaaaagagaaaagtcttaacagctttagttcatcaataaatttagttttataaaaagcacatcctattttctttctcttttgtacttttttttcttgcattttacagccaacttctgaagactttgacattgatggatgcaagtcctcagactggcttttgggagctacagacccataggactcctgagcccaccctgaagtggagagtgaggttagagtttccagtgactgcattgactgtgctgtgcactgtaaaaggtttggttactcagctcctggccaaccacactgcggtgaaaggcttcaagtggacaccatgttgt

SEQ ID NO: 650050 - DNA, 467 bp, Homo sapiens
tttgtgggcaataaatttaaccactttttactgaagaagttcaaaactgtgtgtcactgtagatattgctgttttatacataaatgattacatgtatgtttcgagtaaaaaaaattagaacacatctttatttaagaaatgcatgtgaagttccttatcttacactatgactaatcccagtaaaaaagacatttacataatttccacctaacttattgaatcataaaacaatcctctggtaataaaaattctcattcttctgctttccaatcagagtgaagtacagaacttatggaaagaaaatttgattattctggatactgcaaaaaaacatggctatgaagtagttgacacattcactataacaatggggcgttacaaagagtttctacaggggamgtgtggatgtcatttccatgaggtatttatgctggctatctgagttttatagcttttgatcttttaaa

SEQ ID NO: 650051 - DNA, 583 bp, Homo sapiens
tccatgataaacatcttcagcatgaatcacaaacaactcaggatgtgttatcttgcttctcagcatatgtctaagaaatcagtcttcttgccaaaaggagaaaaaagtttcaaaatcaaaattatgagtcttatagattgattttcgtagtagaaatgaaatgaaggtccttgtaatgggaaaccattagaaatctcaaaatccaaatattgcatkattttcactttacagtacttatatatggcacccaggaaacttctcagttgaccataattaatttataagaaaatttgaaaatttgaaattttatttgtttgtggcaggagctgatgaaacattttctaatgatggaagctaaaattccctaacacaatatttgtgcatcttatactaagtacatctttcaatgcaatttaatttttctcttattctaaaatgtttgtttttttagttcacgtcctaaaaaaagaaatgtgagtgcttcaaaacagaccttgagaaggaaatgctttcagttaaccttatggaaacatcacagaaagtagcactggacaaagtagaagttattcaagtcaagcagagt

SEQ ID NO: 650052 - DNA, 586 bp, Homo sapiens
actcttctcttcctcacccctcccagagcaagaactacaaaaacatagtttttttctcatkttcttttagatgtatctgctgccatttattttctctctggtgattgtgtgatataggaaggggaagcatcaatggcttctttatatcctaaccacattccttgactgggccctgtttcacatctctgactcctctagagattactcagccaacatgctgcccctcctcagcgcatcaccttcttgggtctcagggcttggcattttcattcagccttgcagttccatgctcatcaccaacactgcagacatctgctgccactttcctgcctaaagcaagggaattcctgtgattcacaccgtgagcagaagcaggggtcctcttctactcagcattatcccagtttgtctcactcctttagccaatatcatgaaactctgaaactttatagcaggatgaaaacttaagcctgtagtctaaagacccagaattatgagtgaggaaactgaggccaggagagccatgaatgatagtgtttacttgattgctgtttcagatttcaccagcttttattgatacttcagc

SEQ ID NO: 650053 - DNA, 479 bp, Homo sapiens
atacacatttttttttctattttttttttttttgagacagtsttgctctgtcatccaggctggagtgcagtggtgtgatctcagctcactgcagcctccgcctcctgggttcaagtgatccacctgactcaaactcaagtatctaggattataggcgtgtgccactgcgcctagctaatttttgtattttaatagagacagagtttcaccatgttggcaaggctggtctcaaactcctgacctcaggtgatcagcccacctcagcctcccaaagtgctgggattacaggcatgagccactgtgcttggcccacatagactgtttctaagggaaataaatatgtgttccttcatgcaagaggcaaagactgatttgattattatttgttaggatcgtatattcaattccgatccctgaattttcattgattttcctagatgttttatttaattttttttctgtaaattccattcgttcct

SEQ ID NO: 650054 - DNA, 479 bp, Homo sapiens
atacacatttttttttctattttttttttttttgagacagtcttgctctgtcatccaggctggagtrcagtggtgtgatctcagctcactgcagcctccgcctcctgggttcaagtgatccacctgactcaaactcaagtatctaggattataggcgtgtgccactgcgcctagctaatttttgtattttaatagagacagagtttcaccatgttggcaaggctggtctcaaactcctgacctcaggtgatcagcccacctcagcctcccaaagtgctgggattacaggcatgagccactgtgcttggcccacatagactgtttctaagggaaataaatatgtgttccttcatgcaagaggcaaagactgatttgattattatttgttaggatcgtatattcaattccgatccctgaattttcattgattttcctagatgttttatttaattttttttctgtaaattccattcgttcct

SEQ ID NO: 650055 - DNA, 479 bp, Homo sapiens
atacacatttttttttctattttttttttttttgagacagtcttgctctgtcatccaggctggagtgcagtggtgtgatctcagctcactgcagcctccgcctcctgggttcaagtgatccacctgactcaaactcargtatctaggattataggcgtgtgccactgcgcctagctaatttttgtattttaatagagacagagtttcaccatgttggcaaggctggtctcaaactcctgacctcaggtgatcagcccacctcagcctcccaaagtgctgggattacaggcatgagccactgtgcttggcccacatagactgtttctaagggaaataaatatgtgttccttcatgcaagaggcaaagactgatttgattattatttgttaggatcgtatattcaattccgatccctgaattttcattgattttcctagatgttttatttaattttttttctgtaaattccattcgttcct

SEQ ID NO: 650056 - DNA, 518 bp, Homo sapiens
  misc_feature 99: n = A,T,C or G
tttcttcctcctctcttcttcccccttcttttaaaaacactcccctcccttatttcattattacactattatcctcagactgcagtggatccatccccnattgcttacggcacagtttcctacagcagtacctgtctctacttgtagcacataatatattgttasggggtgagtaaatgatcattaattgttaaggatcaaaattattttaatgttttaattaaaaaattactgcatataatctattattgcatgaatattggtgcctaattaggataagaccaaaggtaggtatttaagccagaaaaatgtttcaatttttttttttttttttcttttcttttttttattatactttaggttttaggtttcatgtgcacattgtgcaggttagttacatatgtatacattttttttgctggtgcactgcacccactaactcgtcatctagcattaggtatatctcccaatgctatccctcccctctccccccaccccaccacagtccccagattgtg

SEQ ID NO: 650057 - DNA, 518 bp, Homo sapiens
  misc_feature 99: n = A,T,C or G
tttcttcctcctctcttcttcccccttcttttaaaaacactcccctcccttatttcattattacactattatcctcagactgcagtggatccatccccnattgcttacggcacagtttcctacagcagtacctgtctctacttgtagcacataatatattgttacggggtgagtaaatgatcattaattgttaaggatcaaaattattttaatgwtttaattaaaaaattactgcatataatctattattgcatgaatattggtgcctaattaggataagaccaaaggtaggtatttaagccagaaaaatgtttcaatttttttttttttttttcttttcttttttttattatactttaggttttaggtttcatgtgcacattgtgcaggttagttacatatgtatacattttttttgctggtgcactgcacccactaactcgtcatctagcattaggtatatctcccaatgctatccctcccctctccccccaccccaccacagtccccagattgtg

SEQ ID NO: 650058 - DNA, 518 bp, Homo sapiens
  misc_feature 99: n = A,T,C or G
tttcttcctcctctcttcttcccccttcttttaaaaacactcccctcccttatttcattattacactattatcctcagactgcagtggatccatccccnattgcttacggcacagtttcctacagcagtacctgtctctacttgtagcacataatatattgttacggggtgagtaaatgatcattaattgttaaggatcaaaattattttaatgttttaattaaaaaattactgcatataatctattattgcatgaatattggtgcctaattaggataagaccaaaggtaggtatttaagccagaaaaatgtttcaatttttttttttttttttcttttcttttttttattatactttaggttttaggtttcatgtgcacattgtgcagrttagttacatatgtatacattttttttgctggtgcactgcacccactaactcgtcatctagcattaggtatatctcccaatgctatccctcccctctccccccaccccaccacagtccccagattgtg

SEQ ID NO: 650059 - DNA, 518 bp, Homo sapiens
  misc_feature 99: n = A,T,C or G
tttcttcctcctctcttcttcccccttcttttaaaaacactcccctcccttatttcattattacactattatcctcagactgcagtggatccatccccnattgcttacggcacagtttcctacagcagtacctgtctctacttgtagcacataatatattgttacggggtgagtaaatgatcattaattgttaaggatcaaaattattttaatgttttaattaaaaaattactgcatataatctattattgcatgaatattggtgcctaattaggataagaccaaaggtaggtatttaagccagaaaaatgtttcaatttttttttttttttttcttttcttttttttattatactttaggttttaggtttcatgtgcacattgtgcaggttagttacatatgtatacattttttttgctggtgcactgcacccactaactcgtcatctagcattaggtatatctcccaatgctatccctccccyctccccccaccccaccacagtccccagattgtg

SEQ ID NO: 650060 - DNA, 425 bp, Homo sapiens
tcacggctgactgcatccttgacctcccaagtgatcctcccatttcagcttcccaagtagctaggattacaggtatgtgacaccatgttcagctaatcatttaaaatttttttcttgtagagatggtgtatcactacgttacccacgctggtcctgaattcttgggctgaagwgatcttcctgccttggcctcccaaagtgcttggattatatgcatgagccaccatgcctggcctctgttctcttattttcttggtcagtctagccagaggtttgtcaatgttgctgatgttctcaaagaatcaacattaatattctacattatttctctgtctcctatttcattatttccacattaactttattatatccctcctctgcttactctgaatttagtttgcccttcttcttttctagtttcttaa

SEQ ID NO: 650061 - DNA, 631 bp, Homo sapiens
gctctctgtggggccagagcctgtgagggtctcactccctgcagggtctttctagcttctctctcctttgaagggcttcctccctccccaaatacatggcacccttgcctcatatgccctaaatcattctctaggtcttagttaaactgcactcagtctccttgaagaacaaagatggggccactttccatggcacagaagtgtctgcaaaggttagagcaggggaaagaagaaagtgcttcttgttgaggcctgtgatgcccccttttgctgtgggtgaaaggcgcaggtgggccctttggttgcatatcagacacattggatgcaaaaagtcttttcactggaggagagagaaagagagactgaggggttcaaaggggaatctagctgagggcctacttaaatgacacgtgcccatggagaggagaaacaaaggcacagctcccagatatgtggccggacatcatcaaatgaggtaaatgcagtgtcagatccaggaaccctgggacactatgcctccctctgttcctgctgagacccaggcattgcataaagagcaamgctgaagtgcaacactacaggaatcttgtagtaatagcagcaacagtaaaagaggaatcaagtcacctgg

SEQ ID NO: 650062 - DNA, 568 bp, Homo sapiens
aggttatataagttatgtaatttaacttaatgaggccaccagacagaaactacaaataatatttcaaaaaccacaggcataattattaaaagatatggctattttagcatctggaaagagaagcagaacattgttaattataaacactttctctgggacaataataaggtttctgctatgggtggcttcaattagatttggggaaaaaaatctgtacttcccttttaagagatgagtcacgcaactgaaacttctctatttcttttcttttctsattgttctccagaattaggactagtaacagtccttaaatcttgtatttccttatctagaaaactcagtatcttcccttccgtttgtcttaaaatattagtactgctcttccttattggcaggtgggctttatggaatttgtttgttataaaaagctatgcaccaggatggatgattttttaaaaatggtctcccataaggttactgcagcgcttgaaggaacatggcttagccagcagttacctttgcgcaatgcagatattctttattagtacttgactgccttgttaagatt

SEQ ID NO: 650063 - DNA, 568 bp, Homo sapiens
aggttatataagttatgtaatttaacttaatgaggccaccagacagaaactacaaataatatttcaaaaaccacaggcataattattaaaagatatggctattttagcatctggaaagagaagcagaacattgttaattataaacactttctctgggacaataataaggtttctgctatgggtggcttcaattagatttggggaaaaaaatctgtacttcccttttaagagatgagtcacgcaactgaaacttctctatttcttttcttttctgattgttctccagaattaggamtagtaacagtccttaaatcttgtatttccttatctagaaaactcagtatcttcccttccgtttgtcttaaaatattagtactgctcttccttattggcaggtgggctttatggaatttgtttgttataaaaagctatgcaccaggatggatgattttttaaaaatggtctcccataaggttactgcagcgcttgaaggaacatggcttagccagcagttacctttgcgcaatgcagatattctttattagtacttgactgccttgttaagatt

SEQ ID NO: 650064 - DNA, 568 bp, Homo sapiens
aggttatataagttatgtaatttaacttaatgaggccaccagacagaaactacaaataatatttcaaaaaccacaggcataattattaaaagatatggctattttagcatctggaaagagaagcagaacattgttaattataaacactttctctgggacaataataaggtttctgctatgggtggcttcaattagatttggggaaaaaaatctgtacttcccttttaagagatgagtcacgcaactgaaacttctctatttcttttcttttctgattgttctccagaattaggactagtaacagtcctkaaatcttgtatttccttatctagaaaactcagtatcttcccttccgtttgtcttaaaatattagtactgctcttccttattggcaggtgggctttatggaatttgtttgttataaaaagctatgcaccaggatggatgattttttaaaaatggtctcccataaggttactgcagcgcttgaaggaacatggcttagccagcagttacctttgcgcaatgcagatattctttattagtacttgactgccttgttaagatt

SEQ ID NO: 650065 - DNA, 562 bp, Homo sapiens
gtaatacagaatgacagatttttctttatttcactcatgtaaacaacatctgaactataaatagtctataatagcatattatgtatgcaagtttgaagcacgtaacttcatataactgagcattaaatgtaaatggctacaaaggctagctctctcatctctagctctgtaaattacaacttgttgtcagtggccagaaaaaaatggtctcacttcctctgatattctagggaaataatccaccctgccaaggacctaggttttaaatttcatgacctacataaaaggcaamgctttttaaaagtttgttttctatatggtaatttctgtatatcacaaagtcagggactagtttcctcttcatttgtgtctacaaaacatacagagtagtatgctctataagatagtggtttccaaatattttgtataaaacatatttcttctgtctggatgtattgtttttcaatgataacaatcttagacagaaaaggaaaacatgtccttcaaatgactgaagagtgtgaaaataagtaattaaaaattaaagctgttggaacttcaa

SEQ ID NO: 650066 - DNA, 555 bp, Homo sapiens
ccctgtctctaaaaaacaaaacagagcaaaaattaaatgatacctggatcctgttattgtcattttttatttagtggaaatgcaatgaagaaaatgcaaaaagtccccacctttcatatataattttttcatgtgtaaaagttacatggatggtawgatctagcggcggttctggttggaaagagctaaaaaatagttataatgtactagttatctcttcccttttagaaacattgttcagtgattttcagaattcaaaatatgtttcctaattttcccctcctctcctctccccttctcttcttcccctccctgctgtcgaaccacagatttaatccacttaagttcagaggatatattcaattgaggtccagaatttatcactttgaacatacctagacatttccatctttttatgcagtctgaggcctgtgcttatcactagtattagtactttcttatttctatattctactcttttgtgtaaagcagaggcaaaaatgcgaagaaaaatttaaataatggcaaaacattgttttccaaagctggtatttc

SEQ ID NO: 650067 - DNA, 626 bp, Homo sapiens
ataaatagctattaaaatttaaccattttattttaaaataatttgcaggggatatgttatatgcatatatattattgaatgctgggataaattcaagcctagtaaaagacactcatttggggattataatttaattttgaacataaaaatgtacatcttgaatcagaacacattaacaaggttatatggctcacgcctgtaatcccagcactttgagaggccgaggcgggcggatcacgaggtcaggagatgcagaccatccgggctaacacagtgaaaccccatgtctaccaaaaatacagaaaattagctgggcgaggcagcaggcacctgtagtcccagcactcgggaggatgaggcaggagaatcgcttgaacctgggaggaggaggttgcagtgagccgaaattgcaccaccgtactccagcctgggcgacagagtgagactcagtctcaacaatgacaacaacaacaacaacaaaaagagtttagatactttcarcttgagaacttgacctactggcatggagatacatgggtctgaagttgagaagagtgattggagccctaagatgtagattggggtctcctcaacattcagattacaggtgaagtcatgaaaattga

SEQ ID NO: 650068 - DNA, 612 bp, Homo sapiens
tgcatcaactacaaagacatttatagccacacttctaaacaaaaagcattctgctcaccaacttctagaagagcttgctttcggagatgtaggacctcaagactggctccagagtcttgcaggagcagatgcagaaagtaaacaggatttccacggcatagcagctgagaactcagaaatgaggcacaggctctcaacccttcatctatccttaaggttatcctgacatctgaaagccattgacatcctsagccttccagctcttcggacgcatgcctaacacaagttaaatatagatccctgacacctgagccaaatggaatgaaagttaacttgaaaaatctcactcattttgggcctcagttgaggaaaataaaacccttaatcctttccctgctaaaacctgttattcctgttaacagatggttgctctacttataaaacatagaaattcaagtaatcagtaatcaataatcaatttgcttcacttcatgattaccatttgctctgatagtaaagaggaaggctcaggttttcctgtcttaagcataaaacaacataaaagtgaatattgattactattgagtcaacaaaacagatttttgttccagt

SEQ ID NO: 650069 - DNA, 575 bp, Homo sapiens
ggattgcaatttcataccatccttgaagttagagagagccacgtgactcatttagccaatgaactgtgagcagaatgacatgtcacttccagctgaagctttaacaatctgagagacattcatacattttccatgtgctgtrgccttatacccaaagcctgggtcccaagtgaccatgacaggcagagctccctgttgagccacagagatttagagaatggctgttaacacagcataatccagcccatcctgactaatctgatattaacatgtataataaagaattctatcaatgctgagggaagatgactagttaaggtcctaggttgcaagtctcaaaacctcttctaaggattgtagacaggaaattaaatgacttctagtccctagagttcccaatctcctaccatcccatcctaatatgacagaagtaattcctgagttgcttctgaaaccagagcttccctcagaacccttagcctgccagatggcttcttggagagccctcactcacttttctccttctgctattgctgctcattcattccagtttttaaaaattcatctttatccag

SEQ ID NO: 650070 - DNA, 620 bp, Homo sapiens
gttgtaaccccatctctactaaaaatatattttaaaaattagctgggcatggtggtgggcacctgtaatcccagcttctcaggaggctgaggcaggagaaccacttgaacctgggaggtggaggttgcagtgagcggagatcacgccactgcactctagcctgggtgacaatagaaagactccatctcaaaaacaaaacaaaacaaaacaaaacaaaaaaccactaaaaaaaagactccatttcaaaaacaaaactaaaaccaaaaacacaacacaaatgtagtacacaaatgaagataattactgtgttaaacacagtttcatagaaaataaaagaccaatcaaatacaataagctgactttttagatgggtatgttattcttctttcacagctaaakaaacaggctcagagaatgttatttgattggaccgtgttgcatttctggacagtgcagctgagatcagactttgtgtgtaactccactagcctaccagggtgcctctcataaaggtaagaaatgtaaatttggcctaatatacaaagttgccagggcagcactgggtcaattctacatacagtacttctatgttcatcaagggaaaccttaagggaaagtga

SEQ ID NO: 650071 - DNA, 620 bp, Homo sapiens
gttgtaaccccatctctactaaaaatatattttaaaaattagctgggcatggtggtgggcacctgtaatcccagcttctcaggaggctgaggcaggagaaccacttgaacctgggaggtggaggttgcagtgagcggagatcacgccactgcactctagcctgggtgacaatagaaagactccatctcaaaaacaaaacaaaacaaaacaaaacaaaaaaccactaaaaaaaagactccatttcaaaaacaaaactaaaaccaaaaacacaacacaaatgtagtacacaaatgaagataattactgtgttaaacacagtttcatagaaaataaaagaccaatcaaatacaataagctgactttttagatgggtatgttattcttctttcacagctaaagaaacaggctcagagaatgttatttgattggaccgtgttgcatttctggacagtgcagctgagatcagactttgtgtgtaactccactagcctaccagggtgcctctcataaaggtaagaaatgtaaatttgkcctaatatacaaagttgccagggcagcactgggtcaattctacatacagtacttctatgttcatcaagggaaaccttaagggaaagtga

SEQ ID NO: 650072 - DNA, 587 bp, Homo sapiens
actatacctatctctctaactcttcatatgtgaaaattactcaaatacaaacaaaatgagtattacacataaaaaactaagatatgtgactaaagtattcagagaaaaacccatgcttaaaataagcctaaagaaaataactcaaccatcastgtggttcttggtgaaactgtaaactggtacagcttttctgaagaataatttggcaatctatcaaaatttaaatctacatgccttttgacccagggtttcactttcagaaatgtatattacagaagcatttatatgtatgcctagaaatccaaggaacctaagcactgtttataactataagcatccatcttcattaatagctaactgtataaatcatgataaagatattttagaataccacataattgcaaagaatatgcagacaggaatatatgtacagtatattcagtgacagggaaaaacagtcacagaacagtacttatagcacggcactgtttacacacaaaaaaaattgacatgggaatgcctggcgtatataaaagtataaaaaaatggcaaaagacttgcaccagtttaatgcttatctctagaga

SEQ ID NO: 650073 - DNA, 587 bp, Homo sapiens
actatacctatctctctaactcttcatatgtgaaaattactcaaatacaaacaaaatgagtattacacataaaaaactaagatatgtgactaaagtattcagagaaaaacccatgcttaaaataagcctaaagaaaataactcaaccatcactgtggttcttggtgaaactgtaaactggtacagcttttctgaagaataatttggcaatctatcaaaatttaaatctacatgccttttgacccagggtttcactttcagaaatgtatattacagaagcatttatatgtatgcctagaaatccaaggaacctaagcactgtttataactataagcatccatcttcattaatagctractgtataaatcatgataaagatattttagaataccacataattgcaaagaatatgcagacaggaatatatgtacagtatattcagtgacagggaaaaacagtcacagaacagtacttatagcacggcactgtttacacacaaaaaaaattgacatgggaatgcctggcgtatataaaagtataaaaaaatggcaaaagacttgcaccagtttaatgcttatctctagaga

SEQ ID NO: 650074 - DNA, 587 bp, Homo sapiens
actatacctatctctctaactcttcatatgtgaaaattactcaaatacaaacaaaatgagtattacacataaaaaactaagatatgtgactaaagtattcagagaaaaacccatgcttaaaataagcctaaagaaaataactcaaccatcactgtggttcttggtgaaactgtaaactggtacagcttttctgaagaataatttggcaatctatcaaaatttaaatctacatgccttttgacccagggtttcactttcagaaatgtatattacagaagcatttatatgtatgcctagaaatccaaggaacctaagcactgtttataactataagcatccatcttcattaatagctaactgtataaatcatgataragatattttagaataccacataattgcaaagaatatgcagacaggaatatatgtacagtatattcagtgacagggaaaaacagtcacagaacagtacttatagcacggcactgtttacacacaaaaaaaattgacatgggaatgcctggcgtatataaaagtataaaaaaatggcaaaagacttgcaccagtttaatgcttatctctagaga

SEQ ID NO: 650075 - DNA, 587 bp, Homo sapiens
actatacctatctctctaactcttcatatgtgaaaattactcaaatacaaacaaaatgagtattacacataaaaaactaagatatgtgactaaagtattcagagaaaaacccatgcttaaaataagcctaaagaaaataactcaaccatcactgtggttcttggtgaaactgtaaactggtacagcttttctgaagaataatttggcaatctatcaaaatttaaatctacatgccttttgacccagggtttcactttcagaaatgtatattacagaagcatttatatgtatgcctagaaatccaaggaacctaagcactgtttataactataagcatccatcttcattaatagctaactgtataaatcatgataaagatatttyagaataccacataattgcaaagaatatgcagacaggaatatatgtacagtatattcagtgacagggaaaaacagtcacagaacagtacttatagcacggcactgtttacacacaaaaaaaattgacatgggaatgcctggcgtatataaaagtataaaaaaatggcaaaagacttgcaccagtttaatgcttatctctagaga

SEQ ID NO: 650076 - DNA, 587 bp, Homo sapiens
tgcaagataaaagtgaagtattatttataagcatagtcctctgagacarccagtgaatttgtaaacagaaaccttgcaggtcagaaaagaactgtgtaaaatggtcaaaggctgaaaaaaattttcatggtgagaataataaaaccagaaaaatgtactacaacataaagaaaaataaaactcttccagaatgaataaatgctggaaaagcacataatcattgtatgtgccctacataaaatgctgaaaagaggtctttccacttaaaacaacatgatgaaaaatatatgtaatcatatgaaaatacataactttctgaaaaacatatgcatatacaaaaagtaaaattctgtggcattattgtgatggtgcagaaaatacttttagttattctttaaaatttgaaaaatataagcataaaaatcataaaacataaaaagatataattagcaacatcaataagaagtatagggtagatataatgaggacaaatttttctatgcaactgaagtcatttttttttacctagtttaaaatatatctgttgtaacatttaagatgttttacagaatctccaatgtagcaca

SEQ ID NO: 650077 - DNA, 587 bp, Homo sapiens
tgcaagataaaagtgaagtattatttataagcatagtcctctgagacaaccagtgaatttgtaaacagaaaccttgcaggtcagaaaagaactgtgtaaaatggtcaaaggctgaaaaaaattttcatggtgagaataataaaaccagaaaaatgtactacaacataaagaaaaataaaactcttccagaatgaataaatgctggaaaagcacataatcattgtatgtgccctamataaaatgctgaaaagaggtctttccacttaaaacaacatgatgaaaaatatatgtaatcatatgaaaatacataactttctgaaaaacatatgcatatacaaaaagtaaaattctgtggcattattgtgatggtgcagaaaatacttttagttattctttaaaatttgaaaaatataagcataaaaatcataaaacataaaaagatataattagcaacatcaataagaagtatagggtagatataatgaggacaaatttttctatgcaactgaagtcatttttttttacctagtttaaaatatatctgttgtaacatttaagatgttttacagaatctccaatgtagcaca

SEQ ID NO: 650078 - DNA, 587 bp, Homo sapiens
tgcaagataaaagtgaagtattatttataagcatagtcctctgagacaaccagtgaatttgtaaacagaaaccttgcaggtcagaaaagaactgtgtaaaatggtcaaaggctgaaaaaaattttcatggtgagaataataaaaccagaaaaatgtactacaacataaagaaaaataaaactcttccagaatgaataaatgctggaaaagcacataatcattgtatgtgccctacataaaatgctgaaaagaggtctttccacttaaaayaacatgatgaaaaatatatgtaatcatatgaaaatacataactttctgaaaaacatatgcatatacaaaaagtaaaattctgtggcattattgtgatggtgcagaaaatacttttagttattctttaaaatttgaaaaatataagcataaaaatcataaaacataaaaagatataattagcaacatcaataagaagtatagggtagatataatgaggacaaatttttctatgcaactgaagtcatttttttttacctagtttaaaatatatctgttgtaacatttaagatgttttacagaatctccaatgtagcaca

SEQ ID NO: 650079 - DNA, 587 bp, Homo sapiens
tgcaagataaaagtgaagtattatttataagcatagtcctctgagacaaccagtgaatttgtaaacagaaaccttgcaggtcagaaaagaactgtgtaaaatggtcaaaggctgaaaaaaattttcatggtgagaataataaaaccagaaaaatgtactacaacataaagaaaaataaaactcttccagaatgaataaatgctggaaaagcacataatcattgtatgtgccctacataaaatgctgaaaagaggtctttccacttaaaacaacatgatgaaaaatatatgtaatcatatgaaaatacataactttctgaaaaacatatgcatatacaaaaagtaaaattctgtggcattattgtgatggtgcagaaaatacttttagttattctttaaaatttgaaaaatataagcataaaaatcataaaacataaaaagatataattagcaacatcaataagaagtatrgggtagatataatgaggacaaatttttctatgcaactgaagtcatttttttttacctagtttaaaatatatctgttgtaacatttaagatgttttacagaatctccaatgtagcaca

SEQ ID NO: 650080 - DNA, 611 bp, Homo sapiens
tgtgaaatccaaataaaatctgtagtttagttaatagaaatgtatcactgttttggcaaatgcgtcttggttgtgtgggacattcacagtagaggaaaacaggaaagggtwtctgaaaactctgtaatgtctttgcagctttttgtaaatgtagaattattccaaaattaaaagtttatttttaaaaattgttttaatgccctaaagttagtttccagggtactctctctaacttcacttcttcagtcaagcagctagtaataggctctggacattaaagtttcaagtgaacacttttgtttttcattactttggcttctagagagcctttcctaagtcaatatattggtcagaaaggaatctcttgggtacaagtgacagacattttaactcaaaatagcgaacaaaaatgagaatttcttggttcatataatggaaaatccaaggtagcgcttgctccagaaaaaagggatgtatgtgacctgttcttcctagtctgtggttcttgccttcagctctgttggcctcatcctgaagccctttatcaagacctctgcaactccaggcttatatcctctgagttcaagttcaccagaaaagagagtatgctt

SEQ ID NO: 650081 - DNA, 650 bp, Homo sapiens
aaattatcgcttcttccagtattctccaacctccaataaaggaagagagtctggctctgccatctgttgcttgtattatatggctgtaataatgtgtggaacatagaaaggaaattaaggaattcataggtataatatgcctagtttcaaagtaaaagacgtgaatgtattttaaatggaaggagaaactaatgatgaaacacaatccattattaacaaaaaggtttaggaagggaggcattccaccaaagtatgtgtaaaagttcctctgacttctgtagcagacttctgaggctccctttctcccagacaatattacagaagagccgaaaagtagggcagagagataggtctggcacaactgcataaaagctcctgaggccaatcagagaactacccaaggtcatttattcacatgaaattacgtgagggtttattttctctgttttattttttctgaaaattgagaaaaacactttgggcaatctttcttagcattaggaattaaatttgagaattaactttacatgaacccaaacatatatggtatcccatcttaaatacaacaaatctttattgatgktcatctgagactcttcctttctatcctatccccttcctccacttacctaaccctgaacattagccca

SEQ ID NO: 650082 - DNA, 542 bp, Homo sapiens
gagttggaggggtgtaggatgacttgagtttctggcttgtgtgattggatgggtagtgatgctgttagctagataaaggaatatagaaatgggtcatatgtggggaaagagtacacagatttgaagatgttcagctctacgtgagtgtgaaatttttcaactgaatctgattgcaagagacttatcaatcctagttatataaatatataaataatgaggatatgagtggtaaaggaaaccatgaaatagacaaatccacccagaatacatataaagataagaagggaaagccaagaagggattggaagagaaggacagtattgcaaagcagacaaagaagtcgggggtaggaggagattcagcagcattgcgtcttaaaagccaaggggaaaaatttcaagaaaaaaagaagtggcagggaaaaggaaaaattamtaagcaatatgttatgtgttttattctatgctattttatctaattttcaaaacaagcctgtaaagtaagcatttcccatgcaacaggtggataaagtaggacaactt

SEQ ID NO: 650083 - DNA, 559 bp, Homo sapiens
gtagtttaagggttgtctgtggagttcttcttactcttatgctacattccactgaggttgcagagtcaaaataatgcattttcaagcccctcgagataattctgctctgtatggtcgtaccactaacatgaattatggttagcttctatttgttttggatagttttacaacttttagggatttttagaaaatatgtttagtttattttggtttgtgtttgtaaaatatttacacggttctaaagtcaaaactaaaayaaggcacactcagaagtctggcttccttctcagccccctctctcagttcttttactaccctgaaagacaatgtccatttgattcgtttttggtttatctttatactgtttttaagtttataaagtgtacacatgtatattatagtacatgtgatatataatgcatagtgtatacaaacacattcatgtggatttttacatcgttaacacagagggcagcctgctatacgcaccagtctgcactctccttttcctttacagcacagactggaaaaccacactccagatgtacgtggcgagggc

SEQ ID NO: 650084 - DNA, 564 bp, Homo sapiens
tcttagacttggctttggatttctggacctttgtgcctgtactgtgctgaaagactttacaggtatatgcggagcaataagccagtcaccatcattttggtcayaagtcatccctcagatgtcatggaaatccgaatggtcaaagaaaattttaaagcaagacctggtcaggtgagtcagtggtcagcaactttttaaatagcctttatccttatgtaatttttggaatttagcaaacatagcatcgttgaaatagttgcaattcttaattggtcatttaaaacttatccgttttttgctttttagtatattactctacattgtcccagtatatctgcattagaaaatcatccatttaccctcacaatggtaagaaacatatctcgtgctttttcacatttgtagggtgctatgcatctttttctttttttgtgtcctatctcattctaaaaggtattcaaggctatcatagtattcttgatgtttaagtaagccatctttttacaaggaaaatagttatctgctcaagaactttgtaactactctttattattttttgacacc

SEQ ID NO: 650085 - DNA, 563 bp, Homo sapiens
ctgcctcccaaacatcttgtcaatgtgaaactgccatcctctgtccaatctgtactgcagttccattttcctcaccatatttcagaaatcagatttctttccttatgtcaaaacctccactttcactatgcttctcaccgagaccctgtggattcttatacagaacctatgctcctacaacacctggcataatattttaagaatgaaagcattaaagtttaatgatttttttttttactttttaatgctttcccaaaaaatttagatgacttaaaacatttacagtaaaatagtgrtaaaacaaagtgaggtcactgaaaccagaaatatgtgactagaaacagaaaacaaaaatagaaaattcataacaggtatatatatatatatatatatatatatgtatatatgtaggcacacacaaattgtaagggttatgtgattgttgtggttgagcttcaaaaaaactatctacctacctaccattcagcttccttgcagccaaaattaaaaaaaaaaaaatgcatgtatgactttttttttaaatattctaattatcagtttta

SEQ ID NO: 650086 - DNA, 651 bp, Homo sapiens
tctaatgctctctctgtcttcatggtcaaaccattcattctgcaataatgtccagatttgggtaatataatcatccaggagtgctctgaaatgaaattataggactggactggattggagtttcagtgcagacttcagaagaagtggctctgcactgaaaattacttgctgccctttgcaatggtggcagttaaataactcaacaagaggtccctcggagaaaatcaatacacaccaaattgcaaaaatgtggatgcaatttgtggggaaagtggatttgatgtgagtctgtgttggctgccagcatgaagtcactctcaaggtggattaaatcctgttgcagctcttccttccaagtgctgggctggtctcttccttgtcctgcagatcccattgacttttcagctcaaccctgctccaggctgtgggatcaattaggccctggagggagccctgttgtggcttcagccatacttgaccataggcatcacaccctcccagttcataagggagagcccacgctgtgaagtagtagggattattttycttgtgttttgccttaggtcttggctctaagaacaggagtcctgtcgtgttcctcgtttagagtctctggcttggtaatctgcccaccagtctctacgagaaggc

SEQ ID NO: 650087 - DNA, 651 bp, Homo sapiens
tctaatgctctctctgtcttcatggtcaaaccattcattctgcaataatgtccagatttgggtaatataatcatccaggagtgctctgaaatgaaattataggactggactggattggagtttcagtgcagacttcagaagaagtggctctgcactgaaaattacttgctgccctttgcaatggtggcagttaaataactcaacaagaggtccctcggagaaaatcaatacacaccaaattgcaaaaatgtggatgcaatttgtggggaaagtggatttgatgtgagtctgtgttggctgccagcatgaagtcactctcaaggtggattaaatcctgttgcagctcttccttccaagtgctgggctggtctcttccttgtcctgcagatcccattgacttttcagctcaaccctgctccaggctgtgggatcaattaggccctggagggagccctgttgtggcttcagccatacttgaccataggcatcacaccctcccagttcataagggagagcccacgctgtgaagtagtagggattattttccttgtgttttgccttaggtcttggctctaagaacaggagtcctgtcgtgytcctcgtttagagtctctggcttggtaatctgcccaccagtctctacgagaaggc

SEQ ID NO: 650088 - DNA, 651 bp, Homo sapiens
tctaatgctctctctgtcttcatggtcaaaccattcattctgcaataatgtccagatttgggtaatataatcatccaggagtgctctgaaatgaaattataggactggactggattggagtttcagtgcagacttcagaagaagtggctctgcactgaaaattacttgctgccctttgcaatggtggcagttaaataactcaacaagaggtccctcggagaaaatcaatacacaccaaattgcaaaaatgtggatgcaatttgtggggaaagtggatttgatgtgagtctgtgttggctgccagcatgaagtcactctcaaggtggattaaatcctgttgcagctcttccttccaagtgctgggctggtctcttccttgtcctgcagatcccattgacttttcagctcaaccctgctccaggctgtgggatcaattaggccctggagggagccctgttgtggcttcagccatacttgaccataggcatcacaccctcccagttcataagggagagcccacgctgtgaagtagtagggattattttccttgtgttttgccttaggtcttggctctaagaacaggagtcctgtcgtgttcctcgtttagagtctctggctyggtaatctgcccaccagtctctacgagaaggc

SEQ ID NO: 650089 - DNA, 423 bp, Homo sapiens
agcagagcgcaaacctggggagtggacacacgtagaatgccaggaggagggaggagcccagccccactgtggccagagggtgtcagaagcacaggacaagcaggaaggaagcctgggagtcacctaggccagccttctcatgcacagagaagtgaacagaggcacaratgaggcagggacttgccagcctctcaaagctgaggtcggaggccaggtgtcctggcccagggttcttgcactgtctgtggtcctgggtgctacaggaagagtccccatggaggcaggagagtccctgacccacctcccaacatagttgggtcctttgagacacagtgctgttgattagggggtagggtaggactgaaggactggattcctccaggcaagagacaggagcagagccctcctcccccttgggttctg

SEQ ID NO: 650090 - DNA, 630 bp, Homo sapiens
attgaaatcataaccctgagaatgaaataaaatcttctaccacttagcagtttgtgaccaaggataatttttttaaaaaacatttcccagttttagtttcctaatctgcaaaatggagataatttttaccacattgaggtcttgcatgcaatccatgggacaatttaggtaaagcatttagaattgttcctggcacatgctctatgtttagcaaatgctttctgttaatattatccatttttaasttaaaataatagttcatagatgaggtcctattagtttcaagatttagtgaacccatctttgttgacttaaaatggactatatcatctcttaatggttgttttttttccagatgggagaggcctaatccctttaatctttgctcatcatcatctcattgtggatgcagcatctggcagcttagggcatgatgaaatactgtggaggtggagggaggattcagtgttgccctagcctctcagttggaaagttctctctctgattccgaagtgaaagtcagctttcctgtatcttcctttcaattttcctactcctgcttcctgggctgcatagaatgtgtaatcattctgatcattggacaaagcttctaacattttaaaacagaga

SEQ ID NO: 650091 - DNA, 576 bp, Homo sapiens
cttttgcagaagcattgcatgcaggaaatgcaagtctgtatcccgagtaagcctcagttccattcactaagaataacacactgctttatttatgataaatctgtagctttatatctctggacaaaattggaacgttttaattcctaatttcttcaaatacttcttcagctctctcatgttttcctccttctgtaattccactggcatgaatgttagatcttttgttatcctcttacaagttcctaagtctctatttattttttagtctattttttctctagtatttgcattagttaatttttatttttctattcttcagtttatcaatttttcctctttccatccactgaactttttatattgattattatatttttcagttctaaaatatccatttggttcttctttatatcttttatttttctgctgtggctttctattttcacatttcttgcaaaaagctatagttatggaagcattttttaakcataatctgctttaaaattatttagtcatttttcaatcattatctgctttaaaattattgccagattattctagcatttctcccatatt

SEQ ID NO: 650092 - DNA, 585 bp, Homo sapiens
ttcaaaacatttttcaactgcctcttgacacatataaagtcttatatgatctgtcccttgcctaggtctctatccttactctcttactatccccctctcctagtctctacaactgccatcctttctcttgcccactgctctttgtgccaccctctggttaaaayaatactactactgataacctctttttcttaattctgctcatattttagtctcaacttcaatgacacccatcttcgcccttaggctacatcagttctccctgctatatgctggctattcagttaacataacacattgcattgcaggaactgtgctaaattattcaccttcccaattagactataagccccatgaggacaataaccattttcgttttgctcacgaacatgtccttgacatctaatagctagtgcttgacaaagagcagaaaataagctgaatttaattctttcatttattccacaaatattttaaggaagcctatttgtgccagatgccacccaaggcactgagatgcagctgtgaatgaaacaaaatctcttcctacataaagctcatgttcttgcagggtaaaaaaaaaaa

SEQ ID NO: 650093 - DNA, 603 bp, Homo sapiens
tataccagtgcttttttaaaaatgtggattcaaatgactgtcttgtgtaacttgcttttagccttaggaatttattttggtgtttttggttttttttttttttttggtatgataggtctggcagcaacaacttcagttaatatttctgtttatctggcaaagtctttgtgttatcttcatttttgaaaaataattgctggataaggaattggtggctgacagttttttttcctttgcatcttttgaatatattattctactgcctcttgccttccattgtttctgttaagtcagctgttaatcttacaaaacataggtgctcaaataacaaacatgtgcatgaatatttacagcagtaataatcatacagtcaaaaagtggaaacaatccatakgcttgttgactcataaatggacacccaatttttagctataacaaagaaagaagtacttatacatggtataatgtgggtgaaatttgaaagcattaagtgcacaaaaagacaaatattacctgattttattcagatgaaacatcaggaattggcaaatcaattgggatataaatcagattagtggtcattagggctcagggaagcagaat

SEQ ID NO: 650094 - DNA, 472 bp, Homo sapiens
gtcttggggccgagcccttatgaatgggattagtgcctttataaaagaagctcaatggagttcttgtgtgccttccactatgtgaggacatagaaagaaggcaccatctatgaaccatgaaatgggctctcatcaacactgaatttgtgagcatcttgacctgagatcttacagcctcaagaagtgtgaaaaaagaaatatctgttgttttttagtcacccagttyatgttattttgttataagagtccaaatagaccaagatattccacttaatatataggggaaggcaacaaaaactgccacacttagaatactcctgatgctgggagtatgaaaacaggaaaaacaaaactgctcttgaaggtgaaggaggaataccactgagctcaccaacacagccaggaaaagaacagaagtgtgagaaggccacattcctgggaccctgagaaaaagtacctgcataagactgag

SEQ ID NO: 650095 - DNA, 472 bp, Homo sapiens
gtcttggggccgagcccttatgaatgggattagtgcctttataaaagaagctcaatggagttcttgtgtgccttccactatgtgaggacatagaaagaaggcaccatctatgaaccatgaaatgggctctcatcaacactgaatttgtgagcatcttgacctgagatcttacagcctcaagaagtgtgaaaaaagaaatatctgttgttttttagtcacccagttcatgttattttgttataagagtccaaatagaccaagatattccacttaatatrtaggggaaggcaacaaaaactgccacacttagaatactcctgatgctgggagtatgaaaacaggaaaaacaaaactgctcttgaaggtgaaggaggaataccactgagctcaccaacacagccaggaaaagaacagaagtgtgagaaggccacattcctgggaccctgagaaaaagtacctgcataagactgag

SEQ ID NO: 650096 - DNA, 626 bp, Homo sapiens
actccatgtgaaaatgggtgatggcttgcatttcatcttcattcgccaactgtttactaacattacatttcaggccttgtgcctggggatacaatgagaagtgacatggtctctgtaatctgtactgagggaaagtggtggagaaaaagagcgttaaaagagaaaacaaatgcctgatcaaatcatatgttatgatgcatattgtgaagcaatattatcaccaagagtgggacagagggagccgaggttcaatagaaatgccaggttcaaaagatataaacagcaatggaaggggaggggagactgtgaataacaggcacatccaggattctgtctcaggcagccaattgagcaggacagtgcagctatgagatgcaggtgccatttcctgaaaccatgcagagagaaggaccagaagattstgggaagaccgaacggtcttacccagcggatatctggattgacacaactcagcaaaaacgcctgcgctggaaagttaagtttggaaggtaaagaagataaatcacatcaccctgagagtgtctggagcagggctctttaatgatctgagaatggcgtaatgtttcattgtgtgagaacatagcacatgccacagaggctgtctc

SEQ ID NO: 650097 - DNA, 594 bp, Homo sapiens
taactacataaaaattgcattctgcaaggaaacagctaattataaacagaacaaaaaaggaaacaagaaaytgggaaaatagttgtaacatttctcacaaagggtttgggtgttttcctagtaaagaactcctgcaaatcaataagtataaggtcaactcaaagaaactgggcaaaacattaaaagacaatgaactacataaaacacattcacatgacttttagataggaatttgtgcttaatctcacagtagcatacaaattaaaacaatgcaagattaaccaagaaaagaagagataaaatccaaataacctcactaagaaacaaaacaggagatattacaactgacacaactgaaatacaaaaggctactatgaacacctttacacacataaactagaaaacctagaagagatggataaattcctggaaaaatacaaccctcttgaatcaggaagaactagataccctgaaaagaccaataaaaagcagtgagactgaaatggtaattaaaaaattaccaccaaaaaatgtccaggaccagatgaattcacagcagacttctatcagacattcaaagaagaattggtacca

SEQ ID NO: 650098 - DNA, 543 bp, Homo sapiens
caagtacatacaataggggaaagataattacttccataaatggtgttaggaaaaatggatatccacatgcagaaggattaaattaaacctttatctctcaccatgtataaaaacaactgaaatggtaataacttaaatgaaagacctaaaactgttagaaaaaaaaacataggggaaaagttccatgacattggtctgagcaatgtttttttctagatacataatggttttctcaaaagcacaaaagcaaaaatagacaatargattatttaaaacttaaaatcttctgtacttcagaggaaacaattaacaaaatgaacagacaacctacaaaatggaagaaaatatttgcatcttataaggagttcatagccaaaatatacaaggaactcaaacaactcaatagcaagaaaacaaacaaaaaaatttaaaaaatgggcaaaagacctgaatagctatttctcaaaagaagacataaatggctcacagtatattttttaaaaaatactcatcatcactattcatcaggtaaatgcacatcaa

SEQ ID NO: 650099 - DNA, 505 bp, Homo sapiens
acttttacagtttaaaaatcaaagtgaattatgtataaattatttttaaaatcttttcctacttgacaacatgccattaaaccaactttcatgacataatttttgaatagttccttgtatcaaaagagttgcactgggccgagcacagtgkcttatgcttgtaatgtcagcactttgggaggctgaggctggaggatcagttgaggtcaggagttcaagagcagcctggccaacatggcaaaaccccatctctactaaaaatacaaaaattagccaggcatgctggtgcatgcctgtagtcccagctagcaggaggctgaggcttgagaatcacttaaacttgagaggttgcactgagccaagatcgtaccactgcactctagcctgggcaacggagcaagactctgtctggaaaaaaaaaaagagagagagagtaatgtaatcggctttataggttgaatatttaaagtacttcctggttttctactaatgctatgatgaacat

SEQ ID NO: 650100 - DNA, 548 bp, Homo sapiens
ttaagagttatatttaatatctgagggcttttcgtcattggaatttattaatgttcaaggaaacctggaaagttttctaacacattaaaggagctttaattataagttccaaattcttcttagaagaagagaaccagcaggcccagacatttttactggtgagttctatcaaatgttttcaagaaatggattatttccattttataaaaacaactccagaataaaaaaaggtccatttgttcgttcatttyatgaggccagtacaaccttgataccaatattatatgagaaatgtgtaagacaggaaaattacatgccaactttcctcatgaacctaacggcaaacattttaaattaaaagttagcaaattaagtttagaagtctataaaaaagataatatagtatgaaaattgtgtttgttccatgaatgcaaggatttctaacaatagaaaaaaaaactatgtataattcatcacattaacaagttaaaggaggaaaagcaaatcatcattgtaggagaggcaaaaagtgaattcaataaaataaa

SEQ ID NO: 650101 - DNA, 548 bp, Homo sapiens
ttaagagttatatttaatatctgagggcttttcgtcattggaatttattaatgttcaaggaaacctggaaagttttctaacacattaaaggagctttaattataagttccaaattcttcttagaagaagagaaccagcaggcccagacatttttactggtgagttctatcaaatgttttcaagaaatggattatttccattttataaaaacaactccagaataaaaaaaggtccatttgttcgttcatttcatgaggccagtacaaccttgataccaatrttatatgagaaatgtgtaagacaggaaaattacatgccaactttcctcatgaacctaacggcaaacattttaaattaaaagttagcaaattaagtttagaagtctataaaaaagataatatagtatgaaaattgtgtttgttccatgaatgcaaggatttctaacaatagaaaaaaaaactatgtataattcatcacattaacaagttaaaggaggaaaagcaaatcatcattgtaggagaggcaaaaagtgaattcaataaaataaa

SEQ ID NO: 650102 - DNA, 485 bp, Homo sapiens
tctctctcctgggctcaagcaatcctcccacctcagcttccagagtacctggggctacagctgygtgccaccatgcccagctaaaggacttgaattttcttacatatcttggccctatagagtggctctcaaccttggctgcacatgtctattacctgagaaaagttttaaataacctaatactcaggtcacaccctagactttaggggtgagacaagcattaatattttttaacactcttagaattaagagccactaatattgtagcactgcaattcctataaagagaacagatgtgagtagatttgttacagtattgttgtattcatctgttttcatgctgctgataaagacatacctgagaccgggcaatttacaaaagaaagaggtttaatggacttacagttccacatgggtggggaggcctcacaatcatggtggaggacaaagaggagcaagtcacatcttacatggatggcagcagg

SEQ ID NO: 650103 - DNA, 515 bp, Homo sapiens
gcagtgatgtgatcatagcttaatgcagcctctctctcctgggctcaagcaatcctcccacctcagcttccagagtacctggggctacagctgcgtgccaccatgcccagctaaaggacttgaattttcttacatatcttggccctatagagtggytctcaaccttggctgcacatgtctattacctgagaaaagttttaaataacctaatactcaggtcacaccctagactttaggggtgagacaagcattaatattttttaacactcttagaattaagagccactaatattgtagcactgcaattcctataaagagaacagatgtgagtagatttgttacagtattgttgtattcatctgttttcatgctgctgataaagacatacctgagaccgggcaatttacaaaagaaagaggtttaatggacttacagttccacatgggtggggaggcctcacaatcatggtggaggacaaagaggagcaagtcacatcttacatggatggcagcagg

SEQ ID NO: 650104 - DNA, 605 bp, Homo sapiens
atgggtagaaaaataggccaagtggaaaaacttattcatatarttgcttcattttgctgactgcaaaaggatttgttttggaagtgatttctgctctttaacctagtggattgatagatcacagaaaggtcttagaaatgacattacataattttgttcataacatgaaattagcttgaatcaaaaaatgtataccattttttgtatctaccttctaagacatttgtcttgagaaattaatgattctacaacataaatagtcattgtgaaaggaaggaaaaagataacagagggctttcataataatcatggactcaagattatctaatttaaaaagacatatctcattttcctttacttaaacataaaacaaatgagagaaaacagaaatagctcataattttatttatctgataaaacatgctgacataaaaatataattcatgcacccagtaagaaaatcaaaaaattaaataaaggtaaaaatgaaatataaaattctctttcctctagtctcttacccccagacatctagaatctctccttaagataatcactgttgacaattccttgagtatctttttaaaaatgaccttaatacacat

SEQ ID NO: 650105 - DNA, 605 bp, Homo sapiens
atgggtagaaaaataggccaagtggaaaaacttattcatatagttgcttcattttgctgactgcaaaaggatttgttttggaagtgatttctgctctttaacctagtggattgatagatcacagaaaggtcttagaaatgacattacataattttgttcataacatgaaattagcttgaatcaaaaaatgtataccwttttttgtatctaccttctaagacatttgtcttgagaaattaatgattctacaacataaatagtcattgtgaaaggaaggaaaaagataacagagggctttcataataatcatggactcaagattatctaatttaaaaagacatatctcattttcctttacttaaacataaaacaaatgagagaaaacagaaatagctcataattttatttatctgataaaacatgctgacataaaaatataattcatgcacccagtaagaaaatcaaaaaattaaataaaggtaaaaatgaaatataaaattctctttcctctagtctcttacccccagacatctagaatctctccttaagataatcactgttgacaattccttgagtatctttttaaaaatgaccttaatacacat

SEQ ID NO: 650106 - DNA, 605 bp, Homo sapiens
atgggtagaaaaataggccaagtggaaaaacttattcatatagttgcttcattttgctgactgcaaaaggatttgttttggaagtgatttctgctctttaacctagtggattgatagatcacagaaaggtcttagaaatgacattacataattttgttcataacatgaaattagcttgaatcaaaaaatgtataccattttttgtatctaccttctaagacatttgtcttgagaaattaatgattctacaacataaatagtcattgtgaaaggaaggaaaaagataacagagggctttcataataatcatggactcaagattatctaatttaaaaagacatatctcattttcctttayttaaacataaaacaaatgagagaaaacagaaatagctcataattttatttatctgataaaacatgctgacataaaaatataattcatgcacccagtaagaaaatcaaaaaattaaataaaggtaaaaatgaaatataaaattctctttcctctagtctcttacccccagacatctagaatctctccttaagataatcactgttgacaattccttgagtatctttttaaaaatgaccttaatacacat

SEQ ID NO: 650107 - DNA, 590 bp, Homo sapiens
atcttaaacaagttagaaaataaaattttatcttttagtattacacaaaaggatgttcagaactaggctttgtattttttttttctagagatgaggtctcactgtgttgcccaggttggtctcaaactcctgggctcaagcaatcctcccgcctcagtctccaaaagtgttgggattataagcatgagatgaagtcttgcctggcctaggctttctatttttgtttaataatttaccttcaagatattcttaacttttaacaactgtattgtataaatatattttttattwaaacaataggctaccaataacattaataacatatcttggtttatgtattttacaagattctccatgtgataaattccaacctgagaagttgctatagaacatatgaatttaacattttttaattgctgcgatctaatatgatcctaaaacatggccctagtttatattcctatgagaatgtctaatacctacactcttgctaacattgactgctattgcattttaaagactcattaatttgattggattgatgttgaacatcttctgttactcttggccattgcatttctttttctacc

SEQ ID NO: 650108 - DNA, 590 bp, Homo sapiens
atcttaaacaagttagaaaataaaattttatcttttagtattacacaaaaggatgttcagaactaggctttgtattttttttttctagagatgaggtctcactgtgttgcccaggttggtctcaaactcctgggctcaagcaatcctcccgcctcagtctccaaaagtgttgggattataagcatgagatgaagtcttgcctggcctaggctttctatttttgtttaataatttaccttcaagatattcttaacttttaacaactgtattgtataaatatattttttatttaaacaataggctaccaataacattaataacatatcttggtttatgtattttacaagattctccatgtgataaattccaacctgagaagttgctatasaacatatgaatttaacattttttaattgctgcgatctaatatgatcctaaaacatggccctagtttatattcctatgagaatgtctaatacctacactcttgctaacattgactgctattgcattttaaagactcattaatttgattggattgatgttgaacatcttctgttactcttggccattgcatttctttttctacc

SEQ ID NO: 650109 - DNA, 555 bp, Homo sapiens
ataatttaccttcaagatattcttaacttttaacaactgtattgtataaatatattttttatttaaacaataggctaccaataacattaataacatatcttggtttatgtattttacaagattctccatgtgataaattccaacctgagaagttgctatagaacatatgaatttaacattttttaattgctgcgatctaatatgatcctaaaacatggccctagtttatattcctatgaraatgtctaatacctacactcttgctaacattgactgctattgcattttaaagactcattaatttgattggattgatgttgaacatcttctgttactcttggccattgcatttctttttctacctattaatctcccttgtataatattgcattatttgtcttttttgtctcatttatcgacaaagattaaagttattggcagtagtgaaaatggagaaaaaaatcaaaattcaaatactgtagagtacaatattttggagaataatttgattctatatattgaaatttaaattgtctttaatctttgacccagtta

SEQ ID NO: 650110 - DNA, 555 bp, Homo sapiens
ataatttaccttcaagatattcttaacttttaacaactgtattgtataaatatattttttatttaaacaataggctaccaataacattaataacatatcttggtttatgtattttacaagattctccatgtgataaattccaacctgagaagttgctatagaacatatgaatttaacattttttaattgctgcgatctaatatgatcctaaaacatggccctagtttatattcctatgagaatgtctaatacctacactcttgctaacattgactgctattgcattttaaagactcattaatttgattggattgatgttgaacatcttctgttactcttggccattgcatttctttttctacctattaatctcccttgtataatattgcattatttgtcttttttgtctcatttatygacaaagattaaagttattggcagtagtgaaaatggagaaaaaaatcaaaattcaaatactgtagagtacaatattttggagaataatttgattctatatattgaaatttaaattgtctttaatctttgacccagtta

SEQ ID NO: 650111 - DNA, 533 bp, Homo sapiens
gaaaaaaatcaaaattcaaatactgtagagtacaatattttggagaataatttgattctatatattgaaatttaaattgtctttaatctttgacccagttattctctttctagtaatttttctacccaaataataattcaggaagaaaacctttacagagattattcttataatgtttgtgatacaatatttacgggcaacataaattctcatccagagatcggagtaaatattatatagtatatctgtagaaygaaatgtaccttgctgtttaaatgaataaattagttattatcataaaataaatgtcatgtaaagacatttattttatggtgtataaaattagaaaaacaagttattaaaaataacatgattttttgtaaaatgcttttattttgtttttaattgacataataattgcacatgtttatggggtacagtgtggtgctttagtgcatgtgtacattgcataatggtcaaatttaaaaattaaatgtattgatagaagaagtgtttggatatttgtatcctaa

SEQ ID NO: 650112 - DNA, 481 bp, Homo sapiens
ggtgaggttcacccttctggctcatagatggcaacttcctgctgtatccccatactttggaaggggccaatgagctctctggggtctcttttatragggctcaaatcccattcatgagaatcttgtcctcatgacctaatcacctccccaaggctctatctcctaacacgagtagcttgggggttaggatttcaatatacaaatttggggggacataaacagtcagtctgtgacattgccatttcatcagtaagaattttcatgaactcactattaagatttatgtttaggttttttatgcggatgttctcactttataatattgtttgtctgcatagtttaaagaaaaggacaatgcccaattagaacaggaggtgtcttttttggccagcaaaatattttaagatgccttgagtgtgaccctacatagagatcatcaaggtaacatcattttgttcttgttctagatccacatgtttca

SEQ ID NO: 650113 - DNA, 481 bp, Homo sapiens
ggtgaggttcacccttctggctcatagatggcaacttcctgctgtatccccatactttggaaggggccaatgagctctctggggtctcttttatgagggcwcaaatcccattcatgagaatcttgtcctcatgacctaatcacctccccaaggctctatctcctaacacgagtagcttgggggttaggatttcaatatacaaatttggggggacataaacagtcagtctgtgacattgccatttcatcagtaagaattttcatgaactcactattaagatttatgtttaggttttttatgcggatgttctcactttataatattgtttgtctgcatagtttaaagaaaaggacaatgcccaattagaacaggaggtgtcttttttggccagcaaaatattttaagatgccttgagtgtgaccctacatagagatcatcaaggtaacatcattttgttcttgttctagatccacatgtttca

SEQ ID NO: 650114 - DNA, 633 bp, Homo sapiens
aaaaatccgcatacaacttttgattccccccaaactactaataacctattgttgaccagaaggcttactgataacatgcrttacatttaagacatattttgcatgctatgtgtattatatactgtattcttacaataaactaagctacagaaaaaaaattataatcaagaaaattgtaaggaagagaaaatatatgacccattcattaagtggaagtggatcaccctaaaggtcttcatcattgttgtcttcatgttgagtaggcagaggaggaggaggaggagctggtctttgtgtcttagggtagcagaggtggaagagggtgaagggatggaaggggaagcaaaagaggcaagcacacttggtgaaactttacaaaaatacatcgttatttctgtctattttgctttttcatttctctaaaaacatttcagtgtagtacctatccgtcttccaccatttgctttagtttcagttcctgtatcatggaacggtctatgtcataaaagaagtcaaaagtagtcttgaataatcaaagctcttttgccagattgttgaatgccaatttgttatctggcactgcttttcctatgtcttcttcctcattatctggcactggttaggaagcactca

SEQ ID NO: 650115 - DNA, 633 bp, Homo sapiens
aaaaatccgcatacaacttttgattccccccaaactactaataacctattgttgaccagaaggcttactgataacatgcattacatttaagacatattttgcatgctatgtgtattatatactgtattcttacaataaactaagctacagaaaaraaattataatcaagaaaattgtaaggaagagaaaatatatgacccattcattaagtggaagtggatcaccctaaaggtcttcatcattgttgtcttcatgttgagtaggcagaggaggaggaggaggagctggtctttgtgtcttagggtagcagaggtggaagagggtgaagggatggaaggggaagcaaaagaggcaagcacacttggtgaaactttacaaaaatacatcgttatttctgtctattttgctttttcatttctctaaaaacatttcagtgtagtacctatccgtcttccaccatttgctttagtttcagttcctgtatcatggaacggtctatgtcataaaagaagtcaaaagtagtcttgaataatcaaagctcttttgccagattgttgaatgccaatttgttatctggcactgcttttcctatgtcttcttcctcattatctggcactggttaggaagcactca

SEQ ID NO: 650116 - DNA, 633 bp, Homo sapiens
aaaaatccgcatacaacttttgattccccccaaactactaataacctattgttgaccagaaggcttactgataacatgcattacatttaagacatattttgcatgctatgtgtattatatactgtattcttacaataaactaagctacagaaaaaaaattataatcaagaaaattgtaaggaagagaaaatatatgacccattcattaagtggaagtggatcaccctaaaggtcttcatcattgttgtcttcatgttgagtaggcagaggaggaggaggaggagctggtctttgtgtcttagggtagcagaggtggaagagggtgaagggatggaaggggaagcaaaagaggcaagcacacttggtgaaactttacaaaaatacatcrttatttctgtctattttgctttttcatttctctaaaaacatttcagtgtagtacctatccgtcttccaccatttgctttagtttcagttcctgtatcatggaacggtctatgtcataaaagaagtcaaaagtagtcttgaataatcaaagctcttttgccagattgttgaatgccaatttgttatctggcactgcttttcctatgtcttcttcctcattatctggcactggttaggaagcactca

SEQ ID NO: 650117 - DNA, 566 bp, Homo sapiens
ttctctaaattggatttgtcgtaattctgtagctatgcacaacatctggacacaaattgtacttttgtccagcacgaatttattgttttgagtttcatggttttctrtatcaactgatgacatcttgaaaggtgtaagccttccagacttccatgatgttctctctattgggtttctcttttgcaatgttgacaaacctttccatagagtgccatatgtagagccttaaaggtccttatgactcccttatctagaggctgaagtagagatgtgtttgggggaaaaggagaacacttcagtacctttggtgttgaactcatggggttctgggtggccagggggattttccaattaacaacatacacaaaaaactttaaaagcagtccttactggcaaggtacttctgacttcagggacaaagcattgatggaactaatccagaaaaagcattctcatagtccaggccttcttgttgtacaaccaaaagactggcaactagtgtttctcttttccctttcaagactcaggggttagcagctttatagttaaggtcagccctgatcata

SEQ ID NO: 650118 - DNA, 566 bp, Homo sapiens
ttctctaaattggatttgtcgtaattctgtagctatgcacaacatctggacacaaattgtacttttgtccagcacgaatttattgttttgagtttcatggttttctatatcaactgatgacatcttgaaaggtrtaagccttccagacttccatgatgttctctctattgggtttctcttttgcaatgttgacaaacctttccatagagtgccatatgtagagccttaaaggtccttatgactcccttatctagaggctgaagtagagatgtgtttgggggaaaaggagaacacttcagtacctttggtgttgaactcatggggttctgggtggccagggggattttccaattaacaacatacacaaaaaactttaaaagcagtccttactggcaaggtacttctgacttcagggacaaagcattgatggaactaatccagaaaaagcattctcatagtccaggccttcttgttgtacaaccaaaagactggcaactagtgtttctcttttccctttcaagactcaggggttagcagctttatagttaaggtcagccctgatcata

SEQ ID NO: 650119 - DNA, 539 bp, Homo sapiens
aggacagtccaatctaactgtgaactcataagggacagccagtaaattcaaaacagcctactgttttttgattacttgtgctactctattaaaatagccacaaacacaaaactagtctacctctttctctccccattattggccctaacccaaaaatagtgggagtaaatgatttaataatttattttcatgctccattttgttcttaagttaaaattactgtggttggtgcccctcctttagcttctgctaaagactttacataatgaaagctcatgaagtgtctggattactaacagttacttatccaaaaagatgagacatggttcattgatttgattctattagttctctcttgaagatatttttctcctccctctgtgaagaaacatttctttctgtgtcatacaagacgcgtcatttttgtagttttaattccctcttgagtcctacartaatactaaaatactcacagtgactacagtatcctttgcagggaaaaaattgtaaattaaccatttaaatatagtcactaagtt

SEQ ID NO: 650120 - DNA, 538 bp, Homo sapiens
gcttttatagttatataatcatcctaatatctgaaatctttatgggcataattctgtttctgctcatgatgtttatttcctcatgagttttgtaagagtcttacttttttctcattttggatgaaattttacctgtggccattctttgagacatgggctgaatgtgggtttctccaaagacactttgccttcgtcttgtgtttggtggtaataccaacatgggataactataaaataaattatcagtttcatgtgtgggttttttttaacttatacttacagtgaaaatttaaaccacaaattcatgtgaagatggccttctcatttttcctctaaatggcaccgagtttgaggcaggaaaatttcctggttgtctccygctgaggaacaggtttttatctagtttatcctttcactgaaattatagtccttcgtatctctggctttcagcagttttctcctgtaagactgctataatgggcaggcactaggttttgtctcacactctcccatatcccaggtggtcataaaaattgaa

SEQ ID NO: 650121 - DNA, 550 bp, Homo sapiens
ttcaaacccaagtagactctagagtgcgtgtgcttcaacactagctatcctgcctccccatcactggatgactccagttcatcaaaaacctctttaaaaagtgaggctcaaaatggaaaaaggcttaacacatgttcttaccagtgcagcacagagctgaaccatgacctyctgatctggacactatgcttttactatttcagagtaagttcttaaactgagaaggcatcgtgagagcgcagttcaagaaagaataatgctccgactcatacccaatggatatgtgtacttttttagaagccacaaaatactactatgtgctatggaatacacactcagctaaaatattcagagccttatttcacatgaactactagtgtaccctatttttctcatcttatacttgtagcacatgttttttgaacccaataattggaactatcattcattccttttaaatccatcatattgagtctttactccaagtttccttgattgagacaacttttacattatactcatacaatcacagaatttcagcagtgatctc

SEQ ID NO: 650122 - DNA, 550 bp, Homo sapiens
ttcaaacccaagtagactctagagtgcgtgtgcttcaacactagctatcctgcctccccatcactggatgactccagttcatcaaaaacctctttaaaaagtgaggctcaaaatggaaaaaggcttaacacatgttcttaccagtgcagcacagagctgaaccatgaccttctgatctggacactatgcttttactatttcagagtaagttcttaaactgagraggcatcgtgagagcgcagttcaagaaagaataatgctccgactcatacccaatggatatgtgtacttttttagaagccacaaaatactactatgtgctatggaatacacactcagctaaaatattcagagccttatttcacatgaactactagtgtaccctatttttctcatcttatacttgtagcacatgttttttgaacccaataattggaactatcattcattccttttaaatccatcatattgagtctttactccaagtttccttgattgagacaacttttacattatactcatacaatcacagaatttcagcagtgatctc

SEQ ID NO: 650123 - DNA, 548 bp, Homo sapiens
aagaggtggttcaggggatcactctttcctacttgttcctctcacctcaaactcaccttctactgcacagcaacactgaggatcgccaaccaaccctgaccataaccttgatcttgccatgttctgttagtggaatgcaacccaaaatcaatggtgttaggtcatctcaacaaaatatatatcaaaccatattccataagaactgctcgtggccctgttcttttcagtatatgggaaaacaaaatggaaacaacaaaatagcatcaggtttacaaaacttcccaagatagatggtcacacatgttttcaggagacctctatataaatgactttgatcacttgataccttgaaaagaggtcttgtggcactagaatgacatctataagtgacaagtataaaatgtagtgctcagtgacattaaaaaacaaatcaacccacatagaggaagagctttggacgtagggatgtcaaactggtctagaatgtaatgaaaacccaagaaggtgccccagtaagaaagargaaatcaatctaacaatgggatgca

SEQ ID NO: 650124 - DNA, 579 bp, Homo sapiens
ctctctgagaaactgctttgtgatatgtgcattcagctcacagggttaaacctttcttttgattcagctggttggaaaaactctttttgtagaatctgtgagggaacattttggagcccactgaggcttacagtgaaaaattgaatgttctgtgactaaaactaaaaagaagctatcagtcagactgcttttgttgtgtggattcagatcacagartaaagcctgtcttttgattcagcaggttggaaacactgtatttgtagcatctgagatgggacattttgtacctaaatgaggcccttagtgaaaaacagaatatcccacaataaaaactagaaagaagctatctgtgaaacttctttgtgatgtgtgtattcatttcagagagttaaagctttttcttgattcagcagattggaaacactctttgcagtatcagcaaagggacatttcagggcccactgggttcaaatgtcaaaaactgaatatcttgcaataaaaactagaaagaagccatatgtgaaattgctttgtgatgtctggattctgctcactgagttaaccttttcttttgattca

SEQ ID NO: 650125 - DNA, 633 bp, Homo sapiens
tacagccagcagagaccatgccacagcctaggtggcaggaaaagactccatttgaaacaaattaataaataaataagtgatgaatgtatataaaaagaaaaatgcaaggaaatggcggagcacgagaaggctccactcattacaaaagaccagagcagaaaaatagggtcatcaggttgagacacaggccattttgaatctgttgtcaccatgcccaggtttctgtgcctcccrtctgtcatcaccgatctcgtcaagtacaattgctgggtcatgactacacagagatctttcagtctaccaaatgtgtccgtactttcactagcctggttgggagaataaaaatgcatcatttagcaaagtactcattgtacgttcattggtctcccatgtctctcatgaaaccaatcaaattcatagtctgttttttttttccagccctcaactgtccacaatatacccagataaacgaacagtgaatacattttttgcaaccaaggaggacaaacaacaaagcaaaagtctcagaggcttgtgatacacagggggatacagaatgaggagactcttccagaatccacacaaagacagacagatggagggatggcaggaaacagattgagaaaatagagt

SEQ ID NO: 650126 - DNA, 549 bp, Homo sapiens
agatttttaaaggactttacagatgaccttgtcttagtttctctgtttatagataataagactgaaacccagatatgtaatataacttttctaaggatcatatatctaaagtggtgttgcctggaccccttattgttaatataaactaatactgtcactcaaaaaattatagaaatggaacaataatggaaaaatatcttcattaaacatgttatggggccaggcatggtggctcacgcctgtaatcccagcactttgggaggctgaggtgggcgaatcacttgagttcagaactgcgagaccagcctggccaacatgacgaaaccctgtctctactaaaaatacaaaaattagctggatgtggtggcacgcacctgtaattccaactacttgggaggctgatgtgagagaattgcttgaacctgggaggcrgaggctgcagtgagccaggatcacaccactgcacttcagcctcaagactgtctcaaaaaaaaaaattatgattagtatattgattctttagaaatatttaaattcttactagtcatt

SEQ ID NO: 650127 - DNA, 566 bp, Homo sapiens
attggactcttctgaccctctgttgtaattgaaagtcaggtggagagagggcttgtgctgtactctggaagtcaccaataattctcagtagtaagtgtcaccactttgattacatagccttcctgaaatgttgatggcctggagttttacaggtgcagtgtatactaaattagccatgaccagaaacaggatgtcattgtcattcctttcaaactacagagtagtaatttggtaatgtgggaacacctggatttgtgcctccttaaacctgaaataaaagggagaggaatagtctgagtcaactgtctttgtgacatctgacccatggtctacatttctttgaaaacattgtatttggatacacacacacacacacacacacacacacacacactagcttttgtttcttagaaaagcagctccttgagggagccattactttgctgtattatgtacaataatgtgggtgctacatgaatrttaagtactactgctaatgttactggtaattcactggtgaggcattttgtgagtcaccacttactgtgtgttcacaatgttcacaa

SEQ ID NO: 650128 - DNA, 589 bp, Homo sapiens
gctaggctggtctcgaactcctggccccaagtggtctcctgggcctcccaaattgctgggattacaggcattagccactgtggctagccttattgcaatgttttcagaagagatatatttaatttctccgaagtttagaggggactatgttattttgttttattataatcccatgtttatttgaagattgaaagaaatgtggacactggagttgaagaaaaataaatagccatctttcctctcttagttatgcaactctcaaattctattttatcagagtattggtaattaacaatacttttctttatataatagggtgtaaatttggatgaattttaagtccccaaatgggccccagtgtggcyatatgctgagtggcattgagcaatttgcaatgcctgagtttgtttcagcacatgtaaagtggtgggtgataataatatctctccataggattgtcatgaggataaaataagataatgcatatgaaagtactttctaaacataaaacccctttcaagtgtaagatattattataatttttggcttacaaaataatacaacacccaaacttttgaaattcaattta

SEQ ID NO: 650129 - DNA, 560 bp, Homo sapiens
agtgctagtcagggtttgattcaaaagtaactaatcatctttccaggaaagttcaaatacttgtgttaaatactggaaagcctatatatatctttcagggtcatctgaaaagttgtcaagatcccccttaatttgccttaagtcctgtagagggaaggagaactggacctgggtgcagaagtgccccaggtaggaggggagtgagtgaggaggggagctgtcckgtgctaaacacacccgtggctgttgaggtgggggtggggggtggtctctcctctaagcacaaatgaaaatcacattgttctgaatcgcgtatctcgtgactgggtcaaatgctcattctacctagtagcatttctgcagtttgcagtaacacccgttacattataaaagaagagataggagccatttcaaaacataaaagaaagaaggaaagataccatagaaaagtctggaggtcttggttgatgccctaccaggtggttggcgatggggtccagtctaggggccttctgcaacaccaaggagtgccctcagccagatggtgtcagttgccccag

SEQ ID NO: 650130 - DNA, 560 bp, Homo sapiens
agtgctagtcagggtttgattcaaaagtaactaatcatctttccaggaaagttcaaatacttgtgttaaatactggaaagcctatatatatctttcagggtcatctgaaaagttgtcaagatcccccttaatttgccttaagtcctgtagagggaaggagaactggacctgggtgcagaagtgccccaggtaggaggggagtgagtgaggaggggagctgtcctgtgctaaacacacccgtggctgttgaggtgggggtggggggtggtcwctcctctaagcacaaatgaaaatcacattgttctgaatcgcgtatctcgtgactgggtcaaatgctcattctacctagtagcatttctgcagtttgcagtaacacccgttacattataaaagaagagataggagccatttcaaaacataaaagaaagaaggaaagataccatagaaaagtctggaggtcttggttgatgccctaccaggtggttggcgatggggtccagtctaggggccttctgcaacaccaaggagtgccctcagccagatggtgtcagttgccccag

SEQ ID NO: 650131 - DNA, 577 bp, Homo sapiens
gcaaattaaaccgcattagaaccasatctaccttgtttatgcatgtacgtgtatgtacactcacatgcaaatatatacacatttgttttatagtttttgggaagttgaagaaatagtagaaatttaaaagaacattaaaaaatcaagcatggatttataaacctttggcattgtatagaaaacaaacataagaagactttgaaaggaagagcaaataagacagactggctagggagcatgggatcaaaggaatactaggtggtgagttccctttctgttttactccatttatccagacttaaagctaaagagccagcaacccagaaatgcctacagatagaggcaaataaagccctgataaaagcgtgctctctctagccaaaggatcaggaaaggggcatcctacaagacagaaaacttttatccaacaaccattctactccagcaacagtgcagaaaaacctgtggtcctacgccccaagggtagaagcttgacaggctgtgggactaggagctgaaacctccctgctgggtggcgtcagaaaaggccaagtgtagagctggcactttgcatcca

SEQ ID NO: 650132 - DNA, 589 bp, Homo sapiens
atttatactggacactattggcaataaggaaaaaatagagacaaaaactgtttctagggaagcactattaaaatagaaaaacctttggcaaataggaccatgagtggggaaaggagaaatcatatatgatcaaccttaggagcaaaaaaggaggcaatacaaatattaaaaagatttattttcatgtataagagaataccatgtacaactttataccaattaatttaaaatctagacagaatggttcattttctagaataataaattaatgaaactatcttaagaagcaatagaaaatgtgaatagagcaatgactgtaactaaaatgaagttaaagaactatctcctccttcccttttcctagctactgcaaagaaaaaaatacgtaccaggccaggatattttatggacagattttaccaagctttcaaagaaaagtgtgataccctttatrcaactccaaacacaaatactttccatactgtttattatatattttctacaggttcatacatattaagaataattagaaaaagatctcagatgaatatttaaaaaatgataatctatgattaacagaccaaaaaat

SEQ ID NO: 650133 - DNA, 543 bp, Homo sapiens
tatacacatatatagtcggaggaaagaaacagtggtggttattagtgggggttcttgtaaccaacctgactgagctgcagtcctattcgataattgtaagmcaagccacttaactttattagcctcagtttcctcatcagtgaagatactaatagtaattacttcctttataagatttctacaagtattcaataggaaactataatgaaaacacttagcataaacttggtattctgtaagtgctagattcttgttttaatatgtgcacaatatctttcaggctagtctctctatactttaatgaacacgatctatcaacatagtaacaaaatctcaattctagactaaaaacactgatataagtaagggggaagagagacaaaaacataacattcacatataatcccctttctcccaaactataattgtttgattattttttattttttggtataggttgattttccttttatagaaaatatcaaatttacagaacagtgcaagaataagaatagtacaaataacaccatacacactttactc

SEQ ID NO: 650134 - DNA, 635 bp, Homo sapiens
accctggggcgtggaatcaagacaaaggtgatatggcagttgcaacttgtctgggctgccagaaatcatgtcttctctcagacataactgcaagaaaacccaggcatgtggccacctcagcagcacacatggcctcaacctcccttccaggccagtgtgtttcttctccaaggtctcttcctgaccacctgccattcccaattatgaaatgcaaggcctcctgccccagtccacaccacyccacagccctggtgcagctactattttctggcacctgctcagaaactagaggctgagaaagagagtgtcttaaaccttgaatccctgtggccagtgaataagatagacgtccagatagctcagcttcaggtccttgagggtcttctcaaaggctttcctcacaaggggtctctcaaagaaagtgggccacaactgcaaagagtgtagcaatgagctattaatactgggaaaaggaagggccacattgtactcattgtccctgctttttgatttgcatcctcatctaacccaccacaagccatttgtaacaaagctgattaagatccacgacacagtgtggaacatcaccagggctcagcacctcaatgacatgtcttaagtgttaaaagcaattg

SEQ ID NO: 650135 - DNA, 610 bp, Homo sapiens
tggaaaacatatctccttaatggcctagaactccaggtttaaatttagagttatcaaaatcattaaaattctgtgctggcattaaaattctcctcacaaggagagtctcaagctcatctgtgtagcagtcgcaagctgcatgtcccagctcagtccayactccttccacaaccccatagcatacagcacctgcctggccaccacttatgtctagggctgttcactccagaggcatcatctgtcttcaagagaatcacctggaaaggagacccttgcaggtgctgaaccctgccttggggcaggtgtgcagagaatgccaaggccctgggtgcctggaacatggtatgaaaataggcagatggggtacaggctctgagtggacacataccctgggcccagggacccctcacctccatggacagagcaactggaggaccagagccaagtgctcccagacatggggaccagggcagaggaccctcttgtctcagggtaggactgcagctcaccccaattgttttgttgtggaaggtttttttaaatggcgaaaatcagagaacaaaacctgaaagaaagttgaaatagtggcctgctgttaaaaaaaaaacca

SEQ ID NO: 650136 - DNA, 610 bp, Homo sapiens
tggaaaacatatctccttaatggcctagaactccaggtttaaatttagagttatcaaaatcattaaaattctgtgctggcattaaaattctcctcacaaggagagtctcaagctcatctgtgtagcagtcgcaagctgcatgtcccagctcagtccacactccttccacaaccccatagcatacagcacctgcctggccaccacttatgtctagggctgttcactccagaggcatcatctgtcttcaagagaatcacctggaaaggagacccttgcaggtgctgaaccctgccttggggcaggtgtgcagagaatgccaaggccctgggtgcctggaacatggtatgaaaataggcagatggggtacaggctctgagtggacacatamcctgggcccagggacccctcacctccatggacagagcaactggaggaccagagccaagtgctcccagacatggggaccagggcagaggaccctcttgtctcagggtaggactgcagctcaccccaattgttttgttgtggaaggtttttttaaatggcgaaaatcagagaacaaaacctgaaagaaagttgaaatagtggcctgctgttaaaaaaaaaacca

SEQ ID NO: 650137 - DNA, 490 bp, Homo sapiens
taacacattcttttaacaagtcagttggattccttggtaattagactctagtagaaagcattttttaggttgaaagccactcaacagcagagccagccagaaatcaaaaatcccctatcggattgtatatactaagagggttttctatctccacagaaacagtttcaagtgcctttcacaggaaatgccttttgtaacagaacttttatggtaagaaagtttctaaaagagttagaaaaacagttgctatttggaagttgtctcatttttacagacattgtaagaaagaagaactgcttaggctcaatgctaagctctcttgctttaaatccacctgatgatatctattctaaaccgactgtcacytgacacagaaccacatttgatgagtgggatcaaaacattactatattataccacggcaatatatcgtcagacctgcttgggccaaagtttaattagattgtccctaataatggattttggattt

SEQ ID NO: 650138 - DNA, 632 bp, Homo sapiens
tgatctattttgttaaccttctcctctggcttatgttaccttaagttgacctttcaagtgctttgtcttctggcaaatatatttaaaactttaggacctaagtaatgtatagctatcagaattcatgcagaaaatcaaagctgagtctggagcattctcttttgaagaaaaataccaccctgcgtgtgatgacctcacctgattcrtcacctgatacctgatgggggtcaatgggtgcagagaagatcctgagcctagggctgggagcgggtgttgtccacatattggctttgctgtgaactggatgggggtcaggtttgcatagggacatgttagacatgctggggttggcctggattagaaaggacatgattttgatttaacttttgttctcatgactttgaaggtaaatctgaggttgtgtcatgtagatgagaagtttctaagttcaaagtcgggaggcctgggttcaactcagggttaagagattgtgagcaagatacacaaactccccatgtctcattgttattattttttaatctgtaaaaagagaccaataatgggatgctgggaacatggtagagtaggaagtaccagaaatttgtttccctacctagacaactattacactg

SEQ ID NO: 650139 - DNA, 632 bp, Homo sapiens
tgatctattttgttaaccttctcctctggcttatgttaccttaagttgacctttcaagtgctttgtcttctggcaaatatatttaaaactttaggacctaagtaatgtatagctatcagaattcatgcagaaaatcaaagctgagtctggagcattctcttttgaagaaaaataccaccctgcgtgtgatgacctcacctgattcgtcacctgatacctgatgggggtcaatgggtgcagagaagatcctgagcctagggctgggagcgggtgttgtccacatattggctttgctgtgaactggatgggggtcaggtttgcatagggacatgttagacatgctggggttggcctggattagaaaggacatgattttgatttaacttttgttctcatgactttgaaggtaaatctgaggttgtgtcatgtagatgagaagtttctaagttcaaagtcgrgaggcctgggttcaactcagggttaagagattgtgagcaagatacacaaactccccatgtctcattgttattattttttaatctgtaaaaagagaccaataatgggatgctgggaacatggtagagtaggaagtaccagaaatttgtttccctacctagacaactattacactg

SEQ ID NO: 650140 - DNA, 592 bp, Homo sapiens
tgccattgaaatgagagaaaatgtacttgtttggtcaaataactgacactcactaaatcaaatacaaacagatgtctttactgcaggacttttcagagcctttctgggaacacatagcctgaatctatagaagggggatgtgctatgcagcttccacagtgtttaactgtggaagagttattgtaaaaattgaattctttccatttcaaacactgcaaatgaaaccaccatcatggaatggagctggactttcatctgtgtgtgatgttgtgtgggtcacaatccacgttatccaacctgatacacagagttatgcctcctagagcttcacgctctgttgctgcctaaaaaagtccataaagttggcctaggttatggagagggactctggtcctgtaaggctttccagtcttcactccaggtgggtctgacattcagggctgcctgcattcctctgttgggcagcaatgaaactctrtgaaaccctagagtttacttgacctgctttagaccattggggcttgatcatgtcagaggtagaaagccagggtgcctctagacttacgcaccagcattacttggagtactgacc

SEQ ID NO: 650141 - DNA, 376 bp, Homo sapiens
tccctcacgttctctcatgactttctcttccagtgacstagactttaacttcagggtaaagcaatgttctgacctctaggatgattctatctgatcatccctgagagccaagggatccagaccctggctttgcacactgttcgatgtggaatcctggggtagaagtatggcaggagttggatccttggattacaggtcccagggtctttatcagtagggtgatcgaggaagaggtgtccagtctgtggacagacacatggcagctgagtttacaccaccatctgggaatcggctttctcagactagggccacccctcctaagtcaggggccagtcacatcaaggtggggagaaggggaagacagaaagagtaaata

SEQ ID NO: 650142 - DNA, 584 bp, Homo sapiens
aaggtggaattctaaaaaatgtttaagtaattcacaaaatggcaaaaaaagataaagaagtgagaatcagaatgaacaaatagaaaacaaataataaaatgacagacttcagctctaacatcttaataattaacttaaatgtaaaagatctaaatataccaattaaaagacagaaattggcaggatatataataaaatatgacccaaggatatgyactttacaagaaactcactttaaattcaatgacacgggtagatttaaagtaaagggctggaaagaatataccatgcaaatattaactgaacagaaggagaagtgtctatatcaatagcatattaagtagaaattagaacaaggacaattaccagagataaagaaaaatatcacataatgataaaaatataaattcaccatgaagacataagaatcctaaatgtgtacacatctaacaacagagcttcaaaatgcaggaaacaaaattgacaaagcagaaaagagaaatagacaaaatcacaattaaaattagcgggccaattatccatcttagcaactgataaaactacaaggtggaatataggcacaa

SEQ ID NO: 650143 - DNA, 584 bp, Homo sapiens
aaggtggaattctaaaaaatgtttaagtaattcacaaaatggcaaaaaaagataaagaagtgagaatcagaatgaacaaatagaaaacaaataataaaatgacagacttcagctctaacatcttaataattaacttaaatgtaaaagatctaaatataccaattaaaagacagaaattggcaggatatataataaaatatgacccaaggatatgcactttacaagaaactcactttaaattcaatgacacgggtagatttaaagtaaagggctggaaagaatataccatgcaaatattaactgaacagaaggagaagtgtctayatcaatagcatattaagtagaaattagaacaaggacaattaccagagataaagaaaaatatcacataatgataaaaatataaattcaccatgaagacataagaatcctaaatgtgtacacatctaacaacagagcttcaaaatgcaggaaacaaaattgacaaagcagaaaagagaaatagacaaaatcacaattaaaattagcgggccaattatccatcttagcaactgataaaactacaaggtggaatataggcacaa

SEQ ID NO: 650144 - DNA, 623 bp, Homo sapiens
agtatctacttgtgatgattaatattacataaactgaacagtattcttattttacttaatatatgtatatagagaaatacccaccttgtaaatagagagtgatagtggttaagcagcaacaaaaaatgagtattttatggcaaatggtatgtttagggttgcaatgaaacactgggcttcatatctttaaagctaatttaaaaatgtaactctaaaaattaatagtcttagaagtcaacttctgtcctctaaaaaaagaaaaagacttttagtcacatgaaagccagaaaagaaattagtcaagctctgtaaatctacaattaggataagatattttaggtagaggactattatctcctcaaggacagagatcatatctgtcctgttcatcactgcatcctagcaaaatgctaggtacrtggtagacaataaaaaattgctggatgaacattaagagatcctgccaactactcttgcaatccaatcacaaaacaaagcatacttatattaaaaaagcaagaagaaattttgcctaaaagactggccctgacagagtaaaaggtactagacatcatccagctgacttaaaggaaaatatggctataattaataaatagatgaga

SEQ ID NO: 650145 - DNA, 283 bp, Homo sapiens
tcctctctgctgaaatcctcgccctctgctttcctctcttcattattatcatcagcagaacagaaaggtgagttaagccacatgtgctgaaatgtggtgtaaggggggcatcggtgcagagagggatgacggctcatatctgcctcctgaaaactgactggctgccaggctccagggcrggagtctttcttcatcagcctaatgacagaaaaacattttttaaggaaaggagggatcacagtggacaagtcagatctgctgctgtgaccctgaccaaggccag

SEQ ID NO: 650146 - DNA, 571 bp, Homo sapiens
tcatgctacctctttacatttgtacctacttcctttaccatatgatgtggtttggctctgtgtcttcacccaaatttcgtctcaaattgtaatccccatgcattaagagagggaccttatggaaggtcctcaagaaatgaggaaactgaggctcagagagcaagggtgattgactcagggttattggctagttaggrgcaggactggaactgatctggaatctgaggatcacaagacccattttcttcctgcgacatcccactgggtgatcactcatgggcatggggaatgtgtcacagtggctagtgagggtagcacaggacaggtttaacttatgggtggggaggaggatgtcaacaaaggcttagtgtttgggacgtcattccagggggtccagtgggaggccttggactgacaccagactttgtgggaaaccaggttgaagagtgcttggcaatgtccagtggcctggaggtccagttcaccaaatcagttttcctcttttagttttatctgcaaaagggaaacacccaccccatagttttagtaagggtatgaatctcacacacct

SEQ ID NO: 650147 - DNA, 588 bp, Homo sapiens
ttttcattctctttatgatgacttttaacgtatgatatttttatagtttataaatgtatcgcacaattggaattagcatacatcttaaattttagattacatggcagaaaattaagtcttgaagttgaaaaatgggaattccattctttttttctttacctggaatagcagttttaaggatgtatgccagccagccaggcgtggtggctcacgcctgtaatcccagcactttgggaggctgagacagggggtggatcccttggggtcaggagttcaagactagcctggccaacatggcaaaactctgtctctactaaaaatacaacaacaacaaaaattaaccgggcttggaggcctgcaagtcccagctactcgggaggctgaggcaggagaatcgcttgaattcgggaggcagagattgcagtgagccaagattgtaccactgcactccagwctgggtgacagagcaagactccatctcaaaaacaaacaaaaacgaatgtatgccagccatttctaataagaaattaatataatgaatgaagtgtaagataataagagtattatattacagttttcattaccgca

SEQ ID NO: 650148 - DNA, 598 bp, Homo sapiens
aactcacacatgaatcacctagaacaaccttaaccattcccccaaaacaatgtcttaccaactaagtatctcttaatccagttaagtaggcacctaaaattaaccatcaaagcaaaagtaatattaaaatgatgaaacctggataaaaaaggaatattattagcataatatatcaaattaccatcaatatataccatacgawtttgtcctcctaatttcaatgaatatgattgtctacttttctaaacactcatcagtaatgttttatgtttttatttttgagaatttagtaatcagtgatgcataccttaatccttagattggcatgatcacagttactattataaaagttatcatgtttccatctgctccacagccaaccagcacctcatttttcaacatctaaagagacaattaagtttcaatagactgggaaacttataaagaaaaagaggtttaattgactcacagttccatatggctggcgaggactcacaatcatggcggaaggcgaatgagtagcaaagtcacatcttacatggcagcaggctcagagagcatgctcaggggaacttccctttataaaaccatcagatct

SEQ ID NO: 650149 - DNA, 639 bp, Homo sapiens
aaaataaaatttagaacttctaaatgtttacctataaatatatatacattgtatattttacaatattgtagcttaaagataaatatttttatctgtaaagctatattcatcacatgattccatcataatgtaatacatattattcatttaaaatgctacatgccttcttagaattatcttacataattataatatatagtatcacattgttctgcaccatattaggtacaagaattcaataaatcaaataactacaaaaatgtcattattattaaaggctttattgacttaccgacagtgacagctactgtattctgagagctataggggttgggggacaaaggaaaagaaattagagaacaaatatgctatggtctgaatgtttaygtctctctctcttagtcagggttctctagagttacaggaccaatagaatggattgataaagagatagatagatggttagatgatagagagatagatagatagatagatatacagatcgatagatattttaaattgctagatatatagaaagagatgttaagatatataacaaataaaaatatatatgaggggatagatatattatgggaattggctcataaaattattatgaccaagaagttccatgatatg

SEQ ID NO: 650150 - DNA, 639 bp, Homo sapiens
aaaataaaatttagaacttctaaatgtttacctataaatatatatacattgtatattttacaatattgtagcttaaagataaatatttttatctgtaaagctatattcatcacatgattccatcataatgtaatacatattattcatttaaaatgctacatgccttcttagaattatcttacataattataatatatagtatcacattgttctgcaccatattaggtacaagaattcaataaatcaaataactacaaaaatgtcattattattaaaggctttattgacttaccgacagtgacagctactgtattctgagagctataggggttgggggacaaaggaaaagaaattagagaacaaatatgctatggtctgaatgtttatgtctctctctcttagtcagggttctctagagttacaggaccaatagaatggattgataaagagatagatagatggttagatgatagagwgatagatagatagatagatatacagatcgatagatattttaaattgctagatatatagaaagagatgttaagatatataacaaataaaaatatatatgaggggatagatatattatgggaattggctcataaaattattatgaccaagaagttccatgatatg

SEQ ID NO: 650151 - DNA, 554 bp, Homo sapiens
gggtaatttatagagaaaagaggtttaactggctcacaattccacaggctgtacaggaagcataaaaacttcttctcagcttctggagaggcttcaggaaacttaaaatcttggcaggaggtaaaagggaagcgggtacattttacatggccagagcaggaccaagagagagatgggaggcgctacacacttttaacaaaatcagatcttgtgataactcactcactccctatcacaagaatatcactgaggtgatggtgctaacccattcatgagaatcccacttccatgatccaatcacctcccaccaggccccacctccaacactgggaattacaatttgattgatatgagatttgattggggatagagatccaaaccatataaatctgcccctggtctttcccaaatctcatgtccttctcagtttgcaaaattaaatcatgccttctcaacagtccccctgagtcttcactcattccagcattaactcaaaagtccacagtccragtgtcatcagagacaaggctagtcccctctgcccgtgagcctaa

SEQ ID NO: 650152 - DNA, 598 bp, Homo sapiens
ctgttcaccaaaagatactattaattaagaatgacagatgtagagtagaatgggaaagctcatattcagaatatattaaaaatttccatagatcaataagaaaagacatactattttttaaaatcagcaaaacactttacactcacttcacaaaaaagaatatctaaaaactgaataaatacatgaagacatttcatctctttagcagcaactcaaatgtaaatgaaagcacagtgagatagtatgctcccattagaatctccaaatttagaagattgttattttcaagtattatttcaagtattgatctgtgaaggaatatgtgaagcaatataggaaggctcatgcaatgtggtgggaaaccaccaaattagtactagcactgtggaacacattttaacacgtctgctaagtgtaagatgtayttacactatgaactctaattccattcctaggtatatatgcaataggaatttgtgtatctctacactaagaaacttatgcaataatatcacaataattacctggcataatccatcatagttacctttaagaggtcaaaactgtaaatacccctaatgtctatctacagcttaat

SEQ ID NO: 650153 - DNA, 598 bp, Homo sapiens
ctgttcaccaaaagatactattaattaagaatgacagatgtagagtagaatgggaaagctcatattcagaatatattaaaaatttccatagatcaataagaaaagacatactattttttaaaatcagcaaaacactttacactcacttcacaaaaaagaatatctaaaaactgaataaatacatgaagacatttcatctctttagcagcaactcaaatgtaaatgaaagcacagtgagatagtatgctcccattagaatctccaaatttagaagattgttattttcaagtattatttcaagtattgatctgtgaaggaatatgtgaagcaatataggaaggctcatgcaatgtggtgggaaaccaccaaattagtactagcactgtggaacacattttaacacgtctgctaagtgtaagatgtactyacactatgaactctaattccattcctaggtatatatgcaataggaatttgtgtatctctacactaagaaacttatgcaataatatcacaataattacctggcataatccatcatagttacctttaagaggtcaaaactgtaaatacccctaatgtctatctacagcttaat

SEQ ID NO: 650154 - DNA, 583 bp, Homo sapiens
aaacagttggttacacatagaaataagtatatatgtgtgtagaaattgttagtatacacttatatgtctttgcagttgagaaatcctagatgcaaaagtaacactgtagcaatgtgcactgtagcaatgagaggtaacttcttacctctcagaagttagtttctaataccattcttcaataaaattaataagggcctcttggagaaattctaggactggagcaataaatacacaagttaagcctggagcatcttgtagtaccagaagagagtgaagaagtgcttaagacagaaagaatgatgaaaacatatcaaagagacacaggcgccaactgaaataattctcaattgtcaaatttgaaaaaatttaacaaaaattaagcaaagcagtattgtgttataaccctaggcataaaataaatgtatttgatttcatacatgcatagatccttgatatggtgtgatgagagtgttttcatacttctgtggtctkcttccgctaagtccataacctaagtctaattatgagaaaattatcatattaatgtctactgagagatattctacaattgcctgacattagt

SEQ ID NO: 650155 - DNA, 587 bp, Homo sapiens
gagtcgaaatatcacccctggctgggtctaggtatgggagttatgattgtgcatatgagctgaatccaagtatatgtcacaatttcacctttggacagagacaacacagaagagttacaccatctgggtgctgagccagggatacagtataatctcctttatagacaggacccagtcagaagagtcatatcagttgggtacagtctcaaataacatgtcatcatgcccactgtatgcaggattgaaaaaatagtggatagtcacattccctagatgctaggctcagcaatgttataattccctctcctggcagagtccaggataaagaggagagtcacatcacctaggttttgcactcagaggtatgtcacaatttcttcagtgggcaggatccaggcagargaggatagtcacattagctacatgccatatctagtgatatgtgtcccctgtgagcagggcactggcaagagagagacattgcccagctgataggcccagagatatgtgatagtatcccctgttggctgggtccaagcagaagagtaacattatgattctgacccagcaatatttcccaacgcacc

SEQ ID NO: 650156 - DNA, 575 bp, Homo sapiens
ggtatgtaaagttcctaatatggtgctgcttcttttccttcacctgctcactcttcagtgaaagaaagggggaagtgggaagcacatctgaggcacttgtgagtcagttactgaatttgcttttgagtatttgcatcttttttaaaattctgcagtgatttgcaggaagaaataaacatcatgaatataaactgattacatcttattttctgtcatttcagtactcttgtagaaaaggtgagcatagatttggaatactatgcatccttatgaaataaaacaaaacaacattaatttgttgaggattcattgtgtttsgcactgggggaaatgcaaagaaatatcagacacagtttctgcactaaagggttaacaattgatttgaagttcaagacaagtgaaaagttccagagccacaaaaaattaaataactcaagatataatatgaaatgtgtcatcaggcagtttattattaacttccaaatgagttgcacagacaataattgttatacaaacttagaagaaaaagaaatcacccctgcatacgtgtagtaaggaagatttggagcagagag

SEQ ID NO: 650157 - DNA, 575 bp, Homo sapiens
ggtatgtaaagttcctaatatggtgctgcttcttttccttcacctgctcactcttcagtgaaagaaagggggaagtgggaagcacatctgaggcacttgtgagtcagttactgaatttgcttttgagtatttgcatcttttttaaaattctgcagtgatttgcaggaagaaataaacatcatgaatataaactgattacatcttattttctgtcatttcagtactcttgtagaaaaggtgagcatagatttggaatactatgcatccttatgaaataaaacaaaacaacattaatttgttgaggattcattgtgtttggcactgkgggaaatgcaaagaaatatcagacacagtttctgcactaaagggttaacaattgatttgaagttcaagacaagtgaaaagttccagagccacaaaaaattaaataactcaagatataatatgaaatgtgtcatcaggcagtttattattaacttccaaatgagttgcacagacaataattgttatacaaacttagaagaaaaagaaatcacccctgcatacgtgtagtaaggaagatttggagcagagag

SEQ ID NO: 650158 - DNA, 575 bp, Homo sapiens
ggtatgtaaagttcctaatatggtgctgcttcttttccttcacctgctcactcttcagtgaaagaaagggggaagtgggaagcacatctgaggcacttgtgagtcagttactgaatttgcttttgagtatttgcatcttttttaaaattctgcagtgatttgcaggaagaaataaacatcatgaatataaactgattacatcttattttctgtcatttcagtactcttgtagaaaaggtgagcatagatttggaatactatgcatccttatgaaataaaacaaaacaacattaatttgttgaggattcattgtgtttggcactggkggaaatgcaaagaaatatcagacacagtttctgcactaaagggttaacaattgatttgaagttcaagacaagtgaaaagttccagagccacaaaaaattaaataactcaagatataatatgaaatgtgtcatcaggcagtttattattaacttccaaatgagttgcacagacaataattgttatacaaacttagaagaaaaagaaatcacccctgcatacgtgtagtaaggaagatttggagcagagag

SEQ ID NO: 650159 - DNA, 575 bp, Homo sapiens
ggtatgtaaagttcctaatatggtgctgcttcttttccttcacctgctcactcttcagtgaaagaaagggggaagtgggaagcacatctgaggcacttgtgagtcagttactgaatttgcttttgagtatttgcatcttttttaaaattctgcagtgatttgcaggaagaaataaacatcatgaatataaactgattacatcttattttctgtcatttcagtactcttgtagaaaaggtgagcatagatttggaatactatgcatccttatgaaataaaacaaaacaacattaatttgttgaggattcattgtgtttggcactgggggaaatgcaaagaaatatcagacacagtttctgcactaaagggttaacaattgatttgaagttcaagacaagtgaaaagttccagagccacaaaaaattaaataactcaagatataataygaaatgtgtcatcaggcagtttattattaacttccaaatgagttgcacagacaataattgttatacaaacttagaagaaaaagaaatcacccctgcatacgtgtagtaaggaagatttggagcagagag

SEQ ID NO: 650160 - DNA, 553 bp, Homo sapiens
aatatccccaatttaactgtgagaaaaatgaaataaatccaaatagggaaatattccaccaaagacctggccaattcttctcaaaattgtcgaggtcataaaaaacaagtctgagccaagagaagctaaggagacatgccaactaaatgcaatgtgacatcctggacgagatcctgggacagggaaaaaatattggttaaaaactgagaaaatctaggccggcctggtggctcgcgcctgtaatcccagcactttgggaggccaaggcgggcagatcacgaggtcaggagatcgagaccatcctggctaacatgatgaaaccccgtctctactaaaattacaaaaaattagccgggcgtggtggcaagtgcccgtagtcccagctactcgggaggctgaggcagaagaatggtgtgaacccgggaggtggagctggcagtgagccragatcgcgccactgcactccagcctggacgacagagtgagactccgtttcaaaaaaacaaacaaacaaacaaaaaccatatatttcaagaataaaaaagcaaacagt

SEQ ID NO: 650161 - DNA, 553 bp, Homo sapiens
aatatccccaatttaactgtgagaaaaatgaaataaatccaaatagggaaatattccaccaaagacctggccaattcttctcaaaattgtcgaggtcataaaaaacaagtctgagccaagagaagctaaggagacatgccaactaaatgcaatgtgacatcctggacgagatcctgggacagggaaaaaatattggttaaaaactgagaaaatctaggccggcctggtggctcgcgcctgtaatcccagcactttgggaggccaaggcgggcagatcacgaggtcaggagatcgagaccatcctggctaacatgatgaaaccccgtctctactaaaattacaaaaaattagccgggcgtggtggcaagtgcccgtagtcccagctactcgggaggctgaggcagaagaatggtgtgaacccgggaggtggagctggcagtgagccgagatcgcgccactgcactccagcctggacgacagagtgagactccgtttcaaaaaaacaaacaaacaaamaaaaaccatatatttcaagaataaaaaagcaaacagt

SEQ ID NO: 650162 - DNA, 576 bp, Homo sapiens
cactgtcactccagtctgacagagtgagactgtgtctcaggaaaaaaaaaaaattagataaataaaaattttaaaaagtaaaagtcaaaaaacaacagatgctatgcggttgcaaagaaaagagaatgtttatacactgttggttggtgtgtaaatttatttaaccattatggaaagcagtatggtaattcctcaaagagctaataacaaaattaccattaaacccagcaatcccattactgagtgtatacccaaaggaatgtaaatcattctaccataaagacacatgtacgcaaatgttcattgcagttttattcataatagcaatgacatggaatcaacctaaatgcccatcaatgagattagatggtacatgtacaccatggaatactatgcagccataaaaaagaawaagatcatgtcttttgtgggaacatggatggagctggaggccattatatttagcaaactagtgcaggactagaaagccaaatactgtatgttctcacttatacatgggagctaaatgatgagaactcatgaacagaaagaagagaacaacagacagtgggacca

SEQ ID NO: 650163 - DNA, 571 bp, Homo sapiens
cctggtcgggattaaatgatatcagtccttgccatttttattatttggttgctcagyattgaaggaaaaggaatgggctttgctttgaggaccggttataccttcctcctctttcttcttatttccggaggtagtagaactaataagtacagtcccacataatgtaaacatccaggcaacatttaagtccttgggggacgattaagataacactcattaccatcaaggagcttaaaatgtagctgcagaataaaacaatcaaaacaactataatgcaaggcagaatctgacaaatggttcaagagaagaataaatccagggctgagaaagggattctgtccagaggatggagagggattggtaagggagggcataaaactgggccatggagaatgtgctgtcttaagtcagtaacagaataacatgcagagcaggggcttttgcacagaaggagtggtgttcagaggtactcaggcagccagtgttggaggtgtctgggaaacaaggaagcctggggaaggctctgtcctgggtgatgtgaggagaaatggctggaaagacagggtgagcc

SEQ ID NO: 650164 - DNA, 427 bp, Homo sapiens
ccccagttccaggctctccacagtgcccacccascccagccctccagaaagcccccaaattccagcccccacaaagtccaactttgatattgtccagatagtccagcctcttgatccttccccagaccctagttctccagagaatcccagagcccagcctcgcaaagtcctgctagcagagcacactcacctccagtcactggaagaattgggaggcctgaattccatcacccaccagcaaccagcaagagccccaggccaggagccagcccagagtggctgatcttaagtgctttgacggttaaggatcaagggtcgggaggagactcctgtccttcaataaagccacaagagccagaagctggtttttcctggtgaatttctctaaggccctctctctggaggggaacacaacctacccacctct

SEQ ID NO: 650165 - DNA, 640 bp, Homo sapiens
ttacaatcttgaggttacagaaagaatgaaggcttggatcctggtaaaataggttagaagagcaggggagaaaagaggaattctactaaggcacaataaatgttactagggaacagaaataaaattgtamattgttttctatggaattaaggaaatcttagagacagtgtttctggaaaaggattctgttcaaatatagttatgtttctggttttctttcctgtaatggataatgagataacaaggagaggaacaagaataattgttctcctttgtaggtcagttcttatctttatgtagataggaaaaaagcctattccagggcttgttaatctaggagagactttaatttaaagtactcattatatcaaggagccatattttggcatgtaatatttttatttccttcaaatggcatatatatatgatatacatgacatatatgtcatatatgtgacatttatgacatatatgatatatacgacatatatgacattatacaagattatatttataagatttatatataagatgtgtgtgtatatatatatatatatatatagagagagagagagagagagagagagaatggtgctgagaacataatagaaactcagtaagtgttagttgaatgaatgtg

SEQ ID NO: 650166 - DNA, 534 bp, Homo sapiens
caacaggaatcattaacagctgttcactgagccacgagagtcataaagtgggactttttctgggcaaccwgggcataaggtctcccaactactggccccaacttgggcatcacacaccccaaactccaaccaagacacatcgctcatgcttccttaatggagcctacattggcaggtcagtgctttcacccctgttttcctgcttctagaaatatccttccttcccatctcagcctgtcaagatccagccagcacttcaaagcccagaccaaatgtgactgcttcctggaagcactcccatgtttcctagttggaattcctcttccctcttctgagtgtgtaaatttgctatgacccttccttgtgtctcgcattagaatcatgccatacattcagccaacaaacatttatggaccactcaggatccagcagtgagcaaggccaaagttcctcccctcggtgagcatgtatttgaccgcaagtgtcacccttgctcattagcttacaaacttctcaaggacaggaattgcgtgt

SEQ ID NO: 650167 - DNA, 564 bp, Homo sapiens
acatggcaaaaccatgtctctactaaaaatacaaaaattagccagcatggtggcacgtccctgtaatcccagctacttgggaggctgagggaggagaattgcttgaacccaggaggcagaggttgcagtgagccgagattgtgccactgcactccagcctgggcaacagagagaaaccccatctcaaaacaaacaaaacaaaaacccagatggtctattggaggagatggactagtacacagtcttttacaacatgctgtatgaagtgctatcatgcacaggatgggcttctgaaagattgcgctggcttggctgacttctgaatgatgggaaagttttcgccaggtgagaaaaggaggaatccatattgctagcatatgcaaaggtaagcagtcatgagaagttctttggttagagtttatttggatgtaagttacacaaatacaaataatagtctagtttatttttgtgatttaaattcaaagcaggcwgtttctgaacattggatgagagaatcagtgatactggagctgatgctttaggctttcttttggcctttccttt

SEQ ID NO: 650168 - DNA, 637 bp, Homo sapiens
ttcattggaaagttaagctaaaagttaaacaaataaacttattatttcccccaagatttgattgttctggcagtttggagagagaaacttttgtatgccactgtttctgtagatgaagagtttgtcacatctagtctcagggacaccgaaggctttgggctcattgtatctcttgggaatgcttacgtttagataattattttggaacatatctartacatgtttaaaccacccttcagtggaagaccaagttgtgaacccttaaaactattaaaataatgtaatcagaaacactttgggatttcaggaaccaaggccttgagactcatgaaggaaaaaggtttatgaggcagattctgcgtcattccctgggtgatgttcaggagacacaaacatatataaaaaccaactccttccaaaagagagaggactcgaagtcacaaataaattccaactctttcctgaggggaagcactatgagtttgtcccaagaagggagtggtttctagtgaggacagctgagcaatggagaaaacaaggctgtgaaagactgtcacctataaattcaaatgtctcaattagggcagtcagtaactatttacagatttgtttctcaaaaataattccacgaaaaata

SEQ ID NO: 650169 - DNA, 405 bp, Homo sapiens
aactttttaacaaatgaaaagcaattgatgaagcttctcmgcaaacaaagcaaacataatgccaaatgctgaatccatcacttagaaacagaagaaagtaatagccaatgattatgcatcaatatagctcagctgcttttttcagtagggtccctgggatctaacctgcaaggtgtgtgcttctcgtatgactttgtcttgagaacatggaataaataagtctagatgtgcatttcagggcccacgtaatacaagatattacttcaagttcacatttgctgctgcacaattatgttcaaataggacttcctaggtaagatgttctccaacacagcacacattgaactgaggagagaaaggtaaatatgttggatgcaggccaggaactgtcataaagctgatggc

SEQ ID NO: 650170 - DNA, 655 bp, Homo sapiens
actgatttctatctcttttcaggcacatgggaaggctataatgccttgaccactttaagttaggcatggccatatgacttcatttggctaaggaaatgttagtggaagatgggtggtacttttagctgaaagcatttagttcttggtcttgcctctctgccttgctttttctctgccccaaggttgaagtaaggagtcaatatgatgcccaaccaacttaagatggaaatgtaacatgcaggaaaaacaaataattgtgraattaagccactgagacatcagggctatttgttacagcagaacaacctaccctgtactgcagcaataggaaaaacaccaagagcagaatctgtcaattaacactcagtaaatattaacactcagtaaacaccttcgatgaagatggggcctatagcatttgattaacttgctttggaatctagtgatttgaattctgctgttttgtagttgtgtaaccttaaatacatcatatcatatctctatgcctctgttttctcatctgtagtataggattagtaatagcccagcactccatagcttaatgtgatttttaatatgaacaagaatataaagtatgagcaatgagtattttgtgtttttgtttgtttaattcaccatatgaaaaactctgtgc

SEQ ID NO: 650171 - DNA, 609 bp, Homo sapiens
gaaagacagctatctacaagccaaggagagagacctcaaaggaaagttacgttgaggacatcttgattttagacttttggccttcaggactgtgaaaaaatacacgtctgttttttaaaccacacattctgtgggactttgttatgacaaccttcgaaaactgatacagggaaaaatagcttcctacctagattcagtcaagataaagaattacaaaagttcaatctcctgtcctaaagacagtttttttgaattctctttttcacttttcatctktcttttgatgtataagaatgagaattgaatggaacaagagttacgctatgtcatttagtagagtagtcaggcatagcatctgtggtcaggaactctgttgtctttcttgcaatagttcatgtttggttaagtgttcagtgaagctgccttttattatagattgcaccagattgctaatatagacatatggaaatgagtttaacccatttgcagtctctagaatctattctagaaccctagctatggatataatctctatactgcatggtagtctttggtaaccacaggtcttttgacattttaatttcttccactattactccaagtgaagta

SEQ ID NO: 650172 - DNA, 558 bp, Homo sapiens
catcaataaatagaagacatcccatgttcatggattgaaagacttaatattgttgagatgtcagtgcttccccaagtcatcaacagattcaatgcaatccctattaaaattccaaagatagatattcagaaatagaaaaacccatcctaaaattcataggcaatcttaggtggtccctgaatagccaaagcgatcttgcaaaaaaacaaagctgggtgtaatacaatttggatatttgtcccttgcwaatctcatgttgaaatgtgatccccaatattggaggtagggcctagtggaaggtattagggtcatggtcgtagatgccttattaatggcttggtgccatccttgcagtaatgagtgcgttcttgttctatgagttaccataagatctgcttgttaaaaagagtctggcctctccctcctctctctctttcttgttgcctctctcaccatgtagcatgcctgctccctctttgccttccatcatgattttaggcttcctgaggccctcaccagaagcagatattggcactatgcttcttgtatactccgcag

SEQ ID NO: 650173 - DNA, 603 bp, Homo sapiens
tatcttacatagttatttctttttttttttttgagatggagtctcactctgttgcccagactgcagtgcagtggcacgatcttggcttgctgcaacytctgcttcccgggttcaagcagttctcctgcctcagcctccctagtagctgggactacaggcacgcaccactgtgcccagctaatttttgtatttttttttagtagagacagggtttcaccatgttggccaggttggtctcgaactcctgacctcatgatcctcctgccttgacctcccaaagtgctgggattacaggcttgagccaccgcgcccggcctatttctttggctgccttagttacaggaatatgagctccaccagggctttgttttatttactgtcatactccctgatctagagcagtacctggaactgttctagtagcagaaactaaatacatatgtatatatttgttactgaacacttttcccctccaactttgttaaaatatgattgacaaataaaaatagtacacatttaagatgtacaatatgatgatttgatacataggtatattgtgaaattattattacaatcaagctaattaataccaaacatttgttg

SEQ ID NO: 650174 - DNA, 603 bp, Homo sapiens
tatcttacatagttatttctttttttttttttgagatggagtctcactctgttgcccagactgcagtgcagtggcacgatcttggcttgctgcaacctctgcttcccgggttcaagcagttctcctgcctcagcctccctagtagctgggactacaggcacgcaccactgtgcccagctaatttttgtatttttttttagtagagacagggtttcaccatgttggccaggttggtctcgaactcctgacctcatgatcctcctgccttgacctcccaaagtgctgggattacaggcttgagccaccgcgcccggcctatttctttggctgccttagttacaggaatatgagctccaccagggctttgttttatttactgtcatactccctgatctagagcagtacctggaactgttctagtagcagaaactaaatacmtatgtatatatttgttactgaacacttttcccctccaactttgttaaaatatgattgacaaataaaaatagtacacatttaagatgtacaatatgatgatttgatacataggtatattgtgaaattattattacaatcaagctaattaataccaaacatttgttg

SEQ ID NO: 650175 - DNA, 603 bp, Homo sapiens
tatcttacatagttatttctttttttttttttgagatggagtctcactctgttgcccagactgcagtgcagtggcacgatcttggcttgctgcaacctctgcttcccgggttcaagcagttctcctgcctcagcctccctagtagctgggactacaggcacgcaccactgtgcccagctaatttttgtatttttttttagtagagacagggtttcaccatgttggccaggttggtctcgaactcctgacctcatgatcctcctgccttgacctcccaaagtgctgggattacaggcttgagccaccgcgcccggcctatttctttggctgccttagttacaggaatatgagctccaccagggctttgttttatttactgtcatactccctgatctagagcagtacctggaactgttctagtagcagaaactaaatacatatgtatatatttgttactgaacayttttcccctccaactttgttaaaatatgattgacaaataaaaatagtacacatttaagatgtacaatatgatgatttgatacataggtatattgtgaaattattattacaatcaagctaattaataccaaacatttgttg

SEQ ID NO: 650176 - DNA, 580 bp, Homo sapiens
tgttaattagcttgatttatttattccacgttgtatacgtatattaaaacattacattgtaccccatgaatgtataaaactatgatgtgtcaattaaaagtattaagaaatrtaaggagagcacaggttaatttcaagagcagaattactttctacagcttgcaaatgccaaatcaaggatggttttcattgacacagttgatgttcaccagggtgatataattttaaggcttggtaataccctcctgacagaaacatctctccaaggatttatcactgatgcttgacaatccaccgttgtcagttaatcccttcaggttactaaaacaattattcttttctgaaatgcatatactcttgagaaatcattttaataactgcaagacattttaaatgagagacataagactgatagccatggagaatacaggacagagtagaataaatgtcactgatattagaaaattaagagtcagtggcaacagtgtatgctatccagactcagtggctcttaagacgagaccgtaggtttatgagttacttcactaaatgtgacctttgatgctcacctctagcagtg

SEQ ID NO: 650177 - DNA, 509 bp, Homo sapiens
aatactgagtagttatttttcatttttctcattgcaaaaacaaaataaaatttgaatatcaactctaagagaagatatgamaaaatcagagtctttatgaaccactggaaggaatatgaattaagatagttacattggaaaacagtttggtcatatttaatagaaaatgtacagaccttattctgcaggcattctacttctaggtatatattgtatattatagagaaatccttacacatatataaacaagcagaaatttactagtctatttatttcagaattgttgtaataccaaaagactgaaaactatgtacatgaccatcagttaagtaatagatcaaatgtggtataatcatatgatggcttaaagccatgtggatgtttgcctccctgcaagcaagtttgctacatttttcccttataggcagaacctatctctttctggagaggctttaaatgccagactcttagtttagtgttttctttgcctgttcagtttgggcacacga

SEQ ID NO: 650178 - DNA, 664 bp, Homo sapiens
ggactataagacatttcaggtttaaagagtctatttctcaatgattaaagaaacagtattttatgaatgaagataaaaatatttagatcgttaattttatttaaccattatttttaatttatggaatgacatttggggagtggtgttggatgaccttgttttagtaaaggttttgattactcctaaatgtgtgaccttgattaagtcacttaaagtctctaagtttccttaactgtactatttattacctatcacatttttgagtgtgttgtgatgtcaaattaaaaaataaacatgaaaaacctgcatgtgaaacccctttgcatcacttaaagcccaaaacaattatttacttgctattattattatccctattttaatcktttttattgataatataataggaaccttctccattctcatatctactctaaaagtattattcatccctactttacaatgtgaaaattagactaactgcaggttaaattattagtcatagctaaactcagaatagggcacagattttcttcttagcatagaaatgaagatgctcttttcaggtaaaggacacattgctaagagcttcttcatttcaacttgctgtgcttgaaattggtgttcgcggttactggtgtctgatgtggaatttgatcagctaatg

SEQ ID NO: 650179 - DNA, 593 bp, Homo sapiens
aattcaactcatccttgtcacagaagttttttttttcttatcttttattattaaactcaatgaaaggcatcactatttctcagtcaataaagcaatttttgctttattgggtgttaaacttttaaaccacccttgcatccccggggtaaatcccacttgattatgatgaatgatttttttaatgtgttgttaaattcagtttgctagtattttgttgaggatttttgcatcgttgttcatcagggaggttagtctgtagttttatttttttaatgtggcttcgtctggtggtgttatcmgggtaatactggcctcatagaatgagtttggaagtattccctcttattccattttttggaatgatttgaggattggtattagttctttaaatgtttggtaaaattcagcagtgaaactatcaagtcccaggcttttctttgctgggatacttttttagtatggcttcaattttattacatttattattggtctgttcaggtttggattgttcatggttcaatttttgtaggttgtatgtctaggaatttgtccatttcttctaggttttcaaatttgttagtatagattgttaa

SEQ ID NO: 650180 - DNA, 615 bp, Homo sapiens
tagcaggtcttgcccgagcagatttcccaacatcctaggaagttggatggacagctatcatctcactttatggttgaggcaatgttgtggtaaagtttgcaagtgacttccttagttagttaaagacacagcaagggtttgtatcccattttgatgatgtaagaggccttttcatacattgtcacaccaaataccaggtaatcatgccttgtgctgaataaacaacaacaacaaaatatcggggtttccactgccttcctttctgttgcatctgagtttctggaactttatgctattgtgtttgagcatccccttagttagggttatgaagatgaattccacaggagaggaggcacaaagraagcccagctgtgtgcctgaacccctgggagtccttccttgcgtgtcctcccgtgttgattggtgtggagagcagcatgcctctggcacagtgcagtgcatcaattttcctggccacgctgtagcctgcactcacgcctgccacaagcttagctattcacggattcctccgtgtctcatggccgtccttgctgatggactgcgaacatggtgtactgtcctctctgcttggccatagcagctagccacaagggg

SEQ ID NO: 650181 - DNA, 339 bp, Homo sapiens
tatttactatctggccctttgcagaaaaagtttgccaactgcaaagaaccatcaaagcactgtgagtcagcacagatatttttggctctatcatgcgatagtaaattgcctggcattggaagtgttcaagtttaggtggctatgggtcaacgtactgaasccaggatccccacctcagcacagaagctccaatctagggtcaggacccggatcttctcagtcatgctcttataacgcacttttcaccattgtccctaaaaggacctcctgattgttaacgtttaagatttggggcacagaagaaaatggtcaccacatcaattataagcatgtgataag

SEQ ID NO: 650182 - DNA, 554 bp, Homo sapiens
ccctgtaatgaatggaggccagagagacaaagaatctaagaaagcacagaacaccaacccacagaaactgtgcgataataaatttgtgctgttgaggcctctaaggctgtttgtcatgaaccaatagaaaatgagaacagtcctccaggcacactcatcctcgtcctgggacctctccgcagtttcccagaacttttcatgcagcttccttctctctggtacttttacctgcaaattctagcttccctgacctccttgaagtcttatttttgcttcttcaactcaatgagacccctggagtctgtgttgattccctgtcccttcactgcagaycacaggcactaagctggggcattgcagggcttggtcactgtagggccattgttttccttctcactgctctcctctgcttattgttcagtgcctgaaaaccattgttttatatattttgcccagttatctcattacttatggcaaggaggcaattcccatagtagttagtttttcatgggtggatgcagaaatccatgaacccaaaaaccatttaacagtca

SEQ ID NO: 650183 - DNA, 444 bp, Homo sapiens
ttacagctccttttgcttccactgtgtggtgggtcccaagttcctgtcctgtgtccaggaagaatgaggctactcagacaactggagggtgagcaaggcagagaagagctttattgggtgactgaacagctctcagcagagaagagacccaaagtgggtagctcctatccacaggcaggtaatcccagagtgtatgagtctggctgagtccagggatttttatgggctcagaatggaggaagttcatgctaattggtccatggtgggcctggaagaagcaccacttgattggctgaaaggcatcaaggaagttttttcactccgggtagcggacttcactgggacctggcagcctggccyccaggcttcagtccatccttggcttgaaggtggggtttcatctgggacccgtcctttcctacccagaaacctgtctgcctcctg

SEQ ID NO: 650184 - DNA, 568 bp, Homo sapiens
tagataatctcattactgttgtatgaatgtcccccaaawtgcatgtgttgaaacttaattgccaatttgacattattaagaagtgaggcctttaggaggtgattaaatcacgagggtacaatttcatggatgaaattagcaaccttataaaaagttggatggggtgagttccctcctttcatcccttccactgtgtgaatctatagcttctgtcccctcagaaggatgcagtaacaaggcataatcttggaagtagaggttaagccctccagagacattaaacctgttggctccttgaactaagacttctgagccttcagaactcagggaaatacatttctgctgtttataaattacctagtctgtggaatgttgttatagcggcacaaatggactaacacacacacacatatacacgcacacacacatacatatatgtgtgtgtatatatatatatatatgcatacacagacacaaaattttttctttttgatattttatttcaacaagcaacatctattttgctgttaaaatcgaattataggatttttaaacaaaatatatagta

SEQ ID NO: 650185 - DNA, 568 bp, Homo sapiens
tagataatctcattactgttgtatgaatgtcccccaaattgyatgtgttgaaacttaattgccaatttgacattattaagaagtgaggcctttaggaggtgattaaatcacgagggtacaatttcatggatgaaattagcaaccttataaaaagttggatggggtgagttccctcctttcatcccttccactgtgtgaatctatagcttctgtcccctcagaaggatgcagtaacaaggcataatcttggaagtagaggttaagccctccagagacattaaacctgttggctccttgaactaagacttctgagccttcagaactcagggaaatacatttctgctgtttataaattacctagtctgtggaatgttgttatagcggcacaaatggactaacacacacacacatatacacgcacacacacatacatatatgtgtgtgtatatatatatatatatgcatacacagacacaaaattttttctttttgatattttatttcaacaagcaacatctattttgctgttaaaatcgaattataggatttttaaacaaaatatatagta

SEQ ID NO: 650186 - DNA, 266 bp, Homo sapiens
acctcttgactggattttaatctgctcacatttaatattataattggtataattctatttatgtctgccattttactgtttgttttgtatatttctcaaatatttttctttattgctttattttgcaatgaatgaatattttctaaaatagagaatgttagattactaatgaattattttactatatatttttgagaatttttgttgttgwtgtaagtttaccacataggtatatggaaaattaattattcaaatcatcttccaat

SEQ ID NO: 650187 - DNA, 545 bp, Homo sapiens
acctagctttacacatgcttctcaggggtagtaagttccaagttactatgctacaactgacatcatttctagttgtgagaggatttgaccatgacggacaagattcaaaaagacaaagagtccagcctactctcattcttgattccttccaagcatggcattagaattcatccttaatcaatcatgtagcatgtcaatatttttctgctgggtacatgcctttgctggcatagccttatgttgcaagttcattgagaaacagtcattggtgtttagyccagcttgaacatttgccagtggatttttgttcatttgatgtcaatttaacaaggatggctgaaaccaggaagatcatgtcacaatggctgcaactttgttttgcttgtttgactcagattgcacagttaatccagctaattccagttcacatgactataatctagactgaactaaatcagacatccagaagaatcaacagtaatgagaggttagtggcatactgatatttcctatgcactactctactcagcaaccatgaattccat

SEQ ID NO: 650188 - DNA, 569 bp, Homo sapiens
catagttaacatcaactctaggtcacaagtgatgcatttttcttttctgtgttttcattttcttttctgtgttcctccttccattcccaagaaacactggacagagagtaataaaagtaggcttakttaatatgttaagaaatatttgaatgtttatgtggtttaaaaaatatttttaatatatatgactaaattattttcaatacatacttgttatgtttaacattaagatttgaggttaattttaaatgttcttggtaaaaaatttttaagtgaagtctccagttggtttaaggaatgagaaaacaaacttagtgatacagttggttttatttatttattttttttgagatggagtttcgcttttgttgtccacagcgatcaatctcagctcactgcaacctccgcctcttgggttcaagcgattctcctgcctcagcctcccaagtagctgggattacaggcatgcgccaccatgcctggctaattttttgtatttttagtagaaacagggtttcaccaagttggccagactggtctcaaactcctgaccccaggtgatccaccca

SEQ ID NO: 650189 - DNA, 609 bp, Homo sapiens
agctgaattaagtataggagtaaaggttgggtgaacatggaggaaaatatatatattatatgcctcaaatacacaaaatgtacacatctgaaaagactgtttgcaaagctagtttctggaacatgatgcacartgagtttttcccgggatttcaatatttagttaggcatgtatggcgatgctgcaaagtagatcagctgcgactgtttgtgacttaatgtgctcttctttaaaatggctgctctcccagacaagtcctcctccaatgttgtttgctgttattccattctgctgcaaaaggaaaaagagtttcactgtagaaattcctcatcaacttgttaaaatttacggagaatgttttgagtctatggaatgtataaaaatggtgtgggaagcaaggggaagggtgggaagaagccaggcttgcttagggcagaaggtggttctccacatttgactgagctggtgctggaagccacatctagcagcatgatgtgcttgaatctcctggcagttgagagagagctaagtattgcttggaataactggcttagtgggaagaggcttggactggaagtcaagagtcctgggttcctgtcctggttggtc

SEQ ID NO: 650190 - DNA, 590 bp, Homo sapiens
ctaaaatttagaatgtgaaaattaaggtcaaataaataataatgaaggattaatgagagmatcttatgtataggttttctgatatggtcttaattatacatgtgtgtatgactatatacaatatttctcttgctgaggtgttttaaaaatagaactttaaaatttatacttttaaaatatattattctcctttggaagattgcaggaaattaatttttgttattacatattttcctttcccatatgagaagttttcctttaagaaattaccatatgaacaaataaatattctttttttttctttttgagattgagtcttgctctgttgcccaggctggagtgcaatggtgcaatcttagctcacggcaacctctgccccctgggttcaggcaagtgtcctgcctcagcctcccgagtagctgggattacaggcatgagccaccatgctgggctaatttttgtatttttattttttttttagtagaaatagggctttgccatgctggtcaggctggtctcaaactcctgacctcaggtaatccacctgcctcagcctcccaaagtgctgggataacaggcaagagccacca

SEQ ID NO: 650191 - DNA, 546 bp, Homo sapiens
aaattaagctatccatgagttcctaactctactccaactccacataaaccattctagcccctttctcttacttacctttaacctccctttccaatcagcagtaacaaacttggctaccgacacccactctctatttcttactttttcaattccagtgtatatttatagtggtttcaaaattattaacacatactcccggggaagaactttattaactacagtccaatgcttaatgtgccatttcttttgctatttgtcttgcagactccactaatttccaaaattacttatgtcagtaactttcccccaccattcccgtcagtgaggttgtttcctgcacttttaattcagttagattattttgttttaatctgaatatcttcccagaatcccctaacctcctaaatgttttctgaaatttgcattcattgrtactgactgttgttcagactgtaaagctctatgggttttgacaaatccatagtgtcatgtattcaccatagcaaaatcatacaaaatagatttctcatcctaaaaatatcctat

SEQ ID NO: 650192 - DNA, 533 bp, Homo sapiens
gtcttgaagttagatagtgttagtcctctgactttgttcttctccttggtattgtgtttgctattctggatcttttgcctctccaaatgaactttataataaatttgttcatattcacaaaataactttctggtattttgattgaaattgcattgaatctatagcttaagttgggaagaactgacagcttgacactattgaatcttcttaaccatgaacatggaatatctctccatttatgtaattcttttttatttctctcatcaaggttttatagctttccccamataaatcatgcagctattttattagatttatgtgtaagtattttattttcacgtgctaatgtaaatagtgctgtgtttttaatttcaaattcaatttgtccattgctggtatgtaggaaagtgattaacttttgtatatttatattgtattttgcaagtttgataatattgtttagtttttgctgatttttggggatttttttgtgtagaaaatcatgtcatctgcaaaaaaaaaaaaaaaaggca

SEQ ID NO: 650193 - DNA, 583 bp, Homo sapiens
atggtgatgttttctaggtacactatccatttaattcttttaaaattataaagataatgtaacagaattgaagaaaaaattttaagcttaatgaaaagtaatatctatgtttgtaacatggtaactacagtagtcaccactactataacatggaactgtgaaaaatgtttatttcttcacagttcttgtcctcatgcattcatgcattgaagtgggattctgtatttcagccagaatgtagttgagtctttctgagtctgaagatttgtagtatcataccttctcatgccatctgggggattagaaccacagaatttacaagtccaatatgytttaggaggttagcctatcctcaggctgcagaaatctatggcatggatggtaattcattcttgccatgtttactaatgctgattcacctggtttttatggattactgcatattccttcaagcaaacactttggaaatgcatctgtgtctccaatagttttttcatcatattaccctcctactccaaaattttctaattcctgaccatattaaatgtaaatacattttcctaaatcagcctgtccagtagag

SEQ ID NO: 650194 - DNA, 583 bp, Homo sapiens
atggtgatgttttctaggtacactatccatttaattcttttaaaattataaagataatgtaacagaattgaagaaaaaattttaagcttaatgaaaagtaatatctatgtttgtaacatggtaactacagtagtcaccactactataacatggaactgtgaaaaatgtttatttcttcacagttcttgtcctcatgcattcatgcattgaagtgggattctgtatttcagccagaatgtagttgagtctttctgagtctgaagatttgtagtatcataccttctcatgccatctgggggattagaaccacagaatttacaagtccaatatgttttaggwggttagcctatcctcaggctgcagaaatctatggcatggatggtaattcattcttgccatgtttactaatgctgattcacctggtttttatggattactgcatattccttcaagcaaacactttggaaatgcatctgtgtctccaatagttttttcatcatattaccctcctactccaaaattttctaattcctgaccatattaaatgtaaatacattttcctaaatcagcctgtccagtagag

SEQ ID NO: 650195 - DNA, 605 bp, Homo sapiens
ttcaaaacaatttgactctctacagagactccaaacgaacctgacacatgccttgctctttggccctaccttagctactgaggactcagtctctgatctgattggtcatctcagctaagttccaaaactgaggttacatggaggcaggccagcagtcaactctgacctcagatgtggaattttgtttgtgggttttgccctacactgcattttaaataaatatatttaatttctaatttttaaaaattaggtgtctagcatgtcttaaaaaaaaatagagccaatagtgctacagtccctggatatgawgatgagatgagacactctccatttccttcttttatgttcctgctggttctgtaggcttctgagtttccagcctgggtgtcaccattgaagacttcccaatgactgtgatatggttaagagagcttgcaggagcactgtccacaaacttgcctcttccctgcttttctttttcaaagtttagctcaaggctttcccttcctggtatgaatcctttccctcaagtattgaagagcatcctctacaaagaccaagtctttcctccttctgataatgggcattatttactcctgcttgtg

SEQ ID NO: 650196 - DNA, 603 bp, Homo sapiens
agtcatggtaggtggacaataccccaaaggctcctggttcaggactggggcaaactttggacatttggttgacagcagatccaagggttcgctacccacctgcctcatggtagaaaagcggatgtgagatctgtttgcctaactttagccccatcattcttcagaccacagtactggcttctaactttctcagaaaaggaggcaagtattggtcccttggccagaccagcagaacctatgcacatgacccagtattttcagtgagataaacaccttcccctggaaaggaaatcccactcaggggccctcctcacctgccccagcctaccctgcatggctgcatggcttaggactgccatgtggcctctgcaggtcctggcattctaggtctcattgtttcactccctaacagacctcagaaaggagaacctctaactcccagtggcatttagcttccctctttaaacrtctgggtcacagatatgctcagttaattaatgttcttagtgctgctcatctgcctgctggataatagattgattcataatttcagtaagcagctgtgtatatctttccctgaacataaaggcagcttgctgtcat

SEQ ID NO: 650197 - DNA, 583 bp, Homo sapiens
ctgactaatcttcaatctgatcacccacctttgggtttatttgatgtcttaggcrtacttaatcacaatcactggttctttgggcccatcttgctccagatcagtcatctacctggagccaccatctccctggtcatggtgacttaatgggtctctgattgtgctgatggagcttttcttgtcatcaggctctaacatagccacaccagggctcagtttctccactgggttgtgacattccctcctcttcccaccaccctgccccacccctatattctcaagtttgaaaagggaaaggatttgatgagcctgacttgcacatatacttttaaaaatgtatcttttcctgtcagtagttcttcatctggcatccagaacattatattgtaaaacagtccttttaaaagagtatttttaacccatgggaaagactttccatttatggaaatttgggcattatggaaggttggtgttagtgactcatcctggcatttccatattatattagtaataagttactgtataggctcacaaggtgtgctctgatcatattacctaaatgaaaaatgggaatacaattctg

SEQ ID NO: 650198 - DNA, 583 bp, Homo sapiens
ctgactaatcttcaatctgatcacccacctttgggtttatttgatgtcttaggcatacttaatcacaatcactggttctttgggcccatcttgctccagatcagtcatctacctggagccaccatctccctggtcatggtgacttaatgggtctctgattgtgctgatggagcttttcttgtcatcaggctctaacatagccacaccagggctcagtttctccactgggwtgtgacattccctcctcttcccaccaccctgccccacccctatattctcaagtttgaaaagggaaaggatttgatgagcctgacttgcacatatacttttaaaaatgtatcttttcctgtcagtagttcttcatctggcatccagaacattatattgtaaaacagtccttttaaaagagtatttttaacccatgggaaagactttccatttatggaaatttgggcattatggaaggttggtgttagtgactcatcctggcatttccatattatattagtaataagttactgtataggctcacaaggtgtgctctgatcatattacctaaatgaaaaatgggaatacaattctg

SEQ ID NO: 650199 - DNA, 583 bp, Homo sapiens
ctgactaatcttcaatctgatcacccacctttgggtttatttgatgtcttaggcatacttaatcacaatcactggttctttgggcccatcttgctccagatcagtcatctacctggagccaccatctccctggtcatggtgacttaatgggtctctgattgtgctgatggagcttttcttgtcatcaggctctaacatagccacaccagggctcagtttctccactgggttgtgacattccctcctcttcccaccaccctgccccacccctatattctcaagtttgaaaagggaaaggatttgatgagcctgacttgcacatatacttttaaaaatgtatcttttcctgtcagtagttcttcatctggcatccagaacattatattgtaaaacagtccttttaaaagagtatttttaacccatgggaaagactttccatttatggaaatttgggcattatggaaggttggtgttagtgactcwtcctggcatttccatattatattagtaataagttactgtataggctcacaaggtgtgctctgatcatattacctaaatgaaaaatgggaatacaattctg

SEQ ID NO: 650200 - DNA, 457 bp, Homo sapiens
cactggtgcaagaggtgggctcccaaggccttgggcagctttgcctttgtggctttgaaggatgccaatcacatgtctgctctcatgggttggagctgagtgcctgcagcttttcyaggctcaggatgcaagctgccagtggatctatcattctaggttctggagggcagtagcccacttcccatagctccactaggcaatgccccagtggggactctgtgtagtgacttcagttccacatttctcctccacattgccctagtagagtttctctgttaaggttctgcctctgtggctggcttctgcctgggcacccaggctttttgatacaccctctgaaatctaggtggaactcaccaagtctccatcactcttgcattgagtgtgcctgcaggtttgacaccacatggaatctaccaaggcttatggcttgcattctccaaagtggcaacctgag

SEQ ID NO: 650201 - DNA, 457 bp, Homo sapiens
cactggtgcaagaggtgggctcccaaggccttgggcagctttgcctttgtggctttgaaggatgccaatcacatgtctgctctcatgggttggagctgagtgcctgcagcttttctaggctcaggatgcaakctgccagtggatctatcattctaggttctggagggcagtagcccacttcccatagctccactaggcaatgccccagtggggactctgtgtagtgacttcagttccacatttctcctccacattgccctagtagagtttctctgttaaggttctgcctctgtggctggcttctgcctgggcacccaggctttttgatacaccctctgaaatctaggtggaactcaccaagtctccatcactcttgcattgagtgtgcctgcaggtttgacaccacatggaatctaccaaggcttatggcttgcattctccaaagtggcaacctgag

SEQ ID NO: 650202 - DNA, 537 bp, Homo sapiens
atactaccaacgcacccttctccaagatgaagggctcattctcaagtcaaaaccaacaatcattattttttaacaatggaactgagggcagcagctcatagagaaatgaatattttctgaatctcgtttgattccaatgagaagaaaagaaagggtcatacagacaagttatgttttcagggagcattccactgataagacagagtaaagaagataattctgtattgtcagcttgtgagcaacctggaagtgctgatctcagttgacttgggagtggcaaagtctaaataartacccacatacgcacaattctattattaaaaaatgtcctactggcatagaacatagcattggcaaccccatccccaccacctacacacacacacacacacacacacacatacacacacacacacagagagagagagagaaaaagagaaagagagagaaacaaggagagagcttctgttgagttctaatcctgaattctgggaagtcctgagtttttagagtaataatttttataaagaagtcaac

SEQ ID NO: 650203 - DNA, 594 bp, Homo sapiens
ataaactatccaactgtttttcaaagtggctgtaccatttaatatttccaccagtgacaagtgaaagtttcagatgctccacatcatcatcaatgcttggtattgtcggttttattaattgtgatcactctagttagtgtgtactggtgtctctttatggttttaatttgcatttccctgatagtaagcatttgtttatatatttactggatatttatatattttctgttgtgagatgtctgtccaaatagtttttctgttttttattgtgttttttttcttcttgctgagttgtaagaattcctttttattattgagatacaattcctcatcaggcatatgtgttacaaatattttctcccagtctgtgaatttctttttaattttyatataagtatacttaaagatttctactatatatagaaaataaaatatataatatatacaaatttattatatattttattttattttatataaaatatgtaatatttgtttttgatttaatatatttaattatatataaaataagaaaataattattttgttatttaataatatcatcaaaattatattattaatatcattaatatt

SEQ ID NO: 650204 - DNA, 559 bp, Homo sapiens
ctgaggcaggagaatcgcttgaacccaggaggtggaggttttagtgagtgagccaagatcaggctagtgcaccccagcaggggagacagagctagacgctgtctcaaaaaaaaagaaaaaaaaatcttttctgcttatgctataattcactacagacatgcaaattatcatgttcttttaattcacttagactagatcctttctatattgatatatcaccaactatatgcaaatttagatttgtttgttttagtttcaatttctagagatttccttctttttaaaatgcaattttgttttatgttcataaaaataatagaaatttcaaaattaaatatctaaagcagtatatcttcaaagaagttmtatacatgcctcttgtattgccatctttataaatagccatctttaaaattttacgtatatatatttatgtcgtctgatttatttaaataaaagagagtgtgccatatactttcctcaactctttttcattttagtaatatatctgggatattatatggcctaataaaagaaatatttcttattatttattata

SEQ ID NO: 650205 - DNA, 563 bp, Homo sapiens
ggaagcaaggggcactggggaagagagatccatagaagtgctgagaccgaagggagaggctcacagacactgcttcctaccagacacagatgggggcttgttggccatgcacagggcccttgggagccagggtgggtcaaggtccgggcagggtgctgtccatcccagggtcctaaccaaatttaattaaaggctggaggttcccatggagccactgatgagtatgggggcacaggacgatggaccagttctgtgtttgtrtggaggacaagatgaggagctccagcccagcaaagcaggggaaatgagaagagagaaaggccgttaccttgccttggaggttgagggagggtgttttccagcacactgcctctgtgctgccagcactggctgtgaggagcagactgagctttgtctcttcctccccaaggctgtctggctctgccccactgtgaccctgcagttcccagactgtctctgggctgctgtgagtagagtcaggtcttggcactagtgatctttgtttggttctgcacttctgtgaacagagcaaacctccaaag

SEQ ID NO: 650206 - DNA, 563 bp, Homo sapiens
ggaagcaaggggcactggggaagagagatccatagaagtgctgagaccgaagggagaggctcacagacactgcttcctaccagacacagatgggggcttgttggccatgcacagggcccttgggagccagggtgggtcaaggtccgggcagggtgctgtccatcccagggtcctaaccaaatttaattaaaggctggaggttcccatggagccactgatgagtatgggggcacaggacgatggaccagttctgtgtttgtatggaggacaagatgaggagctccagcccagcaaagcaggggaaatgagaagagagaaaggcygttaccttgccttggaggttgagggagggtgttttccagcacactgcctctgtgctgccagcactggctgtgaggagcagactgagctttgtctcttcctccccaaggctgtctggctctgccccactgtgaccctgcagttcccagactgtctctgggctgctgtgagtagagtcaggtcttggcactagtgatctttgtttggttctgcacttctgtgaacagagcaaacctccaaag

SEQ ID NO: 650207 - DNA, 563 bp, Homo sapiens
ggaagcaaggggcactggggaagagagatccatagaagtgctgagaccgaagggagaggctcacagacactgcttcctaccagacacagatgggggcttgttggccatgcacagggcccttgggagccagggtgggtcaaggtccgggcagggtgctgtccatcccagggtcctaaccaaatttaattaaaggctggaggttcccatggagccactgatgagtatgggggcacaggacgatggaccagttctgtgtttgtatggaggacaagatgaggagctccagcccagcaaagcaggggaaatgagaagagagaaaggccgttaccttgccttggaggttgagggagggtgttttccagcacactgcctctgtgctgccagcactggctgtgaggagcagactgagctttgtctcttcctccccaaggctgtctggctctgccycactgtgaccctgcagttcccagactgtctctgggctgctgtgagtagagtcaggtcttggcactagtgatctttgtttggttctgcacttctgtgaacagagcaaacctccaaag

SEQ ID NO: 650208 - DNA, 522 bp, Homo sapiens
agaatcctctgccttgaatggtgtcagaaatagaagaatggatttgtcttcaatgcatttcctccataggctcatctaatcccacaactatggacaagtcagggacacacttggctagctaacgtcactgcaaacaactctctctttttttwaaaattatacttttagttctagggtacatgagcacaacgtgcaagtttgttacatatgtatacatgtgccatgctggttggctgcaccacattaactcgtcatttacattaggtatttctcctaatgctatccctcccccacccctccaccccacgacagtcccaggtgtgtgatgttctccgccctgtgtccaaatgttctcattgttcaattcccacctatgagtgagaacacgcagtgtttggttttctgtccttgctgtaaacaactctctgtgtgcctctcctttggctacctggctgacaggcagcttctgatgtggtagactcacctatagatttgaacctcaaatgctagtgtggtgatgaa

SEQ ID NO: 650209 - DNA, 568 bp, Homo sapiens
agagttattgcaagagtccatacaaagaggatagtagcttggactagggagtggcaataggggtattgagaattgctggaaatctgtatatgtatacactgaaagtagcagtgaattcactactgtgttccaattcaatgcaaaagctattgtactatttgctcttacaattttgccttcttttgtaatgtgtttaaaataaaaagtttcccatttttcaaaggtgaaaacaaaaatcattgtcatcttgtaggcttgcaaaatttcagatctatcagagatactggatattatcttttctaaacgcttcattttacagagtagaaaacaaaggattcattcctcagaggagaaatgaggggygggggaagtaaaccaaggaacagaaagtttgtgggacttaaataagttcactcagctatttagagaaagaacctggactggaaaccaggctgtctgactcacagcccaagctactttgtcttacaatcggtgatatttaaggggtttgtactgttcgtttaaagttctgttctgttattttgatttaacaaacattgagtgaaag

SEQ ID NO: 650210 - DNA, 567 bp, Homo sapiens
ttcatttccaccttcctcctctcatttatattaattgtatttttttctagatcatcagcatttatgttatttatattctatcttgccatctactcctaatattttcaaaaatgtctttgttttacaatcaagtagcttcttttattgccactcrttttacattgccctagttatctatttattggctaaagtttgtcttccagttgctttttttgttttctctcagaaaggctcctgggatcagctgttaatctgtctcttttatacttggaattcaggttggcttgatagaaattccttaggttgtagcttatttccttaaataatagattttttcatcatcttctgccattgaatgttgccgtggagtaatctgaggctaacaggttttttcattttattatgacttgaactttttcctgactgcccaaaaatgataatttgtttaaagtctagtaacttttttggaaaaagctctatgttgactgatctgagttacttctccctgccacatgatattctctttcaaaatgtaaatttaagtcttcttatatcagaaaaaatttc

SEQ ID NO: 650211 - DNA, 601 bp, Homo sapiens
gcagcagggctatgcaggcagtcagaatgccttgacccacagagatatttggcagtggtcaattgatatggcattcccaggaatcaaatagatggacagctcactacattgtttgatctgtataacaggaaaaactctaggtctggtagcyaaaagtctggcttgagtcacagcttctcaccccatttctagatctaaggcaatttatgtacttagcgtgtcccttgaataaagaagccccttgaggagggaccctgcatcactattgcaaatttccactgtaaatcttactttaagtcttctccaaagcgacctgtagctgtttattagagtgactgcatttgggagaagagaactcccagacttttccaagattatgacattggctctgagttgacactgattattgaggagccaaaataccacagtggctcaccagtcagagtgggggtttatggtgtcaggggatggaatcttagcccaggtctgactcacagtgggccctgtggtctacagaccaagtctgcagttatttcctcagttcattttttgttttgttttgtttttgagacagggtcttgctctgttattcagactggag

SEQ ID NO: 650212 - DNA, 601 bp, Homo sapiens
gcagcagggctatgcaggcagtcagaatgccttgacccacagagatatttggcagtggtcaattgatatggcattcccaggaatcaaatagatggacagctcactacattgtttgatctgtataacaggaaaaactctaggtctggtagctaaaagtctggcttgagtcacagcttctcaccccatttctagayctaaggcaatttatgtacttagcgtgtcccttgaataaagaagccccttgaggagggaccctgcatcactattgcaaatttccactgtaaatcttactttaagtcttctccaaagcgacctgtagctgtttattagagtgactgcatttgggagaagagaactcccagacttttccaagattatgacattggctctgagttgacactgattattgaggagccaaaataccacagtggctcaccagtcagagtgggggtttatggtgtcaggggatggaatcttagcccaggtctgactcacagtgggccctgtggtctacagaccaagtctgcagttatttcctcagttcattttttgttttgttttgtttttgagacagggtcttgctctgttattcagactggag

SEQ ID NO: 650213 - DNA, 603 bp, Homo sapiens
tttctcggttgatctttgacgaagacttggttgccccttgatctcaggatggctactgtaactccagacatcatgtctgcaggcaaggctgaatggaagctagtgaagtgagctgccacttctcttcatttatcataaaagcaaaaggctttccaaagacttccagaagactatttccagctcattagccagagactgatcacatgaccacccctagctacagcacaagaagtatggtgagtgggtatatagattggacatatgatggcacctgaacagaatcaaggttctattagcaggaaactatctgccttggagtttcaagttccatttgatggaataaagggctatgatgatatcaagggtgaatggccctcccccaggaccacctccatgggagccacttcctccatcrcgtctaacctctgttatctttgcacacatgagaacaggtcagcaggtcatctgaggggcttgaggagcctccagcaggggctgggcttagttctctttgaggcagctctggaaccaggccagtactttccacacaggtggagatctcctggcagggggctcatcttattgttcctgctgtgctggtgt

SEQ ID NO: 650214 - DNA, 459 bp, Homo sapiens
ataaattatatacatatttgtgtgcaagtatctgtaaatattttataagcatatgtgatatatattctataacataatacacgctggggaaatatatgttgaattgaatgcatgagaatatcttgatcacagttaacattttttgactatgccctatgtaccgaactctttgctaagcgcttcacatgaattctcatttccttggcataccgacgaaccctaagataggtactctccttatcctatatttgcaaagaaggaaacctagacttaaaatcatgaagtaaattgcccataattctgtatttattgagtcagatatttgaattttaaagtctaaatgtatctgactctaaagtttttgttctttctagtaatattcygtggatagattcatacatacatatatacacacatagatagtacatagagcaagctatggagacatgtccatatgcc

SEQ ID NO: 650215 - DNA, 602 bp, Homo sapiens
acattctttagccaaaatatattaatatttctggagcacaacatataaatattcacactaagtaaaattaatgaaggctttagcatgtattttaggttttgttaccatttgagctatgaaaatgcttttagttttaagatttttggactttgtaattgcacaccaagggcctgtattattgctacccrtgatctctattggtctaaattgtacccatacctcaaaagtaagatctgataacaccttcccagaaaatctgtcctgtcttctgcacctgaaattaactttcctctcctctactctcaccattctcaattcctttaacagagtgatgacattttcagccttgtgcttaatttagatatacatacacttgttctcttttctagatggaaagatccttgaaggtcagaaaaatggttattcacattttatccttttctgtatctatggcagatattatccttatcgtgagtaggacttaactgaacctaaagaatggcttgaactaggagtgaaaagggaaggacattcctgaagactatgagaactagagggtaaaaagacaatttcatatattgattagacctatgcatatgggc

SEQ ID NO: 650216 - DNA, 564 bp, Homo sapiens
aaccttagctactgagttacagcataggcattctccactactcttcctgaaaggtatccagagtagttaactttgagcttgcaaaggcttttaactactcaagataatgtttagagctaactctgacataaacctccaaattccttttccctagaatgcagagaccaagagaaagtactgccttttatttacaaggtcaagctcccaaggacataaaacaaaatggarataaacagtgatttttaccattcatttgaccatttgcacagagagagagaagccagaaatctgactggtaagaaattcttacccttttgccagcatgccaggcttctaggttcactttccctgagcggccctggtgactcagcttgctgcactatcatggtggggccaagttgcatcaaaaggaaaaattatccttttttgttctggccacagaacatagacattagccactctgattagcacccaatatcaaactgtcaaggctcaagcttgcccctggttgggccccatcatcgttaatccaatctccaaccaggagtttcaacatgtggtctc

SEQ ID NO: 650217 - DNA, 564 bp, Homo sapiens
aaccttagctactgagttacagcataggcattctccactactcttcctgaaaggtatccagagtagttaactttgagcttgcaaaggcttttaactactcaagataatgtttagagctaactctgacataaacctccaaattccttttccctagaatgcagagaccaagagaaagtactgccttttatttacaaggtcaagctcccaaggacataaaacaaaatggaaataaacagtgatttttaccattcatttgaccatttgcacagagagagagaagccagaaatctgactggtaagaaattcttacccttttgccagcatgccaggcttctaggttcactttccctgagcggccctggtgactcagcttgctgcactatcatggtggggccaagttgcatcaaaaggaaaaattatccttttttgttctggccacagaacatagacattagccactctgattagcacccaatatcaaactgkcaaggctcaagcttgcccctggttgggccccatcatcgttaatccaatctccaaccaggagtttcaacatgtggtctc

SEQ ID NO: 650218 - DNA, 631 bp, Homo sapiens
catcccagctccagagctccctgggacaggctgaggcctctgtggcaggtgcactgcagttcagcatctccccctgcccggccctgcttccctcacacccacagctgttgttcccaaaagctctccctgataaatcacctgaggcaaacctctgtctgagtctatttccagaaaaccctacctgggacagcccctaacacagtcctgagcttaagaaatgcctgcagaatggattgatgccacacataacacacaacacacacatacacacacgcgcacacacacaaacacacatgctcccagggctaccaatgactccacgcatctggcccaaccttttccctccagacagacgccccagcattgccccagatacttaaagcacttggcatcctcacctctctgtgtctccatttcctcatctataagacgggaacagaaacagaatctacccctrttaggctgttcgatgactaaattaaataagtaaggacatgaacttagagtagggagtaccccatcaggatgctgcccgtacatcctggtttgcctcatacggtcccagctttacctgtaatgcctcccccacaaccaccacattttatttggcatttactttcagtttcaattg

SEQ ID NO: 650219 - DNA, 584 bp, Homo sapiens
tgtttggcattttagagatctttttgctcataaaccaaatctcagatgatagtttggtgatagatgtatgtttgcacaaaaatgtttattatctggcacaaagataattttcattcaccttgtccccattcatacataaaacaacaggtttgtaataacctgattatacatctatcatataaaactgtatttttggatatttttgttaygtttgtagaaatttaaactctttcatcttcatataaatttgagaagtgtttctctgtcacattttttaccattttttcctctgatatttaggaatagagatatagaaatattagacttaaagaagcattactagtaatatgatgaacaggatgattaattaacaaaaaagggaaatgaaacaaacaagaaatacatgtgggttaagtatacatattttaaacacggataaacagaagacaatgaaagaaaatttctgttcatttttgagtatttgtttaaaaatataaatgttatcgaactgtttacaattttatataaattgtttctcataagatatgtgaagaaaaataacctatgtttatttcaaatttcta

SEQ ID NO: 650220 - DNA, 584 bp, Homo sapiens
tgtttggcattttagagatctttttgctcataaaccaaatctcagatgatagtttggtgatagatgtatgtttgcacaaaaatgtttattatctggcacaaagataattttcattcaccttgtccccattcatacataaaacaacaggtttgtaataacctgattatacatctatcatataaaactgtatttttggatatttttgttacgtttgtagaaatttaaactctttcatcttcatataaatttgagaagtgtttctctgtcacattttttaccattttttcctctgatatttaggaatagagatatagaaatattagacttaaagaagcattactagtaatatgatgaacaggatgattaattaacaaaaaagggaaatgaaacaaacaagaaatacatgtgggttaagtatamatattttaaacacggataaacagaagacaatgaaagaaaatttctgttcatttttgagtatttgtttaaaaatataaatgttatcgaactgtttacaattttatataaattgtttctcataagatatgtgaagaaaaataacctatgtttatttcaaatttcta

SEQ ID NO: 650221 - DNA, 584 bp, Homo sapiens
tgtttggcattttagagatctttttgctcataaaccaaatctcagatgatagtttggtgatagatgtatgtttgcacaaaaatgtttattatctggcacaaagataattttcattcaccttgtccccattcatacataaaacaacaggtttgtaataacctgattatacatctatcatataaaactgtatttttggatatttttgttacgtttgtagaaatttaaactctttcatcttcatataaatttgagaagtgtttctctgtcacattttttaccattttttcctctgatatttaggaatagagatatagaaatattagacttaaagaagcattactagtaatatgatgaacaggatgattaattaacaaaaaagggaaatgaaacaaacaagaaatacatgtgggttaagtatacatattttaaacayggataaacagaagacaatgaaagaaaatttctgttcatttttgagtatttgtttaaaaatataaatgttatcgaactgtttacaattttatataaattgtttctcataagatatgtgaagaaaaataacctatgtttatttcaaatttcta

SEQ ID NO: 650222 - DNA, 590 bp, Homo sapiens
aagtgtccacccaggctaataaaattacttggagaaaaaatgttcttcaagatccagggaagccatggagagtcttttgagtcctcgagaatatggctttacttttgccagccacaagagagctgcttgtagcaaaaaaaaaaaaaagtcrtgaaaccaaaaggcagttcattatgtctgtttaaaagaaagcactgttggagaagaggaagctctgacgaaacggtctgctaggtggacaggtagggaggactcagaagtccattttacaggtagtgaatctcatgtttaaggccaaagtgaagttgtttcgcaagggctctctagcacagagttcctctaaaccttgggcagcaaatgccaaagaacttacctttcccagagttccccaactagtgaaacattcagcaagtcagcccaggctaggctggtttcttggttatatgctcttagatccgtgttccctcctctcacagcacttacatattaacctctgtgactatgtcttcctccccagtcttcaaatttcatgagaacaaggtctgtttttgttttccatggtatcttcagggcttcacaaagagctgtgt

SEQ ID NO: 650223 - DNA, 590 bp, Homo sapiens
aagtgtccacccaggctaataaaattacttggagaaaaaatgttcttcaagatccagggaagccatggagagtcttttgagtcctcgagaatatggctttacttttgccagccacaagagagctgcttgtagcaaaaaaaaaaaaaagtcatgaaaccaaaaggcagttcattatgtctgtttaaaagaaagcactgttggagaagaggaagctctgacgaaacggtctgctaggtggacaggtagggaggrctcagaagtccattttacaggtagtgaatctcatgtttaaggccaaagtgaagttgtttcgcaagggctctctagcacagagttcctctaaaccttgggcagcaaatgccaaagaacttacctttcccagagttccccaactagtgaaacattcagcaagtcagcccaggctaggctggtttcttggttatatgctcttagatccgtgttccctcctctcacagcacttacatattaacctctgtgactatgtcttcctccccagtcttcaaatttcatgagaacaaggtctgtttttgttttccatggtatcttcagggcttcacaaagagctgtgt

SEQ ID NO: 650224 - DNA, 461 bp, Homo sapiens
  misc_feature 290, 402, 445: n = A,T,C or G
aagtaggtaaggtaaaatggaatttatatgtgatagcatcaggtttctcagtgaaggatgaatctaggttataagttgaaagtgagggtcaaaggaaggtatggggaagttgaggaaataggaggtgtgaagtgtcagagtggagaaagtgagtattagtactaaaatggtattttgttttaggcagcaccagtttgatggttgagataatgcaaatgaaatcagttagcttggggttatgatttcccaaatctaagcacacagaaaccagttkggagggttcttctganggaaagagggaattagttgaagggatctgtaagccaacagtaattatggatataagggatatagcatttttgctgacagaagaagtgtgtatattatatgtgttacaggtgnttaaacctgatgatgtattgtcctgagggaactgtcatgtggntgagaagtatattcct

SEQ ID NO: 650225 - DNA, 568 bp, Homo sapiens
tatggctaccatagaagcataatttaaaaatataaagaaagcttcttttaaattttgaggtttgccaacagaattggacatgtattgaaatttcactttttaaaaattatacctttatatgcacataaacaactctgctgaaatgaaattaatctggaaatggcaacttagatttatagaagcaagtaygttaaaaattaatcaactactccccagtcgttgataaaattcagtgttttccaaggacacttctacagtagccgtccaatggcataaggggctacactgttgagagcactttagactttcagactgaatcaatgaggaacactgttaagcacaagacagccctggcaatcacagcatctcatgttcaggttaactccagtaagggggagatattagcaggcatcatcaaataatcaattttagtcacctggaagaacacaatgtactgaacagaaaccaagcatcacctatgaagagcattttgtttgtgtctataaggccccatgccctagacatgctggagtgatcagtattttctaactgtatttcattctacttc

SEQ ID NO: 650226 - DNA, 563 bp, Homo sapiens
tataagggaactctaatcagattaacagttgatttctcagcaaaaaccttacaggctcaggaagaatgagatgatgtattcaaagtgctgaaagaaaacaacactatcagccaagaatactacaaccagcaaaattatcattcaaaaatgaagaagcaataaagtgtttcatagattagcaaaaactgagggaattcttcactagactggtcctgtaagaaatgcttaagggactcctatatctggcagccaaagaaaaatatayatgatcacaataacacacaaaagtatgaaactcataggtagaggaggcatgcaaatgcagaagcaaaaggactcagatcaatcaattcagttgattgatcagatcaatcaactcagatcaatcagtatattttatattatgatcaaatatatatgatcataataacacacaaaagtataaaactcactggtagagcaggcatgcaaatgaggaagaaaaaggacatcagatgttaccactacagaaaatcacacaccacaatgataaacaataagacagaaagaaggtagcaaaggat

SEQ ID NO: 650227 - DNA, 595 bp, Homo sapiens
ctcacctgctctgggcagttctgcygcccacagtgtggctatgccttgcttctccctctcccgtatttattcccaatttcaggttcttcacattatcaaactcattttctttccagcttctcttctcagttgtttcttccatgtctggagcccgttagtctgacattctagggactatttgtattgagctgcctgggtggtcgttcttcctttgaccttggagaatcctacaggcattgccaattggctcaagttgggaccactgcgatgggtcctgtataccatcacacaccatctctatattttgaaacttttctcaaaatatttttctatatctcattaactataggcttcaaggcaaatgtttttagaccccatgtgaaactttatcctaaccctcacttcttttacacacacctaggaatatactttcccattttggggtaaagagaatgtttaatccatattcagtattgaaagaatctcccaatcaggtgactcaatgcaatttgtcaagaacctggttgtgtgatgaagtgtgactttcagtctagtgaacacacttctcaaagcagtggaatattttcctttgaac

SEQ ID NO: 650228 - DNA, 595 bp, Homo sapiens
ctcacctgctctgggcagttctgctgcccacagtgtggctatgccttgcttctccctctcccgtatttattcccaatttcaggttcttcacattatcaaactcattttctttccagcttctcttctcagttgtttcttccatgtctggagcccgttagtctgacattctagggactatttgtattgagctgcctgggtggtcgttcttcctttgaccttggagaatcctacaggcattgccaattggctcaagttgggaccactgcgatgggtcctgtataccatcacacaccatctctmtattttgaaacttttctcaaaatatttttctatatctcattaactataggcttcaaggcaaatgtttttagaccccatgtgaaactttatcctaaccctcacttcttttacacacacctaggaatatactttcccattttggggtaaagagaatgtttaatccatattcagtattgaaagaatctcccaatcaggtgactcaatgcaatttgtcaagaacctggttgtgtgatgaagtgtgactttcagtctagtgaacacacttctcaaagcagtggaatattttcctttgaac

SEQ ID NO: 650229 - DNA, 595 bp, Homo sapiens
ctcacctgctctgggcagttctgctgcccacagtgtggctatgccttgcttctccctctcccgtatttattcccaatttcaggttcttcacattatcaaactcattttctttccagcttctcttctcagttgtttcttccatgtctggagcccgttagtctgacattctagggactatttgtattgagctgcctgggtggtcgttcttcctttgaccttggagaatcctacaggcattgccaattggctcaagttgggaccactgcgatgggtcctgtataccatcacacaccatctctatattttgaaacttttctcaaaatatttttctatatctcattaactataggcttcaaggcaaatgtttttagaccccatgtgaaactttatcctaaccctcacttcttttacacacacctaggaatatactttcccattttggggtaaagagaatgtttaatccatattcagtattgaaagaatctcccaatcaggtgactcaatgcaatttgtcaagaacctggttgtgtgatgaagtgtgactttcagtctagtgaacrcacttctcaaagcagtggaatattttcctttgaac

SEQ ID NO: 650230 - DNA, 510 bp, Homo sapiens
gaattcaagcctacaaataaaattgaacttgatttttttctgtggatactttctcgtattctgggttaattttctttataatattttgaaaggaagtaaaatatgcagagtgccaaagacagcaacagaaacctcccatactcctgaggctttaggaacacctgtcatgaaagtgggtttggctgacgtaggaataacagtgatacaatatgaatgccttttatttttgacagtctctgcgtttatcaattgcaaatgtacggtgtatacagccagtaatttgtcaaagagtgttgtagaaatatgtctgacccagataaaaagaccctatgcgtagaaaagttttgtttatctgaactgtatgctcagtaatctaayggggaaataagaacaacaggtttctaatctttcctggccactgagaaaaggggcttcatatattgtaaaatgcagatacatgctatctaaagtaataataaagattgttttcagtcctactcttaacttcct

SEQ ID NO: 650231 - DNA, 343 bp, Homo sapiens
gtgctgtcagatcaactcatcttatttttcattttatatrtaatgaaataaaggccagttggaatcttatatataaaaagttatgaaattatccattttcatgcaataataaatagaaatgtaaggaatattcttccatgattactttgtaattaactcaaatattttttatgtgactttgaatatatatcctttaatttataaactatcacaaaatgtgtactctttaaaacacaattggataaagagagccttggaattatgaaattatttattgatgtgaatgaacagacattgttatcaactgaaagaccatttatattgacttcctaagaaatgaaaa

SEQ ID NO: 650232 - DNA, 343 bp, Homo sapiens
gtgctgtcagatcaactcatcttatttttcattttatatataatgaaataaaggccagttggaatcttatatataaaaagttatgaaattatccattttcatgcaataataaatagaaatgtaaggaatattcttccatgattactttgtaattaactcaaatattttttatgtgactttgaatatatatcctttaatttataaactatcacaaaatgtgtactctttaaaayacaattggataaagagagccttggaattatgaaattatttattgatgtgaatgaacagacattgttatcaactgaaagaccatttatattgacttcctaagaaatgaaaa

SEQ ID NO: 650233 - DNA, 502 bp, Homo sapiens
aaaccccttcagtcaccccttatagatctataggagtaggaacttgaaataacaataggatgaggccagaaaacaaatgagtgaagctcagggataacacagtaggcagctgccaggactatggagaaatagtctcccctgactcagggtattagcaactatcaccttccagatgacggctgctgctggggaaggcagcaggtctagtcttgcaagaccttcaagagaagctacaagctctggatactcatggggcacttctcaacttctaaaagcagaaacacagcaaaatgtaatttaaaacaatcctatgtgggcyaagcaaaacatgtatctgtaatctcgatttgatcagcaaaatcgcagagttgacaccacccttttcttccaactctttaagcagctagaacactgcttcatatttagttgataaccactaagaatcacgaataaatttacaaaaactatacatgcatgtaaatatatgcatataaaatagaaa

SEQ ID NO: 650234 - DNA, 473 bp, Homo sapiens
aagactttccaacatagtgtgctaagcgtggtgctaggctgctcatttatgaagcactcgatattagaatgcaagatggatcacttcagaataacgtgttcagtattaaaaatgatgataagttygcaaatagtgaaaatattagctgtggaattggaggaggagaaggaggaggaagagaaaaagagggaagaaggtgcaactatgtatttacagacttactacttcaaaaagtatctttcccatctacacctctaatgggttttatggattactgttaattagcttatgtttccaatttccacaaggcagatgagttaacaaataagaggttttcttctattctctgaaataattcattttaggacaatatattcaatatgatctgttacgtagatttcttctgccatcactgagacaatttccttccaaagccacacccttattaaatattctgatagggaggaggaaag

SEQ ID NO: 650235 - DNA, 616 bp, Homo sapiens
ctcactgtaacctacgccttctgggttcaagcgattcccctgcctcagccttctgagtagctgggattacaggcgtgtgccaccatgcccagctaatattttcgtatttttagtagagacagggtttcaccatgttsgtcaggctggtctcaaactcctcacctcgtgatccacctgccttggcctcccagggtgctgagagtacaggcataagccaccatgcccggcctagaaaccctaaataaaaccatttctacaatcaaaactacaggcactgatggcttccccagacaattgtaacagtaatctatttaaaggagtgatttcaaaacacaaaaacgttttcagaaaatgaaaagagtgaaaacatcatcagctcactttcgtgttatcaaaagctgacaagaatattagaagaaagggtaatgcaaatcaacattcaaaactttaaagcaattagcaaatggaaattattttattggacggtaagaaactaatttcctcaattttatttctgcaaatattggcattatctatcacctagttcttttttattcagtttagaattttttttggaagttaaaatattttttaatgccagtcaacttcatgagct

SEQ ID NO: 650236 - DNA, 267 bp, Homo sapiens
tttactaattgattttaactaatatttataagagccagttggattgatatatattgttgaacctgaaaaatatttattatatacatgtttaaaatacacacagaaataaatagtaattrcactaggcatttgaaactgtactaaaatataagctgtgaatattttgtgatcattacaaattcttacactaaataaatatttttattttacaatattaatatgtttgatacctgtgtacttttttacaatgtgttattttatttttgt

SEQ ID NO: 650237 - DNA, 267 bp, Homo sapiens
tttactaattgattttaactaatatttataagagccagttggattgatatatattgttgaacctgaaaaatatttattatatacatgtttaaaatacacacagaaataaatagtaattacactaggcatttgaaactgtactaaaatataagctgtgaayattttgtgatcattacaaattcttacactaaataaatatttttattttacaatattaatatgtttgatacctgtgtacttttttacaatgtgttattttatttttgt

SEQ ID NO: 650238 - DNA, 267 bp, Homo sapiens
tttactaattgattttaactaatatttataagagccagttggattgatatatattgttgaacctgaaaaatatttattatatacatgtttaaaatacacacagaaataaatagtaattacactaggcatttgaaactgtactaaaatataagctgtgaatattttgtgatcattacaaattcttacactraataaatatttttattttacaatattaatatgtttgatacctgtgtacttttttacaatgtgttattttatttttgt

SEQ ID NO: 650239 - DNA, 261 bp, Homo sapiens
aatgcttgagaagtagatatttaatcataacatttcaaaatctactggataacctagaattgaaaaatagcctataggttgaaaaactcctgtagtgaagaaagaaaataactaatawacagtgacaatataaatattataagtatttattttattatcgccctgaaatttgataatgcaaacatgtaatatctacatatcatccatatatcaggtcataaaaaatcaatacattcttcaaaaatttagcataacagaaaa

SEQ ID NO: 650240 - DNA, 261 bp, Homo sapiens
aatgcttgagaagtagatatttaatcataacatttcaaaatctactggataacctagaattgaaaaatagcctataggttgaaaaactcctgtagtgaagaaagaaaataactaataaacagtgacaatataaatattataagtatttattttattatcgccctgaaatttgataatrcaaacatgtaatatctacatatcatccatatatcaggtcataaaaaatcaatacattcttcaaaaatttagcataacagaaaa

SEQ ID NO: 650241 - DNA, 388 bp, Homo sapiens
ctggtttgtcctggactcaactttatgtgcttttatgcttctgattattttaatctggtttctttcactgttagaaactataaccacaraaaaaatcagctttcttgagttatgtgaatcattaaaccaaaggggacttggggacccccaatagaaagtatatatattcttaaaaagaaaaagaatactggctataacagatattgctgatgacttgtcttctatgtcctggactcaatgtgttcacctgaaattcacctgtttccagctaactgagagctccccacatcatgcctgtctttctgatttttgggcctgcctgcaagcttcttgaggctaaccagtgcttctcaaccacacataggaacaaagaaagagttaggggtgg

SEQ ID NO: 650242 - DNA, 388 bp, Homo sapiens
ctggtttgtcctggactcaactttatgtgcttttatgcttctgattattttaatctggtttctttcactgttagaaactataaccacagaaaaaatcagctttcttgagttatgtgaatcattaaaccaaaggggacttggggacccccaatagaaagtatatatattcttaaaaagaaaaagaawactggctataacagatattgctgatgacttgtcttctatgtcctggactcaatgtgttcacctgaaattcacctgtttccagctaactgagagctccccacatcatgcctgtctttctgatttttgggcctgcctgcaagcttcttgaggctaaccagtgcttctcaaccacacataggaacaaagaaagagttaggggtgg

SEQ ID NO: 650243 - DNA, 409 bp, Homo sapiens
gctctgtgatgtgtgcgttcaactcacagagtttaacttttcttttcattcagcagtttggaaacactctgtttgtaaagtctgcacgtggatattttgacctctttgaggccttcgttggaaacgggtttttttcatgtaaggctagacagaggaattcccagtaacttccttgtgttgtgtgcattcaactcacagagttgaatgattctttacacagagctgatttggacactcttttggtggaatttgtaactggagaaatcagcagctttgaggtcaatggtagaaaaggaaatatcttcgtataaaaactagacagaatgattctcagaaactgttttgtgatgtgtgsgttcaactcacagattttaacctttcttttcacagagcagttaggaaacactct

SEQ ID NO: 650244 - DNA, 391 bp, Homo sapiens
ttcatataatgctagagggaagaattcttagtaacttctttgtgttgtgtgtattcaactgacagagttgaaccttcctttagacagagcagatttggaastctctttttgtggaatttgcaagtggagatttcaagcgctttgaggccaaaagcagaaaaggaaatattttcctatgaaaactagacagaatcattctcagaaactgctctgtgatgtgtgcgttcaactcacagagtttaacttttcttttcattcagcagtttggaaacactctgtttgtaaagtctgcacgtggatattttgacctctttgaggccttcgttggaaacgggtttttttcatgtaaggctagacagaagaaatctcagtaacttccttgtgttgtgcg

SEQ ID NO: 650245 - DNA, 391 bp, Homo sapiens
ttcatataatgctagagggaagaattcttagtaacttctttgtgttgtgtgtattcaactgacagagttgaaccttcctttagacagagcagatttggaactctctttttgtggaatttgcaagtggagatttcaagcgctttgaggccaaaagcagaaaaggaaatattttcctatgaaaactagacagaatcattctcagaaactgctctgtgatgtgtgcgttcaactcacagagtttaacttttcttttcattcagcagtttggaaacactctgtttgkaaagtctgcacgtggatattttgacctctttgaggccttcgttggaaacgggtttttttcatgtaaggctagacagaagaaatctcagtaacttccttgtgttgtgcg

SEQ ID NO: 650246 - DNA, 629 bp, Homo sapiens
tatgacagcaccctactggaaagtttgagcataaaaattgttttgttttccatgtttgttgttcttgaagctttgattcctcttggagtgtcttgagttagtttttatatttgtttcaatggtggaatttactgggaggtagtctaaatatgtgggaaagtaaaagtttgggatgccttattttggctataataagtcctaggaattcgttcattcagtaaattttttttttagtatctacccaatgccaagccccacataaaacattaagagtagggacaataatacattaaggtctctgaccccatgaaactcatggtcagaggaggaagatcaacatgtatgcagagaaatgaaagcaatttaacaaatgcttgcatacagttatgtgcacaggagcaggaagaatgggcaagagaatagccagactagctaggacatgtgggagacttcagagagaagactgggtgcagakagatgttctgagtttgaagaggccaaggctgtatataacctccacgaaaaccactgtctgcagtgcccagccataggccacccccttagacctcctaactccctagtcacaagaggctgtgttagtttgtacaacaccagacacagtaacagat

SEQ ID NO: 650247 - DNA, 606 bp, Homo sapiens
ggttcttatgggagtgctatttttatttttttgatgactttccatattcttttctgtagcagctgcacaattttgcattcctaccaacagtgttgaagtgttccaatttatctataccctggccaatacttattatttcctgttcttttgattgtggccatctaaatttgtatgagataatatctcattttggttttaatyggcatttccctgatgatgaatgacattgagcatctgtttatatactcaatggccatttgtatatctcctttagaaaagtgtctgttcaagtcttagcccattttaaaaattgggttatgaatgttttgcagtggagctacatgagttccttatatattatgtattttggaaattgtctccttatccgatagatgatttgcacatattttctctcattaagtaggttctctgtcaactattgtttcctttgctgtacaatttttttaaaaaaaggaagaaaaaatttccttttttaaggaaagcttttaaaagaacatgacataatctaaacaataatttccctgttaatggcaagaatatttgtttttgccattataagcaatactactataaacatacttacac

SEQ ID NO: 650248 - DNA, 220 bp, Homo sapiens
tttttacaataatttgttttataaagcagatttttaaagaaatattgaagttaaattaagctttaaatatgttttgacctacaaaagtaatttcaatcatatattcctawacaaaaatatattatgttcaaaatatataacacaaactatatagatatatgttgtatctcatataaacatacatgtacataaacataatactcacatatatcatatatgt

SEQ ID NO: 650249 - DNA, 598 bp, Homo sapiens
tgcaatcacagcagccctcatatgagcattttgcaggtggtctggggatcgccctgcccctgcctaccacagccagtgatggtatacataactgggaggccagagggtaggtctgactggctcggtgacactctcaccccattacctgagcactcagttcaggggcctgaggattgcccaacccaataaaccactgttggcacctgagcacttcttgtgagatctgaggtcaggcccactaaacatgttgctgccacgagaagtggcacccatccwtgccatctgtgggtctgggactggcctaccaagcccactgtagccaacaccaacacaagcacaaaagcttgggtcccagcagattgtcccaccactgctattgctatcacccatgtcacacccactgcccaggggctcaagaacctgctcacctacctggcccattgctgccattcccagtacatgaagaagccacctggatgcccaagaatcagccccattttacccactaatacccgtgccagcgtctgccacagctgtccctattaaggtccaaagcctggcccatctggcatcccagtcctcagcaaaacttcataac

SEQ ID NO: 650250 - DNA, 656 bp, Homo sapiens
atgctatcattgcatctcattgcaaagcagacaatatttatgcttacattctgaaaaaataaaagaaaagactacctttgataaaagatatctgcattagaattactgaattatccaatctgtgtactgytgatcttcatcacttcattctgatttacttttaccctatgattgaacaaatcaaacagttattggtgtaatcctctcccacttttttaatctagtaaaggagaaatggatgccctgcacctcttaactcacaaatatacaaattacatggcattaaattacattgattttgaaataatgttaataatgcgacatgattcatataatttaagaggctaagggatcacattgttggcaacacatgaaaaaattaatgttattattggggtcaaatagaacctccacttgaaagtacctttttccagttgatcttgaattctctatattctctctatgtacaaaaatgaaaatgattaatttgcacatatgctttaggcaacagtagggtatatctcattatataattttcatagcattgatggatgagaaacatagaggtaaaatgccagtagtagtataagagaagtagctttattatagaataaaatttcatatgaatcttgtgaatgaagaattcagtgtgtatg

SEQ ID NO: 650251 - DNA, 656 bp, Homo sapiens
atgctatcattgcatctcattgcaaagcagacaatatttatgcttacattctgaaaaaataaaagaaaagactacctttgataaaagatatctgcattagaattactgaattatccaatctgtgtactgctgatcttcatcacttcattctgatttacttttaccctatgattgaacaaatcaaacagttattggtgtaatcctctcccacttttttaatctagtaaaggagaaatggatgccctgcacctcttaactcacaaatatacaaattacatggcatyaaattacattgattttgaaataatgttaataatgcgacatgattcatataatttaagaggctaagggatcacattgttggcaacacatgaaaaaattaatgttattattggggtcaaatagaacctccacttgaaagtacctttttccagttgatcttgaattctctatattctctctatgtacaaaaatgaaaatgattaatttgcacatatgctttaggcaacagtagggtatatctcattatataattttcatagcattgatggatgagaaacatagaggtaaaatgccagtagtagtataagagaagtagctttattatagaataaaatttcatatgaatcttgtgaatgaagaattcagtgtgtatg

SEQ ID NO: 650252 - DNA, 656 bp, Homo sapiens
atgctatcattgcatctcattgcaaagcagacaatatttatgcttacattctgaaaaaataaaagaaaagactacctttgataaaagatatctgcattagaattactgaattatccaatctgtgtactgctgatcttcatcacttcattctgatttacttttaccctatgattgaacaaatcaaacagttattggtgtaatcctctcccacttttttaatctagtaaaggagaaatggatgccctgcacctcttaactcacaaatatacaaattacatggcattaaattacattgattttgaaataatgttaataatgcgacatgattcatataatttaagaggctaagggatcacattgttggcaacacatgaaaaaattaatgttattattggggtcaaatagaacctccacttgaaagtacctttttccagttgatcttgaattctctatattctctctatgtacaaaaatgaaaatgattaatttgcacatatgctttaggcaacagtagggtatatctcattatataattttcatarcattgatggatgagaaacatagaggtaaaatgccagtagtagtataagagaagtagctttattatagaataaaatttcatatgaatcttgtgaatgaagaattcagtgtgtatg

SEQ ID NO: 650253 - DNA, 605 bp, Homo sapiens
ttaaatattttccccttatgatcagcatgtctcatttcctctgtttgattcttttctactaattctaatagtggtgaagtagaattgaatattctttttaaaaattattgctaattgggtaggcaaaaaataatcattcaaatttttattttttgataagtgggatttaacatttttcaatatgtttgttagctgtttgcctttttcgctttgtgaattacctactgctgtcacttatgatttatttattgaaattttagggtttttcttaccaatctgtgcattctatggatatatcaactccttttcagtcatatttgctgtatattttcccatttatatttgccttttatttcttgattttgcacttttagggaatatggaactttaacagttttatggggttaaatgtattaatcttcaaaaacttcaaaaactcttccaagacttttaagattagtttcataaccttttcccatggcacattttttatgtataattctttatatattcctataggcattatcaagtttgatttctacatataactattatccatctgaaatctatgagctrcagatgtgcacatttataacagcattgtt

SEQ ID NO: 650254 - DNA, 467 bp, Homo sapiens
  misc_feature 130, 133: n = A,T,C or G
caaacaattcagagtgtgaaaaagacattttgtatcatgtttacagggctcttggatgcacttttttaattttgtgttattttttatctttttagtgggtatgagcttagctgtccttaagatctttgantangcatgtggagaccaagccactttagcccggcctagtgcagtctgtaaagaactgaccatggtacgaatattccctccttgactcctgcgatatgctttaacattttaattccgtgcttctcatgctcacaacagtgacttctcatgaacagtaggcatctcacgaagtgcagtatggtttgcactttaattrtaatagctacatttcttgaccacttgggttctttttgtttctcctaacctcacaagttggataatatgtaatgtggggagggtgtttgttctagtggttaaggacacggggaaagaatcctgattttgccacccgcccactc

SEQ ID NO: 650255 - DNA, 578 bp, Homo sapiens
ttaccgtgaagtatataccattttgatgtgtggaatttttaagaaagagaaggaagcataggagcagagccatgaccttagtgtaagatcagggccttcagtaccagataagcaccatttccaaattctaggataacctttggcaaatctctaaattaactgaggccttggtttcttcatcttatgcaagayggaattgattaaaagacaaaccactattttattgaccacgaggaaagaaaaaatagtcatttagaattgcaatatgcattgattataaaatgcattctgattgcagagatgtttaaaatatgaaaaaaagtacatcttagaatcaatgataaatggtataattgagaggtaggggcttagcaaaacagatatttctgatagtgatcctgtctggttgcttgccctttttaagagatgactatttttattgttgacttctttttgcagttgtacttaagcactgaaataactgcagaaaagagaggagcagcggcttttaggaatatgcacttctagtagctgcagactgactctgaatcaattaggtattggaaagttaaattatt

SEQ ID NO: 650256 - DNA, 549 bp, Homo sapiens
ctgcaacttgctagagccattcgtggactattgccttccagatgaaaattaagctggaagataaaatgggaaaagcatcacaaagtgccttgtaatctctggatatatttgggaacagcttaatttccatttgtctaggctttcagatgtttaccactaaactttcatttgacaacaggaaaccagtcttgtgtgataaatagtagacattttttctcaaaagatagtatgcacagtgtccactcttaaccatctgtgtatcctttcaatgtagaatatatgtagaatatttgrtgtgctcttcatgttttggaagatataaagaagaataagttcatattgatgtctccaagaagctcatggtattgtttcttttttctttggacagagaccacatatacagaagaaatatgattatgatcaaagacaagcaagttacaaaagttataataacaaagatgtacctacccactcaactttttttaacctatagtttagagttatatatcatctcttggttcatgaactcaactaatgaaggtagattta

SEQ ID NO: 650257 - DNA, 549 bp, Homo sapiens
ctgcaacttgctagagccattcgtggactattgccttccagatgaaaattaagctggaagataaaatgggaaaagcatcacaaagtgccttgtaatctctggatatatttgggaacagcttaatttccatttgtctaggctttcagatgtttaccactaaactttcatttgacaacaggaaaccagtcttgtgtgataaatagtagacattttttctcaaaagatagtatgcacagtgtccactcttaaccatctgtgtatcctttcaatgtagaatatatgtagaatatttgatgtgctcttcatgttttggaagatataaagaagaataagttcatattgatgtctccaagaagctcatggtattgtttcttttttctttggacagagaccacatatacagaagaaatatgattatgatcaaagacaagcaagttacaaaagttataataacaaagaygtacctacccactcaactttttttaacctatagtttagagttatatatcatctcttggttcatgaactcaactaatgaaggtagattta

SEQ ID NO: 650258 - DNA, 540 bp, Homo sapiens
cattaacaaaaatatcccaacaaattgagaaacctagaaaaaatagattcatttaygcatacatacacactaccaaaattgaaccataaagaaacagaaaacctcaacaaaccattggcaagtaatgagataagagtcataataagatgtcttttatcaaataaaagcccagaatctgacagttttactgctgaattctaccaaacatttaaagaagaactaatatcaattctactcaaactctgttcaaaacatcaagagaaaggaatacttttaaattcattctatcaggcaggcattaccttgatactgaaaccagaaaaggacacaatgaaaaaagaagaactataggccaatatcactgatgaacatagatgcaaatattctcaacagaatactagctaatgacattcaacaacatattaaaaagacattcaccataatcaagtgggattcaacccaggggtaaaaagatggttcaacattcacaagtcaataaatgtgatatatcatattaatagaatcaagaataaaaaccat

SEQ ID NO: 650259 - DNA, 540 bp, Homo sapiens
cattaacaaaaatatcccaacaaattgagaaacctagaaaaaatagattcatttacgcatacatacacactaccaaaattgaaccataaagaaacagaaaacctcaacaaaccattggcaagtaatgagataagagtcataataagatgtcttttatcaaataaaagcccagaatctgacagttttactgctgaattctaccaaacatttaaagaagaactaatatcaattctactcaaactctgttcaaaacatcaagagaaaggaatacttttaaattcmttctatcaggcaggcattaccttgatactgaaaccagaaaaggacacaatgaaaaaagaagaactataggccaatatcactgatgaacatagatgcaaatattctcaacagaatactagctaatgacattcaacaacatattaaaaagacattcaccataatcaagtgggattcaacccaggggtaaaaagatggttcaacattcacaagtcaataaatgtgatatatcatattaatagaatcaagaataaaaaccat

SEQ ID NO: 650260 - DNA, 587 bp, Homo sapiens
ggatacatgttgaacttagttgaatataaaaatctagataaaaagtgtgtttaccatactgtataattccatttacatgaagcatccagaaaagataaatgtatagggacaaaaagtagattmatgtttgcaaggggctggggctggaagctggtagtgactgctaatgggcatgaggaatcttacagtgatggaaatgctctaaagttggattgtagagatggctgcacaactcagtaaatgtactaaaaatcttttaactttaagtcaaaacagatacattctatagtatgtaaattatatttcaacaaagctgttttaataaaaaaggaaaaatgtttactatatcggcttagaaacatgcctcatttctaggaaataaaagaggtgagagatgatttactttgagaaaagacattgtgtcacctatgaaattttattaggcacagagtcatattttaaggtagatagttctgtactgctgaaatagtaattttaatgtctttatattgccacatgttaagaccataatgtagttataaatggaaatgtttacacctgaagtattttcaaattaaaatttaatt

SEQ ID NO: 650261 - DNA, 587 bp, Homo sapiens
ggatacatgttgaacttagttgaatataaaaatctagataaaaagtgtgtttaccatactgtataattccatttacatgaagcatccagaaaagataaatgtatagggacaaaaagtagattaatgtttgcaaggggctggggctggaagctggtagtgactgctaatgggcatgaggaatcttacagtgatggaaatgctctaaagttggattgtagagatggctgcacaactcagtaaatgtactaaaaatcttttaactttaagtcaaaacagatacattctatagtatgtaaattatatttcaacaaagctgttttaataaaaaaggaaaaatgtttactatatcggcttagaaacatgcctcatttctaggaaataaaagaggtgagagatgatttactttgagaaaagacattgtgtcacctatgaaattttattaggcacagagtcatattttaaggtagatagttctgtactgctgaaatagtaattttaatgtctttatrttgccacatgttaagaccataatgtagttataaatggaaatgtttacacctgaagtattttcaaattaaaatttaatt

SEQ ID NO: 650262 - DNA, 398 bp, Homo sapiens
acaatgtacagaactcaactttctactaaagagtcaaaggctaaatttttggctaagaaattatgcttcttatatgataaaaatcatacatgccaaaacttaccatactttattaaacaacataatgtaaggtctgattcaacagaaatattgcagaatggtgattttttaaaatatgtgtaagtatatgtttgttttcaaaaatattggaaataactatgatgggactgtaagttcaaacagtttgagctaagcagataaacttgcatgcatgaaaacacattaaacagactcatttggctgggaatattcrttgcaaatctcaaggctagatgtgtttttgtggcttgtctcagtcattgcttccctcccattgtattcccattctatcattaaat

SEQ ID NO: 650263 - DNA, 398 bp, Homo sapiens
acaatgtacagaactcaactttctactaaagagtcaaaggctaaatttttggctaagaaattatgcttcttatatgataaaaatcatacatgccaaaacttaccatactttattaaacaacataatgtaaggtctgattcaacagaaatattgcagaatggtgattttttaaaatatgtgtaagtatatgtttgttttcaaaaatattggaaataactatgatgggactgtaagttcaaacagtttgagctaagcagataaacttgcatgcatgaaaacacattaaacagactcatttggctgggaatattcgttgcaamtctcaaggctagatgtgtttttgtggcttgtctcagtcattgcttccctcccattgtattcccattctatcattaaat

SEQ ID NO: 650264 - DNA, 554 bp, Homo sapiens
ctgacagtgaggcttaatgcaggtaaccacacttcacatcctgtgccgggtttgaagtgctctggtgatctgcaaagagagcctcaacacagccaactcactgccaaaaaagaaattctcactcagaatattggccaaacaacatttttatttgaaagaaaccargccaaataaaaacacatagtattttcttctcatgcctttccttgcctgggatatttatttatttacttttctttcattctcctgaccacctctgacattgtttttattttgaggagatttaaaaataacttccctgtactcattcatcttgctctcctgagatagagggaattttcacattttccagccagttttaatgtagcagaaacaatcagaggtgctgctgtgacttttggtgtattagaaaaggggagggctggggcaggtgggcttggccaataaaatacagctggggaacaggaaactgcagagagatttcccagacttggcctgcgctgcagcccgctgtgctctcctgtgaagctgcaccaggcctctgggctgaattc

SEQ ID NO: 650265 - DNA, 624 bp, Homo sapiens
atttgtaattcctgtggattggtatgggttgaatatatactacacacaaagcactgtgtaagacttgggaaatatttagaacagtggaagacttaatctttgtccatagaaaatgtaatagagaaaacggatctttgataagtgaacctgtttgagtcctaggagraagagacaccactgtgggatttgatgtccaagagatttgctggtgaacatctcttgtgaaggacagaagaggaacaggcagaatcattaggaagtcttcaggctacagtgcaggtgcagcactctgaagaataggaggaaggaaagatgggaaccgaagagtctcaaaccacagtgttgtcgactaacaaaaaatgaaatcttgcttgtaaagagttaaggttgttttattcagaagtcttgctgaggactgtcacatgaggactaaaccgtgggagaaggctttcagggaggctctgccataccgctccagcacagtgttttagctcacactgtatctacaggtagcagaggtttccatgcatgcaaaatcatgttaaagtttgggtgtcagaggatattcagttataggttactaaaatacatttggttatagattgcagaagcataattgctaag

SEQ ID NO: 650266 - DNA, 624 bp, Homo sapiens
atttgtaattcctgtggattggtatgggttgaatatatactacacacaaagcactgtgtaagacttgggaaatatttagaacagtggaagacttaatctttgtccatagaaaatgtaatagagaaaacggatctttgataagtgaacctgtttgagtcctaggaggaagagacaccactgtgggatttgatgtccaagagatttgctggtgaacatctcttgtgaaggacagaagaggaacaggcagaatcattaggaagtcttcaggctacagtgcaggtgcagcactctgaagaataggaggaaggaaagatgggaaccgaagagtctcaaaccacagtgttgtcgactaacaaaaaatgaaatcwtgcttgtaaagagttaaggttgttttattcagaagtcttgctgaggactgtcacatgaggactaaaccgtgggagaaggctttcagggaggctctgccataccgctccagcacagtgttttagctcacactgtatctacaggtagcagaggtttccatgcatgcaaaatcatgttaaagtttgggtgtcagaggatattcagttataggttactaaaatacatttggttatagattgcagaagcataattgctaag

SEQ ID NO: 650267 - DNA, 624 bp, Homo sapiens
atttgtaattcctgtggattggtatgggttgaatatatactacacacaaagcactgtgtaagacttgggaaatatttagaacagtggaagacttaatctttgtccatagaaaatgtaatagagaaaacggatctttgataagtgaacctgtttgagtcctaggaggaagagacaccactgtgggatttgatgtccaagagatttgctggtgaacatctcttgtgaaggacagaagaggaacaggcagaatcattaggaagtcttcaggctacagtgcaggtgcagcactctgaagaataggaggaaggaaagatgggaaccgaagagtctcaaaccacagtgttgtcgactaacaaaaaatgaaatcttgcttgtaargagttaaggttgttttattcagaagtcttgctgaggactgtcacatgaggactaaaccgtgggagaaggctttcagggaggctctgccataccgctccagcacagtgttttagctcacactgtatctacaggtagcagaggtttccatgcatgcaaaatcatgttaaagtttgggtgtcagaggatattcagttataggttactaaaatacatttggttatagattgcagaagcataattgctaag

SEQ ID NO: 650268 - DNA, 586 bp, Homo sapiens
atgcctgagaatgaattttcaaggatacattgtaatacaccctggcttaaagctggacatggaatacgttaatgcatcttaccaactatagttaaattgtattattttatttatagttgaagatttgtgtatatttttaagattaatatataaatttttccttctgtgtcctctaaagccttataagtaatttttaaaagtcagcagtggatcccaatgtaacatatattagctaaaataaaagtcaatttttatgtaacgttacaaggaaagagtaaactacatataactattacaaaattttataactactgtaattwttattaataaaagtaacaatagattttttaaaagaaaaactttgattcaataacaactggacatctacctaccaaaattaaataaataaatttagatattgacaatagacctcttacaaacagtaactaaaaatggctcatagacctaaatatgaaatgcgagactatataaccacacaaggatgacaaaggaggaaactcagatggctttaggtttggcaatggtttttacatacaacatcaaaggtgtgatccatgaaaaaatc

SEQ ID NO: 650269 - DNA, 608 bp, Homo sapiens
tcagtagacttcacatatctgaggagaaatcagtgagcttgaaaatatatcaatagaaatttcccacattgaaaggaaaatagaaaaaaaaactttaaaaaagaacagaatagcacataaaagtggagcaatcttaaaaggcataacaaaacatatgattaacaggaaaagttgaagagggaatggagaacagtgcaaaagaaatattcaaagtaataatagccaaaaactttcttaaataaaagacagacaccactaggccggccgaagccagatggtgagcataaagttcaatcccttcatcaccttagaccacagccaaaactgcaaatgtcacttcactggcccctcacatgtgcacaggaacatcttgccgtccctgctctcccagcatgatatcccagcaaggagctgaagcagaagcacagtgtccactccatgcccatcctcaaggataaagaggtccaggtggttggaagacactacaaaggtcagcaaatcagcaaggtggtccagatgtacataaataaatgtcatctacacggagtgggtgcaktgtgagaagaaccaatgggaccgccgtctttgtgggcattcgcccgagccag

SEQ ID NO: 650270 - DNA, 582 bp, Homo sapiens
tcccatcttctaagactttaaaggacttgcatctacttttgttaatctacaagcattcttggtaaatatcagatacacaatactagcttttctcatacgtcacaatggaagaaaaggtaaaatcaagactcatgcatttaacattaatctctaggaaaaaaaccaggatggctaattaagcagatgacgtgaaaaggagaaaagaaagaaaagatgactatactaggcaaaacagctttactaagaacataaactaagcgaacatagttgtttttgttgatcaggagctaygctggtaaatgaaagaaatgtgagtgtgggctccgcctgtgtagagaaaagtgtgtgcacatacggccccttgattctgcaagacagtcatgctcagctaagatggggaaatacaaattaaagaaagagttatttgtgtctggctgcaaggccatctctcaatattttgattactacatgtatgtccaccagctgatgaagctgtctagtcgtgtgtcacagtggctaccatttgttttgccctgttcaaaatttctatcagtgacttggttgacaatgccatgttttagt

SEQ ID NO: 650271 - DNA, 582 bp, Homo sapiens
tcccatcttctaagactttaaaggacttgcatctacttttgttaatctacaagcattcttggtaaatatcagatacacaatactagcttttctcatacgtcacaatggaagaaaaggtaaaatcaagactcatgcatttaacattaatctctaggaaaaaaaccaggatggctaattaagcagatgacgtgaaaaggagaaaagaaagaaaagatgactatactaggcaaaacagctttactaagaacataaactaagcgaacatagttgtttttgttgatcaggagctatgctggtaaatgaaagaaatgtgagtgtgggctccgcctgtgtagagaaaagtgtgtgcacatacggccccttgattctgcaagacagtcatgctcagctaagatgggraaatacaaattaaagaaagagttatttgtgtctggctgcaaggccatctctcaatattttgattactacatgtatgtccaccagctgatgaagctgtctagtcgtgtgtcacagtggctaccatttgttttgccctgttcaaaatttctatcagtgacttggttgacaatgccatgttttagt

SEQ ID NO: 650272 - DNA, 589 bp, Homo sapiens
atcataataaatctcactatatatacatatctctcatatatatgtatatctcatataaatatatatgtatatctcatataaatatatttgagagagagatatatatatagtgagatttattatgatatatgtgagagatatatatatctacacacaccagttggtctgcttctctggagaactctgactaatacgtgggccaataattaaatcaaaaagtactgcccyaactatagtgacaacagtatttgaaaatagatttttctatttcgatttatgttgctttgcaatgggctgcagtgctcagcccaggattcccagaatttaaaaacttaactggtccatcttggtatctgcttttgaaacaacaggcttgggtatatattgtccaatatagcaggcctcatgtgctccttaaaccagggctacttcaaatagagttgccctttacagttggataatggttaactttaaatagcaagatgtatctagcaagagggtttctgaaaacccctgggtttctttcttatattgtcctctatttcctaaatttcattttttaacttactttagcttggagacagagttt

SEQ ID NO: 650273 - DNA, 595 bp, Homo sapiens
gaagtaattgacagtccccacaagagccacatggcatatagtcagacaacatagagttcttccaaaaaggagggcagctgggaaaaattaattattttttaaaacaatacatttctatcaaatataatatttaacaagttgccttcacattctcctttaagccttaataattttgttataaaaacatattagaaatggtgagattgattcccaaaagacttaaatggtttacaaagttaacatacatactaaatgccagagattagactagaatttaggatttcacactttgagactcgtgttctctctgcatttcaaattaggtgtttgcatcacttattcggactgtcaggactattcwaagtcatgcattcataaatcttttaatattgggagcttaatactaattatacaaaaaaatactgtacaaagagaaacagaataagttgagctgaatgacagaaggttgcttactctttctaacatcaacctcccactaatgttttctctatatttcaaccagtcccttctaatgctaaacgacctggatttcaaaatgaatttcctctctcataagatttgtaatagagagtat

SEQ ID NO: 650274 - DNA, 652 bp, Homo sapiens
attagacattggagctctctgtgtcaggtctttagactttctttttgactaagcagcccttccccatccccacaggttttcaggcctttggccttagactgaattatgctattggctttcctgactctcttgtttgcagatggcatatcatggaacttcttggtcataataattttatgagccaattcccataatatatctatcccctcatatatatttttatttgttatatatcttaacatctctttctatatatctagcaatttaaaatatctatcgatctgtatatctatctatctatctatctctctatcatctaaccatctatctatctctttatcaatccattctattggtcctgtaactctagagaaccctgactaagagagagagacataaacattcagaccatagcatatttgttctctaatttcttttcctttgtcccccaacccctatagctctcagaatacagtagctgtcacwgtcggtaagtcaataaagcctttaataataatgacatttttgtagttatttgatttattgaattcttgtacctaatatggtgcagaacaatgtgatactatatattataattatgtaagataattctaagaaggcatgtagcattttaaatgaataatatgtatta

SEQ ID NO: 650275 - DNA, 634 bp, Homo sapiens
attaatatggattttaacaaagatattggcaaatgtattttttaaaaacaaaaatctcattaccttaacgattgtattgagcaattcactttccaagatgtcatatatttgagattacctattcttagcacagttcttccagtctacctcagaaataaaataaaaactttttatcttattttctaaaatctgtattattcttgtgacygttatctgctcaagattacatcattttttctgcataaaagccagtttccagtaagtatacggaacttagtattaaagctagtcatttcacattacatttgaattatgcttaatttctaaagtatttcaacatattatctctcttgatattataaatatatcaagggttagctcagattgttatcactctacaatggcagaatcacgactccaagtttttattgtctggtcatgtttactattttcacaattgcaaataatgcctcaaatactagtagatttgcacatacattacagaaacaactatgataaagactgggacgaattggaataattctaatgctgtaagttttaaataataaaatttgttattttattataaaaacaaaggagtctttcttacatatagagtattgttatgaacaca

SEQ ID NO: 650276 - DNA, 634 bp, Homo sapiens
attaatatggattttaacaaagatattggcaaatgtattttttaaaaacaaaaatctcattaccttaacgattgtattgagcaattcactttccaagatgtcatatatttgagattacctattcttagcacagttcttccagtctacctcagaaataaaataaaaactttttatcttattttctaaaatctgtattattcttgtgactgttatctgctcaagattacatcattttttctgcataaaagccagtttccagtaagtatacggaacttagtattaaagctagtcatttcacattacatttgaattatgcttaatttctaaagtatttcaacatattatctctcttgatattataaatatatcaagggttagctcagattgttatcactctacaatggcagaatcacgactccaagtttttattgtctggtcatgtttactattttcacaattgcaaataatgcctmaaatactagtagatttgcacatacattacagaaacaactatgataaagactgggacgaattggaataattctaatgctgtaagttttaaataataaaatttgttattttattataaaaacaaaggagtctttcttacatatagagtattgttatgaacaca

SEQ ID NO: 650277 - DNA, 634 bp, Homo sapiens
attaatatggattttaacaaagatattggcaaatgtattttttaaaaacaaaaatctcattaccttaacgattgtattgagcaattcactttccaagatgtcatatatttgagattacctattcttagcacagttcttccagtctacctcagaaataaaataaaaactttttatcttattttctaaaatctgtattattcttgtgactgttatctgctcaagattacatcattttttctgcataaaagccagtttccagtaagtatacggaacttagtattaaagctagtcatttcacattacatttgaattatgcttaatttctaaagtatttcaacatattatctctcttgatattataaatatatcaagggttagctcagattgttatcactctacaatggcagaatcacgactccaagtttttattgtctggtcatgtttactattttcacaattgcaaataatgcctcaaatactagtagatttgcacatacattacagaaacaactatgataaagamtgggacgaattggaataattctaatgctgtaagttttaaataataaaatttgttattttattataaaaacaaaggagtctttcttacatatagagtattgttatgaacaca

SEQ ID NO: 650278 - DNA, 524 bp, Homo sapiens
ggctcacgcctgtaatctcagcactttgggagtccaaggctggaggatcacttgagtccaggagttggagatgagcctgggcaacagagtaagacctcatctccacaaaaaaataaacaaaattagttgttttcttccttttaaaaatstacgtttttttctacaggatccaacaaagtgaagaaacaatcttttatcatttaaaaatgtaacccatcctgcatgtgagattttgggtggtttttgtttgtatgtttaatattttaacttttagtaagtatatataccatatttatagttagaacaaatgacacagaatgatttttaattggccccaaaacatttttctagtttgtcttcatggcaaaaaaaaaaaaaaaaaaaaagttagtagtccaaaaaattaagccttgaagtcatcatatctactattataattaatcaaataagcagttcacatataacaactgtttctggctcaaaattatacttttttaaacaattgtaataactagcaatccatg

SEQ ID NO: 650279 - DNA, 589 bp, Homo sapiens
aaaaaagtagaaagacatcacataaacaacctaatgttgcatctcaaataattagaaaagcaaaagcaaaccaaacccaaaattagtggaagaaaataaataatagagatgaaagcagaaataaatgaaattgaaacaaaaaaatacaaaagatcaatgaattgaaagtggatttttgtaaaaaacagataaacaaaattgacaaacctttactcagagtaggaaaaaagtaagaaagtccaaataaaatcagagatggaaagggagacataaaactgataccacagaaattcaaaggatcattacaggctactatgagcaactatatgccaataaattgaaaaatctagaataaacagataagttcctagacacatacaacctatcaagattgagccatgaagaaatccaaaacctgaatagaccaatagcaagtaatgagatcgaagcctaataaaatgtctctcagcagcgaaaagcctggaacccaaaggcttcactgctgaattttaccaaacaattaaaaaactwataccaattctactcaaattgctttaaaaaatacaagagaagtaaatacttccaaatt

SEQ ID NO: 650280 - DNA, 474 bp, Homo sapiens
ttctgatgcccactcaagtttccaaatcactgttctaatgggttatagttttgtgggctctgataagctcaacttggaatgtattgacaatttgtttttcccaaggtttttgtgttagtccgttttcacactgctgatagagacatacctgagactgggcaatttacaagggaaagaggtttaataaacttacagttccacatgactgggaaggcctcacaatcatggtrgaaagcaaggaggagcaagtgacgtcttacatggatggccacaggcaaaaagaacttgtgtgggaaaactccttcttataaaaccatcaggtctcatgagacttattcactaccacaaaaacagcacaggaaagatctgccccccatgattcagttatctcctaccaggtctctcctacaacatgtgggaattatggaggctacaatatgagatttgggtagggacacagaaccaaaccatatc

SEQ ID NO: 650281 - DNA, 590 bp, Homo sapiens
actatagtctccacaataggtatttttgatggtgacaaaagcaaaaatgattaaatataacctcgtaactctctcacatgcaggccttcttctatagaaaagaagagggttctttattgtgtttttttcctgagtgtacaaacatcttcttttttctttcgttctttcaaaactttttcagaaggaaggaattatctgtcccctgattagaagcctaaatgagctttttctcctctttctacataaagtttatgactctacacacggaaatatactgccatattaactcagtgtatccaaaacaccttaataactccagctatggcccaagctagttacttcagtgaaaaccaccctgggtgagaggatctatgtcttcttacacagggcctagtaggtgaaagcagattattgctgatttcctcaaatcccatcccttggccttttatctctccaactgaaatgggaatctcagaaaaattgacctttaaatratttggcttctgtctgaaacatgggtttaaagatgttaataaaagcagaaatgtcttatgacctataagaaataaactcttttgaacttaaggtga

SEQ ID NO: 650282 - DNA, 422 bp, Homo sapiens
gttttcaactctgtttggcctacattttctgcttgtgcagggaaggtagaaatttcccaggtttttactgaacatgcacacagccttgacatacacagtttgcaaattctcagaaatatgttgaagcttttcaaagcccatattccccaaagcatctcattcccagtactttctctcaagatttttgtttagtctattgttttccccagtgttcaggcagcagtatttataatgtttttcaataaatgttttctaacaccggcccacaccaagtagcagctttaccactgcrtgaagtccagattaggtgaaaaaacaaggcttttgagaatatatttgagggagtcaacaggcagatcaatttttcatgaatgaggtccattctgtttttctggcattggtattaagaatctgggcattat

SEQ ID NO: 650283 - DNA, 600 bp, Homo sapiens
gtggttggtataatttcgagttttttgaatttgctgaatattgttttatggccaatcacatggttgattttagagtgtgcaccatgtgcacatgagaagaatgtgtattctgttgttgggtggactgttctgtagatgtcttttaggtccatttagtcaagtgttgagttagggcctacatatctttgttagttttctctctcaatgatctgtcaaatgctgtcagtgaggtgttgaagtctcccactactactgtgtggttatctaagtctttttgtaggtgcctaataacttggtttatgaatttgygcacacttgtcttgggtgcatatatatttaagatagctaagtcttcttgttgaattgaaccctttaccattatgtaatgcccttctttgtctatctctatctttgttggcttaaagtctgttttgtctgaaattagaatggcaacccctgcttttttgtttcccatttgcttggcagatctttctttgagtctttactttgagcctatgtgtgatgaatctcacatgcaatgacactgaagacagcatacagttggggcttgcttcttcatccaacttgccactttgtgcc

SEQ ID NO: 650284 - DNA, 490 bp, Homo sapiens
tgagagtctccatgtgagagcagtttttgccaatctcacatcaggtttaagatactaagggcattttcaaccctttctgamcccttttctaggttcaaggatggaaggaacactgcaagtggttctgctcttccctccccccattgatatggacaaaatcagccagatagggcttaggagaggtaagagttctcagaacctagaggtgtttgtcagctacatctccataatggggatatagcatctaagggaaagaaacaatattacatctttaggggccaatttatgcaccaaatgttcagggagaggcaacgtggttgtcaaaaccatggtctccgaagtgggcctgcctaggtttaggtctcagctctgtcctttctggtaaccactctggaaatctgctccccatttatgataagggatgattttgcagaaggtatctaataagatattgtgatgagcaaacaggagagcagttaagaagcctaga

SEQ ID NO: 650285 - DNA, 628 bp, Homo sapiens
tgctcattgattgtatttatctttgctgcccttcgtctccttgttctctagagctctttgctcaccatttcactgccacacaatgcccttgtcctcacaccaatttccccttatcaaaacttactctcaaaaaataatctgatactcatcatattagaactgaataaaagaaaaaaaaactctacctatgagtcattctgtgaggaatcaacgttttggcagacatcamagctttaatataaagagtaaaggtctaaggtaagaacaaattttgtgaaattcattatttcagcagccaatgccttcaatgtgttcaaattcattctatatgttaatggaaacagaataacatggagcttgccctagcagtatttacagcctaacaatagacatgaatacaaagcacaccgccacactgaggtgtgaaaaatgatacaagagaagtatagaaacatgcagaagagtcagtaactcactctccctagagaagttggagactgtcagattgttggtcttaaaggaaatataggtactttgccaagagaaggaagataaatgtttatcctgctgaggaaagagaatgtgaaaagtgattatggcatgaaaaacatgccatgctggagacctg

SEQ ID NO: 650286 - DNA, 628 bp, Homo sapiens
tgctcattgattgtatttatctttgctgcccttcgtctccttgttctctagagctctttgctcaccatttcactgccacacaatgcccttgtcctcacaccaatttccccttatcaaaacttactctcaaaaaataatctgatactcatcatattagaactgaataaaagaaaaaaaaactctacctatgagtcattctgtgaggaatcaacgttttggcagacatcacagctttaatataaagagtaaaggtctaaggtaagaacaaattttgtgaaattcattatttcagcagccaatgccttcaatgtgttcaaattcattctatatgttaatggaaacagaayaacatggagcttgccctagcagtatttacagcctaacaatagacatgaatacaaagcacaccgccacactgaggtgtgaaaaatgatacaagagaagtatagaaacatgcagaagagtcagtaactcactctccctagagaagttggagactgtcagattgttggtcttaaaggaaatataggtactttgccaagagaaggaagataaatgtttatcctgctgaggaaagagaatgtgaaaagtgattatggcatgaaaaacatgccatgctggagacctg

SEQ ID NO: 650287 - DNA, 589 bp, Homo sapiens
cagcacaggggcacaattaaaataaataagaggtttaaggaatgtaaagaaattaatcaaactgttcattgcagggcacattataatctatattaggcaaccaaaaagccacaaattattgaaagtaacaagtttagcaagattgtagacaaaaaatcaaatctaaaatcaaattatatttgattttatttatatatatatatatatatatagccttacgcctacaggcaagagatggacagatacgtagttttaaaaacatgccattcgaaacatcggtagacatacttgtaataggtaacataatagatgcaaacctttacagggaaacttaaaagaacttacaaaactttactgaagaatgaatgcctaaacaaatagagttgttgcattcatgtttagtgattccaaattgtaaagaccgatcacaattaaccatgtagtcaatatattctcartaaaacccatatcaagattttttatttgaatttagcatgctgattctgaaatttaaatttcagcacaattgagaaaatcaacataagatttgccttatcagagatcaatatttattataaagctttaataa

SEQ ID NO: 650288 - DNA, 559 bp, Homo sapiens
gggttgtttgaggagactgaggctgcagtgcgctatcattgcaccactgcactccagcctgggtgatagtgaaagtctgtatctaaataaataaataaaaacaaaacaggactttattttcccagggactatccctcatcactgccaagtttggggacattagggatcctgtgcttacttgcaaaagaattttttctctgtcctccagggaaacttttttttttttaatgacattaattttttcatttattcctgacaaaacaatgtgagaaaataaaacaacatttgtcactaggattggctgggtgtcctttttaattaactggattaaaaagataatcatctgtaattgtagagaatgataaaaatgctgaagaccctttgaagtccttcattcgttaaatgttcttattaccagtacccactaacatgccctygctgacagttcacaaggattgcaagctcgttatatctactgaattacagagctaagctacaccttatatgagatccagttcaattctctccatctttcttaatgggaaagctggggattaaa

SEQ ID NO: 650289 - DNA, 576 bp, Homo sapiens
ttctgtatttgcactttccttgagaacctcgggtgtgtactgcaattagtctaattattcaacttgaagctgtcacctcctcctttgcctgaagcaaagcagcaggaagtacaaatcacactcaacagcctgacaccaggagaaggaaacaaatacctccgcatggaatttgcacatctgacagtgtgtcagctgaaatggaaaaaagatagattttattttggagaatcctggaactccttcaataattaggaccgcaaaacatctgcatctggtttaccagtggaaagaggctgcagagacacatcctgattggctcctcttgatggctatggacactycatacagtgcctggcatatattagatgctcaataattgtttgctgagcaaattaatcaatttttgaataaatgtgtattgctaaaaatcaataaggctttcaagtaaaaggtttgagagacatcatccccattcttacaacaacaaataaaagcttggcaaagtaaaaatgaatgtgttttattggcttcatcagtgaactgaggttgcaagaaaaagaggcatcttgacatctg

SEQ ID NO: 650290 - DNA, 584 bp, Homo sapiens
aacactttagttttctccaaagagaaaattaaatggctcttatcaattacctttatcaactaatttgtctaaatatctgcaagcagacctgaagtcattgatagggtctgtgatttgacggggaagtagggaaggtgatccattagctgtatcattagtattttccaagtgcacgtttctatagaagcacattctggtattgtccactcacagactcggaacaagcacaatacatcagagcaagactgcctttgaaacatttttcactttatttttcctacattacatcattacttttttcttacaaaggaaactaaaatactttttaaccttcctaaccagcttgacttcctcacttccaatgtatgttatcttgttgagtgcatcctctcagacctctttctgtgcattatatatgcacatacatgtccacgccaatattcttgccattatycaggtcacctaaagaatgaacagccttgggcaattcaaattttgcacccagtcacatatcttattttatctaagtttatttaagtgaagcataacacacagttcaatgagaaagaaaataagcgacagag

SEQ ID NO: 650291 - DNA, 591 bp, Homo sapiens
taaattcttatatatatctacacagtattttgcccaccactttaggggtatcccaacactataaaaaccaaagattaggcttaatccttgaagaatttacctcaaatatactgtttccaaggaaatcctctggaaaaagaatgagataaattgctctatttgccctttataatggacaaacttatttttatttttacagtaaataatcgaatatggtttaattacttgagcctcaacaacaacaaagaagaacataggttcctggctttttttgtttgttttttgagactgaaacttttggggaaactctgtgtatagtcacatagaatacagtgcaaataaagtaataacttgaccccaaacagaaacttcaatrtaggaatcagttatcgttattgcataatggtgccactggttatgattgtctttgttttgccctcttaagtttatgttaattacatttgctcaagacctcccagatattgacattatacacaaattgaaggaaattgcattttctccattgttgtaattcaggctgtctaatggaaataaaatgtaagctacattttgaatttttaattttctagc

SEQ ID NO: 650292 - DNA, 619 bp, Homo sapiens
cagatttctctgggttccccttgtccaaaaggggatccgttcagtcagttgggggcttagcattttatttgtagtttacatagtttatatatgaatatttatatataataaatgttatttataatagatgttatttataatatataaatatttttatataacaaataaaaacataatatatattatatataacatgtataatatagttccaccactttggacttttcctaaaacctcaagagaaaacttcattatttgttagatcatggtttttctgaatcacatacattctaaacctgcaattgaaatcattactggatattttctaatttagttcattgttttgaatctaactatcaagtaagaaaattaattttcaagtatcttcacaattttgtctgttataaaggtgtaagtcatttatcacaatttctcagttgtctgtgctggtctgaaaaaaaaggctagattattgatccaatcataatttaaaccaayatttccaaagcctttctaagttgttgttttggtcaagttgttattatataaaatagctggtttagttttgttattggaaaggggtcccaatccaggccccaagagagggttcttggatctc

SEQ ID NO: 650293 - DNA, 584 bp, Homo sapiens
tagagatttttttacctacctggttagctgtattcttaggcattttattgttttgggggctattgtgaatgagattgtattgatttggttctcagcttggacgttgtcagtgtataggaatgctaccaattttcatatactgattttgtactctgaaactttgctgaagttgtttattagacctaggagttcttgggcaaaaactatgaggtttctaggtatagaatcctattgtctgcaaacatagatagtttgacttcttctctccctatttggatgccttttatttatttcttttgcctgattgttctgactaggtcttccaccactatattgaaaaggaacagtgagaatgggcattcttgtcttgttctgattttcaaggggaatgctcccagctttttcccattctgtatgatrttggcttcaggtttctcattgatggctcttattattttgagatatgctcccccattgcctacattgttgagagcttttaacaacaagggatgttaaattttatcaaaagccttttctacatctattgaggtgatcatgtggttttttagtctttttatgtgatg

SEQ ID NO: 650294 - DNA, 546 bp, Homo sapiens
acatctgcagggtgggagggaggggagaagaaagatgaacagccagggctggcaacttcgaagagacctctatagacgtgaccttgaygctgtggagcctgagtcccatctggtgtgttaacccatccactcaaccagacagaatgaaaaacaaccttctaaagtgatggaaatgacaggaagttattttgtcctttccccccacttataatggaattttaatatggaatagttgtttctttttcaaatagagcagagaccccagtagatagttttgatttttcaaacatccagggtcacttccatcattcaactggattttgtggcttgccttctctggataatggaaatctgttctagtcctttttcatcacctgtgtctgctcttcctgtttaatttgggaaagtctgttggagcagttaaaaagaaagacaatactgagagcacctaggtttgaacccccagctctggcacttctttgctgtgaatttaagacatttattctcacttaacctcctcatctgtaaaattgggatatccacagt

SEQ ID NO: 650295 - DNA, 576 bp, Homo sapiens
gctgcctccttatttctgcacagtgggtcagaacctctgctggcagtttaaaatgttttaaaaacagtaggacagcccccagatcaatccatccatcaatcaatctatcatggaatttacayagcatccctagggaacaactgtctagagtgctttacaaaacacaataaactctgtgaaggccaaaccccaaatcaaccctagtattaatacgagtctcttctggtaaggaatcagtttaatttcaggggaagaaattataagaccttctcatctaaaacattctctcattatagtcaataatgtattagagattaaagtgataaaaataatacagcttaaaatcatccccctgaataataaattggacccttctgcttttacttttccattttctcctctttttcttccttttcatcattttctctttttctttctacccctatctcctattcatctcctccatcatcagtagtataaagaactatgtttacctctataaccctcggtatctatgaaaaggctcttcaaagcaaagctgaaaattaatatgaaaggaagatatccatgacatct

SEQ ID NO: 650296 - DNA, 568 bp, Homo sapiens
tgctgtctgggacttaactttcattcagcctgctgtgaagttatgggaggatatctttctctaaataatttatttccaaaccccctaattagaagatgtgaggcatctttagaaacatgcccacaagcactagagggcaatgctggacagatattacygagatccaagcaaatactagtgagtatgactggatactcactggtttcaaatgaacaatacttcagacgcaactttgaatattctgtgagtagaatgaagtttccagtgattgctttccagcctgataacaggaacagacaaagagggcaaggttttcttggtagcaatcaattctgcttcctggcttcatcagggcattttgcccagattgaagctgggccagtttaagagcaggttggcagagtgaggagataatagccaatgtcaaagccaagaaaaagtttttggaacaggattcagaatcaaaatttagactctgtagaagaaagaaatatcaaagttgctcactcaattgtgtctcctgatctcatataatgtaatgggcccagggagttatatgagggtgaga

SEQ ID NO: 650297 - DNA, 542 bp, Homo sapiens
acctttagccttgaaacttgyccattccgaagatgcttaagttagatttgagtgagagatttcaaattaggataatagctacaccaaaagattcagaaaactagttttattgactctaaagagcagaatcaataattcagtcaagattccttacaagctttattcccccagcaccaaactaggtgctgtcagagcagctattatttttcaaaaatgatatatatgcttgcaccaagcatgggcctccttatggatgtggatggaaggctaatttgtgatatgtaatttgtccctggccacaggaaaggctgtaactgtccatgggctgtgcaattgtttttaaatatcatcttctcctctcagcagctcagcctagagtcatcccatccccagtagccacatgactccacagctcacctggaattgtcactcttctcatgactgtgttgctcagctgggtgctaagtttcattatctttgcccttttcacccattttctgcttctgtttgacacaccatgtggagagctgataagcgacatc

SEQ ID NO: 650298 - DNA, 647 bp, Homo sapiens
agtggtttctgacaaaagtctgtccaggtgtgttgacagaattcagtctctcttcctgcaayatgagttcagttaatgaaaactcaaagaagggacaagaggtaattggtttttttctttggcaggtccagacctcaggcagataaaagaatttcagaggacaacttcatcccgtgctttgggtgggggagggaaaggcataataagtcagagaaaccttgagacttctgcagttcaaggtgtcatcaaagcactgtatttggggtattggtttctgagccccaaaagccagcagtctgccaaacatgcccatatacttggttcccagtttgggcttgtagttttagcctcactacagctacacgcatgtacaatcagtctatattcctcttgctaatgaagagccagacaacatcatctgaaattgttcttctttcaaaggcacagcttttagtgtttctcatggtatttatctttaatctctattcaataaatatttttgaaggaatgaatcactggctttcactcacaaagcctttacactcctccctctgtcacagttctaagacttccttttttatggatttttttttccagatattaattccattttgaacctggctgagggatgattctagattttgaaa

SEQ ID NO: 650299 - DNA, 632 bp, Homo sapiens
gtaatttgagactatgtagatatctctgttcttcatcaaactcaatttattcatttacttgatttgatatttacttgtggtttatttcatttaataggttataatttgacaattttttttaacaatttttttctttttagaaatgttttattttgacaattttagacttatagaaaaatagtaagaaaactacaaaacattcttggatactattccccaaatgtgaacattttactgtatttgctttatcctttctcccccttttcctcttctctttctaggtaaatataaatgtaggtgcataatatagactttttctgaatggtttataagttgcaggtatgatgcctctttatttctaaataattttatgtgtgtctcctaaaaacaakgcattatcttgcataattatagtataactatcaaaatcaggaaattaaaaatggtttactgttactatctcaaccataaaccttattttacatatttcagttgactcaataatattttttatagccaaataatttaagatgggtgatgttacaatccatgatgttgactttcataatccatgatgttgagaggattcagcatttttacgttgatcttcctcatctctgtggcctatgtac

SEQ ID NO: 650300 - DNA, 632 bp, Homo sapiens
gtaatttgagactatgtagatatctctgttcttcatcaaactcaatttattcatttacttgatttgatatttacttgtggtttatttcatttaataggttataatttgacaattttttttaacaatttttttctttttagaaatgttttattttgacaattttagacttatagaaaaatagtaagaaaactacaaaacattcttggatactattccccaaatgtgaacattttactgtatttgctttatcctttctcccccttttcctcttctctttctaggtaaatataaatgtaggtgcataatatagactttttctgaatggtttataagttgcaggtatgatgcctctttatttctaaataattttatgtgtgtctcctaaaaacaaggcattatcttgcataattatagtataactatcaaaatcaggaaattaaaaatggtttactgttamtatctcaaccataaaccttattttacatatttcagttgactcaataatattttttatagccaaataatttaagatgggtgatgttacaatccatgatgttgactttcataatccatgatgttgagaggattcagcatttttacgttgatcttcctcatctctgtggcctatgtac

SEQ ID NO: 650301 - DNA, 471 bp, Homo sapiens
ctgcccatgtcaccccagctccgcagtcctacctggcatgagtcttcctataactatacctaggcttcctgactgctctgtggggacacccagcctcattgcaccacaggatggggcagtcagagcagggcttcttacactttaacatgcataygatcacctggttagcatgtggattctgatccagtaggtctgggatgaggcctgagattctgcacatctaacacgctcccaggtcctgcccatgttgctggcctgtggcccatccttccaccagaagcgtttagaaggctttagtctcctcgcagctgttcaagagaccggtgcggtgcaatcgggtgctgagtcatttggtcactgccgcttcttgttaagtcaacttctatcatttcacatgcatagaagttttgacaagcccttcagtcttttgtttctttctgtacgccagtaaaaaagaaagaacaagccagg

SEQ ID NO: 650302 - DNA, 644 bp, Homo sapiens
actcttgggcagccctcaaatagaatattattcctcctcctctctccaccttaccccaggtacaagagatgaatcctgttcccccataagccagctgattccatgacacagcagtccatgcagtccccaaaatttatcccaactgccttcctcatgctcagcttccaggctgctcatttccttggcatattcaccctgcatcagtttctagtgtggcccagtctccaggatcaacacagtcagtttgggattctctattcaagctctgatattgatttcatattcgccctctggcttcaggcactcacttgggtcaggggcaccctacagtctgagcccctttcgggtgagagtggaacagaacatgggtttgaggtcaggtggctctgggttctgaccctgagtccttgaatcactaggttttgctatcttggtcaatttacctgacctcagctttcctatttgtgagatacaaagagaaatattatattgtaagcgtgttgtcagcagtgattctcaaagtttkgtctttgggacatcaatcctatgagatggaaaaggtttttattatcaagtgagtttggcaaatgctcaatatcatatcctcatcttgggaattctcaaataacaaaagaatgggttcc

SEQ ID NO: 650303 - DNA, 644 bp, Homo sapiens
actcttgggcagccctcaaatagaatattattcctcctcctctctccaccttaccccaggtacaagagatgaatcctgttcccccataagccagctgattccatgacacagcagtccatgcagtccccaaaatttatcccaactgccttcctcatgctcagcttccaggctgctcatttccttggcatattcaccctgcatcagtttctagtgtggcccagtctccaggatcaacacagtcagtttgggattctctattcaagctctgatattgatttcatattcgccctctggcttcaggcactcacttgggtcaggggcaccctacagtctgagcccctttcgggtgagagtggaacagaacatgggtttgaggtcaggtggctctgggttctgaccctgagtccttgaatcactaggttttgctatcttggtcaatttacctgacctcagctttcctatttgtgagatacaaagagaaatattatattgtaagcgtgttgtcagcagtgattctcaaagttttgtctttggracatcaatcctatgagatggaaaaggtttttattatcaagtgagtttggcaaatgctcaatatcatatcctcatcttgggaattctcaaataacaaaagaatgggttcc

SEQ ID NO: 650304 - DNA, 521 bp, Homo sapiens
gtgcagaaaatcatcttattttgtaaatcaaatttgtctaaattatatgaagctactgttgaaaaatatggtgtgtttcctactgaaatacattatcttttaaaagaaaggataatggcatgcatgtagggtacctttaaaaagaggattcactgcataacagcaccttggttttagcacaaggatcaacaaatyggtgcttgtggagcaaatccagcccactgcctgttttcataaggaaatttccttgaaatgcagccacacttatgccctttataattcacaaggcctaaaatatttactaactggctctttacaaaaagagctgtccaattcttggttcagtagagctaagatcctctgttgtattttagtaagttttacccagtatattgaaaagctgacacggaacatgaatccccatgtgcaatcccttggcaatattcagattaatttgaggatctggtatttcagcactcacacattgacagcaaaaaacaaaaatttaataactagaattc

SEQ ID NO: 650305 - DNA, 521 bp, Homo sapiens
gtgcagaaaatcatcttattttgtaaatcaaatttgtctaaattatatgaagctactgttgaaaaatatggtgtgtttcctactgaaatacattatcttttaaaagaaaggataatggcatgcatgtagggtacctttaaaaagaggattcactgcataacagcaccttggttttagcacaaggatcaacaaattggtgcttgtggagcaaatccagcccactgcctgttttcataaggaaatttccttgaaatgcagccacacttatgccctttataattcacaaggcctaaaatatttactaactggctctttacaaaaagagctgtccaattcttggttcagtagagctaagatcctctgttgtattttagtaagttttacccagtatattgaaaagctgacacggaacatgaatccccatgtgcmatcccttggcaatattcagattaatttgaggatctggtatttcagcactcacacattgacagcaaaaaacaaaaatttaataactagaattc

SEQ ID NO: 650306 - DNA, 547 bp, Homo sapiens
tgtttaacaaaaccaaaaaaaaaaaaaccccacaaatgttagtttttggaataattttgccatttatcgttattttttagaaactcaatttgtgtaggacatgctaaattatgttcaatttgttaatttagaggacacaattattgcttagttcttactcctcaaaatgtagttagaatgattaaaaaaaaaaaataaaccaccatctgagaaaccagccgtgaatatctgagcccataatgttaaagcaaatgccattgggtcattatacatggccatagggaactaaattaacttctccttgatgagaaatctgacttgtgatttcctcagaagaaaagttaattagcacaatcttattaaaatatgttctgatttaaaggaattcagtggtgtcaatatatctatccaactatatctaattattcatttattttyataactcaacttgtaacaaaatgcagatttttgacttgcaaatataaatgcaagaaacaaggtaaactttaataaatgaaataaaactgaggtagaaaaaagataacta

SEQ ID NO: 650307 - DNA, 634 bp, Homo sapiens
aagatacgttagagaaaaacctaataattcagtgtagtgttatttgaaattcaaaaattgggtcatcccactcttccctcttcctttttaaaaacaacaacaacaataacaaaaaaacaagtttgcataccatgaagtgaaacaagaaatgaaatgaagctgtgttcagtggcctgsagtgtgatgctcaagggctcccaagaacttgcaaaagtcaatattatgtagttatgaattttcagaaatataagtaaagtcaacttgtaacgtttgatttaaccaataggaactgctccaacaactcaatgtatcaactctgaaaacaaattactgtatcccctgcctaccctagtatttagaaggtcagtgcctccctcctgaagtgtacctctcaacggcccaagtttgggtttaggctagccaggcatcttcaacccaaggggagagatcattggtcagggctgtctttactgctctagaccacacggtgtcactgttgaagaccagttggttcaccaaacatctctgctgtgaggagccgggggtggggcggtggtgccagtccctgctggggccacatggccctttttggaggacaatggcctcccacaacatgtagctctgcccggggccc

SEQ ID NO: 650308 - DNA, 529 bp, Homo sapiens
cagacaaagagatcagtgtcttaatctaaagagataattgactgatataaaatttgaggcatcagtcagcaagataaggtaactttcttggttccctgaaatcaagccagatagacctgctttaccatttcaatataaatgagattattccttcaacacaacatattattgattcaacatatggtttttatattctattagggaaatttgagataataagaaaatgtaagtgttccaaaaatgtattacatgttttgctagcttttctccagtgacaagagatggaaaatacatttgctctgtgtggatcttgcaccatgtcgagtgacataaataagataatctctttcatcctataattcttaaaacaaygttcagagatattctttcccaaatgctttaaattatggtctttcaaaagacaagtacagtatttgtaaagggaagaaggattttgtagcttgtgtgggaagagggttgtaatcaatgataaaaaagctgaagaaccacaatcttgcaggcagcaaag

SEQ ID NO: 650309 - DNA, 555 bp, Homo sapiens
accctggtgtcctgaaagagttaaggcagcttgtacatttgcataatttacaaccagggagtagctgagggactgggagaatctggttcagtaggccatttagaaattcattaaaatttattcagcttcaccaatagttatgtccagaacctaaaaacatcaaaaatgtatttccaaaaataaagtaraaaataaggtaaacttgacatgcttacatctgtaactgcaaactcttaaatcaccctgttgtttgggggtttctccttaaacacagaaacttattcatatattcacattaggcagttaattgaacagaatagaagttgctatggaaacagtgtggtatgccctagtacttagtgaggaaatgaacactactaattatcaccaaatgtatgatatttctgctcttgtactctatagtttttaatgtacaatctgtttaatgagcagcaagttgttcacctagcattcagagggtgaaagaagcctaaaaatagaagagtaaatcctcaggtgtgaatctgcaaattttattgaaataaagcaataaaa

SEQ ID NO: 650310 - DNA, 577 bp, Homo sapiens
aggacagccataagcctcctatagcaaagctatcctgtatgagaagctttgagggtttttgtggttgtcccatttatttaggtaaatcaaatcaattttcgatgctcatggaagatctcctcctaggagaaatgtgatgcaaatgtaaaaagccatggtttttcacaactgtcacataaaattctgtcttttgtatgcatgtcagagttataaaattatagctaaacatggatataggactgaattcattcaacatgacttgtgtagagaggatgttattagataagacagacacatgtacyctgtaagaactctatgctctaaaattactgttttcaagtatctcaaactaccttcaagaagtaacattctcataacttgcatttttggcagggcttttttaagttcgtaaatgattaaacatggaatattttttataatattttgtaaagatggagactgtatttacatttatgccatactttcattagctctagagtggtatgactgtcttcaaaatgataaatttcaaagtgttacttgcttaccacagcattttggatagaaattgaggagg

SEQ ID NO: 650311 - DNA, 410 bp, Homo sapiens
gaattctcttttacctggaggagggtcaacccttttgttctacttaggccttcaactgattggatgargcccaccgactgcccatccaacgttgggtagggccatctattttactcccctccacctgattttgactgaatatggttttacccccaaaacacccacccgggccccccttaaaaaaaatgttttgccccaaaattatggggggcccggtggatcagtgaaattgacacatgaaatcaatcatcacaatctctctggcccaaattgcagtgtcctatactgtcattttttaaaacacactgtaatatttttttcctaggtgaacttgctgtttgctttcaaacacaccttacttaaattatccatgttagagctgcttcttttcttatgcttcctcttcctcc

SEQ ID NO: 650312 - DNA, 410 bp, Homo sapiens
gaattctcttttacctggaggagggtcaacccttttgttctacttaggccttcaactgattggatgaggcccaccgactgcccatccaacgttgggtagggccatctattttactcccctccacctgattttgactgaatatggttttacccccaaaacacccacccgggccccccttaaaaaaaatgttttgccccaaaattatggggggcccggtggatcagtgaaattgacacatgaaatcaatcatcacaatctctctggcccaaattgcagtgtcctatactgtcattttttaaaacacactgtaatatttttttcctargtgaacttgctgtttgctttcaaacacaccttacttaaattatccatgttagagctgcttcttttcttatgcttcctcttcctcc

SEQ ID NO: 650313 - DNA, 420 bp, Homo sapiens
caacccttttgttctacttaggccttcaactgattggatgaggcccaccgactgcccatccaacgttgggtagggccatctattttactcccctccacctgattttgactgaatatggttttacccccaaaacacccacccgggccccccttaaaaaaaatgttttgccccaaaattatggggggcccggtggatcagtgaaattgacacatgaaatcaatcatcacaatctctctggcccaaattgcagtgtcctatactgtcattttttaaaacacactgtaatatttttttcctaggtgaacttgctgtttgctttcaaacacaccttacttaaattatccatgttagagctgcttcttttcttatgyttcctcttcctcccattacgttctcctaactgaagattttaaagtaaaa

SEQ ID NO: 650314 - DNA, 604 bp, Homo sapiens
aagttacatataaagatgtagatgcagacatgaaaatgcatgcaaatacatacacatgtagataaatataggtagagctatcacaggcgtmttcctttcgatcttcttttgagtataattcggaatttatcctgagaaatactgataaaatatagggctaggcaaatgtaatttgggatgctgtcgagtgttattagtggaaacgacttctcttttctgagccttgtgaaatagcttccaaggggcagctggtagtgatttaagggcagtcacagagacagccaattagcattgatcagtcattatacttatagcaccagactatcatgcaatacaaaactgatgccgacttgaccttttcatcccctatatttccttccccatctcaaacagcagccaatcatatgcaatgggcttcattatgaataataggaagcatcttacattccttcgtagggtggtccacctcggtatggcacaggatgcttcacaaggccctgcctgtagctttttgtagtttacttgagagaccactaatggaattaacctctacagctaacatttactgaggaaccactaattgtaaggtacactaagtgcatta

SEQ ID NO: 650315 - DNA, 608 bp, Homo sapiens
ccagggttgcagttgtgaaacactgttaaagcttaagattgagaagtgttctattcagaaggcaggtcctcattcatgtgggaaactacaggaccgctcttcctggctacagaccaggatcgggttcacccaacttggtcccagtaagaattcagaacttactctgtaaccatcccaaattcctcccaggtacagtctggcagaggtcttgccattccagacacttgggaggaaggtactcgtttacarccatgtagacaggcctgcagaacttggcctttactgtggtccttgaagcagtttaatgactcagtttcacttacctgagccacagttcatggccagttctgcctacatagaaacctacccaattacctcaggaaatgctctctcatatacagtgaaagccacactcatccacatcctgatacaaggcccaccatatgcagagctgactcaaaaaacatgccctagtgtctgccctatggagcaaagtcctgaaggatatgcagtgtgctcaaaaataaactgggaattacaactacccaagcccctgtaacaagccaactgaaggtggaccctagtgcagacccagcagccttgtgata

SEQ ID NO: 650316 - DNA, 608 bp, Homo sapiens
ccagggttgcagttgtgaaacactgttaaagcttaagattgagaagtgttctattcagaaggcaggtcctcattcatgtgggaaactacaggaccgctcttcctggctacagaccaggatcgggttcacccaacttggtcccagtaagaattcagaacttactctgtaaccatcccaaattcctcccaggtacagtctggcagaggtcttgccattccagacacttgggaggaaggtactcgtttacaaccatgtagacaggcctgcagaacttggcctttactgtggtccttgaagcagtttaatgactcagtttcacttacctgagccacagttcatggccagttctgcctacatagaaacctacccaattacctcaggaaatgctctctcatatacagtgaaagccacactcatccacatcctgatacaaggcccaccatatgcagagctgactsaaaaaacatgccctagtgtctgccctatggagcaaagtcctgaaggatatgcagtgtgctcaaaaataaactgggaattacaactacccaagcccctgtaacaagccaactgaaggtggaccctagtgcagacccagcagccttgtgata

SEQ ID NO: 650317 - DNA, 587 bp, Homo sapiens
tcttactgagcagagtaacatgcgttttgctttgcctgtggtacatatcataaatgcaaatttcatagcagacactagagacaatgtttcattgaatacaccttttaaaacaacttaattgctgaagtattacaacattcttgccttctaaagggatattcactgaccttcccacacttatcagatatttaaaactttttttctttttttttttttttgagagggagtctcactctgtcacccaagctggagtgcagtggcgcaatctcagctcgctgcaacctccgcctcccgttttcaagcaattctcctgtctcagcctcccctcctgagtacttgagactacagstgcctgccaacatgcctggctaatttttgtatttttagtagagacggggtttcaccttgttagtcaggctggtcttgaactcatgacctcaggtgatccatctgccttcacctcccaaagttctgggattacaggcatgagccactgcactctgcctaataatgttttgttgtactagaatgttagaaatattgaactttgttggaagcctggccaacaaaatagtatttgtaaatat

SEQ ID NO: 650318 - DNA, 624 bp, Homo sapiens
attagcatatttaatggttaatgataaaggaccacacttttcctagtatcaatcccatatttatctatgaccagcacttttccctagctatctgctactggtgccttcaaatccagtgggcatttagcaagttaactggctctaagggctgaatatattggcctatattgcttgtggctgtttctatagttatcctatatgcttccatatgagaaattaaaaatcaaatgacttaaatatggaagaaagtggaaacttatttgggtgggaagttcataacttaaacaatrctttatatatgtactctttaatatgtagagtgctaaagaatttgaaactatggatgacatggatgatctaagaagaaaaatcagcaaaattgatcagagaaatataatacataagtaggctggtaactgtagacaaaatgagtgaaatacatgacaaaaatgaatcctacaaagtgcctaacctgatggagaatgttcattagaaggaagattagaaaagtgaataaattgactttaaaatctcttcttatttgaaaaattttcaaaactatagaaaagttaaaagagtagtacaatgaacaccagtgtatcccacaactagatttactgttaa

SEQ ID NO: 650319 - DNA, 615 bp, Homo sapiens
aaacaggcagcacacagaggacttttagagcagaaaaacyattgtgtgtggtcctataatggtagatacatgtcattatacctttgtccaaatccacagaatgtacaataccaagaatgaaccttaatgtaaactatggactttgggtgataatgatgtgtcaatgtaggttcgttgatcgtaacaaatgcaccactctggtgtgagatgttgatagcaggggaggctgcgtgtgtgagggcaggggtatagggtaactccatgtaccttccactctgttttgccgtgaacctaaaactgctctaaaaaagaaagtctatttttttttttaaaaaagcctttaatctgagagaaagagtccataaaaatcctataggagatattacacttaatggtaaaatattggaagcatttaaaatcaggagcaagacaaggaggtctactatcattatttctgaaaaagataaaacaaagtataaaaattgaaaaggaataaaatgttctttattcacatctatgaaagtctatatagaaatatcaaaagaatctacacaaaaatgaatagaaataataagagaatttggcaagttggctgggtataatataaatatttaa

SEQ ID NO: 650320 - DNA, 615 bp, Homo sapiens
aaacaggcagcacacagaggacttttagagcagaaaaactattgtgtgtggtcctataatggtagatacatgtcattatacctttgtccaaatccacagaatgtacaataccaagaatgaaccttaatgtaaactatggactttgggtgataatgatgtgtcaatgtaggttcgttgatcgtaacaaatgcaccactctggtgtgagatgttgatagcaggggaggctgcgtgtgtgagggcaggggtatagggtaactccatgtaccttccactctgttttgccgtgaacctaaaactgctctaaaaaagaaagtctattttttttttwaaaaaagcctttaatctgagagaaagagtccataaaaatcctataggagatattacacttaatggtaaaatattggaagcatttaaaatcaggagcaagacaaggaggtctactatcattatttctgaaaaagataaaacaaagtataaaaattgaaaaggaataaaatgttctttattcacatctatgaaagtctatatagaaatatcaaaagaatctacacaaaaatgaatagaaataataagagaatttggcaagttggctgggtataatataaatatttaa

SEQ ID NO: 650321 - DNA, 543 bp, Homo sapiens
cctgtacccacatctgggggaagctgaggagggaggaacagtcagccacagctctactccaggacctgtcctctctgccccaatctttgaggaagagcatccccttcttcctttccctggccacccctaacatcctctctgggcctgggaccctctccayagaggggatgtggcccgtggtcatgacataacctggcagcagtaggaaaaactctcttctgtgaagaagaagcagactgggccataaagaaacagtgggactggctcaagtgcccaaggtttgcttagggtctgggaattggctatgtgttatttaatttattgagaggagtggagtaggtggcttttatttcccctccctcttccaccaacaagaataaagtttattaaatttaaaaatttctttgccttcttctttttctggaagaaatatctgaagactggtggcagccagattgactggacctttagggatggggacaggaaggatgggcgatgagtctgcccagacacagtggggccagaccacagaagtctgagcaa

SEQ ID NO: 650322 - DNA, 543 bp, Homo sapiens
cctgtacccacatctgggggaagctgaggagggaggaacagtcagccacagctctactccaggacctgtcctctctgccccaatctttgaggaagagcatccccttcttcctttccctggccacccctaacatcctctctgggcctgggaccctctccatagaggggatgtggcccgtggtcatgacataacctggcagcagtaggaaaaactctcttctgtgaagaagaagcagactgggccataaagaaacagtgggactgsctcaagtgcccaaggtttgcttagggtctgggaattggctatgtgttatttaatttattgagaggagtggagtaggtggcttttatttcccctccctcttccaccaacaagaataaagtttattaaatttaaaaatttctttgccttcttctttttctggaagaaatatctgaagactggtggcagccagattgactggacctttagggatggggacaggaaggatgggcgatgagtctgcccagacacagtggggccagaccacagaagtctgagcaa

SEQ ID NO: 650323 - DNA, 603 bp, Homo sapiens
gatgcatataggacacatcagtaaagctaattcttataattctcaatagctagaagaatcataacagattattcaagatrtgtatttccaactgtggggtcaatacctgaaatgtacttgaggcaattataaaattatttcttttaaaaaagatattaagggcaaggaaatagccagtgaactaaggtctcaggtctggagctagtgttttttatttggttggttggttggtttttagtgttttctatgttcaagggaataatttcactccaaaaatactttggggtacagaaatatcctcatttttcatattccagtttttaaagaattctcttgaggaggcaggagagccacaatatccaatgggtaaaatacctttttaaaaaacaacagttacagcacatcaaaatttgtcatgtgcaggcaaagctgtacttctaaagaaagacctaaaatcaattacctaaaactttcaacttaagacactagaataggaagagcaaggtaaacccaaagtaagtagaaagatagggataatagagctctgagcagaaatcaatgaaataaaatgcaggcaaaaagtatagaaaattagtttagaat

SEQ ID NO: 650324 - DNA, 430 bp, Homo sapiens
aggaattctttcagctcgctaagctgccaggtattgctgtggtactctataggaaaagttaaggaaataagagaaagtataaatttgcttaggtgtagcatctctwttagttttctaatgcattgcctggaggcttgttaagaatagaatgtcaggcctttaaacaaatcccagtctctttaaacaaaatctgcagcttaacaagagcctcaggtgattcgtatgcacattaaagtctgaggagtactggtctttagggaccacagctgccaacctgacagccccaattagctccaggccgccactctccaaacatttaggctttacaaagaatgtgtgaaagcagctcaaaatctaaatatgaaatgacaatttctcaaattccagactaaaaagagagaggacttcaaactaaaacataggttcttat

SEQ ID NO: 650325 - DNA, 625 bp, Homo sapiens
catcacattttcatgcaaaggaccattgaattccctaatgatgttctgattttcttaacaatgaacaccagtgaactttcccctaggcaaaccagatggaaactaaatcgtttctgcagaatgaacgatttgtgaaatcttggcaaattgaattccaaatatacttagagatgatcttgactttctctgtaactctaccacaacatgcaatrcatttaaggcctacatgggaaatacactaattagttgcataacctttatgcagaaatgaatgagaacagaagatcaccatcaaaggaataaaagtcagtaactccgaaaaagaagtaatatgcagatgggacatcttcactaagaaagtatgagtttaatgtagatattgtgggaggtattcccttgtcatctttgaattggttctttttaacctgctttgtgaaggaggtaactcattaagcacgtttctttacattgtttcaaatacgtcatttagctagttatatgaaaatctgaattcaaattcttaatctatgtgtctacattttctacttcacacactctcttacctataccccaaaatggaattaaatggactgtgcatgaaaaagattttgtttctattacccac

SEQ ID NO: 650326 - DNA, 625 bp, Homo sapiens
catcacattttcatgcaaaggaccattgaattccctaatgatgttctgattttcttaacaatgaacaccagtgaactttcccctaggcaaaccagatggaaactaaatcgtttctgcagaatgaacgatttgtgaaatcttggcaaattgaattccaaatatacttagagatgatcttgactttctctgtaactctaccacaacatgcaatgcatttaaggcctacatgggaaatacactaattagttgcataacctttatgcagaaatgaatgagaacagaagatcaccatcaaaggaataaaagtcartaactccgaaaaagaagtaatatgcagatgggacatcttcactaagaaagtatgagtttaatgtagatattgtgggaggtattcccttgtcatctttgaattggttctttttaacctgctttgtgaaggaggtaactcattaagcacgtttctttacattgtttcaaatacgtcatttagctagttatatgaaaatctgaattcaaattcttaatctatgtgtctacattttctacttcacacactctcttacctataccccaaaatggaattaaatggactgtgcatgaaaaagattttgtttctattacccac

SEQ ID NO: 650327 - DNA, 402 bp, Homo sapiens
agctgcatgattttgtttagctctagatgtcatattttaagaggaacagtgaatagaatggtctctgttcaaaggagagtataaagttttgtaaatcaagcaacataaaccgttgaaggaattggaaatattaaatttcgagaatataaggcagtgtggtgtcatcttttgaagtgcattttgcccacagggattttttctttagcttgcatagtatttaaaataatgagtcacattrtcaatgggaggcttcacctaatattttaagtttccaccttcccttacaaaatctgaaatttgagcaacacagagctttgggggtttgccacctttttagatggagttttactctccattttgcaatagttctcaccattccttattgtacacaaaactgaattc

SEQ ID NO: 650328 - DNA, 405 bp, Homo sapiens
agatcttcaaataaagagtttagaaagaatatagtttctgatttggagcatgatctgtaamtactatcctatttacatgataaacaggcatgctggcttactgacaagagcaatacatggagctaaattgccttttcatgttttattcagtaattatagatactataatttcactgatatgaagtcattctacaggcagttggctcatttctttagacttttttcatacttactgatcaataatttgatattatgacattaaaagaaaactaaaacatgatctaaagtgcttatactgagtgtgccaaacttccactttaaaagttgttggatgtcttttattatcaaaagccctattataattttttaagattcttaagtagaagtcatttctaccttactgca

SEQ ID NO: 650329 - DNA, 561 bp, Homo sapiens
acacataccacccactcattgttcaaccccttgctttctgatttcatcatgggagtcctgctgagtgtaaaaagtaacttatattccattcttcaatacagtagacttgtcacatgtttcattatcctctatctcttaaaatattaaaaatattaaacgtggtcatttatttatttaagattgtgtgtgtgtgtgtgtgtgtgtgtgtgtgtgtgtgtatgtgtgtgtgttgcttactttgaacctgggcccttttcttggtagtaaagagtaataaacaaaacaaacttagatccaattcttgtgaatcttccaatgaagtaattgaaacacatggtaaaaatgaacacactaaaaatatttaatttcaaattgtagtaagtatagtgaaaaaaatggatgttatggkatctaatttagattataaagtgcatatctaaaagacaaagaggcattagacaggatggtttcagacagagtgaagagcaaataaaagtccctaagatggaaaagaaagagtttaagatattcaagaaagatgaagattactgtggctgaaac

SEQ ID NO: 650330 - DNA, 546 bp, Homo sapiens
taagaatattgtgatttatgtcatatttattgctagtatttttccagttttaactcaacattttatttcataaatttattttatacaagttttgctgctatatgtaatcaaatctgtccacctttttcattatgattaatttcattgcatttatctatggttgtataattttaatggtttcccattttggaytaattttactattcatgtggatttcattttggttttattaaagaaaatacttatttgcttcaaataaccaacattcacaacagtatttaatataggttgtgaaaagttggttaaactttaaatatttcacaaccatacagtaagtgaaatgaaactaatcagttttacatattttaacatatttgtaggtgatcttgggacagtttcagggctttctgtcctgttcctttcagctgcctctttattttagcttagtatcactctccttttaattattataataattttatgatatatagtttatatcagttattactcatacttatctttttggttatcttttatttatgaaaa

SEQ ID NO: 650331 - DNA, 546 bp, Homo sapiens
taagaatattgtgatttatgtcatatttattgctagtatttttccagttttaactcaacattttatttcataaatttattttatacaagttttgctgctatatgtaatcaaatctgtccacctttttcattatgattaatttcattgcatttatctatggttgtataattttaatggtttcccattttggactaattttactattcatgtggatttcattttggttttattaaagaaaatacttatttgcttcaaataaccaacattcacaacagtatttaatataggttgtgaaaagttggttaaactttaaatattkcacaaccatacagtaagtgaaatgaaactaatcagttttacatattttaacatatttgtaggtgatcttgggacagtttcagggctttctgtcctgttcctttcagctgcctctttattttagcttagtatcactctccttttaattattataataattttatgatatatagtttatatcagttattactcatacttatctttttggttatcttttatttatgaaaa

SEQ ID NO: 650332 - DNA, 583 bp, Homo sapiens
tagactagaatacgttccttacaccaactttcgcttttctatatttcctcaaattcaagcactcagtgccaggagtatctggatgagaccaggttgcgaatccttactagacactgaatctgccattccttgatattagactcccagccccaggactatgggaaatcaatgtctgctgtttataagccatgcaatctaaggtattttgttacagaagtctgaattgactgggatacagtttcttatagcagcattcactctactatatsccttcaaaatggtgcactcagcactgtgggtatccagggagaccaggttgggatgactgttggtgcctacacttcagctgattgaagctgaatatcacagcacattgtttgatttagacaggtatttgtcagtcttggtttacattcaaccagttgtagacattcctaaaagtttttcaagccactctttcatctctgctcatcaggtatggtgtggagaggttcagaacacctgccttatccaggtgggtctgctatcatcacagggatccttacaaaagggaagtgggagagtcaaagctacagaaaagaca

SEQ ID NO: 650333 - DNA, 583 bp, Homo sapiens
tagactagaatacgttccttacaccaactttcgcttttctatatttcctcaaattcaagcactcagtgccaggagtatctggatgagaccaggttgcgaatccttactagacactgaatctgccattccttgatattagactcccagccccaggactatgggaaatcaatgtctgctgtttataagccatgcaatctaaggtattttgttacagaagtctgaattgactgggatacagtttcttatagcagcattcactctactatatcccttcaaaatggwgcactcagcactgtgggtatccagggagaccaggttgggatgactgttggtgcctacacttcagctgattgaagctgaatatcacagcacattgtttgatttagacaggtatttgtcagtcttggtttacattcaaccagttgtagacattcctaaaagtttttcaagccactctttcatctctgctcatcaggtatggtgtggagaggttcagaacacctgccttatccaggtgggtctgctatcatcacagggatccttacaaaagggaagtgggagagtcaaagctacagaaaagaca

SEQ ID NO: 650334 - DNA, 569 bp, Homo sapiens
atcttgcttctaacttttaagctgtccttgttcattcytgggtgtaggctgaactaactttgggaaggaattcagttcatagtgtgactctgaaacaaaattgataacagcccttttccaaaaagaccctcttcttgcctggggaccagtctgcctttgcaggactaacagtttagctacaagattagaaattacagtttaggggtcatgcagcctctggctccaagagtctgaactgccccaaattgctcctgggataacatcactattgtagaacctaagatcagtgcttgagatattttgcagaccctgccctggatggatcagctgataccacacacactggtaatctggctcaaccagttctgccatcccacctaggaacagaagacagcaagaaaaactcacagcgacccccatgattccatcttcaacctgaccaatcaacactccccacttcccaagccccaacccaccaaattatctttaaaaactttgatccctgaatgcttggggagacagatttgagtaacaataaaactccggtctcccacacagcccactctgcg

SEQ ID NO: 650335 - DNA, 569 bp, Homo sapiens
atcttgcttctaacttttaagctgtccttgttcattcttgggtgtaggctgaactaactttgggaaggaattcagttcatagtgtgactctgaaacaaaattgataacagcccttttccaaaaagaccctcttcttgcctggggaccagtctgcctttgcaggactaacagtttagctacaagattagaaattacartttaggggtcatgcagcctctggctccaagagtctgaactgccccaaattgctcctgggataacatcactattgtagaacctaagatcagtgcttgagatattttgcagaccctgccctggatggatcagctgataccacacacactggtaatctggctcaaccagttctgccatcccacctaggaacagaagacagcaagaaaaactcacagcgacccccatgattccatcttcaacctgaccaatcaacactccccacttcccaagccccaacccaccaaattatctttaaaaactttgatccctgaatgcttggggagacagatttgagtaacaataaaactccggtctcccacacagcccactctgcg

SEQ ID NO: 650336 - DNA, 569 bp, Homo sapiens
atcttgcttctaacttttaagctgtccttgttcattcttgggtgtaggctgaactaactttgggaaggaattcagttcatagtgtgactctgaaacaaaattgataacagcccttttccaaaaagaccctcttcttgcctggggaccagtctgcctttgcaggactaacagtttagctacaagattagaaattacagtttaggggtcatgcagcctctggctccaagagtctgaactgccccaaattgctcctgggataacatcactattgtagaacctaagatcagtgcttgagatattttgcagaccctgccctggatggatcagctgataccacacacactggtaatctggctcaaccagttctgccatcccaccyaggaacagaagacagcaagaaaaactcacagcgacccccatgattccatcttcaacctgaccaatcaacactccccacttcccaagccccaacccaccaaattatctttaaaaactttgatccctgaatgcttggggagacagatttgagtaacaataaaactccggtctcccacacagcccactctgcg

SEQ ID NO: 650337 - DNA, 569 bp, Homo sapiens
atcttgcttctaacttttaagctgtccttgttcattcttgggtgtaggctgaactaactttgggaaggaattcagttcatagtgtgactctgaaacaaaattgataacagcccttttccaaaaagaccctcttcttgcctggggaccagtctgcctttgcaggactaacagtttagctacaagattagaaattacagtttaggggtcatgcagcctctggctccaagagtctgaactgccccaaattgctcctgggataacatcactattgtagaacctaagatcagtgcttgagatattttgcagaccctgccctggatggatcagctgataccacacacactggtaatctggctcaaccagttctgccatcccacctaggaacagaagacagcaagaaaaactcacrgcgacccccatgattccatcttcaacctgaccaatcaacactccccacttcccaagccccaacccaccaaattatctttaaaaactttgatccctgaatgcttggggagacagatttgagtaacaataaaactccggtctcccacacagcccactctgcg

SEQ ID NO: 650338 - DNA, 604 bp, Homo sapiens
gtgtgctacaaaatggtcactgcctctttttccttctctaactctctagggactgccccttttagcctgccctaactggaaaaagaattccctagaagggaatccttggatggtagttgcacctaggcaaattgatacatccaaggccatcacagagttaagtaccttaccacatttaactcaccaaagacagtacctcactcatagttagcattcagtaattgtgattattgcccttattaaagccataaaagtttagttagccaaagattcttatataaagtgctcgttcatataatgtattttgatatgctcaaatctcaatttcaaatttatattggcttatattatagccaagatacattttcattcctaactaaaaaaggttattagtcaccaaaatgtcagagatacttgataggcagtaagaaatcttaacttaaaacctttaagaattcaggcaaaacttatattcaaagccaaaattcaggtccaagtgtctctacaaggaaggagttcttaacagcagtgctattckgaatcaaaatctacttgaaatttttataaagtaaatgtaatcttggctagtattccttaagactgt

SEQ ID NO: 650339 - DNA, 489 bp, Homo sapiens
ggccagactacctgatcataagcacatcttttcaatatcctgttgggcagcaagccatactgcccagacccctcctccccatacctataagtaccccagcctgtaatcagcagagggctctggcattaagctggtcccctacttctgcaggtttttgcaatatacctatgttgctgttgagccaccctctgtgtgtgtgcgtgtctttctttaaccctcgccttcccttcaaracctaacaggaagctctgagagcagggaccctgttggcatcatctttgaagtgcctacgatgcccagctgagctacaagaattctctaactctgagattcttctccaactgcctactggcatttggacccagatggcaaacccaacatggccaacctgaattcttcctcctcccagaccacttccatccccctcctacacctaaccccctgggtcatcccagatctcctgccccctccacccctcacatcgaatca

SEQ ID NO: 650340 - DNA, 561 bp, Homo sapiens
agacagaacccatctgaaccatgcccagatagtcaatgtagctggtatgctaaatagcacatcttaagaaataatttttaagtagcaaattttagtcttccaccactctttaaacttttttgagggaatctcccactggataaaaactcagcagaatccaaggttttctgcttcctttgaggatagacagacctgcagtcatttaccataaacatagtatctatttagtaattagaataccaggacctagatattgaccctacaatcttcatccaaagtgaataaatgaagattacttcaactctctaatcttcaagtcaatcttcatttgcttcctcttccggytgaaacagaaatactaggaagagagagggcagggtacagtgtaagatgtcatgtacatgttatgtaaaatgcatacagtgcctgggttatagagtttatttgggatgtgattccaggaagcagggatgagagactggagataatgagataaagaaggagaaacgccaatgtaagcaggtgaaagtaaggtccctgctatggacaacagggatttga

SEQ ID NO: 650341 - DNA, 555 bp, Homo sapiens
tattctatttctgtacaatattctttcccactcagaagaactattcctctgtgattactgctagtctctaactcatttcttaatactaactaaatacacattcacaatgaattagcctatatcatgttctattttgatctttgatgttgctgtcaggcagaataacagtatgaaattataacagttgtatttaatgtaacctgtgtggtacttggcaacatcatgaatattcattctttggtaagacttagcctttggctttgttcctgattcagattttcctcacatgtggctatgtggtagytcttgctcaactatctagatgcttgctggctaatgcttttcacttgtcaaatggtaaatatgcagccatcactttccagataatattgccatctgggtagaaatcaccgtacattctgaatttttcttgtgtactttttagctctgtgaatatcaaatgagattgggttacagcaaaatggctctgctgtgcccaacccagttctgtgatgcctcagactgctagagttgcagtaattttattcatgctta

SEQ ID NO: 650342 - DNA, 562 bp, Homo sapiens
gctatctatctgcagatccttaacttagttcaactaatggtattttgtttcttaaaaaaaggtttaagtaaattgactttttttttttccttttgagagacaccatctcactctgttgcccaagatgtagtgcagtggcacaatctcggcttactgcaacctctgcctcccaggtttaagaaattcttctacctcagcctcctgattagctgagattacaggcacatgccaccacacctggctaatttttgtatttttagtagagatggggtttcaccatgttggtcaggctggtctcaaacccctgagctcaggcaatcttcccgcctyagcctcccaaagtgctgggattacaggcatcagccacggcaatttttaattatataagtttatggggtaaaaagtgatattataatttatgaatacaatatgaaataattaaatcaatctagttaacatatacatctcttcaagtacttaattttttgtggtgagaacatttggaatttactcagcagttttgaaatgtacaatattcccattattaactatattcaccaca

SEQ ID NO: 650343 - DNA, 583 bp, Homo sapiens
gttcaggctagtccttaccaataacctgacccacaaaattgtgagcaaaataaatggttgctttaagccactaaattttgtgattattatatggcaataaataaacaaacatggatagcatgttgcagtaggaaatccagctctagagccattaaatatagattcatatgctgtcttaactttttacaacaatgtgctgatgggaagctcacttaaatgttcttattctcartgttctcatctacatgatagggatggattcaatcactcagtaaaagtcccttgagagcttggaggcaacacagtaaataagcttcagtttctgccttcagggagtttacactctgcggaaacaaggcaagaggccagaaactcacagagcagggatatcagtccttctattgcactaagtacagaaacactgaaatacatggtaggggtgggaagagtactggattcactcctggggctggtagcagaagtgatataatataatctagactgagactaataatgcaaggagttaaaaaaggggaggagagagggtgaggtcagaaagaggatatttaggaggaagaagaag

SEQ ID NO: 650344 - DNA, 583 bp, Homo sapiens
gttcaggctagtccttaccaataacctgacccacaaaattgtgagcaaaataaatggttgctttaagccactaaattttgtgattattatatggcaataaataaacaaacatggatagcatgttgcagtaggaaatccagctctagagccattaaatatagattcatatgctgtcttaactttttacaacaatgtgctgatgggaagctcacttaaatgttcttattctcagtgttctcatctayatgatagggatggattcaatcactcagtaaaagtcccttgagagcttggaggcaacacagtaaataagcttcagtttctgccttcagggagtttacactctgcggaaacaaggcaagaggccagaaactcacagagcagggatatcagtccttctattgcactaagtacagaaacactgaaatacatggtaggggtgggaagagtactggattcactcctggggctggtagcagaagtgatataatataatctagactgagactaataatgcaaggagttaaaaaaggggaggagagagggtgaggtcagaaagaggatatttaggaggaagaagaag

SEQ ID NO: 650345 - DNA, 625 bp, Homo sapiens
taagtcacacaagtggttatcagcagggctgggatgagaatgcagktcttttggctttcagtgtaaattttctgtagctcaatcctgtttctgaacttcttcacaggtgcccacagttgttaaatgtatccaatttttcttctttttaggttaactgtgaagcaaaaccccagcttagacttctttcactgatgttgagacatgtatataagatctgtttataattctaagagttttacaatgggggaacagaaaataagaaatatgataaaatattgaagaaataacaaaggctaagaaaaactcaaaaaatttttatagtattcacatatttttagttgtacataaaatcaagccacacctgtccaacttctttcttaacgctctctcttttttagatttttcttattaaatttatttaaatttctggagatggagcttgcacaattcccctcctctttttttttttaacttttatttgaggttaagaggtacatgtgcaagtttgttatatagataaattgtatgtcacaaggatttggtgtcaagagtatttcaccacctaggaaataagcacagtacccaataggtagtttgttgatcttcatcctcctccccacctcca

SEQ ID NO: 650346 - DNA, 560 bp, Homo sapiens
ttttcaagttttactttaggttgaagatgyaagttgcattagttaatggagtagtatgaagatttgcaggatattttggtgacagcaattttgtcaaggttttgtgcattttttccttctttgtcctgatccacatatgcatacacatttagcatagtatatcaggaagtgtaaaaataagccatacaaattactttattctttttcatttctcatttgcagtttaaccccctctaatcctttccatgaagattactcaatcaaattagtttacttacttgctttctttcaagcatgctttgtgctttccttctccattaatttcttcatgagagttttgagcagggaaaacctttattcctttttacctacatcttagtcatgtctcacttccctccatttctctcccttctcagaaacttttccacagcattctaactctaactcattgtgacatcattcttatttcagttcccaaaatttcttatggccattctaaagctcatcactggcataacatgcataacatgctctcataccttatggtggggagcctgtgg

SEQ ID NO: 650347 - DNA, 560 bp, Homo sapiens
ttttcaagttttactttaggttgaagatgtaagttgcattagttaatggagtagtatgaagatttgcaggatattttggtgacagcaattttgtcaaggttttgtgcattttttccttctttgtcctgatccacatatgcatacacatttagcatagtatatcaggaagtgtaaaaataagccatacaaattactttattctttttcatttctcatttgcagtttaaccccctctaatcctttccatgaagattactcaatcaaattagtttacttacttgctttctttcaagcatgctttgtgctttccttctccattaatttcttcatgagagttttgagcagggaaaacctttattcctttttacctacatcttastcatgtctcacttccctccatttctctcccttctcagaaacttttccacagcattctaactctaactcattgtgacatcattcttatttcagttcccaaaatttcttatggccattctaaagctcatcactggcataacatgcataacatgctctcataccttatggtggggagcctgtgg

SEQ ID NO: 650348 - DNA, 560 bp, Homo sapiens
ttttcaagttttactttaggttgaagatgtaagttgcattagttaatggagtagtatgaagatttgcaggatattttggtgacagcaattttgtcaaggttttgtgcattttttccttctttgtcctgatccacatatgcatacacatttagcatagtatatcaggaagtgtaaaaataagccatacaaattactttattctttttcatttctcatttgcagtttaaccccctctaatcctttccatgaagattactcaatcaaattagtttacttacttgctttctttcaagcatgctttgtgctttccttctccattaatttcttcatgagagttttgagcagggaaaacctttattcctttttacctacatcttagtcatgtctcacttccctccatttctctcccttctcagaaacttttccacagcattctaactctaactcattgtgacatcattcttatttcagttcccaaaatttcttatggccattctaaagctcatcactggcataamatgcataacatgctctcataccttatggtggggagcctgtgg

SEQ ID NO: 650349 - DNA, 631 bp, Homo sapiens
taccccttggcttccagtctgtgaagggatagggtgggagacatggctatctcttccattagacaaggattctgacaaatgcaatgctagagagtctccacttcattctgtgaaatacagtaggaatgtggtccattctggattttatgagatgttggtgagataagagtatgacctgtcggtatggcaagagattaggcaaaagattacttaggttctaattaaggcatatttccagacatctcaatggttacaacagggatggaggctgacagartcaactcagggaggaaagagagagagagaaaaagaaagtaaactaagcaagtaagtgaaatacaaacctgggtacaccgagaaatccataaatttgactagcttacttcaaagttccttgactacttctgtgtcaggaaggatagcactcagaaattaagttgattacaggaatctaacattacattgactgacgcctgagtctgtgactgtgaaatttgtttatctctttggctagccctgggcattgcatggagtgctcactccacaaacactggttgagaggttgagtgggtgcaagaatgtagggagtataagtaagaaatgcaaagctagcgactttgtcagtcacggt

SEQ ID NO: 650350 - DNA, 631 bp, Homo sapiens
taccccttggcttccagtctgtgaagggatagggtgggagacatggctatctcttccattagacaaggattctgacaaatgcaatgctagagagtctccacttcattctgtgaaatacagtaggaatgtggtccattctggattttatgagatgttggtgagataagagtatgacctgtcggtatggcaagagattaggcaaaagattacttaggttctaattaaggcatatttccagacatctcaatggttacaacagggatggaggctgacagagtcaactcagggaggaaagagagagagagaaaaagaaagtaaactaagcaagtaagtgaaatacaaacctgggtacaccgagaaatccataaatttgactagcttacttcaaagttccttgactacttctgtgtcaggaaggayagcactcagaaattaagttgattacaggaatctaacattacattgactgacgcctgagtctgtgactgtgaaatttgtttatctctttggctagccctgggcattgcatggagtgctcactccacaaacactggttgagaggttgagtgggtgcaagaatgtagggagtataagtaagaaatgcaaagctagcgactttgtcagtcacggt

SEQ ID NO: 650351 - DNA, 578 bp, Homo sapiens
aaaaaataaatggcaaacacaaaagaaagaaataaaattatttttattttttcagataacataatcttacatgtagaaaattaaattataaagaatccactagcacaaaatacttagaaccaataaactaatttttaaagttgyaatatacaaaattaatgtacaaaaatttgttgcatttctgtacattagcaatgaaatatctgaaaagtaaatcaaggggaaaatcctatttacaatagcatctaaaggaatgagatatttagaaacaaacaatcaaagaggtgaaaaacttgtacactgaaaactacaaaacactaatgaaagaaattaaagatgcaaataaatgaaaagacataccacatttgtggactggagaacctcatattgttaaaatgtttatactacccaaagtgatctacaaatttaatcctatccccatcaaaatcccaatggcaatcctatagatatacaaaaaaaatcttaaaattcatatggagccacaaaagaccctaaattgccaaagcaatcttgagaaagagcaaatattgatactccctgattgaaatcagaaaata

SEQ ID NO: 650352 - DNA, 427 bp, Homo sapiens
gctttgggagtttaaggtgggaggattgytcgagtttgagctatcgaagagtaagtaaccagaaatttgagaacagcctgggcagcatagtgagaccccatctctacaaaaacttcacagattagccaggtatggtggcattctcctgtagtcccagctactcagaatgctgaggcaggagagtggcttgtgaccaagagttcaggctgcagtgagctatgatcctgtcactgtactccagcctgagcctgggtgacagagcaagaccctgtctctttaaaaaaaaaaaaaaaaaaaaaaggaattttattagtagctgtgaaagaaaataaagaaatacataaagtgcagaaaagcataaggaaaaaatgaaaatagtcatcccccacgtagagatgtcatcttaacactttgataattacctttc

SEQ ID NO: 650353 - DNA, 427 bp, Homo sapiens
gctttgggagtttaaggtgggaggattgttcgagtttgagctatcgaagagtaagtaaccagaaatttgagaacagcctgggcagcatagtgagaccccatctctacaaaaacttcacagattagccaggtatggtggcattctcctgtagtcccagctactcagaatgctgaggcaggagagtggcttgtgaccaagagttcaggctgcagtgagctatgatcctgtcactgtactccagcctgagcctgggtgacagagcaagaccctgtctcttwaaaaaaaaaaaaaaaaaaaaaaggaattttattagtagctgtgaaagaaaataaagaaatacataaagtgcagaaaagcataaggaaaaaatgaaaatagtcatcccccacgtagagatgtcatcttaacactttgataattacctttc

SEQ ID NO: 650354 - DNA, 560 bp, Homo sapiens
tgaaatgaggtcaagagcagtaatttttaaagaggaggctgactaagacccaccatcttctgcaatccaggcagaagatggtgcaggtaaagcacaggtgaggatgaaccaggagctctgtgtggagctgcctcagccagggagcaggctccctctggaattcacacaaggacactgtgggtgccaacagaaagcctgtggttaccgaagtggaaaagagtgagggaatttagatagatttaggagacgaaaatccaatccacggtgcttagttgaaatgccaggggcaaaggagtctaggatgacattctaaggtaaaactcagaaatagtgaaggtttgttgaatttcgtttagaaaacaaawataggaaatgtaattagctcttgattattctaacaaatgttcctttgaaatccaggaacatggcaagtgtaatgttaggatgcctaaataaggaagagcacagcgtgtgtgtgtgtgtgtgtgtgtgtgtgtgtgtgtgtgtgtgtgtgtgtgtgaaagtctggaaggagctactcccaagatgtttagaaaaat

SEQ ID NO: 650355 - DNA, 581 bp, Homo sapiens
acagaataactgcaaacttttaagatcaggaaatgtagacatctagtgatttctttagtagacagtttaatttcccccaagattaggagacacttctgtgcaggttctaaaaggagcccaatggcctggggtgggagtggggagtagatagggaatatgtgggatttggtttaagttcatcattggragagttcctggatccttgcaagcttagataaatgtgatctttattagatagcagtggcatgctttaaaaaaaaaaaaggcaatgaaaatttagcaagccactgaatttgagttttcactttgtttctaatatgctgtgtgaatcagtacagttttcttaccctttcttggtcttaatttccttactgataaaatggggtagtaatacctatctcaaaaaattattgcacatattaaataacattcctctatgtatctcaatggcattagacattaggagaagcattttgtggaggatttgaagttgagatcttcatccaagaagtagcttttcaatttgctagaagcttaatgtaggcaagccacttcatttttcagaacttgtttactcattt

SEQ ID NO: 650356 - DNA, 581 bp, Homo sapiens
acagaataactgcaaacttttaagatcaggaaatgtagacatctagtgatttctttagtagacagtttaatttcccccaagattaggagacacttctgtgcaggttctaaaaggagcccaatggcctggggtgggagtggggagtagatagggaatatgtgggatttggtttaagttcatcattggaagagttcctggatccttgcaagcttagataaatgtgatctttattagatagcagtggcatgctttwaaaaaaaaaaaggcaatgaaaatttagcaagccactgaatttgagttttcactttgtttctaatatgctgtgtgaatcagtacagttttcttaccctttcttggtcttaatttccttactgataaaatggggtagtaatacctatctcaaaaaattattgcacatattaaataacattcctctatgtatctcaatggcattagacattaggagaagcattttgtggaggatttgaagttgagatcttcatccaagaagtagcttttcaatttgctagaagcttaatgtaggcaagccacttcatttttcagaacttgtttactcattt

SEQ ID NO: 650357 - DNA, 668 bp, Homo sapiens
ttaaaaaaacaaaacaaaaacaaacaaaaaaacaagacaaatcaaacagaaaccyatcagaagagaagaaataacaaagatcagagcagaattaaatgagattgagaccaaaaaaaacaaaaacaaaggatcaatgaaacaaaaaagttggttctttgaaaagataaacaaaattgacagactgctggctaatttaacgaccaaaaaaaattcaaataagcacaatcagaaatgataaagtgacagacagctgatgtcacagaaatacaaacatcatcagagattactatagatatctatatgtgcccaaattagaaaacatagtggaaataataaattactagaaaaatacaacttcccaagattgaaccaggaggatacagaagtcctggacagaccaacaatgagtagtaaaattgagtcagtaatttaaaaaatcttccaacaacaacaaaaaagccaaggaccagatggattcacaactgaattttaccagatgtacacagtagatctggtaacagtcttactgaaactgttcaaaaaaattgaggaggagggattcctccctaactaattctgtgaaaccagtatcaccctgatacaaaaatcaggcaaggacacacaacaaaaaaatactacaggccagtatccctgatgaacatagatgc

SEQ ID NO: 650358 - DNA, 535 bp, Homo sapiens
tcattcagaaaaaagaatgagatactttcatttgcaaaaagatagatggaacttgagatgattatattaggtgaaataaggcagtcacagaaaggcaaacgtcacatattctcccctatgtgtggggtctacaaatcaaaacaattgaacttatgtacatagagagtagaaggattgttaccaggggctgggaatgatagtagggtgggagcggcagggtgctggggacagtgaatgggtacaaaaaaatagaaagaacaaataagacctagtattggttaacacaagaggataactatagtcaataataacttaattgtamactataaaataactaagagtttaactgaattgtttataatacaaaggctaaataattgaagggatggataccccattctttatgataatattatgcattgcatgcctgtattaaaacatcttgtgtattccataaatatatatatctactatatatgtaaccatgcaaattaaacataaacatttttaaaagatggcaaattaatttgaaaga

SEQ ID NO: 650359 - DNA, 607 bp, Homo sapiens
tgagggaaaagcaagagaaaaaagtcaaaattggtgatggtatttttcagctgctgtcatagcctttgactctctacccctgaacttcccacaggtaaaatataaaaccccatgtggggtttaaactgtacttaaattacggctgactgctttcattatgttttgaacacatttctaatagaaacagaawgtaaagccataataagagtcaagacaagatagatcatattattaaataaacctttctttctttcatgggttcccactgcccattcaaagctagtacttttgttgtgcttctttctaggcatatgacattttatccagagaaacccaaatgtctacatcttattctgtactccttagcagaaatacatattgactgctattttttctaactcctcatctacatagctatttttttaaaatctaataattgcattcatgatagtgaattatgatcagtaataaccccttcataacctcatgggcatttgtattttagtggggaaatagtcatttgtcaggaacgcataggtagttatatcaccaaacatttatgggaaaagtcacaaaggaagatattttggggaagagtgtcactaaa

SEQ ID NO: 650360 - DNA, 415 bp, Homo sapiens
catagtgattctcaaacttaagtgagcatcagaatcatctggagagcctattaaaatacagattactgggtgccaccttcagatttcagtatctggggatgccactcccagatttttattcaataagtcagtagtggtgcccaagaatttgcatatctaacaagttgccaggtggtactaatgctgctggtgtgaggacaacacttggaaaaccactgctctaatatattgttcaaaatacctcccaacaagacaaaatggggtaggamcacatagataacaatgcctgcaaattctgaaggtcatgccaccttagcagtagccatgccaagtagcatagcagacaaaatgtccaagtagtcacagactcactagcagtgccactgagttttccagggtaatcatggttttctag

SEQ ID NO: 650361 - DNA, 626 bp, Homo sapiens
ttttaatatgagaccaactgattttaaaaagctatcaccaaatggggtgatgattagaggaaagggtttttctggtttgtatgttggatatattagagaaagcattgctaataacaaatgtaaggtatgtgatgctggtacactaaaactgagaaaagatagcagtgttgggaactccatcttagtgatctgagaattgaagtaattgtatttctgtcatagcatttgcacatctagatctttaatcccctcgctctggttgatctgatcaaatctaattttgacttttggattttattacatctattgacagcaaacatatggaagtaagacrcaatttgtaaaagttctaattattcactgtcattagatttttcagcctttaaataatttaaataacattaacatttttcatgctgctcaaattacatatgttaattgtcataaattttttaaatcaagaaaaaaaggaaaaggaaaaaattttctgtatttgaccttctagagagaacctatactagagaaaaattaatatgttgatgttaattcccaacatttgtattatatatggcagatacatacaatattttaataaaaatagaattatggtatccatacaattttat

SEQ ID NO: 650362 - DNA, 626 bp, Homo sapiens
ttttaatatgagaccaactgattttaaaaagctatcaccaaatggggtgatgattagaggaaagggtttttctggtttgtatgttggatatattagagaaagcattgctaataacaaatgtaaggtatgtgatgctggtacactaaaactgagaaaagatagcagtgttgggaactccatcttagtgatctgagaattgaagtaattgtatttctgtcatagcatttgcacatctagatctttaatcccctcgctctggttgatctgatcaaatctaattttgacttttggattttattacatctattgacagcaaacatatggaagtaagacgcaatttgtaaaagttctaattattcactgtcattagatttttcagcctttaaataatttaaataacattaacatttttcatgctgctcaaattacatatgttaattgtcataaattttttaaatcaagaaaaaaaggaaaaggaaaaaawtttctgtatttgaccttctagagagaacctatactagagaaaaattaatatgttgatgttaattcccaacatttgtattatatatggcagatacatacaatattttaataaaaatagaattatggtatccatacaattttat

SEQ ID NO: 650363 - DNA, 524 bp, Homo sapiens
catttttgggaaagacattaccaattcaatttctttacagatataaagctgttccaacgatatatttgtctttgtatgagttctagcgattgggtgtcttcagggatttttgtcttttccatgaaattatcaaatttgagggcataaagttatttataatattcttttattacattttcctgtccgtggaatcattgatrataacctgtctctcatatgtgatattactagagtgtgtcttttctctttttgcttggatagtatacctagaagttttaaaattttactgatctttttaaataacctttttttggttgctgatttttttctgtgggctgttctaaaatttattgttatatgctttgatttatttccttcttcttgctctaaatttttaaaatgtatctctttttctatactttgccaaggtggaagcttagattattgattttagatctttcttctttaatatatgcatttattgttttaaaatttcatttgcactccacatgtttcaataagtt

SEQ ID NO: 650364 - DNA, 555 bp, Homo sapiens
cataatagagatttttgctgatcatattttactgsttgaatatgttagaagcctttcattatgaaaagtaaaaaaaaattaaaataaggaaaatgtagatattcatgcatttaaaagaaagaaaataatcagtaaagtagagaatagtggaattttcctgttgggcagagtaaattccatgctcctctgacctgtaaaatatttacctattgctctttaatctgagctccttgaatttgttctagtcccagttcagaaacaaaatcctcggccctgcccccatgttaccccctatcttggagaagccctctgatatgaaagctgaagatggactcatttgcattaaattaaagtaagccatcttacttttagggctctcattccactaccaggggcaacccaggagcggtgagacaagcttataccatttgggaacaggaggactcttaaaaacacacacacacaaaattaagcacaaaagaatatacttagaagggtctggcacaagtgaggatgctgaagcctgactttcatcagcctggtcgtccatctgcc

SEQ ID NO: 650365 - DNA, 555 bp, Homo sapiens
cataatagagatttttgctgatcatattttactggttgaatatgttagaagcctttcattatgaaaagtaaaaaaaaattaaaataaggaaaatgtagatattcatgcatttaaaagaaagaaaataatcagtaaagtagagaatagtggaattttcctgttgggcagagtaaattccatgctcctctgacctgtaaaatatttacctattgctctttaatctgagctccttgaatttgttctagtcccagttcagaaacaaaatcctcggccctgcccccatgttaccccctatcttggagaagccctctgatatgaaagctgaagatggactcatttgcattaaattaaagtaagccatcttacttttagggctctcattccactaccaggggcaacccaggagcrgtgagacaagcttataccatttgggaacaggaggactcttaaaaacacacacacacaaaattaagcacaaaagaatatacttagaagggtctggcacaagtgaggatgctgaagcctgactttcatcagcctggtcgtccatctgcc

SEQ ID NO: 650366 - DNA, 488 bp, Homo sapiens
tcagaggcttgagaccatggtctgcagtgaccaaataggcctcactacactttgctgtttttgcaatcctggaagcagggagtccccaaaataactctgaatttcctgccagccagacagattgggacctasaaattaatgtatagaaaatggaagaaaaagtgattttattttttggagaactgattttgtagtctgagtgatatccactttctttacagtagtattctaatcatggtggcagtaattctagtggtagccgtagtcctggagataataaaagcattggcagctatagcagcagcaacattagtaatgacttcttgtgatgatcatcattagtatttctgctattttctttttaccactgggaaatattgatatacctatttcaaataaattaatgtttctgttttaacttatctctttgtacaaatatgtatgtcaaaaatagtagaaaaataagcacaggcaaaaattagagataa

SEQ ID NO: 650367 - DNA, 488 bp, Homo sapiens
tcagaggcttgagaccatggtctgcagtgaccaaataggcctcactacactttgctgtttttgcaatcctggaagcagggagtccccaaaataactctgaatttcctgccagccagacagattgggacctagaaattaatgtatagaaaatggaagaaaaagtgattttattttttggagaactgattttgtagtctgagtgatatccactttctttacagtagtattctaatcatggtggcagtaattctagtggtrgccgtagtcctggagataataaaagcattggcagctatagcagcagcaacattagtaatgacttcttgtgatgatcatcattagtatttctgctattttctttttaccactgggaaatattgatatacctatttcaaataaattaatgtttctgttttaacttatctctttgtacaaatatgtatgtcaaaaatagtagaaaaataagcacaggcaaaaattagagataa

SEQ ID NO: 650368 - DNA, 480 bp, Homo sapiens
acctaaaaaaattataagactatttattaaaacattgcttaatataggaaaagactagaagtaacgtaagtgttcattaacaaggaattgattaaataaattatggtaacgccataaagtaaaattgagtgaatgtcagaattagggttatggttaataggaaagctgaaarggaacccccaagactatttaaacaaaaaaagtcaagccatggaacagtgctaagtaagtgctgagacctcgcctttaaatatttcaatagataatattgagtttcatatacatgccttatgcacataaaatgtctccacaggaatacataagaaactcctaaccacggttgtctctgagaaagagaactagctgaccaacagactgaaagtagtctgatattttactttgtaaatatctgtactttttgacttttgtgtgatgggcacacatcattcattcaaaaaatggttaattaaaaaattaaga

SEQ ID NO: 650369 - DNA, 570 bp, Homo sapiens
ttcactgacattattaaacattgaaagcccagaggtagcagaaagctgtaataggtctgccattcaaatgtgttaactggattttgaattaatttatggtttctttcctctaatttattaaaggctcattttacatgataaggtgttacctgacccaatgactgcagtttccccacctagatcattggcatttaacttgccatagaacacaactgaaacattccttcttgttctagcaaaatgataccttctaaataaggcaattttaagacatttattgaatacttaccacgtaaaatgttctgtcctaatgctttactggtatgaacttgtatagcaaaggagggcagagagaattgtaaaaatttcccagaataagacacttagcttggattcaaattcaagcaatctgactccaaagaccatgcattcctaaactgtgtatttcttccaaygtagacacaacatactctgaataagtatctatagatgtgaatggatgtacaatattagggagaaaacaaatatgtatttgtttggaagtatacacagaaaacagataatattgga

SEQ ID NO: 650370 - DNA, 621 bp, Homo sapiens
tttttcagtaattccccttggtaaagcacaagtttctttgctcaaaatttgatcattgaagacagagcatttgttaatggaagcataagacccacataagaaaatattatgactctggcaactgattcctcctgtttctacttttccgactattgatgagggcctttaacttgccatagtcccctctcattttctgtgattcatctccctgctgatgttgctgccgagtgtctttgcartattggttaatcatctgcatttctgagtggctgaatgcccccatgatgtccttcgggtggaagggtaaagccctcacagagctggcccaggtccatggggaccatttgtccgtcacaacagccaccatttctgaatctaaaactttgaagttgatcttggctatggtctgcttgaaactattttctgtagcaatgcagtgataaagtccttggtcagaaccctgaacagagcggatcaggagtccctgtgaagtggctattattcgttcattcagcttaacctaaaagagagacaaattaaagttactgaaactgaacattatatttccttagattatgaccaacatacacagaatagtctcaactttcacagatttgggaa

SEQ ID NO: 650371 - DNA, 621 bp, Homo sapiens
tttttcagtaattccccttggtaaagcacaagtttctttgctcaaaatttgatcattgaagacagagcatttgttaatggaagcataagacccacataagaaaatattatgactctggcaactgattcctcctgtttctacttttccgactattgatgagggcctttaacttgccatagtcccctctcattttctgtgattcatctccctgctgatgttgctgccgagtgtctttgcaatattggttaatcatctgcatttctgagtggctgaatgcccccatgatgtccttcgggtggaagggtaaagccctcacagagctggcccaggtccayggggaccatttgtccgtcacaacagccaccatttctgaatctaaaactttgaagttgatcttggctatggtctgcttgaaactattttctgtagcaatgcagtgataaagtccttggtcagaaccctgaacagagcggatcaggagtccctgtgaagtggctattattcgttcattcagcttaacctaaaagagagacaaattaaagttactgaaactgaacattatatttccttagattatgaccaacatacacagaatagtctcaactttcacagatttgggaa

SEQ ID NO: 650372 - DNA, 575 bp, Homo sapiens
ttttttttcctcatgcaaagtgacctctgaccttacctctcatcaggctcttcacccacgtgacaacttaaaaggcaccttaacaggtgtatagaactcagagcatcactgtgagaaaaccattcatgtcaggcagcaattgttctacataaaatgtaggaatactaaaccctttttagtaaaacagaataaaccaatgctaaattagaaaattctgctaacagtcccacttttcactgttttttagctctcaagaatgaccatttgtttcctgttccaaagcagtgtagagtaagccagggttagcaacacacatctgcaacagactccgtgaaaaaagggagtagtcaggatttgagaaatatttctataatgtggtttcttacatctggtgttgagaccagagcagctcctttaaatcaaaaaattgtcagatgagtgatccttagagaataaaagaggcagggtagragtgacctttggaactcctcctggaaaagcgtacctccctgaagattctgtccctccacccttcaaccagcaaaacaccatgaagtcagctctctgactcaaga

SEQ ID NO: 650373 - DNA, 522 bp, Homo sapiens
gaacagcaatcctgctccggcttgtccctaagtcaagcagggtcatttgaaacttttgtctttaacaaccccctgaatacaaggatatgggagtgccatctcagttcgccggtcacactggcgcagaaatgcctaattgtggcatattataacatacagcaaactcaaagcttaagacgctttgaactccattctgcagatagatgctgagttaatcacaattgaccttccatgtagcaggtgaaaatagtgaacatgtactaactcacacttttggagggtagagaatccggaagcggcttagctgrgtggctccggctgagggtctctcaggaggctgcagtcacctcaaggcctgactgggggagagtatgtttccagacttggctcctccccatacagcctctccaccagctgagtgtcctcatggcatggccactgtccaccccagagtgagggattcaagagggagggcaagagagccacctgagtcacagtccttttgtaatctaattttagaag

SEQ ID NO: 650374 - DNA, 645 bp, Homo sapiens
aatggaaatagtttctaggaagaaactagtgaattaaaaaataaacagcacatcagattccaaaaaatatgtgtaaaggatcaataaacattcaatgaattcaagaaaaatatctgaatatctggctatcaccttactagtttattataaaaacgtgatcatatttcagaagggagcaaagactgatttttccaacaaacaaaattgtatagtactttattacaggtttttgtgcttcatttatcaatattttagatcagtttaccaaaaaaaaaatacatagcaaaaacactcaactctcaaatattaactagaagagaaaacaaatcattcttagataaaacatctgcaaataaccataatctatgaaggaagtataaaggaaaaggtgaaaaagaatattataatgtttaaaatattataatgctgtaatcccagcactttgggaggsccaggcaggtggatcagctgaagtcagaagtttaagaccagcctggccaacatggcgaaaccccgcctctactaaaaatgcagaaggaaattagccgagcgtggtggcatgtgcctgtaatcacagctactagggatgttgagacaggagaatcacttgaacctgggaggcggaggttgcagtgagccgagatc

SEQ ID NO: 650375 - DNA, 551 bp, Homo sapiens
aaaatacctccaaagcttcagacttaggacaaaccagggagacctgaagttactggcaggttttgctgccaaaataatatagaatttattcattggtctgcttatgtacagatttgagctctgttccctttatccccacacaagctttgagttatttatatgtcccttaaacaagctcaagccttttgctggaaaacaattatccttaggagccgggagctttgcatatttgatgatcagatatgcatttctggttcagcgtctttctggaaattctattttctattaaatctcagatggatggtaataataaatgtttgtttagcagcagctggtcccagattgttatcctgtcgtgaacatattttatttatttgtctycatttttttaacctcttttggtaacctttccttttttcaaggctttatacgtgaaataaaaatgtgtgctgcttaatctgttcactttccagtttctctcactgaattaagtgcaattgtatttatacaaaaggcctcatgcaacttgctatgcatcactgctgatttaa

SEQ ID NO: 650376 - DNA, 483 bp, Homo sapiens
tggttcaacacttggctctgacatctgtcagctgtgtgaccttgggcaagtcacttacttaatctgtctcttgtgcctgagtttcctcacttatgcaacatgagtagtagcagcacctgttttataaggtgttatgaagattaaatgagttcattccctgattctcacagttgactacatatgtgagtcacctggggagtgtttaaaactcaatttaggagagcctgatttcattggtgtagggtgtggcctaagcatagggactattttaaattacccacgtgattctaatgtgcaggagagttcatgaaccactgyattagtatatgtagatgcttgaaagagtgtctgacacagtgtaaccatgatttaagtatttgaagttattatatttttagtgtctttaaaatgcataatatatttaaaatccacaattgagagtctactatgtgccactaaatgccactgcaggacggaatattt

SEQ ID NO: 650377 - DNA, 535 bp, Homo sapiens
tgagacagtcatgagattttgttggctgtgcagtgatactttgaccagatgttttattaagatgtccagcatctctctgtttttctctggcaatttgcacaccaatgcatgtacagcctccaccctgtagttttggtcatcagatttaacagcaatgatacaaatctttgtgtaacttgtaagtcatcagtggtgctgcaaagcacctgaggtagtttttcagcccactcattgtcttattgtcccacagttcaatatcaatatcaggaggggatttaggagaaaatatgatattcacaagtttttgaactttggagttcactcctcctattcagtagaggcctaaaacggtgataccgcttgtttccacagcttgaatgcagtttctcacaaaattgaaccctgcttcattcaaatacctttcttctttcttgcttataatgtcaggcagagtataaatcrtttccttcccatccatggcttcaagccagagtttcctattagcgtctgagaaggcctgtaatgtgatgatccc

SEQ ID NO: 650378 - DNA, 602 bp, Homo sapiens
ggctccctgtgaagctctctggcttaggcagccttcccgagtgccccatagtacctagtgctcagctttattattgcttgtaacacagctcattctgaatgtctggttgcttatctacattttccattagacaatgaccgtctcaatggaagagaatatttcttgctcctctttgcatcttcagctagggactcaatgcttgctgaatgaatgaaaagtttttggtggaactagatgattgttgttcatgctgttctgactgtttttgtttgcttgttttgactggaacaagaattccatagcaagctaatatttggggatgcagaagtcttatgtacaaaatatctatttatatccccacatcttacccgtttctgattgtttttttcttcttaaactttgaatgaaacctatatgtgaagctttgaatagcactttaaacaaagcccagcaacccctctccacctataccatcatctatgactatttcaataactcctataccagayggaagttttggtagttttagaatggcaaataacgttaaaaatcattatgaataaatattaatttacctaaacacaggtttagttttttgtttg

SEQ ID NO: 650379 - DNA, 611 bp, Homo sapiens
gtgattatttttcacaaatattacattcatataatcttacccatcacaattgaaatacgaattgttcagtggaaaataaatttctaaattatcgtaactatgcccctaagacaaatttcagcatttaaaaattgtgatagaaaatttttgtaaatgaatgccattcttctccacctcaataggtttcataacatataatttaatttgttgctgatgggcagacttctataacgaataaattctttagcacaacaattccatcaggggcacattaagtgaatttactgtgctatcattcagtttgttaaataaccctatagaaacagggctatgctattcctagaggcctgtgaccaatgatgctatcaccattccccttcactgaagggtttagggatatagaaatagtatggtcaaaaaccagtaaacaggtyctgcaaactattgttaccacagtatagaaatttatagtttgcgtttagcaagttttataaacatttattaatttttataactattggacctaataacaaaacatcagggttgtactttgtatttattttccatttcgtttgtctaataatttttattctattttgtacaagtataaa

SEQ ID NO: 650380 - DNA, 659 bp, Homo sapiens
tgtttatttttgcttttgttacttgcgtttttgggatcatttccaagaaatccttgcccaaatcaatgtcttggagcatttcccctgtttttttttttctaggagttttacagtttcaggtcttacatttaagtttgtaagccattttgaggtgattttgcaccgtttcatatttaatggatgtttctatctctctccgtagggtgattgttcaagtttttgccaattttgctcttcagtttttaactcataaaaccttttatgtattctggatatctcttctttgttggttatatagagcagagatctttatggcttgtcctgtcattacagtgtcttttaatgaacaggagttgatttttaatttttctgctaaaattcaccttttttagtaaacaagtctgtgggttttgacaaatacacctaatggcataaccaccaccacaatcgaaacacagaattgcaccacactccaaaattccctgttgtcactcctttgtagccaccactcctgatccacagccccgagcaactactgatttgtttctgtcaaggaaacttttgccctttccaggattccatataaatggacacrtactgtttgaagccttttgagtctggcttccttcacttagcatcatgcatttgagatttatcaa

SEQ ID NO: 650381 - DNA, 561 bp, Homo sapiens
aacctgtgaggaacaaaggaataagaactgtagtagtaattcaagcaacatgtctttaatcttatctgaactgtcaggttaggcaagcttatttgctgtacttggaaagagagcttccaaaagtgattgccttcttcaggtataattctctcttcacatttgtttaaaagataatgttaagtgaaataaaacaggtacagaaagacaagtaccacataatttcacttgcatgtggaatctagaaaagttgatctcatggaggtagagagtagaaygttggttaacagggtctggggcagtggtgatggagggggtaagaaagatgttggtccaaagacacaacatttttgttagccaaaaggaataaattcaaaagatctattctacaacagagtgactacagttaataacaatatattatattcctgaaaaatgctaagatattagtaagtgttctcaccacaaaaatgacaactgtgatgtattggctttgtttggccattctgcaaggtatatgtgtttcagaatgtcatgttttatatgacaaatatatataattgt

SEQ ID NO: 650382 - DNA, 582 bp, Homo sapiens
atggtggcatgctaccacttagtcatcaaacagttaccattaagaacaaagcaataggttggtaatttttttgtttcttattttatctaatgcactgagtccttaatcaattcagcagagtatatgtggaatattgaacaatttcatgtagatgctaatgcaggatgagatgctctcatgcctcatacacaaatatctcaaattataggatgatgacttcctaactccacacttcaacattttcaaactagtttgcaacccaatggtaaatctagaaattaatttggtagaatggagccaaggattttttttttataaaatagacaaagtaaaatagaarttagtagagtgcctcacatatagaaaggtaaatatagtctccaaaagctttttgttctgtgtgtgtgtggagggggtgtatgtgtatgcatgcacgtgcgtgtgtgctaaatcttaatgtaaaatctatatattactgtggatcatttcaaggtctgaaagctactgccttgtaccacatattagcgtttcagaaaggagaggtaaattgtttaatatctcagaggtattacatgagggaag

SEQ ID NO: 650383 - DNA, 582 bp, Homo sapiens
atggtggcatgctaccacttagtcatcaaacagttaccattaagaacaaagcaataggttggtaatttttttgtttcttattttatctaatgcactgagtccttaatcaattcagcagagtatatgtggaatattgaacaatttcatgtagatgctaatgcaggatgagatgctctcatgcctcatacacaaatatctcaaattataggatgatgacttcctaactccacacttcaacattttcaaactagtttgcaacccaatggtaaatctagaaattaatttggtagaatggagccaaggattttttttttataaaatagacaaagtaaaatagaaattagtagagtgcctcacatatagaaaggtaaatatagtctccaaaagctttttgttctgtgtgtgtgtggagggggtgtatgtgtatgcatgcacgtgcgtgtgtgctaaatcttaatgtaaaatctrtatattactgtggatcatttcaaggtctgaaagctactgccttgtaccacatattagcgtttcagaaaggagaggtaaattgtttaatatctcagaggtattacatgagggaag

SEQ ID NO: 650384 - DNA, 564 bp, Homo sapiens
tgataagtaatgttgagttttttttcatatatctgttggccatttgtatgcatgttttctttcgataaatgtctattcaggttttttgcccatttttaattcagattatttttttttctgctattgaattgtatgagttccttataaattctggacactaaccccttgtcagatgcctagtttgcaaatatattcttccattctataggttgactccttactcyattgattgtttcatttgctgaggggaacctttttagtttgatactacttagacataaaacaatgaaatcttattgtttacagcaacatggatgattgggagatcattatgttaagtgaaatgagccagacacagaaagacaaacaccacataatctcactcatgtggaattttaaaagggtgatattatatgagtagagaatagaacagcagttactagaagttggggaggatgggggatgagaaatgggaaaaggttggtcaatggtcaaaattgcagttccagtaagttctgggtgttttagtacatagcagggtgactacagctaatgataatgtat

SEQ ID NO: 650385 - DNA, 530 bp, Homo sapiens
cttatcttaaaacttttatgaaaacaaatatctaagaatattaaaataaaaattttaagaacaagggtacaataaatatcattcttatgtgtkacaaatttaaatataaacagaaataagattgtctattagggttaatggctcaaaaatatgaaaaattataaatataaaagattgctagggttagcaacattaaaataaatacaaaaaaagaaaaattctacataagaaaaacatcattcatttaattcacaaactaagttttggtgaagagatgtgtaatgaattaaaatgaaaaagattatattccagggtataaaaggagtttatattccagagtttaaaatgtgcacacacacacacacacacacacacacacacacacacacattcaggagcccacagatttgagagtggcaccagtcatgcagtattaactcaagtaggaaaaataagaagagtttttggttttgagaaacagatgctacattaatttttaaaatatatttgcttactcaacagatattttt

SEQ ID NO: 650386 - DNA, 530 bp, Homo sapiens
cttatcttaaaacttttatgaaaacaaatatctaagaatattaaaataaaaattttaagaacaagggtacaataaatatcattcttatgtgttacaaatttaaatataaacagaaataagattgtctattagggttaatggctcaaaaatatgaaaaattataaatataaaagattgctagggttagcaacattaaaataaatacaaaaaaagaaaaattctacataagaaaaacatcattcatttaattcacaaactaagttttggtgaagagatgtgtaatgaattaaaatgaaaaagattatattccagggtataaaaggagtttatattccagagtttaaaatgtgcrcacacacacacacacacacacacacacacacacacacattcaggagcccacagatttgagagtggcaccagtcatgcagtattaactcaagtaggaaaaataagaagagtttttggttttgagaaacagatgctacattaatttttaaaatatatttgcttactcaacagatattttt

SEQ ID NO: 650387 - DNA, 620 bp, Homo sapiens
aactacacttgtttcataagcagtctctcttttcttttctgagcataacttttgactctaatttattgaatgaactgaacacaaaatatgcatcagaaaaaaaatggtatttttttcctcctatcacatctttcaactcttctcggttggctcccctttccctgctcattgacaacatctctggaagatacaacagctcttttgtcactttcagttgtaagaacggtcttattttttgataattttcactttcaggaataaataatccttaggtggtccagtgtcaaaactgagcctcagatactgttctcctcactccacctggccaattttagttgggctgtgatccgtgatgtctttatctttatctcttttcccttctggatcttccagaatcaaaatgaggagataagagattaaaagaaaaagacaaaacatattttrtgacttacacaatttgtggccactggtgcccttaagtcatgatagacatttatgtgctggtttttttatgcagtgtgtgttatgttctttgagaataccattcccccacagcacacacatacacttttagattatggtcctgtgtatttgcctaactgaactcaccacttgcgagc

SEQ ID NO: 650388 - DNA, 382 bp, Homo sapiens
tttaattttgttggtggttattgtaaatgatactactttttaaaaattttgttaaaaagtgttcacttttggcaaatagaaatgccactaatttttttgtatgttgattttgtatgctacaacttcactgaatttgtttatcagttataatagtttatttgtgaaatctttaggtttttcctagtataaaattatataacctgcagacaaggataatttgacttctttctttccaatttggatgtackttatttctttctcttttctgattgctctagttagggctttgagtattgtgttgaataacagtggtgaaagtggggatccttgtcatgttccagatctttgagaaaagactttcagttcttccctattcagtatg

SEQ ID NO: 650389 - DNA, 540 bp, Homo sapiens
gatttcgggctttaaattgatctggtattccccatgggactctaattgtgtctaaatagacttgagagtcgaaagacaaagacacataaggggcttcttttgctttacgatgtcttatttttcctttctctgactgatgaaatgcaagggtgaaccaattggactaaagcacaagtgccacttcagttacttggcagagtgtccagtcaaggtccgccataataccagtacacatctgctcagggatgaataaaggctgattgattggtaagctcctgaaaattcttaaggtcactgcatcccttcaggtctccaaggaacactaagttgcctccctgtcgtgagggacataaaatgaacttagtgttgagagacggaagctggatagccctcgggggctgaccctcagggtgtcaaactttgggatatagcagacagagagcttggcacaacttgttacctcaggctgcagaatcctggaaaagagctaccrtgcagcccacacccggtcgactggaggaccaccctagtggaaagggg

SEQ ID NO: 650390 - DNA, 603 bp, Homo sapiens
tctccatttttctggccttgttctaaaatactagggactatgtttctatttttatttatttctatgcttacattttcaggccwgcagttaaattcctttatttgttcatttttacgtcatttcaaatagagtgttttaggcaaaactcctctctaattttattccataaagttgctctcttcttgagagtccataattatagtttcagggcagataatgtttttcaataaagattaaaatgagtatttttttcaggtttccaccctgggctgctgtgtgtcctacaactccaggggtaggcttgccttgctcttttcagatgaccctgcacacaccacttactcccagtacacacaaatggtactccctgggcctggggatgcagtagctttgtcatacctaatgttatttgttgtgctatatgtttcaatctttaaagcctgagatccaaaggggagcttgcatagccataattataatttttatatggttctaaatactttgtccacgatacttcgaaagtgatgttcatgcctaatgagattattgtaaataaattatattttatttttacagaagagtatgttatttataaaatatgaa

SEQ ID NO: 650391 - DNA, 382 bp, Homo sapiens
aataacagtcgaactgtatgcatgtgttataattttattataaacatatttttccaaagttatctagatatctgtagtaagctaaatggtgtcccctaaaaagatatgtataaatctgatctcctagcacctgtgaatgtgatcttagagaaaataaggtctttgcagatgtaattaagttaaggatcttgaaattagattatcctgaatttaagatgaactttatgtccatgaaaggtgcccctataagctaaaaaaaaaaaaaaaaaaaaaaaaaaaaaaaagggagatttgatatacagagacacacagggagaagtccatgtgaaratgcaggtagaggttggagtcattcagctctaagccaagaaatgcctggagc

SEQ ID NO: 650392 - DNA, 587 bp, Homo sapiens
ggaaataatttatgactaagtattcaaaggcaattgcaacaaaagcaaaaattgataagtgggacataattaaactaaggagcttctctaccgccaaagaacctatcaacaaagtaaacagaaaacctacagaatgggagaaaatattcacaaactatgcatccaacaaagatctaatatccagaatctataaggaacttaataagcaaaaaataacctcattaaaaagtgaaaaaaacatgatcagacacttctcaaaagaagmcatacaagcagccaactaacatatgaagaactgctcagcatcactgatcataagagaaatgcaaatcaagaccacaatgagatacacctcacaccagtcagctattattaaaaaaccaaaaaacaacagatgctggtgaggttgcagagaaaagggaactgcttatacattgttggtgaaaattcaaattagttcagtcactgcgaaaagcagtttgcagatttctcaaagagcttaaaacaaaactaccatccagaccagcaatcctattactgggtatatatccaaaggaaaataatttattctcccaaaaagatacatg

SEQ ID NO: 650393 - DNA, 499 bp, Homo sapiens
ttaatcctcacaagaaggctggtactataattttctttttataaagaaactaaagcagagaaagttcatttactggaggtcacactgcttgtcagtggtagagccaggatttgaactcaggtatttggccccagagttcactttcacaggcaggcctggtaagagattgcatgttgaaagtaagtaaaaaaaggaggttttaaaggtttcctggctggaaacagtggctcatgcctataatcccagcactttgggaggttgaggttggtggatcacctgaggtcaggagtttgagaccagcctgaccaacatggtgaaamcccatctctactaaaaatacaaaattagccaggcatggcggcacatgcctgtaatcccagctactggggaggctgtggcaggagaatcacttgaacccagggggcagaggttgcagtgagccaagatcgcgctaccgcactcccacctgggtagcaaaagcgaaactccatctcataaa

SEQ ID NO: 650394 - DNA, 499 bp, Homo sapiens
ttaatcctcacaagaaggctggtactataattttctttttataaagaaactaaagcagagaaagttcatttactggaggtcacactgcttgtcagtggtagagccaggatttgaactcaggtatttggccccagagttcactttcacaggcaggcctggtaagagattgcatgttgaaagtaagtaaaaaaaggaggttttaaaggtttcctggctggaaacagtggctcatgcctataatcccagcactttgggaggttgaggttggtggatcacctgaggtcaggagtttgagaccagcctgaccaacatggtgaaaacccatctctactaaaaatacaaaattagccaggcatggcggcacatgcctgtaatcccagctactggggaggctgtggcaggagaatcacttgaacccagggggcagaggttgcagtgagccaagatcgcgctaccgcactcccrcctgggtagcaaaagcgaaactccatctcataaa

SEQ ID NO: 650395 - DNA, 499 bp, Homo sapiens
ttaatcctcacaagaaggctggtactataattttctttttataaagaaactaaagcagagaaagttcatttactggaggtcacactgcttgtcagtggtagagccaggatttgaactcaggtatttggccccagagttcactttcacaggcaggcctggtaagagattgcatgttgaaagtaagtaaaaaaaggaggttttaaaggtttcctggctggaaacagtggctcatgcctataatcccagcactttgggaggttgaggttggtggatcacctgaggtcaggagtttgagaccagcctgaccaacatggtgaaaacccatctctactaaaaatacaaaattagccaggcatggcggcacatgcctgtaatcccagctactggggaggctgtggcaggagaatcacttgaacccagggggcagaggttgcagtgagccaagatcgcgctaccgcactcccacctgggtarcaaaagcgaaactccatctcataaa

SEQ ID NO: 650396 - DNA, 655 bp, Homo sapiens
gacgggaaagacccgccccttgattcaattacttcccactggtccctcccacaatgtgtgggaatttggggagttacaatttaagatgagatttggatagggacacagccaaactacatcatgtacttacatcaaaatagagtttttctctttcataatatttatccttcgttagagtaaaaatggctttcaaattaccaataaaatgacagacaccaatatgtacttgattctttaagaattgtatatcttgtattaatttaatctaaatgtcaactctttcctcttaaattccatagaattgacacaaactccgycctcattcagggggaaatccagtgttctctccaggatgtctgcagatgctaaggtcatgatgtaatttagtcacgtctgcccactctgtgttccttggtcttctctctttcctcttgccactatcttatttttcctcttatttggctttccccaagcccaattatctgttcatttctgatgttaaagcatttggcaactctcaaacagtctctttcttccctctttaaatttttacagccaaaaagcttaactctgcttctctaaacaaacaagcaaacaagtcctttccctaaggagaattcctgtgtctcctgcagtcagtttacccattacagtg

SEQ ID NO: 650397 - DNA, 456 bp, Homo sapiens
gagatgccccaaactacatgtggcaagcagtctctaaaaggatcccaataatttttcctcttgatacctatgcccttatgtaatcccctttccttgagtgtatgctgtcctagtgatttgcttataaccaatagaatatggcaaaggggacagtatgctatttctatgattaggttacataagactgtgacttccgtcttgctagtagagtctcttcctcattggctttgatgaaacaagctgctatgttggagagactcatgtggtgagaaagtaaaagagacctctggacaacagccaggaaggaacaaggccctcagtctaacagcctacaaataactgaattttgccaataaccayatgcgttctgaagcagatttctccctagataattcctcagataagaccaaagccatgtctagcactttggagagaccatgaagcagaggatgaggt

SEQ ID NO: 650398 - DNA, 456 bp, Homo sapiens
gagatgccccaaactacatgtggcaagcagtctctaaaaggatcccaataatttttcctcttgatacctatgcccttatgtaatcccctttccttgagtgtatgctgtcctagtgatttgcttataaccaatagaatatggcaaaggggacagtatgctatttctatgattaggttacataagactgtgacttccgtcttgctagtagagtctcttcctcattggctttgatgaaacaagctgctatgttggagagactcatgtggtgagaaagtaaaagagacctctggacaacagccaggaaggaacaaggccctcagtctaacagcctacaaataactgaattttgccaataaccatatgcgttctgaagcagatttctccctagataattcctcagataagaccaaagccatgtctagcactttggagagaycatgaagcagaggatgaggt

SEQ ID NO: 650399 - DNA, 602 bp, Homo sapiens
tctttgcatatgccaaactgaattctgtcacaaccaaaaaagcattaattaatacacttcgttaaatatatatatttattccagaatgtgacacgttgtgacatgcagtgatatggtttagatctgtgtcccaccaaatctcatattgaattctaatccccagtgttggaggtggagcttggtggaaggtgattggatcatgtgagcggagttctcatgaatggcttaggagtgagttatcgtgagatctggttgtttaaaagtatgtagcacctctytcttctctccttggtcctgctcctgccttgtaagacacctgctcctgcttgctttgtcttccaccacaagtaaaagctccctaaggcctccccagaagcaaatgctgccatgcttactgtatagcctgaggaaccaggaaccaatgaaaacctcttttctttataaatctccattctcatgtatttctttatagcagtgtaagaatggactaatacatgcagcaaccactattttttaggaggttgagaatcctgaaatgaaccacacatacctcatgtacatgaatggaaacttaacagctgggaagaaaataattatctctg

SEQ ID NO: 650400 - DNA, 572 bp, Homo sapiens
ttttggcatactgtgtttttgtcttcatctatctctaaayattttctctaaagttgctttgtgatttcttttttgatctattggttgtttagaattgtgttatttaatttctacaaactagtacttttttggttccttttgttatgaatttttaacttcatcccattgtggtaggagaagatactttgcatgatatctatcattttaaatctactgagactaattcaaggcctaacatattgtctatcttagaagatgtccatgtgcatttgaaaagaatgtgtactctattgttattaggtagtgtgctgtatatgcctgttagatctacctggtttattgtgttgtctaagtcctctacttcttcatttatcttctgtctacctgttatattcaatatagagagtagggtattgaagtctcctataattactgtagaactgtttatatctttcatcatttctgtccatttttctttatatattttgatggtctgtaatcaggtaaattaatgtttgtaattgttagatcttgctgtattgaaacttttattaatatgtaacatctttgtc

SEQ ID NO: 650401 - DNA, 572 bp, Homo sapiens
ttttggcatactgtgtttttgtcttcatctatctctaaatattttctctaaagttgctttgtgatttcttttttgatctattggttgtttagaattgtgttatttaatttctacaaactagtacttttttggttccttttgttatgaatttttaacttcatcccattgtggtaggagaagatactttgcatgatatctatcattttaaatctactgagactaattcraggcctaacatattgtctatcttagaagatgtccatgtgcatttgaaaagaatgtgtactctattgttattaggtagtgtgctgtatatgcctgttagatctacctggtttattgtgttgtctaagtcctctacttcttcatttatcttctgtctacctgttatattcaatatagagagtagggtattgaagtctcctataattactgtagaactgtttatatctttcatcatttctgtccatttttctttatatattttgatggtctgtaatcaggtaaattaatgtttgtaattgttagatcttgctgtattgaaacttttattaatatgtaacatctttgtc

SEQ ID NO: 650402 - DNA, 351 bp, Homo sapiens
ttctcactttaacaaggcaaggtaaagtgaacattactgattgtcaaaattatccttgaaacttctttaaatctggaggaccagggctctgggcaaaaagctaagaattcactccagcactttgatttccctttgccctgaggctttccyggccctgagtagggtagaggtgtgagtctactttgaaatgggaaggagaggaaagatgagatgaagagttggaaaggaggggagagggggagacataggatggagaagggaggggccacagagatgcaccaatcttctttttccaagaaagtgccatttgaactctcgcaagtgagggcatggtgtctctctgctctgtct

SEQ ID NO: 650403 - DNA, 647 bp, Homo sapiens
tagatgacttacaagcttaatattgtgtctttaagtgtaccatgtctccccattaaggaggacaatagttaaaaacaagacataattggccakgcacggtggctcattcctgtaatcccagcactgtgggaggccaaggcaggtggatcacctgaggtcaggagtttgagaccatcgagaccagcctggtcaatatggtgaaaccccgtctccaataaaaatacaaaaattagctgggtgtagtggtgggtgcctgtaatcccagctactcgggaggctgaggcaggagaatcacttgaacccggcaggcggaggttgcagtgagccaagatcatgccattgcaccccagcctgggcaacagagaaagcctccacctcaaaaaaaaaaaacaaaacaaaacaaaaaaaaaaccataattgtcttgatacaacttcttgcttagaaacaactcttggctaaacttttccacggtacacaaggaagacattcaaattgctcatttgagaacaatgttgagctgcaacatgttaaaagataactccatattatttctcaagcacccactggcatatagctttgtagtaggcactattataggagcaaataagcatttgtttttttatatcacatatttcttcttccactg

SEQ ID NO: 650404 - DNA, 544 bp, Homo sapiens
gctcaccatcactggccatcagagaaatgcaaatcaaaaccacaatgaggtaccatctcacaccagttagaatggcaatcattaaaaagtcaggaaacaacaggtgctggagaggatgtggagaaataggaacacttttacactgttggtgggactgtaaactagttcaaccattgtggaagtcaggagcttcaatttctatttatcattatggagaggaastagaggatgatgctatggggagaatgtcctgagctacttaccctcttaattatattaaacattcctcctggattcttattaactcacaaagcaagccttgccttcactgacaatgtacaattagccttttgctcatccttgaataaaaggctgaattgtcagattgagatacaagagttcagtagttttcttcctaaaggaatagcagcagcagcacctaatatttagtgtgtgttcactgtaagccaggaattctagtatttcatatatattaatggactttatttttcccacaacattgtgggaggtaatattgttaccc

SEQ ID NO: 650405 - DNA, 535 bp, Homo sapiens
ggtggggacacagtcaaaccataccagcatattatatttaaacttcagaaaaatcaaatacaaaaagaaaaaccttaaaaagcagccagattgagggtagatggtgaagggtacattacctacagagtaacaagtataagagttgacttttcttcagacaccacacaagtaagaagagaatggggtgacatactacagttttgtgaaaaaaaatggaccgacaaatactaacaatctagaattctgtatccagtaaaattatctttcgagagtgaaagagtcagacatggtgatatgtgactgtagtcccagttgtcgggagattaaggcaagaggataattctttgggctcaggagggcagcttgggcagtattatgaggccccatctcaaataaattacagatagatgacaagtagattagatagatagatgatagatagatagatasatacatacatacatacatacatacatacatcaatagatatatagatacattgatagatacgtatgtatacaaaacagctagctag

SEQ ID NO: 650406 - DNA, 562 bp, Homo sapiens
aacccaccaattccggacacaatttcatcttctttggctatattcccagaagagggatcactgggtcatatggcaattctattttacaaatttgcatactgtgttccataatggctgtaccaatcttcattcccatcaatagtgtattagagttcccttttcttcacatccttgccagcatgtcttaccacttgtctttttgataatagtcatcttaacaatgtgacatcatatctcaaagtagttttaatttgcatttccctaatgaggactgatgttgagcactgttttatttatcttttgggcatttttatatcatctttggagaaacgtctgctcaggtccttttcccattattttaatcttacccagagacctttaatttggagttcatgttttcaattattttactatgctgcaaacatcatcatgatgcatagtgcctccatatcttggtgtcagatgttttcacctctgggtagaatattctttctctgattttcttttccttatcatttaaaattaaatgmatgaacccacctcctctaaaagaaaggtatct

SEQ ID NO: 650407 - DNA, 665 bp, Homo sapiens
ttaaaaaacttaatgaatattacaatgcaatttagttcatgatataccattagaaagaaggaaggagtgatgaattagtaatttcacagattaaaccacaggatgtgatagcttaaagaaatttagaaattattagattagtctgggtgcagtggttcacgcctgtaatcccagcactttgggaggctgaggcaagtgcatcacctgaggtcaggagttcgagactaacctggccaacatagtaaaaccccatctctactaaaatacaaaaattagccaggcatggtggcatacgtctgtaatcccagctacttgggaagctgaggcaggagaattgcttgaacccaggaggcagaggttgaagtgagccaagattgcaccattccactccagcctggatgacagaatgaaactccatttcaaaaactcaaaaaaaatcgttagattaaaatatgatctgaaaaacagaaaacggccaagattagttgtttcagttattcatggaatcacccaatggttaaacatggttgtacatgcctctacattttgtctgtattttaagtatacacaygcgcgcgcacacacacgcacacacatatatatacaaatatatatacacacatatgtatacagagagcatatgataatcatccaatgaactggta

SEQ ID NO: 650408 - DNA, 587 bp, Homo sapiens
tttatactgagcatgtgtattacagttactattactgcgtaacaaataaccacaaaactttgtggcttaaaaccactttactatgctcctggattctgtaggtcaagaattaagatagcacacagcttatctgtgctccacagtgcctggacttctgcwgggaattactcatgggatggaggctggagttctccagacagcacaaccgctgccatcacgctggctgcagcagagaaacacggctggggcttcatgctccatggagccagtgagagctctgccccttctgagttggggcaggagctccgcaggtgtcgctgcaactacccaaaccatggctgcagactcatgcatcctgcactcttgggagcccaggaaggccccccctaccctcacaggctcagaagtgactgctcccactgcctggcttttccctgctatggggcctgctcccatgactggtggtggatcctgctctgcctcagtgggacttgagctggggctgtcaactaaagcagctgcttgagctctccatgtggcctgggctcccttataccatggtggccttagggtagtctttttctttc

SEQ ID NO: 650409 - DNA, 520 bp, Homo sapiens
tacctgtccttaatctttctatgaatttcaaaacttttcagacctatttggaagaaggaacagggctgggggcatttgcaccacgcttcttctgaatattctttactagctcagttgtatgttttccactacttcccagggcctaggttaatgataatatgtccaaggaaagkcaatctagtgtagtaattgtcaaactgtagtagttgttgcctataatccacattaaaaataaggcaaaaagcccaatatttttcttaatcttccagcaagaaatagtacttgtcaataatggtagacaagatgcagaagaaggaggtcgtggaatctcctgacagctgagtaggaaaggacaaacacactagtgatgtcctcatttacttacttatttaacacattttattgatctccttccatcttctaagaaacaggctgaatgacaggctgttaagaaaggtgaataagatagggctctcccctgttggaaacttctgatagagtagaggagatggaaaatgag

SEQ ID NO: 650410 - DNA, 587 bp, Homo sapiens
tgtgtgtgtgtgtgtgtgtgtatagtttcctatctagaccgggaggtcatggagtggaataatytagttttgcctagtttccagtcgcatagcagacatttctaaatgaatccatgcataaattaatatacaggtaaacccagaggcagtctgggtaaaaaaaaaaaatttctgttatcagtttatgaagaaaccaattttctatcaagaacagtgaaattttaatgggcctcaatagtcagctcttcaaagatgtttgtgtcccaatcccttgaacatgagaatagttctattaaatggcaacagggtgttaaattgtagacggaattaaggctgtcaatcagctgaccttacaatatggagattatcctggattatccaggtgggccaaatgtaattacaatgaactttaaatgaagaagggagaaacagaagagtcagaaccagagaggtggcactaagacaaagactcaactagccattatttgccttgaagatggaggaagtagtaaggagccaaggaattcagggggcttctagaagctggaaaaggcaagaaaacacattttcctctagagttccagaaa

SEQ ID NO: 650411 - DNA, 539 bp, Homo sapiens
gcttcagtggcttagcacctccaagatgctcctttttagtacttacgggaaaactgaatgaacaacagaaaaaaagggggggttgggggggttggattgctcttccggacaacatggtagtactgaaatgaaatacctagacagacttaccgaagagcttgctgggagtgtcctcgctgtcatttgattccacaggcgcaagcaggggctcattcagctcgctgtctgaagtagcagccttgtcctcacctctcaactccgcattcatttcactccgcactgacagcaagggcttactgacttgtccagctatcattggatcctaggatgggcgaaaagagtgaaggggaggaaaaaaaaagtggcagmtttagagtgcgtgtcctctctctccctctccctctctcttctctctctctcttccacacacactctccctctctcctctctctcttatctctggctgctcccgctgttattgctggctgcagtcaagtgaagagctattacagatccgatgagttctccattactcccca

SEQ ID NO: 650412 - DNA, 646 bp, Homo sapiens
gggcacataggcagcctgctgcagggcagaccccacatagagaaagtctactagggcagtgcctaggggaaatgtggaattggagaccccacatagaatccccaccaggcactgcctagtggagctgtgggaagggaccacagtcctctagaccccaaaatagaagatttaccagcagcttgccgcctcagcacggaaaaaccataggcattcagccccaaaccatgagagcagccgtgagggtggcatcctgcaaagcactggggtggagctgcccaaagccttgcactagtgtgctgtggttgtgagacatggaaccaaagaatattcttttggagctttaatatttaatggcttccctgctaagtttcagacttsgctgaggcctattgctctgttcctttggcaaatttatcccttttggaatggaaaagtatttataccactattgtatcttgggaataagtaacattttattctttgacctcacaggttcgtaggtggaaggaattcatctccagataagactttggacttgggacttgggattgtttagttaaggctggaacaagttaagactttgggggactattgcaaattcatgattatattttgaaatgtgagaaggacatgagatttgcagagg

SEQ ID NO: 650413 - DNA, 646 bp, Homo sapiens
gggcacataggcagcctgctgcagggcagaccccacatagagaaagtctactagggcagtgcctaggggaaatgtggaattggagaccccacatagaatccccaccaggcactgcctagtggagctgtgggaagggaccacagtcctctagaccccaaaatagaagatttaccagcagcttgccgcctcagcacggaaaaaccataggcattcagccccaaaccatgagagcagccgtgagggtggcatcctgcaaagcactggggtggagctgcccaaagccttgcactagtgtgctgtggttgtgagacatggaaccaaagaatattcttttggagctttaatatttaatggcttccctgctaagtttcagacttcsctgaggcctattgctctgttcctttggcaaatttatcccttttggaatggaaaagtatttataccactattgtatcttgggaataagtaacattttattctttgacctcacaggttcgtaggtggaaggaattcatctccagataagactttggacttgggacttgggattgtttagttaaggctggaacaagttaagactttgggggactattgcaaattcatgattatattttgaaatgtgagaaggacatgagatttgcagagg

SEQ ID NO: 650414 - DNA, 507 bp, Homo sapiens
tagtagctggtttctaaatgttgattgatttctattcagttcccagatgtatgacaaaaatcttagtgtgattccctggttcagttgtacaaggcatcagctctggggttaaaaagcaggatatggacctgaatcccagattgactgtgcatccagtgccatcttctctttttgtcacaaatttcatttgtctctacatttctggttcagcagatgtttctttatggctgctatgcttatgcttgrgttggttgttagggctgttaagtaaaaagcactgtcagcacagtatcttgccctcaagagaggatgtaacttcaattttatgacaatgtttattattactgatataggaaagaaagtcccttgcttgtttctggcccacttgctcaatactttatatttaaaccatgataggatactgatttttttaaaacaccaatcttgctttagacttttaatcatcactaagtaggagaatctgtaatcatgtgacaaatactgagt

SEQ ID NO: 650415 - DNA, 525 bp, Homo sapiens
ctcaaatggaattttcaacagagggagaagaaggtgatttcttgagttcctggggggtgtcatcagtgtcatcaggggcagcgaagcccgctgctgctgatagatgtcctggatcagcagggtgttcatgactttccactctctgtatttcctggctgtcagcttcgggtcatccagcaactggttaatcatggccagatcatgttctttacactgtgtgagtagaaaaaaaggggaagggggtatgttgagagtgtcttaatttacataaaccatctttaccaactcttttacaagtacacatatacataaaattaccaaagcatttttgcacgttaatgttctaattccagcattaagcttaagaaatacgacatttgtttgcatacgctagccgcaaagaagtgaagtatcctacccaagagttagtgraagagctagacatatagcaaagatcttctatgttgcctttccctgatcaatccattattccacaccacagtaacaattctaccttggtgtggg

SEQ ID NO: 650416 - DNA, 446 bp, Homo sapiens
ccataacaaaaacctagaacatgcggcgttacctttaggagactggagaaatggtgaataaatcataataaattcttaaaaattacaatatgtactgaaatgaatccttaagagtaagacatctacagtatacaatttatggcggtaatacaagcacaacattgagtgtgattatctatcttaaatttttcaccatagatgtctcgcttgatttatcctagtcctggccacagctagtagtggaagctataatagcagagatraagctgctatagtaggttgaaaaaatggcaacacatgttttgagatagaacaaaaattgcctgcagtaaattaaaagaaaataaacctactgcatctagtagtgaagatgatttccaggcataatgtttaaaatgtcagttggattcttttagctgtgtgtgaaaaaaaaaaaaaaagaagag

SEQ ID NO: 650417 - DNA, 610 bp, Homo sapiens
tttaagaataaaatgtgatattaaaataatattgcttaagtggtataatgttttgccatactatgtaaatgatatgatatgtacatgtgatataatacacatcacttatgcaataattttatcaggataaaaaagccacaacagttaaaaaagacaaagagggacattatatacattatataatgatacaaggactggttcaacaggagagtatcacaatcctaaatatattcacctaaaactggagctcccaaattcatttatttattcattgatttctttctcttttttttaaattgagacaaggtctctctgtgttgtccagtttggtcttaaactcctgggctcaagtcatccttctgccttagcccctcamagtgttgggattacagatgtcagccaacacaaccatcctggagcttcgtaatttataaaacaattaccactagatctaagatatgggatagacagcaacagcagttatagtggggaatttcaatactcctctgacagcactagacaggtcagtgagacagcaaagtcagcaactacaccctagaacaaatggacttaacagatgtttacagaacattctacccaacaactgcag

SEQ ID NO: 650418 - DNA, 356 bp, Homo sapiens
gtttctggtgttgatgcagggcaggtaagccacaaaactggggcttagactgagagggttcttggcttcacccaggaaataattcaagggcaaaccgaaggtgttagaggccaacttttttttttttcgggacagggtctcactctgtcacccaggctggagtgcagtggctcactgcagactctgcctcctgggttcaagtgattctcccgcctcaacctcctgagtagytgggagtgcaggtgtgcgccaaaacacccaactaatttttttgtatttttagtagagatggggtttcaccatgttgaccaggctggtctcaaactcctggcctcaaatgatccacccgcctcagc

SEQ ID NO: 650419 - DNA, 584 bp, Homo sapiens
atctatggctgcatgacaagtcacttcaaactgtgtgactttagacacaacatttattgtctcacgatttctgtgggtcaagaatctagacagggcttaactgggttctttggtccaggttttctttttgtttttaaacttcactcctatgttcattgcagcactatttacaatggccaagatcattaatttgcctaagtgtgtgtgtggttttttttaattttagcttttattttagaaacagggggtatacgtacagatttgctacataggagtattctgtatgagatttggagtacggatcctgccacccaggtaggtagtttgttaacccacccctctcccttcaccctctagtagtcaatagtgtctattgttcccgtacttgtgtccttgaaagactgtatttaagatgtagagagggcagcttgagtcatcttgaggcttacctggaggatgaagctcttctaagctcatgcacgtggcttttggcaggactcagtgcttyatgggctgttggaagccctttgtagcttgctggctgctgaccatgagccagcttcagtttcctgacacatggacat

SEQ ID NO: 650420 - DNA, 587 bp, Homo sapiens
tgggcactcaaaccactggatggtctcgtgctgtaaggactttcctgttatgcaaccctgtccaagtactgccccataaggcttgttgtgtgttacagcctttcaggatcatatcttatttattgatcagcccccaaatcccttgaacttcctatttactggcctctagtaggagaatgcccagttgcccaggacttattttaaacaactaaactattatttaaggaatccaatcagattgtaaggtgtcaaattttctccatataagactgcatatatatatatatatatatayacacacacacatatacatatatacacttaactctatgtgacgttaaatatagtcagttttatttccaattatataacacttttcacttgctatctagcaggaagttggcatacgatacaaaatgatacctactcaattagcctgtgcgtctgatggagataaacaaaacaaaaataatttgaaggtacacccaccccttgttaatgtattcttttggttaatttattacagctcaagtatactatctgcttttgactattaaggagcttatctatttagtacttactccagt

SEQ ID NO: 650421 - DNA, 460 bp, Homo sapiens
gtatttcatagccaccatctgtgtggttcagggtgaatacatgtttttgcttttttcctcctaatattaaagaaaagttggacaatgttatacttatctatttatttttcttatttgtcttatttgtttcctctttgtcttttctactaagggaaatatttatgaaacaatttgttatattttaagactcaggacagaaaaatgaaagccagcaccaaaggtatgaagtaagtaaggagagaaatcaagccagaccctggtttgagattcattggtttatgaagaaaagacttagcataaagagcagtcaaaagggttaggaacagtattctcgtaacagaattgattccagttaaaaatctgtagatayagattgtgtgtatgagtatcttcacgtgttagaaaacaaaacaaaattaatccaacattagaaaattaggatatttattaggatactata

SEQ ID NO: 650422 - DNA, 397 bp, Homo sapiens
aaccctgaacacctccacatcttagtctgagtaaatatcagagtcctttcagtggcctatctctgaccctttcttactctgcttcaatcacactggcctccatgctagttatcaaatcattggggcctacttgggccttagggcctttgcattttctgtccyctcttcctatgatgcacttatcccatatagttgctcttcattcaagacttgactttaatgtcatcttctcagtaaaaactaaccacttaatttaagatcacctaatttataccttgatacacctatctctctttcctagttgattttcctccgtggttattacctcctatagattttacttatatatcctatttattctctgtgttccctcctattatagaggcagttttaaatt

SEQ ID NO: 650423 - DNA, 397 bp, Homo sapiens
aaccctgaacacctccacatcttagtctgagtaaatatcagagtcctttcagtggcctatctctgaccctttcttactctgcttcaatcacactggcctccatgctagttatcaaatcattggggcctacttgggccttagggcctttgcattttctgtcccctcttcctatgatgcacttatcccatatagttgctcttcattcaagacttgacttwaatgtcatcttctcagtaaaaactaaccacttaatttaagatcacctaatttataccttgatacacctatctctctttcctagttgattttcctccgtggttattacctcctatagattttacttatatatcctatttattctctgtgttccctcctattatagaggcagttttaaatt

SEQ ID NO: 650424 - DNA, 397 bp, Homo sapiens
aaccctgaacacctccacatcttagtctgagtaaatatcagagtcctttcagtggcctatctctgaccctttcttactctgcttcaatcacactggcctccatgctagttatcaaatcattggggcctacttgggccttagggcctttgcattttctgtcccctcttcctatgatgcacttatcccatatagttgctcttcattcaagacttgactttaatgtcatcttctcagtaaaaactaaccacttaatttaagatcacctaatttataccttgatacacctatctctctttcctagttgattttcctccrtggttattacctcctatagattttacttatatatcctatttattctctgtgttccctcctattatagaggcagttttaaatt

SEQ ID NO: 650425 - DNA, 419 bp, Homo sapiens
gggcccacacatcaacccacagcctctactagaggggcactgaagaagatacagatggatctccctataagggccctctgcagaggcrctatgctaagccccttacacgtatcattccattcagttaacaccatccccacccaaagctaaggagactccgctcagaaggcagggctgggtgtggccttggggaagcagctgcagcctcctggcctcaggccaccatctctgtgcatgcacttagctgctccctcatgatggccctggctgcctgctcctcctgtaggaggagggttccattcttcttcagatgtccccgaggtaccacagagggcctcaggtgcagacactcacttggaatggagaaccctggtgactggctgaccccgacagaggggacggttcagtgacccaccctc

SEQ ID NO: 650426 - DNA, 573 bp, Homo sapiens
aagcccacagaagacagagaaggaacaactagagggagaagccaaggcaggcatgtgtgataacatataggaactgagggagaggacatttcaagatggaggggatgccatacaacaggactatgtgatggtttttggctgtgtccataggaagtcacaacaggcaagggaaagaaaccagaacccagtcatggagttaagaagtgagtcagagaggagatgggtagggacagtgaggtaaggcctctttctaaggaagtttggctgaaggatagactagctggacayatgctggctgtgtggggtagagggaggaatgatggagggtaggagagccttgagcctgcgagaagagtctcctagaatagagaagctgaggttaaagttgtggaagacagtggggataactgagtgacagataatcaggagaagaaaaggagatccagaatcatgacagagagatgacctttgccaagagcacagccatctttcactgtcacagagaggtaggacaaaacgattggtgttcaagaattggtttgtagcacaatattttaactatgtcctttaaaa

SEQ ID NO: 650427 - DNA, 551 bp, Homo sapiens
tcaggctacaattgaaaataaaaattctgttctgaatacagccaccaaaatgaaagatgtacaaacatccacaccaggtaaactttgcattgtagatttaactctggaaagaagtacattaatctgtttgtaatgctcatagtctttctattctcaattatttcactttttatattttatttcaggatttcatctaaataatgcagctgttatcatttttatattttcaaaaatgagatttacatgcataargaaaatatatttttaaaacataaggtttttgttttgttttgttttttgttttgttttgttttttgtttttggagacagagctttgctcttgttgcccagggtggagtgcaatggctcaattgtaactcacgacaacctccaccttcctggttcaagcaattctcttgcctcagcctcccgagtagctgggattacaggtatgccccaccatgcccggctaattttgtatttttagtagagacaggctttctccatgttggtcaggctggtcttgagctctcgacctcaggtgatcctcc

SEQ ID NO: 650428 - DNA, 655 bp, Homo sapiens
taacccaacatcagctggtctcttttcttgtttatatatcggaatctctcctctggcctactcctagtctccctctataggagacagacttcctgaattaagctgaaagcattaaattattattttttgccctggcaaggtttaaacagggcaaagccaaccagtttggttaacaactgtgcgaataatcctatttctgtcatgagattcaggattcaaatggcttttcctcccattcgcttctggaattcatctttctctgaatgtccctgcacatgctttctctctgacacagttactcagtcacagaccgacagacagaaggacacacacaccctccatttaagaggcaattaagtgtcaatagagagagtattaactcgatgacataaaagttggagaactaactgtcatttagaccttggacaaatttcttagccttcctgtgatccctcatctggtgttttacctatttgaaaatactaacaaacrtaagaagtatttttataatttatttttttcatcagtttactaatgatgatcttgttatagagtaaaattgtcaacaagggagatttcagttcaatgaacaaagcagtaacaacagagagtacccaaagatgacctgacctgggctgctttgtgaagtagtgag

SEQ ID NO: 650429 - DNA, 604 bp, Homo sapiens
gacgctggagacccagacccctcatctgctaagcagacagactgtaagtggtcatggaagaagggtgcaaaagtgaacacattctgttaacactcatggcctccagaaaacagaagaatcayggacatcagctgagaagcgcatctcatccttcccctcccataacactgttgggaaaatcaggctcagagaaaggaaaggtcaaagccaaggctcccaatatggagtcttccattctctctgcttggacacatgccccaaagctgcacagccagcctcaagggagtcagtgcaaggggcacacgcacagacatcctgcatgccggcacctgccaggtggggaagtggacgtgtgcatgcacctgcaactggagacctcatcctccatctcccagaaactctctttcaggtgtctttagtcttgctacaggtggaatgagaccctccagtcagagtaaaaggacatctcaaagccaatgctcaggccagcactttctcaagcacaacatcctccctggtttccttcctgccaaagctctcaggtttggtcacagggttaaaccaaggaaagtggaccaggaaaaaaggtgaacttatcaactgt

SEQ ID NO: 650430 - DNA, 519 bp, Homo sapiens
cttccccaagatcagaggccaagaaaatagcataatatctgaaaaataaatttggttagattytcgcagaactttctaactcacctctttggaactgtactgtttagttctaaggaccacttatgaaagaagtctgggtattaattctatcctaaaaccataacaattatgaagttatatttacatggttatatttactttggtaaattatatgagctatttctaacatattggaagaaagagctaatctacctggattatgaaaatgcttattctactttaaagataaacacacacacacacacatactcatatacttataagtatgtatatgtagatttagtagcttcaattcttttttttcctgttaatccatttaagcattcaaccattcaacaaatgttctgtaaatacaggacatttactatgccctaggcattaagaagtatataaagttatacaagtcacatgcatacttctttaaatctagtgggagggaataaaatattaatatataaa

SEQ ID NO: 650431 - DNA, 464 bp, Homo sapiens
tagttctcaccatctgagagccaaactgtctctgccagtggggttatgagtctttcacacagggcagacagttgctggtgtcacctgtcatgttggagcagactgctgtgatgatttccacttaagcagtagttatactatatcatgattggaktgaagagacagctacttggaaggattgactcaagctctggatcagtcaatcttaactactgataggttaaagccttcctgtagtgacgatctcctgatggtggagattgccagatttactgagtcctttatcacctttaatttatttgtactactggctctccatatccatgggttctgcatccatggagtcaaccaactgcagattgaaaatatttgggaaaaataaaaaataaaaatttaatattaataaaaataatacaaataaaaacagtatagaataatgactatttacatagtatttacattgt

SEQ ID NO: 650432 - DNA, 626 bp, Homo sapiens
actctaacctaacaacccacctcactctctctgaaccaaagacctttgaggtgggaaaatgccaagaaaactcctatgaaatggaaatggtacatccaattgcaggtcaaatctggccctcaagtcctgagcaaaattcatgagcaagtggctgttcacatctggtggcttataggaagaatccattgagtgtgttagggccyttgtgtctctatagctaaccactttccttcttttttcatccccaccttgactccagtaggtggctggcaaggttagcctgggttgggaagaacttcatggacataaatttggatgatttctgccctgtgaagtcatttcatggtaattgccacaaagtaggtgactggcatttttgtgtgtgttgacttttcaatgcttcttacatgttcttctaggatggggatgtggttgtggcattaggcctatgtagcaggttccctcttctctgtagtagaccctccttgatctgtgaaggtagcctggtggcctttggtggcagaatgatgacttcctgtctgcacatagcttttgctgagggaaaaggagggatggtttggatcaactcagagttgtattgggtgtgggtggagctgaaggtatgg

SEQ ID NO: 650433 - DNA, 572 bp, Homo sapiens
aaatattaatatatgggtatctagtggctgcgaccaggccagagagaggaagtttaaaaaatcaagggaaggagttttgtccataagttaagtttaaaaatacataacatgaagtctggagataaatagaccaaatactaacaatgtttatctttggcttttttgttttattttcagcytttttattttttgtggatacataaggggtgtatatatttatgggttacatgagatattttcatacaggtatgcaatgtgtaataatcagatcaaggtaaataggacatccatcacctaaagtgtttatcctttgtcttacaaacaattcaattatactgttttattttaaaatgtaaaattacattatttttgactatagtcaccctgttgtgctatcaaatattaggtcttattcattattactttttttttttttttttgagacagcctcactctgtcacccaggctggaatgcaaaaggtgtgatcccggctcactgcaacctccgcctcccgggctcaagcgattctcctcccttagtatcctgagtagctgggatgacaggcacatgc

SEQ ID NO: 650434 - DNA, 572 bp, Homo sapiens
aaatattaatatatgggtatctagtggctgcgaccaggccagagagaggaagtttaaaaaatcaagggaaggagttttgtccataagttaagtttaaaaatacataacatgaagtctggagataaatagaccaaatactaacaatgtttatctttggcttttttgttttattttcagcctttttattttttgtggatacataaggggtgtatatatttatgggttacatgagatattttcatacaggtatgcaatgtgtaataatcagatsaaggtaaataggacatccatcacctaaagtgtttatcctttgtcttacaaacaattcaattatactgttttattttaaaatgtaaaattacattatttttgactatagtcaccctgttgtgctatcaaatattaggtcttattcattattactttttttttttttttttgagacagcctcactctgtcacccaggctggaatgcaaaaggtgtgatcccggctcactgcaacctccgcctcccgggctcaagcgattctcctcccttagtatcctgagtagctgggatgacaggcacatgc

SEQ ID NO: 650435 - DNA, 572 bp, Homo sapiens
aaatattaatatatgggtatctagtggctgcgaccaggccagagagaggaagtttaaaaaatcaagggaaggagttttgtccataagttaagtttaaaaatacataacatgaagtctggagataaatagaccaaatactaacaatgtttatctttggcttttttgttttattttcagcctttttattttttgtggatacataaggggtgtatatatttatgggttacatgagatattttcatacaggtatgcaatgtgtaataatcagatcaaggtaaataggacatccatcacctaaagtgtttatcctttgtcttacaaacaattcaattatactgttttattttaaaatgtaaaattacattatttttgactatagtcaccctgttgtgctatcaaatattaggtcttattcattattactttttttttttttttttgagacagcctcactctgtcacccaggctggartgcaaaaggtgtgatcccggctcactgcaacctccgcctcccgggctcaagcgattctcctcccttagtatcctgagtagctgggatgacaggcacatgc

SEQ ID NO: 650436 - DNA, 370 bp, Homo sapiens
ttctaaaatggaggtctcctagagacctgaacaagagaaggagaatatatatatatgacatatatatatatatacacacacatatacatatacacacacatatatatgtatatatatatgcttctctgttaagtctctatatatatacatatatatagagagacgtctctctatatatacacatatatatgtatgtatatatacacatatatgtgtatatatacacacacatatatatgtgtgtgtttatatatatatakagagagagagagaagcttaacagagaaacatgacagaaacccagactctgtcctccagcatcctggaatatggacagagtctgagggaggaccctcgtcatggccatttc

SEQ ID NO: 650437 - DNA, 565 bp, Homo sapiens
agttatcttgtgcaggctgtgcagacacagccattttgggactcagcactttccttaatttactttccatcaacctgctcggaatgatttctttctctttttttttttttttttttttgagatggagtctcrctctgttgccaggctggagtgcagagtggcgccatctcagctcattgcaacctccgcctccctggttcaagcgattctcctgcctcagcctcccgagtagctgggactacaggcccccgccaccacacccagctaatttttgtatttttaatagagacagggtttcaccatgttggccaggatggtctcgatttcctgacttcgtgatctgcccgccttggcctcccaaagtgctgggattacaggcggaatgattttttaaagtctgattatattccttgaagggtctgatcttatctttttaaaattctcgccagtgcgtacacatctccctgcttgttcttaaagtatgcaagcgatacatatttaaattgaattcttcccctggaatcttctggctgataattttgcctgggaggaatttaactggtcc

SEQ ID NO: 650438 - DNA, 565 bp, Homo sapiens
agttatcttgtgcaggctgtgcagacacagccattttgggactcagcactttccttaatttactttccatcaacctgctcggaatgatttctttctctttttttttttttttttttttgagatggagtctcactctgttgccaggctggagtgcagagtggcgccatctcagctcattgcaacctccgcctccctggttcaagcgattctcctgcctcagcctcccgagtagctgggactacaggcccccgccaccacacccagctaatttttgtatttttaatagagacagggtttcaccatgttggccaggmtggtctcgatttcctgacttcgtgatctgcccgccttggcctcccaaagtgctgggattacaggcggaatgattttttaaagtctgattatattccttgaagggtctgatcttatctttttaaaattctcgccagtgcgtacacatctccctgcttgttcttaaagtatgcaagcgatacatatttaaattgaattcttcccctggaatcttctggctgataattttgcctgggaggaatttaactggtcc

SEQ ID NO: 650439 - DNA, 443 bp, Homo sapiens
tgactaaaaaactattagaatgaagaaatgcattcaacaaagttgtgaaaacacaaaatcaatactcaaatattgtatttctatacactgtccataaatagtataaaataaaaattttaaaaaattttatttacaatagcatcaaaaagaatgaagtatttacgaataaacacaacaaagtagaaaacttacactcttaaacctaaaatacgttacttaaagaaattaaagaacatacaagtaaattgaagaatactcatgttttgcatcggtagacttratattgttaagatacctgtaatctcctaatcgctctacagattgaatgcaatccttgtcagaatagcagctggcttctttgtagaaattaaaagtctgatcctaaaatctgtattgaattttgaaacaccaatataacacaatctttaaaaaggagaacaaag

SEQ ID NO: 650440 - DNA, 559 bp, Homo sapiens
gcctaaagtataataattaaaaaaataaaataatataacatcactaggaaaaattatagactgtaactaagttttctatgttttaaataatattgaattgaaactaatatcagatcctacattgtagaataaaaaaaagagagaactgggcttgaagtttaaaaaaaatgaatctgtttcttggtctcagtcatgctacttacaattaggcaatgttgtgatctcttaacttctctaagcctctgttccctcatataaaataggaacaataatatataccttggtttgaatagtaagtgtagtaaagtgggttaaaataattttaaaaaytattttaataattctaaatattaatgtattactgtcctttgatcctgttttcctgtcttaaaccaactagcctcattttcctttctttggcctcccacatccttaatttttacatttttcccataatttctgaaagataaaacctaaatttcatcctcagttatggtaactacataaatgtagattttggtcttggtttcttttttaaaagttatctttcagtggtttt

SEQ ID NO: 650441 - DNA, 559 bp, Homo sapiens
gcctaaagtataataattaaaaaaataaaataatataacatcactaggaaaaattatagactgtaactaagttttctatgttttaaataatattgaattgaaactaatatcagatcctacattgtagaataaaaaaaagagagaactgggcttgaagtttaaaaaaaatgaatctgtttcttggtctcagtcatgctacttacaattaggcaatgttgtgatctcttaacttctctaagcctctgttccctcatataaaataggaacaataatatataccttggtttgaatagtaagtgtagtaaagtgggttaaaataattttaaaaattattttaataattctaaatattaatgtattactgtcctttgatcctgttttcctgtcttaaaccaactagcctcattttcctttctttggcctcccacatccttaatttttacatttttcccataatttctgaaagataaaacctaaatttcatmctcagttatggtaactacataaatgtagattttggtcttggtttcttttttaaaagttatctttcagtggtttt

SEQ ID NO: 650442 - DNA, 615 bp, Homo sapiens
gaattggttgacccttttattaagccctctcttgcttatatgtcctgtattaatatttggaccctgcrtactcaatactataactcaaattgtttcttcttgcctagaagcaaccaaactccaaatggtgctgcaaacggaaccacacatggacgcactgttcttccgaggacccttagatcaaccccaggagaagccctagctgctgttccctatttgacactcctttttagcaggaagcagccagaaagagtcatcactcagaatcccttaatagcagttagggtgatatctccacagggagaaatgaggaggagttattaagaaattattttaggcagatagagaggaaaaaaggggttcttggaagattttttgcagcccttgtccagcatgaaggtcctggctcttaaacctaggccagcaacctttaatatgcaaatgccagccattagaagctgggtccacccaacatgaggattcccgttgttgtcctcttgcccttgccccaacttgtgcctggcagcatggctgcccccatatatccccatgtgtggaacatcatggtgccctgcatttacatatgaataggctagagtgggagggccagttttt

SEQ ID NO: 650443 - DNA, 618 bp, Homo sapiens
tgagttataagcaacatccctttagaaagaccctttctcatttgggctctgttcctgccaaggatcctcaggaattagactggtgggtcctcggtatattttatcagttcatcttttcctaattgagcacaaggatatgggagagaagtaacaaaacagcatatctttttttcttacttaaaaagagttgaggcattttgttcggcatactgagtagaaccaacttgaaggatatattaattcatacttcttttacattcaaattaatgtctcaagccactctccttccagctcacaggcaatccagtatttctactttggagcctccaagaattaatcgagaattatggatgcttgctaagtgtttatagagaacattgcttctcttgtgttggtgcagacattttaaaacycagagttattatttcattaagattggaaaccccataactgcctctgaaacatctactttagaagtggttgctttttttttaaatcgctaccataaaggaaggcctcagggattctctgctcatagtgataccagttttggagaagtcgactcttgatagaaatagttgtacagcttatgtgccggggatcgagtctactgcccca

SEQ ID NO: 650444 - DNA, 538 bp, Homo sapiens
ctttttaaaatcctgttagaaataataaacaaattcagtaaactttcargatacaaaatcaacatacaaatatcagttgtatttcttgcaacaaaaaaaaaaaatctaaaagggaaatttaaaaagtagtcctatttacattagtatccaaaaagaagtaattaagggtaaacttatccagggatgtgaaaagcttgcatattgaaaattacaaaacattgttcaaagaataaagaagacataggtaaatggaaggacatactgtgtttgtggcttggaagatttaatattgctaaaatgttcttattacataaagcaatgtacaatgtcaatgcaacccctatcaaaatctcagtgactttttgttcagaaatagaaaaaaaatactaaatttaatatggaaacaaagaatcccatagagccaaaacaatcttgagaaagaacaatcctggacgccccacacttctgaaattcaatacatatgacaagactatagtaatcaagagaatagtactggcataaagatagacatgtaatc

SEQ ID NO: 650445 - DNA, 538 bp, Homo sapiens
ctttttaaaatcctgttagaaataataaacaaattcagtaaactttcaagatacaaaatcaacatacaaatatcagttgtatttcttgcaacaaaaaaaaaaaatctaaaagggaaatttaaaaagtagtcctatttacattagtatccaaaaagaagtaattaagggtaaacttatccagggatgtgaaaagcttgcatattgaaaattacaaaacattgttcaaagaataaagaagacataggtaaatggaaggacatactgtgtttgtggcttggaagatttaatattgctaaaatgttcttattacataaagcaatgtacaatgtcaatgcaacccctatcaaaatctcagtgactttttgttcagaaatagaaaaaaaatactaaatttaatatggaaacaaagaatcccatagagccaaaacaatcttgagaaagaacaatcctggamgccccacacttctgaaattcaatacatatgacaagactatagtaatcaagagaatagtactggcataaagatagacatgtaatc

SEQ ID NO: 650446 - DNA, 641 bp, Homo sapiens
cttgggtatatctctattagtagcataaaagcagactaatacaaatacattataaatgtaaaagtatgagttaacttataaattaactgtagcgttaaaaaaatcattttttaggatcatagcaaagaatgtaagaaatattctttatgtttgtttcaaaatctgacactggcaaaatgtaagatctgctaaaccatagtagatttcaggagacagagaaatggaaacagaaatagagagaaataaagagagtgaaagaaagactctccttcatataaagcatagatactattaccagctttcttttatttttggtgtttcccagaaagccgtgttatcatctatagaaaaatatttttacttaaatagagacagccaagaataaggatgttatcagctctggaatttgctttgttcagtggtcatgtgcaaagtgcaggagatgaaagatagtttagttcagtttagtaactgctaaaaccagaataactttaatatgagttctgtggaattaatcacattaagggaacttctcacagtacctgacttagggaagaaktgaatggttatgcgtgcagtgttgctttgtctgatatttgtttggaccctaagcgttaattataaatgaaattacagatgtt

SEQ ID NO: 650447 - DNA, 681 bp, Homo sapiens
  misc_feature 1, 2, 3, 4, 5, 6, 7, 8, 9, 10, 11, 12, 13, 14, 15, 16, 17,18, 19, 20, 21, 22, 23, 24, 25, 26, 27, 28, 29, 30: n = A,T,C or G
nnnnnnnnnnnnnnnnnnnnnnnnnnnnnncattttttattagtttagaagttgtttctacctttatacatctctattggaactgccatataaatttttgggattcttattcttacaaattattgtaacatgcaaaaattactattaagtttttttcatatttgagttataaaatctcaggatgtttcaagttttctggttcagtaatattaaatactcttttaattracattatttattgtctagaaagggccctgtgcaagagaagaggccctgaagattaatcttcattaatttgcagcaaatccaatccagagtgacctgctgatgttggaagaactggctttatattctcctcatatttatcatctaggccatccagcccctcgaattgccatttaaggatgatgcttggcacctaagccattgctcttagccttaagaaaggtatttaggactcaactgaaattgagactttaagtgatattatgtaataatatatgggatatgaataagatgattatgttagtttaaaaaactaaatcagactttgtgccctatggacagagaacaaatattgcatctgtcaaacttataagacactgtaagggctgcaatctctgacaacaatgcagaaaacatacaaagtcattataaagaaatattagaaaagatgaatca

SEQ ID NO: 650448 - DNA, 681 bp, Homo sapiens
  misc_feature 1, 2, 3, 4, 5, 6, 7, 8, 9, 10, 11, 12, 13, 14, 15, 16, 17,18, 19, 20, 21, 22, 23, 24, 25, 26, 27, 28, 29, 30: n = A,T,C or G
nnnnnnnnnnnnnnnnnnnnnnnnnnnnnncattttttattagtttagaagttgtttctacctttatacatctctattggaactgccatataaatttttgggattcttattcttacaaattattgtaacatgcaaaaattactattaagtttttttcatatttgagttataaaatctcaggatgtttcaagttttctggttcagtaatattaaatactcttttaattaacattatttattgtctagaaagggccctgtgcaagagaagaggccctgaagattaatcttcattaatttgcagcaaatccaatccagagtgacctgctgatgttggargaactggctttatattctcctcatatttatcatctaggccatccagcccctcgaattgccatttaaggatgatgcttggcacctaagccattgctcttagccttaagaaaggtatttaggactcaactgaaattgagactttaagtgatattatgtaataatatatgggatatgaataagatgattatgttagtttaaaaaactaaatcagactttgtgccctatggacagagaacaaatattgcatctgtcaaacttataagacactgtaagggctgcaatctctgacaacaatgcagaaaacatacaaagtcattataaagaaatattagaaaagatgaatca

SEQ ID NO: 650449 - DNA, 681 bp, Homo sapiens
  misc_feature 1, 2, 3, 4, 5, 6, 7, 8, 9, 10, 11, 12, 13, 14, 15, 16, 17,18, 19, 20, 21, 22, 23, 24, 25, 26, 27, 28, 29, 30: n = A,T,C or G
nnnnnnnnnnnnnnnnnnnnnnnnnnnnnncattttttattagtttagaagttgtttctacctttatacatctctattggaactgccatataaatttttgggattcttattcttacaaattattgtaacatgcaaaaattactattaagtttttttcatatttgagttataaaatctcaggatgtttcaagttttctggttcagtaatattaaatactcttttaattaacattatttattgtctagaaagggccctgtgcaagagaagaggccctgaagattaatcttcattaatttgcagcaaatccaatccagagtgacctgctgatgttggaagaactggctttatattctcctcatatttatcatctaggccatccagcccctcgaattgccatttaaggatgatgcttggcacctaagccattgctcttagccttaagaaaggtatttaggactcaactgaaattgaractttaagtgatattatgtaataatatatgggatatgaataagatgattatgttagtttaaaaaactaaatcagactttgtgccctatggacagagaacaaatattgcatctgtcaaacttataagacactgtaagggctgcaatctctgacaacaatgcagaaaacatacaaagtcattataaagaaatattagaaaagatgaatca

SEQ ID NO: 650450 - DNA, 591 bp, Homo sapiens
aaatattccttatttaatcaaatgcacattgcacttgttttttctcacctgtgtgtgcaggggtggggggaagtgttggcrttaggtggggaaaaaaagaggaaagttactataactacaacagcagaggatattttcatagagaaaggttctttttttttaatgtagggacctagtagctcattaataatacatttcttttaaatattaatatgttgatttcaaacacttaaatagggtttcaaggctcacctattgtcctacaaatcaaggtcctgaacaaaacagaatgcactcaatttgaaatagataaataagtaattaaataagagatccagcttaataattttatttgcatttttatgatttgcaagtattttcatgcacatgctcatacttagttacgttacataaacataggagacaaggtttttttatagttaaaaaataaaattcaaagaggttagatggcatatgcaacatttctaagccagtaaatggcaatggtaggtatatacacttaggtcctattttaggcttgtgggaagtgatggggttccatttcttaaagattgttttaagtcaaaatag

SEQ ID NO: 650451 - DNA, 526 bp, Homo sapiens
tgtggattggaatgattcaggttactctgcagatggaaattataaaattattcatactgattagctatgtgtttaagtctccttttattttagaattaattttatttggctatatgttttatttttaaaatttgataggaaagaaaatgattrcatacataccctaatacttttttttaagccttggggaaaaatgcaactaggagtcagtcaagagaatttaaaactttctcttactctacacatcagagagtacatcagtctgctatccctttgctacaactgtgagaagtaaagtctgaaaagaaatgtgaaagtctgaaagcccactaaatgtgaataataatagcgatttgagttcatagaaacaggcaaacacattcgaaattccttcatcacaaatggaaagaaacacaattaaaagttttctaatactcccaaacttgtttaaaattagctgatgctttgaaaattacttgaatgtttttataaggaaagtgatgctgatcagcacagttgtagcatt

SEQ ID NO: 650452 - DNA, 526 bp, Homo sapiens
tgtggattggaatgattcaggttactctgcagatggaaattataaaattattcatactgattagctatgtgtttaagtctccttttattttagaattaattttatttggctatatgttttatttttaaaatttgataggaaagaaaatgattacatacataccctaatacttttttttaagccttggggaaaaatgcaactaggagtcagtcaagagaatttaaaactttctcttactctacacatcagagagtacatcagtctgctatccctttgctacaactgtgagaagtaaagtctgaaaagaaatgtgaaagtctgaaagcccactaaatgtgaataataatagcgatttgagttcatagaaacaggcaaacacattygaaattccttcatcacaaatggaaagaaacacaattaaaagttttctaatactcccaaacttgtttaaaattagctgatgctttgaaaattacttgaatgtttttataaggaaagtgatgctgatcagcacagttgtagcatt

SEQ ID NO: 650453 - DNA, 606 bp, Homo sapiens
catgcatatatcaataaaatgaaatttatctagattaaggactatataaatatatataaataaatattatatagatatacatgaatattcatttaaatccataaatatttaaataaatcatttgtgtagcacagatataaaacgtaaatgatttattcatattaatatgtktgtgtatacatgcataaatatttgaatgtatactttttactaaatattttataagtacaggcattataggaaacatacacatggcatatacctatgtataataatccccacgagtcaagggtgggaccaggtgcatatatatatatatatatatatatatatatatatatatatatatatatacacatacacacacacacacacacacacacacatatgccacatacatattttctattgtatctgtatttatttgtaaactatttgcccattttgaccacgttcatgggcatatatatacatacaacaaattacacacatatacacccatgaccacttcattctacacgtaggtgtttatggacacacacatgaattatcatttcaacttgtttcgcacaggccttaaggtaaaagcagccaaatgccctttaa

SEQ ID NO: 650454 - DNA, 498 bp, Homo sapiens
ttcccataaatttgtacagttattacatgtcaattaaaaatgtattccataaaaagatcagctgtttccagggttgagggggagaaggataaatagagttcagagaatttttagggtagtgaaattattctttgtgatactacagtggtgggtacatgccattatacaattgttcaacccatataatgtacaacaccaagagtggcccctaatacagtatatgctatggacttagagtgatagtgatatgttaatgtaagtttatcaattgtaacaaatgtacccctgtgatacaggatgttgatagtgagggaggctgtgggtatgtagtatagtggggagttgtatattgaaaatctcygtattttcattcaattttgctctgaatatagaaataccctaaaataataacaataaaaaagttgaagttctgataaaggctacaacaagaataagccttgaaaaccttctactaattgaaaaaagattactattgta

SEQ ID NO: 650455 - DNA, 531 bp, Homo sapiens
ctcttcttggaatacttccctccaacacactggcctcacctcctctgacccacaggggtgggtcagtcttctggagaagtcagaacacttggttcttgtttgaattcagctatgcacattagctgtatagctttgggcaagtcatctctgtgatgttttctcaatatcaaaagtagtttgatgagattatttttaaaggctaatttgttcactttgaaataatatttcaaatccaggatttttatttagtctgatcaaatttgtacccagacttcattattataacaacaatgcagaaggaatttctgatgtagaatgacggcaaactgttgcttatggggaaatttaccatggggatactgaagggttctacattcccactcctggctcttctaagtcctcagtcwcaggtagccctaccttttccaagctccactccaggagcagggagaaacaactggaaagaaagaagacctgaaggagttcattctctgcaacattattgagcactattcaacagtacagtgcaag

SEQ ID NO: 650456 - DNA, 544 bp, Homo sapiens
tattcttctggttccaaccatttttgcttttggcagagcatctgacctgtcactggtgcccttgttgtcatttccctggccacagagactgggttcactctgtcccaagcaaagatgatgtaatgtagataagcttttgctagaatggtaggacaaaggcgagtcctctctcctactggatgaggatgtgcttctgggcatgatagaagccatctgtgaccatgaggtagggtggctatctgagagtgaagccagaagaagcagagccgaaagatggaaagacagaagcctctcaggctgatggtgtcaactgaaaccttgacctagctacacctaaagccagactgattcctgaagcttttgattatggagccaaygcattctttttggttagaacattttggatatgtttctttttgttacatgtgaccaaagcctaaaaaatcagataacccatgttcaatttctttgttaaatgcacactagctgggtcttcagtccatacccatccctgacttgacacactgggcattttcagattcct

SEQ ID NO: 650457 - DNA, 555 bp, Homo sapiens
atacctttagagacctaaggctcatttacatgcatttatacttttccattactagcttataaccaggtaaacttcatttttccttattctgtctttattcctgaggccacaaatcctgctatatcaaactactcccaggtccacagaagtgctagcttctttctcagcagtgaacagtcatatggctctttcatttacttggaatgctcactatgcttttttcacacttaattccttttggtctttcaggacatacagcataaccccctcagagaatcctttctgactcacctggtctggataagttgctcgtcttatttcagtgcttaacacttagaaccctgtactctagtgacttattttcatatctcgttgaggacaggcactgtgacatttatctcatcttttatggcatgtagtgattaatcagtaaatgtttgctgaatgcctacctgaatgaataaatatctgcattttgaggcttcccttsacattcattttattcagaattgacattattaccatgaatggaagaaatagtgtcggtgattcaca

SEQ ID NO: 650458 - DNA, 653 bp, Homo sapiens
tccctacactactgtaattgctctcatttaaaccataattgccatttgcctagactattgcaatactgtgatgtatcagaaaaataaacaaattttgcagacagtttgcttttaccctgctatrttaccagtgtggtattggttaagtcattaaaactcttttggacttcaggatacacccacataaaatgaacttactttgctgatatctcttgaagcctgttacagtggctatatgacactgttttgatgaaggagacatgaactgacatctctaagggggtgggggagagaaagggatggctttctggggagctttttaaatcctgatgacgctgttctttctctcttctttcctcaaatgtgagtacattgagtggcacataagcagctatttttaaactatgagaaaaggccaagaaaattgcaaagaggatatctctaacatggttgatttgctcaaaccagctccagtgacaagctctctagatttcttcttacatgggaaaaatgacctcctctttgtttaaggcaatattatcacagttttcttaaggttttctgttacttgcagcaaaaatgcttgctcatggcaaggtcattatcgacctcctcattattcaatccaatggtcaattcttaatattcacctt

SEQ ID NO: 650459 - DNA, 334 bp, Homo sapiens
aggaccaaagataacttaaaaaaaattcacattctctacttcatacatactcctccttatttagaaagttgcttgaacaattataaataaaataatagttccatttaattattgcattaattatattacatttagttatgacatttmattatatgtatctcacatttaatggaaaataagttcctctcctcttctaccgcacttgtttttgtgtggtttacctttagagttgcccacaaaacactcagacggcatcttagaggacttctagtattcctgaagtcatacttcatcatcttccattcctagatggggtagtggaccctcaacacca

SEQ ID NO: 650460 - DNA, 588 bp, Homo sapiens
acttaaagagactattctatcagtcttaaggtctctgtgttgatgtttgtgaggcatgtctgacctaaactagtttttttttttttttttttcaggattatttggaatgtctttggctaaggggagggttcatcagtcagtatgatggcttagaattttatatttggtttatacagcagagacttaggaatcctatgatggcctttgagggtctaatgtgtagagggcctcatgtcagcytgagtggctgtgtagagcagatagggagggatggcatgctgaagtaaagggggcgtagcctaaggaagctgtccctaatgcctaacctctccccaacaacacatatgccatgatttatttcagctttatgtagtctccaaaagatatagaaatcactgtgtgtccctatagggcctataaaatgcttagatggctggtagatcagacgaaggtattaggagaaagaagacctagtgtgtatagtcaccaaccatcctaatttacccagaactgaggggtttctccagaagcaggactctcaatgctaaaaccaaatgggactcagacatgctgggaatagctgtcacc

SEQ ID NO: 650461 - DNA, 588 bp, Homo sapiens
acttaaagagactattctatcagtcttaaggtctctgtgttgatgtttgtgaggcatgtctgacctaaactagtttttttttttttttttttcaggattatttggaatgtctttggctaaggggagggttcatcagtcagtatgatggcttagaattttatatttggtttatacagcagagacttaggaatcctatgatggcctttgagggtctaatgtgtagagggcctcatgtcagcctgagtggctgtgtagagcagatakggagggatggcatgctgaagtaaagggggcgtagcctaaggaagctgtccctaatgcctaacctctccccaacaacacatatgccatgatttatttcagctttatgtagtctccaaaagatatagaaatcactgtgtgtccctatagggcctataaaatgcttagatggctggtagatcagacgaaggtattaggagaaagaagacctagtgtgtatagtcaccaaccatcctaatttacccagaactgaggggtttctccagaagcaggactctcaatgctaaaaccaaatgggactcagacatgctgggaatagctgtcacc

SEQ ID NO: 650462 - DNA, 588 bp, Homo sapiens
acttaaagagactattctatcagtcttaaggtctctgtgttgatgtttgtgaggcatgtctgacctaaactagtttttttttttttttttttcaggattatttggaatgtctttggctaaggggagggttcatcagtcagtatgatggcttagaattttatatttggtttatacagcagagacttaggaatcctatgatggcctttgagggtctaatgtgtagagggcctcatgtcagcctgagtggctgtgtagagcagatagggagggatggcatgctgaagtaaagggggcgtagcytaaggaagctgtccctaatgcctaacctctccccaacaacacatatgccatgatttatttcagctttatgtagtctccaaaagatatagaaatcactgtgtgtccctatagggcctataaaatgcttagatggctggtagatcagacgaaggtattaggagaaagaagacctagtgtgtatagtcaccaaccatcctaatttacccagaactgaggggtttctccagaagcaggactctcaatgctaaaaccaaatgggactcagacatgctgggaatagctgtcacc

SEQ ID NO: 650463 - DNA, 588 bp, Homo sapiens
acttaaagagactattctatcagtcttaaggtctctgtgttgatgtttgtgaggcatgtctgacctaaactagtttttttttttttttttttcaggattatttggaatgtctttggctaaggggagggttcatcagtcagtatgatggcttagaattttatatttggtttatacagcagagacttaggaatcctatgatggcctttgagggtctaatgtgtagagggcctcatgtcagcctgagtggctgtgtagagcagatagggagggatggcatgctgaagtaaagggggcgtagcctaaggaagctgtccctaatgcctaacctctccccaacaacacatatgccatgatttatttcagctttatgtagtctccaaaagatatagaaatcactgtgtgtccctatagggcctataaaatgcttagatggctggtagatcagacgaaggtattaggagaaagaagacytagtgtgtatagtcaccaaccatcctaatttacccagaactgaggggtttctccagaagcaggactctcaatgctaaaaccaaatgggactcagacatgctgggaatagctgtcacc

SEQ ID NO: 650464 - DNA, 608 bp, Homo sapiens
ttattatgtacttatttgtgtttgtatataatctgtcagtcatttgtcagtgtatatgctacaaatatatatattttgtaatctgtggactttcttaatgctatttttaataagaaaatattttaaatrtagtaacacataatttattattattttttacttgtgcttttttgtattgcattggaaaaattttcctggtccaaaccacacctaaaaaggctgttttcttcataaaaccctccggggatgttgaaagggatctcattaaatgtatagattgatttgaggagagtagacaaattaataatcttgcatctttcaattcaagaacatggtgtatcttttcacttattatttgtttatgtctttgaaaatttgcctcaaatatatatcatatttttagtatagacgtctggtatattctttatcagacttgacactaagtatgtgacatattttggtactcttttcaatggtatattttaaattcaattttctaattgttcattgctgatatggagaaatgcaattaatttttataacataacatctttttcacataacctggctagattcacttatttgttacagaatgttttagaagattc

SEQ ID NO: 650465 - DNA, 380 bp, Homo sapiens
tatgaaaatagctctaaccatgatggttttcatcaattcagggcctttcaagtattctcctggcattctgagactaaaggtgtcatgatcaccctaagccatttggaaattgtcatggcaaattgtgcagtaagtacttccttgtgaatttatgaatctcatcagatttcggaaygtgctgatctcagaggtgagggcagggatccgagcctgactgcttcactgctcatccgtggcttccttttatcttcctttccagtgcagagctccaaagagtttttcaaagcccattagactgcccgatgacattcttaacagaagaaggaacagtgtttgtttagttgaattaggggaagtctcctgtggccagtgaagtttta

SEQ ID NO: 650466 - DNA, 458 bp, Homo sapiens
ttcagaaggcactcaataaatatgattatttcttaacaaaaataataaaaacaacattataactaatgcgcgtgttctaaaacgtttcttaaaartaacccataaacaaacttctaggagaaaagtgaaagccagaataaatgcccgatgcctatatttaattataaaggtagaaaaaatggctaaaagatagatgggaagatcataccaggcttttcagtaaatgaatcatcctgaaatcaaagcatggaaggttcaatatcactggtatgggactattaaaagttactagtaagtttcaggatgtttaaacttttaaccaatcttaatccaacaaaggtgtaggcaatctaagttaaaaaccacactcatccctggaattacgttaggaccaaagccggtttccgatcagcatttaaggttctcctgacaagtattggttagaagaataaaaatat

SEQ ID NO: 650467 - DNA, 505 bp, Homo sapiens
gttcatgaattgtggcagcattgtgtggagagtcaggacccaaagagagtgaagagaacatccagcatggaggtgacccagcccaggggtgccagagcccatgctggctgtggaggatgtctgtgtgggaaaagacctcgagcagaatgctgaagtccaagcaaggtacgaagatcatcctcatggaggggcattctggcacggggtatcatggcagagcccatttgagtggggcggacattcccacagagggtctgggctccagtgcagtaatgagagcatctgtgcaagagtggtgacctggtgtgagatcagtgcctgtgctagtgtgaaagcaagaggagtggtagtcagagacagagcagggggagraggaactgccaaacagggagatggcctactgtgaggtgctggccaaccagggtgagaagggcattgccatgaaggccaaggggatgctggccaggcccagggtatcaatgtgaagctataagagctggcttgg

SEQ ID NO: 650468 - DNA, 560 bp, Homo sapiens
gtaggtgctttaagagttgatggaaaagataggtagaagcaaaacaagaatcatactacctttgcagttggtggatgggataattattggaatcagatgttacttagtgagaactagcccattttaaaacagtgcttgctttttgggtggaatagttctacttagcttgatggttaaaatatatataatgctacaatatcattataaaaattaattctaagagtaacaaactgaaattttctgttatatcacatgaaaattttctattttttacaaaattttatttgaactaactttgtgatctagaaggcgggaaaaatactcattaaattattttatttaatttagaagcatggataaaatggaatggtgatctggtctattttcttgaatgaaaattaatattaaaggtaattactggagaggggcagagcaagatggccaaatagaaggcttcactggttatctgtcctacaggaacaccraatttaacaactatctacatacagaaaacagcttcataagaaccaaatatcaggtgagcacacacagtacctggt

SEQ ID NO: 650469 - DNA, 552 bp, Homo sapiens
tctcagaagtacagggagcccaagaaatagtggggggatagccgtttgtccactgaaaattatgtaatttatcatctcttaaggagagaatcaatttggggaaacagctagcattcttggacacagcacaaagttggcttcatcatcatttttccaccatactttctactcctccttccccacttgcccctctgccactctttcttcaacgttatataggcaaagaaaaagaggacgaggcagaaatgtatagttgactggcactgttgttaatctgatgttggtgcctttatcaggaaggtgcccaatgttgtcttttcctcttcagaatgcttttgygggttccatttaacaatggggagtgatcccccatttaaagattctttgatttcagttagctggaatgaagttgcctcctccggctgtctgtgaaaaagcttgcttcatttctagacttgtggaaattcaccccacagcagattatctcttttggtatcacagcatccggcaggtgatccatgtaatcagtagccctttcaggacaactcacag

SEQ ID NO: 650470 - DNA, 613 bp, Homo sapiens
tacattcaacatacatattttgggaggatgcaaatattcagaccatcacagactgcatgatcaaattcaagactgaaatagtctaacggtattgtttctctcctctaaagcatctccttttctcctccttctcccaaatatggctttttctttttttgagccttgcactgtcactcaggctggagtgcagtggcatgatctcggctcactgcaacctccacctcccaggttcaagtgattctcctgcctcagtctcccaagtagttgggaatacaggtgcctgccaccatgcctggctaattttttttgtatgtttagtagagacaggggtttcactatgttggtcaagctggtttccaactcctgacctygtgatccacttgcctcagcctcccaaagtgattacaggagtgagccaccactcccagcccttcttgataaagaaggaagttcgtgtaatctcatgtcagtaagaaaaggagtctagctggggccctgtgcccttactagtttctagcaagtgtggttggcctggttgctgtgcacatatttttctttctaatttaaaatttaaaacaaaaaatgtatatgcgggtgtttcattttggtgctc

SEQ ID NO: 650471 - DNA, 603 bp, Homo sapiens
ttcaggaaaacttaagggacctacccacatccactgattttcttgaggctaggagacccataggaaataacttgaaccctctctacagttgtggttgagatatttgccaatatgtctcatggactgggtgagagaaacagggaagagttccaagaacaagtcaccatctgtggggcaggagtgtgggcaggtgggcacagtcacagcaggatgaaccaaatggtgattctaggtgctacaggaagctcttttctcctcctcttcctcctcctcctccytgtcctccccccaactcctgccaacactatcctttgaattttccaaatacactaagctcattcgctccccagggccttcatccttgctcttcatgcctgggatggttgtcctcagatctttgcatggctgactccttgtcttttaagggaatctctttaaagaggctgctctcactaccaatttatgtttcccgtcactttcgcctgattttgttttcttcatagccttaaacactctctgaaattctctcgtttattgtctgcctcctacagctagaatacaagctttatgagagcaaagactttgtctttcttatttgccatt

SEQ ID NO: 650472 - DNA, 603 bp, Homo sapiens
ttcaggaaaacttaagggacctacccacatccactgattttcttgaggctaggagacccataggaaataacttgaaccctctctacagttgtggttgagatatttgccaatatgtctcatggactgggtgagagaaacagggaagagttccaagaacaagtcaccatctgtggggcaggagtgtgggcaggtgggcacagtcacagcaggatgaaccaaatggtgattctaggtgctacaggaagctcttttctcctcctcttcctcctcctcctccttgtcctccccccaactcctgccaacactatcctttgaattttccaaatacactaagctcattcsctccccagggccttcatccttgctcttcatgcctgggatggttgtcctcagatctttgcatggctgactccttgtcttttaagggaatctctttaaagaggctgctctcactaccaatttatgtttcccgtcactttcgcctgattttgttttcttcatagccttaaacactctctgaaattctctcgtttattgtctgcctcctacagctagaatacaagctttatgagagcaaagactttgtctttcttatttgccatt

SEQ ID NO: 650473 - DNA, 511 bp, Homo sapiens
caccattatcaccaatttgagtttaaaaggagactcacaatgcccagaaactgcaggatatacaggcttcttttcagtcatggcaaagaggttgttaaaaaaaaaaaaagaaagaaagaaagaaagaaaaaaagctttgtctacctgtaaatacacactggacagaagtccaaaatagaattgtgaaaaggaagtaatagtcgaagtgaaggaacttgtaacagacaacctctgatacctgtgcagcaggagggctttgtaactcacacgctataaccttccctgcagaaaactgccgaccaagcatgttgaaaagaacccgtctcccctggtctactacctcacctgcgtggaggcatgggttatgatcagctagccaaacacaaaagacctttagccatcattgtaattwagagtgatatgattctctttttcaagcttcaatattgtgtacattttttaaaattctgtgatttctttaatcacatttctttaatgctgcaactcaact

SEQ ID NO: 650474 - DNA, 645 bp, Homo sapiens
ttttactaatgtgctctttctgtttaaggatcccatctaggagaccacaatatatttagtgatcatgtctttttaggcttctggctgtggcacttcctcagactttctttgttttttatgaccatgacagttttgaggaatcccagtcagatattttgtaggatgcccctctgtagtaatttgtctgatatttttctcatggtaaaaataaagtgatggattttggaaaagaagattataaagttctattttcattacattatatcaagggtatatactaggcaacatggtttgtccctgttgatgacgatcttaatcgcctggctgaggtaatgtttgtcaggtttctccactgtaaatttactctttttcctcccctttacatactgtattctstgagaggaagtcattatgcgcagcccacacttacggagcaaagatatgacctcttcttttagggcagagtatctacataatttatttggaagtgttagtcattcactttttatttccaaagatcagcacagagccctcaacatagtaggttcttactacatgtgacgtgcaagaataggattaaacggaatttttcccctcaagaaagtttataggatctggatgtcagcaaaatggtgaataagactt

SEQ ID NO: 650475 - DNA, 645 bp, Homo sapiens
ttttactaatgtgctctttctgtttaaggatcccatctaggagaccacaatatatttagtgatcatgtctttttaggcttctggctgtggcacttcctcagactttctttgttttttatgaccatgacagttttgaggaatcccagtcagatattttgtaggatgcccctctgtagtaatttgtctgatatttttctcatggtaaaaataaagtgatggattttggaaaagaagattataaagttctattttcattacattatatcaagggtatatactaggcaacatggtttgtccctgttgatgacgatcttaatcgcctggctgaggtaatgtttgtcaggtttctccactgtaaatttactctttttcctcccctttacatactgtattctctgagaggaagtcattatgcgcagcccacacttacggagcaaagatatgacctcttcttttagggcagagtatctacataatttatttggaagtgttagtcattcactttttatttccaaagatcagcacagagccctcaacatagtaggttcttactacatgtgacgtgcaagaataggattaaacrgaatttttcccctcaagaaagtttataggatctggatgtcagcaaaatggtgaataagactt

SEQ ID NO: 650476 - DNA, 452 bp, Homo sapiens
ttttcatatttcacatatttcactaataatatattctaaaccccacaaacacactggtttgatttctcaataatggcctctctgatacagacatggttctcagggaagatatttacttgctgttgatttgcatttttgacagcacattttactctacttaggaaaaaaaaagtgttaggcaatatctgttgatgaaagaagaaaacccgtttcttgactttgaccattctttagatggcggaatgttgtttttgtatggggggaggaaaagaggaaaaaaaattgaatgacatgccagcaattttagttaatttcataataacttaatctatgtcagacaaagtaaaatgaatcacaacctaaaaggaaatgactttttaatgaaaattgttcagrcgtgtcatttatgctgtaagtgcacaagcgtgtgtatgcgtgcatgtgtgtgtttt

SEQ ID NO: 650477 - DNA, 566 bp, Homo sapiens
agcaagtgaaaggggaagagtgcagctttgtcttcttatttcattatgttttcataaatatatatatatatawaaatatatattttgttgttgttttgttttctttttttgagacgttgtcttgctctgtcacccaggccagagtgcagtggtgcgatcttggctcactacaacctccacctcccaggttcaagcaattctcctgcctcagcctcctgagtagctgggattacaggcacctgccactacgcccagccaattttttgtatttttaggagagacggggtttcaccatgttggccaggctggtctcaaactcccaacctcaggtgatccacctgccttggcttcccaaagaaaaatatattttttagaattgataaaatttttaaatattttatgcatatattaaatcattttgccaacaaaaatgttcttgggttgtggttgcctatgattcaaatacattttcaatatttcaaatacaaacacaaacttttacatcataaagctgcaggtcagcccacctgtgttaggagacaaataaaatgatgaattgatgttgt

SEQ ID NO: 650478 - DNA, 566 bp, Homo sapiens
agcaagtgaaaggggaagagtgcagctttgtcttcttatttcattatgttttcataaatatatatatatataaaaatatatattttgttgttgttttgttttctttttttgagacgttgtcttgctctgtcacccaggccagagtgcagtggtgcgatcttggctcactacaacctccacctcccaggttcaagcaattctcctgcctcagcctcctgagtagctgggattacaggcacctgccactacgcccagccaattttttgtatttttaggagagacggggtttcaccatgttggccaggctggtctcaaactcccaacctcaggtgatccacctgccttggcytcccaaagaaaaatatattttttagaattgataaaatttttaaatattttatgcatatattaaatcattttgccaacaaaaatgttcttgggttgtggttgcctatgattcaaatacattttcaatatttcaaatacaaacacaaacttttacatcataaagctgcaggtcagcccacctgtgttaggagacaaataaaatgatgaattgatgttgt

SEQ ID NO: 650479 - DNA, 566 bp, Homo sapiens
agcaagtgaaaggggaagagtgcagctttgtcttcttatttcattatgttttcataaatatatatatatataaaaatatatattttgttgttgttttgttttctttttttgagacgttgtcttgctctgtcacccaggccagagtgcagtggtgcgatcttggctcactacaacctccacctcccaggttcaagcaattctcctgcctcagcctcctgagtagctgggattacaggcacctgccactacgcccagccaattttttgtatttttaggagagacggggtttcaccatgttggccaggctggtctcaaactcccaacctcaggtgatccacctgccttggcttcccaaagaaaaatatattttttagaattgataaaatttttaaatattttatgcatatattaaatcattttgccaacaaaaatgttcttgggttgtggttgmctatgattcaaatacattttcaatatttcaaatacaaacacaaacttttacatcataaagctgcaggtcagcccacctgtgttaggagacaaataaaatgatgaattgatgttgt

SEQ ID NO: 650480 - DNA, 543 bp, Homo sapiens
tactcactacaaactccgcctcccgggttcacgccattctcctgcctccgcctcccgaggagctgggactacaggcacacagcaccacgcccagctaatttttgttgtattttttagtagagacagggtttcaccatgttagccaggatgatctcgatctcctgacctcgtgatctgcccccctcggcctcccaaagtgctgggattacaggtgtgagccactgcgtccggcctgagaatctgcatttctaacaagcacctaggtgatgctgatgctgccactacagcagggggggaattccttctcaccatccatcatttgcaaactgcaaaaatcacattccattattcacgaacataagtcacttctcatttccaatctttaactccccctcatcaycaccttcagaaaaaattcagagtgaaaaataaaaaataaaaaataaaaaaagcaaagtaagccctatctatagcattttctaccacagctttcaaaggaaaggtaagctcaaattgtccctttcccacagtcacagatttaga

SEQ ID NO: 650481 - DNA, 592 bp, Homo sapiens
tgctggcaattttggcctatggggaattacatcaaatgaagattagagaaattcagtggtaggggattgatgaagaaattgcttagtcaagagagtaaactttatctagctcattatttgatctatttaatttgargtggtttggtttatggagaccttgggtgaggagcatactgcaaactcttggtattatcctcccagtagtctctctggtgcactgtattctctcaaaggttttaaatacttttactcagccatctctagaatgtcatatggtctcccttcaactggaataacaggggctaaaagaaatgtgcgaccatgaggaccctgtaacctataaatgatgtgctgagaccagaaacccaaaataatggtaactgagagtggcgttaagcccctaagtttgtgtcacactctcacctaagtgagaacttgtccataaagggggaattttaaaaacaaaattctagggcggtcattgttttggactaaggtcatgcactaggccccaacaaaccaaaccaaaccaaaatggagttgcttgtgctaagactttaaggaaacacatagattctagaacagaccaggt

SEQ ID NO: 650482 - DNA, 476 bp, Homo sapiens
cattctttatggaagatatagagtgaaactgcagtttttgtttttcttttaatggaatacattctctttcttgtttcaasataaatctgatcttttcattatacagtgtattggaaagggatcacaaagtgttatggatcttctaatttttattactggccccagaaactcttccacctgactttcttcaccttggacaataggagacttgataactagacctgttgctcaaagtggaacagcatatggtagttagttaaatccattggcacttagaaaaactttaattcaagttcttatcattttaaacattctcatgattagctcagctgttacttcagctaatttattttattgattctgcacagagctccaaatggccctgtggaagtttacattagaatagttcttatcccaaatcatttgaagagttagaacatggggatcgagcccttggagtggaggattgaaagaca

SEQ ID NO: 650483 - DNA, 476 bp, Homo sapiens
cattctttatggaagatatagagtgaaactgcagtttttgtttttcttttaatggaatacattctctttcttgtttcaacataaatctgatcttttsattatacagtgtattggaaagggatcacaaagtgttatggatcttctaatttttattactggccccagaaactcttccacctgactttcttcaccttggacaataggagacttgataactagacctgttgctcaaagtggaacagcatatggtagttagttaaatccattggcacttagaaaaactttaattcaagttcttatcattttaaacattctcatgattagctcagctgttacttcagctaatttattttattgattctgcacagagctccaaatggccctgtggaagtttacattagaatagttcttatcccaaatcatttgaagagttagaacatggggatcgagcccttggagtggaggattgaaagaca

SEQ ID NO: 650484 - DNA, 511 bp, Homo sapiens
ttctgggagatacaatttgggttgagatttgggtggggacaaagccaaaccgtatcagactgtgatggaagggatggaaattggagtgacaccactcattattgcgaccaggcacatattttttacttttcatacaatgattctaggtactgccattttagagaatttagttcctaaggaaagaaatgcttttgccaggggcatagcaatttttytagagactaaaagttaagcatatcaccttacctatttagattcacatataattaaatgaacaagaaaaaaaaggaagtattgactgtggtgtgtaataatgatttatcaaggtaaaataaagttgctgcatatggtagttatcaccaagttattcccaaatctgtttctcctcttttcaggcatatggtagtgttgcatctccctgtgtctttgaatatagtcatagccttcttggcctggtaacttgagcaaaggcccatgaaatgtgagcagaaatattaagatatgttaaata

SEQ ID NO: 650485 - DNA, 584 bp, Homo sapiens
  misc_feature 578, 579, 580, 581, 582, 583, 584: n = A,T,C or G
aacctagaattctgctgggttaagttataaaagaagcttgaaagyacaaaaaaaaaaacatttttagattagtagagactcaaatttcattcccatgcacgcttttcaggaagctactaaaaggtagaatccaataaagaaagggaataaaccaagaaatgtgggcccatggaactcctgcttctgagatcctaacacaagaggatatgacatgaatccttgaaatgatagtaaaaggaagaccaaggagagtggcagctgttgagtcacctagggagcgcccagtctagttgataacaaaaggattaggactttaggggaatatctcagagtgagagagagagagagcaagaacaagaaagcaagagaaccagtttgaccatacggaggtgttttacagctctggcaaagactctggggatgggcacagaaaataaggcaaataaataactaagcaaataaaacaaaatgcaggggtggagaaattaaaaaaaaagcaatcacaatttattactggctcagcacagaacatgtttgcatcatcacgacagagactgactactgactattaattcaannnnnnn

SEQ ID NO: 650486 - DNA, 583 bp, Homo sapiens
ctgtcttccaacatatgtattcaatactataaatttttttctaaagattgcttttctgcatccctattttttgttatatttttatttgtatcgagttcaaaatatttttaatttctcttgaaacttctgcttgacctttgcgttattttgaagtgtactgtgtatgtttaaatattttgagatttcccagctatatttacgttattaaatgctattaggttggtgcaaaagcaattgtggattttgccattaaaagtgatggcacatgtacacgagaaattgttgttaggcacatatacttgagacacatatatgttgttaggcacatatacatgagaaatygttatatcttcttatagaatttatctctttatcataatgtaaacaattctctttatccatgccagttttctttgttttgatgtttgcttagactgaaattagcacaactatttcagctttcttttattagtgttaacatggcatatttttctccatccctttacttttctttttttttagacagagtcttgctctgtcgccctcaagctggtgtgcagtggtgccatcttggctcactgca

SEQ ID NO: 650487 - DNA, 542 bp, Homo sapiens
ttgggttctaaagattgctgaatgaatgtacctgccatgaaccaatggtgttactataagtgagttattaaattccctttgcctggatattttcatctgtgagacagacgtttttaattcagttacctayagccacacttccacctccattgttccatggcttctataataaagttacccattctaattaacattgaagttgaattcagagcttcaagaaataagtttagggaaaaagatttttcaagcccttcagcaagaacaaataagccaaaaacctttgcatgagttggtcctagccctcttttggttccatggactcaggaatctgtcctgacacctcagctaccatgcccagctctgctactattgtctgtgttatacataattagtcaggtagtttttaataacagttaatattgtttctggttttttttttttctgtaactcccagcaaggactttaagacatttattatttgggcagaaattgcaatttatttctaacatagatggttaactttaagaattctcagctgctag

SEQ ID NO: 650488 - DNA, 515 bp, Homo sapiens
ttttctgactccacagccatggctccagaccactaagcagcactttccctctagctcaaggccaaagcatatctgttaccctacagcagcccagggccttaatggtgagaaccctagtttgctgcttagggccttgagtcagtagtttttctgggagggtctttgtgtaacccaacctcccttcctttcctgattaagattacccagcagattatcactctatcttccattatgcatgtttgcacacattagtctttgtcagaaaatcaggtgtgttgggtaatggttccagaccttccaactccttgttgtatgtttctagatcaacaacagagtcactagggacagagtcacatctctgatgtgaggggattggagcctcctggcaacaaattccacaatcctatcacagccttctgtcaacctgayatcctttacatcttttcctaaatattgaaacttggcgtatgctcagcaggtcctggaagaagtggagaatggaggcagaggatgtg

SEQ ID NO: 650489 - DNA, 514 bp, Homo sapiens
atattattttcacagcctgacccactctggttcatctactgggctgagagctgaaggagggatggtagttaccccaggcaaaattccagagacgtgcgctgttcttatccaaagttaagtggttttcaggaataaatgcatctccgtttgttgtatgtctctggtcaaattccagagtgctgagatggttgcattttagtgtattatccatctttatatttgcttttgggacagaggatttttttgactgccttttttgtgtcatggtggaagttgcaagtctcctatgcttagttttagtgacaagatcttcaatgaagatgagctggtccatactctttgyatgtgagtataaaagctcagtccatattccaaaagacatgtactatatttgacagtatgtccccaaatgggcatactccatgcattacttatccttcaagaagcaaacaggtttgaagttcttcccatacctcttcctcaatttctttgtgaatactcagtgttctcattt

SEQ ID NO: 650490 - DNA, 550 bp, Homo sapiens
actataggggtgggaggaggccctctgctgtttttgaaaggttgtaaattcagataatgtcaattcccacttcaaaccttccagcagcttctcacctgtcttagggtcaaatctaaactcctgacacatgcggacctggccctgtgtccactccattctgaatttgtgacacattgatcaaaatgctgattttgtgatacactggtcaaaatactgcagccccacctgcccgccttctgttccttggtgcgtctctgcctcttgtcttaggtgcttcacatgtgcaattcccctccttggagctctttcttcccttctcacctggattctcaccccagcctcgttctcttccttgttcacttctaaacttttaattaaaatgctgcatctggtgataacctcacctggtcacccacctccagtctgaattaggctgaccagcataactccctgattttcccttttccagctcccacrtaatttgaccttaaacatttcttgcactctctatgacacttccattgttctgtttgactctaggctccatgag

SEQ ID NO: 650491 - DNA, 610 bp, Homo sapiens
tttgagcgtgtactatgtgtttggcgctgctctcacagctgtgtgggatataaaagtataagatgcacttcctgtccccagggaccttgcaatgtagttaaggaagagagatatgcacacatggaatgttaattaacaaagcaaggccatctagggtaaatagcaaattaatggaatgaacaataggaaaatggtgcttagggaattcagaggagggagtgttgatggtgatagtaataaagaaatttagtatcattttattgagcatttattgtatcccagacacatggcattaagtgctctatgtgtattaccattttacagctgaggaaactgaggcttagggaagttgaatgacatgcacaaggccacacagccagtgggtgatgacaggagagtgatcttggggtatctcacacaagaaggagctcttaatttcttgacattctttatatttaaaaaattatttttaatttttgtgggtacatagtaggtgtatatatctrtggggtacatgagatgctttgatacaggcatacaatgtgtaataatcacatcatggaaaatggggtatccatcccttcaagcatttatcctttgtgttacaaac

SEQ ID NO: 650492 - DNA, 529 bp, Homo sapiens
tgaattcttgtccatctttctttcctatttcaactactgccttctatatgaagccttatctaataacctcaatctatcctgatggatcttttaattcctatagcaatttatatttatcttatgacattgatcacacatccccttgcattatatgcaagataacagttatatattatcttctctactaagttgaaaactccttgactgggcttttcatatttgctttttcttttcttctttctttygctttttttttttttttttactgtgaaaagtagcatacgattataaaagtgcacacaacccaaatatactacttaatacattattataaggagaacagcaagtaaccagcacccaggtcaagaaataaaacattgataataccttagcagtccccatcacttgcccccatgggccccttcctttgccttccaccatattcacttgcttctctttcttagcacctgccacagaggttcaggcttagcaagtgtcaggaaatgcttgaaagagaaacgaatagttg

SEQ ID NO: 650493 - DNA, 610 bp, Homo sapiens
ccctactttatttgtagtttataacaagccttgagagatttttaaaatattgattatctaaatacataaactaactacgttaataaagaaaatatctggtagaagatatgttgaaaatagttatcaatgttgcttaaggtttctatttgaaatgtcaatttttaagaaaaggaagataaaaaataaaagtgtgatgctaaaaaattaacaactgcatagcagtgcacaatacacaaagtaaatttcaratccaaatagattattatcatcccatgctcataaattacaattgtgcatagcataggctaagcgagctcaaagttacaataaatcatggatctgggagttgctacctgttcctttatcccagaatgatggtgtacataataacggttatatcgataataatcatttaaatctattggtttagaaaactgcaaagtccaggagtatatttggctttaagcatagcttcagtcatggcatgaagctcaagtgatgtcatcagtgtctgtttctctccatcacttggaggtactgatcaaatgatggccaggagtccaccatccattggtgtcactgtgcccactggatcccagaatacaacgtg

SEQ ID NO: 650494 - DNA, 610 bp, Homo sapiens
ccctactttatttgtagtttataacaagccttgagagatttttaaaatattgattatctaaatacataaactaactacgttaataaagaaaatatctggtagaagatatgttgaaaatagttatcaatgttgcttaaggtttctatttgaaatgtcaatttttaagaaaaggaagataaaaaataaaagtgtgatgctaaaaaattaacaactgcatagcagtgcacaatacacaaagtaaatttcagatccraatagattattatcatcccatgctcataaattacaattgtgcatagcataggctaagcgagctcaaagttacaataaatcatggatctgggagttgctacctgttcctttatcccagaatgatggtgtacataataacggttatatcgataataatcatttaaatctattggtttagaaaactgcaaagtccaggagtatatttggctttaagcatagcttcagtcatggcatgaagctcaagtgatgtcatcagtgtctgtttctctccatcacttggaggtactgatcaaatgatggccaggagtccaccatccattggtgtcactgtgcccactggatcccagaatacaacgtg

SEQ ID NO: 650495 - DNA, 610 bp, Homo sapiens
ccctactttatttgtagtttataacaagccttgagagatttttaaaatattgattatctaaatacataaactaactacgttaataaagaaaatatctggtagaagatatgttgaaaatagttatcaatgttgcttaaggtttctatttgaaatgtcaatttttaagaaaaggaagataaaaaataaaagtgtgatgctaaaaaattaacaactgcatagcagtgcacaatacacaaagtaaatttcagatccaaatagattattatcatcccatgctcataaattacaattgtgcatagcataggctaagcgagctcaaagttacaataaatcatggatctgggagttgctacctgttcctttatcccagaatgatggtgtacataataacggttatatcgataataatcatttaaatctattggtttagaaaactrcaaagtccaggagtatatttggctttaagcatagcttcagtcatggcatgaagctcaagtgatgtcatcagtgtctgtttctctccatcacttggaggtactgatcaaatgatggccaggagtccaccatccattggtgtcactgtgcccactggatcccagaatacaacgtg

SEQ ID NO: 650496 - DNA, 602 bp, Homo sapiens
aagatcagtcattagggaaaaaagtgagataattaaagacaaagagttctagggtgatccagtttggaatctgcattgcaccattgtggcccaaatctctatataggatatgtgtctagctatgtgtgtcttgttatattagttctctgttagtattagctatctgttgctgcataataaattactctccaaaacttagcagcttaaaataacaagttcacagcttttgtagatcagaaatttgggagcagcttagctgggtgtttctggcccaggatctctcatgaggttgagtcaagatgtcaaccaggtctgcagtcatctgaaggcttgattagggatagaggctctgctccatttgttcacatggctattggcaaggggtcccaagttcttgctatgtgagcctctacctagggctgcttgagtgtcagctagcaactggctttcctagagtgagtggtccaagagacagagcaaggagaaagtcactatgccttttgtgttttaatagataagtyacataccaagatttctgccacttactaaagcacacagcaaaggagaggggaattaggttccttacgctttgaagagagaag

SEQ ID NO: 650497 - DNA, 619 bp, Homo sapiens
tccctacaacttaagtgcttgaatacccaaaagacaaagctagagaagctgaatgttctaggtccaaacatcaaaccaggaaacgtcactagaaataattcagaagcaggacaaatgtagaaataaattctgaggcagagaggaagggaataaaaagaaggggcaccaaaggggaagtcggcacatctaccacacagagaaccttacaattgcctgtggkttatttggtatatggataaattggtttacttcagatgcttaaagtcatgatacaatttgtgcagttttgataaaacagtattacaaggaaagcacagccttccaagataggctttggttgattattttacatggaagaaaatccagaaaaatccctattcaaagttaaaatgcacatatagatgtacatacactctgaaaataaatattataaattttaaaaacagataatatgtttttgctcttctaagtgagtgcatgtttctttaaaaaactacacagaaaaaagacagtaaaagcacttacacagttgatagaaattttggaaactaattccctcaaatgatgactatattactgtagctaactttcaaagagtgaccttgttgaagaaaattgt

SEQ ID NO: 650498 - DNA, 619 bp, Homo sapiens
tccctacaacttaagtgcttgaatacccaaaagacaaagctagagaagctgaatgttctaggtccaaacatcaaaccaggaaacgtcactagaaataattcagaagcaggacaaatgtagaaataaattctgaggcagagaggaagggaataaaaagaaggggcaccaaaggggaagtcggcacatctaccacacagagaaccttacaattgcctgtggtttatttggtatatggataaattggtttacttcagatgcttaaagtcatgatayaatttgtgcagttttgataaaacagtattacaaggaaagcacagccttccaagataggctttggttgattattttacatggaagaaaatccagaaaaatccctattcaaagttaaaatgcacatatagatgtacatacactctgaaaataaatattataaattttaaaaacagataatatgtttttgctcttctaagtgagtgcatgtttctttaaaaaactacacagaaaaaagacagtaaaagcacttacacagttgatagaaattttggaaactaattccctcaaatgatgactatattactgtagctaactttcaaagagtgaccttgttgaagaaaattgt

SEQ ID NO: 650499 - DNA, 621 bp, Homo sapiens
ttagagggttctaatttatcacttgttttattaaaaagtttctatatatatttccaaattatagtcgaatggcataataccaactcagattccctttctcaagatttcaaagatgcttttggccagcctaattctttatgacgtaagtggagtggaatgaaaatgaaataataaccttaacccatttgtgcttaaatatcagttgcaaatataaatgcatatggccatgagaacacaaggctatcactactcccccactcccaaagcttttgaagagattggtgtatatgaggggtcttgagattttagcctgraaggaagcatggtgagtatgagagagataaaggttggtatgttggaaagaaatcaaaaattggttatataaatatggagagttaattaagattgaaagcatgctggggtcctgtggttcatgtcttcatcctataagcatgaggaatctattgatgggtaaagctgcagaaagacacagtctggtgtatgttttcaaggaatgcttaaggctatcaattgaaagggtgacaaagtgaaaacgcgttaatgaaaaggcacaggatgactgtaacagggactagactatgagtggaggagatgtagata

SEQ ID NO: 650500 - DNA, 553 bp, Homo sapiens
aagagaatcctagaggtaaacctcacaaaaatgtgagggccctcatggaattgttaactttcaaacttatccaccatgaacagctatcaaattgtcaactgttatttaggttttcctaccacactactagtgatataggagttaaaaagaaattatttaggcagttagtgagggtacaggagtcctcggtaaggttttccttttaataaaaagcagtcccaaaatcttttcttttctaacaaaaagcagcctgaaaaatcaagcagcaagcacagataaaccaagctggaggcttgcacaggtgaatgctggctgctgtgccaggtgccaggaatatatctaacatggaggatttctcttcccttttctttgttgccatgtgtgagggtgtcatggcaccagccaggtagagacaccatctgcataataaaagattagggtaggatggctagcctcttcatgggctatgtaaatggcacacctggtgcaaccaatccctgggccttatgtaaatcagacaccacctcytcaagtccctctataaaaccaactg

SEQ ID NO: 650501 - DNA, 634 bp, Homo sapiens
accctaatcttattatgcaaatrgagtctttgcctggctggtgtcatgttgcctgctccttactgtacactggctggcaaagagaagggacgatggagccaccatgttgaacatgcctaatcccaggtagccttttcctattggcatagctgccggcattcacccatgcaagcttccagcttgcttgcctatgtctgcagctcgattttacaggccgctctttgttagaaaagaaaatgattttggggctgctgttcattaaatggaaaaccttactgaggacttccttaccctcactatctgcctaatttcttcttaactcctgtatcactatgtttgaggtactctgttaggcactgagtagtgaacaaaacagatcctgtcctcattcgtgcttcattatttttgttgtgatttgggaaaacttctcagctttactgtgatttctctaatgtactagaatgtgcacagtgtataaaagttaaaaatgttttgcatttcattgtataatgaaagaaggcctccaaatgaaatatttaatgagatttttttttcatatggataggaaaattttaaggattgcgttctgtcaggcaggaaaaatacaatttttactttagaaaataatcaaata

SEQ ID NO: 650502 - DNA, 634 bp, Homo sapiens
accctaatcttattatgcaaatggagtctttgcctggctggtgtcrtgttgcctgctccttactgtacactggctggcaaagagaagggacgatggagccaccatgttgaacatgcctaatcccaggtagccttttcctattggcatagctgccggcattcacccatgcaagcttccagcttgcttgcctatgtctgcagctcgattttacaggccgctctttgttagaaaagaaaatgattttggggctgctgttcattaaatggaaaaccttactgaggacttccttaccctcactatctgcctaatttcttcttaactcctgtatcactatgtttgaggtactctgttaggcactgagtagtgaacaaaacagatcctgtcctcattcgtgcttcattatttttgttgtgatttgggaaaacttctcagctttactgtgatttctctaatgtactagaatgtgcacagtgtataaaagttaaaaatgttttgcatttcattgtataatgaaagaaggcctccaaatgaaatatttaatgagatttttttttcatatggataggaaaattttaaggattgcgttctgtcaggcaggaaaaatacaatttttactttagaaaataatcaaata

SEQ ID NO: 650503 - DNA, 567 bp, Homo sapiens
gtttgcagttcttttctaaagctgcacttttggatccaagaacagcatcaaggggaaactatatgactaattttagaagctatatatttctattacataaactttaattattcatccttttcatttttagaataaaaagtttcaaattgtatcacaataaaattaaatgtaaaagagaatccaggtaccatggcccacgcctctagtcccagatgcttggaaggctgaggcaggaagattgcttgaacccagaaattctggactatagtgtgcagtgattgtgtatgcaaatagccactacactccagcctgggcaacatagcaaaacttgtcactcaaaaaataaatgtataaaatgatatactataaagaatctccccatccttgttttctatctatctgctcattctcatttttcacccccattagataaccactattattagggtttgtatawccttcctaatattttttaaatgcttagttccacatagtttttatacaaataatgcctgttttgtaccttgctctttaaatataacaggtgtttctatagcaacacatata

SEQ ID NO: 650504 - DNA, 568 bp, Homo sapiens
aggttgtatagacacattatgagcagctttcatgatttccctatgatactgatttacagttacatatattttcaagttttgatttatatcatggaaagtagactttctaaaatgaacccattatttaccagccagcagggaactctttattttcaagatcttaatcagaggtcattgttccttggaggtgaatcctgattattcttaagacaaaaayatgaattctctttcctggagcatagaccatgtacctctaacacacagttgaaataaataggggaagctatggagcacccagcactcaccttccaaccccattttcccacctcatattttttctatcttgagcattagccgccccaggagctgagcagggagcctcattgtgagatgaactgaggagtcctgatctgtcgaggcaaggttagagctgagcttttacctcagactcacaagggaaggtcctcccctagggtgcaatatgcaaatcacctggtgggtgcagcagtgtggaaagggtcaatggtggagggggtatgtctctactgtgaacaatgtgacataaaat

SEQ ID NO: 650505 - DNA, 568 bp, Homo sapiens
aggttgtatagacacattatgagcagctttcatgatttccctatgatactgatttacagttacatatattttcaagttttgatttatatcatggaaagtagactttctaaaatgaacccattatttaccagccagcagggaactctttattttcaagatcttaatcagaggtcattgttccttggaggtgaatcctgattattcttaagacaaaaacatgaattctctttcctggagcatagaccatgtacctctaacacacrgttgaaataaataggggaagctatggagcacccagcactcaccttccaaccccattttcccacctcatattttttctatcttgagcattagccgccccaggagctgagcagggagcctcattgtgagatgaactgaggagtcctgatctgtcgaggcaaggttagagctgagcttttacctcagactcacaagggaaggtcctcccctagggtgcaatatgcaaatcacctggtgggtgcagcagtgtggaaagggtcaatggtggagggggtatgtctctactgtgaacaatgtgacataaaat

SEQ ID NO: 650506 - DNA, 561 bp, Homo sapiens
ccaatgaagaacctaagaagaggaaaccataaggagaaggaaccactggggaggtagcaggagaaaaggagagtggagtgtagcaaacaacaaaggagaagataacttgtcagcagtgtcaaatgctatcaaaaaataaaatgacactagcctactgccttaaaaaacttgaagtcagtggcatctctaccaagaacaatctctgtagagtgtatagtggaaatgatgttgctgaacacaaattgtagtgtgaaagtgaacragtaagaaagaaaagtgagggagaggaggtgaatacagacaactctttcaagacgttttattgtgaaagagaaaagaaaggagattggtgaaatatgatggttaaaattttatttttttttaatatggaagaggtttgagctgtttgcaagctgaggggaaaaaagcagtgcaagaagtgttgcaaaacagtgaagacagggatgatgggcaggtaggaggtatggagtaagccgagaaccccaaagtttcagcatttgcagttccattcttattgagatcttgtgaaggaatgagagg

SEQ ID NO: 650507 - DNA, 407 bp, Homo sapiens
ctgatcaatagctggcctctacccacaattgattccttctccaattagctctaaatcatagtatcagatagaaactgctttctgttcaaaggcttagtgttagaaaaataatcacaacaatactgaaacacatatgtgacttgctttttgtttatgtaataaatttgactgaattttttctatggatcagtgctcctcaatttttaaatattcccatacttacgcgtgagtacatcagaacatatttacaccagtcttgggattagaggtaatgagcctcatttctccaaaaacaacagacttcctctacctcctactcacagacaaatttccctagtctgagtttgaaactaagggcacaytggtttctggaaaggtgtaacctgctgtgtttgaaccagtaatta

SEQ ID NO: 650508 - DNA, 576 bp, Homo sapiens
tgaaaacaataacaacaacaaaaatcagctatgactctgcaaagttgctcatttctctctgaggggaacaacttaatttggataagagactggaaaactccatgcttagagtgatacctaaaacaataaagaccttgatggacagcaattaagagaagcctggtagctagctatatgatataaacaaaatggcaagaaagctagaagtttactgaagagaatgaaggaaggagatagccatgataaggcattctgaaacaactatctgaatctaaaagttgtgcaaatatgctaggatgcacccactcagaacaatcagaaaagaatgcaagggcagacttcaaagtattccttaaaccagcaaaacaaamaaagaaaaaagtcaacacagatgaggagcctcatttgtacaagaggattaaaacaacttctgaataaatgctccatgacgataaaccactgtgtcccaggaccaactcctgggaagccagacttaaaaataaagttccacataacccttgcagtctagaagattgcttaattgacaaagctggcaaatcacatgtgcatttaatt

SEQ ID NO: 650509 - DNA, 515 bp, Homo sapiens
tgattgctacattgaagtatgtagttttgttttttttgtgtgtcagtctttaaccatttgtgtccctgttaacttataattgatgaatttatttgtatttatttttaggcagggtaaaaaatagtaatatgtctcataaataatatatgttcctattactagttttggtaggatttaaaaactttataataatcctcaatatagaaacctgcccctttaaccatattactatttgcttttaaaaaaaaattttaggttttgtttctaaaatgcttcacaatttatttttgaaaatataaggaatgaaattctaactttctaatttgaatggaaggatgagttggtagcacacaaagcactaaattgagtaatgtagattttattatttttaatgaatcctttgtttaatrttttgcaggttcaatttgtttacttgtgatgtacagagagttttttataccttcccagcttatatttgaatattccttttcaaggttttataaagagatttctct

SEQ ID NO: 650510 - DNA, 528 bp, Homo sapiens
gaaaacatgctgtagaattaaagcaaaattatgctgtcccctgatccccttatgtcttgatctgctctccaatgtttcttcttcccaatttcaatgtgaggaagtgtataatattactgcgaagatcatgttccagatcagcagcatcagcatcacccgagaatttattacaaatgaagaatctcaggtctgctgaatcagaaagtgcagcttcgacgagccccgccccgctgatttattcggggaagagaagttcttttctaaatgattgaaaataacattaaatgtgttttgcaaaattacctgtcccacattgtagtgcatccttttttttttacatcaacaatttatttttatttatttgtttttctcagctattagtggtttatttgcttcagtaccatatttaattttttttctttttctttcttttattattaaagttttagggtacatgtgcacattgtgcaggttagttacatatgtatacatgtgccatgctggtgygctgcacccactaactcatca

SEQ ID NO: 650511 - DNA, 593 bp, Homo sapiens
ttagcttttaagcttagccttcctgggctgctggtgtcgcgaggttgagggatggagatgaccctcaggtgctgcatgggcctggagcgggttttccctggagctggagagggcgtgatggcccgtgtgcgggagtggaaggcacagcattgtcattgcccttctcggaactgctttttctagggwggaggtggagggcctgggaaaggagggtgatgtcgccagaaccccaggtccctggcgtggggaggatgtgggagcagacgcagagagattctgtacctgcaccctgtcctcaccagtgaggtttggcacctagaactgcaagcagtattaccaggttctgttgtggtcttcagcaagttctactaggtatctgcctgagtggtgggggttgaggggaggggctttctctcctggggggaaaaagagctgctgggtaactgtgctcagctgtggctacctgggaagtgggacctgagggctgaaggattgtgatgaactctggcctgcttcctcaggttgttcagattctttctcttgctgaatgacatcattggaaaggaaaaactctgctgtttgactgatttgta

SEQ ID NO: 650512 - DNA, 593 bp, Homo sapiens
ttagcttttaagcttagccttcctgggctgctggtgtcgcgaggttgagggatggagatgaccctcaggtgctgcatgggcctggagcgggttttccctggagctggagagggcgtgatggcccgtgtgcgggagtggaaggcacagcattgtcattgcccttctcggaactgctttttctagggaggaggtggagggcctgggaaaggagggtgatgtcgccagaaccccaggtccctggcgtggggaggatgtgggagcagacgcagagagattctgtacctgcaccctgtcctcrccagtgaggtttggcacctagaactgcaagcagtattaccaggttctgttgtggtcttcagcaagttctactaggtatctgcctgagtggtgggggttgaggggaggggctttctctcctggggggaaaaagagctgctgggtaactgtgctcagctgtggctacctgggaagtgggacctgagggctgaaggattgtgatgaactctggcctgcttcctcaggttgttcagattctttctcttgctgaatgacatcattggaaaggaaaaactctgctgtttgactgatttgta

SEQ ID NO: 650513 - DNA, 593 bp, Homo sapiens
ttagcttttaagcttagccttcctgggctgctggtgtcgcgaggttgagggatggagatgaccctcaggtgctgcatgggcctggagcgggttttccctggagctggagagggcgtgatggcccgtgtgcgggagtggaaggcacagcattgtcattgcccttctcggaactgctttttctagggaggaggtggagggcctgggaaaggagggtgatgtcgccagaaccccaggtccctggcgtggggaggatgtgggagcagacgcagagagattctgtacctgcaccctgtcctcaccagtgaggtttggcacctagaactgcaagcagtattaccaggttctgttgtggtcttcagcaagttctactaggyatctgcctgagtggtgggggttgaggggaggggctttctctcctggggggaaaaagagctgctgggtaactgtgctcagctgtggctacctgggaagtgggacctgagggctgaaggattgtgatgaactctggcctgcttcctcaggttgttcagattctttctcttgctgaatgacatcattggaaaggaaaaactctgctgtttgactgatttgta

SEQ ID NO: 650514 - DNA, 593 bp, Homo sapiens
ttagcttttaagcttagccttcctgggctgctggtgtcgcgaggttgagggatggagatgaccctcaggtgctgcatgggcctggagcgggttttccctggagctggagagggcgtgatggcccgtgtgcgggagtggaaggcacagcattgtcattgcccttctcggaactgctttttctagggaggaggtggagggcctgggaaaggagggtgatgtcgccagaaccccaggtccctggcgtggggaggatgtgggagcagacgcagagagattctgtacctgcaccctgtcctcaccagtgaggtttggcacctagaactgcaagcagtattaccaggttctgttgtggtcttcagcaagttctactaggtatctgcctgagtggtgggggttgaggggaggggctttctctcctggggggaaaaagagctgctgggtaactgtgctcagctgtggctacctgggaagtgggacctgagggctgaaggattgtgatgaactctggcctgcttcctcaggttgttcagattcyttctcttgctgaatgacatcattggaaaggaaaaactctgctgtttgactgatttgta

SEQ ID NO: 650515 - DNA, 481 bp, Homo sapiens
catcagctgtcattactgttartgtatcttgtgtgtggcccaagacgattcttctttcaatgtggtccaggaaagccaaaagattgaacacccctacacgttatgtatatatacataaatattcatatacatatacataacttagaaataatgaatttataccagcacctccagttcttatccttctccactgagttctttgccttttcattcttgcatgtctgttcttctacaataaaaatactgggttgtagaacagcacatttattcagttgctcaatctaaaaagcaagtctgcttcagtttgctctcagtaatagattttattcccctttttcttagtgatttaattttttaaatatagaaggtattagtatactttcaaaactatatgaaattttgctcagaattgtcactgtctcttgtttattacttataccgcatttcccccagcctcttggaagtaactaacttcattgtt

SEQ ID NO: 650516 - DNA, 623 bp, Homo sapiens
agctgtcattactgttagtgtatcttgtgtgtggcccaagacgattcttctttcaatgtggtccaggaaagccaaaagattgaacacccctacacgttatgtatatayacataaatattcatatacatatacataacttagaaataatgaatttataccagcacctccagttcttatccttctccactgagttctttgccttttcattcttgcatgtctgttcttctacaataaaaatactgggttgtagaacagcacatttattcagttgctcaatctaaaaagcaagtctgcttcagtttgctctcagtaatagattttattcccctttttcttagtgatttaattttttaaatatagaaggtattagtatactttcaaaactatatgaaattttgctcagaattgtcactgtctcttgtttattacttataccgcatttcccccagcctcttggaagtaactaacttcattgttttctgttttaaacctcctgttatttttcatctaagaataagaggatatattgctctttcagtgaaggtagcatgttgtatatgttcttttgcatgttgcttttttcatgtaataaaatctggaaatcacttccaggcaagttaggc

SEQ ID NO: 650517 - DNA, 481 bp, Homo sapiens
catcagctgtcattactgttagtgtatcttgtgtgtggcccaagacgattcttctttcaatgtggtccaggaaagccaaaagattgaacacccctacacgttatgtatatatacataaatattcatatacatatacataacttagaaataatgaatttataccagcacctccagttcttatccttctccactgagttmtttgccttttcattcttgcatgtctgttcttctacaataaaaatactgggttgtagaacagcacatttattcagttgctcaatctaaaaagcaagtctgcttcagtttgctctcagtaatagattttattcccctttttcttagtgatttaattttttaaatatagaaggtattagtatactttcaaaactatatgaaattttgctcagaattgtcactgtctcttgtttattacttataccgcatttcccccagcctcttggaagtaactaacttcattgtt

SEQ ID NO: 650518 - DNA, 623 bp, Homo sapiens
agctgtcattactgttagtgtatcttgtgtgtggcccaagacgattcttctttcaatgtggtccaggaaagccaaaagattgaacacccctacacgttatgtatatatacataaatattcatatacatatacataacttagaaataatgaatttataccagcacctccagttcttatccttctccactgagttctttgccttttcattcttgcatgtctgttcttctacaataaaaatwctgggttgtagaacagcacatttattcagttgctcaatctaaaaagcaagtctgcttcagtttgctctcagtaatagattttattcccctttttcttagtgatttaattttttaaatatagaaggtattagtatactttcaaaactatatgaaattttgctcagaattgtcactgtctcttgtttattacttataccgcatttcccccagcctcttggaagtaactaacttcattgttttctgttttaaacctcctgttatttttcatctaagaataagaggatatattgctctttcagtgaaggtagcatgttgtatatgttcttttgcatgttgcttttttcatgtaataaaatctggaaatcacttccaggcaagttaggc

SEQ ID NO: 650519 - DNA, 623 bp, Homo sapiens
agctgtcattactgttagtgtatcttgtgtgtggcccaagacgattcttctttcaatgtggtccaggaaagccaaaagattgaacacccctacacgttatgtatatatacataaatattcatatacatatacataacttagaaataatgaatttataccagcacctccagttcttatccttctccactgagttctttgccttttcattcttgcatgtctgttcttctacaataaaaatactgggttgtagarcagcacatttattcagttgctcaatctaaaaagcaagtctgcttcagtttgctctcagtaatagattttattcccctttttcttagtgatttaattttttaaatatagaaggtattagtatactttcaaaactatatgaaattttgctcagaattgtcactgtctcttgtttattacttataccgcatttcccccagcctcttggaagtaactaacttcattgttttctgttttaaacctcctgttatttttcatctaagaataagaggatatattgctctttcagtgaaggtagcatgttgtatatgttcttttgcatgttgcttttttcatgtaataaaatctggaaatcacttccaggcaagttaggc

SEQ ID NO: 650520 - DNA, 623 bp, Homo sapiens
agctgtcattactgttagtgtatcttgtgtgtggcccaagacgattcttctttcaatgtggtccaggaaagccaaaagattgaacacccctacacgttatgtatatatacataaatattcatatacatatacataacttagaaataatgaatttataccagcacctccagttcttatccttctccactgagttctttgccttttcattcttgcatgtctgttcttctacaataaaaatactgggttgtagaacagcacatttattcagttgctcaatctaaaaagcaagtctgcttcagtttgctctcagtaatagattttattcccctttttcttagtgatttaattttttaaatatagaaggtattagtatactttcaaaactatatgaaattttgctcagaattgtcactgtctcttgtttattacttataccgcatttcccccagcctcttggaagtaactaacttcattgttttctgttttaaacctcctgttatttttcatctaagaataagaggatatattgctctttcagtgaaggtagcatgttgtatatgttcttttgcatgttgcttttttcatgtaataaaatmtggaaatcacttccaggcaagttaggc

SEQ ID NO: 650521 - DNA, 569 bp, Homo sapiens
acaatgacaattcagttaaatgtacatttcatgtctcttcagtggaagtgtcctaacttgatcaccttggacatatgtttcctgaaatctagtagataatattcattatttctcacaccatgtggtgtaataatttgcctaagtttcttgtatccactagtttagccttctgaaagtttcttcatccactcatggcaccaaaggataatatattagcctcaataaaaatatcatcaattaccgaygttaacatacttctacaaagtaaaactgctacaagcattagatattgataagttttacattcagaaatcaccccagtattcattgaaaatgaccactttaggagttaattagaattcaacatcatttttgtttctaaaatagccttgttgggattatcatgttattctctaaagaagtttcgtgaaatagctattttatccaagaggttgctccttgaacaaggaagccaatgtattcatatgcaagtttatctcatttttataattaaagtcaacaaaacatgtatctctgatgcctaatagtaacaaagaggagtaatgagt

SEQ ID NO: 650522 - DNA, 569 bp, Homo sapiens
acaatgacaattcagttaaatgtacatttcatgtctcttcagtggaagtgtcctaacttgatcaccttggacatatgtttcctgaaatctagtagataatattcattatttctcacaccatgtggtgtaataatttgcctaagtttcttgtatccactagtttagccttctgaaagtttcttcatccactcatggcaccaaaggataatatattagcctcaataaaaatatcatcaattaccgacgttaacatacttctacaaagtaaaactgctacaagcattagatattgataagttttacattcagaaatcaccccagtattcattgaaaatgaccactttaggagttaattagaattcaacatcatttttgtttctaaaatagccttgttgggattatcatgttattctctaaagaagtttygtgaaatagctattttatccaagaggttgctccttgaacaaggaagccaatgtattcatatgcaagtttatctcatttttataattaaagtcaacaaaacatgtatctctgatgcctaatagtaacaaagaggagtaatgagt

SEQ ID NO: 650523 - DNA, 569 bp, Homo sapiens
acaatgacaattcagttaaatgtacatttcatgtctcttcagtggaagtgtcctaacttgatcaccttggacatatgtttcctgaaatctagtagataatattcattatttctcacaccatgtggtgtaataatttgcctaagtttcttgtatccactagtttagccttctgaaagtttcttcatccactcatggcaccaaaggataatatattagcctcaataaaaatatcatcaattaccgacgttaacatacttctacaaagtaaaactgctacaagcattagatattgataagttttacattcagaaatcaccccagtattcattgaaaatgaccactttaggagttaattagaattcaacatcatttttgtttctaaaatagccttgttgggattatcatgttattctctaaagaagtttcgtgaaatagctattttatccaagaggtwgctccttgaacaaggaagccaatgtattcatatgcaagtttatctcatttttataattaaagtcaacaaaacatgtatctctgatgcctaatagtaacaaagaggagtaatgagt

SEQ ID NO: 650524 - DNA, 476 bp, Homo sapiens
ggcctgggaatgtaaatatcctttccttccccattcagcttactaatgaatctatcataatctcagctgtctgaatctaaaagagaaccagtaaaattgagataacaagtttattgcaaaataaatgacctgaaagccacaggcattgggtgmggtaggagaagggcaggtagtggtgactgaggtgactctgtgtttgggtttttgaaaagattgtagatttgaaggataaggagttcagagaagtagaaaggcaaataggggctgttataaataaggacagtggcatgagccaacggggttatctctcatatttaaagaacatggctacatctggtttccctataagttgattccttactgttattctgagttgaatgcatatcttttgtctcagtgaagcctgaatggcttttgatgtctctgatctggaaaggttatttgtgtatctcagaataagtcattttgctaaaaaa

SEQ ID NO: 650525 - DNA, 503 bp, Homo sapiens
gttagtaaaatgtttcagataatacattggtaatagaaaaagatccattgaaatgtgaggcattcacatggaaagaactggcagaatgtggtaattaacagctataargaccccaaaataaaaggagtaatcaaacatcactcaaggcttttagcacagtttttgagaacagtgtcagaaggagaagacaactttgttcctaaaagttatattgtaaaataaatgtagcttatacatttttgaaagtgaaatctcaggattcatggtatctttacttctacttgccaaattattaaaatggtgttatatttcttaagatattttaaagcctctattgtagaacagaaatagtagaaaatggaactaatgtttattaacagttactatggaagagggaatagaaatgtgttgctcttgaacaggtttattcaactttggcgctattgacattttgggctagctaattccttgtcacgggcagtatatcctgtgtgtaggatgtt

SEQ ID NO: 650526 - DNA, 503 bp, Homo sapiens
gttagtaaaatgtttcagataatacattggtaatagaaaaagatccattgaaatgtgaggcattcacatggaaagaactggcagaatgtggtaattaacagctataaagaccccaaaataaaaggagtaatcaaacatcactcaaggcttttagcacagtttttgagaacagtgtcagaaggagaagacaactttgttcctaaaagttatattgtaaaataaatgtagcttatacatttttgaaagtgaaatctcaggattcatggtatcwttacttctacttgccaaattattaaaatggtgttatatttcttaagatattttaaagcctctattgtagaacagaaatagtagaaaatggaactaatgtttattaacagttactatggaagagggaatagaaatgtgttgctcttgaacaggtttattcaactttggcgctattgacattttgggctagctaattccttgtcacgggcagtatatcctgtgtgtaggatgtt

SEQ ID NO: 650527 - DNA, 503 bp, Homo sapiens
gttagtaaaatgtttcagataatacattggtaatagaaaaagatccattgaaatgtgaggcattcacatggaaagaactggcagaatgtggtaattaacagctataaagaccccaaaataaaaggagtaatcaaacatcactcaaggcttttagcacagtttttgagaacagtgtcagaaggagaagacaactttgttcctaaaagttatattgtaaaataaatgtagcttatacatttttgaaagtgaaatctcaggattcatggtatctttacttctacttgccaaattattaaaatggtgttatatttcttaagatattttaaagcctctattgtagaacagaaatagtagaaaatggaactaatgtttattaacagttactatggaagagggaatagaaatgtgttgctcttgaacaggtttattcarctttggcgctattgacattttgggctagctaattccttgtcacgggcagtatatcctgtgtgtaggatgtt

SEQ ID NO: 650528 - DNA, 503 bp, Homo sapiens
gttagtaaaatgtttcagataatacattggtaatagaaaaagatccattgaaatgtgaggcattcacatggaaagaactggcagaatgtggtaattaacagctataaagaccccaaaataaaaggagtaatcaaacatcactcaaggcttttagcacagtttttgagaacagtgtcagaaggagaagacaactttgttcctaaaagttatattgtaaaataaatgtagcttatacatttttgaaagtgaaatctcaggattcatggtatctttacttctacttgccaaattattaaaatggtgttatatttcttaagatattttaaagcctctattgtagaacagaaatagtagaaaatggaactaatgtttattaacagttactatggaagagggaatagaaatgtgttgctcttgaacaggtttattcaactttggcrctattgacattttgggctagctaattccttgtcacgggcagtatatcctgtgtgtaggatgtt

SEQ ID NO: 650529 - DNA, 405 bp, Homo sapiens
tgctggaactgccaaataattcatatggaaaacaaagaaacatgaatcttatctcgtattctcttatcatatgtgtaatttaaccataaatggattttttaaacctacaagtaacactgcggcaagcaaagattttttaataaagcataaagagcataattttttcaacttcaaaaaattaacaaatgacaaatgtcatcaaaatgraaccctctgctgttcaataaacattgctaaataaatgaaaacaagtcacacattaggcaaaaatatttaaaaaatgcatctccaataactgacttctgtgaataatatataaaaaaaatcttagaactcaagaagatgacaagcaaatcaattggaaaaaaatggtggtagagacaaaatactttaacagacatgtca

SEQ ID NO: 650530 - DNA, 205 bp, Homo sapiens
tgtctcttgtttgactgaaacwttataagtaatatttgatttatttcagatgctgccaggtgttcaagagctagatgaaggtatgttgccaaaatttatgaattaaattcaaatcattgatttctgaaataaactgtaagtagtgaatggtattcctctcaattgcttggttaatacatgctacattaaatattttttcttacac

SEQ ID NO: 650531 - DNA, 476 bp, Homo sapiens
tgtttttccatcatattatgactctgaaaaacsctagtgtcatgcttttcagagaatgacattggaaagaagaaacggccaaagtatcatttggtaccttggcttccttacatagatgttgaactccaagaatgatcaaatcacagtttagaacccctttgttgggccctataaagggtttccggatatcaaatgataaatagtctccagatgaagaaatgctctataacgccccaccgctgtgttttcctatattttgtccttttctgaaaactttaaatacacgaatttttggtagaaatgaaaatctttctgttttatatatttgtttctgtccatggcactctgatatctttgaatctagtaaggatatagccttgtcttatttataccagcaagcagtgttgtcacttaatgctctcatttttcacgtaaatgactgacattttcccaagtcttcacaagtgatttttgaa

SEQ ID NO: 650532 - DNA, 528 bp, Homo sapiens
gaaaacatgctgtagaattaaagcaaaattatgctgtcccctgatccccttatgtcttgatctgctctccaatgtttcttcttcccaatttcaatgtgaggaagtgtataatattactgcgaagatcatgttccagatcagcagcatcagcatcacccgagaatttattacaaatgaagaatctcaggtctgctgaatcagaaagtgcagcttcgacgagccccgccccgctgatttattcggggaagagaagttcttttctaaatgattgaaaatracattaaatgtgttttgcaaaattacctgtcccacattgtagtgcatccttttttttttacatcaacaatttatttttatttatttgtttttctcagctattagtggtttatttgcttcagtaccatatttaattttttttctttttctttcttttattattaaagttttagggtacatgtgcacattgtgcaggttagttacatatgtatacatgtgccatgctggtgtgctgcacccactaactcatca

SEQ ID NO: 650533 - DNA, 541 bp, Homo sapiens
gtgatagagttgggataaaccacagtgactcattattcctctttgttactattgggcaccagaggtatatgttttgttgatattggttattcaaatgagataaacgtgaatatgcatacattggctttgtttttcaaggagctrttggataaaatagcaacttaataaaaattctctagagaataacatgataatttaaccagactattttagaagtgaaaataatgttgaattcattacttgactcccaaatggttattttcaaggaatattggcgtgatttccagatgtaaaagcttattcatatctaatgcttgtagcaattttattttgtataagtatgtcaaatttggtaatttattaaactttttgatgaagtttatacattataccttgttgccatgagtggatgaagatttcggaaggctaaactagaagatgcaagagatgtaggcacattattacaccatatgggtgtgagaaataatgaacattacatactataattcaccaaacatatatccaagctgattaagttagg

SEQ ID NO: 650534 - DNA, 567 bp, Homo sapiens
tctcactctgtcacccagggtggagtgtagggcactatctcagctcacagcaacctccacctcccaggctcaagcgatccccccacttcagcctgccaagtagctgggactataggcgcataccaccacacacggctaatatttgtactttttgtagagacggggtttcgccacattgcccaggctggtctcaaactcctgagttcaagtgatccrcctgccttggactctcaaagtgctgggattactggtgtgagccactgtgtccggcataacctcttttctttacagattacccagtctcacatattcctttatagcaatgcagacggactaacacagacataaaacatataaggattgacagatgaacagatggcatggagagatatgtagtaaagcaagtatcctaaaataataatggtataaagtagtgaatttactgatgtacaatgaaaaattgtttcaatttttctgtatgcttaaacgttttcataataaaatgttgggggaaaaaattatacctaaaacagttaaagaacaagttaagagaacagggaataataa

SEQ ID NO: 650535 - DNA, 567 bp, Homo sapiens
taaaggttaattagaattacggacttgaaaaggttatttatgaaacaagatagaaaggaacaagtaagtaggggagagggatataaagaaagttaaggacatgaagatatatttttggtagggaaggttataaagaaaaaaaagatcatgcctgtaatcccagcccttcggaaggcgaaggcgggcaaatcacgaggtcaggagattgagaccatcctggctaatatggtgaaaccccatctctactaaaaacaaaaaattagccaggcgtggttgcagrtgcctgtagtcccagctactcaggaggctgaggcagtagaatggcctgaacctgggaggcagagcttgcagtgagccaagatcatgccacggcactccagcctgggtgacagagtgagactctgtctcaaaaaaaagaaaaaagaaaataaagaattttgtatgacaaaggatcgtgtatggtgaatttttgtcccaaaataaaatgactgcttattttaaaaagaaaagaaaagttagtacaaaacagaaagcccaagcatgtcatagatggtccatgtaagtcat

SEQ ID NO: 650536 - DNA, 567 bp, Homo sapiens
taaaggttaattagaattacggacttgaaaaggttatttatgaaacaagatagaaaggaacaagtaagtaggggagagggatataaagaaagttaaggacatgaagatatatttttggtagggaaggttataaagaaaaaaaagatcatgcctgtaatcccagcccttcggaaggcgaaggcgggcaaatcacgaggtcaggagattgagaccatcctggctaatatggtgaaaccccatctctactaaaaacaaaaaattagccaggcgtggttgcagatgcctgtagtcccagctactcaggaggctgaggcagkagaatggcctgaacctgggaggcagagcttgcagtgagccaagatcatgccacggcactccagcctgggtgacagagtgagactctgtctcaaaaaaaagaaaaaagaaaataaagaattttgtatgacaaaggatcgtgtatggtgaatttttgtcccaaaataaaatgactgcttattttaaaaagaaaagaaaagttagtacaaaacagaaagcccaagcatgtcatagatggtccatgtaagtcat

SEQ ID NO: 650537 - DNA, 569 bp, Homo sapiens
aactaaacattctttaacactgcttcataaacactcaactggtctattagctgctaaatctgtttgcataaaatcaatcttcagatatgtcactgatgttaaagaattctttaagataattgtcactctcttacaaatggaatgattctaaaattggttttaaaatgcataatcggcccattttatgtaacctaggtatttgcctaccctttctactatttagtgtcatgttggtaaatattcaattgtattctgtttttaaacttctcttcttggccttttgatgttttattctatacaatctatcttttacttcttctcctttccagggagcttctgactattttgcttctcactcaaaaatttaatgaagctgctgtcttgtaaattattatcaattccatttkccttgggtccctattttttaatatagttgcccattctggtaactctgtcctaattttatttccagaaacatgcaactggtagagttttcaaaaacattttctttgtctactttcgttttaaaattttttaatttatgcagcacactttaaaagatagaaaat

SEQ ID NO: 650538 - DNA, 547 bp, Homo sapiens
tcagcttcttagaacctctggaaaggaaaaaggtcctaaggacactttgatttttcatgtttgatccccaaaacagcaagataatttgtgttggtttaggtcactaagcttatgacaatttgcttagaaacagaacacaaatacaattgctcctcagtatccatgggggattggttccaggaccccctgtgtataccaaatgcctcagatgctcargtccctgatataaaagagtagtaatttcatataatcttcacactccttgcatatactttaaatcattcctagatttcttgtaacactgaacacaatgtaaatgctaagtaagtaggagttatgctgtatttcctagaaaataatggcaagagaaaaaggcctgtgcatgctcaattcagacacaatgtttttgtagaacgtttcctgatgtggaacacacgaataggaagggcctactggtttcaaattataaactgagcataaaattagtaacacaaaaaagctaaggctacatttctgtaatggagaacaaagatgaaaacctaccaac

SEQ ID NO: 650539 - DNA, 547 bp, Homo sapiens
tcagcttcttagaacctctggaaaggaaaaaggtcctaaggacactttgatttttcatgtttgatccccaaaacagcaagataatttgtgttggtttaggtcactaagcttatgacaatttgcttagaaacagaacacaaatacaattgctcctcagtatccatgggggattggttccaggaccccctgtgtataccaaatgcctcagatgctcaagtccctgatataaaagagtagtaatttcatataatcttcacactccttgcatatactttaaatcattcctagatttcttgtaacactgaacacaatgtaaatgctaagtaagtaggagttatgctgtatttcctagaaaataatggcaagagaaaaaggcctgtgcatgctcaattcagacacaatgtttttgtagaacgtttcctgatgtggaacacacgaataggaagggcctactggtttcaaattatraactgagcataaaattagtaacacaaaaaagctaaggctacatttctgtaatggagaacaaagatgaaaacctaccaac

SEQ ID NO: 650540 - DNA, 575 bp, Homo sapiens
caacagtcccccaaagtcttaactgattccagcataactcaaaactccaagtccaaagtcttatttgagacaagtcccttctgcctatcagcctataaaattaaagaaaaaaaagttagttacatccacaatgggggcctcatgaccctgaccagtgccctatcctactgtggctcaactgatatccaagatgcaagacaaagtcctttctactctttcctctaatctcctctagcagaaggaagcrgtcttttttggagctgcaagctgtgctgcctggggttgggggagtggtaatgcaagtactcctctagctgtcctggctggtgtctcagcacgctttatggcactcacctcagtacactggccccgagtacagtaccattgtgtcagcagtcgtgtacgagatcgtaaataagtctccattctcccagactcttcttgagcatcaaggctgcctggttgttgagctatagctacagactttcctcgcagagcctagcatgtacatgcttcctctgctggaaaaaaaacagcaacaaacaaacccagaacaaccccccacaactggaaag

SEQ ID NO: 650541 - DNA, 527 bp, Homo sapiens
taacctaagcacacaaagaatatactggaaggctatgaactcagttgaatcaacaataggctgagagctagtattggataacaatcaggaatcaaaagatccttaggagttagggcagcaaatataaaccagtagcagcgtctgatttgaaccccactgtgagcaataagtccccagttgtttgctggcttcactctcaaaagtcaaagtcttacaaagaagcattcaatttgctaaacccaagtatgttcctagttcctctttctccatccatacaaggacaaggaatggaaggactggtatctttctccaagactatatacaaatgaaagagtactccagggtgagctcaggatgcttttagttatatggaattcaatactattcagtccgaatttacaaatgccccatacatatacttaagtaaggacagaagttagttgagccttagsgagaactaatcaaaggatattttgtattatagtgtaatgagcactcatatgttttgagcaaattgtttagggcca

SEQ ID NO: 650542 - DNA, 527 bp, Homo sapiens
taacctaagcacacaaagaatatactggaaggctatgaactcagttgaatcaacaataggctgagagctagtattggataacaatcaggaatcaaaagatccttaggagttagggcagcaaatataaaccagtagcagcgtctgatttgaaccccactgtgagcaataagtccccagttgtttgctggcttcactctcaaaagtcaaagtcttacaaagaagcattcaatttgctaaacccaagtatgttcctagttcctctttctccatccatacaaggacaaggaatggaaggactggtatctttctccaagactatatacaaatgaaagagtactccagggtgagctcaggatgcttttagttatatggaattcaatactattcagtccgaatttacaaatgccccatacatatacttaagtaaggacagaagttagttgagccttagcsagaactaatcaaaggatattttgtattatagtgtaatgagcactcatatgttttgagcaaattgtttagggcca

SEQ ID NO: 650543 - DNA, 595 bp, Homo sapiens
aggaggtcacttcagaaatgaagaaccacttatgccaagctcttgaggcagaaatgcaataacatttaagagacctgtgctgaaagcaggggccaggttttcaagactattatttaggatgagcaaagggtagtaatgtacttcatgctaagagaaatagagagctcttaagggtattaagcagagaaggaacamgatgaaatttattctgattgttagtggagaaattggagcaggagtaggaacacaggagctgcgatggtgagagatggtggtggcttggatcaaggcagtggccttgacaaaacaagaaatggaagaattggagaaatattgagtaagtcgagttgaaaagcattttgagaaagttactggatatgaaggcgtaggctctggagtgactggcaggtctgtgcaagggcaacctgacgtcttcttgatgccatttacagagcgagcaaatgcagcatgaagggcagcctggtgtttgtgtctttctatagattagaaaaaataatggagcctaatgagcctactggaaatagagaatcctggttcaaatttgtcactcatctgaggatatgacatcaccaca

SEQ ID NO: 650544 - DNA, 595 bp, Homo sapiens
aggaggtcacttcagaaatgaagaaccacttatgccaagctcttgaggcagaaatgcaataacatttaagagacctgtgctgaaagcaggggccaggttttcaagactattatttaggatgagcaaagggtagtaatgtacttcatgctaagagaaatagagagctcttaagggtattaagcagagaaggaacacgatgaaatttattctgattgttagtggagaaattggagcaggagtaggaacacaggagctgcgayggtgagagatggtggtggcttggatcaaggcagtggccttgacaaaacaagaaatggaagaattggagaaatattgagtaagtcgagttgaaaagcattttgagaaagttactggatatgaaggcgtaggctctggagtgactggcaggtctgtgcaagggcaacctgacgtcttcttgatgccatttacagagcgagcaaatgcagcatgaagggcagcctggtgtttgtgtctttctatagattagaaaaaataatggagcctaatgagcctactggaaatagagaatcctggttcaaatttgtcactcatctgaggatatgacatcaccaca

SEQ ID NO: 650545 - DNA, 595 bp, Homo sapiens
aggaggtcacttcagaaatgaagaaccacttatgccaagctcttgaggcagaaatgcaataacatttaagagacctgtgctgaaagcaggggccaggttttcaagactattatttaggatgagcaaagggtagtaatgtacttcatgctaagagaaatagagagctcttaagggtattaagcagagaaggaacacgatgaaatttattctgattgttagtggagaaattggagcaggagtaggaacacaggagctgcgatrgtgagagatggtggtggcttggatcaaggcagtggccttgacaaaacaagaaatggaagaattggagaaatattgagtaagtcgagttgaaaagcattttgagaaagttactggatatgaaggcgtaggctctggagtgactggcaggtctgtgcaagggcaacctgacgtcttcttgatgccatttacagagcgagcaaatgcagcatgaagggcagcctggtgtttgtgtctttctatagattagaaaaaataatggagcctaatgagcctactggaaatagagaatcctggttcaaatttgtcactcatctgaggatatgacatcaccaca

SEQ ID NO: 650546 - DNA, 595 bp, Homo sapiens
aggaggtcacttcagaaatgaagaaccacttatgccaagctcttgaggcagaaatgcaataacatttaagagacctgtgctgaaagcaggggccaggttttcaagactattatttaggatgagcaaagggtagtaatgtacttcatgctaagagaaatagagagctcttaagggtattaagcagagaaggaacacgatgaaatttattctgattgttagtggagaaattggagcaggagtaggaacacaggagctgcgatggtgagagatggtggtggcttggatcaaggcartggccttgacaaaacaagaaatggaagaattggagaaatattgagtaagtcgagttgaaaagcattttgagaaagttactggatatgaaggcgtaggctctggagtgactggcaggtctgtgcaagggcaacctgacgtcttcttgatgccatttacagagcgagcaaatgcagcatgaagggcagcctggtgtttgtgtctttctatagattagaaaaaataatggagcctaatgagcctactggaaatagagaatcctggttcaaatttgtcactcatctgaggatatgacatcaccaca

SEQ ID NO: 650547 - DNA, 586 bp, Homo sapiens
tttgaacagtaaatgaatgttgttattgttgagttttttgtcctctaagatccactatagaaaagtgataatgtgcttaccagtataaacacatatttgaatcctactcatgtaaagaaatctgctctcaaaagagaatagtaaacaaaacatcaagcaaacgaatacattttaaaaaaagtcctgggtctctttataagtagctcgaaactacttgaaagaccactgtggactgggatttctacctgagagacctttccacttgttacttagatttttctcatcttacagctttccaggctcacagcaccckgtgattcaggatccatcctcagaaatcacaggatgtgctgtgctcttcatgtcatctacttgctgactggccggagagcaatcttgtaatagcaataatctttagacccatattaatctctcaccctcaaaaaatcccattaagttaagtactaatgagggaaagttcctcatacaaggcaaggtactttctcgataataaaacataagacttttctgtctaaaagtcattgctattgtcttaaattatagttttatctattctttaaagatt

SEQ ID NO: 650548 - DNA, 557 bp, Homo sapiens
tcgtgtatcacttttgcttctctgtatacgtggaaacatttttgcatccctggggtgatcccacttgatcatgatgaatgatcttttgaatgtgttgttaaactcagtttgctagtattttgttgaagatttttgcatccgtgttcattagtaatttgcctgtagttttattttcttagtctttgtctggttttgaaatcaggggaatgctttccttgatagaacgagtttgaaagtattccctccttgatttattgaaatagtttgaatagaattaatatctattctcactgatatatatatatatatatatttttcagaacgcagcagtgaagccatcaggtcaggtcccagctatcctttgaagggagactattattgcctctatctcattagttgttattggtccattgatgctttaactttcttcatgtttcaatcatcataggttgtatgtgtctaggaatatasttatttattttaaattttccagcttattggcatatagttgcttataaaggtctttaatgatcatgtgcatttctgtggtatcagtc

SEQ ID NO: 650549 - DNA, 574 bp, Homo sapiens
cactatttctatgagggaagcactggtatgactttaactttatatttgaggacactgaggttgaaagagtttatgcaacttttgaaagttctcacttagactaatctaaagctcaggattataatcatgatcccatcgtgattcccttggcttaaattttaaatttaaacaataatacttccatcatcttggtttactcacaratttcttcttgtgttcaggcttttacttgttcactcactaagtttagcatgattagttattggggcacctctgctcttcacccagcatccattcttgcaggttttcagcagtatccactgctcacgagcaatctaccaggaataattgtcatgtggagagccagaggggcacaaatatgaagaaacacagattctgcccttcgtttctcagagggagacacacgcaaaactcataacgtggctgacatggccagagccatggggagggggaggctgaggtgcagtgcagcatgagaggattggacccccagcaaggtgggcagggaaatctgggcttgcagctgcttgctgtgtaatcaatatgcttttca

SEQ ID NO: 650550 - DNA, 622 bp, Homo sapiens
acaatatacaatgaggtaagaaggtgctcagcgaaccaccatacttgttcttgtctgattttgaactccatgtggtagcaatakccttacaattttcgctttgtaagcatttatttcttgatttaacccaccaccaccacaaacgctgcccctcactgattcatcaaatattgggttggtagttattcttattaatcattcctaaatgcatatatagctcacatttactttaatttttaatatgagaaatgttttgaatctttatttagaaatttggtgatgtttttgtgaccagacacatatgccacaagaacttaattcttgttatatcaattagcatctggtaaaattggttttgttatgtgtcgttttggctaacgtcccagttttcaataacctattgatgatgttaagtgaggacttactgtactgatctaagagtatgtagcattttactttctatatgcagtctttctcaaacctgaaatcctgtagcttgaaagtgtggtaactgtcatccaaattttagagtggatatgttaagagtcacaacatttttacctcaatatataaataaacatattctcttgtcacttcagtgtaatacgtgacaactcccaca

SEQ ID NO: 650551 - DNA, 622 bp, Homo sapiens
acaatatacaatgaggtaagaaggtgctcagcgaaccaccatacttgttcttgtctgattttgaactccatgtggtagcaatagccttacaattttcgctttgtaagcatttatttcttgatttaacccaccaccaccrcaaacgctgcccctcactgattcatcaaatattgggttggtagttattcttattaatcattcctaaatgcatatatagctcacatttactttaatttttaatatgagaaatgttttgaatctttatttagaaatttggtgatgtttttgtgaccagacacatatgccacaagaacttaattcttgttatatcaattagcatctggtaaaattggttttgttatgtgtcgttttggctaacgtcccagttttcaataacctattgatgatgttaagtgaggacttactgtactgatctaagagtatgtagcattttactttctatatgcagtctttctcaaacctgaaatcctgtagcttgaaagtgtggtaactgtcatccaaattttagagtggatatgttaagagtcacaacatttttacctcaatatataaataaacatattctcttgtcacttcagtgtaatacgtgacaactcccaca

SEQ ID NO: 650552 - DNA, 622 bp, Homo sapiens
acaatatacaatgaggtaagaaggtgctcagcgaaccaccatacttgttcttgtctgattttgaactccatgtggtagcaatagccttacaattttcgctttgtaagcatttatttcttgatttaacccaccaccaccacaaacgctgcccctcactgattcatcaaatattgggttggtagttattcttattaatcattcctaaatgcatatatagctcacatttactttaatttttaatatgagaaatgttttgaatctttatttagaaatttggtgatgtttttgtgaccagacacatatgccacaagaacttaattcttgttatatcaattagcatctggtaaaattggttttgttatgtgtcgttttggctaacgtcccagttttcaataacctattgatgatgttaagtgaggactyactgtactgatctaagagtatgtagcattttactttctatatgcagtctttctcaaacctgaaatcctgtagcttgaaagtgtggtaactgtcatccaaattttagagtggatatgttaagagtcacaacatttttacctcaatatataaataaacatattctcttgtcacttcagtgtaatacgtgacaactcccaca

SEQ ID NO: 650553 - DNA, 622 bp, Homo sapiens
acaatatacaatgaggtaagaaggtgctcagcgaaccaccatacttgttcttgtctgattttgaactccatgtggtagcaatagccttacaattttcgctttgtaagcatttatttcttgatttaacccaccaccaccacaaacgctgcccctcactgattcatcaaatattgggttggtagttattcttattaatcattcctaaatgcatatatagctcacatttactttaatttttaatatgagaaatgttttgaatctttatttagaaatttggtgatgtttttgtgaccagacacatatgccacaagaacttaattcttgttatatcaattagcatctggtaaaattggttttgttatgtgtcgttttggctaacgtcccagttttcaataacctattgatgatgttaagtgaggacttactgtactgatctaagagtatgtagcattttactttctatatgcagtctttctcaaacctgaaatcctgtagcttgaaagtgtggtaactgtcatccaaattttagagtggatatgttaagagtcacaacatttttacctcaatatataaataaacatattctcttgtcacttcartgtaatacgtgacaactcccaca

SEQ ID NO: 650554 - DNA, 630 bp, Homo sapiens
ttaatagatgaaatatagtgtgcacacatacttgggaaacaccactatttgtattctctatagtcttatattttccattcacaggctacaggatcagaaaggaaatctggaatcattacaaatgacagcagaaaagcagagctcattcatttccaaatggcaacaaattgatcaggagaccaagtttcaggaccctggtgccctaytcctgagagtgacaagattaaaaaggataaaacattgctgctaagaagaggaaccatctcagaaaacttggaaagtgactccaagatatggtcaaagcatggacttctagtcaatttccctggtccagatgcaagatgaggtcatccccaaggatcaagatgaaggttctgggttggcataagagtatgggacacctggaaggataccctggattgctgtctcaggtagaatttgctttcatggtatctaaggtcaaaccaagcacttttattcttggaggcccagtttagtccgtatatgtgggtcattaaaacattattgttagaagggagtcattcatatcaaccagttttcgccctttgaatttttgccttcagtatcctccatgggatattagggcccatttggagactacaagtagga

SEQ ID NO: 650555 - DNA, 630 bp, Homo sapiens
ttaatagatgaaatatagtgtgcacacatacttgggaaacaccactatttgtattctctatagtcttatattttccattcacaggctacaggatcagaaaggaaatctggaatcattacaaatgacagcagaaaagcagagctcattcatttccaaatggcaacaaattgatcaggagaccaagtttcaggaccctggtgccctactcctgagagtgacaagattaaaaaggataaaacattgctgctaagaagaggaaccatctcagaaaacttggaaagtgactccaagatatggtcaaagcatggacttctagtcaatttccctggtccagatgcaagatgaggtcatccccaaggatcaagatgaaggttctgggttggcataagagtatgggacacstggaaggataccctggattgctgtctcaggtagaatttgctttcatggtatctaaggtcaaaccaagcacttttattcttggaggcccagtttagtccgtatatgtgggtcattaaaacattattgttagaagggagtcattcatatcaaccagttttcgccctttgaatttttgccttcagtatcctccatgggatattagggcccatttggagactacaagtagga

SEQ ID NO: 650556 - DNA, 526 bp, Homo sapiens
tataaattttggtcctagctttagggtagagctcctgtgtgatgctctatcttggaaaaamctatgtatttctttactgtcctatgtgatgtatgacagtaggaatctgcactcattcattttgctacatgtccgtagggcaaaattggtttcggtgtttaggtatattttgtctgctccctgcattcccatggttttgaccttatattttactttttttgtgtgaacataccaatgcttcaatttttttccagtaatataatcaactatactataagaaagagaaaacttttgataaaacacaaatttcatgttttcctactctaattggcttttacataaaaatacaggtaaaatttatttgtacttttttgctatttctgttttgctattctctgtttgtctatgtcttctccacatagacacaattagggaattttgtacactcttgtgccaactgctttgatagtaacaaaatgtatttctcaaactcctagctataaaactcaagtatccacaatttaaa

SEQ ID NO: 650557 - DNA, 569 bp, Homo sapiens
agtaccttttgacaggtgtaaaactgtagacagactgatacatacatattctaattgactcaaaagtatatgggacctattttaaaatctagattttaaaatgtcttgtcaacatacacatgttctccttgtgaaataattgctttttattctctggatagaataatttaatctttaaaccttcaaatcactgttaaaaacaaaatattacataaggatatgcttatamaaataattcccaactagcttttcaattcagaaatatatgtgaaaaatcatcaagcatctaatggatttcaaggagaaatgggttagtaatttattccctatatctcaatttttcctagactcaaggcttcctttaaaataattgtaggcatttaagaaaccatgtaaactaaaaagaagaaattatgacactgccgcttaggttttttaaatttttggacatgaatcaatatattttttgaattttatcttaattagacattgtgagttcaccatcttcctttcagtatagcatccaagctgattatcatagattacaagttcaactatcaactgtgttc

SEQ ID NO: 650558 - DNA, 601 bp, Homo sapiens
aaggaataggggctgggctattaatacatctgctacaaatcaataaagcccttatgctccttttggtgatcgacaacgtatttaaaaatattacatgatcaagaagggctgcagaaaggaggaaacagaaacaaacagcacacctcttggtttatatttattcatttcatcagtttcaaggaaaatgtgttgggagttcctggcatagagaatgtcacaaagacatgttttcaatagtagtgctatccctagggcagagaagacccagagaaagcccaagtggctgctggaacaaagtcagacaccgtgcaacctgtccacactccttggctctgcatcatgctgaagatcgctttaaaggactggcttccctcmccccaaaattaaaagagcacagactgagaaactgaatgtaggagacagcagtggattatgctgttctcaggggtcacctcaggtttggaagcattctttcaaattaacccatctcaggccatctgcagagaagaaagatggtacctaactttttttcttgtcagcatttggtaggggtgttttattgaccaaatagttttttgtaactaactaaatatagtagatt

SEQ ID NO: 650559 - DNA, 641 bp, Homo sapiens
aaataggagaataccatattttatatttattaattatacttgtctctaacgacagaaagaaatgtaaagaaatactatgaacaccccaaaattagacagcctaggtgaaatggactgtacacctcaaaattagataacctagatgaaatggacaaatttttaaccacgcataaattatctaatgtgattcaagaagaagaagaaattcttaasagacctataacaagtacagagaatagaccggtaatcaaaactcctcctcaacaacaacaaaagctcagtatcagatgtttcactggtgaattctgtcaaacatgtaaaaaagaataaataccaattcatcttaaattcttccaaaaaatagaagaaggagcatttctcaagtcattacatgagacaagcattatccttataccaaagtcagatggagaaatccaaagaacagaaagttacagaccaatattccctatgaatacaagtagaaaaaaagtaattaataaagcattccaatgtataacattatctcaaagaataaaatacctaggaacaaatttgaacaaggaagtgaaagacttgtacactgaaaactacaaaacattgctaaaaaagttaaagaagacctgcataaatgaaaatattga

SEQ ID NO: 650560 - DNA, 641 bp, Homo sapiens
aaataggagaataccatattttatatttattaattatacttgtctctaacgacagaaagaaatgtaaagaaatactatgaacaccccaaaattagacagcctaggtgaaatggactgtacacctcaaaattagataacctagatgaaatggacaaatttttaaccacgcataaattatctaatgtgattcaagaagaagaagaaattcttaacagacctataacaagtacagagaatagaccggtaatcaaaactcctcctcaacaacaacaaaagcycagtatcagatgtttcactggtgaattctgtcaaacatgtaaaaaagaataaataccaattcatcttaaattcttccaaaaaatagaagaaggagcatttctcaagtcattacatgagacaagcattatccttataccaaagtcagatggagaaatccaaagaacagaaagttacagaccaatattccctatgaatacaagtagaaaaaaagtaattaataaagcattccaatgtataacattatctcaaagaataaaatacctaggaacaaatttgaacaaggaagtgaaagacttgtacactgaaaactacaaaacattgctaaaaaagttaaagaagacctgcataaatgaaaatattga

SEQ ID NO: 650561 - DNA, 641 bp, Homo sapiens
aaataggagaataccatattttatatttattaattatacttgtctctaacgacagaaagaaatgtaaagaaatactatgaacaccccaaaattagacagcctaggtgaaatggactgtacacctcaaaattagataacctagatgaaatggacaaatttttaaccacgcataaattatctaatgtgattcaagaagaagaagaaattcttaacagacctataacaagtacagagaatagaccggtaatcaaaactcctcctcaacaacaacaaaagctcagtatcagatgtttcactggtgaattctgtcaaacatgtaaaaaagaataaataccaattcatcttaaattcttccaaaaaatagaagaaggagcatttctcaagtcattacatgagacaagcattatccttataccaaagtcagatggagaaatccaaagaacagaaagttacagaccaatattccctatgaatacaagtagaaaaaaagtaattaataaagcattccaatgtataayattatctcaaagaataaaatacctaggaacaaatttgaacaaggaagtgaaagacttgtacactgaaaactacaaaacattgctaaaaaagttaaagaagacctgcataaatgaaaatattga

SEQ ID NO: 650562 - DNA, 591 bp, Homo sapiens
atggcatggtctcagcacactgcaacctctgcctcctggattcaagcgattctcctgcctcagcctcctgagtagctgggattatgggagcctgccataccacccagctaatttttatatttttagtagagactgggtttctcactgttggccaagctggtttcagactccygacctcaggtgatctgcctgccttcacctcccaaagtgctgggattacaggcatgagctaccgtgcctggcccaaataaataaattttaaatcactcttaagcaacctactggaatgatattatcaaacatctatcaggtacacttaggatgagagataggaagacaaacatgcttataactcatcagctctcaatataattagattttggttaacctgtaataagaacattgtactgcattaattcatctttgttttcttttttcttatgtcttcggtaggaatttattttgaaaaagctgtacacgacttgcttgtgttagaggatcattgtggtcaaaggttataggaggcaaagaaattcccatcctagatgcagaagagcctgcaaactgagcaagatatatgtaaatgcaaga

SEQ ID NO: 650563 - DNA, 591 bp, Homo sapiens
atggcatggtctcagcacactgcaacctctgcctcctggattcaagcgattctcctgcctcagcctcctgagtagctgggattatgggagcctgccataccacccagctaatttttatatttttagtagagactgggtttctcactgttggccaagctggtttcagactcccgacctcaggtgatctgcctgccttcacctcccaaagtgctgggattacaggcatgagctaccgtgcctggcccaaataaataaattttaaatcactcttaagcaacctactggaatgatattatcaaacatctatcaggtacacttaggatgagagataggaaracaaacatgcttataactcatcagctctcaatataattagattttggttaacctgtaataagaacattgtactgcattaattcatctttgttttcttttttcttatgtcttcggtaggaatttattttgaaaaagctgtacacgacttgcttgtgttagaggatcattgtggtcaaaggttataggaggcaaagaaattcccatcctagatgcagaagagcctgcaaactgagcaagatatatgtaaatgcaaga

SEQ ID NO: 650564 - DNA, 304 bp, Homo sapiens
tatggagaaaagggaatgcttgcacactttcagtggaaatctaaattagttcagccactrtggaaagtagtttggagcttttttaaagactttaaaagggaactacaatttgacccagcaatcccattactggttatgtatctaaaagaaaacaaattgttttagcaagaatacataggctctcatatgcttcgcagtcctattcacaatagcagccatgaaatcaacctaggtgcccattaatggtggaatggataaagaaaacatggcaaatatacatgatggaacactacacagccataaa

SEQ ID NO: 650565 - DNA, 576 bp, Homo sapiens
cctacagtcaacttacaatgaaggccagttcttctcaaacaccataatgctctgcctaaatcattcatttaaaaaatcatgggtaaaactttatgaataaaatgaagtatactttatgttaaataattttgaattttctctatttaaaaataatattgagattatgactccagtaaacaaaactgaaatgctaaagattacatttaaataacacattctttattattattattttcttattttaagttttactttaagttctgggatatgtgtgcagaacatgcaggtttgttacataggtatacatgtgccgtggtggtttgctgaacctaacaaactgtcatgtaggttttaagcctcgcatgcattaggtatttgtcctaatgctcttcctctctccccttgccccccacccmccgacatagtgcattaaaacatcaagtattgtaatttgcagtttgtgatacaccatttaggctagaataagaaaccttttaagtatgaaataggaagacataaagaaattaattaatttttaaatttaattttaaattttcaattaatgtttatatttta

SEQ ID NO: 650566 - DNA, 529 bp, Homo sapiens
ttccaccttaaattcctgtaaataaaattcttgtgatagcttcttaaaaagtaagagaaaagaaagacagagaaaactgattcctttctacttggagcttgatttcaaatatgtaaaccccaactacgtaattctgtacacagggatctcattatttattttcatagttgctgctttgtttaaaattttgtctctaaagtttgtatttggcaagacaaatagaaataagctggtttataatttttcttattctaagatgtgcatgtgtatatgtgtaagtatgttttaatttctaatggcctgtccagatgatggtatcactcctggagacatggcaacccatatgagaatgtttatatacactggggtggagaagaacaaccatgcccamatcctaatttaaatcaccttcacctttgaaatgttaaaactgtatgtgtccttttcaatttctctctgctcctccttttctcctatgctcttgctcagaaaacatttaatttcaactcaggtgtatttattagaaaga

SEQ ID NO: 650567 - DNA, 529 bp, Homo sapiens
ttccaccttaaattcctgtaaataaaattcttgtgatagcttcttaaaaagtaagagaaaagaaagacagagaaaactgattcctttctacttggagcttgatttcaaatatgtaaaccccaactacgtaattctgtacacagggatctcattatttattttcatagttgctgctttgtttaaaattttgtctctaaagtttgtatttggcaagacaaatagaaataagctggtttataatttttcttattctaagatgtgcatgtgtatatgtgtaagtatgttttaatttctaatggcctgtccagatgatggtatcactcctggagacatggcaacccatatgagaatgtttatatacactggggtggagaagaacaaccatgcccacatsctaatttaaatcaccttcacctttgaaatgttaaaactgtatgtgtccttttcaatttctctctgctcctccttttctcctatgctcttgctcagaaaacatttaatttcaactcaggtgtatttattagaaaga

SEQ ID NO: 650568 - DNA, 529 bp, Homo sapiens
ttccaccttaaattcctgtaaataaaattcttgtgatagcttcttaaaaagtaagagaaaagaaagacagagaaaactgattcctttctacttggagcttgatttcaaatatgtaaaccccaactacgtaattctgtacacagggatctcattatttattttcatagttgctgctttgtttaaaattttgtctctaaagtttgtatttggcaagacaaatagaaataagctggtttataatttttcttattctaagatgtgcatgtgtatatgtgtaagtatgttttaatttctaatggcctgtccagatgatggtatcactcctggagacatggcaacccatatgagaatgtttatatacactggggtggagaagaacaaccatgcccacatcctaatttaaatcaccttcacctttgaaatgttaaaactgtatgtgtcyttttcaatttctctctgctcctccttttctcctatgctcttgctcagaaaacatttaatttcaactcaggtgtatttattagaaaga

SEQ ID NO: 650569 - DNA, 613 bp, Homo sapiens
cactgtgaaatgcagtgaaartaggaaagtgagtaagatggggcctcaaagagctcaaggacctgtgtgctacaacatcttcaaaataaacacctgtcaccgagctggtcctcctagtggaggtggagtattatacacaaaagaccccataaaggagaaaaggaatttcttgcctggagagatcaaggaaggctatggagtatttacatcccgtgcagtaagtgcattgttgatgagtgagcaagtggaaggtgatgtgcgggcattcaagacagagtcaaatataaacacagccaataaattggcaaatccaagcacagattgagaaataagcggtgccagaagattaaataatccagagtttgatcatgaagggatatatagaagcaaggaactaaaattttattctgaaggcatgggagactagtgaactcaggtcagtcatctttcttatttcctgaatatggaattcattgctcacctgtctttgggtaattaaaaaccatcaccttatgacatattatgacttgccatctgaatataaatatatggtttttagtcttgtgacactttttattatatttatctaaaagaaagacgagaagctttaaat

SEQ ID NO: 650570 - DNA, 613 bp, Homo sapiens
cactgtgaaatgcagtgaaagtaggaaagtgagtaagatggggcctcaaagagctcaaggaccygtgtgctacaacatcttcaaaataaacacctgtcaccgagctggtcctcctagtggaggtggagtattatacacaaaagaccccataaaggagaaaaggaatttcttgcctggagagatcaaggaaggctatggagtatttacatcccgtgcagtaagtgcattgttgatgagtgagcaagtggaaggtgatgtgcgggcattcaagacagagtcaaatataaacacagccaataaattggcaaatccaagcacagattgagaaataagcggtgccagaagattaaataatccagagtttgatcatgaagggatatatagaagcaaggaactaaaattttattctgaaggcatgggagactagtgaactcaggtcagtcatctttcttatttcctgaatatggaattcattgctcacctgtctttgggtaattaaaaaccatcaccttatgacatattatgacttgccatctgaatataaatatatggtttttagtcttgtgacactttttattatatttatctaaaagaaagacgagaagctttaaat

SEQ ID NO: 650571 - DNA, 599 bp, Homo sapiens
ttagaaagaacaccagaacttaaaataacctgctcacttgggcttgctctacagcatgtctgtatggtctgcactctctccccggattaattgctttcatatcatgtacatttgcaggaacagtgtgacaaatgataaaacaaaataaggtcacttaatgtgattaaggacaagagtgatttgtgcaaaatattattgaaaattactatttaagttgcattttgcgtgtacttttcagaattttaaaaagagtgatatgatgtgtggagatgatggatgagggtgagatggaaagcatattaatgtatgaagccactgaaacttctgaaaagatactcaagagttttacattaagcatctcaatacctaaaataaagctgtgagataagcattattaatttattttcagatcagaaatctaaggcacagagggtttgctcaaaaccaaacagctagtaagtgtcagagttggagtcttattaaggctatttgactccaaagactragctcctatcgaccatgaagaacttgtaaaagacaaaaaaaaataaaataaaacaaaaacacatctttattatttattcacatccctaacacat

SEQ ID NO: 650572 - DNA, 605 bp, Homo sapiens
tgtagttcacatatttcactgatctaagggaaaagagagaaagaaagaaagaaagaaagaaagaaagaaagaaagaaagaaagaaagaaagaaagaaagaaaaagaaagaaagaagagagggagagaaagaaagaaagaagagagggagagaaagaagtaagtaacagcttttgatctgcagcggggactgacactgaccacttgactatggaccatcaagttaccaagtggtctgaactgcccatcatgggctgcatgtgatacctgacctaccaaaccataaaactggatgtgcacaactacactgcatcatcaaatggaaatagtatatacagtgtagtgtttaaacaagtccacaatgctaaagtaagttgcatgagaaagtggcccagatgttcactgttacgatttctgttgcattaccttctgtttctcaacatataactatggacctcatagggagttgtgcatgactagttgacttaggaagaaaagtcttgtgcttgttttacagatgattctgcatgatgtgtcggcactaaccaaaagaggacggttatagcaccgcagttccactctgggataatgctgaagaamtggagtg

SEQ ID NO: 650573 - DNA, 547 bp, Homo sapiens
aggatcaattgttatcaacctctagcagattattgaatagacggtcgttacatgaaactgacactcagttcttcatggtccacgatagttcttatatccagaaaacgtacttacgttatcaactctgactccataagacaactttgcaaagtcttggctcataactatgtaagcaatgagataacttasttttcatttctcacttgttacttacaagtaaacagccctgcagctcagctgagctacagattaactacaggtaatcacttcagcgattctgctttacccatgcccaagattttaaaaaagaacctgacagatcattaaattttgagatttgctttttaaaatgcaggttccataaagttacgctgttttgcttatatatacagcaacaaatgccttcttagatatttactttaaaattctagtttccttaccatgtattagccagataatctgtcattttttaaattctgaaattgtacacatataaattaatgtacatctctatgcctgaaaggtacatttggaattacaacgtgtg

SEQ ID NO: 650574 - DNA, 547 bp, Homo sapiens
aggatcaattgttatcaacctctagcagattattgaatagacggtcgttacatgaaactgacactcagttcttcatggtccacgatagttcttatatccagaaaacgtacttacgttatcaactctgactccataagacaactttgcaaagtcttggctcataactatgtaagcaatgagataacttacttttcatttctcacttgttacttacaagtaaacagccctgcagctcagctgagctacagattaactacaggtaatcacttcagcgattctgctttacccatgcccaagattttaaaaaagaacctgacagatcattaaattttgagatttgctttttaaaatgcaggttccataaagttacgctgttttgcttatatatacagcaacaaatgccttcttagatatttactttaaaattctagtttccttaccatgtattagccagataatctgtcattttttaaattctgaaattgtacayatataaattaatgtacatctctatgcctgaaaggtacatttggaattacaacgtgtg

SEQ ID NO: 650575 - DNA, 595 bp, Homo sapiens
gtcttagaaaaaagctttttcctaagaaagtaaattatgttattgtcaaactacttttataaaaatgatatgttggattcagtggataactttacggattggttttctaaatatgcatgaaaatgctagatttttattttctgaatcattgctgtgttgatgattgtttgcccactttattacttcactgaaaaacaaatgggatcaaamaaaatgttgctactcttctctttggaagcctcgagtcattctggatcatatagtatattctgtattctgattgatgttttaacaatgtagtgttgctatattaatactatattctttaaattgtaatatttgttataatatttttgtttactttgaaactacagagtctacactttttatcaatataacattttgtgaattataacaaaaatatataaatattgtttactaaagaaaacatagtcaagctttggaaggattaaagttagtgttattcagaagtcttactgaagactatagactgaagcctgtagctgtagggcagttctgccagactgctcctgcttagtgtttcagccactgcttatatacaagtggtgggggt

SEQ ID NO: 650576 - DNA, 595 bp, Homo sapiens
gtcttagaaaaaagctttttcctaagaaagtaaattatgttattgtcaaactacttttataaaaatgatatgttggattcagtggataactttacggattggttttctaaatatgcatgaaaatgctagatttttattttctgaatcattgctgtgttgatgattgtttgcccactttattacttcactgaaaaacaaatgggatcaaaaaaaatgttgctactcttctctttggaagcctcgagtcattctggatcatatagtatattctgtattctgattgatgttttaacaatgtagtgttgctatattaatactatattctttaaattgtaatatttgttataatatttttgtttactttgaaactacagagtctayactttttatcaatataacattttgtgaattataacaaaaatatataaatattgtttactaaagaaaacatagtcaagctttggaaggattaaagttagtgttattcagaagtcttactgaagactatagactgaagcctgtagctgtagggcagttctgccagactgctcctgcttagtgtttcagccactgcttatatacaagtggtgggggt

SEQ ID NO: 650577 - DNA, 590 bp, Homo sapiens
tatatctgaactatccaagatgttagctactagccacttatgactgtttagcatttaaaatgtcacttgtggaactgacaaaatcaacttttaattttacttgattttaataaatttaaatttaaatagatacatgtgtctagtggctaccacaataaatagtgcagggctagaccttaatcacatcactaccccatctgcaagaaaagctggaaaatgaaggtttggagctaaacacgttgctaccctccacaaaattatgtttttcttagtaaggaaaaacaaacaaaaatgaatataggctgggcagataacagcctctgcaaccaagggatatttgcttgctaatattccttaagcccagaggaatggagtgctaatgggtttatcayaggcatgaaaaatggtgtgtctgggaagatattatgtagttaaaaagcagaatcttggagctggagttcaatccaaatactttctttttacaatgagaaaactgaggctcagagggacaactgagagacctcattaatagagcaataggaaaatctgctctgaaattatacagagctatttagtggcctttataacat

SEQ ID NO: 650578 - DNA, 570 bp, Homo sapiens
tagtcatactggccacattgggaatactcagcagccacatatgastatttgttatcatattgagtatcacggatttagacactttccatcatcacagagagttctattgaacagtgctgaatgctacacatttagtcctcattattcatggtcctgatatgcatacatttcagttaccatggttttgctaatctaccagtccccaacaacatagcttaaatttcagttaccatgatatgttaactgaattgcataaagcacaaagtttgccattagctgctcaatccaaaaatcactacacaaataaaaggtgtgcatgatggtcagcaaccaatcgcatcacttctttccaagtctgccactgattggtctgttattcagctcatgcacacacagcaaaaagcaagtagatgtgctgccttcttttgttttcccccatgtgataaggccgtgtaacatttaataaaattggagcattgatagagagaactggtcaacaaagatgaaagtgcaacaaagaaacaagtgataacactagaagtgaaattaaaataagacatcaatggaatc

SEQ ID NO: 650579 - DNA, 617 bp, Homo sapiens
ttaaaaaactgtactgaactttacatgaaatatgcattttccattttttagctcttcacagctaaaacgaattattagcaaataggaaactgataccaaacaatacaatagttatatagtcataccacataagtaacaaggacaggtgcagtggctcatgcctgtaatcctagcactctgggaggccaaggcaggtggatcacctgaggtcaggagttcgagaccagcctggccagcatggtgaaaccccatctctactaaaaatacaaaaattagccaggcttggtggcaggcacctataatcccaactactcargaggctgaggcaggagaatcgcttgaacctggagagcggaggttggagtgagccaacttcacttcagcgtgggcaaaagagcgaaactccatctcaaaataaataaatataaaataaagtaaagtaacaaaaccactgttgcaagagagttcaaactactcccagcaggactgctcagcatctagttcccacacatgcatcatgtacccataacctaacccataattttccacgtttctcactgaccccattgatttgcagcctggcagcttcacacatctcacaggctaacacagaaaga

SEQ ID NO: 650580 - DNA, 570 bp, Homo sapiens
gggcaattcttttttaagtgaccaatttgaccacaattactaacattttcctccaaatgttctaacttgtcctcctaaaacaactcctgttattgcttgagccataagcatagctttatgcatagctcctccgattccatcacaggcttttacatattctgagattacatctgatcctgcaggaacctttccttttaatggcttaatggctgattgacactcaggattggcgttttcatatgccatyaactccactatgaccttacgggctttttcatcggcaattgacttttgagcaacatcttggagccttgccacaaaatcaggatagggctcttttgaaccttgtcttactgtattaaatgaggggcaggtacttcctgggtcttggattttttcccaggctctaaggcagatagctctaacttgctcaatggcctcattttgcattaatgcttgttgactaatagtactccaattttgacctattcctaatagttgatctgcatctatgttaactggaggattggcagccctatttcttcggacctgttcttgtaccccatcaat

SEQ ID NO: 650581 - DNA, 587 bp, Homo sapiens
tgaggtattggcagtaaaatgcagaaatgatactgaagaaaataaaaattgttattaacctacagtgacaaatagggtccttgtagtgcagaaggagtcatggtaacagactctcttgggcaaagtaaggaaatccaggtgctgaaggtaaacttaaaccatcaggtaatctcccaaagcctttgagagcctcagctattgggagcaccagatgccaaggaaggtggggtgggttgaggtctgaaaagactaagattagttagatgactgtaaacatgggagttggaacacccagatcctctcctacatgcctgtagccagaagattatttctcacatacatcttcactggcaggagaatagtcggctatcctcaggaaggctctggactttgtaacagagcacagcagagagcaggagagagtatgtgaatgaaaaatacagtgaggtatgcaaacttctctccactttcttttctcttttttctgtccttctccttgcctcgctcaggattccagcaactgagtataaggatcctcctctctctgcaccctaccrcaaaaagctggaaaaaagagattcttgggt

SEQ ID NO: 650582 - DNA, 512 bp, Homo sapiens
tcccaacagttaacactaaaccgtaccaagtatacattattttgctctctctcacacaaatatacacatatataaacaagtcacacagtcccaaccctgaaggtcaacgaggatagtgtttgctacccttgtagagtacaatctttaaactgtgatgacaagacaataaattttcccaaccatttgaatgagctttggaagtggattttttacttgagcttccagaaaaaaagcccagtctggctgatgccttgagttagccttatgagcattgaagcagagaacccagttgagcctgactgaattagtaactatagaaatgtacactaaraaatgaagggttgattttggccaaaaaataataataataatggtaactgtgataatgtgaactggcatcctctcccccacttacagcagacttgaggttatctagagaatgaattttgggctagaagaaatcatccagtccacaatcagtgtcttcaattctagaatcaattgaaatattt

SEQ ID NO: 650583 - DNA, 631 bp, Homo sapiens
acatggtcattttattgtaatgcaaccactgcccttggtattagttacttcaaatttcagggagaaagagttgggatatcctcctttttgctaacagaaagcccttggggactcrctcatctaaaaatactgcgtaaggtgaatctagttatactccagcaggtgtctcaccaacctttatttaaataagagggccattttccaactgcatcatctctaaacagcaaacataactatatagagcctacttctggagcacagaattgataaccttaacttctcattactttccaacatgcactcctccctgtgatagtataggtctttacctccagttatgccttctttaattcggcattcctgttctaatggctttcccttttcctcttctcctatctagaggctgtctacctttcaagatgcagatgacctccttcctgatgaaagctttctcttactactctgtcttaccaggatgtttctaaagaatgctgataacataccagtcattttatagtgttagagaacaaggtctagacaggttaaataacttaccccaaatcatacaaccagctaatggcaaaggctggactacaacccagaccttcaaactctaattcccaagagtctt

SEQ ID NO: 650584 - DNA, 573 bp, Homo sapiens
atgtgtgggtaattacgtggctctctatactgtttcattggtctgtgtctgttttggtgccagtacattactgttttgaatactatagctttgtaatatattttgaaatcaggtagtctgatgattccagctttgttctttttgctcaagattgctttggctatctgggatatttttggttccatataaattttaggaatgttttttcatatttgtgtgaaaaatgctatttatattttgaaagggattgcattaaatatgtaaattgctttggattatatggacattttaacaatattaattaatgaacacaaaatatctttgyattcttttgtgtcttcctcaattgccttaaagactatagttttaaatgtccagatgtttcaccttattggctaattgtattcctaagtattttttctttttgatgctattgtaaatggaatttctttcttaatttcttttttggatagtttgttgttggtgtatggaaatgcaatccattttttagtgttgattttgtatcctgcaactttactgaatgtgtttattagttataaaagtttttggtga

SEQ ID NO: 650585 - DNA, 626 bp, Homo sapiens
gtgtattcaactgagcatctgttctaagtgcatgtcaaattaacctgctaaattagcatctattgcaactttacttttttcccccattctctgttaaacatctctatactaatttgaagacttcacattctgtaacaaaacatgcaattgcaaacatttttgttaaacagtgtttaactctattgtggaaatctaaaattgaacggtttgtctgtttttgcttcagcaccacggacagagatgcaaagtgtcattcctgcctgttcaagatggcgataatcaccaaaatactcctgttctggtaaggatttggcatagcgccaaaatgaagcaagcggtgctctgatttttcctcagttctaaaatctccattacctactgtatgaaaacaacttcaaaatgaaccaggccattataataactctgatatctgttttggtccagcaacaataygcaaacacagaataaaagtatgaatttagagggagttattaagattcatatttacttcctgctggatgatcctggagtgtagttcatgttgactcaaataggccacccaagtcccatatggaaagagcttctccatcggtaacaccatccatcctgaaggcagtctatcttta

SEQ ID NO: 650586 - DNA, 598 bp, Homo sapiens
aatctgatttacatcttagaaagattgaagagtggacggtaaaagagcaatagcagaagaaaggaaacaagccgaagaaaatcgtagtcatccagtggcaactggcttagactatggggtaaaaatgagatggagaggagattgarttgactagatttgctcataatggggaaatcttccccaaaaggccatctgctatcacaagtgatcaatgttttccatatgccagcactcctcctcactgtattaattcaattctggtatactcttgtagaaagccaccactcatcaaatcatcaaataagaactgacagaatgtcaagtaggttgttattaataccagctagtcaaaaaaaggtgctccagttgctgcttttctttaagtataaactttgcttgccattaatatgtttattgtatgttaattaaatatcagtgtaataagccagtgtgttagaaattaagaagtgcataacaagaggaacagatgctatgtaattattaaactttactaaatatttccttacatatctatatttatcaggcaatagctatcctgctaaatctaaataaaatgcctagtcaaatatcttgaggc

SEQ ID NO: 650587 - DNA, 572 bp, Homo sapiens
atttttgtatatggaatgaaataaaggtcagggttaaggattttttatatggatactcaaatgttgaagcaccatttaaaaatatactacacttttggaactgaattactttggcaattttgtctttaaaaattgmccccaaagttacggatttatttctagattgtcttttattatctatctgtctatccttattgaaatacgtcattgaaataaatcctttttgaatattattctattgaaatatcttgattacagtagttttgtatacaatcttaaaatcacatactgtaaatgctataaatttgttttccaaaatagtttttaaaatattctacattcatttttattttcatacatgttttaggataaatatgatattttctttaaaaatcaaactgaatccttctgggatctagattgggatcacagtaaatcattaggagaactgacacccaagtaatcttgagtcttttgggcaattaacgtcttatttctttctgtttatttaggacatctttaatttttcccagaatagctttcatttgtctctggacctgtcttgtatgtat

SEQ ID NO: 650588 - DNA, 529 bp, Homo sapiens
tttaaactcatactcagctacttgctagttttgtggccttgggaaaaatcgctttttcttttcagacttccaatctcctggtaaaccttttcagtagaatgtaatatcatgctttctactaggtgggaaaaatcatctacaaatgaagaacccaacaaacaatctgtagagtaagtagaacatggacttatttaatctgcacatctccatctcttctcaggctgatggggtccaggctctttaggaatccaggatcctggccctgatagtaacttrgtgtttggcactcagccagacactctcctactccccccaactcaggacgtctatttctttatctgaaacttgagctggttaaaacaagtaattccttctttctttctagctctaaaattctgtggtctctccagctgtcactgaggtctcatgtggatctgctgaaatcattgtcattctatgattgccccacagctacattttgaagaacttcctatagacacatttatttgaattggtcctgggtgatacc

SEQ ID NO: 650589 - DNA, 559 bp, Homo sapiens
attcgtcagagcaaaatttatcatcaaaaacttggaatatttagacttcatgaaaacactttataccaaatgttttagtatggcactaaagagagtctagaaggaaattctrgcaatattacaaataaatatatttttaaaataagattgaaaattgatcagcctagtatttagttatagaaagtagcaaaggaggagggaagctaacctaaataagtggaaggaaataaacgacaaggcaacacatttatgaaataagtaataagaaaacaatagagaagataaacaaattcagaagctacttttttgaaaagctaataaaataggaaacatacacaatgaataatcaagtaaaacaaagacaaggcaggaaaatcactgctaggtgaaaggggtcatagttaaaatacagtagacttttaattttgtgaatatatagtagatgtatacatttatggggtaatgagatattttaatacaagcatacagtgtgaaataagcacattatggagaacagcgtattcatcccctcaaacatctaccctttgagttaccaata

SEQ ID NO: 650590 - DNA, 441 bp, Homo sapiens
tagtattttaaagactacagacaattcaacaaagcctgtaaatscctctcatttggaatcccactgggcctaatctgttttccattgccaacacactgctgctaaagctatcccacatcaagcactctccctaaaggctcagcaaccattgtggaagagaggtgcatgtgagattctaaaagctggattagggaggtggagtatggaagccaaagcaactccatcttggatgctagtcagccatgttgacttctgaataaccccagttccaggaagtcctttcagatttccagtttatctattattccttgggtaagagaggtgcttaccgtaaatcctgcccttaagtcaaacaaccttgatgttgtcgtacttcaattgtcctacacaccccttctgaatcacatataccatttccctatggtatacaagccctgactc

SEQ ID NO: 650591 - DNA, 441 bp, Homo sapiens
tagtattttaaagactacagacaattcaacaaagcctgtaaatgcctctcatttggaatcccactgggcctaatctgttttccattgccaacacactgctgctaaagctatcccacatcaagcactctccctaaaggctcagcaaccattgtggaagagaggtgcatgtgagattctaaaagctggattagggaggtggagtatggaagccaaagcaactccatcttggatgctagtcagccatgttgacttctgaataaccccagttccaggaagtcctttcagatttccagtttatctattattccttgggtaagagaggtgcttaccrtaaatcctgcccttaagtcaaacaaccttgatgttgtcgtacttcaattgtcctacacaccccttctgaatcacatataccatttccctatggtatacaagccctgactc

SEQ ID NO: 650592 - DNA, 384 bp, Homo sapiens
atggttttaagcttaggagaactataaagaatgtgtttataagagagatgcatatctaatccaaaggtyttataattgaaaaggaatggtgaagaaaaatgaccaaaaaagtaaaagtaaatgatatggagatcattgttaggatgctgaaacaaagaaacaactaccactaaaataaaagaaacaataacaatggaagaaatgcaccagtaattcataggaaccataattaggacaagaattgtatgtggaataggcagaaaggactgaagattttacaaatacattaatggaggaggaaacactttgtttcttattttaacattgagatataattaaaatacaaaatatgtacaaatattgagtgtatagttctatgaattc

SEQ ID NO: 650593 - DNA, 569 bp, Homo sapiens
atcttacgtatattgattgatgtctcatgtctctttaaaatgtataacagcaagctgtacctcaaccacctcagatgtgtgtcctcatgaccttgtgaggctgtgtcacagatgtgtccttaaccttgacaaaataactttctatactgattgagtcctgtttcagatactttctggtttacattatctaacgttaacaattttcaataatcatcatcaatgatcagtaattgatataagaaataggaaaayggagctcttctccttccggaagcattctgtgatggaaagggccccggataagacttggaaagatttagattctatttgccagtcttgggaaaaaagaattttaatactagtgaggcttacaataattaagatagtcacaatgaatatatgacaagctgatctgaaaaaattagacactaggaaatggaaagaattatcattgatgatcgtcaatccctaggaatttgttttctctgacccagcattcaattttgttcaaaatactgtaaaagtaattgctgatggtaaagaaaattttcaactgcaacagtaatatt

SEQ ID NO: 650594 - DNA, 589 bp, Homo sapiens
gtttaatcaccatttggatttgctcacctgtgaattttctagtcatattacttgctattatgtttgtttcactgtttatctatttcttactaatttgtgggagttatttgcattttactgatagtaacatcttatctgacatatccatggcaatttccccctaatctagcatttgtatattaccttgaacaattgtatgtctttctatactaaaaaatttacatatttatatatcaaatatgtccacattttcttctatcgcttttaagtttcttttgtttgtttgtttgcttggggtttttggcagggacagggtctcactcttttgcccaggctggaatacaatggcacagtcacggctcactgcagcctcgacctcccagactcargtgatcctcccacctaagcccccccaagaagctgggactacaggcgtgtggcaccatgcccagctaaattttttattttttgtagagacaggggacttgctatgttgcccagtctggtcttgaactcctggactcaagtgatcctcctgccttagcttctcaaagtgttgagattacagatgtgagccactgttcctgga

SEQ ID NO: 650595 - DNA, 564 bp, Homo sapiens
tctttcttaatgataataccatatgctgtactcagcatacatgtctgtagrtacatgatttgaatgctaacatgtctctgttgaaaagtagataaattttataaactttcatgcaggataaaagcccggcattagttctgttgaatgcctaccttatttttacattatccaagaaaactggtcaaaatatatttgaccaatatattcctaaatattagcttataccaataggaaattaatggacttctgtctataaagtggcccttaacaattgaactaagcattaaggagtattttaataaaaaaagacaccgacatagttccattaggttatggagaggaatgatggaacaaatttttgtgacaaattattccattgtttatgccttatatcttatcacaaacatgagattgctttattttacaaatatatattatgtaacattagatttgcagttccacgtattttctaaaaatcaccatcatcattgtcatcattttttaatacttgaagtaaccttaatttgcataaatttctatgcatagcagtagtcatcactataa

SEQ ID NO: 650596 - DNA, 581 bp, Homo sapiens
gttttttgtctacctggaaaaaataccattagcaagawtcatgtcattctacagcatctctactgtcactctttctttaatcctcattatcttcttattgtctgtaaaatcctaaaattcaaaaggatgtcaaaccatagagactacaagtttactattaaaaaaatgaccactgacaagattattgctgagaataaattaatattaccaccttaaagagaaatcgttgtatcattaataatacaatttaactaattctcttaatcttacatttacataggagtcatttagatttacacaatcatataaattaaaaaagttttattcaaaaactaataaatattgaaaacatgagctcatatttttaaagacccttatgcataatttcctaatatatcttataagttcccaataatatactttggagagtacataaatatttgttgagtgttgacactgtaaagagatgaagactttaaagggcatgaagtttatagctattcattaagcaagtgaccaacttcatctatacaacttttgaaagactcaaatgtacattggtctgctaaagtactatgtat

SEQ ID NO: 650597 - DNA, 581 bp, Homo sapiens
gttttttgtctacctggaaaaaataccattagcaagattcatgtcattctacagcatctctactgtcactctttctttaatcctcattatcttcttattgtctgtaaaatcctaaaattcaaaaggatgtcaaaccatagagactacaagtttactattaaaaaaatgaccactgacaagattattgctgagaataaattaatattaccaccttaaagagaaatcgttgtatcattaataatacaatttaactaattctcttaatcttacatttacataggagtcatttagatttacacaatcatataaattaaaaaagttttattcaaaaactaataaatattgaaaacatgagctcatatttttaaagacccttatgcataatttcctaatatatcttataagttcccaataatatactttggagagtacataaatatttgttgagtgttgacactgtaaagagatgaagactttaaagggcatgaagtttatagctattcattaagcaagtgaccracttcatctatacaacttttgaaagactcaaatgtacattggtctgctaaagtactatgtat

SEQ ID NO: 650598 - DNA, 603 bp, Homo sapiens
ttaaattatgagatttaaaaaaattagtaaattgaacatctttttttagaaaaaagtatggtgtttcatttgaagtacacattatagagaagcaaaacaaaagtaatttcacctctaaaataatgtggaaagacatgttgctttagaacagttcttgccatgtaattccataaacaatatacagaagcagatgaacaaattagtgaatattatgtttctgcatatctttaatactgatgcacagttgcttcccagtagtgaagataaaccacagtttagagttcaatggtactgttatcattatattgtcaatggacaattacataagtttattgaatagaaattgagaggtgttccatcaaagcacattacaaactttcaactcaaatcctgttgaaaacatatttaaatayccagagcattaaactatgacatagaacaccattaaatctgttttgtactcaacgcaagtaaacttgcaatggttttacttttcttggttgtgtgataccttatatgttggttttgaattttctacattctcccttgaactggattcaaatcctgtgaaggaatcaattcttttcatgcccctgtactatc

SEQ ID NO: 650599 - DNA, 622 bp, Homo sapiens
ccaatcacagctccttcctgccttacgttggtttaggtgccgtgactccactcccagctacaatgggcatgtgactcaggatggccaatcacagatgcttcctgacttaggttagtttaggtgctgtgactccacccccagctactatggacatgtgactcaggatggccaatcacagctccttcctggcttagggtggtttaggtgccatgagtccacccccagctacaatgggcgtgcgactcaggatgggcaatcacagctccttcctgccttaggttagtttaagtgctgtgactccacccccagctacaatgggcatgtgactcagggtgrccaatcacagctcctccctgccttagggagtcacagatgtcatgtggccacattagaaccaataagacagatgtgtcatagactttcactggcttttttgatggagaagcatgctctcttattggagatgagaatgtaagcctggatttgcgagcagccactactttgcgaaaagcaggactgaggtagactaaatgtaggcagaaagaaaataacacccactcctgaaagaaagtgaaaaaaagacccagtccctggatcaagccattactaaacctattgcatt

SEQ ID NO: 650600 - DNA, 594 bp, Homo sapiens
ggcctttctactagaaactcccaagccaagctcccttcttcgagcacctgggccactcctccatccccaggatgttaggccatttggcaaggtgcccagaagtccttaatcgcatctgtctcccaggaggagggcataagtgcaggattcccctcaggcccccatgcatgtggcctggagctgagcctctgccaactcctctccccctacagagcaggactgtccaggccccttgtcaatggagcatatccagagaaggagagctttcccagaggaaggaaagctgtgtctgtcagagctctttctctcttgatttcagctcttataatccttggcaggagaagatgtttgaggatagctcggtttccgtaagctartcaccatcttcagaattgagaaaacagtagcagaatttaagtcctagtggggctttctttaatgcctggtcagtccatgtgaggactttgtgttgtccttccaaaggggcagctggcaggaccagtgtcccatatccctgggccagcttgacttctattgtcataaaaaattaatgtggaggatgaggtgatttgtagggccctgcagctggcaggc

SEQ ID NO: 650601 - DNA, 574 bp, Homo sapiens
aagttacaatgaaaaaaacataaaggagagagcaacattattttaataatcatagcaaaaaccacaccaagcaagagtcctattacatttttttctggaaagctgctcatgatcagaagcaggttaaattaaattagaggatgaggaggtraggttttggggtgcttttaaaggctttaaaagttgctggctttggttcattattagctctaatttactacgaaatgcatggctctccctttttcctgatgcaggtgtaaatccctggcaccaatcttgcacttatctgccatgattagcattatttttggctctaaaatagaacaaagcagggaggagaacgtggaggggagggagaggaatcttttgctgcagtcgtttggaaggaattgggaggaaagaaggaaggcagaaaggcctaggatagatatgaatgtgctgtgcaacactgtttgtagtggaaagtggttcctaggagggacaggagcacagcatctcttctctgatggggaaggaggaaacagaaaagagaagccaagtcaagtggtagagtgagtattcccatgtgttttag

SEQ ID NO: 650602 - DNA, 640 bp, Homo sapiens
ccaacatctaaggactcattaaggcctgtttgtgctgtttaagtgtttctcacaccttactttttctgtcttcactgccattgaatttagttcacttagtcccaaggatcatttatttgacaagaagtggaactagtaatggaacccagaatttaggtaccagggttcatatcttttgaaggctggtgtgcgttttattttgacttagttcataaatctgattgcagtgaagttttagtaggatttaaaattgtacagaaaatactgagacaaaaagtttttcataagccacatttcagttgggcaggytaaaggaagaactcctgtcctaattacggttagggtcatattgtgatcattggtaaattttctgtagatcgtcatagcaaaatgaatgagggattgtgctgaatcctttccactggcccccctaagccttttacccttctcgattcagctctgtgccccaggaggatggcctctttggacagctttactctgactccgttgacctctgactgtggttaagtttgaccaatggggagctgcagcaggaaaatggaatatggcacctggctgcttctcagccagagcactggagatggtgatatttctttctggaggctatagctcctattaa

SEQ ID NO: 650603 - DNA, 640 bp, Homo sapiens
ccaacatctaaggactcattaaggcctgtttgtgctgtttaagtgtttctcacaccttactttttctgtcttcactgccattgaatttagttcacttagtcccaaggatcatttatttgacaagaagtggaactagtaatggaacccagaatttaggtaccagggttcatatcttttgaaggctggtgtgcgttttattttgacttagttcataaatctgattgcagtgaagttttagtaggatttaaaattgtacagaaaatactgagacaaaaagtttttcataagccacatttcagttgggcaggctaaaggaagaactcctgtcctaattacggttagggtcatattgtgatcattggtaaattttctgtagatcgtcatagcaaaatgaatgagggattgtgctgaatcytttccactggcccccctaagccttttacccttctcgattcagctctgtgccccaggaggatggcctctttggacagctttactctgactccgttgacctctgactgtggttaagtttgaccaatggggagctgcagcaggaaaatggaatatggcacctggctgcttctcagccagagcactggagatggtgatatttctttctggaggctatagctcctattaa

SEQ ID NO: 650604 - DNA, 599 bp, Homo sapiens
ataacatatctagttcttattctttttataatgataaaagacatgatgcataccaaaacaataagctttttwaaaaaaagtaatataaaaaaggcaagtaaaagagaagaatctgaagcccaaattataatgataaaatgagtattcatagtggttgactgtaactattattttattattgatatagcatgtgtattgtgaaaagtgatatgataaatacagtgtaccacatgctattcatgaagcagagatttaataatattactataacatattgtttatcaattgaactatgagtatcttgcatccaattcatttggaacacagataagactgagaaatgctagaggcttcagcttagccaaaacaggtgtcagaaaggccacgtgctaaggttcaaagactactactactcatgatccatttgctattcttttactagtccctgctgagaaccactccaccctttttttagttctcttaaaactaagggatgaaagcatttgtcctaaggtctaagtcagttcatgtatttaactgacaaatacttgctgaatgcctgctatgtattataggctaggaatacagcagtagacaaa

SEQ ID NO: 650605 - DNA, 599 bp, Homo sapiens
ataacatatctagttcttattctttttataatgataaaagacatgatgcataccaaaacaataagctttttaaaaaaaagtaatataaaaaaggcaagtaaaagagaagaatctgaagcccaaattataatgataaaatgagtattcatagtggttgactgtaactattattttattattgatatagcatgtgtattgtgaaaagtgatatgataaatacagtgtaccacatgctattcatgaagcagagatttaataatattactataacatattgtttatcaattgaactatgagtatcttgcatccaattcatttggaacacagataagactgagaaatgctagaggcttcagcttagccaaaacrggtgtcagaaaggccacgtgctaaggttcaaagactactactactcatgatccatttgctattcttttactagtccctgctgagaaccactccaccctttttttagttctcttaaaactaagggatgaaagcatttgtcctaaggtctaagtcagttcatgtatttaactgacaaatacttgctgaatgcctgctatgtattataggctaggaatacagcagtagacaaa

SEQ ID NO: 650606 - DNA, 599 bp, Homo sapiens
ataacatatctagttcttattctttttataatgataaaagacatgatgcataccaaaacaataagctttttaaaaaaaagtaatataaaaaaggcaagtaaaagagaagaatctgaagcccaaattataatgataaaatgagtattcatagtggttgactgtaactattattttattattgatatagcatgtgtattgtgaaaagtgatatgataaatacagtgtaccacatgctattcatgaagcagagatttaataatattactataacatattgtttatcaattgaactatgagtatcttgcatccaattcatttggaacacagataagactgagaaatgctagaggcttcagcttagccaaaacaggtgtcagaaaggccacgtgctaaggttcaaagactactactactcatgatccatttrctattcttttactagtccctgctgagaaccactccaccctttttttagttctcttaaaactaagggatgaaagcatttgtcctaaggtctaagtcagttcatgtatttaactgacaaatacttgctgaatgcctgctatgtattataggctaggaatacagcagtagacaaa

SEQ ID NO: 650607 - DNA, 599 bp, Homo sapiens
ataacatatctagttcttattctttttataatgataaaagacatgatgcataccaaaacaataagctttttaaaaaaaagtaatataaaaaaggcaagtaaaagagaagaatctgaagcccaaattataatgataaaatgagtattcatagtggttgactgtaactattattttattattgatatagcatgtgtattgtgaaaagtgatatgataaatacagtgtaccacatgctattcatgaagcagagatttaataatattactataacatattgtttatcaattgaactatgagtatcttgcatccaattcatttggaacacagataagactgagaaatgctagaggcttcagcttagccaaaacaggtgtcagaaaggccacgtgctaaggttcaaagactactactactcatgatccatttgctattcttttactagtccctgctgagaaccactccaccctttttttagttctcttaaaackaagggatgaaagcatttgtcctaaggtctaagtcagttcatgtatttaactgacaaatacttgctgaatgcctgctatgtattataggctaggaatacagcagtagacaaa

SEQ ID NO: 650608 - DNA, 632 bp, Homo sapiens
taagtgccaggtctgtcacacaaactgtataaccttgggcaagtcatacaacctctctgggcctcagttttctatttagaagataccttttgaggattaagtaagataaacatgttagctgtttaatacagaacctggtacatagcaaatgtttaataaatgcaagtaactttaccattgaatcactcactcaattaaaagccactgaagcttatgtgctgatgatcacagatgccttaaaggaagggattcgatttgggctatgatgaaggctaaccccatygtgcttgggttcacattagatccacttaccaatcttttgctgagagccaagaatttgggaaggcaaattagaccaaatctcttcctgtgccttggcattctcagtctagtagtcttataagtattttcagcacaatagaggaagtttaaaaagacacatataagatatatgtatacgagatctgtagctatctattggaatgtaagtttttatgagttcactcacaaaatacatatgctgagaaatgatgttcttgaatctgttattagttttaaatctggcagctaatctgagatataaagtatttactcatttatccatcaccttttcttaacagtatttaaggtta

SEQ ID NO: 650609 - DNA, 506 bp, Homo sapiens
ggtgagtttacctaatgacctcgaattggagcaagaaaaccaggccattatatttctgtaccaagcagttctcggatgtgggatgycttgagaagggacatgaacttggatgaaggaactttactgtgctgtgagtattgttgccaggagtcagctgtcaacactcccaggagacgggaaattatgctttagtcactgaggcggcatgtagtgtcagaccacagccttgttaaacagagccagaatttggaggatggttggtgggtttaacatttggggcttgacatcttgtccccacaagctgctgctggcctcttccttgtccatttctgtgtgacctgttaaggagccccagcttcctgcttcttctttaccatatttggaatgcaaaaatctacacgtaatttggcccatggacccttctgcttagacatatccttgtagctattttttttttaaaagatgactatgccttctagaatatttctaagaaactgcctaagtca

SEQ ID NO: 650610 - DNA, 590 bp, Homo sapiens
cctgttctgcttatttcatatacatagaattatacaatacgtagtcctttgtgactggctttttcacttagcataatgttttcagaattcacttagcataatgttttagcacacattggtagtttatttcttcttatagttaagtgatattctattccatgtctatactggttttccattcattcatcggttgatgkacctttaggttagtttccactgtttagctcttatgaaaaatgctgctgcgaacattcacttacaggttattatgtggacaagcgtttttatttctctgccattggactttatcctcagagttaattgggcagatttcagcacttgtcttgctcatgctatcctttctgccttctcagtttctattcatctagcctcattcactcggacgtggcagacaatttattgttttcatgaagctttctctgagtgttctctcattgacctcatgtgttagcaatcgttgtctagtctgtgcagaaaaacttagttcttaattttacatggcttttatttttttatggaagatagctttctctcattataaatttgcttaatgggggaataatatataa

SEQ ID NO: 650611 - DNA, 590 bp, Homo sapiens
cctgttctgcttatttcatatacatagaattatacaatacgtagtcctttgtgactggctttttcacttagcataatgttttcagaattcacttagcataatgttttagcacacattggtagtttatttcttcttatagttaagtgatattctattccatgtctatactggttttccattcattcatcggttgatggacctttaggttagtttccactgtttagctcttatgaaaaatgctgctgcgaacattcacttacaggttattatgtggacaagcgtttttatttctctgccattggactttatcctcagagttaattgggcagatttcagcacttgtcttgctcatgctatcctttctgccttctcagtttctrttcatctagcctcattcactcggacgtggcagacaatttattgttttcatgaagctttctctgagtgttctctcattgacctcatgtgttagcaatcgttgtctagtctgtgcagaaaaacttagttcttaattttacatggcttttatttttttatggaagatagctttctctcattataaatttgcttaatgggggaataatatataa

SEQ ID NO: 650612 - DNA, 471 bp, Homo sapiens
gaattcattaactttagtattttcagagagttatgccgtcatcattacaattaattttagaacattttcatcaccctaaaaacaaaccccacatcatttagccatcttcactagttttcccttcctccctcagccctagggaaccacccaccttctttgtatagatttgcctataagcctctgaaataaaaagcaagtggtctgctgggactggcttatttcacttagcataatttttcatgctgcatctgtgctgtagcaggtattgatgccgggtttttgctccttagttcagctacatctgkgttcttctctcatgaccaggaaaaattaagcatgcagacacattgaggagggcagaatttattatgtgaaagcacagctctcagcaaagagcggggtcctgcaaagaggtttccacctcacaattgaataccaggagcacatgagctgaagcggccaggctcctcc

SEQ ID NO: 650613 - DNA, 471 bp, Homo sapiens
gaattcattaactttagtattttcagagagttatgccgtcatcattacaattaattttagaacattttcatcaccctaaaaacaaaccccacatcatttagccatcttcactagttttcccttcctccctcagccctagggaaccacccaccttctttgtatagatttgcctataagcctctgaaataaaaagcaagtggtctgctgggactggcttatttcacttagcataatttttcatgctgcatctgtgctgtagcaggtattgatgccgggtttttgctccttagttcagctacatctgtgttcttctctcatgaccaggaaaaattaagcmtgcagacacattgaggagggcagaatttattatgtgaaagcacagctctcagcaaagagcggggtcctgcaaagaggtttccacctcacaattgaataccaggagcacatgagctgaagcggccaggctcctcc

SEQ ID NO: 650614 - DNA, 400 bp, Homo sapiens
tcccttatcagatacacacttttcaaatactttcttctacttggcgtcttaccttttcatttcttcatgctgtcttctgaggcacagcagttttcaattttgaagtccattgaatccatttttcctttggagtcatagctaagaaaacactggcaaatgcagtcacaaagatttatgccagtgttttcttctgagggwtttatagttttagcttttacagttaactattttattttgagttaattattaaataagatatttggtcgaaatttatttattttttgcttatggatacccagttgtcccagcaccatttgttgaaaagactattcttttcccattttgttcttttgttaagcttgtataaaatcaattgactgtaaaagtgcaggcttatttt

SEQ ID NO: 650615 - DNA, 593 bp, Homo sapiens
tgtaaggtaagagtccaacttcattgttttgcatgtagttatacaattttcccatcaccatttgttgaagaaactgtgctttgccattgagtggtcttggcatccttctggaagatcatcggaccatatatgccagggttggtttctgaggtctctgttgtgttggtccataagtgtgtcaagagtgtctttatgccatgaccacattttttttttttggcttattgcagttttgtaattgctttgagacctttaattttgttctgtttcaagattgatttgcctattcatgggccctggatattccatgagttttaggwtaggtttttctgtttatcaaaaatgtcattggaatctttataaggattgtattgaatctaggtcacttcgagtagtgttgacatcattccaagatgaaatcatctaatttgcaaacccagcttttcttttcatttatttgtgtttaatttcttttaacagtgttttgtagttttctgtgttcaaatcttttgccctcttggttaagcttatttctaatttttataatgctgttgtaaatataattttttttttttttgagatggagtcttgct

SEQ ID NO: 650616 - DNA, 593 bp, Homo sapiens
tgtaaggtaagagtccaacttcattgttttgcatgtagttatacaattttcccatcaccatttgttgaagaaactgtgctttgccattgagtggtcttggcatccttctggaagatcatcggaccatatatgccagggttggtttctgaggtctctgttgtgttggtccataagtgtgtcaagagtgtctttatgccatgaccacattttttttttttggcttattgcagttttgtaattgctttgagacctttaattttgttctgtttcaagattgatttgcctattcatgggccctggatattccatgagttttaggataggtttttctgtttatcaaaaatgtcattggaatctttataaggattgtattgaatctaggtcacttcgagtagtgttgacatcattccaagatgaaatcatctaatytgcaaacccagcttttcttttcatttatttgtgtttaatttcttttaacagtgttttgtagttttctgtgttcaaatcttttgccctcttggttaagcttatttctaatttttataatgctgttgtaaatataattttttttttttttgagatggagtcttgct

SEQ ID NO: 650617 - DNA, 494 bp, Homo sapiens
tataagaaccacttcactagaaataattatatcaaaacatcatgttgtactccttaatgtaggttaagaaaactaaaatgaacgaaaaaaaatctaggaayacttgtgtttagtaaaccagttttagatttcactcttgtacatttcacccattatctaggaccaattaaacatttggcactgaggaataattcagagcaacaactcctaggggagaactagattgtctggttggtgatcaaaaagaattaaagcatctctgaaggcaattagtccccaacactgtgaccaaggccctggaggtggggcatgttctttctgccttccacacaccgcttcaggctgaacaaggtgttattttttaaccgctttgtgaattacacttctttaaattcctgtgataattattccctatttcacaagggtgcctttctgtaacatcttgaatatgttacacaaatagtctttcttgaggcaccctctggtgataatac

SEQ ID NO: 650618 - DNA, 539 bp, Homo sapiens
tcactagaaataattatatcaaaacatcatgttgtactccttaatgtaggttaagaaaactaaaatgaacgaaaaaaaatctaggaacacttgtgtttagtaaaccagttttagatttcactcttgtacatttcacccattatctaggaccaattaaacatttggcactgaggaataattcagagcaacaactcctaggggagaactagattgtctggttggtgatcaaaaagaattaaagcatctctgaagrcaattagtccccaacactgtgaccaaggccctggaggtggggcatgttctttctgccttccacacaccgcttcaggctgaacaaggtgttattttttaaccgctttgtgaattacacttctttaaattcctgtgataattattccctatttcacaagggtgcctttctgtaacatcttgaatatgttacacaaatagtctttcttgaggcaccctctggtgataatactaaagatcacaatcaaaaacaattgtgcccagagtagaagtaccactttgcatttagg

SEQ ID NO: 650619 - DNA, 539 bp, Homo sapiens
tcactagaaataattatatcaaaacatcatgttgtactccttaatgtaggttaagaaaactaaaatgaacgaaaaaaaatctaggaacacttgtgtttagtaaaccagttttagatttcactcttgtacatttcacccattatctaggaccaattaaacatttggcactgaggaataattcagagcaacaactcctaggggagaactagattgtctggttggtgatcaaaaagaattaaagcatctctgaaggcaattagtccccaacactgtgaccaaggccctggaggtggggcatgttytttctgccttccacacaccgcttcaggctgaacaaggtgttattttttaaccgctttgtgaattacacttctttaaattcctgtgataattattccctatttcacaagggtgcctttctgtaacatcttgaatatgttacacaaatagtctttcttgaggcaccctctggtgataatactaaagatcacaatcaaaaacaattgtgcccagagtagaagtaccactttgcatttagg

SEQ ID NO: 650620 - DNA, 437 bp, Homo sapiens
cttcagcgtggaactctcttgtggttcttgaagatgctatttcttttctttttttttttttttttgagacagcatcttcctctgtcaccaggctcgagtgcagtggcacaatctcaactcacagcaacttctgcctcccgggttcaagcatttcttttgcctcagcctctgaagtagctgggactacaggcacatgtcaccatgcccggctaagctttgtattttctgtagatacggggtttcagcatgttggacaggctggtcttgaacttctgaccttgtgatccactggccttggactcctaaagtgctgggattacaggtgtgagccaccgtgcctggcctcttttttcagtctttaataaactgctgccatcatttcagaccrcttgctattttaggcacttagaaatttttcactggaattcatgtaaaga

SEQ ID NO: 650621 - DNA, 616 bp, Homo sapiens
cactgcaatggcacagacacggcagatagtcaataaaatgatctttaacttctgatctaggttatttttgttgttgttcatgtattaacctagtgaaactcagccaatagatggrgtggcattgacctgcacaacttccaaaatcccatccaaccttagtgtcctctgaagttctccataacttattgtctgttccaaccaacatttagcataagctacagcttatattgttaataattcttctatgtttatgtgctgatttgcaaataaatgggcctatatagtctttatctagtgttggattgggatcaaaagcttcatgaaatcattgtttttagtatacgtacagatggataattgtataaataagtacagatgtgtataaatgagtgagtatacatacatatattttctagctcctctaacaaaagggcctagaaacaacatcatcccagtaacaatgagaacaccattctccaattaaaggaaccaaggctccttggggacatatttgatatcaggattgggcagggaaaatacaagattagtttgaaatattttgtcatgttaggaagtaaggaaatgctcacaaaatggggaaaatgtgaaagggaaa

SEQ ID NO: 650622 - DNA, 616 bp, Homo sapiens
cactgcaatggcacagacacggcagatagtcaataaaatgatctttaacttctgatctaggttatttttgttgttgttcatgtattaacctagtgaaactcagccaatagatggggtggcattgacctgcacaacttccaaaatcccatccaaccttagtgtcctctgaagttctccataacttattgtctgttccaaccaacatttagcataagctacagcttatattgttaataattcttctatgtttatgtgctgatttgcaaataaatgggcctatatagtctttatctagtgttggattgggatcaaaagyttcatgaaatcattgtttttagtatacgtacagatggataattgtataaataagtacagatgtgtataaatgagtgagtatacatacatatattttctagctcctctaacaaaagggcctagaaacaacatcatcccagtaacaatgagaacaccattctccaattaaaggaaccaaggctccttggggacatatttgatatcaggattgggcagggaaaatacaagattagtttgaaatattttgtcatgttaggaagtaaggaaatgctcacaaaatggggaaaatgtgaaagggaaa

SEQ ID NO: 650623 - DNA, 576 bp, Homo sapiens
ggcatcaacaaacccatataggagagaaatctgatatagctgaygcaggctatgtattccctcaaaatcactttttttcccttgaacacacaacctacacctctccaggtactactatagatttctccatgctcagtctaggagaatatggacacaaatggtgaccattacctcctgacctaccaacaagaaagttataaccatgctgtaacagaagtgctatcatgcaggctttcttgttcccatttttacagcacacttcacactttaatgtcacagatatggctgttttcctagaagctcatgtaccaacctctgccagcttcaaacatttcttctgcaactttctcacctctcttctcctccatagaattgaagagagttagggcctttctcaggattaggctttgtctcaagggaattttggggctggtttgatcttctatgcagaccactcagactttctctgtgtcagtaaaaaatctgttttttttttaaatcattcatgtgttcactggagtagcacctataacttccttcaagaactttttgtttccattcacaacttgggtagct

SEQ ID NO: 650624 - DNA, 584 bp, Homo sapiens
tcttgtgttcactctaatgcaagttttacgtttctttctgttttcacactttcactgtgcttacttatagcagcagtcagtctagactgatgattcaatttcagcttccagtcttttgttgctttcttcttccttcaacagttcggaattgagccttgtattctcagctttgagatcattaagctcttgttgataccggaatgctgtttttgttatcaattcctcattgagttttatatacttttcaagggcagcatttgtttttttaacaattttagcgtccttaagatatttattttctttttccaggtkgtcatttttcattgtgcatatttcctgtcggagtatagcaatatctgtcttcaaaatgcaattttcatccatcagatctttcatttcttcctgattatgaaaatcctaaataaaacaaaagaaagttttagctagtactcaataaaatatcatgattacctctgaagttaaagaataacctgcacatccatatactaaaaaggttactgtaagtggatatccaactggagaaaaagttgaagcaaaactttgtactttatagagcataagtt

SEQ ID NO: 650625 - DNA, 584 bp, Homo sapiens
tcttgtgttcactctaatgcaagttttacgtttctttctgttttcacactttcactgtgcttacttatagcagcagtcagtctagactgatgattcaatttcagcttccagtcttttgttgctttcttcttccttcaacagttcggaattgagccttgtattctcagctttgagatcattaagctcttgttgataccggaatgctgtttttgttatcaattcctcattgagttttatatacttttcaagggcagcatttgtttttttaacaattttagcgtccttaagatatttattttctttttccaggttgtcatttttcattgtgcatatttcctgtcggagtatagcaatatctgtcttcaaaatgcaattttcatccatcagatctttcatttcttcctgattatgaaaatcctaaataaaacaaaagaaagttttagctagtactcaataaaatatcatgattacctctgaagttaaagaataacctgcacatccayatactaaaaaggttactgtaagtggatatccaactggagaaaaagttgaagcaaaactttgtactttatagagcataagtt

SEQ ID NO: 650626 - DNA, 593 bp, Homo sapiens
tcttcaaacgaatgcatatacttgaaaagtagtaaggaaagaatattctactaaagtttttattactagtcactctagtatgtattatacaaaaagatactggaaataattcagtatagttagaagttcaaaactaccttttcaaatcacacagtcataattactacctgattagaaaaggtcatttacaatcaactaaatttttaaagttactayttattgacaagcgtataagttcactagaaataagttttcatctctatgaaatattgcaggtgtctctccaaatgatttacagagtaagatgtctctcacacaaactgtatctgcagattattgtcatctaaaactaggctaaagagtctaacatctgtcaccccacacttttcctaattctttcttaatacttccaattcaccttcttattacatatatttgatatatttatgaagctattgttcattatgtgtaatatataattaatgcccttaataagtgtgtgtatgtttacacaagtcatgttttcctgtgaaatctagtcccagaagtggagttgttgagttaaagggatgtcaggttatttgaaattttga

SEQ ID NO: 650627 - DNA, 330 bp, Homo sapiens
cacaccattgcactccagcttgggtaacaagagagaaactccatctcaaaaaaaaaaaaaaaaaaacctgctataggcttacttacctatcrtgctcttccttcagtttcttgggaaattgctgaggatacgttttcccaatctttctttctttggttaatctgtcagcagcagcagaagatgtactatgacatacattttctgatagttgtattttttcacttttgtttgtattatttccttctttgacctttaataaaagtaatatgaataataattattattttattcaataaaaaaaactttttccctgattttttaacttgattc

SEQ ID NO: 650628 - DNA, 330 bp, Homo sapiens
cacaccattgcactccagcttgggtaacaagagagaaactccatctcaaaaaaaaaaaaaaaaaaacctgctataggcttacttacctatcatgctcttccttcagtttcttgggaaattgctgaggatacrttttcccaatctttctttctttggttaatctgtcagcagcagcagaagatgtactatgacatacattttctgatagttgtattttttcacttttgtttgtattatttccttctttgacctttaataaaagtaatatgaataataattattattttattcaataaaaaaaactttttccctgattttttaacttgattc

SEQ ID NO: 650629 - DNA, 330 bp, Homo sapiens
cacaccattgcactccagcttgggtaacaagagagaaactccatctcaaaaaaaaaaaaaaaaaaacctgctataggcttacttacctatcatgctcttccttcagtttcttgggaaattgctgaggatacgttttcccaatctttctttstttggttaatctgtcagcagcagcagaagatgtactatgacatacattttctgatagttgtattttttcacttttgtttgtattatttccttctttgacctttaataaaagtaatatgaataataattattattttattcaataaaaaaaactttttccctgattttttaacttgattc

SEQ ID NO: 650630 - DNA, 330 bp, Homo sapiens
cacaccattgcactccagcttgggtaacaagagagaaactccatctcaaaaaaaaaaaaaaaaaaacctgctataggcttacttacctatcatgctcttccttcagtttcttgggaaattgctgaggatacgttttcccaatctttctttctttggttaatctgtcagcagcagcagaagatgtactatgacatacattttctgatagttgtattttttcacttttrtttgtattatttccttctttgacctttaataaaagtaatatgaataataattattattttattcaataaaaaaaactttttccctgattttttaacttgattc

SEQ ID NO: 650631 - DNA, 412 bp, Homo sapiens
aacacagtgtacagaactcaactttctactaaagagtcaaaggttaaatttttaactaagaaattatgcttcttacatgataaaaatcatacatgccaaaacttaccatactttattaaacaacataatgtaaggtctgattcaacagaaatattggagtggtgattttttwaaatatgtggaagtatatatttgttttcaaaatattagaaataaccatgatggaactataaattcaaacagtttgagctaagcagataaacttgcatgcatgaaaacacattaaacagactcatttggctgggaatattcattgcaactctcaaggctagaagtgtttttgtggctcatctcagtcattgcttccctcccattgtattcccattctatcattaaataaatgtaattcatc

SEQ ID NO: 650632 - DNA, 419 bp, Homo sapiens
agtgtacagaactcaactttctactaaagagtcaaaggttaaatttttaactaagaaattatgcttcttacatgataaaaatcatacatgccaaaacttaccatactttattaaacaacataatgtaaggtctgattcaacagaaatattggagtggtgattttttaaaatatgtggaagtatatatttgttttcaaaatattagaaataaccatgatggaactataaattcaaacagtttgagctaagcagataaacttgcatgcatgaaaacacattaaacagactcatttggctgggaatattcattgcaactctcaaggctagaagtgtttttgtggctcatctcagtcattgcttccctcccrttgtattcccattctatcattaaataaatgtaattcatctctaaatgacta

SEQ ID NO: 650633 - DNA, 535 bp, Homo sapiens
gggtaaaccacaaatcaaaaagactttctggatctatagactgagactaatgcctaatgtctaatttccaattagtggtatttgggtttatatatttttccatttgcatgtcaaactcttaatcatctttcatttcaatcataattactgggttccttactttctcagtttctatatcataacaaaaattttcatcatctgtgttagaaacaagctgtgtgtctggtttgttatcatttttatagtctgatttattttaawttaaatgaagcttagaagatgactggtaagtgtatttcagggacctggagtgtgaatggaataaaaagacatttgacatgggcttcctctgttcaggcgctgcctggactgccacagagctagaccctccagatacatttttctcctcacaatcagggacatgattcatcagactagagggcactccttttttgttcatccctctttagagttaccatgtaggagctcttcctcaggccaagcagtaattttggagttttcagaacttttacca

SEQ ID NO: 650634 - DNA, 551 bp, Homo sapiens
attagggataattcactctaaatactatgaggagcataaaattctgaggcatataaatcaatgaacaaagataaaatataaggcaatgttgcaaagatgatgcaggcctgaggagatgttttcagaaatatttaggatataggtatcagtggccattataagaatgaatttctattgaataaataaatgtatatatctgggtccctggagaaatacactctgctcattactttacaaattttatcaatcaaatgagaagtaaaataatatacataaactctttcagttacttgtatttactttaccctttttctgtttcagttttactgtgccaaggaaatgcatttgggttttgtggtggttgttgtggttgtggttgtggttgtttttgttttttgagatggaatttcactcttcctgcccagtctgaagtgcaatggtgtgatctcagctcatggcaacctctgcctcctgggttcaagcgattctcctgcctcagcctcccwagtagctggaattacaggcatgtgccaccatgaacagctattttg

SEQ ID NO: 650635 - DNA, 461 bp, Homo sapiens
cccagcaaatgtccttctttcctccttttgtgtccwttcaccatccctcttcctttgaaaaaatgattatcagaactgtcatcctgatgcttcccttcctaactgctttttatggatgattgtgaccacttttttcatctgtattcagcagtagtatacacctgtaatctctcttttttcatctcattttccttcccctgtggctagaatcatgctcagaaataaaaggaaattaaagctttccctggattctgttattttttaaattgctctccagtggttctttttccagatttctctaaaggaaagctattcccttgctattcagagctgtgtccaaggaccagcacaaacatcacctgagtgctcatgagaaatgcagactccaatacctgctgagtcagaatgtgcactttccagaagctcctcaacgaattcatgacaatttgaatgccctgttc

SEQ ID NO: 650636 - DNA, 444 bp, Homo sapiens
tgcttcctggctcctcaaggctccctaatagtttagagattatgaagaagcagaaagcagatgggatctgggcttatgaccttagcaggggaaggagccaagtctagagttcatcatgtgcccctccccgccccccaaccaagagtgatcaggtaaagcagggactaggagagaggagtgggtctggaagtgaagaccacacaggggtccacagagrccaggtgattccatcgttccctacctctgtctggagtaggggctgctggcacttaacaccctggctgtggggaaaataccaaacccatagcactttctggggacaggcagataggggaatgttgacatgtacacgttttacagagcttaaattgattacaatgcacaaaaataatgaattcttttttttttttttgagaccatctttctctatcactcaggctggag

SEQ ID NO: 650637 - DNA, 582 bp, Homo sapiens
tagtgcatatagtgctctctactggccttatctttattacaactacaatcagtgtcgagtttgtagttatatgggaaccatcatgaaaatcttctataytgcaactacaatcatcgtcaaatttgtagttatgtaggaaacatcatgataaacttctgtctccgaagactaatagtattttaattttaatttctttttgttttctcctttaggggtgtgtgtgtatatgtatgtgcattcaaaaacattcattcttgaacttctatactgaagtcagttgtgaattctgcaaataagttgctggcatacatcatcacaaataatcatgtaataaagagaaaatacaaaaaagatggatgtagaacaataaccgaactgaaaacattatgccttacataagtcagtagcagctacaatgcttgcttttattgtctttggagaaaacaagtgaaggcctcccaggagcagaatgggtgggtgtgtatatttaggaaatcatggtggacagtgaccaccatcataagctcctttctttctttcctccaacactccttacttcctgcaccatcttctaaagactcc

SEQ ID NO: 650638 - DNA, 642 bp, Homo sapiens
gcaagtttctcaatttaataggcaagaattatagaaaagtacataagaagataaaaaagcatattaaagttcttacaggaaatttttcaaagtataaatgcttgaatgcttcctgattcttccagagtcctgaaaaagccccaggtggcaatggtaaccttatataaaaacagagaagttaaaattatgatgaaagtggtaataaagacaggttgattagaactattatttttctactgtgacagataattacaattcaaatcctacattgaawtataacccctaaatctgctggacagatcatgtctaacagaggtttatgtagctgaccattgtacagcagaattgttgaagaatgactttagtctctggaaagtgcacaaaaggcacaagtatgtggaaatcaaataactattagcaataagcattgcttcagtgaaaaacataatatctgcaaaaaaagaaccaaaaaacgtgtcattgaattactttcttagaaaactattatttcaccattgaaaagttaatttattttttgaagtactaagatattgtcatctttgcctgtctctctgtgtaatagaatattctaattaagcacccagtgtaaaaacttatttcataatcaatatgcctccctcc

SEQ ID NO: 650639 - DNA, 569 bp, Homo sapiens
tttgagtctcgtcatttcttgactgcacaccctttgtttgctcctgtcttcagttcaggcatagcaagtgcagacttccctctgcacatttagatacggacttgcaaattattcacagacctgagtgctcaccacatgttgggcctcctaaaatatcactttctagtcacagtaacttattgatatcaataataggagaacctgaggcctatggaagatactaacagcattctttattgaagagtgtttcttgaaaatgcacaatgattcagaagttgtactgtctcaaaataactgtttcttgcaattagtacttttcttgtttgtgttttgacmcaagtgataacacctccatgcctgacacttcctctaaaaggaagtacagctgatgccctctaaaatctattctgaatcttaaacctgaaatgtatgccccgaaatttagtgatgtacgggtgatcctttgggaaaagatggtcaaatatttgattgactgaaattatttttaaaaacacactaaaattattcttcaggccaacagggaaagagagtaattttcatagttaaat

SEQ ID NO: 650640 - DNA, 535 bp, Homo sapiens
ttttattaagtatttatatttgataagaaaattctatctcagtttaaatcagatttgtcttctctgtctttgaaatctcttagagaattgtgaactgatactttatactgactttttactagctcctagcaatattgcttagcaaattgattatttccttctgaaatgtttgatgatgtatccagctcttattaaagtgcccaaaccttactatttaactacttgacaagggttgccagtggtgaataccatattccactttaactttttggaataggaattgaggtcttaatccaatgaaagttttatttgtagaaaaaaatagactgaatattgtttttaagtacagtaaaaatatctacacttttccagtttccctaagtaaacattttatgagtaattattagaaagacaaaaaagtgtgtaagttattgttagaaagtcattcatgcttgcaaggatgtagagaaaagggaactcmtacacggttagtaggaatgtaaattagtacagccgttatggaaaatagcatgga

SEQ ID NO: 650641 - DNA, 584 bp, Homo sapiens
agcatctccagaagtgataagcaacccaaatcttatgatacaagtgattcatcctaagagccagagtcaagataaatgctaagaaagctgatctgtgttgccacttctcacatacatccgcagactaacattcgaggttgaaaatcaacataaatgttcttactcaccttcttctattcaacaaggcagatatttcaattgcctataattccccactatggaactcattacaactagtgccattttgaataaaggaaaagttaatctgtaaawttttttatttttgatacagggaaagtatggtaatttgtaatgttttatagggtttcgtgccttgtatacttaaagaggaaaaatcacaaaaagccctatctattgtatgcttagtgtctagaagaacttttgtcaaatctccaagtcagtataaaaataattttttttaccttaacaactgatagtctaagaccaagtccaaagctgtgggaaaggacacagaggcagatcatttctcctagtccaagccatgtgtaaataaaggaggcaatcacatttggggaatcaatcagggtgcaacttgatctgca

SEQ ID NO: 650642 - DNA, 498 bp, Homo sapiens
gaattcaatatatgttgaacaatattctaatttcycttacggaaaaagtttttgtaagaaatctgtaaaatgagtacttacaataaaccatcctacagtagaggttgttggcatacagtgtttaaatttctatgattaggtcctactaaggaaaagaaaattttaaaataaaataattagattttcctatttaataagataatttttgcctataaagtttttcagtctaatttttttgtagaattaggttttagccttcataaaacttgacattatgaagcagaaaacaggtgtcatctgtctctgttgttcctggaatttctaacccaaatgccaattcctccacaactcccctcacacacttctgaattgaagcacaacagatttattaaaaatggcataacagtggtctccagaaatgtgcagagattttcccagatccctaaaaggaatgacaaactattcagatcatttaggttctcacaagattctgggagg

SEQ ID NO: 650643 - DNA, 498 bp, Homo sapiens
gaattcaatatatgttgaacaatattctaatttcccttacggaaaaagtttttgtaagaaatctgtaaaatgagtacttacaataaaccatcctacagtagaggttgttggcatacagtgtttaaatttctatgattaggtcctactaaggaaaagaaaattttaaaataaaataattagattttcctatttaataagataatttttgcctataaagtttttcagtctaatttttttgtagaattaggttttagccttcataaaacttgacattatgaagcagaaaacaggtgtcatctgtctctgttgttcctggaatttctaacccaaatgccaattcctccacaactcccctcacacacttctgaattgaagcacaacagatttattaaaaatggcataacagtggtctccagaaatgtgcagagattttcccagatccctaaaagsaatgacaaactattcagatcatttaggttctcacaagattctgggagg

SEQ ID NO: 650644 - DNA, 565 bp, Homo sapiens
cacatccctaggtattctgccagggatatgttcttgttccctcctgaaagcatgacacatgcagcagagtcacctcacctgggttctgggtccagcgatatgtcacaattttccctgtgagcaaggcacaggcaggagaaacacatcacctgtttgctgggcccagaaatatgctacagtttttcttgtgagcagggytcaggcagaaatgggggaatcacattttctaggtgataaatgcagagctatgtcacaaggtccccagtagtcagggtcttggcagaagattcctattgtctaggcgattggcccagtgatacaacacaatagctaaattatgcagggcccaaggcaaagaggagagttgcatcacctaagtgatgaacaaaaagatatgtcataatacccaggtggaaatgggccatgcaggtaagtcacattacctaggtgttggacccagtgatatgtcacaatacacaatatatgcagggcccagccaagaggggagagtcaaatcacccaggtgctgggcccgatgatacattgtaatctgtctttggtcaga

SEQ ID NO: 650645 - DNA, 565 bp, Homo sapiens
cacatccctaggtattctgccagggatatgttcttgttccctcctgaaagcatgacacatgcagcagagtcacctcacctgggttctgggtccagcgatatgtcacaattttccctgtgagcaaggcacaggcaggagaaacacatcacctgtttgctgggcccagaaatatgctacagtttttcttgtgagcagggttcaggcagaaatgggggaatcacattttctaggtgataaatgcagagctatgtcacaaggtccccagtagtcagggycttggcagaagattcctattgtctaggcgattggcccagtgatacaacacaatagctaaattatgcagggcccaaggcaaagaggagagttgcatcacctaagtgatgaacaaaaagatatgtcataatacccaggtggaaatgggccatgcaggtaagtcacattacctaggtgttggacccagtgatatgtcacaatacacaatatatgcagggcccagccaagaggggagagtcaaatcacccaggtgctgggcccgatgatacattgtaatctgtctttggtcaga

SEQ ID NO: 650646 - DNA, 274 bp, Homo sapiens
aaaacggttctccaactcacrcatgcagtaaaaacaaatttcacatggatacaatgagtaattatttaaaatttaaaataccctgaaaacattaacgtttatctcattactatgtaatatggaaattacaagacaaaaaaacccaaagacttatttttaaaatagaaatggcgctttttatatgatgaaatggtccataatttaaatgtaaaaagtgaataggaaatatatgaaataaaataaaattatttgtaaaggtgacaatgcctgtatt

SEQ ID NO: 650647 - DNA, 274 bp, Homo sapiens
aaaacggttctccaactcacgcatgcagtaaaaacaaatttcacrtggatacaatgagtaattatttaaaatttaaaataccctgaaaacattaacgtttatctcattactatgtaatatggaaattacaagacaaaaaaacccaaagacttatttttaaaatagaaatggcgctttttatatgatgaaatggtccataatttaaatgtaaaaagtgaataggaaatatatgaaataaaataaaattatttgtaaaggtgacaatgcctgtatt

SEQ ID NO: 650648 - DNA, 274 bp, Homo sapiens
aaaacggttctccaactcacgcatgcagtaaaaacaaatttcacatggatayaatgagtaattatttaaaatttaaaataccctgaaaacattaacgtttatctcattactatgtaatatggaaattacaagacaaaaaaacccaaagacttatttttaaaatagaaatggcgctttttatatgatgaaatggtccataatttaaatgtaaaaagtgaataggaaatatatgaaataaaataaaattatttgtaaaggtgacaatgcctgtatt

SEQ ID NO: 650649 - DNA, 419 bp, Homo sapiens
agcctcctagcatacatactggggatgatgctaacatctacttcctagggattgtattagatgtatataagataaaacataaaaatcatgtggtggtacctgtagataatgcacacacttagagatggaagcattaggagaataygtaggaggtagcatgggccacaactcaaacagtcctgggtctggcagggtgatcttggaaatgtcacttctccactgggcttcattttcattctgctccagtatgaagttgaaattaaatgtagatactgtcctctggcattcatatagtttagctgtgtgttccacccaaacttctctgtgtattataaccgccaggtgttaagggagaaacctgaggggagatgattggattatggggacgggttctcctcatgctgttcttgtgatagtga

SEQ ID NO: 650650 - DNA, 419 bp, Homo sapiens
agcctcctagcatacatactggggatgatgctaacatctacttcctagggattgtattagatgtatataagataaaacataaaaatcatgtggtggtacctgtagataatgcacacacttagagatggaagcattaggagaatacgtagraggtagcatgggccacaactcaaacagtcctgggtctggcagggtgatcttggaaatgtcacttctccactgggcttcattttcattctgctccagtatgaagttgaaattaaatgtagatactgtcctctggcattcatatagtttagctgtgtgttccacccaaacttctctgtgtattataaccgccaggtgttaagggagaaacctgaggggagatgattggattatggggacgggttctcctcatgctgttcttgtgatagtga

SEQ ID NO: 650651 - DNA, 419 bp, Homo sapiens
agcctcctagcatacatactggggatgatgctaacatctacttcctagggattgtattagatgtatataagataaaacataaaaatcatgtggtggtacctgtagataatgcacacacttagagatggaagcattaggagaatacgtaggaggtagcatgggccacaactcaaacagtcctgggtctggcagggtgatcttggaaatgtcacttctccactgsgcttcattttcattctgctccagtatgaagttgaaattaaatgtagatactgtcctctggcattcatatagtttagctgtgtgttccacccaaacttctctgtgtattataaccgccaggtgttaagggagaaacctgaggggagatgattggattatggggacgggttctcctcatgctgttcttgtgatagtga

SEQ ID NO: 650652 - DNA, 419 bp, Homo sapiens
agcctcctagcatacatactggggatgatgctaacatctacttcctagggattgtattagatgtatataagataaaacataaaaatcatgtggtggtacctgtagataatgcacacacttagagatggaagcattaggagaatacgtaggaggtagcatgggccacaactcaaacagtcctgggtctggcagggtgatcttggaaatgtcacttctccactgggcttcattttcattctgctccagtatgaagttgaaattaaatgtagatactgtcctctggcattcatatagtttagctgtgtgttccacccaaacttctctgtgtattataaccsccaggtgttaagggagaaacctgaggggagatgattggattatggggacgggttctcctcatgctgttcttgtgatagtga

SEQ ID NO: 650653 - DNA, 602 bp, Homo sapiens
gataaaggaaatgtggtaccatacaccatggaacactatgaagccataaaatgtaatgagatgatgtcccttgcaggcatgcgcttggaatttgaagccattactcccagcaaactaatgcaggaacagaaaaccaaacaccgcctattattattctaacttattagcagaagcagatcaatgagaacacatggacacatcaggaagaacaacacacactggacacctgtttcatggcatgggggaggggaaggagagcatcaggaagaatagctgcggatgctgggcttggtacctgggtgatgagatgatctgtgcagtaaaccacagtggtacgcatttatgtatgtaagagacckgcatactctgcacatggacccctaaacttaaaataaaagttgaaaaataaactttatcacatatggacccctgaacttaaaataaaacttgaaaaaaaaatgtgtttctggtggattctctatgttagacccaaactgaggatcttgaagctctcgctgggggaatcggggatgggggcacactggggagccgctgccaaggccaaccaccctccctacaagccacctcccttcccggccagt

SEQ ID NO: 650654 - DNA, 602 bp, Homo sapiens
gataaaggaaatgtggtaccatacaccatggaacactatgaagccataaaatgtaatgagatgatgtcccttgcaggcatgcgcttggaatttgaagccattactcccagcaaactaatgcaggaacagaaaaccaaacaccgcctattattattctaacttattagcagaagcagatcaatgagaacacatggacacatcaggaagaacaacacacactggacacctgtttcatggcatgggggaggggaaggagagcatcaggaagaatagctgcggatgctgggcttggtacctgggtgatgagatgatctgtgcagtaaaccacagtggtacgcatttatgtatgtaagagacctgcatactctgcacatggacccctaaacttaaaataaaagttgaaaaataaactttatcacatatggacccctgaacttaaaataaaacttgaaaaaaaaatgtgtttctggtggattctctatgttagacccaaactgaggatcttgaagctctcgctgggggaatcggggatgggggcacactggggagccrctgccaaggccaaccaccctccctacaagccacctcccttcccggccagt

SEQ ID NO: 650655 - DNA, 612 bp, Homo sapiens
ccagaattcaaacaagccaataaatttctgggcctcctttttagtggtaggggttgcaaattctagtattttaaccatagcctttggtaaaatggactttttccttgctttccatgggatgcaaagcaattttatagtttgtgcaggttcttgaaatttgtaaaggctaatttcccattcttcagataggaactgggtttttacccactycaaaccccagctgactcgttcttcagttttaccctgaccacaccacttgcacagctgtttttttcatcaataatctgttagctttgagcctgatcagtcaaggcataggcctgaaattgagccagggccagtctggaagtcagagtagtgttttctttttccagcttacatttatcttgtagcaattgatttctatctcaacacattaacttataagcagtaagcaaacaccatctatgctaagagatccccctggcatctcctttgctgactgaaatcccctgcagcacttcatgcacagtcaaaggttcaaattccactaatttagatacccaattttcactaaggtcagttccccccgaccattcaattgccaagagggagaactggaggagtttctat

SEQ ID NO: 650656 - DNA, 612 bp, Homo sapiens
ccagaattcaaacaagccaataaatttctgggcctcctttttagtggtaggggttgcaaattctagtattttaaccatagcctttggtaaaatggactttttccttgctttccatgggatgcaaagcaattttatagtttgtgcaggttcttgaaatttgtaaaggctaatttcccattcttcagataggaactgggtttttacccacttcaarccccagctgactcgttcttcagttttaccctgaccacaccacttgcacagctgtttttttcatcaataatctgttagctttgagcctgatcagtcaaggcataggcctgaaattgagccagggccagtctggaagtcagagtagtgttttctttttccagcttacatttatcttgtagcaattgatttctatctcaacacattaacttataagcagtaagcaaacaccatctatgctaagagatccccctggcatctcctttgctgactgaaatcccctgcagcacttcatgcacagtcaaaggttcaaattccactaatttagatacccaattttcactaaggtcagttccccccgaccattcaattgccaagagggagaactggaggagtttctat

SEQ ID NO: 650657 - DNA, 553 bp, Homo sapiens
taataaaaaaaaaagaaagaaaaaagcgggaaaatccaacctaataaatgcytaaagtagaacagaaaaaaggtctgaaatcaatagtctcaacttaaacacacacacacacacacacacacacacacacacacacacacacacacagaaaaagaaagtcaaattcaacccaacataagcagaaaataggaacaggaaatagtaaagtttagagcaggagtcaatgaaatacaaaacaggaaaacagatgggaaaattaatgaaacccaaagctggctctttgagaacatcaataatattgataaatctctagtcagactgattaggagataagttataaattaacaacatccagaatgagagaggtgaggtgacatcactacagatattatagatattgaaagggtaacaaggaaatgttttgaacaactttatgccaataaatgtgacatatagatgaaactggaaaattctttaaggccacaaacaatcaaagattttctaagaagaaataaattgccttattaatatacatcattaaaggaactgaatt

SEQ ID NO: 650658 - DNA, 523 bp, Homo sapiens
tgagacaacttccatggcaaacttaatggtaatattttctaattgagttacccctactcttcttcttccaagacattttctccccaacataatcctcgcagtctttatttaatcagagtctgtgtctaatacattacagatgctcaaagaaacatttcatataagagtgaaataattaatggtgtgggaaacagatcaaaaagctcagccagacccaggttagatgggactcatraagacttccttgacagtcaggtgaatgagaaagccagcagccaggaaaccgggctgtccctctgacatgaacatcttggaaattccagataagcattactgagatgctgaagaggaatagttagctggccagggcagagggaacagcaaaaagcagagtttacagggcctggagagcaactgagttacctgatttacgttggttggtgctagactcccttggagcgggcagaagaggctaccagtcaccttcctcatggtgggcagtcttctgtttccaatgggaaat

SEQ ID NO: 650659 - DNA, 523 bp, Homo sapiens
tgagacaacttccatggcaaacttaatggtaatattttctaattgagttacccctactcttcttcttccaagacattttctccccaacataatcctcgcagtctttatttaatcagagtctgtgtctaatacattacagatgctcaaagaaacatttcatataagagtgaaataattaatggtgtgggaaacagatcaaaaagctcagccagacccaggttagatgggactcatgaagacttccttgacagtcaggtgaatgagaaagccagcagccaggaaaccgggctgtccctctgacatgaacatcttggaaattccarataagcattactgagatgctgaagaggaatagttagctggccagggcagagggaacagcaaaaagcagagtttacagggcctggagagcaactgagttacctgatttacgttggttggtgctagactcccttggagcgggcagaagaggctaccagtcaccttcctcatggtgggcagtcttctgtttccaatgggaaat

SEQ ID NO: 650660 - DNA, 523 bp, Homo sapiens
tgagacaacttccatggcaaacttaatggtaatattttctaattgagttacccctactcttcttcttccaagacattttctccccaacataatcctcgcagtctttatttaatcagagtctgtgtctaatacattacagatgctcaaagaaacatttcatataagagtgaaataattaatggtgtgggaaacagatcaaaaagctcagccagacccaggttagatgggactcatgaagacttccttgacagtcaggtgaatgagaaagccagcagccaggaaaccgggctgtccctctgacatgaacatcttggaaattccagataagcattactgagatgctgaagaggaatagttagctggccagggcaragggaacagcaaaaagcagagtttacagggcctggagagcaactgagttacctgatttacgttggttggtgctagactcccttggagcgggcagaagaggctaccagtcaccttcctcatggtgggcagtcttctgtttccaatgggaaat

SEQ ID NO: 650661 - DNA, 523 bp, Homo sapiens
tgagacaacttccatggcaaacttaatggtaatattttctaattgagttacccctactcttcttcttccaagacattttctccccaacataatcctcgcagtctttatttaatcagagtctgtgtctaatacattacagatgctcaaagaaacatttcatataagagtgaaataattaatggtgtgggaaacagatcaaaaagctcagccagacccaggttagatgggactcatgaagacttccttgacagtcaggtgaatgagaaagccagcagccaggaaaccgggctgtccctctgacatgaacatcttggaaattccagataagcattactgagatgctgaagaggaatagttagctggccagggcagagggaacagcaaaaagcagagtttacagggcctggagagcaactgagttacctgatttacgttggttggtgctagactcccttggagygggcagaagaggctaccagtcaccttcctcatggtgggcagtcttctgtttccaatgggaaat

SEQ ID NO: 650662 - DNA, 566 bp, Homo sapiens
aattccttaggtagaccaagtagggtcttcatgtcaggaccctggcttagcctgcaatttcatctcatccctctctttgtcatgggtcctactcttcatcccaacracactccttagatattccctaaaaggcagagttgtttgtgcctccatgccaatatctatattgtgtcctcagctttgaatcacctttccttgagcctcttctctctcttactcattcttcaagatttattttaagcatctctagcattggaagccttttatgtgtccctcctctcccagtctgcacttcctacgaaagctctaagacattcacttcagctattatcattcctcctctttacattttcaatatcacacccaggcaccaataactacaagagtcacaacaaaagccacacagcaatgagctttttttcacatcatttactaagctcttctgacacatcgaacactgtgctatgtatagtgcatgttatcctctttcttttgcagtaactttaagagatcagtgtgtataagctttaggagtaaagttatctcagagaagttaagatacacat

SEQ ID NO: 650663 - DNA, 560 bp, Homo sapiens
caactgtagtagaaagagatctgaatggcttgccatttagctaggcacatggtatatgtgcttaattcatactagcagccactacagttgtcatgattaataatgagcttccaactgcacagaatgcttttaatccatagaaaatcaaatcagaaacaagtttttgtaaaattaatgtgaaaggagcaacaattaaaatgcaagattgacatttattttctaaattggttmtattttctttcacatttacaaaatttataagaaaattctttatttctatgtgatataaagaactagaatgtactttgatgtgaattattgttgccagtgctgttcaacttttatccataatttactaagcacctacatttagacaaaggcattatccatccctttggggaggatttcagatgattcatacacagacctggtctcgaggaatttaagattttctttggggagggaaataaggactttaaccaactcaagagtacttagagaattttctgaaaataattttatcaatgaaaacttgttatattaaaagaaactgtcattct

SEQ ID NO: 650664 - DNA, 560 bp, Homo sapiens
caactgtagtagaaagagatctgaatggcttgccatttagctaggcacatggtatatgtgcttaattcatactagcagccactacagttgtcatgattaataatgagcttccaactgcacagaatgcttttaatccatagaaaatcaaatcagaaacaagtttttgtaaaattaatgtgaaaggagcaacaattaaaatgcaagattgacatttattttctaaattggttctattttctttcacatttacaaaatttataagaaaattctttatttctatgtgatataaagaactagaatgtactttgatgtgaattattgttgccagtgctgttcaacttttatccataatttactaagcacctacatttagacaaaggcattatccatccctttggggaggatttcagatgattcatacacagacctggtctcgaggaatttaagattttcttkggggagggaaataaggactttaaccaactcaagagtacttagagaattttctgaaaataattttatcaatgaaaacttgttatattaaaagaaactgtcattct

SEQ ID NO: 650665 - DNA, 309 bp, Homo sapiens
atttcatcttgaatggtgtattttatttcaaaagaagctttgagcaaagataaaatgttaattctgagcattagaaggaacacatttgtttttttgtactgtggatctttttgtatttcctagaactcttaatctaaawcaaatattgcaaaatatatcactgtaaacaactggttggtcactagctttttaaatactttgtagcaacttggttgcttgtcagaggtcttctttgagtgaagtctttaatttatagttctttatgcttgatcagcataattgcaccaaactgttacttaatctgaaaaa

SEQ ID NO: 650666 - DNA, 309 bp, Homo sapiens
atttcatcttgaatggtgtattttatttcaaaagaagctttgagcaaagataaaatgttaattctgagcattagaaggaacacatttgtttttttgtactgtggatctttttgtatttcctagaactcttaatctaaatcaaatattgcaaaatatatcactgtaaacaactggttggtcactagctttttaaatactttgtagcaacttggttgcttgtcagaggtcttctttgagtgaagtctttaatttatagttctttatrcttgatcagcataattgcaccaaactgttacttaatctgaaaaa

SEQ ID NO: 650667 - DNA, 602 bp, Homo sapiens
  misc_feature 1: n = A,T,C or G
ntaaaataaagttaataaaaaaagttcttaaatcttggaacacttagcacttcataaacatttgctcaatactgartcaatgaatttccaattagattttaaaataactaattaactaaataaatagcatggcaaaaatattttcaaagtttttcatgctttgatctccctctctcttttcttttcactctaattgagcaaacttattcaaagacatatctatttacgagttatcctaatagtatattttaaatagaacaactgagtattcataacatttgaacaatatacatagatcttaatagttttcaaaatgtttcaataaccacagaaaattatacaattttgttgatttaattttaactcacatattcaataccttacagagattttgaggtaaagttttctgtatagttatttgcttgaatattgcatacaaatatgcatgcatgaatctatgttacatggtttaaaaatgtgtagaagctgattgccaacatttgaaatatttgcttcctagagttgtgtattataattgccaaacttattctatcaatgaaataaaataccaatgaaataaaatatcaatgaaataaaaatac

SEQ ID NO: 650668 - DNA, 602 bp, Homo sapiens
  misc_feature 1: n = A,T,C or G
ntaaaataaagttaataaaaaaagttcttaaatcttggaacacttagcacttcataaacatttgctcaatactgagtcaatgaatttccaattagattttaaaataactaattaactaaataaatagcatggcaaaaatattttcaaagtttttcatgctttgatctccctctctcttttcttttcactctaattgagcaaacttattcaaagacatatctatttacgagttatcctaatagtatattttaaatagaacaactgagtattcataacatttgaacaatatacatagatcttaatagttttcaaaatgtttcaataaccacagaaaattatacaattttgttgatttaattttaactcacatattcaataccttacagagattttgaggtaaagttttctgtatagttatttgcttgaatattgcatacaaatatgcatgcatgaatctatgttayatggtttaaaaatgtgtagaagctgattgccaacatttgaaatatttgcttcctagagttgtgtattataattgccaaacttattctatcaatgaaataaaataccaatgaaataaaatatcaatgaaataaaaatac

SEQ ID NO: 650669 - DNA, 598 bp, Homo sapiens
gctgctctggccagactgccagatttctcctctctgggcagggcatctctgaaaaaaaggcagcagcctcagtcagggacttatagataaaactcccatctctctgggacagagyacctggcggagggggcggctatgggtgcagcttcagcagactttagtgtccctgcctgatggctctgaagagagcagcagacctcccagtacggcgttcgagctctgctaagggtcagactgcctcctcaagtcggtccctgacccccatgtatcctgactgggagacacctctcagtaggggctgacagacacctcatacaggagagctctggctggcatctggcaggtgcccctctgggacgaagcctccagaggaaagaccaggcagcaatctttgctgttctgcagcctctgctagtgatacccaggcaaacagggtcgggagtggacctccagcaaactccagcagggcggcagctgagcggcctgactgtcagaaggaaaactaacaaacagaaaggaatagcacatcccctcaaagaccccatccgaaggtcaccaacataaaagaccaaaggtagataactccacaaagatgggg

SEQ ID NO: 650670 - DNA, 565 bp, Homo sapiens
tgggggatagacctatagtacaggctgatagctctcccagcccttcctacctccttcctcattttctctaaccccatcttggcttctgcttctcagagaggactgctagcacaagtggtccaggagtggtccaagaaaaaagaggaggttatatagggatttaagatttgagctgrctcatccagccatccttgttggcagatgaagctcagatagtctctggtacaaggtggtggctcaaattcctaaagatttcaccagtggtaccataggaaatgttgcagctggggggaatgccgtaggatttttaaaatatggaaagatcaatacctataaagacaacagagttggctaattattgctaaattatatagaggccctttataaatttataaattataaagaatgataaagactgagggccattaaccaatagtggctgtgtgagagcccagggcctctttgggagctgttggtgaggcccttgtctctggcagtggatgaacagacacagcttaatggaaggccaaatgtctaactctgagtcacggagctccagacacag

SEQ ID NO: 650671 - DNA, 565 bp, Homo sapiens
tgggggatagacctatagtacaggctgatagctctcccagcccttcctacctccttcctcattttctctaaccccatcttggcttctgcttctcagagaggactgctagcacaagtggtccaggagtggtccaagaaaaaagaggaggttatatagggatttaagatttgagctggctcatccagccatccttgttggcagatgaagctcagatagtctctggtacaaggtggtggctcaaattcctaaagatttcaccagtggtaccataggaaatgttgcagctggggggaatgccgtaggatttttaaaatatggaaagatcaatacctataaagacaacagagttggstaattattgctaaattatatagaggccctttataaatttataaattataaagaatgataaagactgagggccattaaccaatagtggctgtgtgagagcccagggcctctttgggagctgttggtgaggcccttgtctctggcagtggatgaacagacacagcttaatggaaggccaaatgtctaactctgagtcacggagctccagacacag

SEQ ID NO: 650672 - DNA, 624 bp, Homo sapiens
caccctttacctgggccactgatccaaagaatgttgatggggatgacagttgccagatttagcaaataaaaatacaggattccagttaactttgaatttcagataaacaatattgtttgtataagtatattctatgaagattttgaattacacttttgaaaatgccgttgtttatctgcaattcaaagttgaacgggcatcttgcattttatctggcaaccttcatggtggctttcccctgcatgactcatggtaggaaagacaggaacaaagctgggcttgttaatatccaccagaatgaaagggctccagagaaatagaggcaaccagagtgctgcttagacatccaaactggaaaaggggaagtcttattgcccctctttgctgatattatgatcctttatctagcwaaacctaaagaccacaccaaaaaaaaaacctcttagatttgataaataaattcagtaaagttgcagcatacaaagtcaacatacaaaacacagtagtgtttctatacaccaataaggatctagccaagaaagaaatcaagaagacaatcccatttacaataactacaaaaatatattaaatgcctaggaataaatttaaccaaggaagtgaaag

SEQ ID NO: 650673 - DNA, 624 bp, Homo sapiens
caccctttacctgggccactgatccaaagaatgttgatggggatgacagttgccagatttagcaaataaaaatacaggattccagttaactttgaatttcagataaacaatattgtttgtataagtatattctatgaagattttgaattacacttttgaaaatgccgttgtttatctgcaattcaaagttgaacgggcatcttgcattttatctggcaaccttcatggtggctttcccctgcatgactcatggtaggaaagacaggaacaaagctgggcttgttaatatccaccagaatgaaagggctccagagaaatagaggcaaccagagtgctgcttagacatccaaactggaaaaggggaagtcttattgcccctctttgctgatattatgatcctttatctagctaaacctaaagaccacaccaaaaaaaaaacctcttagatttgataaataaattcagtaaagttgcagcatacaaagtcaacatacaaaacacagtagtgtttctatacaccaataaggatctagccaagaaagaaatcaagaagacaatcccatttacaataactacaaaaatatrttaaatgcctaggaataaatttaaccaaggaagtgaaag

SEQ ID NO: 650674 - DNA, 624 bp, Homo sapiens
caccctttacctgggccactgatccaaagaatgttgatggggatgacagttgccagatttagcaaataaaaatacaggattccagttaactttgaatttcagataaacaatattgtttgtataagtatattctatgaagattttgaattacacttttgaaaatgccgttgtttatctgcaattcaaagttgaacgggcatcttgcattttatctggcaaccttcatggtggctttcccctgcatgactcatggtaggaaagacaggaacaaagctgggcttgttaatatccaccagaatgaaagggctccagagaaatagaggcaaccagagtgctgcttagacatccaaactggaaaaggggaagtcttattgcccctctttgctgatattatgatcctttatctagctaaacctaaagaccacaccaaaaaaaaaacctcttagatttgataaataaattcagtaaagttgcagcatacaaagtcaacatacaaaacacagtagtgtttctatacaccaataaggatctagccaagaaagaaatcaagaagacaatcccatttacaataactacaaaaatatatwaaatgcctaggaataaatttaaccaaggaagtgaaag

SEQ ID NO: 650675 - DNA, 604 bp, Homo sapiens
tttgtttttgttaaagaagcaaggtcatgtggtcagttaacaatatgggcttgcagtgagactgataygttccaaatcttgccttagctcctcctaattgcttggccttggaggattttcctagcctctcaaagtgtcagttgcctcactcagaaaacagaggtaatgatgtataaggtcattgtgagaataaaatgagaacaccaagaacacaatacacattgagcaaatggtggttctcgttgttattattgtgtctttttccctagcttatagatacttcctgttcattccttttttaatatgaactgtaaacaagtttccccaaattctctaaattgtttcctaggattacccagtctataattttaaacaagcctgcatcactgtctgagtcttgagttttatttccctgcagccttcataatttttaaagagctttcataagcatcatttcatttgacctttgaactatgaaattacaaagggaaggcaggtattatacaggatgaatccatgatgtagaaaggtcttgaagaatctcctcaaagcttgttgacatctggttggttgctcatggaatcatcacagtgtcatatgtgtc

SEQ ID NO: 650676 - DNA, 559 bp, Homo sapiens
tgaaaaagtcctgcatatatatactgcaacccccattcaaagttttgcaataaaattcaagaacaaaaagaaaaacaatgaaacattaactagtctaagacgaaaacaatttggagtaaaaatatgaaatatgtcaagcattcagattttgagtgtgtagaagtgtgtgtgtgtgtgtgtgtatgtgtatgtatttatttcaaaacatcattacagaaaagtagacttttgtaatcataacaaaactggtttatgacttaaaattcattcaagtatgcaaaaataattttatccacaattgagaaattgtagaaatctgtatatcccttctcattcttgttcttcactgaattctctttaaacaataagagtttctcttaaaatagccatgatattttaacttttcaagcttcttgaaatctcaatgcartatcactaaagtatagcattttgccaagtttcatacacataggcacattatatcttgtctctgtggataataatgccttaaaagtcagtattttccctagacttaaatgctttcctgaaagaaggtaga

SEQ ID NO: 650677 - DNA, 592 bp, Homo sapiens
gtgatttaggtatgggtggccctatgcccaatcctgattctaccttttaccagccatgtggcttattccatctgaataactaagctttggttttttatattcaatttggcacctagtggatatccaaatactgataactattaatatgactttaaacataggcttcagtgcatagagcaatggtttgaagtcacatggttctcccacacttctttggggttggcctttaatgcatgaatgagctcacctgattggaaggggacacagtatcctgcataaaaacaggaatttcatctccaactccttctaactcaaactatcctgtgccataaaggwtagagatgtggtattggtgactcaaagataccatggcaacatggaggagtcctagggaggaaggcttagcctcagagcttagatgtggagacaggcctgagatccaacccttttactttgtccctgcaccagtgaaaacggtagcgagctgggtcaggagaagccagtgctggtaattgtgcagcctatgaagaaagtcagttttattctaagtattcatgctcttatcagattctaaagttgacagaattggcac

SEQ ID NO: 650678 - DNA, 568 bp, Homo sapiens
ctgaaggtggagagaaaggaggctttctatctttgtttcgtgccttcccatactgtttgaatttctgaccatgtgcatacattgtatgcaattatttttaatagcaaaggtggttacagtgagctaatgagccatttgtgtttatttcctttcagatactttttgtgtttgaaaaaaaattaggaatatcattttaacacagttttcaattaaaagatttatcttgtgtttttcaaaagaatatttaaaatgtttcatttgctactttcaaattgatggcgtggtattcactaccaatatcaatgggctgtattatttttggacactagagggaatttagaaatgagagaaaatacactgaagaaccaatatggctcccaaagctctctgactggatttccttactcccactgagaacctctttagaacaaaagcattacttaaaccgtggttgacttgtagatatattcctaagagcttgtatgtaattgaatcatatcrtaagttctggggagattgctgttgagaggaatcctagtgtggattgtctagaaaataatgaagcttt

SEQ ID NO: 650679 - DNA, 594 bp, Homo sapiens
aaaggtagtttctgtgaagtagaaaatctttagcatattgcataggtgaacaggtccaaataaacattaaggtgaggaacaaaacgtcattttagggggtatctgtagtctattattaaatatacagtgtacattttattttactccacataaaagtgcagttcaaaagaatatgctatttttcataaaatattttctttaagttcaaatatttaaggactgtactgaagaaactgagtaagttacaatggttactcaatcactttagccaccgggattcattagttatttatttgttgagatatcataatttttagattgcttctttatatcatattacttgctactacatttatcttcagctccacatttggcaactcttcgcttttatctgacacaatatttccaaagtagtttttacttcttcttcaaatactctatttaggagactttagacagaaattatatcaaatgttggcaccttagtgttttagcattacttattattgttttgtaattatttcattcatgttttaaaggcagagaatagatttttagggaaatgamgaatttatatgtagtaatccccaaaag

SEQ ID NO: 650680 - DNA, 656 bp, Homo sapiens
aaattacggattgtactacccattaatatttattttattaaataaatatttctagactggatgtggtagctcatgcctgtaatcccagcactttgggaggtgggaggagcgcttgagcccrggagttcaagaccagcctgggcaacatagtgagactccatctttatgaaaaattttttaaaaattagccaggtgtggtggcacacacctatggtcccaactactcgggagactgaggtaggaggactgcttcagctcaggccattgaggctacagtaagccatgatcgtagcactgcactccagcctgggcgacagagtgagaccctgtctcaatcaatcaatcagtcaatatttctgtgaataagcagaaaacatggaaactaaatctaaactcttgtgttttaaggcctgtgcctatttttaataccaaattcttagctatatgagagtagcttgcaaatgagatgaggttgaaggcaaagtttggcttgctctaaaaaagaaaaaaaaacactatttctgaaacacaggaagcacatttcattattgccagtaagttctgaagagggctgttaatgacctactattattaactaacatttacaacttaagacatatttctattcaaaatagtagaatcaatatttgaaaaga

SEQ ID NO: 650681 - DNA, 516 bp, Homo sapiens
  misc_feature 273: n = A,T,C or G
gaaaaaagtcaagtttagatattttaaaataagaattcatgcagatatacacacatctgatacttatgaagaatgactgagaggaaaagggacagtaacctaaaatagaactttgggtaatgcctagtattaatggaaatawaaagatgccacaaagaaattagcaaacaaaaacaaaaacaaaaacagtacctgaatagaatcacaccaaaaatcacaatgtctaggaagctacactagtaggtcactatgaaaagacgatttcacaagagnaaagtaccagaagccattaagagttgatatgaggccgggcatcgtggctcatgctataatctcagcactttgggaggctgaggcgggcggatcacctgaggtcaggagtttgagaccacgcctgggcaacatagtgtgaaccctgtctctactaaaaatacaaaaattgggcaggcatggtggcaggcacctgtaatcctggctacttggaaggctaaggcaggaaaatcacttgaacccagg

SEQ ID NO: 650682 - DNA, 623 bp, Homo sapiens
ttattatgaagacactttcagctctttccagattttccacccccttttcatatcaggagtacctcaaggtgctcagccaagcaagagggctctctactcccttagaagcacaaagcacaggcagttactctcagatttttctctaaccagacccttttttaagaaggcaagagtggatttgaagtgtagttgttttcccctcttttatatacagttttctgcagtctggcttcttcacctaacttgccaatctaacttggttccactaagtctgaaggagggaaggagtcctatttatatttatgycctctgctgctgaatcagtggcctgttaaaagtagttgctaaataaccatattcctcaattgactgtgagctatcacagagtacagtatatagctgtacttgactggtattcttcagtgtctggctcagggcttgacatgtagaaaatactcaaggcagatgtgttggatttgactttgaatggtgatttgttcatgattacaatatgttcattttcacagtccaggcagaacaactcatgaaagtggctcaataagaagagctccaagcaaggggaatgctgttctgtagaatccactggagttatccagcaattt

SEQ ID NO: 650683 - DNA, 623 bp, Homo sapiens
ttattatgaagacactttcagctctttccagattttccacccccttttcatatcaggagtacctcaaggtgctcagccaagcaagagggctctctactcccttagaagcacaaagcacaggcagttactctcagatttttctctaaccagacccttttttaagaaggcaagagtggatttgaagtgtagttgttttcccctcttttatatacagttttctgcagtctggcttcttcacctaacttgccaatctaacttggttccactaagtctgaaggagggaaggagtcctatttatatttatgccctctgctgctgaatcagtggcctgttaaaagtagttgctaaataaccatattcctcaattgactgtgagctatcacagagtacagtatatagctgtayttgactggtattcttcagtgtctggctcagggcttgacatgtagaaaatactcaaggcagatgtgttggatttgactttgaatggtgatttgttcatgattacaatatgttcattttcacagtccaggcagaacaactcatgaaagtggctcaataagaagagctccaagcaaggggaatgctgttctgtagaatccactggagttatccagcaattt

SEQ ID NO: 650684 - DNA, 623 bp, Homo sapiens
ttattatgaagacactttcagctctttccagattttccacccccttttcatatcaggagtacctcaaggtgctcagccaagcaagagggctctctactcccttagaagcacaaagcacaggcagttactctcagatttttctctaaccagacccttttttaagaaggcaagagtggatttgaagtgtagttgttttcccctcttttatatacagttttctgcagtctggcttcttcacctaacttgccaatctaacttggttccactaagtctgaaggagggaaggagtcctatttatatttatgccctctgctgctgaatcagtggcctgttaaaagtagttgctaaataaccatattcctcaattgactgtgagctatcacagagtacagtatatagctgtacttgactggtattcttcagtrtctggctcagggcttgacatgtagaaaatactcaaggcagatgtgttggatttgactttgaatggtgatttgttcatgattacaatatgttcattttcacagtccaggcagaacaactcatgaaagtggctcaataagaagagctccaagcaaggggaatgctgttctgtagaatccactggagttatccagcaattt

SEQ ID NO: 650685 - DNA, 607 bp, Homo sapiens
atctttgctattgtgaatggtgctacagtaaacatacacacgcaggtatctttttgatataatgacttcttttcttttgagtagatacccagtagtgggattgtttaattgaatggtagatccactttcagctctttgagaaatccctatactgttttccacagaggttatgctaaattacattcctaccagtggcatatacgtgttcccttttcactacatccatgtcaacacaaagatcagagaaattttaagccactgttcaagtaagtttgycatgctgggaaaggtggtaggttactctctggtggccaaaaagctagagagggtcaaccccctgatcaaggaacataaattatttgtttgctgaattgatagtatatgtttacaatgtgatagggggaggggaatcatttctccttaaagattgttccaattctaataataattattattataaacaaaggctatcatatagtgcaggaagtcatctaagcactttccaggtattaacacacttagccctcacaaataccttatgagattggtacttttactgtccccattttacagatgaaggaattgaggcacagagaggttatgcaat

SEQ ID NO: 650686 - DNA, 539 bp, Homo sapiens
caaacagtgaagggtgaaggaaccatagcctcaagattgcagaataacaagtcagaaaaagtagaaattagaaattccactgatgataatattatgttgaaggtgatacttcaggagatcagttttgtggttcttttcattatggactgaaagggggagaaaagtactctaaccaaaggctagcagttaaaaaactcaactccaaaggcccaggtgtacgcttataatgttctgagctacaagagtggcaatataaatgaaaaagatggcaayaaaaatgctaccaagagagccatactagggctcatggactatatagatatagatgtaagggagagggggaaacagcatgccatctccaccagatgccatggtttggttttcaccatcaggtagatggtcattttactgttagacaaattactctaaagcaagactctggttctaaaaagaaaatagaaaatgttccatttctttctcttggttgctattcccttttcctcatattattttatcattaagaatatgcaattaagagt

SEQ ID NO: 650687 - DNA, 538 bp, Homo sapiens
gcatatttagtagtaaagacaatatttgcagcaattatcaaataaccatattttgcacagtgaacaatcaaaaatacaaaaccaaatagcaaatggttttatctatcttttttttttttttaagaaatggggtctggctgtgttgcccaggcaggattacagtggctgttcataggtgtgatcagagcttactgcagccccgaactcctgggcttgagggatcttcctgcctcagcctcctgaatagcttggactataggctcacaccactgaactactgtatccatgtattttttaaatgatgtttttgctgtcctatctgccaaagkcacaaatattccaactgctcaccttgagcattttaggaacacaaacctcatgttaggtggcaacttaacgacgtaccacagatgtaggaaatagagcctttccttggcaattcaaaagcctctgaaagaaatctgaagcttaactgtacaaaaacaaaaatattataaaaggtagcacatctgtgttaaccttgtgggcctaccccctc

SEQ ID NO: 650688 - DNA, 602 bp, Homo sapiens
cattttaacataacgcacttcaacagttacccataaatgtaaattttgtttttgataaaatgaagagccttttaatccaaattgcacagtgatgcttctacactgatctgttataacttagtaatcagagttaacagactgcctaattaaccaagtcatcatttgccaagatccaaatatgggatgaattgtgggccaaggagaaaatatgayggacatgaaaattattaattcagggaagcattaaaagcatgtgaaattaaagttttttgctaaatctcaccatctttaatatctttaatttttaaggtgtaagtaacatgcaaaaataaaaaaaaaaattccatccagggcacatggaaaaacatttatatcaagtagctaaatggacataactaaatgttaagcttttgacaaccaatgaggtataaaaatcatagataccctttgataacaagtaatattgacagagggcttaccaggtgatagaaccatatttggtgtttcacatgctccagatgtttattctctatatccctaacccttcaggaggtactatttttatcctcaggtaccagatgagaaaactgaggttcaaaata

SEQ ID NO: 650689 - DNA, 538 bp, Homo sapiens
agttccttccttccttcctttcttttcttcctcttcttcctcttctttttctctctctctctctcttttctttctttgtttttttttttgttttttttttttttggagtacagtggtgcgatcttggcttactgcaacctccacctcccaggttcaagtgattctcatgtctcagcatcccaagtaactgggattacaggttgtgccaacatggctggctaatttttgtatttttagtagagacaagtgttcaccatgttgaccaggctggtcttgaactcctgacctcaagtgatcttcccacctcagcctcccaaagtgctgggattacagctgtgagccactgtgcccagcctactcagttctttttacagagagctcggttttctggcacaggtaaagaactccataaatagrttctttcttttaatcaacaacaacaacaacaacaacaacaacaaaacccttgaatggagatactgttatcatccacattctacagaaaagaagaggaaggggagacacagggagactaaat

SEQ ID NO: 650690 - DNA, 510 bp, Homo sapiens
acctggttctaatcagactctgatggccattcacaaatccaagcttgattaaatcctgatacagaaacaaatatcttggctccagtctttggtttcaatggyacgagtggttacaatcaggaagttagctgcctccactatcacttacagaagatgacccacatagatagctgagaactgaattaaatctattccaaccaagagaaaaatgcaacagtccttagagcaacaagctggcaagcggggcctctctaagagggaagagtcaaacagtggccacttccaagggatttggcattttgactgttcttcacctctgcataaacacgatttccacaacttacagagaaggcaggagaagcaatatattggaggggtcaccccagagttctagagagagactgccaggctgacttcccagttctaccactcaccaaccttgagacacaccttacacattacttctcctctctgccatttccttgtcagtgaaatgagataattgttgta

SEQ ID NO: 650691 - DNA, 510 bp, Homo sapiens
acctggttctaatcagactctgatggccattcacaaatccaagcttgattaaatcctgatacagaaacaaatatcttggctccagtctttggtttcaatggcacgagtggttacaatcaggaagttagctgcctccactatcacttacagaagatgacccacatagatagctgagaactgaattaaatctattccaaccaagagaaaaatgcaacagtccttagagcaacaagctggcaagcggggcctctctaagagggaagmgtcaaacagtggccacttccaagggatttggcattttgactgttcttcacctctgcataaacacgatttccacaacttacagagaaggcaggagaagcaatatattggaggggtcaccccagagttctagagagagactgccaggctgacttcccagttctaccactcaccaaccttgagacacaccttacacattacttctcctctctgccatttccttgtcagtgaaatgagataattgttgta

SEQ ID NO: 650692 - DNA, 592 bp, Homo sapiens
gatgggggcatcagctagtgacctcttggttcatcaggcctaatagagaagaaagaataagacagaagctaattccggacttgataaaccaggtggacttgacctttggttcccatcgcctctcaggattggaggaaagaggacrgtgctcaaggcagcctgaggtgtttagaggaactctctccatgaactttcattgcccttattaaaggacttcagatgaagcatttaggaaaaatacctctcaggagacttggcattttccatcttgagtagaagaggtgaaaatatctcttgtgagttttcaaaactaaaagcagtccccatgcaagtttgtctttcaaatttgtattatccagtggtccataaatctcaagccaacatttttgttcttggtgaattgggcttagtagtaacccaggcatttgaagaagcaaatgaaaatcctctccacaagaacttaacttcaaaccaggcctcagaaaatccccatagataaaattccaataaatgtgagctcagactcaaaaacaaaaagtgcacaagaaagcaagacaccatgaagaaaaggcagcagaaatgatgcacatgc

SEQ ID NO: 650693 - DNA, 579 bp, Homo sapiens
gttagaactctttctgactccctgaactgcaacactgaacacagattctccacttagtgagcccatgccaataaattcatcctgatccaacttcgcatttcttccaccactattccttaccttcagcatccatttctacatatgtcctctggtttttgtgtgcataaattaaaaacatcaagtggttatttttagtgtaattcacttcccaatgggtcacatattgtaccttgtctttataggtctgctgggagttkagtaaagttataggtctagaagcaaagaggggtggtgggtgggtgtgagtcctgaagagaatcacctgtcttgcatggtaagtgcctccaggaggcatgatagtttcctctgtcaatgtagggttaatctcttcacgctgagatggaaaggctgatactgcagtgggtgggaaggagctatcactcactggggatatggaagccacttctgttgggattggagaggccaatagctccggtaaatgaggaggtcgctttcagttggggtagggatacctcttctactggcaaagaagactcattatacttaggtgttcaatgt

SEQ ID NO: 650694 - DNA, 579 bp, Homo sapiens
gttagaactctttctgactccctgaactgcaacactgaacacagattctccacttagtgagcccatgccaataaattcatcctgatccaacttcgcatttcttccaccactattccttaccttcagcatccatttctacatatgtcctctggtttttgtgtgcataaattaaaaacatcaagtggttatttttagtgtaattcacttcccaatgggtcacatattgtaccttgtctttataggtctgctgggagttgagtaaagttataggtctagaagcaaagaggggtggtgggtgggtgtgagtcctgaagagaatcacctgtcttgcatggtaagtgcctccaggaggcatgatagtttcctctgtcaatgtagggttaatctcttcacgctgagatggaaaggctgatactgcagtgggtgggaaggagctatcactcactggggatatggaagccacttctgttgggaytggagaggccaatagctccggtaaatgaggaggtcgctttcagttggggtagggatacctcttctactggcaaagaagactcattatacttaggtgttcaatgt

SEQ ID NO: 650695 - DNA, 333 bp, Homo sapiens
gaagtgtttgcatctctctgcaatcctagtgtgtgcagcagtctctccacagttatcaccggccacacagcccctttaccatgaatccagcattggcccaggacacccccaccttataggttctcacactagccagtcagtctcagtgtctcacgtggcacaggcaatacaacaagcatgcttctgaattctggtaaaaccactttcttcccttttgccctctgaactgatatttatttctgggttacattgagtgccctgttttaatctttggyttatccaacacttttgggacttccccatcttaagtctcctgcgtttgaagtgcataac

SEQ ID NO: 650696 - DNA, 612 bp, Homo sapiens
taatggaggacagaaataatattgaaacattgctgttttttttttttcagagtctagagaatttttttcttttgaagtatttatagcctttaacarctgagtagagcgtacttttgtaaacagaatttaaagcatgtttctctctttgcctgatttctccagaattcagaaactgtgaatattctttattcaggacaatgtggttgtttgcataagttcaataagagtatattttatgttataataggacacaattgtaggaactgattattttctcagggctttcactgaaatgtcgtgttttcagatatgagtagcctgctttgagaaactgctgttaactttatggagctgatgagacccccttagaaggattggcctcataccttatctacacattcctttgcagggtttctggcctgtggttaagttgacaatttcactttctgacaggtccaggaacctcaagtatctcaagttggggcctggagaaaaaggggttcactgaatacatgcaggtatctgcaggtgcagatagattcctggctgggctcgggaggcctttggaggccaagtctgagattccctgtgagaggttccaatgaagctaac

SEQ ID NO: 650697 - DNA, 612 bp, Homo sapiens
taatggaggacagaaataatattgaaacattgctgttttttttttttcagagtctagagaatttttttcttttgaagtatttatagcctttaacaactgagtagagcgtacttttgtaaacagaatttaaagcatgtttctctctttgcctgatttctccagaattcagaaactgtgaatattctttattcaggacaatgtggttgtttgcataagttcaataagagtatattttatgttataataggacacaattgtaggaactgattattttctcagggctttcactgaaatgtcrtgttttcagatatgagtagcctgctttgagaaactgctgttaactttatggagctgatgagacccccttagaaggattggcctcataccttatctacacattcctttgcagggtttctggcctgtggttaagttgacaatttcactttctgacaggtccaggaacctcaagtatctcaagttggggcctggagaaaaaggggttcactgaatacatgcaggtatctgcaggtgcagatagattcctggctgggctcgggaggcctttggaggccaagtctgagattccctgtgagaggttccaatgaagctaac

SEQ ID NO: 650698 - DNA, 612 bp, Homo sapiens
taatggaggacagaaataatattgaaacattgctgttttttttttttcagagtctagagaatttttttcttttgaagtatttatagcctttaacaactgagtagagcgtacttttgtaaacagaatttaaagcatgtttctctctttgcctgatttctccagaattcagaaactgtgaatattctttattcaggacaatgtggttgtttgcataagttcaataagagtatattttatgttataataggacacaattgtaggaactgattattttctcagggctttcactgaaatgtcgtgttttcagatatgagtagcctgctttgagaaactgctgttaactttatggagctgatgagacccccttagaaggattggcctcataccttatctacacattcctttgcagggtttctggcctgtggttaagttgacaatttcactttctgacaggtccaggaacctcaagtwtctcaagttggggcctggagaaaaaggggttcactgaatacatgcaggtatctgcaggtgcagatagattcctggctgggctcgggaggcctttggaggccaagtctgagattccctgtgagaggttccaatgaagctaac

SEQ ID NO: 650699 - DNA, 590 bp, Homo sapiens
ctctatgttgctcaggcaggtcttgaactcctggcctcaagccattctctcatcttggcatcctagtgctggtattatagctgttttgagccaccatgcctggcctcttttattatttttcaatgtggaaagtagagatgagagaggacaggggcaatggtggggtttgttcctgggttcacagctctgctgtcactgtgagggagctacagaggtggggaggggcagaccaggaaagcagacccctgaaatacaatgtcatttgcagatccagcctcttgttttccatcctggacattcttccattaccaggcagccaacacttcccaggctgtcctgggactcgcagttctgtctacctgggcacagtttcaggctccagctggcaaggcagccccatcactttytgcagaggagcatgtgctggaataggagacagtgagatcacaggaattcattagcatcccatattcattttcttttcctttataggccttctccccaaccctgtacccgacacccacctcagtcattttttttttttcccttagagtagctgggggaatctgtcaaagccagttcaggagctt

SEQ ID NO: 650700 - DNA, 526 bp, Homo sapiens
acttacagtattatattactagtacattaaatttactaaaaattatttctctcagtaaaatatacaaacaagacaaactaggcattttktgtgtgtatatattaatacatacatgagtgaggtatatttttatatctatacatgtgaatatagatatctctatttacagcacacgttaggattgcttcaccctttccatgcttccttttctcttcaatagagaaaaattactttctttaggagaaacccaaaggcttttacatggttcctaacagtgtctaatatttactaagtgctttctctatgccccatactagcctaagaattttatctgtaatagctcacttgatccttacaaggagtactgtgaagtaatctgggcatggttatgtagctagttagtggtagaatctagactcttaactgaggtctgtctgtactcattcttaactactctgcagaatggcttcacctaacctgttgtttaagtgccatgtcactatttgagctaatcctagtttttcac

SEQ ID NO: 650701 - DNA, 441 bp, Homo sapiens
gggcaccctccaatttgctgccagtttgactaaaacaaaggaggctgaagaagagggataagcaggttgctgagtcctctatttttctgtcttcccatggcttcctctcctcctgcccttggacatcatactctgggttcttaagctttagtactctggcacttgtaccagyagcctccggggggctcttgagcctctagcctcagactgagggctgcactgtcaacttccctggttttcaggctttgggacttggactgagccatgctgctggtttctctctttcccaatttgaagatggactatcctgggacatagccttgtaactgtgagtcaattctctctaataaaatctcatatatatatacacacatatctacacataaatacacatatatatatacatatatctacacatatatatatacacacacacataca

SEQ ID NO: 650702 - DNA, 441 bp, Homo sapiens
gggcaccctccaatttgctgccagtttgactaaaacaaaggaggctgaagaagagggataagcaggttgctgagtcctctatttttctgtcttcccatggcttcctctcctcctgcccttggacatcatactctgggttcttaagctttagtactctggcacttgtaccagcagcctccggggggctcttgagcctctagcctcagactgagggctgcactgtcaacttccctggttttcaggctttgggacttggactgagccatgctgctggtttctctctttcccaatttgaagatggactatcctgggacatagccttgtaactgtgagtcaattctctctaataaaatctcatatatatatacacacatatmtacacataaatacacatatatatatacatatatctacacatatatatatacacacacacataca

SEQ ID NO: 650703 - DNA, 624 bp, Homo sapiens
tgtggtgaaacaaaaggaactggatttagcctcccattttaaactaccaaaacaccacataaaatatataaaacaactgtayagtttatagtggcatgaaatggaaaggttaaaaaaattcttactcaatccaaaaaaaggaataaaggaatgaaaacaagaaacaataaacagagtgcacaaatgcaagatatatatgcaggtggtagattgaaatctaacaatattagtaatattaatacatgcaaatgttataaatactccaaataaaaagtacagataagaaaattaataaaagcaatacccaacaattgactgtctaaaaggaccccactttaaattaagaaaacacatatcgcataacaacgaaggcatggaagttctactgtgcaataacttatcataagaaagtaaagttgctatatttatatccaagaaagtagacttcagaaaaggaatatatcgagaataaatacagagattgcataataataaagatgattttatcaaaagatataaaaactcagttttgtataaaatcattaactgagcttcaaaattaattaagtaaaatgtgataaaagagaaaagtaagttagaaaaatccacagttagagttggaac

SEQ ID NO: 650704 - DNA, 592 bp, Homo sapiens
gttatgtgaagaataatgacggtattttgataggaattgcattgagcttgcagattgattttagaagtatggctttgacagagtcttactgtcaccgggactggagtgcagtggtcagattttggctcactgctgcctctgcctcctaggttccagcgattttcctgcctcagcctcctgggtagctgggattacaggcacgtgccaccacacctggctaatttttgtatttttcgtagagacggggtttcactatgttggtyaggctggtctcagactcctgacctcaggtgatccacctgcctcagcctctcaaagtgctgggattacaggcatgagccactgtgcccagcctggaagtatggtcattttttttttttttttttttgagacggagtcttgctctgtcgcccaggctggagtgcagtggcgcgatctcggctcactgcaagctccgaagtatggccattttcatgatattgattctacccatctatgagcataggatgtgttttcatttgtttgtggtatctgtgatttctttcagcagtgtttgtagttttccttataaaggtttttcaccaccttggtt

SEQ ID NO: 650705 - DNA, 561 bp, Homo sapiens
aactgcctcctcctaatttagcacatggtcgtacattaacacgtctcctttctccctgaaaatgactctccttgagatttatttctttactaactaggtttattatgacttataagatgagggcaacaataaaggatatttgtttcctgtaggacttccaacactaattcccctgttatctttcaggagaatcctccatgggggctatgcagaagggatgcagagccccaccttccactacagaatccaaaggcagaaaacacatgacccaagttcagtcaatgagactgtcccactacttttgatgtggaccaaatgagccaatgaccagagattattagaattaatgatgcaaaagtcagayccaatggcactagtaatgatctggtggcagtattagtacccaccagcaactttggactgtagtttccaggactgactgaccctgtagctttgatttcttcttccagtctgtcctcaattctgtgaatcccttatataattccagaaaatcccaatgttgctatgacagattttgtttcactcttataagcaaaaatc

SEQ ID NO: 650706 - DNA, 515 bp, Homo sapiens
atggctggtgggccgagcctctgaatgctgcaattcaggttaatcacacagacctgctggagcatgtggggctgagggttccctgcacctcccttctctcccctgctgtctggatctctcacctcgctcctggtgggcctgaatttgccatgagtgatcaagaacctgagaggcctctgatctgctccacgcacatctgtgcaaccgggaaaaacaaaaatcctgatgaaagacctgaggtgcgagtcaggattcaccataaccgtactgtgatctcaccttctgaaaagctattttgttcaycataagtaggcagtttgacaattgctcaatgtttgggttctaccctgtatcctgtactagtcaatgtcagggaaggaaaggtgcctcgtctccaggcatgtgggcccacagcagagcagaacaggctggggacttggggttcttgggctctttccgatgggggctgaacactggtcatattctgacctctagagagggcagaggtgaacagg

SEQ ID NO: 650707 - DNA, 468 bp, Homo sapiens
atatgctcttctggctatcatgaaatatacagtaaattattgttaacaacagtcgccctattgtgctactgaacattatatcttattcattttatctaactgtagataaaaatattaaccaaatcttcttttttcaccacctcccaactagccttcccagtctgtggtaaccaccattctattcactacctccatgagatcatttttttttatagctcttacatatgagtaagaacaggtgacatttatctttttgtgcctggctgattttacctaatattctccaggatcatccatgctgttgcaaattttaaaaattataactatggtctactctatttctacacatagagtataaaaatataaagagatcgatttttaacctttaataggtaaccacagaaggtcatgcttgagtaatgactatagttgttaaatttataaatggrgaaataggaaatggtgtga

SEQ ID NO: 650708 - DNA, 572 bp, Homo sapiens
tttccaaaattccaactctgccaaccatttcattttaaaaagagagaaagcaaatgagacagaaagagagattcaatcctttaaaatcctttaatttttcttcctttcaactcagtcaaaattaggtaacctctcataagaaagttaattatcttctcctcttttgggattttattttgtaaccccccaaataatgcatttattacaaacacaagatacctcttctattgccacaatcctcacatattatctaatctgcaaaagcaattccctactttgttaaaagtaaaaccatggactcttcctttcccatttccttattgagagcttcatgtcccaggctttgctctctggattcccatcagaaggttcctacaaaatcctccctaccttatgctctgcytctgcagcattaggtatgacatctgccatggcattagccacttcagtgctcagagaaatagaaaaaccatcctggagaacttcaaaactccacaagcagaagcttcaggtaatagaaagggagcgttacttgcttttcagttgcctaagatcaaaatcgcacacacagg

SEQ ID NO: 650709 - DNA, 572 bp, Homo sapiens
tttccaaaattccaactctgccaaccatttcattttaaaaagagagaaagcaaatgagacagaaagagagattcaatcctttaaaatcctttaatttttcttcctttcaactcagtcaaaattaggtaacctctcataagaaagttaattatcttctcctcttttgggattttattttgtaaccccccaaataatgcatttattacaaacacaagatacctcttctattgccacaatcctcacatattatctaatctgcaaaagcaattccctactttgttaaaagtaaaaccatggactcttcctttcccatttccttattgagagcttcatgtcccaggctttgctctctggattcccatcagaaggttcctacaaaatcctccctaccttatgctctgcttctgcagcattaggtatgacatctgccatggcattagccacttcagtgctcagagaaatagaaaaaccatcctggagaacttcaaaactccayaagcagaagcttcaggtaatagaaagggagcgttacttgcttttcagttgcctaagatcaaaatcgcacacacagg

SEQ ID NO: 650710 - DNA, 520 bp, Homo sapiens
tctcttgatttgtttctctatttaacactaaacagtatttattaaatgtacacgtctccacaatacctcctaagaagacaattacagaaatcagtcaactcctcttacttttttaatggcaaggcatgtccagcgatgaagcaaccacagccacatgagctgctaagttctcgccccagccagtgtcccagctgaagcctaaccgcccagggccaggaacagtggccaacacatctgtgcttcagcccgcctctgtccacctggagatgggattagaggccaccragatctcagaaaacactcacagctcactagcagccaatgcaatccatgaggtcaactcaggtgcagattaggtctagtcaagtaaagcacacagcccctcatccagtgaactcaaacccaagctgtccctttagtctatgggggattcatccaagcaccacaattgggcttctatagtaattttcacagtcaatttccccatcccctttgaagcagatccctttgcacataaagt

SEQ ID NO: 650711 - DNA, 520 bp, Homo sapiens
tctcttgatttgtttctctatttaacactaaacagtatttattaaatgtacacgtctccacaatacctcctaagaagacaattacagaaatcagtcaactcctcttacttttttaatggcaaggcatgtccagcgatgaagcaaccacagccacatgagctgctaagttctcgccccagccagtgtcccagctgaagcctaaccgcccagggccaggaacagtggccaacacatctgtgcttcagcccgcctctgtccacctggagatgggattagaggccaccaagatctcagaaaacactcacagctcactagcagccaatgcaatccatgaggtcaactcaggtgcagattaggtctagtcaagtaaagcacacagcccctcatccagtgaactcaaacccaagctgtccctttagtctatgggggattcatccaagcaccacaattgggcttctatagtaattttcacagtcaattkccccatcccctttgaagcagatccctttgcacataaagt

SEQ ID NO: 650712 - DNA, 600 bp, Homo sapiens
tagatatcctctcatatcccaatggttaaaaactggtctctgacaatccttggaccagtatgagattattatcatggctgggctagaacacccaccctcaggccaaggtatgaccatctgctgcctgaacaagctggggcttcatctgcagagaaaaaggtgagatggaagatgtgtagttaatgaactcaagcaaaagttatctgtagtctctggagaattgttacatcatccagaaaaatgagacaacaaaatctctgtcccttagaattttctcaaggattaaatatgcttttcatataaaacaaaatgtctgctccatgacacaagaggcacagtgcttaggagtgcagaccctacaaccagtctgctggctatgaaccccagctctactgccaaaggctgttgggaggacaggtcagtgctgggaacacagtaaatactaagaaaaaggtggctgytattgttattattactgacactactactaaataagcctgcaatgaatggtagctgacatttcttgattttctccatacttggaaatgagtatggctggaaaagtaaaaatcaccaataaaacccaattaaatgagagtc

SEQ ID NO: 650713 - DNA, 438 bp, Homo sapiens
tatatttctatagttctttatagtttttatataaaaacaatttgcaaagtgtttttttattaaaggcataatcttatttggtttttacagccgctctatagataagcaaactgaggtttagrgaaagtaattaaccagctagctaataaatatcaatgttctatttggattccagtccttctgaattcatagtttttcatatatagtttcttttccattctgttcatttaaatgcaaaggcatgctccaacttcctctttttgaacccttgccaagcatttgtaggtaaaagctgaaggtcttaatcggcagcataattattcaacaacttactagaattttcctgaggatgggctggtagaccttgagtatttgaccagaaataattattctacaaatacatttattaatgtttttgagcacttcgtatttgacaaa

SEQ ID NO: 650714 - DNA, 598 bp, Homo sapiens
tctgggaatgaacaacttctcagtgaaagagagagcgagctaagtcctgttagctagaccagagtttccagctgaaatgggggactgcttttgagtatagagacagacctcaggccatctctggttcagtctctgtggaatgatacctggatattaggaattgcaggatgattggacacgatgatatcaagatgttaggactgaaaaatagagactgggttaaatgaatcatcaaggccaccataaagtgatgggggaaataagattcttgtggcagaggtgggaaaagagttttttgaaaggtttggattagagaggaactctgtgaactgcccatgaaaggaaaktggatggggagggaaagggaattttatgaaccatgtctccattcagtgtttgataaacgcaagcaaaattattttgaaaatacattttggtttcctaggctgtatctctttaactgtgacttatctctgaggtgtctgctaggttggtcatggttttgtagtttttatgccaacaaacttggtattagccatggtaactcatgtccccagggcacttttgtatgagtaggcatttttaaccaggaaaatgg

SEQ ID NO: 650715 - DNA, 579 bp, Homo sapiens
cgtattttaggtaatgggccataagggattattttaattgtaagaaaatgtacaaaaaatttgctttttacaaattttctatttaatagcaataaaatgaagtgacactaaagtacaaaaaagcctgaacagtatgatttctttgtatcaacagtgaagggctcccttgtatatggagttcccaaacagtaagttttcttaatcctgatcatctgtggccagtgtaaaagaaaggcctgacaggaaaagttaaggagccagctgggtaactccatatgagggaactcttggtgacattcaaaaaactcacacttccactttcaaaatcaagaaacacaccaacccggcccagaggtttctctatrtagtgaggaaactctggggaggtggtcaagagactgaaatgattatccaccttcagacacaaaagaagaaatatgtcctcagagttaaccattgtgctattcttccttatccaggagtcgttacagactcccagagcccagtcacaagagttgtccacatccagctcccagtagtgtttcccaaaggagaagaccctggctccccatgcagcaa

SEQ ID NO: 650716 - DNA, 579 bp, Homo sapiens
cgtattttaggtaatgggccataagggattattttaattgtaagaaaatgtacaaaaaatttgctttttacaaattttctatttaatagcaataaaatgaagtgacactaaagtacaaaaaagcctgaacagtatgatttctttgtatcaacagtgaagggctcccttgtatatggagttcccaaacagtaagttttcttaatcctgatcatctgtggccagtgtaaaagaaaggcctgacaggaaaagttaaggagccagctgggtaactccatatgagggaactcttggtgacattcaaaaaactcacacttccactttcaaaatcaagaaacacaccaacccggcccagaggtttctctatatagtgaggaaacwctggggaggtggtcaagagactgaaatgattatccaccttcagacacaaaagaagaaatatgtcctcagagttaaccattgtgctattcttccttatccaggagtcgttacagactcccagagcccagtcacaagagttgtccacatccagctcccagtagtgtttcccaaaggagaagaccctggctccccatgcagcaa

SEQ ID NO: 650717 - DNA, 579 bp, Homo sapiens
cgtattttaggtaatgggccataagggattattttaattgtaagaaaatgtacaaaaaatttgctttttacaaattttctatttaatagcaataaaatgaagtgacactaaagtacaaaaaagcctgaacagtatgatttctttgtatcaacagtgaagggctcccttgtatatggagttcccaaacagtaagttttcttaatcctgatcatctgtggccagtgtaaaagaaaggcctgacaggaaaagttaaggagccagctgggtaactccatatgagggaactcttggtgacattcaaaaaactcacacttccactttcaaaatcaagaaacacaccaacccggcccagaggtttctctatatagtgaggaaactctggggaggtggtcaagagaytgaaatgattatccaccttcagacacaaaagaagaaatatgtcctcagagttaaccattgtgctattcttccttatccaggagtcgttacagactcccagagcccagtcacaagagttgtccacatccagctcccagtagtgtttcccaaaggagaagaccctggctccccatgcagcaa

SEQ ID NO: 650718 - DNA, 579 bp, Homo sapiens
cgtattttaggtaatgggccataagggattattttaattgtaagaaaatgtacaaaaaatttgctttttacaaattttctatttaatagcaataaaatgaagtgacactaaagtacaaaaaagcctgaacagtatgatttctttgtatcaacagtgaagggctcccttgtatatggagttcccaaacagtaagttttcttaatcctgatcatctgtggccagtgtaaaagaaaggcctgacaggaaaagttaaggagccagctgggtaactccatatgagggaactcttggtgacattcaaaaaactcacacttccactttcaaaatcaagaaacacaccaacccggcccagaggtttctctatatagtgaggaaactctggggaggtggtcaagagactgaaatgattatccaccttcagacacaaaagaagaaatatgtcctcagagttaaccattgtgctattcttccttatccaggagtygttacagactcccagagcccagtcacaagagttgtccacatccagctcccagtagtgtttcccaaaggagaagaccctggctccccatgcagcaa

SEQ ID NO: 650719 - DNA, 512 bp, Homo sapiens
atgccataaagctagtgagatccgtgatttaaaacagaaaagcttttgtgtgtccctccttctctcagtctatcatatcatatggatggttttccgtttcttataattacctaaaacatacaggtaaagctggtgcatttgaatatatttctgtcttacgcatacatgaactactctgaatcaaaaacaagttacatattttaaatttaagcatttgctgcaccaggaaggatttttgaaaaggtctgtggtttttaaatcccataatgtacttgctaacaaaagttagtctaaattctcctgctcacacatgtgaaggagaaaaataacaaaagtacagtracatttcaattgaatactttggttttgatgaagcaaatccaaatatcctacatttaggtgcccatgtctattcaaatatcgattaagaaatttcaggaataagttccaatcacagagtagcaattacagttggataaagtgagctataactagaactctgtacctgttga

SEQ ID NO: 650720 - DNA, 571 bp, Homo sapiens
ttgagcaaatgtcactttttctttccaagaaattgttgtatcttaccttgtgcacatggagtcataataataagtgtcaaaactgtaaaggtctgacattttatcctatctacaagtttacaagttagcctaaagaagttctgtagatattggcagaagacatgatgcttctgaratgaagacctttactactcatgacacatcaagaagtataatcttcaaaatcatatcatttccacagtgatggtgagcccaggaagattccatgaatgtaatgagcttctatcacagatgaggaaccccatatataaagaactcccgatttaataaggaaatataagaaaacctgcccaatctttgtcccagaggaagacattatctttattatcctggacagcaaataattctaccttctgccctagtgggagagagtatcattcaaggttgctcatgaaacaagtattattgaaaagaagatagagaactagtctgtcacaagacttgtttaaatgtgagaaatccatgtagagtggtttccaaaaatcggtcacagagaaagaaagcaacaaag

SEQ ID NO: 650721 - DNA, 531 bp, Homo sapiens
gcactccagtctggggcaacagagcgagaccccgtatctttaaaaatatatatcccatcccagagtccaccctatagagaaacccaagtatttttccayttgttgaactaggaacatctgtggatattatgaacataaatattttattctaagcctctattgacctttcaattctctgaatcattgcaaaaattattctcagcagtcgtgagttgtaccacctcagcaaaatgattctatctcagctccctgtctagactttaaattccaggaaggcaaggctgcatcttcatacctttttcctccaggtttctgagtgttggcaatgacactctttcggtaaatggaaatttgaaagagccaatgaaaaagaataatagttgaggagcaaaggtttctcctgcagtgggccaactgtccgtagcaacaaagacacatgggcaaacaaacagtgcttgcttctctttaggaaagaataattatttaccgtgaaagaagctctgtgaaaaaaaataacttcaatgtgtgtca

SEQ ID NO: 650722 - DNA, 589 bp, Homo sapiens
tcttagggtgtgccctctctccgtctctcatgtcactcacctcggagaactcagctgccacaccgtgaggtccccttgtagataagccacatggcaagggcttgaggcctgtcagcaaccgtgtgagtgaatctggaggagaattccctccttgtccccgagtcaagcctagagatgagcctgcagccccagccgacagtcccattgcaatctaatgagacaccttgagttcagaggcaccaagctatgctatgcctcaaatttcccacccatagaaactctgggatagtaaatattgtttgggctgggcacagktgctcatgcctataattccaatgctttgggaggctgaggtgggaggattacttagggccaggagttcaagaccagccttggcaacatggtgagaccctgtctgtacccccccccaaaaaaaaataaataaaaattagctggacatggtggtacatgcctgtagtcccagctacctggggactgaggcaaaaggatcacttgagcccaggaattcaaggctgcagtgagctatgatttgctactgcaccccagcctagacaacagagagacaccc

SEQ ID NO: 650723 - DNA, 589 bp, Homo sapiens
tcttagggtgtgccctctctccgtctctcatgtcactcacctcggagaactcagctgccacaccgtgaggtccccttgtagataagccacatggcaagggcttgaggcctgtcagcaaccgtgtgagtgaatctggaggagaattccctccttgtccccgagtcaagcctagagatgagcctgcagccccagccgacagtcccattgcaatctaatgagacaccttgagttcagaggcaccaagctatgctatgcctcaaatttcccacccatagaaactctgggatagtaaatattgtttgggctgggcacaggtgctcatgcctataattccaatgctttgggaggctgaggtgggaggattacttagggccaggagttcaagaccagccttggcaacatggtgagaccctgtctgtacccccccccaaaaaaaaataaataaaaattagctggrcatggtggtacatgcctgtagtcccagctacctggggactgaggcaaaaggatcacttgagcccaggaattcaaggctgcagtgagctatgatttgctactgcaccccagcctagacaacagagagacaccc

SEQ ID NO: 650724 - DNA, 583 bp, Homo sapiens
ttgacatccaagcagagatatcaaataggcagttggctatcaggctgaagttcgggagagagtcctggactggaaatataaattctggagtcatcaacatgcagatggtatgttaatttttactgctgcataacgaaacaacaaaaaccgagcttcttaaaataatacccattgtctcacagttctatgggtcagaagcctggacacagcatggctgggttctctgctcaggctctcacaggctgaaatcaaggtgccagctggggttacagtgggactttggtcctcttccaagctcactgattaacggccaagttcagttccttgcgactatggggctgaggtacccattttcttgctsgctgttggtcaggggtccctctcagctcccaggagctacccacagtttcaagccttgtggtctctctacaacatgacaattttcttccttaaggccaccaagagaatctctttctcataaagactttcactccagcaagggtccagttcctcttttcagaattcagctgatcagaccaggcaaacccaggataatcactcttttgatgaactcagtcaactg

SEQ ID NO: 650725 - DNA, 632 bp, Homo sapiens
tcttccacaaaaccatgggcccctacaaagtatagtggggaaaccacagactctggggccacrtggcctgcaccttctcccagcatctttcttcaccagccaagtgactttgggctactaagtctcataacctctctgagcactgtctttttacttgtaaaatagtatcaatactaagtccaagcctaccaacttcccagggttgttttgaaaaatcaaaggagatatcgtatgtggaagcactttgtaacctgccatacaaatgaggggtgtttagttttaagatcacctagcctagcatttttagttaggggaggcagagaaataataaacatttactcatgtccactgtgtataggaaatatgaatatatactccaatgcagtcttctagactttctcatgaggcagacagtgtttgccccacgtgagagatgagaaaactgaagttctaagaagttggctaacttccctagatcacagaatatgatttgcagtccagtgtgaaaatggttcttacaacaccaaagtccaggctgtgtggccatgccaacctccttcacaaaagaaggacatttctttgcatgtgacaccatgatagtcatgctaactcctaaaaaactttcaagacat

SEQ ID NO: 650726 - DNA, 632 bp, Homo sapiens
tcttccacaaaaccatgggcccctacaaagtatagtggggaaaccacagactctggggccacatggcctgcaccttctcccagcatctttcttcaccagccaagtgactttgggctactaagtctcataacctctctgagcactgtctttttacttgtaaaatagtatcaatactaagtccaagcctaccaacttcccagggttgttttgaaaaatcaaaggagatatcgtatgtggaagcactttgtaacctgccatacaaatgaggggtgtttagttttaagatcacctagcctagcatttttagttaggggaggcagagaaataataaacatttactcatgtccactgtgtataggaaatatgaatatatactccaatgcagtcttctagactttctcatgaggcagacagtgtttgccccacgtgagagatgagaaaactgaagttctaagaagttggctaacttccctagatcacagaatatgatttgcagtccagtgtgaaaatggttcttacaacaccaaagtccaggctgtgtggccatgccaacctccttcacaaaagaaggacatttctttgcatgtgacaccatgatagtsatgctaactcctaaaaaactttcaagacat

SEQ ID NO: 650727 - DNA, 520 bp, Homo sapiens
agtatgggtatgggtaagtgtgtgggaggaaaataatgagcattgaaggacaacatacctactagcctagaaagggaatgtttatggagaattaagagcatgggaatttcaacatgaaataattaatagcattgcttaacacaaagaattcaagggacatggagaatatgaaagcatcactagatttgcaaaatattggtgacatatatgagtgtactttattttaggaaaacaatgatgatagaagcctgattgcaagggttaaaaaaagaaaaagaagcaatgarcaatacagaaagcaagcagatattttatttggccaaaagaaaaaataactagaagagagaaatacacattaagaaaataggatggctataacaggaggtaaaagatggagcatgcttctcttttacaggtaagggataaaacagtgtgctggtattaggtttcacaaaaaacaaaggagctaaattcagttataatcgcagcacaataggaagggatgttgtttgatgtaatc

SEQ ID NO: 650728 - DNA, 508 bp, Homo sapiens
tattaaccatcacaggagtgtatagacaaaaaaactcataattaaaataaaatgttaagaagaagcattagtacatgtggctactataatattatattctggtgtggactactttgattgatattaggcactaagactaataatggctttcactacttctacttaaatctggttgactattcaggagacaagcatatctcatcttaataattcattgggcatcaaaaacagtagagtcagatttatattagtatgggggatgttttttctttgaataaaaaatatttmcctgttctttttttttttttttttttttgctctgtgcttcttttgttcccaaatttctccagatgtatctacacagtgtttctcagagtgggatccctgacctagcaatattagtaccacctgggaacttaataggcacgtaatgaatcagatgtaatgaatcagaaactcgaaggatagggcccagcaatctgtgttgtaacaagcccttctggagtgt

SEQ ID NO: 650729 - DNA, 508 bp, Homo sapiens
tattaaccatcacaggagtgtatagacaaaaaaactcataattaaaataaaatgttaagaagaagcattagtacatgtggctactataatattatattctggtgtggactactttgattgatattaggcactaagactaataatggctttcactacttctacttaaatctggttgactattcaggagacaagcatatctcatcttaataattcattgggcatcaaaaacagtagagtcagatttatattagtatgggggatgttttttctttgaataaaaaatatttccctgttctttttttttttttttttttttgctctgkgcttcttttgttcccaaatttctccagatgtatctacacagtgtttctcagagtgggatccctgacctagcaatattagtaccacctgggaacttaataggcacgtaatgaatcagatgtaatgaatcagaaactcgaaggatagggcccagcaatctgtgttgtaacaagcccttctggagtgt

SEQ ID NO: 650730 - DNA, 577 bp, Homo sapiens
ctattctcaaaattagaagcatactatatgtaattttatacactgcattttcacttaacatatcatgagcaattatctatgtcattaattttttatttcctctttttccttccttgatattattttgcttttttgctttggctgttgaaatgggttttgttgccttttttttttctgcagtatatgtaagaaatacacattgtttgtaactaaactagtggaacctgttgtgtgtgtggagtgttttttttttttttttawaaaaaaacatcatccatatttctttatttggtataatcaggaaagtaatcattccatcttctggtccaacatataaagaggaagaattgaatacttctctgtccttgctcttttccccacactggactttccaatttgtattaacataaagtgttatttattattaaaaacttttatgcggtatttttactgcaaaatccagtctaaagttgcattcagatttgaaattaagctattagcaattatttaaatgctattaatatgttcaatttgaatgattctatcattcttgtagtcaccatttgtccatttttat

SEQ ID NO: 650731 - DNA, 597 bp, Homo sapiens
ctggtgatgtgtttgtctatctgatgaattatctgtctacttctctgggctgcaaactccaaaatcatagggattgtgtatgtttggttcagtgtccatttttaggactgaacagtgtctggaacttcataagcatggtactcagctaatactagctgatgagtaaatgagaaaggcagtggatggcctctgaagacagagaggtgaaaacctttttcctgcatgttgtgattctctaatgagattctctaatgtgattctctaattcggatgttgctaggatctagcagcctattatttcaaggaagattcttactaaggagatgcttaatttaaaaatctttatttccccctggtgagcagtctaccattcaggacttcagggctagggcaagctggctttggcctactacttggggacctgtctgrgataaatatgtctcagattcttggctagaggtggtaggaaaggaggtaggatttggattgagtgtccaagactttctgggaatttggggtcagactcacagggacaaattggtgtataaaaaggcagagtttctggaatgggcttcagcaggtcttgagtgaggtccc

SEQ ID NO: 650732 - DNA, 626 bp, Homo sapiens
gacagagagcacacagcagaagtccactgctgtctgcaagccaggaagcagccctcaccagggcctgtgctagcaacttgatcttggacttcccagcctccagaactacttgttgtttaagccacccagtctatgttattttattatagcatcctgagccaagacattgctcaactttttccagaacttaattagtagccaggctctttaacagaaaatatacaccagttcaaaagtaccacactgctttatgttccacataccatattggttaaccataatgcactaggcaatggcatccraaggtcattggcctatcttgagatatctttatagattaggaaataaaagtttaaaaataagggctgaaaaactgtgctgttggtagagacttagataatcaaatagccttaaccaaagtttctgatcagttcacctgataagtctcttgacttatttttctgtctactaaactataaggcatttgagggtaggacccatctaatgtaataacatatgccagttatttaatatttagtggctgcaaagtgttgttctaagtgatttgcatgtataaagtcatttaatcctgacaactccattagatttttaattgaaaattagac

SEQ ID NO: 650733 - DNA, 536 bp, Homo sapiens
tactaccaggcctgccttgaaagagctgttgaaggaagcactaaatatgagaaggaaaaaccagtaccaggccctgcaaaaacacaccaaaatataaagaacaatgacactatgaagaaactgcatcaactagtgtgcaaaataaccagattgcattatgatgacaggatcagattcacacataacaatatgaaccttaattttaaatgggctataagcccccattaaaagacacagactggcaaatgtgataaagggtcgagacccrttggtgtgctgtattaggagacccatctcatgtgcaaagacacatataagctcaaaataaaaggatggaggaaaatttaccaagcaactggaaagcaaaagaaaaaaaatgcagaggttgcaatcctagcctctgaaaaaacagactttaaaccagcaaagatgaaaaaagacaaagaaaggcattacataagggtaaagagatcagttcaaccagaagagctaactattctaaatatatatataccaaatacaggagtaggcagatt

SEQ ID NO: 650734 - DNA, 585 bp, Homo sapiens
cactaggaaactaatacatccaataaaaattatcaccaacagtctgcatcggtcaactggttgttagaatgcagagacaactaaatagttgaatatttttttttcaaaattggttggtttatgagatatatgataagaatatagataagtggattgaacaattgtttgcacattcctatcttaaaatattttaatgttttatattaaataacatgaccacaatgaccaatagaatgamcacagtgttcttcagtgttgaaagagcttaaattttcaataatctttaaggctaaagtataccttgttaaaataaagtaaaaacgtaagtaatcatgttatctgcttaaatgttgaaaaatctattgatggaagtttatttgcattttctaccccaaacaaagcatatacaactaataatcctatttatctgctttagtattagtaatttaattaaattagaatttatgtaaattgaacaaaatatattagaattaaacattcaccctgactgtgaatgtgggtacctgtatatatttttgacttataaatgcttgacataaatggttggcttaatatttaaatttt

SEQ ID NO: 650735 - DNA, 583 bp, Homo sapiens
  misc_feature 578, 579, 580, 581, 582, 583: n = A,T,C or G
tgtagatgtcaaatgcagttgtgatgcatggccatgaggggagactcaaggtcatccttgagaggaatctgaggtcggacatagtacttgaccaaactgcattgtcaaaagatagtgcccttgttgtgaatgagtcagagtgaaccttggagcaattggaaaacaaggggtaatactcatgcaaatgagctggaatacagggagcaagaaggtgatatgactatgcatttatgctttgactggttatcttttgcctttgtcggttggactagccagattctattttactttaattttaacctttattttaagttcagcggtaaaattggcaggtttgttataggtaaacttgtgtcataggggtttgtcgtataaattatttcatcacccaggtatgaagcstagtacccattagttgtttttctagatcctcgccctcctcctattccccaccttccaaaggaccctagtgtgtgttgttcccccctatgtgtccatgtgttctcattatttagctcccacttgtaaagagagaacatacagtattgtaatacttggtagaactacctcaggtggcnnnnnn

SEQ ID NO: 650736 - DNA, 553 bp, Homo sapiens
tagggaactggtcttttcacaaagaggccatcttgcagttatgtcaacaaackttttcacactagtgcatctgtttccaaagtttgtggtttgaaagaatagactgatattaactacttctcttgagtcttcaaacgaccaagaaaggaaagaaggaagactggtagcagcaatgaattttcacagacatgcaaactcagtatttcagatggcttaacagatgcacagttacaaataagagccatatgggtgcattaaagggtaaaaaatctgggtcacattatacagtacaggtggaaatgcagctataaacacagtcagaacaggtgatttggatacctgtcacttatatctatatacagacttatccagtaagactctcctatcccatacttaaatgagattaaaccttgtcaaccataaagttcagtataaagatctttgatgtcaaacacagcattctgaagcaaggatttattagctaggtgttttgtaataacatttatcttcaaagcacaaacacagtacacattcccaggtacatagtaagtgc

SEQ ID NO: 650737 - DNA, 562 bp, Homo sapiens
cttatagcatgaattaaggcagacattattatcacccattttacagttgggcaaacaatttagggaggctgatttcttgcctaagtttgtacagctagttgggaaaacatgttgatatcactctttgctttgttcktctgaaaagcctatttttcctacaagtctaaactgcttcttctaagaattagtcttagtaagaggaggagggagatagctacatttataaataattgttataatataggtggaatttgataagtatcattcaaaaagctatgtgagtttggagagcctgcttctttgctgaataattaggggagagcatcgtggaagtgatggcatttgaactagaaattgaagaactcgtaggattttaatttgcggagatggggataatagaggtaatgtagatgttagaaaagtgtaactgggttaggaagagcatggagacatttgggaaatagcaaatcatacaccttagagtaatcgatgtgggaggattgatgggttagatggctggttgagtccttatcacacaagatcatatatggtagctagtggg

SEQ ID NO: 650738 - DNA, 495 bp, Homo sapiens
cttaactgacgcaaatgccagctccatcctcccccagggttaggtatccaagccattgggctatgctaattgtttggatgattgcatccacacccggtctggataccttcctctggaacctgatgragccaccactccaagttgccagtgcaatgaaattatcacatgttgaatttcatactgactttaacctttcacctgtgatctagataaacttcaagctgacaacgccttggatttcaagaacttaagcctgcactttgcttctatgaggaactgccaatgtttgccctcaggcaaagaggaaacctgatttctttcccctgaccatgtctcagaatgtccagttccagccgttaagatctctcccctgctgcaatctgctaattaagaacatactctgtcacctctctcgctctccctcttcatcttcctctccctttccctcttttcccctctctccacctcatttcttaatttttccctcctactctt

SEQ ID NO: 650739 - DNA, 593 bp, Homo sapiens
tgtgcacttgaaaggaaaaaaaaatggtgaatactagcattgtcaacaacatctgcccttttggtcattgaatgattgcctcactttttttccccacacattaaacacctattgttcacaatagaaatcacaatagmaaatgcaaagtctcctccattcatcacaagtaggtcaacatccaggatattgggggcatgaatggtagcccatgcattaggtttgggaattttttcctctcattccaaagattcatatcctaaaaaggaaacatgcaagaatgaaacaggggcatatactataatgaaataagatcatcataagaaatacaccatgcaggtgaagggaaaatgagaccactcatcagtaactgaaaggacaattctgagatctgggagatactctgggttcccctaacccgaggaaggagactgttcctttattaggccctgattttgctctctggaagcagcttcctaatttattcttttaggcccatggatctgcccctctggctagttctttgttttcccgttattatccttctcagctacttctgatataagcatggggtggcataccctctttgggagctg

SEQ ID NO: 650740 - DNA, 491 bp, Homo sapiens
taggactttgaccaaaagattcaggggtgcttgctcaggccggtctatcctgatttttcttccatttttttcatctgtgtagagaaaagacycagccgtgcggcacgttggccgctggacaccactggcctcctcatgtgccgggcagagtcctcctcactcctgggtggaccttgcttttatgcctccaggacgttgcatgtgctgttctcttcctttcaaatgccctcctcccctttgcgactcatccttccaggccagctcggtgacatctcaccacggcgggaatctggagctacctctcccagggtgagccttgccactccacacacgccggggccatcctcaactgctggctcacatgtttcacagatgtattttgcatttctcataggagacagggatgtgtcttgtgagttctggaagcccagtgccgcagcccacatgttcattcattaattcattaattcattaattcattaattcatgta

SEQ ID NO: 650741 - DNA, 384 bp, Homo sapiens
actttatttcagagtacagtgttaagtacatgccatgaattttggcgagtatgtttcggatcactgataatttctaaatagattttatttgtgcctttgttttctattttggccttagatttatttattactatgaggttattttttggctgtatgtattgatttataagacttctaaaaaacattctaattaatttctaattttattacgttaattcatttttaccttgtgagacaaattgagattttcctaggttgaccagtggataaagtgttagtaacatgagatttgggcattaaaatatattatttatatctaggrgacaattttcaatacattaactatcctaatgataatattcacattgtataatgtttgtcttg

SEQ ID NO: 650742 - DNA, 489 bp, Homo sapiens
tgattgattgacaaaaatgttgttaccagaggctcacaggaacgtaccctgtatttacactgggaccaatgggataggatgtgctaattcagtgttcatggacacttatagaacataactaccatgaatcagattcaactgtgtgtgttctttttttttttcatcattatagtcctccctaaaatgaaggggattctgtaagagcagggctttgtctataccaagaatgtagcagatgcccagtagtaatcctacattattatatcaattgaccttctcaaaaattcaatgttgtaggggctactgcgtgcattctacattaaagaagcatatatctagcaggtcaacacctgctcaagatcaaacaatggtaattgtcagtgctaaggtgtgaaaccaggtactggtttgatttcctaaccattccagtactgttgaaggtgaarttggtagataagctatatggctggtgaatgaaataaaggaagg

SEQ ID NO: 650743 - DNA, 650 bp, Homo sapiens
tgcttgtaatgtcctaactcagatatcacaatttttggtgatgactattactggtatcagcaacttgagcctagaatagaatgtgtggtatgatttttggatatactattatataggataaataagattatatattataattacataatgtataattatatacaaatccatatatacacagatatatgtgtatatgcatgtatrtgtgtatccatgcatacatatatgtacatagtatagtgggtgtgtgtgtgaatatagatgtagatgtagacttaatatttgtcttctttaagtcttgaaactagaaaagtgtggcataagggagatgtggaagaagattcttattgtagagtcccataaaacaatagcaaaaccacaaccagaacttaaaggaaatttgtatcagtatattcctatattagaaagaaaaagtatctccaatccatgaccttagcttctatcttgataaactaaaaaaaaacagagcaaatcaaacacaaagtaagcagaaaaataattaataaaattcacagttgaaatcaacagaataaaaagcagaaaaacaataaagaaaattaatgaaactaaaagctgattctttaagaaaagcaatacaactgataaaattccagtcagattgattggca

SEQ ID NO: 650744 - DNA, 627 bp, Homo sapiens
atatacatattgatttggaatttttagtctttttcatctagataacctcaaagggcatataagtctatatccatatctatctatccatctatctatctatctatctatctacaccaatagatttactcaaattccagtttctcagtgaagtatttcctgaaaaytctctataaaatagtagccccttacactctcccaaccccacattttcattattttccttccttgttctgttttactccacattatgtataacaaaatgtaatatagtataactagtgtactacatgttttatttctttattttcacagttatctccactgccacacacactagcgtataaaagaatatgtaagtttttgggtctagtgcactaggttttaatgacaggttactaactgttactaactgagggacctggagcaagttaggtaacccctctgttcctcaggatccatgtgaataataacactacctacctcgtagagctgttataaagtttaaattagttaatatatacaaaagtgcttagcacatagtaagtactatggaaatgttacctttaataatcaatctcacaaaggtagaaatttgtttttcaatggtatatcccatgaacctataac

SEQ ID NO: 650745 - DNA, 627 bp, Homo sapiens
atatacatattgatttggaatttttagtctttttcatctagataacctcaaagggcatataagtctatatccatatctatctatccatctatctatctatctatctatctacaccaatagatttactcaaattccagtttctcagtgaagtatttcctgaaaactctmtataaaatagtagccccttacactctcccaaccccacattttcattattttccttccttgttctgttttactccacattatgtataacaaaatgtaatatagtataactagtgtactacatgttttatttctttattttcacagttatctccactgccacacacactagcgtataaaagaatatgtaagtttttgggtctagtgcactaggttttaatgacaggttactaactgttactaactgagggacctggagcaagttaggtaacccctctgttcctcaggatccatgtgaataataacactacctacctcgtagagctgttataaagtttaaattagttaatatatacaaaagtgcttagcacatagtaagtactatggaaatgttacctttaataatcaatctcacaaaggtagaaatttgtttttcaatggtatatcccatgaacctataac

SEQ ID NO: 650746 - DNA, 627 bp, Homo sapiens
atatacatattgatttggaatttttagtctttttcatctagataacctcaaagggcatataagtctatatccatatctatctatccatctatctatctatctatctatctacaccaatagatttactcaaattccagtttctcagtgaagtatttcctgaaaactctctataaaatagtagccccttacactctcccaaccccacattttcattattttccttccttgttctgttttactccacattatgtataacaaaatgtaatatagtataactagtgtactacatgttttatttctttattttcacagttatctccactgccacacacactagcgtataaaagaatatgtaagtttttgggtctagtgcactaggttttaatgacaggttactaactgttactaactgagggacctggagcaagttaggtaacccctctgttcctcaggatccatgtgaataataacactacctacctcgtagrgctgttataaagtttaaattagttaatatatacaaaagtgcttagcacatagtaagtactatggaaatgttacctttaataatcaatctcacaaaggtagaaatttgtttttcaatggtatatcccatgaacctataac

SEQ ID NO: 650747 - DNA, 548 bp, Homo sapiens
agatgcttatctttctgtttagtaagatagcacttttttatattatttatctaaaatctgtttggaaataaactacaaagaaagagaaatagactttcacttaggctatattaacagaaatttgataaagattaaaacacatatgtcagaaggccatttctaacaacttggtttcttgaattatgataaaatatctaaagaatacataaaatccttagactatatttaaaccttatagtgatttatttttaggttgtaaaattacaggcatactcatgagaagctatagagactcagtattagaaggtgtccttggtccattcattcatcgattcctttctttatcaacragtatgtattaagttctactaacagtgaggtggcacgaagcattctggggattcagcagtgagcacaaggattagatctcttcccttggaaggggagatgacaagacagaaaaagcaagtagattaatagagaatatggaagatagttacaaactgcactaagtgcaggaaaggaaataaacaacatgggcacacagt

SEQ ID NO: 650748 - DNA, 604 bp, Homo sapiens
ccttcaggtgcacaaaatgcaagagtcgaggcctgggagctccacccagactttagagggtgtatggaaaagcctggatgtccaggaagaagmctgctgcaggggtagaggcctcctggacaacctctactaggacagtgtggaggggaaaatgtggggttggagccccatacagcagcctcactggggcactgcttagtggagctgtgagaagagggccacatcctccagaccccagaatggtagatccactgacagtttgcactacacatctgaaaaagtcacaggcacttaataccagactgtaaaagcagttatggggatggaaccctgcaaagccacaaggatagagctgcccaaggcctgggaagcccacctttcatatcagtttgtcctggattttggacatggagtcaaaggagattattttggagctttaatgtttaatgactgctctgctgggtttcagacttgcatgggacttgtagcccctttcttttagccaatttcactcttttggaatgggagtatttacccaatgcctataccccccattgtatcttaggagtaactaacttgttttttattttacaggcttataggt

SEQ ID NO: 650749 - DNA, 604 bp, Homo sapiens
ccttcaggtgcacaaaatgcaagagtcgaggcctgggagctccacccagactttagagggtgtatggaaaagcctggatgtccaggaagaagacygctgcaggggtagaggcctcctggacaacctctactaggacagtgtggaggggaaaatgtggggttggagccccatacagcagcctcactggggcactgcttagtggagctgtgagaagagggccacatcctccagaccccagaatggtagatccactgacagtttgcactacacatctgaaaaagtcacaggcacttaataccagactgtaaaagcagttatggggatggaaccctgcaaagccacaaggatagagctgcccaaggcctgggaagcccacctttcatatcagtttgtcctggattttggacatggagtcaaaggagattattttggagctttaatgtttaatgactgctctgctgggtttcagacttgcatgggacttgtagcccctttcttttagccaatttcactcttttggaatgggagtatttacccaatgcctataccccccattgtatcttaggagtaactaacttgttttttattttacaggcttataggt

SEQ ID NO: 650750 - DNA, 595 bp, Homo sapiens
gagtccccaaagtccactgtatcattcttatgcctttgcatctkcatagcttagctcccacttaagagtgagaacatgcaatgtttggttttccattcctgagatacttcacttagaataatagtctccaattccatccaggttattatgaatgccattaattcattcctttttatggctgagtagtattccatcacatatatgtatttatgcatatatatatatatacacatatgcatatatatatacatatacatacacacacacacacacacacacacacacacacacacacacataaatatataccacagtttattcactcattgattcacgggcatttaggctggttccacatttttgcaattgctaattgtgctgttataaacgtgcatgtgcaagtatcttttttgtgtaatgacttcttttcctctgggtagataaccagtaagattgctggatcaaatggtagttctacttttatgaattgtccttgtttttctttaaaagttaatacttttgatcactatagtttgttagtgttggattgtttccactttgaaatttctaaactttttcccttcataatgttaaa

SEQ ID NO: 650751 - DNA, 595 bp, Homo sapiens
gagtccccaaagtccactgtatcattcttatgcctttgcatcttcatagcttagctcccacttaagagtgagaacatgcaatgtttggttttccattcctgagatacttcacttagaataatagtctccaatyccatccaggttattatgaatgccattaattcattcctttttatggctgagtagtattccatcacatatatgtatttatgcatatatatatatatacacatatgcatatatatatacatatacatacacacacacacacacacacacacacacacacacacacacataaatatataccacagtttattcactcattgattcacgggcatttaggctggttccacatttttgcaattgctaattgtgctgttataaacgtgcatgtgcaagtatcttttttgtgtaatgacttcttttcctctgggtagataaccagtaagattgctggatcaaatggtagttctacttttatgaattgtccttgtttttctttaaaagttaatacttttgatcactatagtttgttagtgttggattgtttccactttgaaatttctaaactttttcccttcataatgttaaa

SEQ ID NO: 650752 - DNA, 596 bp, Homo sapiens
gaacgcactaatcagtgctctgtgtctagctaatctggtggggacttggagaacttttgtgtctagctaaaggattgtaaacagaccaagcagctctctgtaaaatgaacccatcagctctctatgaaatggaccgatcatcaggatgtgggtggggtgagataagggaataaaagcagctgccagagccagcaacagcaacgtgctagggtccctttccacagtgtggaggctttgttcttttgctctttgcagtcttgctgctgctcactgtttggctctgcgcagagctgtaacactcaccragaaggtctgcagcttcacccaaagatattccaaagatacagaaaactatatagagacattttgtatagttctaatagcatataatccacaggtccctgatctataatatgggttttttataaaattgtttttttgtatgctatgaggaattttacttgttaaaaagaagaggtggaaaggcagaatatgaaaactatgaaaatgacataagagactatgaattaggtgagaaaccagagaggtttagaaacctgtagacattgtgcatcccccaatgcctttccccttaa

SEQ ID NO: 650753 - DNA, 632 bp, Homo sapiens
catggcacatgtatacatatgtaacaaacctgcaagttgtgcacatgtgccctagaacttaaagtattaaaaaaaaatacacttaagaaatgtgctcagaacacttacattagccagtccaaaaaaaaaatctaacctaaagcctatttttaaataaagtgttgaatatcacatgtaaattattaaatactgaatgtgaaaaacggaatgggtatatgggtaataaaagcattgtttctactgaatgtttatcacttttgtaccatgatraagctgtaaagttgtaccattgtaaatctgggaccatctgtgttacattcaagagaaaagctcagtcgaactaataaataaatcaaaatttcttctgattatttaggtgttttttcctgttagataattaagacatccaactgttgcttgctgcttcaccacacagaccatacacagatacaaatacacactccatgaatgagcgtatgtgcttgtttaaagagacatactaaccaaacagttgtatgctgccgtgatattgattatgtcatcaagttccttatttaacaaaacagagctgtgtatgaagtatttctctaaaatgtacattcaatagcaactggttttgttcagtcttatgt

SEQ ID NO: 650754 - DNA, 632 bp, Homo sapiens
catggcacatgtatacatatgtaacaaacctgcaagttgtgcacatgtgccctagaacttaaagtattaaaaaaaaatacacttaagaaatgtgctcagaacacttacattagccagtccaaaaaaaaaatctaacctaaagcctatttttaaataaagtgttgaatatcacatgtaaattattaaatactgaatgtgaaaaacggaatgggtatatgggtaataaaagcattgtttctactgaatgtttatcacttttgtaccatgatgaagctgtaaagttgtaccattgtaaatctgggaccatctgtgttacattcaagagaaaagctcagtcgaactaataaataaatcaaaatttcttctgattatttaggtgttttttcctgttagataattaagacatccaactgttgcttgctgcttcaccacacagaccatacacagatacaaatacacactccatgaatgagcrtatgtgcttgtttaaagagacatactaaccaaacagttgtatgctgccgtgatattgattatgtcatcaagttccttatttaacaaaacagagctgtgtatgaagtatttctctaaaatgtacattcaatagcaactggttttgttcagtcttatgt

SEQ ID NO: 650755 - DNA, 547 bp, Homo sapiens
aattaggaatagtagctttataggtaaagtaattaaatgtaaccttaagcataaaaagataaagttaactaggaaaatgaaaactcaagatatacagattaaatatgacaaacaatggatctttttttgtggatcttggtttgcagataccgatatctcatatagtgattcacttgatccaaaggcatttgatggaagctgtcttctcccaaagactatttgcttttggaagaatcctaagagtcrttagttagaagtttttggtagggatactttcctgtaatatgaagatgacctaaacctctttacttgagagataggaatcaaaggatcagtcttttaaagactatgggtttgctagttgttagctgtgcctgatagtgacttttttcctatgatctttccctgccgtgtctcttagaagacaaggtatccaggtatgaaaaccaattttgcagacattgtttaggatactaatggggaaagtcttcagtaacttttgttgaaagaatggatttcctgagtccttacagcatttagttaaata

SEQ ID NO: 650756 - DNA, 542 bp, Homo sapiens
atagaggaattaggaatagtagctttataggtaaagtaattaaatgtaaccttaagcataaaaagataaagttaactaggaaaatgaaaactcaagatatacagattaaatatgacaaacaatggatctttttttgtggatcttggtttgcagataccgatatctcatatagtgattcacttgatccaaaggcatttgatggaagctgtcttctcccaaagactatttgcttttggaagaatcctaagagtcattagttagaagtttttggtagggatactttcctgtaayatgaagatgacctaaacctctttacttgagagataggaatcaaaggatcagtcttttaaagactatgggtttgctagttgttagctgtgcctgatagtgacttttttcctatgatctttccctgccgtgtctcttagaagacaaggtatccaggtatgaaaaccaattttgcagacattgtttaggatactaatggggaaagtcttcagtaacttttgttgaaagaatggatttcctgagtccttacagca

SEQ ID NO: 650757 - DNA, 542 bp, Homo sapiens
atagaggaattaggaatagtagctttataggtaaagtaattaaatgtaaccttaagcataaaaagataaagttaactaggaaaatgaaaactcaagatatacagattaaatatgacaaacaatggatctttttttgtggatcttggtttgcagataccgatatctcatatagtgattcacttgatccaaaggcatttgatggaagctgtcttctcccaaagactatttgcttttggaagaatcctaagagtcattagttagaagtttttggtagggatactttcctgtaatatgaagatgacctaaacctctttacttgagagataggaatcaaaggatcagtcttttaaagactatgggtttgctagttgttagctgtgcctgataktgacttttttcctatgatctttccctgccgtgtctcttagaagacaaggtatccaggtatgaaaaccaattttgcagacattgtttaggatactaatggggaaagtcttcagtaacttttgttgaaagaatggatttcctgagtccttacagca

SEQ ID NO: 650758 - DNA, 534 bp, Homo sapiens
gagtgctgtagtgccgttggctgtgagttcaatgttaatgaatgaacaatgtatattatttatttattcttcatttaattaattattattattattttttttgagatagagtctcactctgttgctcaggctggagtgcagtggtgcagtcttggctcactgcaacctctgcctcctgggttcaagcgattcccctgccttagcctcccaagtagctaagactacaggcatgcgccaccatgcctggctaatttttttttttttttttttttttgtagttttagtagagacggggtttcaccacgttggccaggctggtctcgaactccagacctcaaatgatctgcccgccttggcttcscaaagtgctgggattacaggcgttagccactgtgcctggccaacaatatatattaaataagcacacatacaacaaaagtaggtgttggtaagcttacaaaagtgtgaccagtagcttgctgaaacctaactttttatttgttcatggaactttctagaccgtaactacactga

SEQ ID NO: 650759 - DNA, 607 bp, Homo sapiens
ggctctctgttttggtctggagaccccagctggggtatctcctgagcccagggattcaaaggttcgtggcagaaatatgcatcccacgggactctcactcactcaccattttcttgtagggggattcccctgggtctgtgccactcctgggtgaatggytgatctgtctcactcttctccgtgatccgaaggtcacactatgtcactgatgaatccttatgtgtccacctggatgttccggttgaagagctagtgtctcaccactctttctgctatttgtgagagtggcacacactagctgcttctagtcaaccatcttggccccacctcactcacttttctcaagtaatcaaagacctagtaaaagagagcataaagcataagaaattaccttgataaacaaaaaatcttggtttattaggccagttatctaaaaggtagagaaaacatttcactattttctattaagagcaggtcaatactcaaagaaaagcttgttgtttcagcacaggggacaaatttcaagttttccattcctgtacttttgataataatgctcaagttttcagaatatttataaataatttccttttaactttagccaact

SEQ ID NO: 650760 - DNA, 627 bp, Homo sapiens
taaatgaagtgcaccaggcacagataagctagtccctggagtatgtccagatacaccwgaaagaagaatgactcaagctgggtgtgtaaagctacactttggaggatagagcttcccacaggtgcaatggaactctcacttctcacttgctcagaaattatgatctgcagtgtgagtctcccctggtaaggaaacgtgtccagctccttgaaacatgttctagagaacagcattcattaccctcccatgaacttaaacatgcttcttggctcctgtgcattttaggtaagtaagctttgatttccccaggtggtgtcggtgtctagtcttttcataaacttgcacttactattaacatggagaggacatccacaggccgagatacattgccatgtcttgcattaaaagcaaatgaacctgaagtttttttgtaaacaacttacgaagtttcatttgatttgatttgatttttaataattccctgaattgctgtgataattagagtagtgaattcatttctggtatgttttaaaagtaattcaaggaaaataattttgcagaatcctgatttagataatatgaagagtgaataggaaaatgatgaaattgttgctgctttttacagag

SEQ ID NO: 650761 - DNA, 518 bp, Homo sapiens
aatcagttcttcattattaagtttataaaataccagccagaggccaggcgcagtggctcacgcctataatcacagcattttgggaggctgaggcagatggatcacttgaggccaggagttcaagaccaacctagacaacatggtaaaatcctgtctctactaaaaatacaaaaaaattacaaaaaattagccaggcatggtagtgcctgcctgtagtcccagctacttgggtggctggggcatgagaattgcctgaacccagaagtcagaggttgcagtgagccgagatcatgtcactgcactccagcctggatgacagagagagaagctctcaaaaaaataaaaataaaaatacagccagagatcratttaactgttaactattatttgatgtaattagctacatacctatcatataattaaaattcagtattgagatggttgtcatagggacacttcaaaccagattaagtttattttaaaagtgaattgagagattttactttataaaaaaaaaa

SEQ ID NO: 650762 - DNA, 513 bp, Homo sapiens
gagatcaatttaactgttaactattatttgatgtaattagctacatacctatcatataattaaaattcagtattgagatggttgtcatagggacacttcaaaccagattaagtttattttaaaagtgaattgagagattttactttataaaaaaaaaaccaatttggttagtttgccatttaggcttctaattttgatctgaggcctgctaaccctggagaktacacaaagactttgtgaggcgtactgcggccaggcaaagacttttaaagaacaggtttccaggtgtcacattcgaatacttctttcatcattcttgctgtccctctttcatttcttctttttcaaaagaattcttctcccacaatgtttctttttttaaaagagaaaaatatatctccactttttttaactttaccttggtgctttgtccccaggtgttgaaatttccaggatgcaaaacgaaggggcaattcaaaacattcatctccacttctcaaaagtaagtcacct

SEQ ID NO: 650763 - DNA, 513 bp, Homo sapiens
gagatcaatttaactgttaactattatttgatgtaattagctacatacctatcatataattaaaattcagtattgagatggttgtcatagggacacttcaaaccagattaagtttattttaaaagtgaattgagagattttactttataaaaaaaaaaccaatttggttagtttgccatttaggcttctaattttgatctgaggcctgctaaccctggagattacacaaagactttgtgaggcgtactgcggccaggcaaagacttttaaagaacaggtttccaggtgtcacattcgaatacttctttcatcattcttgctgtccctctttcatttcttctttttcaaaagaattcttctcccacaatgtttctttttttaaaagagaaaaatatwtctccactttttttaactttaccttggtgctttgtccccaggtgttgaaatttccaggatgcaaaacgaaggggcaattcaaaacattcatctccacttctcaaaagtaagtcacct

SEQ ID NO: 650764 - DNA, 489 bp, Homo sapiens
agtaatgtattgactcaaatactttatgccttctatttcacattttttacaggtttataagtctagatacctatgtcaattagtgaattttctaccaagagttcatgttttgttgcttaaaggcagataatttttttatttaaataatattaaaaagaggaaaatatttcaaaatascaagattgggaggtgtctgggagatttatatgtattgcttttattaactatctagcactggatttataaaccagcttatttttttaatttaaaagctctctgccttgcaatttaattcacatgatctgcattaaccatgccatattcaaaatttcattgataaattctatccagtagtcaatatcgaattgtaaactgatgtaatgtgctttaaaatatgaagatttaatctttaaaatatgaatatttgattgaataattactaccactaaaatcatgtttacttattagaattatcatataagaattgtt

SEQ ID NO: 650765 - DNA, 489 bp, Homo sapiens
agtaatgtattgactcaaatactttatgccttctatttcacattttttacaggtttataagtctagatacctatgtcaattagtgaattttctaccaagagttcatgttttgttgcttaaaggcagataatttttttatttaaataatattaaaaagaggaaaatatttcaaaatagcaagattgggaggtgtctgggagatttatatgtattgcttttattaactrtctagcactggatttataaaccagcttatttttttaatttaaaagctctctgccttgcaatttaattcacatgatctgcattaaccatgccatattcaaaatttcattgataaattctatccagtagtcaatatcgaattgtaaactgatgtaatgtgctttaaaatatgaagatttaatctttaaaatatgaatatttgattgaataattactaccactaaaatcatgtttacttattagaattatcatataagaattgtt

SEQ ID NO: 650766 - DNA, 582 bp, Homo sapiens
ttgaattatgtgttaactcgtgagcattcaaattaatagagcatgctgtaccaaaatattgtcattattttggttattataaattatatatggccatgatcagtgctatagggcaagactatatcattttttacttctaggctaaaaggattatgttcctacacatgaattatgtaactttttaaaaaaaatagtgatatttttctattagaagttaaagcaattagttctttacaacattggctacgtactcaaatcaactgattcctgggtttcccctcaatccaagtaaattaggcagagagcaaaactaaggaacagtattttcaaagmggaccaggattgacaatgactggtattcaaatagctgtgaatttgtgcaaatgtagcagaagacagcaaagggttctggatatgccaattattatttatttatttttattatactttaagttctagggtacatgtgcacaatgtgcaggtttgttacatatgtatacatgtgccatgttggtgtgctgcagccattaactcgtcatttacattaggcacatctcctaatgctatccctgccccctcctc

SEQ ID NO: 650767 - DNA, 582 bp, Homo sapiens
ttgaattatgtgttaactcgtgagcattcaaattaatagagcatgctgtaccaaaatattgtcattattttggttattataaattatatatggccatgatcagtgctatagggcaagactatatcattttttacttctaggctaaaaggattatgttcctacacatgaattatgtaactttttaaaaaaaatagtgatatttttctattagaagttaaagcaattagttctttacaacattggctacgtactcaaatcaactgattcctgggtttcccctcaatccaagtaaattaggcagagagcaaaactaaggaacagtattttcaaagakgaccaggattgacaatgactggtattcaaatagctgtgaatttgtgcaaatgtagcagaagacagcaaagggttctggatatgccaattattatttatttatttttattatactttaagttctagggtacatgtgcacaatgtgcaggtttgttacatatgtatacatgtgccatgttggtgtgctgcagccattaactcgtcatttacattaggcacatctcctaatgctatccctgccccctcctc

SEQ ID NO: 650768 - DNA, 533 bp, Homo sapiens
gaatcgatattgtagattcaattactgaatattttaaaatgtaattgccagtaacataaaaccagaattgacatactgcttcccttgggctaaatacaatccatcacctattttttaaataaattcttattggaacgcagccacattttcttattgtccatggttgcttttgcagaacatgggagaactgagtacttcctacagagacaatatggctcacaaaataaaaatatttactatctggccctttgcttaaaaaaaaattaatgagttttgacctatcccctttcacatcttcatttttctctctctctttctccctctctctctctctccctcggttgcttttggttttgtcctttttagaagcacattgcaacctcttctctagatgaacycaactatctgatttctgcatatttctcagtccatgactgctgctgaagaatgccatgcaagaaaacaaactgataatattttaagacaatgatcaccattggaaaccgggttttcaattgtgcctgacataactt

SEQ ID NO: 650769 - DNA, 533 bp, Homo sapiens
gaatcgatattgtagattcaattactgaatattttaaaatgtaattgccagtaacataaaaccagaattgacatactgcttcccttgggctaaatacaatccatcacctattttttaaataaattcttattggaacgcagccacattttcttattgtccatggttgcttttgcagaacatgggagaactgagtacttcctacagagacaatatggctcacaaaataaaaatatttactatctggccctttgcttaaaaaaaaattaatgagttttgacctatcccctttcacatcttcatttttctctctctctttctccctctctctctctctccctcggttgcttttggttttgtcctttttagaagcacattgcaacctcttctctagatgaactcaactatctgatttctgcatatttctcagtccatgactgctgctgaagaatgccatgcaagaaaacaaactgataatattttaagacratgatcaccattggaaaccgggttttcaattgtgcctgacataactt

SEQ ID NO: 650770 - DNA, 610 bp, Homo sapiens
tttagcttttgtctgcatcctctagacctttgggggtacgcatgtgtgatgtcctcaactgttggaaactatttgaaaaattcaggccaggtgtggtggctcacgtctataatcccaacactttgggaggccaaggtgggcagatcacttgagctcaggagttcaagaccaggctgggcaacatggtgaaacctcatctctttaaaaattcaaaaaattagctaggtgtggtggcacgtgcctgtggtcccggctactcggraggctgaggtgggaggatcgcttgagcctgggaggcagaggatgcagtgaacagagatcgtaccactacactccagcctgggtgacagagtgagaccccatctcaaaaaaaaaaaaaaaattgaattatgtaaatgggtttacaagggttatctttcctttgcagacccagaagtccacattcccctcgagaatctacagcagtttcctgccttcaattcttatacctgctcctctgattctgctttgggtcccaccagcaccgagggccatggggccctctccatttctcctctcagcagaagtccaggttcccatgcaggtaaacaggtgaaatttaatgaattca

SEQ ID NO: 650771 - DNA, 610 bp, Homo sapiens
tttagcttttgtctgcatcctctagacctttgggggtacgcatgtgtgatgtcctcaactgttggaaactatttgaaaaattcaggccaggtgtggtggctcacgtctataatcccaacactttgggaggccaaggtgggcagatcacttgagctcaggagttcaagaccaggctgggcaacatggtgaaacctcatctctttaaaaattcaaaaaattagctaggtgtggtggcacgtgcctgtggtcccggctactcggaaggctgaggtgggaggatcgcttgagcctgggaggcagaggatgcagtgaacagagatcgtaccactacactccagcctgggtgacagagtgagaccccatctcaaaaaaaaaaaaaaaattgaattmtgtaaatgggtttacaagggttatctttcctttgcagacccagaagtccacattcccctcgagaatctacagcagtttcctgccttcaattcttatacctgctcctctgattctgctttgggtcccaccagcaccgagggccatggggccctctccatttctcctctcagcagaagtccaggttcccatgcaggtaaacaggtgaaatttaatgaattca

SEQ ID NO: 650772 - DNA, 534 bp, Homo sapiens
tctctagaagacaaatccagggaaaatgtatcactctcatggcaaacacaatcatctgcttctactggtaccaggaagaatgtcttccaaacaccaaggagggaggggtcaaggagaccactggcttattaattttcatccttcattccactgaatcccagaaccaccggacastgccactgaggatcctgaaagccaagctctacctctttgaggaaaaatttcttgtcacttaccaccctaaagcaatgagaatgagagtgtcctgtggccccagacagcctccattctcagtttacaccataaacatgctgggggaacactaaagggactccctaaaatcgatgccattattttttattttgaaaattttctaccagaaatggaccaggtgctgtggctcatgtctgtaatcccaacactgctggacaccaaggcaggcagttcacttgaggtcaggagttcgagaacagcctggcctacataatgaaacgatgtctctactaaatacaaaaaaattaagaatcatttgac

SEQ ID NO: 650773 - DNA, 535 bp, Homo sapiens
cctgaatgggcatatgatctaccatgttaggtagcataaaacccaggtgcccagtggatacacagagatttttattgtgttttttagggatgacatccctgtcttcttaaagctgctttaatgctgaaatgttttgatacttttgatgtggccaaagattctccaataaagatatatatatattctaatgtcagaaacagattaaatccttccctgtatcactatgaaggtcacatattagtcaaactttaccagtgtttgtggaataagtgaataaatgagttttagaccttcatcctgttattacttctttcactttcataaatgcctatctaatttaatcacttcatgagaagaaaattgaaaactcaatcagggttaactgggtggaagttcacgatccagttggatgtcgttttcgaattgraagttggtagtcaagaagggggttgtagtgagaaaggtcaataaaagctcctgaaggtgcacagaagagacccaaagccctggctcctggagctactgcttgattctc

SEQ ID NO: 650774 - DNA, 407 bp, Homo sapiens
gaggaactgagtggtgaactgggtaacaatctccttcttctgctctggggaaacgtagcgagagacatccatgtgggagagaacgagcttctgaagattcctcatgtggcccaggtatggggtaaactgtgtcaggatgggcagtacccacttgcaattcacttccacctcctggatacagtctaggttcaccattttcaggatgcttctgatattgcggaagggcattcccaaaattttcagcttcttacagcacaggtgtagtaaatctttcctctgcttgacccatagaaggaggcaggtgaggtrttcatccagagtcctgttcttgagccaaagttctacgaacacagtcaagggctgccgtcctctcatccttggacagtcctgcactggttttttgttcc

SEQ ID NO: 650775 - DNA, 411 bp, Homo sapiens
gcattcccaaaattttcagcttcttacagcacaggtgtagtaaatctttcctctgcttgacccatagaaggaggcaggtgaggtgttcatccagagtcctgttcttgagccaaagttctacgaacacagtcaagggctgccgtcctctcatccttggacagtcctgcactggttttttgttcctcttggcattgaggaagcacccaygggccatagcttcagaccaaaccatccagaagttctcacagacatcctgtaaatccagcacttgaagtttccacctcctgtgggaaaatagaggtgagactgagaatttcagaactcatttctgaacttaaactccacatcctggatagcagctcctcccctccctgcttcttgtccctgtctctgacatttctccaccctgtt

SEQ ID NO: 650776 - DNA, 553 bp, Homo sapiens
tgcagcctcaatcttctgggctaaagtgattctcccacaccagtcacccaaatagctgggactacagatgcatgccaccatgcccggctaattaaaaaaaaaaaaagtagaggccgagcaccagtggctcacggctctaatcccagcagtttgggaggccaaggcaggtggatcacttgaggtcaggtgttggagaccaacctggccagcacggtgaaacacccgctctactaaaaatgcaaaaattagccaggcatggtggcagatggctgacaccagcttctgaggatggagactgaggcatgagaattgcttgaacctggaaggtaaaggttgcagtgagttgagatcgtgccactgcactccagtctgggcaacacagtgagactccatccccgtcctcacaaaaaaaataacgttgtgtagaggagggtttctgycatgttgcccaggttggtctcaaacccctgggctgaaatgatcctcccactttggcctcccaaagtgttggggttaaaggcatgagtcactgctcccttcaagaattttgaaa

SEQ ID NO: 650777 - DNA, 334 bp, Homo sapiens
taccagtaatgaaatcaataatagtcatagaccactcatttgcacctatagcttcttctcaatgccaagtcatttaattatcaatattaaccaacctaccaaaggaaggataacaaatcttatcatgaayttagcatcctcaattgctacccaactgtgtacgaaagcaggttgtagtattaagtgtgatccttccctttcatctaaatgactccatagccagcaattgctttggttagtgagagtggctacattttgaacagaagatcttagaaagtgtttggtttgagtggtgaaagtacctaacaacataaaatataggtttgataatttt

SEQ ID NO: 650778 - DNA, 658 bp, Homo sapiens
ttcattcatttaaggccagctgagttggctcatgcctgtaatcccagcactttgggaggccaagacaggcggatcacctgaggtcaggagttcaagacaagcttgrccaatatggtgaaaccctgtctctacaaaaatacaaaattagccgggcatgatggcggctgcctgtaatccggatacttgggaggctgaggtgggagaattgcttgaacccaggaggctgaggttgcagtgaaccgagattgcacactgccctccagactgggtgacagagggagactctgtcaacaacaacaacaacaacaacaacaacaacaacagaatgccttcattcacgaactccacaagcactgatggaattttactgatatgtcaccttcatagccctgggtgtgaggcagggaaggggttgatctgttctggacattagacagaaaaataaaacctgagaatagtgttgttgggagatctttggccacatcaatattttaaaaatgctttatagttaaaatagcttcctgaccttccttaacctgaactgcttggttccctagaagcagaaattgatcatattagaacccaaactcataccaaccttgaccttcatgaagtactcaagtgtttctgctcttcttcctcatgtgatgtagaaagt

SEQ ID NO: 650779 - DNA, 566 bp, Homo sapiens
acgtgtgtgtgtgtggcatcagaactattgactcctcctattgaygtttaagatattccattacacaaacctgggctcatactttttgttgttagatcttatgccaaaaatgtaggcaaaaaatgccaagcaggaaatgctatcacttctgaagatgaattcatagagatggaaattctttcagaatttatttttccagcttttttctttgtttgtttgttcgtttgtgtttgtttgttttgagacggagtctcgctctgtcaccaagttggagtgcagtggtgaaatcttggctgactgcaacctcctcctcctgagttcaagcgactctcatgcctcagtctctcgagtagctaggactatgggtgggcgccaccatgctcagctaatttttgtatttttagcagagacagggtttcaccatgtcggctaggatggtctcaattttttggcatcgtgatctacctgccttggcctcctgaagtgctgggattagaggtgtgagccaccaccgtgcccggcctttttttttttttttccttttgagatggagtctcactctattg

SEQ ID NO: 650780 - DNA, 566 bp, Homo sapiens
acgtgtgtgtgtgtggcatcagaactattgactcctcctattgacgtttaagatattccattacacaaacctgggytcatactttttgttgttagatcttatgccaaaaatgtaggcaaaaaatgccaagcaggaaatgctatcacttctgaagatgaattcatagagatggaaattctttcagaatttatttttccagcttttttctttgtttgtttgttcgtttgtgtttgtttgttttgagacggagtctcgctctgtcaccaagttggagtgcagtggtgaaatcttggctgactgcaacctcctcctcctgagttcaagcgactctcatgcctcagtctctcgagtagctaggactatgggtgggcgccaccatgctcagctaatttttgtatttttagcagagacagggtttcaccatgtcggctaggatggtctcaattttttggcatcgtgatctacctgccttggcctcctgaagtgctgggattagaggtgtgagccaccaccgtgcccggcctttttttttttttttccttttgagatggagtctcactctattg

SEQ ID NO: 650781 - DNA, 566 bp, Homo sapiens
acgtgtgtgtgtgtggcatcagaactattgactcctcctattgacgtttaagatattccattacacaaacctgggctcatactttttgttgwtagatcttatgccaaaaatgtaggcaaaaaatgccaagcaggaaatgctatcacttctgaagatgaattcatagagatggaaattctttcagaatttatttttccagcttttttctttgtttgtttgttcgtttgtgtttgtttgttttgagacggagtctcgctctgtcaccaagttggagtgcagtggtgaaatcttggctgactgcaacctcctcctcctgagttcaagcgactctcatgcctcagtctctcgagtagctaggactatgggtgggcgccaccatgctcagctaatttttgtatttttagcagagacagggtttcaccatgtcggctaggatggtctcaattttttggcatcgtgatctacctgccttggcctcctgaagtgctgggattagaggtgtgagccaccaccgtgcccggcctttttttttttttttccttttgagatggagtctcactctattg

SEQ ID NO: 650782 - DNA, 566 bp, Homo sapiens
acgtgtgtgtgtgtggcatcagaactattgactcctcctattgacgtttaagatattccattacacaaacctgggctcatactttttgttgttagatcttatgccaaaaatgtaggcaaaaaatgccaagcaggaaatgctatcacttctgaagatgaattcatasagatggaaattctttcagaatttatttttccagcttttttctttgtttgtttgttcgtttgtgtttgtttgttttgagacggagtctcgctctgtcaccaagttggagtgcagtggtgaaatcttggctgactgcaacctcctcctcctgagttcaagcgactctcatgcctcagtctctcgagtagctaggactatgggtgggcgccaccatgctcagctaatttttgtatttttagcagagacagggtttcaccatgtcggctaggatggtctcaattttttggcatcgtgatctacctgccttggcctcctgaagtgctgggattagaggtgtgagccaccaccgtgcccggcctttttttttttttttccttttgagatggagtctcactctattg

SEQ ID NO: 650783 - DNA, 557 bp, Homo sapiens
tcagaattcctctggctgtgaaaaagactttgtggagacctgggactatcatacttctggttagtgaaatatatctgctctctttggggtgtttattttcgcatgtacttattcagcctctgaagtttcttcacttccaagaaaggcaaagcatgtctatactctgcaaagaagtgcagattaatgggctttgggcagtaccagygattctctacctcaattctaccattaacaatggatgtccagagcccaggtgtcatatagcctaccctggaggccacctggggagagcaacggtagtgggaaggcaacctgttgctgctgagacatcccattgccagatgccgttatttgaggggtgttctatagcttgaggcagaaagagggtcatgcatgtctcctggcagtagcataaggcagatatttgtcactctgttgtctcaaaccactttttcaaccaaaaaactggccttcctcattatcctgagatatccttcccctaactggttgcatttttttcacttcttcatatatttgaatatgttaattttcattca

SEQ ID NO: 650784 - DNA, 591 bp, Homo sapiens
tttagagtgcttgacctaacccttgcctggcatggccttaggtcttgtttataattgrtatctcattgccacaaaaagtctgttctgccagtcttatgatctctattttaacattaatgctggtcagtcgctgtgtctaaaccacaaacatgagggggtataatgagacatgtctgacctcccatcccatcatggccaggaactcaattgtaagatttttctggggtccccttggctaaggggagtgtccttcagttggtgggggcttaggatttcatttttagtttacaatttctgcaaagggaaaggctgctgataaaccttaaacttcctgcacttgtgtttcaaagcaataaatcagacctcttaagtactaatggagttgtatacaatttgtatggtggccagtttcccttctagcctgaaagccctgtgaagacagagttcttggcttttttattccttaacagttttcttactcccaaattagcatgtagcagcaggtacacagatgagaatctctttctttgttccccacagtttctaccttgaacaattctccctgccaacatgcagcatcatcctgtagcc

SEQ ID NO: 650785 - DNA, 591 bp, Homo sapiens
tttagagtgcttgacctaacccttgcctggcatggccttaggtcttgtttataattgatatctcattgccacaaaaagtctgttctgccagtcttatgatctctattttaacattaatgctggtcagtcgctgtgtctaaaccacaaacatgagggggtataatgagacatgtctgacctcccatcccatcatggccaggaactcaattgtaagatttttctggggtccccttggctaaggggagtgtccttcagttggtgggggcttaggatttcatttttagtttacaatttctgcaaagggaaaggctgctgataaaccttaaacttcctgcacttgtgtttcaaagcaataaatcagacctcttaagtactaatggagttgtatacaatttgtatggtggccagtttcccttctagcctgaaagccctgtgaagacagagttcttggcttttttattccttaacagttttcttactcccaaattagcatgtagcagcagstacacagatgagaatctctttctttgttccccacagtttctaccttgaacaattctccctgccaacatgcagcatcatcctgtagcc

SEQ ID NO: 650786 - DNA, 418 bp, Homo sapiens
ttgacgtcacagcgttgccatttgcctactgctgcttggatacagaatgcagcacttaacccttgtcctgcggggagggagtgattgagttgggtgctgtagttctggattacacaaccttttctttcttccttatctttrcttctgtctttgcttttttccttgttatttgcttttgatagaggagaaaaaggattatgattaagcattttgctgtggttttgtgtgttttgcttgttttaacagctctgtagcctgatttcctttaactgtttagtgcctgataggaaagttgggcttttaaatgtatggacagggcaacaaggctaattcctgcagttgtgtacccactccctccctggccccctcctaccacatatacttcttttcaataatactgtttttcagtggcttttct

SEQ ID NO: 650787 - DNA, 554 bp, Homo sapiens
tgtgtatggagggggtgggggtgaatgggatgggaggaggcagggaaggcttaaaaataacatttaaactgggtcctgaggaatgagtgggagtttaccagaaagagaaaagtcatcccagaacatacaaaggtaaaggaatggtgtgaaggacataataaattagaaaaactacaggaagtttggtgttgggaacacggggataggaggaataaaagagagaggaataacatgaagcaagagttggactagatccagattgcaaaacactttgctatggamaaggaagaatctagtggctagagggtctattgggggctataaactgaactaccacagagtctcaatgaagccaaattaacgaaactttatgtatattatccccaaatgcggtgagggagtatttaaatgtaagacattcaaaatattgcccattttagtaacattcttcaaagaccattggtttgacactgaaggagaaaaaaattgaaaaagtcatgattttactttcaataaagggctcccatgtagctaggaatacaggtgcatgcacc

SEQ ID NO: 650788 - DNA, 594 bp, Homo sapiens
tgtactttctgggaactttaacaggtctttgaacatacagagtaaaagcaaaggattcacatattgatcccttgctgttacaaattcaatggtaggaaatctgccatctgccttagtttcaggtatctgacgtcttagggatgagtaagacagcttggaacaattgsaaatgaaataagacccccaattccactttgctatcaaggagctgtaagaaatgggagttcaaggactttactttcaatgtttctaattttttgtaacattctagtatctatgccattttgaatcttaagttatactataggaatttatgaaaacttttagtctaaaagacattgctaacatgatcaagggcttaaaaccaagcacatttccaagaaatccaagctatttctaaaggaatagtctactgaattgttgaaataaaacaactagaaaagtaattaaattaacaggattttaactttggagtttaaccttaattttttttaagtttaaaattgaatgatgtattgggttaggataggtttgcaaagagcaccgattgaaaaatacccaggtttgggggaggagccaagatggccgaatagg

SEQ ID NO: 650789 - DNA, 594 bp, Homo sapiens
tgtactttctgggaactttaacaggtctttgaacatacagagtaaaagcaaaggattcacatattgatcccttgctgttacaaattcaatggtaggaaatctgccatctgccttagtttcaggtatctgacgtcttagggatgagtaagacagcttggaacaattggaaatgaaataagacccccaattccactttgctatcaaggagctgtaagaaatgggagttcaaggactttaytttcaatgtttctaattttttgtaacattctagtatctatgccattttgaatcttaagttatactataggaatttatgaaaacttttagtctaaaagacattgctaacatgatcaagggcttaaaaccaagcacatttccaagaaatccaagctatttctaaaggaatagtctactgaattgttgaaataaaacaactagaaaagtaattaaattaacaggattttaactttggagtttaaccttaattttttttaagtttaaaattgaatgatgtattgggttaggataggtttgcaaagagcaccgattgaaaaatacccaggtttgggggaggagccaagatggccgaatagg

SEQ ID NO: 650790 - DNA, 656 bp, Homo sapiens
ccactgacctttttaagtggctttgtccatctctgggatttgtctgcatgtatgcatrtgacggtatttaggttaggcctttgggctgtttgcagcatttgaggacagatcaggggttgctgatcccttgaagtaattctctgctcacccaccctcgccaccacacacgttcatgacccaaggcctctgggtctgtgttccttgctgttgccccttcccttgtgtgagttttttcactgccaaggccaagaggctgcactgccagaaacagtttccagctcacactcgacatagtggttgcatttgttttctctgttttatgagctgggatggagtgggtggtgggcagcctgctggcagacttttgcaggctttacatgtttatacttgctgtggggggaaggcaaagagttggctggactttcagaaaactggagctgaggcatttaatagaaccagattcctatagccctttttgctattatatattttctctgtcaacagacactaaactagtaataatagttaacatttatggagaagttaccatgttccaaatatgatggtaagtattttacatgcatgcttctagctgttttgtgaggtggtcctattatttataaccattttgctgatggaacaactgagaccgggag

SEQ ID NO: 650791 - DNA, 399 bp, Homo sapiens
aattatataggcacaaaattgtaactaaactgatggtataattttaggtctgattcctcagctgtgtagacttagcatctacttatctgttatatctgctatctacctattatctacttgtctattatcatatttttatcatatatatgcatttattgagactcagttgtagaagaaaaatgaacacatatactmccttgccaattggatatacaattacgtataaaacattatttcttcacatcttgttttatgaactagaataaaagtttcctagatttaaagaatgcaatttttttctcgaaagaatctgtaattagtagtaatttttttaaaatttatttgttttgtattgatttacaatgacaagcaaatagattgctttatcaattttggaaa

SEQ ID NO: 650792 - DNA, 581 bp, Homo sapiens
atgaaacaagtagggctaagatgctttacctgagcaatcaccycagacatgctcctcactgggtttgactccttttatggagagctgggtgtcagctcagtaaagtctacagacaagcatctctttgggtccctatcacctgcacaggtctcaggactctgagacaaatttctgagtagatgtcaatgaggacaagtcatgaggagatggattacagctgaatataagaagatctttctaagaattagagctggccaaagatggaataaactgctgtggagagctgtctaccacaagagatgttcaagaagagagaaaatatggtacctcttgactagaatgttgtaaacatcagatccagcatgggatggacagaaagactagatgaattttaaagttcccgccaatgcataagtcaacaaagaggaaaatttcagccactccttaattaattaaaagagatagcaaaaaaagtctgtgggtggggtcagctttcaactgatcctatctcttcaaaggaaaaaagaacatagaaacacactccaactcaccatcagcctctcctatagaatgttctaaag

SEQ ID NO: 650793 - DNA, 581 bp, Homo sapiens
atgaaacaagtagggctaagatgctttacctgagcaatcaccccagacatgctcctcactgggtttgactccttttatggagagctgggtgtcagctcagtaaagtctacagacaagcatctctttgggtccctatcacctgcacaggtctcaggactctgagacaaatttctgagtagatgtcaatgaggacaagtcatgaggagayggattacagctgaatataagaagatctttctaagaattagagctggccaaagatggaataaactgctgtggagagctgtctaccacaagagatgttcaagaagagagaaaatatggtacctcttgactagaatgttgtaaacatcagatccagcatgggatggacagaaagactagatgaattttaaagttcccgccaatgcataagtcaacaaagaggaaaatttcagccactccttaattaattaaaagagatagcaaaaaaagtctgtgggtggggtcagctttcaactgatcctatctcttcaaaggaaaaaagaacatagaaacacactccaactcaccatcagcctctcctatagaatgttctaaag

SEQ ID NO: 650794 - DNA, 609 bp, Homo sapiens
agacaaggagaccagctaagctaaggatattcgttgtaacactgtaatagcaaaaccttgaaaacaacataaatgcccacccttagaggaatggatgaataatgtatggtatatttataaaatgaaatgcaacacagtaattgaaaagactatagctatttatgtcaatagggataaatcttaaaaactaaatgacagtgaaaataatcrcagagggagacaaagtataccatttatgtatatttttttcaagacaatactacacattatctgtggatgcatatatatagatatagatattaagagactataaccagaatagtagttacttccagggcaggagagtagggggtgtgatcaaacctgggtacaagtgggcttctaagaaaagagctaaaagtaagaacaacaacaatagttgtatggacatatcattccgggaaagagccctcgtgaaagcaaaggtacagtcagaagagtaagtaaatgagttctgtctctgttagcagtgagaggagtcaaggacggaaagggggttgggaccaaattatgcagccttgaatggcaagctgaaagggtggggaggcagctacctcttaggtcacataa

SEQ ID NO: 650795 - DNA, 609 bp, Homo sapiens
agacaaggagaccagctaagctaaggatattcgttgtaacactgtaatagcaaaaccttgaaaacaacataaatgcccacccttagaggaatggatgaataatgtatggtatatttataaaatgaaatgcaacacagtaattgaaaagactatagctatttatgtcaatagggataaatcttaaaaactaaatgacagtgaaaataatcgcagagggagacaaagtataccatttatgtatatttttttcaagacaatactacacattatctgtggatgcatatatatagatatagatattaagagactataaccagaatagtagttacttccagggcaggagagtagggggtgtgatcaaacctgggtacaagtgggcttctaagaaaagagctaaaagtaagaacarcaacaatagttgtatggacatatcattccgggaaagagccctcgtgaaagcaaaggtacagtcagaagagtaagtaaatgagttctgtctctgttagcagtgagaggagtcaaggacggaaagggggttgggaccaaattatgcagccttgaatggcaagctgaaagggtggggaggcagctacctcttaggtcacataa

SEQ ID NO: 650796 - DNA, 609 bp, Homo sapiens
agacaaggagaccagctaagctaaggatattcgttgtaacactgtaatagcaaaaccttgaaaacaacataaatgcccacccttagaggaatggatgaataatgtatggtatatttataaaatgaaatgcaacacagtaattgaaaagactatagctatttatgtcaatagggataaatcttaaaaactaaatgacagtgaaaataatcgcagagggagacaaagtataccatttatgtatatttttttcaagacaatactacacattatctgtggatgcatatatatagatatagatattaagagactataaccagaatagtagttacttccagggcaggagagtagggggtgtgatcaaacctgggtacaagtgggcttctaagaaaagagctaaaagtaagaacaacaacaatagttgtatggacatatcattccgggaaagagccctcgtgaaagcaaaggtacagtcaraagagtaagtaaatgagttctgtctctgttagcagtgagaggagtcaaggacggaaagggggttgggaccaaattatgcagccttgaatggcaagctgaaagggtggggaggcagctacctcttaggtcacataa

SEQ ID NO: 650797 - DNA, 627 bp, Homo sapiens
caacattctgttttcttgtcctaacctatctcaagctaaggaaattctagggtctattgttcaaagacttgaaatgttttccttggattattcccactcttatatttttcttgcctctttccaaaagtgcgttaaaaatgtccaggttttttaactcattaagatgytcatcaagcatcttaatgagttagtcacgattacaactgcatcttttaaattacccaaactgttgaaaggctgccatgaaaggagcttctacaaacaaaatctgggctgtatttctcattatcttatgttgcaaaaagtgaatgaggagttacttccaaaacagtaattagcataaaggctgctgaagcagaggagagataggtgcgctactgtctcaatggaaaatgtcactgttttttctgcaaggaatatgtacattactactaaaggagaagctctttgctaacaaatgtgaaagggtttcacacagttcatggcacataataagtgctcataatttgtttgcttcatcggaattctctctgtagtctacttctcagtcaaataactgtgactacctccatttcctcacaatccagtctccttatgttccttctgttacaggaattgcagcctcat

SEQ ID NO: 650798 - DNA, 627 bp, Homo sapiens
caacattctgttttcttgtcctaacctatctcaagctaaggaaattctagggtctattgttcaaagacttgaaatgttttccttggattattcccactcttatatttttcttgcctctttccaaaagtgcgttaaaaatgtccaggttttttaactcattaagatgctcatcaagcatcttaatgagttagtcacgattacaactgcatcttttaaattacccaaactgttgaaaggctgccatgaaaggagcttctacaaacaaaatctgggctgtatttctcattatcttatgttgcaaaaagtgaatgaggagttacttccaaaacagtaattagcataaaggctgctgaagcagaggagagataggtgcgctactgtctcaatggaaaatgtcrctgttttttctgcaaggaatatgtacattactactaaaggagaagctctttgctaacaaatgtgaaagggtttcacacagttcatggcacataataagtgctcataatttgtttgcttcatcggaattctctctgtagtctacttctcagtcaaataactgtgactacctccatttcctcacaatccagtctccttatgttccttctgttacaggaattgcagcctcat

SEQ ID NO: 650799 - DNA, 417 bp, Homo sapiens
gtaattccagccctttgggaggcagaagtgggaggatcacttgagcccaggaattcgagaccagcctgagcaacatgtgagaccgtgtctctataaaaagttttaaaaatgggagactgaggcaggaggatggatggcttgagcctaggaggtggaggctgcagtgatccatgattgctctactgcactcaagcctgggccacagatggagatgctagtaaccaagacttcctttacaaaagaccccttagggaaacatcatatttgataaaggattttaataggacataagtattaataagaatcacttaggaatggtactgttaaagggtccagatctcaagtcctaatacaaggaaaagcctcacaggacatactcmtatgcatctgtaactcactatgcaaatgtaaggtgcc

SEQ ID NO: 650800 - DNA, 272 bp, Homo sapiens
cttcaggaggcctgaaggctgatcaccacagagattccttggtttttgtcccagaaactgtgggtaaaattccctattctggtagatcgttatccmaatatcatttgtcccaagtttgtgcaaatggttatgccatatttttccaatcgatttaaagcaaatgcccccaaatggttgctaggagaaaaactgcactattcagccctgtctcatcaaatactcagattgttcatggtagcgaggattttagacgctgaaattagagtaaagga

SEQ ID NO: 650801 - DNA, 557 bp, Homo sapiens
gtcttaatctactaaagaatttcttttgggatcaaaaagtaacaggaaagaatgctaaccaactttccttggattayaacaaacataattccattcttcttcccagttacaaaaagatttaaaagaactacaactcttcaaaatggaagtttgcaatttagatcattctcctattatgcaaatgttcattcagaattaaaatattgttttaaaaagtaaaatgtaagtcagtttagtgcacaaaatgtttacattaaatacaaaattacactatctaagggactacaggattccaccagacaatggcattatttattatggttaagtatgttggctttggatcaggaaagaggggttccagtgactgttctttaccactgactggctaggtgatctggatgaacattccttaacttttctgtaaacaagaatcctaacatctattttaaggactaaaggaaacaagtaaagtattttgtccccaagcatctgtcacataataaaccctcagaatatggaagctactgatagtcacataaacttcatgaaaacagaaa

SEQ ID NO: 650802 - DNA, 557 bp, Homo sapiens
gtcttaatctactaaagaatttcttttgggatcaaaaagtaacaggaaagaatgctaaccaactttccttggattacaacaaacataattccattcttcttcccagttacaaaaagatttaaaagaactacaactcttcaaaatggaagtttgcaatttagatcattctcctattatgcaaatgttcattcagaattaaaatattgttttaaaaagtaaaatgtaagtcagtytagtgcacaaaatgtttacattaaatacaaaattacactatctaagggactacaggattccaccagacaatggcattatttattatggttaagtatgttggctttggatcaggaaagaggggttccagtgactgttctttaccactgactggctaggtgatctggatgaacattccttaacttttctgtaaacaagaatcctaacatctattttaaggactaaaggaaacaagtaaagtattttgtccccaagcatctgtcacataataaaccctcagaatatggaagctactgatagtcacataaacttcatgaaaacagaaa

SEQ ID NO: 650803 - DNA, 557 bp, Homo sapiens
gtcttaatctactaaagaatttcttttgggatcaaaaagtaacaggaaagaatgctaaccaactttccttggattacaacaaacataattccattcttcttcccagttacaaaaagatttaaaagaactacaactcttcaaaatggaagtttgcaatttagatcattctcctattatgcaaatgttcattcagaattaaaatattgttttaaaaagtaaaatgtaagtcagtttagtgcacaaaatgtttacattaaatacaaaattacactatctaagggactacaggattccaccagacaatggyattatttattatggttaagtatgttggctttggatcaggaaagaggggttccagtgactgttctttaccactgactggctaggtgatctggatgaacattccttaacttttctgtaaacaagaatcctaacatctattttaaggactaaaggaaacaagtaaagtattttgtccccaagcatctgtcacataataaaccctcagaatatggaagctactgatagtcacataaacttcatgaaaacagaaa

SEQ ID NO: 650804 - DNA, 570 bp, Homo sapiens
gaacacattttttttaacttaaaacatggatattagaacttatatttgattatatttttctttgtgctgaaggattgatctccttgtctaacacacgttgaaaatctggagggggtttcattggaaaattgtagcatttcctttattagcgacccttaaaaataacaagaataattaatctgctggtttagcttaaatttggtcttatgacaggcatgcacacgagctggcttktcattaccctatcctcctccatgattctgtcttgtgaaatcatgaatggaatttctatgaaaatatatagcaaataggttcctgacaaaattactattcacataattcatcatccttaagtgacagagatttgtaaataatgaaatctagtgagaaatctttaatttcatttagctagtagcttagaagtgattctgattccacctgtttaccagaactcctaaagagaaaatgaagaaatttaaacttcaaatcccatttccttttctttttgaaattaaaagcaccttgttgatggaggagcagtgattggtatctgtgcaaggtggtatgtgg

SEQ ID NO: 650805 - DNA, 491 bp, Homo sapiens
tttcttccagagacatgaggagaattgaaatgcagtttcaaaggaggagtctctttcggtgtttcttcaatcatttttttgtttgaagctttaattacagtgctccttgctacctaatgctttcagtttaaaatgacatcacaaaagagaggggaagatgtaattgctcagatgaagggcagccatcacagcagcattgaggtatttactcaccagggagttcctgctacatgattcttttctagatcaacattttgtttttggaatgcttttgtatcatgcatatttgacatggtttgtctttagagtgattgctctgatactgctattgccagagcagataataaccttcgggaaataatgtattctgaaataaaggaactagttatttgcatagttttctctggattggataatgtgtacaggtggctagtggcttcctaaasgtttagtgttctaatcaaataaacttgtatttaaatacattaaca

SEQ ID NO: 650806 - DNA, 474 bp, Homo sapiens
ttagttttctgacagtttttacactttaaagctatgagtaaaaccttggactaaatgcaggcatctgagaaagtaagtaacaatgccgtggaaggaaaggcatcacttgtttacacacctggtcaccttctttagtccatgggactcactcaygtttccaagagaatatttcatttccacacagacatagacatttctgacagttaaatccaaagtaactcaaatgctacataacatttttacattgttttgtgtgtttcttgggtgtgtggcatttggcatcaagaagacccgtgtttcaatgcaatctctgccacattttggctgtgaagaccaaatgcaggttatttgacttttgggaaactcagtctcctcctctgagaattgaggtttgtaataccaactcatgaactcattctaaggatcagatgagataatagatcagaaagagtaggtgggtctataatgttagtt

SEQ ID NO: 650807 - DNA, 590 bp, Homo sapiens
tattaactaggcagtgtaaaagcatattgcaaacattattatcagaagagaacaactttgtaagtctataatcattttgaatactaatggcagcaataacaatggtaactgatgggtgataaaccgaggacggatggctaagtgctgtctcggagaagtcagcttataaatcagaggcagagcacagggaaggaggacaggcctgacytcaggacaaagctttcaaccctgacacaggcaaagaaaatagtcatcgtagcatcgtggggagatacgggttgagtgatataataaacctcttttaaggaactttctgattttttccgcatatttactttacgtacctcaacccagggggcattctttcaccaaaggagtattgcttcaaattgaataaatgcacacacaaaaaaatcacaggcagctctactggatggtgaaatatggctgccttgtcatgagaggagttaactgagtctcattgagacctggatggccatccctgctcctcaaaccagaaggcactccaaaggctggagatgtcttgcaaacttgggaaatatttgagcagcagaaacacatctctccca

SEQ ID NO: 650808 - DNA, 590 bp, Homo sapiens
tattaactaggcagtgtaaaagcatattgcaaacattattatcagaagagaacaactttgtaagtctataatcattttgaatactaatggcagcaataacaatggtaactgatgggtgataaaccgaggacggatggctaagtgctgtctcggagaagtcagcttataaatcagaggcagagcacagggaaggaggacaggcctgacctcaggacaaagctttcaaccctgacacaggcaaagaaaatagtcatcgtagcatcgtggggagatacgggttgagtgatataataaacctcttttaaggaactttctgattttttccgcatatttactttacgtacctcaacccagggggcattctttcaccaaaggagtattgcttcaaattgaataaatgcacacacaaaaaaatcacaggcagctctactggatggtgaaatatggctgccttgtcatgagaggagttaactgagtctcattgagacctggatggccatccctgctcctcaaaccagaaggcactccaaaggctggagatgtcttgcraacttgggaaatatttgagcagcagaaacacatctctccca

SEQ ID NO: 650809 - DNA, 567 bp, Homo sapiens
ttatatggtagcttaatttttagtattttgaggagcctccaaactgttctccacagtggttatgstaacctgcattcccaccagcagggtacaaaagttcccttttctctgcatacttgccagcattttttattgcctctcttctgcatataaggtatttttactggggtgtgatgatatctcaatgtagttttaatttgcatttctctattggtcagtggtgttgagcaccttttcatatgcctgattgccatttgtgtttcttcttttgagaaatgtctgtccaaatcttttgcccgtgttttgattggattattagcttttttcctatagtcgtttgatctctttatatcttcttgttattaagccctggtcaaatagatagtttgtaaatattttctcccattctgtgggtatgtctcttcaccttgtggattgtttcctttgctgtgcagaagctttttaacttgtgatcccatttgtccatttttgctttggctgcctgtgcttgtggggtattgatcaagaaatttttgcccataccaatgtcctggagattttccccta

SEQ ID NO: 650810 - DNA, 407 bp, Homo sapiens
tctttgtgtaggggacccttcatttctgtttaaaatggaacaaataaaccatttggaagaggtattacatagaaatctactataaccccagaataatgattacctctgttttaggrtttcgggtttttttgctttgttttgttttgttttgcttttggagaatgggggcatttgagcgcataacttccttctttacatctgatggggaatgtgaaaagtataaatgaagtttatcttaaatgccctgttctcttcaaatctttcaaatattccatttaaataggatctttctcttttgtgtctgggtataattttgttgatacctctttggcatttatgaccatctgccttaaattattaattgggctttcatccttgccgtcctctctcctaaataatgtgcaagc

SEQ ID NO: 650811 - DNA, 604 bp, Homo sapiens
tttcatcttttctacttgtgaaatatacctcttcaatagcaccaaccccaggtcattttaaatcmatttctaataaatctgtggtgctttttctttctctcattgaaagaaaggtagtattgtaggaattatttttgtttctggcttacctttatctaagctgattggctgtgacttcccttatttatttcacaaatgattgagtattaaatagtttactggatgttaagatgccttgaggtacagggatgttaaaccacacagtgagttaaaatatttcaaaagctccttcagatgttaacaaccaaaataaaaaccactgaatggccaaataatgtaaatttgggtcattgtatctttatttctttataactcttctcactacaaaatagtttagagatggtatgcaataaaaggcttattcaataagacaagtctcattagaataagaacaggaaattaaattcataaattaaagaataatgtaaatatttcagctattgaggataaaggaagtaatattatcaaccacctgacttttgaatttgagcttcctggcagctggagaaaaaaatagattgtactaatttttacctaataaaaa

SEQ ID NO: 650812 - DNA, 604 bp, Homo sapiens
tttcatcttttctacttgtgaaatatacctcttcaatagcaccaaccccaggtcattttaaatcaatttctaataaatctgtggtgctttttctttctctcattgaaagaaaggtagtattgtaggaattatttttgtttctggcttacctttatctaagctgattggctgtgacttcccttatttatttcacaaatgattgagtattaaatagtttactggatgttaagatgccttgaggtacagggatgttaaaccacacagtgagttaaaatatttcaaaagctccttcagatgttaacaaccaaaataaaaaccactgaatggccaaataatgtaaatttgggtcattgtatctttatttctttataactcttctcactacaaaatagtttagagatggtatgcaataaaaggcttattcaataagacaagtctcattagaataagaacaggaaattaaattcataaattamagaataatgtaaatatttcagctattgaggataaaggaagtaatattatcaaccacctgacttttgaatttgagcttcctggcagctggagaaaaaaatagattgtactaatttttacctaataaaaa

SEQ ID NO: 650813 - DNA, 624 bp, Homo sapiens
catactatgtttgatatatagattctttactcaatagctgtaacaatgtaaactattatcaaaaattaatattatctgtactttgcccagtttgtaggtaaatgctaaagaatttgaatatttgctgactttttccttgttattcttgcaaatcccatcaactcccaccacttatttgtatttcactttggcttctttaagaagataagtagggggcaacgggggaatttgctgtgatrccctcattcatcttgaaagccagataactaagttcttacaaagcaagagtaaatgacactgtctacattgactttaaccttatgaaaattacaaaaatttaaatatagttttggaatcacaattaaagtcacttttccatggtgacatttattcattttcattttacttcatgctgtaatcagaattcttgaaatttctaacgtcaggctaatataacattttctatacagagaaaagtctatctaagtattaaataacttttaattcctttttacctttaatgctcctagaacatatattctttagttcattcaacaagcacttgagcatcttctacatgtcaggtattagtgatacaatgccaaggagactcaagacctgtgc

SEQ ID NO: 650814 - DNA, 456 bp, Homo sapiens
tatcagatttagatttaaacaccaggtgtagtctggagatcaggattccttaattaagcggactttgaataagaactgaaaargagaactatttaatcaagttaaggggaaaacttgctgttcagacaaaaaaaaaaaaaaaaagtgatacgtccaagacctcaggataggaggaaatgtatcacattgaggatcactgaggaggacagagtgactggagcaaagaaggtgagggaggctgtgctctcaatgtgttgatcctgttgtattagtccaggctcatgctgctgtgaagaaatacttgagactgggtaatttataaaggaaagaggtttaattgactcacaggtacacacggcttggggggcccgcaggaaacttacaaccacggcagaaggtacctcttcacagggtggcaggagagagaagtgagtgcaagcagaggaactgccagat

SEQ ID NO: 650815 - DNA, 520 bp, Homo sapiens
atattttgaagatccgggctgtgagaattgttaaaaaccagcaaccaataatactggtcaagccacggatttgtatgagttagatttctatgcagggatactttrtctgttactaccatctccatcttggatatctctactttgtttttatgatgtgggccaaaaggtattgttttaatagagcgtttcttccttttttttttttttttttttttgtgatggagtttcactcttgtcatccaggctggagtgcaatggcgcaatctcagctcactgcaacctccacctcccaggttcaagcgattcttctgcctcagcctcccgagtagctgggattacaggtgcatgccaccacacctggctaatttttgtattttttttttctttttttagtagagatggggtttcactctgttagccaagctagtctcgaactcctagcctcggatgatccgcctctttaggacttatgaaaatatagtcggccaaggacttcctataggtaacaattaatgtttta

SEQ ID NO: 650816 - DNA, 532 bp, Homo sapiens
tattttgaagatccgggctgtgagaattgttaaaaaccagcaaccaataatactggtcaagccacggatttgtatgagttagatttctatgcagggatactttatctgttactaccatctccatcttggatatctctactttgtttttatgatgtgggccaaaaggtattgttttaatagagcgtttcttccttttttttttttttttttttttgtgatggagtttcactcttgtcatccaggctggagtgcaatggcgcaatctcagctcactgcaacctccacctcccaggttcaagcgattcttcygcctcagcctcccgagtagctgggattacaggtgcatgccaccacacctggctaatttttgtattttttttttctttttttagtagagatggggtttcactctgttagccaagctagtctcgaactcctagcctcggatgatccgcctctttaggacttatgaaaatatagtcggccaaggacttcctataggtaacaattaatgttttatctaatctacctg

SEQ ID NO: 650817 - DNA, 424 bp, Homo sapiens
taattgagaaaaagattagaagggaatatgtagaaatagaaagaattatgttagagtgataggattatgtaattttttcttagtattttctcagttcatcaaactttytattataccctgattatactgattatattacctcctacgctgactcaaaatctttttttttttcccctcaggtggcgacatgtctaagaatgtgagccagtcacagatggcaaaattgaaccaacaaatggccaaaatgatggatcctagggttcttcatcacatgggtaaataccaagttgttggcagttgctaatgcagtttaatttataagggttgagttttaatgataagccttttattgtaatattatgaaaatatgttcaaaaggtgtgtgatttcagggaaatggtcatctgaatcctaagttgaattc

SEQ ID NO: 650818 - DNA, 582 bp, Homo sapiens
ctcctctccacttgttaccccactcgcccttcgctttctaccccattttgcttctctctgcccaagcctgtggtccaaggtgcagggatctcacaggaaaacaggtagcctcggggtgggaattcccagagcactgaaggcgccggttgttggccagagggaggccgggactccggtgggcagagtaccccgcgagtgcggagattytcaggctgtaatcttcagtctgggaaaggcgatgggaaggaagggcgatgcagaatagaggtggtccacttctgactcccccctcacccgccctcccctgcaagtaagactcaatttctatgattcaacaccgccttcaccagctcctctatcaaaccttgaggtaggcagacattctgaaagtgttgtgatcagaaaaggcatttaaaatgataacaaataactcacaaattatgtttgtgagggtgggagggaaaataaaatgccccatgtttttttcgtggtctgttgcttagcacatgtaatctttttccctatcttcggtcctatcttccctatcttgcagaaaagccgctaggaggaaagcatgttgga

SEQ ID NO: 650819 - DNA, 313 bp, Homo sapiens
ttattgctatggacatgctgccctgcagatgacattcccaaataaaccaaccttggcggggggyggggacgggaaactgggtgcggaggcagacatgtgaaaggattcttgggtagaaggaccaggtgccttctgactggagccctgctggtgagtgggcaagttgtcctatttgggaagcaagttcacagagctgaggagtttgagaagggctgagtcactgaggttcctgtgagtccaaagtgatcactggccctaaggaagccagcccatagggcaagacataagaagtaggaattagatcccccagatg

SEQ ID NO: 650820 - DNA, 313 bp, Homo sapiens
ttattgctatggacatgctgccctgcagatgacattcccaaataaaccaaccttggcggggggcggggacgggaaactgggtgcggaggcagacatgtgaaaggattcttgggtagaaggaccaggtgccttctgactggagccctgctrgtgagtgggcaagttgtcctatttgggaagcaagttcacagagctgaggagtttgagaagggctgagtcactgaggttcctgtgagtccaaagtgatcactggccctaaggaagccagcccatagggcaagacataagaagtaggaattagatcccccagatg

SEQ ID NO: 650821 - DNA, 574 bp, Homo sapiens
aggggtccagtttcaatctactgcatatgactaaccagttatcctaggaccatttattgcatagggagtcctttcttcrttgcttacttttgtcaactttgtcaaagatcagatagctgtaagtgtggggctttatttctatgctctctattctgttccattggtttatatgtctgtttttgtaccagaactatgccactttggttattattcctctgtattatactttgaagttaggtaatctgatgcttccagctttgtacattttgctttggattgctttgtccactaaggcaattttttggttgcatatgaattttagaatagtttttctctaattctgtgaaaagtggcattgatagtttgataggaatagcattgaatctgtaaattgcactgggcagtatggccattttaacaatattgattcttcctatccatgatgatggaatgtttttccatttgtttgtgtcaactctgatttctttcagcaacgttttgtacttctccttgtggagatttttcgccttcttagttagctctattcctaggtattttattttgtgtgtgtggc

SEQ ID NO: 650822 - DNA, 594 bp, Homo sapiens
aattagtcttattattgcatttactgtcacctacacatttgtttgtgggaaggcactcctcttggcatttgcttagttggaaaaaggarcactaagactatagccactggataatgttcttgaagttcacggcactgtggcagcataaagcttgaacagacctagtttttttattgatggagtgcaactgatgtagcaccacttttctctgacactgtatattagcttttagttatgaactacttccttccagtgcagcagttgttgcctaccattggtaccagtttggcaccattataaagaaacattgtacctcttataggaagaatttggagagttttggtatggtaatcaagatgtgtattgtaataattaactgaattctgtgaacacactgtttctaccttaagtgaaagaaaaagagaacagctgcaattatttatcttcactcatttctcatagatagccaggatttttcagtgtacattctcttgtcctgaaattattttcagttcttgttgattcttatagattataatgagaaaggcacgagcaagaaatttgaaataaagaacacaaaatgagattgccctt

SEQ ID NO: 650823 - DNA, 594 bp, Homo sapiens
aattagtcttattattgcatttactgtcacctacacatttgtttgtgggaaggcactcctcttggcatttgcttagttggaaaaaggaacactaagactatagccactggataatgytcttgaagttcacggcactgtggcagcataaagcttgaacagacctagtttttttattgatggagtgcaactgatgtagcaccacttttctctgacactgtatattagcttttagttatgaactacttccttccagtgcagcagttgttgcctaccattggtaccagtttggcaccattataaagaaacattgtacctcttataggaagaatttggagagttttggtatggtaatcaagatgtgtattgtaataattaactgaattctgtgaacacactgtttctaccttaagtgaaagaaaaagagaacagctgcaattatttatcttcactcatttctcatagatagccaggatttttcagtgtacattctcttgtcctgaaattattttcagttcttgttgattcttatagattataatgagaaaggcacgagcaagaaatttgaaataaagaacacaaaatgagattgccctt

SEQ ID NO: 650824 - DNA, 590 bp, Homo sapiens
aaccactaagagtcacaaaccctctgtctctctgaaagaagatatttcttctttaacaaaatggttcttttcatacattaagagatattactccctttttatttggcacctgaaatggtaacattaccttttcagagtcagatttccccagataatgaggttttatcacatccacaaggtactggacaagaagcatctcatgtgccgccattttgtgaagcattctgtttttcttgtcaataccaacacccagaagaaatcctcaatctttcaagagctctcttgttaaatgatgaatgaacagacttcatgttaattcattgctttcatgttcaggaaactagaaagttccttcagaagaaaaccatcttgttaccttctcccatgtgatcatttggcctgtcatagttttaaaagtctttactatgactcgttacctatacaataaaatttcaagtttaagatatttataagtcaytgtgaatttcatccactgtcattaaaatttttcaaatgtggaagccttgtcaagctattttaggctcaccattgtgttccctatggtttttatgaggattattattattatt

SEQ ID NO: 650825 - DNA, 317 bp, Homo sapiens
cccacagccaacagtagggtgtgctgggcagatgaacactgtactttgagataaactaaaaataataagtacactaactagttcttcagaatgaatgggatcttcagcacttcctataagttcctgacttcctataagaacaactatatccctgacttttataatgctaatgtctgaagatatataattgtggaaatggtaatcatatgataaaattattacattttccatcatgaacaacctaataacatttgrtaactggtaatctgatagggtttattgttttattttgttttttttctgtaaatgcttcttgc

SEQ ID NO: 650826 - DNA, 511 bp, Homo sapiens
ctttgttaactgaagcatcccgaggtaaacagctatcccttaaygcgtgttttcttgtaaaatcattgtggtagcacaaaaataataatattctataaagctgaaagaatatcagcaagacaaaatctagaatgtcagaaaggaaaggaagaaagcaaaaaggcagaagaaagaggacacacagacttggcaatgtaaggatagggacaggggaaagagagaaactcaccttcagaaagcaagcccacctaaaactgattagcaaggaattttggaagtcatctgacgcaatggtgagcaatgagggaagccatttaagaaaaggaaaaagactcccatattatctacaaagtagaatgtttacaaatgaaagatttcctctcttatgtagtccctgaagtagaaaaggtattcacgaagctgagtatcaattttaaagttgcaggtctctcaaactaaatagtaaatagtatgacaaatgttattcattttttacattccatgggaactg

SEQ ID NO: 650827 - DNA, 453 bp, Homo sapiens
atttagaattcattaagaatttatggtaactgaaacgaaggaagtagtgaagatcagtcagatggcctgttcagatgggcagtatagagtgacatgagaaggcactaagaccaaaaaaaaaaagaagaaaaaaagaaaaaacctgaagaagaaaaacatttaattcttagtcagggaaagataacaattctggctcacgcctatgatcccagcaygatgggaggccaaggcgggtggatcacaaggtcaggagatcgagatcagcctggacaacatggtgaaaccccatctctactaaaaatacaaaaattaggcagagatggtggtgcatgcctgtagtccccaatactcgggaggctgaggcaggagaattgcttgaacccgggagacggaggttgcagtgagctgagatcatgccactgcactctgacctggtcaacagagcaagaatcc

SEQ ID NO: 650828 - DNA, 615 bp, Homo sapiens
tagaatctggcccttttccttctaagtgaaactgactagaaacagattcacaaggcataggtaaatcacaagacagctttaatattggtcctattttcccgagaccaaataagttgaagaaaataagaatggagagactcttatccaataaaagattattatttttcacagtataggcargtgtaaaacacagtctacagaaaaataagggtggtattattcgtccaatttaagggtccattcagaaaccgtatcaatctttatccttttcacaaagaaaagactgcacatcatcaggaaacttcaatagggtcaacaaacagcacaaaccataaagtggagagtattagttgtctaccaaaagatactctccttttattcctgcatgcaggaataaatggaatattccagcctccttttcatagtggacttcttttccccatggaatttaatgtgataggtgtcccttatggacctaagtcttaggaccgtgtgtatgcttccatgttatctttccccttatcaccagctggaatggcagctgaccctgtctctgccatgcagaagatgacagtcctagaggataatactgcaatcaatggaaagaaccttaat

SEQ ID NO: 650829 - DNA, 469 bp, Homo sapiens
tatctgaaattcaaatataactgggcatcctgtattttattcagcacctctacgtgtaaggagccccatggcctggggagagaggcagtgcagcacacgaaggccagcatgcaaggccaatgggtcacagcctccatgtcacagctaccgaaactgtcccttacagagactctgaacacgtccttctgacaggtaggaatagagagaggagggctgcgtggtaaagtcaccggccgacaacaaagttacagggctccaagttaaagtcagtctctcagctcatttctggccctggagcttctcctgarggtgctgtacggaatgctctagaagaagtttggaatgggggtggggcatgtcaggcaacccagagaaatgttctcccagcccaggtaataaacgtacccctttccccaaagtaccgttaaagatgtttaaaaaaaaatcttaaagaaaaaaaaaaaaaacc

SEQ ID NO: 650830 - DNA, 498 bp, Homo sapiens
aaaggggcacaggactactttggaaratgatggaattattctgtatcttgattgtggcagtagttacacagctatctaattagtcaaatgtagaaactatacatttgaatagtttcgcatctattttataaaactatatacaaataagcatgattttactgtgtgtaaattatagtttaatttctaaatggagggagagaaccatccaacagatagaagtgaaataaatattactaaatcctgcgacaggttattttactagagaatgactaatagggtcattaaaagattttttttagtttcaatctaataaaataaaaatttactggctactataggatggaatttatactgtcatttttcatcatcctgttagtcactgtttaaaaatttggtgtgtatcaatgtgttagagaacttaactaagatttttaaagataactatgtaaatatatcaatactaactctctaaataaaggaaactgtacacttaaaagc

SEQ ID NO: 650831 - DNA, 498 bp, Homo sapiens
aaaggggcacaggactactttggaagatgatggaattattctgtatcttgattgtggcagtagttacacagctatctaattagtcaaatgtagaaactatacatttgaatagtttcgcatctattttataaaactatatacaaataagcatgattttactgtgtgtaaattatagtttaatttctaaatggagggagagaaccatccaacagatagaagtgaaataaatattactaaatcctgcsacaggttattttactagagaatgactaatagggtcattaaaagattttttttagtttcaatctaataaaataaaaatttactggctactataggatggaatttatactgtcatttttcatcatcctgttagtcactgtttaaaaatttggtgtgtatcaatgtgttagagaacttaactaagatttttaaagataactatgtaaatatatcaatactaactctctaaataaaggaaactgtacacttaaaagc

SEQ ID NO: 650832 - DNA, 597 bp, Homo sapiens
acattgttttgaggtatatgtacattgtagaatgctacctttagttaagtaacatgcattatctcacataggtataagttttgtggtgaaaacactttaaatccactctcttagcattattcaagaatatattaactatagacaccacgtcatacaatggatatcttaaacttattcatcctttctaactgaaattttgtatcccctgctcctccmaccagctcagatcctggtaaccaccattatattctctacctctacgagaccacctttctcacatttcacatatgaatgagatcatgtagtatttgtatttctgtgcctggcttatttaacataatgttctccagattcatccatgttgttgcaaatgacagggtttcttctatgatgaatagatttccattgtgtatatataccatatttttaaatccttcattcattgacagatacttaggttgattccgtatcttggctactgtgaataatgctgcaataaacatgggagtgcagatgtctgttcgacaagttgatttgattttctttaaatatatatccagtagtgggattgttggatcacatgatggttctgttttt

SEQ ID NO: 650833 - DNA, 553 bp, Homo sapiens
ttttccaatgattagaacactgtacaagctcccaagatgtcctgaccagattcagcctgttggccatcaatttaccacccatgctttggtctttatttcaatcccatatttgaagcaattaarcagagaaaggaaaggtgaaaagggagggagacagaaagagaatgaggaaaaggacaaaaaattcgaaaaaaaggaggaaaatagaacaagattgatgaaaaaggaatgaataaatgattacgtttttcttaactgctaagttttcaggtaacttgttacacagtaataaataactaatacagcatctgtctcaagaaattaaagaataaaaaattaaaaccatctgggtatggtggctgacgcctataatcccgcactttgggaggccaaggcaggcagattgcttgagctcaagtgttcaaagaccagcctgggcaacatggcgagaccccatctctactaaaaatacagaaaaatagctaggtgtggtggtgcacacctgtggtcccagctacttaggaggctgaggtgggaggatcatttgagccca

SEQ ID NO: 650834 - DNA, 551 bp, Homo sapiens
cctatgaagttagttaccactattgcaatctctgttatatggttgtagaaattgaggtttcaaaacattaagttaatttgccctaattcaccaaactaacaaatagtgaagccaatgttaaaatatacctattcggattccagggaaccattaactggaaaaacatatttctagtaagaaatctcaccaggtaggtaatgtctttgtaatatgcctgagcagtagtcagatactgaggcaaagactctatcagaaactggggatgtgagagggcctccagatcacaaacaaagagtgggatcagggataggtcacaagttccaccatgactcaagcctcakatctatgcatacctcataggtaagtaaggagatttaggcagcctccctgtgctggctacagagtatatgggtgctgcaggtgaaggccacccccacctgggaccagcctcaaaggggatcaagcctggcagtcttggaaagttggtcttgggaaggctacagggcaacctgcaatacacactgaacacccttttgcactggtagaaaaat

SEQ ID NO: 650835 - DNA, 554 bp, Homo sapiens
aagcactgtgcatgcgggaagcccaccctaagggaagaatcgtgggagaaaggcaagcctataaggccctaggattaaggttaaaggccccttttttttgttctcttttctcccttggaccttcagacacccgcttgggtctcttccaagcgaatttttctttctttcctgctctaaagtcttcttaaataaacttccactcctgctctgaaacttgcctcagtctccttttctgctttatgcccctcaatcgaattctttcttctgaggaggcaaggactgaagttgctacggacccgtacagatatgccgcgggtaacttggggtaacttggatctcttccaccggcagcaaactcaccgtggtgtctgtcccacattctacctttgcaaaaagctgactttggaaagttgaattctctgactgctaccctgcctccaatattcaagaagttagaggtattatgtctttaaawgctcaaggctatttccttaattaatcaaaactgctcatcatagaaacatttttatacaaatatctcagaatcagaccta

SEQ ID NO: 650836 - DNA, 423 bp, Homo sapiens
ctgtgtcctggtttaatcatggtttcaagagataaatatgaaggcagtcccagtgtctgtgtccatcagcagctgtgaagcttcttgtttgagggtacaattgyagactttgattcataggcatgtctttggacaaaaccgattgtgactctactggccctggtttctcttcgttgttcagggttggtcgttcttaggttttaagcaacagcatctttctggaaaaactgtgagagaagcaactcacaacatgatttgagttttgtttcactttgagtgcaaaatggctattttgaggtttacaacattttgagtgttatggattgtttgattcctagattctaaaaaatactgattagcttggtatgtttcacatcagcttggtaccttttatgtattaagttatgacagaatcttattata

SEQ ID NO: 650837 - DNA, 596 bp, Homo sapiens
tttggacaaaaccgattgtgactctacyggccctggtttctcttcgttgttcagggttggtcgttcttaggttttaagcaacagcatctttctggaaaaactgtgagagaagcaactcacaacatgatttgagttttgtttcactttgagtgcaaaatggctattttgaggtttacaacattttgagtgttatggattgtttgattcctagattctaaaaaatactgattagcttggtatgtttcacatcagcttggtaccttttatgtattaagttatgacagaatcttattatattcaaattatgaaaagtcttctggcatgccctattcaaaaggaaatagactactccagccatcaaccacacgccgtgacaactatggataccatcaaaaacttgatggcaggcctctgagaacctgctgtacctcctccatctcgtattaaatagagatagagcaagaggggctgaaagagggaaagagccaggagcaggtgaaagaaactcgtttttgcagagtattgttttgattttttggcttctggcctccatagcctttgaccttgagtcaatccctgcccttggagaagccatc

SEQ ID NO: 650838 - DNA, 577 bp, Homo sapiens
tcacacatctttggccccttttaatttcaggggtggagaggtaaaagcccagccagggaacctgtgcaattatgagcaattacttaaacggctttcagacaagacttggccctccaccagcaggcacaggggccggcgtctcggttttgtaggcaagaaggagcaacggtgggaaggttgggggcatgggaggagacagcaaagccttttgtcactgsgttacaaaaaaaaaaaaaaaaaaacaacccattggtatttcctgccactgcactagctgacacaaaccagccccgtgcaggggaactattcacttaaaagtcatcatttccttaacttatctgcctctaaagaaacaaatctattagcagcaagaaatcactccagcagctttaactaagtactgctcctactgaaaacaccaaagctctgccttcagctcactccggctggctgtcccctcgcctccactcctccctcctcccaggcagcagctctgcactggcccaggtcagaagagtctctgaccactacagataacaagggccattacattccaaatcctttctcaacctcctcc

SEQ ID NO: 650839 - DNA, 577 bp, Homo sapiens
tcacacatctttggccccttttaatttcaggggtggagaggtaaaagcccagccagggaacctgtgcaattatgagcaattacttaaacggctttcagacaagacttggccctccaccagcaggcacaggggccggcgtctcggttttgtaggcaagaaggagcaacggtgggaaggttgggggcatgggaggagacagcaaagccttttgtcactgcgttacmaaaaaaaaaaaaaaaaaacaacccattggtatttcctgccactgcactagctgacacaaaccagccccgtgcaggggaactattcacttaaaagtcatcatttccttaacttatctgcctctaaagaaacaaatctattagcagcaagaaatcactccagcagctttaactaagtactgctcctactgaaaacaccaaagctctgccttcagctcactccggctggctgtcccctcgcctccactcctccctcctcccaggcagcagctctgcactggcccaggtcagaagagtctctgaccactacagataacaagggccattacattccaaatcctttctcaacctcctcc

SEQ ID NO: 650840 - DNA, 450 bp, Homo sapiens
ggccaaaggcacatgtgcctgaaactggctaaatgaattcttggccttgtaacaaaacaaggataaccaaccactgatgtgtgacctgatgttctttgccycattagcaccacaccttcaccaacagggttaaagagcaatactatgtggtcatatcatctagcacgaaaccatcaaacctgtgaaccctcgattggcaagaaagtcttgggaatttaaggctaaaatactgtctacacatctgtcttagtctgttttctgctgctataacagaatactacagattgggaacttcataatgaacagaaattaatttggctcatggttctggagtctgagaagtccaagaacatggtgctagcatctggtgagcatcttcatgctgcatcatctcatggcagaagatggaaggacaagacagcatgatagcaaacaaggaagagaggacca

SEQ ID NO: 650841 - DNA, 544 bp, Homo sapiens
gaatgatgactcttaaaattttattttaccatgaaaattgctttcgccttttcttgttgcaatttgacataatcatttccacaagaatcaaatccctaggcctcagtttctctaaatctataaaatgagaagtttgaacgagacccaaagtggagcgctcatgagaaacacctggagagctggttaaatatgcagattcctgagttccactcccaacaattctgagtctgaagttttggacccagcaagactccatttcagactcatttctgcttagtctaaggcaggcagtccacaggccaggctctgagagtactratctgatgaactctaaggtgctgcttcttccagtagtcggagactgtataaaaacttcagctggagattagctgattatccaggcacaccttatgtttattgacaaacctctctctatcagcctctctagtccttgtgtactttgtgagcaaggcaagccctgctccaaggtgagtgtgaggtacagtggaggaggggaggcagcgctgccctccaaactctgagc

SEQ ID NO: 650842 - DNA, 496 bp, Homo sapiens
tgttgtcagcctcttggaaagccccatgagccactgcactgcagctatgccacccacgtgcagcaaccctacatgtgcacatgctaaaaagcaaggagttagcttaaaaactctggtctgcaggaggaaagggaatgaataaccataagccaaggcaaaatgttcatgaatggctgaggcccagtggggatggcggtggatgaagaccttagtgtggacaggtcctagccactgcctctcagccagctgcttcctgtaaaaccagaaaaagraacagttctgagaacagatcatggccttatgatcaatttattttttattttgcaaacttttattaatctaagatgtttgatttccattgtttactaggttactagtagtttgataagagagttctaggaaataccttccctgaggtctagatccccaaattctatctggaaaggaagtttgctgccttgggtcaccaaactgccctccaaggacacagaagcct

SEQ ID NO: 650843 - DNA, 584 bp, Homo sapiens
tcggtagaagaggatgaaccagcaaaagagactgtgaargaacagctagagaaataggaagaaaacagaagaatgttatgttggaaaaccaggatgtcatgccaaacgctgccaagacattaagtaagatgaggatcatctgattttgtgacagtagagattagggattttagcaagtgagagctgtttcagagaatagacaggacgagatgctgatggtgctaatggagactgcaaggagatactcagaaatgtgcccatgacacggaagagggactacagagggtgagggtgacagaggaccttttttttttaatgggagaaacttgagcacatttgcaagggatgcctgatgggataaagtccctgaaaaggcctgagtggctgagccctgagcagcagtggagggctggctccagcttgatagtacctgcaggcaagtgctaaagttttagagcatttattctctatgtatttcaaaatattccctttaccttgtttagtaaatgtcatagcagatcaaaggcaaattaacctaaagttctgtcagaattatcatgaatatagaatttgtgaagatcaaa

SEQ ID NO: 650844 - DNA, 646 bp, Homo sapiens
ggattcatttgctgccaggcaagaggaaaagcacgatacctctgttactgtgtttaggatgactcactggttgtgtggaaggaagtcgatttgacccggctgtctgagaaggaacgtcgtgatgccttgaatgagatwgttattctggcactgctgcagcacgacaacattattgcctactacaatcacttcatggacaataccacgctgctgattgagctggaatattgtaatggtaagatagagttcagtgggacttttccagcaagactttcttagactcataattacgttgaggagaagaatataagaagagacatatacagtgataaaaactttaaatgaatttctagagtttaagagaaacttttcaggccttggagaatttttgaagtggtgtacgaaataaggagagggattttcccctgcatacccaaattttctcttgtgattacagttccattttcaaactatcttttctttggttggattttacctttatttttcaaggtttttctttatgaaatgacattagttaaccagagtgtggcttggcagcacttgatacagtatttaataagatcttataggtgatatttatttatattgtcttcagctaaagctatcctattgaaaagtggtccaa

SEQ ID NO: 650845 - DNA, 550 bp, Homo sapiens
tgactttaacttcagaatgaggaatgtaaatttggattctgtggctgggcatattacctcttgatgttcctatactcctctgaactgtacttgatggcctcattcatgtccaagtcctcttttaggctctaggaatatagaaatgagtctcagaaaactcctgctttcaaggagctcacactctagtagaataggggactagcacaggcaggtgttaggtgctataatagcagcagcctagtcttctaagtcctggagtaccccaaggctcacttgtctctccaaagtgagctygttcccttaaattccccctatacattgactgctttatatcaccaggcttgaccttcagactcatttattcaacagctcctcaacttgatgtctaaatttagggtgggccatataacccagttatcttagaccaatcctgattcatgccttcatgcctgttgtcctggcttaatgattaatagccaccctgtttcatttttttttaaaagcctgatttggataagaagttataggcatctcagacaaacttagtata

SEQ ID NO: 650846 - DNA, 549 bp, Homo sapiens
ttcacaccctttggcctagtatttatctttatcaaatttaccctcagaaaataacctgagctatgcatataaagatattcatcatgctttatttacaaaaccaaaaaaaattggaaatatgaatttctaacaatatgggttttaagtaagcctttaagagtatttaacatccttaaaaatcacgtttcttaaaaatattttatgaaggctgggcacagtggctcacacctgtaattccagcactttgggacgccaagatgggcagatcagttgaggtcagtagttcaagaccagcctggccaatatggtgaaacctcatttctactaaaaatataaaaattagccaggcgtggttgtgtatgcctgtaatcctagctactcaggagactgaggcaggtgaattgcttgaactcgggaggcagaggctgcagtgagccaagattgcactccagcctgggcaacagagtgagtctctgtcytaaaaaagattttttagatctgtcttaaaagattttttaaaaggaaatattttatgaattaagaaatatt

SEQ ID NO: 650847 - DNA, 427 bp, Homo sapiens
acttatcttatgcagagttgcccagccatgtaccatgattcatttagatgtggactaagatattgaaattgtcatcctgcgtgtaggaggagagatgggtggggaaggggagacctgggagaactataggctatttgccttctgcggtgagcaacttccttcccagtatgcaaatctatgataacattttctgtgtgttatgacttgaaaaaggttgagaagcattggtctagaaataatggatattaagcctcagtatcaactccctgatcatgaagcagcagtcacatttaaattttgactaaagagaaaacatttaagtggaaatgccactggggtcaaataattttcttatccctctatagaagatcagatttactcyaattttctttttcatttagttctaatattttaggtctgttgtttc

SEQ ID NO: 650848 - DNA, 541 bp, Homo sapiens
tgtgccatttttggtcattcttaatttgctaattcaaactgaccaacattttattttttttctctgaatgacttgtaatcatagtctcattattaaaaaacaacaaaaatcatactctatttatttgagaggagcaaacaagaacagtaatgayataatgttggctcccaatttgtcctcattgagaatgaagacacaagaggctctcaataaataaaatatgttcccatggttaggttacaactgtaactatgggtcagaaggatggggacttgcgtgattggcatctgaagtgaaggcagtcttgtgggactgagccctctcacgtatgggatctgatactaactccagatagatagtgtcaacgttggattaaatagtaagacacccagctcatgtctggagagtggacagttgcttttttacttgagaagccttatatcagaactgtaaagggcacggttcctaaacgtgagtgaactctattatctgatataaggcttttcaggtaaacccacatgttggcaaagctctccttgta

SEQ ID NO: 650849 - DNA, 561 bp, Homo sapiens
cactttaaagtgagcagttctgtggcatttagtagttttaaaatcattttaaagtgagcagttctgtggcattcaccatgttgtgcaaccaccacttcttccaaacattatcatcactccaaaaggaaaccccaagcctgtaaagcagttgcatcccattccttcctccccgcccgcaggccctggaaagtaccagtctcattcatctctgcagatttacctattctggatactttatataaatggaatcatacaatatatgactttattatgtctggcttctttcatgaaacatgtttttgaggmtattagcttttacaactgagagtttgcaccagttgaaagtcagggattttccacgtgattttgccacagcacagtttaccctcagaacctttctccagatcccttcaacagttcttgagacaacaggcaagtctttttacttttttccttcagatcactcagtaaatttttcctttctttcttttttattttttggggacagggtctcactgtgtcatccaggctggaatgcagtggtacaatcatagctcacta

SEQ ID NO: 650850 - DNA, 561 bp, Homo sapiens
cactttaaagtgagcagttctgtggcatttagtagttttaaaatcattttaaagtgagcagttctgtggcattcaccatgttgtgcaaccaccacttcttccaaacattatcatcactccaaaaggaaaccccaagcctgtaaagcagttgcatcccattccttcctccccgcccgcaggccctggaaagtaccagtctcattcatctctgcagatttacctattctggatactttatataaatggaatcatacaatatatgactttattatgtctggcttctttcatgaaacatgtttttgaggctattagcttttacaactgagagtttgcaccagttgaaagtcagggattttccasgtgattttgccacagcacagtttaccctcagaacctttctccagatcccttcaacagttcttgagacaacaggcaagtctttttacttttttccttcagatcactcagtaaatttttcctttctttcttttttattttttggggacagggtctcactgtgtcatccaggctggaatgcagtggtacaatcatagctcacta

SEQ ID NO: 650851 - DNA, 377 bp, Homo sapiens
aaaaagatcccaagtgaagatgacaagggtgttgtttccttgtgaaaataaacagacttatctgatatttttattttaatggaaggtcacttcacctgtggctcaacagtgagccaaatgagcactttcaaagggatcaagtgcaatgctcacaaaacactttggggtctgcgcaaattgttgatgcaaatgccgtaactctgtaccayaaggcacaaaagagttggcctgtcttgaaagcttttgagggtaagcagtaccaaaggtctgtcctgactagagaagatccttaacatgactcctgtaaaatgcaactgcatcgcaagggttaaccaggtaaatcaccagttggggtccttaggaactaactatggctg

SEQ ID NO: 650852 - DNA, 377 bp, Homo sapiens
aaaaagatcccaagtgaagatgacaagggtgttgtttccttgtgaaaataaacagacttatctgatatttttattttaatggaaggtcacttcacctgtggctcaacagtgagccaaatgagcactttcaaagggatcaagtgcaatgctcacaaaacactttggggtctgcgcaaattgttgatgcaaatgccgtaactctgtaccacaaggcacaaaagagttggcctgtcttgaaagcttttgaggrtaagcagtaccaaaggtctgtcctgactagagaagatccttaacatgactcctgtaaaatgcaactgcatcgcaagggttaaccaggtaaatcaccagttggggtccttaggaactaactatggctg

SEQ ID NO: 650853 - DNA, 588 bp, Homo sapiens
cagttataaaattaaaaggagggcacttgggatccagccctgttttatgccatttaagatagacatttcatctctcaaaaagaaggcctttcctatccacgttaatttgttccatattgccagcagtaatggctccragagagaattataagtctggaatctatgttgagatcatacacttaggcctctttatagattcaatgaccaatgatggatcaataattccatgaaaagtcttaaagtgctcctaactgattgagagactgcattttatccacagacatgtatgctgcatgctgatttcttacctctctcccaactgtccacaacctgtttcctaatctgtcctcaggcctcttctttatatgctcttatattatagttaggtttgcatacatcttatggcttgaattagctttctattttattagattcttcaacgctttcacagtcattctataaatatacgccttctctaaatgtttgcttgatgaaagaatgaatgactggtagatggatgaatacatggaaaagtatttccttcttttagtcatgattaaatataaagtttctaaccaaacaatttgg

SEQ ID NO: 650854 - DNA, 288 bp, Homo sapiens
gacatgggactgctgggccagaatctcacatcaagccctatccagcaaggggcaggatggaacaatcttactgcttctaggcaccaggactgtggcctctattggtgctatggaatgggcgctggtctactctggagcccaaggctagtagagttcctcttagttgaccctgcaaaacwgctgggtggctctctgcttcagtctagaagtgcagtgggtggtggagggcgttcagagggattctcccattccccgtgttgcacatgtccccatggggagcatgaattc

SEQ ID NO: 650855 - DNA, 624 bp, Homo sapiens
ttttggttccatatgatttttttcataaaagcattgatttttttttttttagttctgtgatgaatgatggtagtattttgatgggaattgcattgaatttgtagactgcttttggcagcatggtcatttttacaatattgattctacccatccatgaacatgggatgtgyttccatttgtctgtgttgtctatgatttctttcagcagtgttttgtagctttccttgtacaggtctttcacatccttggttaggtatattcctaagtcttttattttattttttgcaactattttgaaaggggttgaattcttgatttgattctcagcatggttgctagcaagatgactctcagcttggtgtgtagcagagctacggatttgtgtacatgaattttgtatcctgaaactttgctaaattcatttaccagttctaggagctttttagatgagtctttaggattttctaggtatacaatcatatcatcagcacagtgacagtttgacttcctctttactgattgggatgccctttatttctttctcttgtctgattgctctggtcaggactttcagtactatgttgaatagaagtggtgaaagtgggcattcttgtcttgttccag

SEQ ID NO: 650856 - DNA, 587 bp, Homo sapiens
tggattgttcttgtttttcccrtttcatgaggtgtgaccttagattgtctatttgtgctctttcacactttttgatgtaggcatttaatgctatgaaatttcctcttaacaccacttttgctgtatttcagaggttttgatacattgggccaccattatagttcagttcaaagaatttttaaatttccatcttgatttctttgttgacccaacaatcattcaggagcaagttacttaacttccatgcatttgcatggttttgagtgttccttttggagttgatttccaattttgttccactgtggtctgaaagagtatttgatatacttgatataatttcaattttcctaaatttactgaggcttgttttgtggctgatcatatggtctatattggagaatattccatgtgctgatgaatagaatgtatattctgcagttgttgggtagaatgttctgtaaatatctattaagtccatttgttctagggtatagtttcagtccagtgtttctttgttgactttctgtcttgatgatgtatctagtactgtcagtgtagtattaaagtcccccactattattgtgttg

SEQ ID NO: 650857 - DNA, 612 bp, Homo sapiens
cctgccctttcttttggttctctgtagcccatcttagcttagattatacagcttacattttatgtggttgtgtctttgctccattgttgttctctcaggtttttctgcatgagaatcttgtttctgaatcttgttctagcgagtgacagcttcttcttaacttggtgattttcagtcttggcatttcttttacctgggataatgtaattgttatggctgatcttatgaatgtggatccaaagaagctcaactttctaaaacagagaggaaatttaggctctatctcccaggccaatcctcattcaatgcttcatttgcccataatatatcccagccaggtagacttctcatctctgcctgaacacctctgatgaatgggaacccactatctctcatgctgtgttcctactcaagcttcagcattygacccccagtctgacctctgaggtcagatggaacaaattaatattttttatgcaaaagtcctctaaatattcaaaatcttctaacatgtccttcctctcttctttcacctctaacttttatttgccctcttagctgaatacctttagctcattcaacagcttgacccttggggaagtattgaatctt

SEQ ID NO: 650858 - DNA, 550 bp, Homo sapiens
ggaatatgaggtctttgagaaaaggttttgtctgttttgttcactgaaattctgaagtacttacaacactgtctattatgaaaagtgttccataaatatttgttcaatgaatgaatcagtatttttcccatccctgttattataaccaccctgagcttaaattctgtatagattactaactgttacatatttgcaggcctgtgaagattggacctctaaaaaggttcaatctccttccctttgcagaaagaggttgttggctgtcttaacaataactttatggctatggccacttctggttagaaatcagggacaagattgtctgaaaatgtagaaatcatacaggcttcttcagctttcttatgaaaagcaatgtagcatattgtttttgtgaatcagctttggattcaggctgcctgggttaaaatcctgcctttgttgcttattagctgtgtacctatggtcagctacttaaccactctgtgtctccatttcctcgtttgtcaaatagrtagatgacaataatacacacacacacacacacacacgc

SEQ ID NO: 650859 - DNA, 528 bp, Homo sapiens
atttttcataagtattacaaatacttattcagaaaatctgcatataggttgccatttttaattaccaagccaaccaaacaagcaaaaataataartaaccaaataaattgctgtgtgaaacatacaactgacacaacttatttatttacttatttttagtgtacttttccctgttttcacagatctaattacaggataagggatagtgattcagaggtggtagctggacactgagcaagattcactactcatttcttcagaaacacaatgcttattccctttttaaagcatttttacatgatgtttaggtatagttttgtatcaccttcccaaacatatgagaatattgtatttttagaataatcagaaaattctacagtaaaattagagatttgctatattatttccaagaagaatatgacacactttcaataaatatctctctcacaaagaaaaaccaagattacagaggtgaagtaaaacatacattatttcactggtttatgagtaccttctatacacatggcc

SEQ ID NO: 650860 - DNA, 560 bp, Homo sapiens
aacaattcatgcagccactgcttttccaggtagatttttcataagtattacaaatacttattcagaaaatctgcatataggttgccatttttaattaccaagccaaccaaacaagcaaaaataataagtaaccaaataaattgctgtgtgaaacatacaactgacacaacttatttatttacttatttttagtgtacttttccctgttttcacagatctaattacaggataagggatagtgattcagaggtggtagctggacactgarcaagattcactactcatttcttcagaaacacaatgcttattccctttttaaagcatttttacatgatgtttaggtatagttttgtatcaccttcccaaacatatgagaatattgtatttttagaataatcagaaaattctacagtaaaattagagatttgctatattatttccaagaagaatatgacacactttcaataaatatctctctcacaaagaaaaaccaagattacagaggtgaagtaaaacatacattatttcactggtttatgagtaccttctatacacatggc

SEQ ID NO: 650861 - DNA, 566 bp, Homo sapiens
ataaaatgggaagcaggtttgtctgacacagttcccaggttgacttttccttttggttcagtgatttgggggtcttgaggtttattttcctttcacagtacatcatctgggaaaacataaagattatgttgtatgaggcatttgaaacattgctaagtaatattttgccaattcatgactttgtagtaggaggttttcagaaaggaaacagctccttcttatcaacctgtttcaattaattatacaggtgtcaatcaatacygtataagccatttgttttttaatttattatacataatgctaggacaaaaatatttagtgttattcatacttgattgattaaaataaatttcaatttaaaatatatggttttaaaacaataagaagcatttgctgcatcgatttcaaaaatgtgattaagaacattaatcacaggagagtagttgctgaacacagtctggatcaagcaagagccaatgcaagagtctcatttcaattagggaacaaaaagcagcagaatctctatatagtagtctcacagagcttctttattattttgtattttc

SEQ ID NO: 650862 - DNA, 520 bp, Homo sapiens
aaagacttttcaattttggtagctgtgcccaaggttgactcacagtaggattatggacaggaaaactctggaacattttttttaaagtacatgagtaacacatgaaaacaagcttttgtaattagtccaattaaaaataaaatagaaagagcaagaaacaggaatgctgagggggtggagcaagatggcagaatagaagcctacaccttcatttcccttgctgggacaccacattttaacaactatatgcacacagaaaaacactgtcacaataaccaaaaatcaggtaagcatcacagtacatggttttaacttcatatcattgaaagaggtattgaagagggtaggagagattgtcttgaatcactgacaccacctcttcaccattccccagaagcagcaggacagcacagagagtctgagtctgtgcactttgggaagggmaagtgtattagcctgtcttcacgctgctgatgaacacatacctgagactgggcaatttaaaaaacaaagaggttta

SEQ ID NO: 650863 - DNA, 537 bp, Homo sapiens
ctcaaaagggcaaatctaagagttattagccttaaagaggaggcagagaaagagataagggtagaaagtttaacaaatggataatatctgagaactccccaaacctagagaaagatatcagaattcaagtacaaggttgtagaacaccaagcagattaaactcaaagactacctcatgtcatttaataatcaaattctcaaaggtcacagatctagtaaggatcctaaaagcagcaactgaaaagaaacaaataacatacaatgsagctccataaaattgaccacagacttttcagtggaaaaggccaggagatagtgtcatgacatatttcatgacatatgtcatgacatatttaaagtgaagaaagaaaaaaccttttaccctatagtagtatatctggtaaaaatatccttaaattatgaaaaagaaataatgatcttcccagaaaaacaaaagctgagaaatttcatcaaaaccagccctgtcctacaagaaacgctagggaattattgcaaatgaaagtaaagaatgtaagt

SEQ ID NO: 650864 - DNA, 569 bp, Homo sapiens
aatactgtgagggtatgtgctcatataaggttcagcttcatgaggcagagtacagacagatacccaccaagttgttaatatgaattacgagggtactgaagtggaggtttatgtgaatagaattcgagacagtgtgggggggtcagaatgaggaaataagtagcatagtagttcataataaaagtcatgmagaacttatagctatctctgaatttacagacttccatgatttaatgttgcaaggaaatgtatgcagtatgttcagacttttgttgaaagaaatagctcaaacttttctctctaaacactctctttatatataaaatacttgtttatgtacatgtaagcaggtagaagaaaggtgttcaaagatatccacaaaattgttaacactaaatagctcaaaggctgagaggtaaatatttttgacttaataaaacttgtgctatttttgtgctattttatactaactgttactacaaatatgtattacttttttaaatttgaaaaacatttaaaaatatttactctacgttaaattctgaaagtacatcctagcaatattgcac

SEQ ID NO: 650865 - DNA, 450 bp, Homo sapiens
ttctatatcaatttcttgcaagattgtaaagatttcataggataaacaggttgagtctggtggcagaataaattacatgtgaaaaaattcatatatgaacgtgtggggctattcacaaaaccattagcatttgacatggctgcaggaagcrtgtttgggaaagagtagcattaattgagagtagaaaggaaagtgacaacacatttgtgaatgtcaagtacaccatgccaaaaaaattaagatatattaaatgaatggtcaatttacatatttttaatattaaaaatcctctgagggatgttttatgtttcctattttacacatgagaaatcaagctaagaaagttttgatgcatacatattaagtactgttatgtcttcttagagaatagacctaattatataatgaccttcattatctgattaattttctgatgaatgttctgttctc

SEQ ID NO: 650866 - DNA, 581 bp, Homo sapiens
attctctctgctttaatttttggaagagtttcagaaatattggtattagttatttaaatgtttgggagaaytcatccatgaaggtattaggtcctaggcttttttttcatggcaaactttttactatggttcaatctcttggctagttattggcatattcagatcttctattttctaatgattcagtcttgatatgtggtatacgtttaggaatttatctatttcttccagtttgccaaatttgttgacatatagttcttcatagtggtttcattattaacccttctatttctgtggcatcagttgcaatgtatcctttttatttctggttttatttatttgattctttttctcttagtctagctaaagttttgtcaattttgtttgtcttttcaaagaaccaacttttagtcttgtttatctttttattgattttgtagtttctatttcatttgttaattctctgatcattatcattaccttttttttctactaacagtggacatagtttactattcctttcctagttccttgtgatgaaacattagttttttttatttaggatttttatttgggtgttt

SEQ ID NO: 650867 - DNA, 581 bp, Homo sapiens
attctctctgctttaatttttggaagagtttcagaaatattggtattagttatttaaatgtttgggagaactcatccatgaaggtattaggtcctaggcttttttttcatggcaaactttttactatggttcaatctcttggctagttattggcatattcagatcttctattttctaatgattcagtcttgatatgtggtataygtttaggaatttatctatttcttccagtttgccaaatttgttgacatatagttcttcatagtggtttcattattaacccttctatttctgtggcatcagttgcaatgtatcctttttatttctggttttatttatttgattctttttctcttagtctagctaaagttttgtcaattttgtttgtcttttcaaagaaccaacttttagtcttgtttatctttttattgattttgtagtttctatttcatttgttaattctctgatcattatcattaccttttttttctactaacagtggacatagtttactattcctttcctagttccttgtgatgaaacattagttttttttatttaggatttttatttgggtgttt

SEQ ID NO: 650868 - DNA, 573 bp, Homo sapiens
tgggtgactaccatgaaaccacagagcccaggattgaaatgtgggtacttgcagagtggccacagagcccaggtttggagtacaggcacttgaaggatggctgtggctcagggattgaggcatgtgaggggttgggagatgtgatgacttcttttctaaagcagctcagtagtggctgatccttgaggggagagaggtaggcagctgcatctccctttctccaatgggaatggcagacctctttctttatatacttttctgattgtaatttactataaactagaagccctggtaaccaaacatgtttacatatgtttataaagttagtaaattgcttatgagtgaagaattaaggtggtttcttttgaacatagtttacatgtattaacataaacttaatgacatattatatggctatgcaaatatatctttacttaatattttaaaatatttttcacrttgcaatataatgtatttttggaatacttaatccaaacactagagcaaatacaatgtagaaagtgaaattcagcctacaatgatgtaatgaattgtactatgtactacccaaat

SEQ ID NO: 650869 - DNA, 608 bp, Homo sapiens
atggcacaggatctatatctactatctattacagtagtcactagacatatggagctatttaagcttaaatttaataaaaacacaaagaaatgtaaaactgagttccccattacaagtgttcaatagccacattggctagtggtttccatatcaaacagcatacatatagaacattttggccattgcagaaagatctattagactgcacagtttacacatacgttctttgtagttttgtgatctagttgatgcttatttttaaaaattttctcaaaattaagatagtctgccttgtcacattgttataaatagcatctactctttgtgttccattacacatcataaattataaagtgctttataccaacatgactatagcctctctaaatgactgaggctgtattgcattattcaatcctgccaaaaagtacaatraaataaagattacacttaggaataaagtagcttaaaaattaagtttaatgtatttgagagaaaatgtttaaattctttaaattgagaacatttatacaaaatactttcagtccagtatttaggcaataataattagaatgaggcaaacatggcattctctttagatacaaaac

SEQ ID NO: 650870 - DNA, 602 bp, Homo sapiens
gaaatttcataacagatgttacctaatttgttcagaagacattttattttgttcacaacatgcatgttctagcataatctcagtctcttagatatrgatagaagttggtaaatgaatgctcccagtttctaaacatctaatacattggttacatttgttgatccagtaattctgtgaaaattttgtgtttctctacctttatacctaataattttgcaagttgaaatgtcttagcttgttcctattcagttccacccagtaatatggaaataatccttgctctagttttaagtaagttgaggagtctgagcagtcttccagtatcaagtataccttgcttcagtagcaatctgatataatttcccacttttaatcatggagattttcctgagagagtaagttctttgtataatgaataacccagggagaattgctctcatagccacgtaattattgttttctcattttttggtaaactgaagatgaagcttatccatcacaatgtcttttactaaatataacagaaaccccaactctaatgtatttaaataataaggctacttgttatttcatataataataggtggtggttcgcaggcctt

SEQ ID NO: 650871 - DNA, 496 bp, Homo sapiens
caatatgactcctgataatctttcaggggtgttacaaagtcaaaactattttcattatgatactaagataccatttgccttcttcagtatgttgactgatgggacaaaggtaatggtgtgtaaaactgctaataccttagcaaaaatcaaggcattggtgctgaactgcattagcagttatcatactgttgtattattgactgctatgcaattgcctttttwaaaaaaaaaagccaattttatgcattttatctgagaatgtccttgatttgcagaagaaatttattttatcagactatatttttttaatttttaatttctacattttgtggatacagagcagatgtatgtatgtatttatgggttataggagatattttgatacaggcatacaagtgaactatttctccattagttcactcgttttaaattttagctaccacaaataagtaagattagtttgtctttctgtacctggcttatttcacttaacata

SEQ ID NO: 650872 - DNA, 592 bp, Homo sapiens
aaatataaaatcatatcatttacasacaagaataatttgacttcctctgccagggtctgacctacagacccaggatgcacaatggatgaataacatactcagacaccaatattcagtaaaagagcaagccagggagccaggccactcacagaaagagttttggcagccacacaccctgactagttggctctatggtcacttactcagcacagatttaatgccaaaggctttgagtcaaccacctgagggtaattaatcaatctggtcgcccacccacccccccgccacccccccgcaccccccccgagagatcagtcctgccttcgaatgatcaaaggtcagtcttgggaccagatgagtaaacaagctctttagataactcccttgcattcctttgtacctactctaagctactaacttaaggtaagaggattaggctgccttcagccaaatctttcactaaagctacacaaacctcccagccttccaagaaagtttgtgtctatttcctataactttatctttataatttttcccaccactttgactgatcccctacattctttctttccaatttagatgcctttatttt

SEQ ID NO: 650873 - DNA, 592 bp, Homo sapiens
aaatataaaatcatatcatttacagacaagaataatttgacttcctctgccagggtctgacctacagacccaggatgcacaatggatgaataacatactcagacaccaatattcagtaaaagagcaagccagggagccaggccactcacagaaagagttttggcagccacacaccctgactagttggctctatggtcacttactcagcacagatttaatgccaaaggctttgagtcaaccacctgagggtaattaatcaatctggtcgcccacccacccccccgccamccccccgcaccccccccgagagatcagtcctgccttcgaatgatcaaaggtcagtcttgggaccagatgagtaaacaagctctttagataactcccttgcattcctttgtacctactctaagctactaacttaaggtaagaggattaggctgccttcagccaaatctttcactaaagctacacaaacctcccagccttccaagaaagtttgtgtctatttcctataactttatctttataatttttcccaccactttgactgatcccctacattctttctttccaatttagatgcctttatttt

SEQ ID NO: 650874 - DNA, 592 bp, Homo sapiens
aaatataaaatcatatcatttacagacaagaataatttgacttcctctgccagggtctgacctacagacccaggatgcacaatggatgaataacatactcagacaccaatattcagtaaaagagcaagccagggagccaggccactcacagaaagagttttggcagccacacaccctgactagttggctctatggtcacttactcagcacagatttaatgccaaaggctttgagtcaaccacctgagggtaattaatcaatctggtcgcccacccacccccccgccacccccccgcaccccccccgagagatcagtcctgcctkcgaatgatcaaaggtcagtcttgggaccagatgagtaaacaagctctttagataactcccttgcattcctttgtacctactctaagctactaacttaaggtaagaggattaggctgccttcagccaaatctttcactaaagctacacaaacctcccagccttccaagaaagtttgtgtctatttcctataactttatctttataatttttcccaccactttgactgatcccctacattctttctttccaatttagatgcctttatttt

SEQ ID NO: 650875 - DNA, 592 bp, Homo sapiens
aaatataaaatcatatcatttacagacaagaataatttgacttcctctgccagggtctgacctacagacccaggatgcacaatggatgaataacatactcagacaccaatattcagtaaaagagcaagccagggagccaggccactcacagaaagagttttggcagccacacaccctgactagttggctctatggtcacttactcagcacagatttaatgccaaaggctttgagtcaaccacctgagggtaattaatcaatctggtcgcccacccacccccccgccacccccccgcaccccccccgagagatcagtcctgccttcgaatgatcaaaggtcagtcttgggaccagatgagtaaacaagctctttagataactcccttgcattcctttgtacctactctaagctactaactyaaggtaagaggattaggctgccttcagccaaatctttcactaaagctacacaaacctcccagccttccaagaaagtttgtgtctatttcctataactttatctttataatttttcccaccactttgactgatcccctacattctttctttccaatttagatgcctttatttt

SEQ ID NO: 650876 - DNA, 583 bp, Homo sapiens
ttaatgtccttttccttctgatttaagtattcccttcagcatttcttgtaggactggtctggtattgatgaaatccctcagcttttgtttgtctagaaaagtctttatttctccttcatgtttgaaggacatttttaccagatataatgttccagggtattttttttttccttcaacacttttatttatttatttgtgacagagtctcactgtgttacccaggctggagtgcagtggtgcaatcttggctaactgcaccctccacttcccgggtttaagcaattctcctgcctcagccttccargtagatgagatgacagatgcctgccatcacagccagctaattttcatatttttagtagagatcaggtttcaccttgttggccaggctggtcttgaactcctgacctcagataatctgcctgcctcagcctcccaaactgctgggattacaggcataagccactgtgtccggtcttccttaagcacttttgacatgctaggccactctttcctggcctgtcaggcttccactgaaagtctgctgccagatgtattggagctccgttttatgtcatttgtt

SEQ ID NO: 650877 - DNA, 605 bp, Homo sapiens
ggtgttatcccacaaagcttgatagagagatgaagtgacgatttagattagaaacgtttatcaaggaatcaagaaacctcaacatgaagttagcagcaagctatgggaaagctataagcaatgggcttcctccaggccttttaaacactaaattctgagtttgaaggaaaccaaatctcttctttcataacttggttttggaattatgaatgtttctctaattaaagctactatgttttcaatggttatgatttagcaatgtgaaagctaatccataatccttgttatgggagcacaaaattatgagagcaaatttgtacatatagtgggattggccaaataagtgaatatattatggaaaaagaaagccaggttcctcactgtcagagaagaacgttacaaataaggaaatgtggaaggctaagatgaatccagtagagttagattgaaattagaagtattaataaaaacttaggtttttgttaaattatatatamagataaacatagaaataagtattggtgtctgtgtattcatgaattagaatacatacatatatttcctagttctttctgatgagtctagacgcaatgataccctaatag

SEQ ID NO: 650878 - DNA, 461 bp, Homo sapiens
cttattataaataagaaatgatgcctctcttatgctgtcactcaggaaattatgagagttttagaagcctgaagcagagaaaaagtatatatttttattgcgtcccaatagtcacatctcgttrttttattttaatttgcatttctttgataacatgagatgtggaacatcttttaagatgcttatttgtcatctgtatatcttcttggtgaaatgtctgttaaagtctttggctcattttgtaatcaggttgttttattgttgaattttaataattatttgtatattttgaataacaatcttttatcaaatatcttgcgaatattttctcctactctgtggcttgtctttacattctcttgacagagtctttcacagagcagaattttgtaattttaatgaagtccagttttaattttttttatatatattgtacttcggtatgttttgaaaagtcatca

SEQ ID NO: 650879 - DNA, 546 bp, Homo sapiens
gtaacatttttattaacagaaaatattttgtcctatctctctcccagttcagtggctgcttgcacatcttaaatgtatgtaactgagaggtgtcatggaagtgatcctttagagacagaaaaatatcataaataactttctaagaaaaatcaggcaatctttctagctcagactatgctaagcaaatacttattaaattatctctctaatggaaaattaaaaagtgataaggactctttaaaataataaatttctccktgtaatttattacaacatttatagtgtagtttatcattcattaatgtggcaaatatttattggttagtactaggtatacccagcagtgaatgaaatagtcaaagccattttgaaacttactttatggtagagtataataaatagtaagcaaaaagtacataataagtaaattataaatcatattagaaaatcttacatgctttgagggaaaaaacaaacagagaaagataagggagatcagaatgtggtaggaaagagttgtaactgaaaatacaataaagtagtttg

SEQ ID NO: 650880 - DNA, 546 bp, Homo sapiens
gtaacatttttattaacagaaaatattttgtcctatctctctcccagttcagtggctgcttgcacatcttaaatgtatgtaactgagaggtgtcatggaagtgatcctttagagacagaaaaatatcataaataactttctaagaaaaatcaggcaatctttctagctcagactatgctaagcaaatacttattaaattatctctctaatggaaaattaaaaagtgataaggactctttaaaataataaatttctccttgtaatttattacaacatttatagtgtagtttatcattcattaatgtggcaaatatttattggttagtactaggtatacccagcagtgaatgaaatagtcaaagccattttgaaacttactttatggtagagtataataaatagtaagcaaaaagtacataataagtaaattataaatcatattagaaaatcttacrtgctttgagggaaaaaacaaacagagaaagataagggagatcagaatgtggtaggaaagagttgtaactgaaaatacaataaagtagtttg

SEQ ID NO: 650881 - DNA, 527 bp, Homo sapiens
ttgaatatgactttgcccatattcatcagaggaattactatctatggcagctatagccttatgaaatgtatttctaaaataataagcctcgaaagtcaaaattgcttcttgatccatgggctgcagaatggatgttgcattagcaggaataaaaacatttatcttcttggatatcttcatccaagctcttgcatggtgaggtacattgtcaatgaaccacattattttgaaaataatctgttttctcagcagtaggtctcaacagtgagattcaactattcagtaaaccatactttaaagagatgtgctgtccttcrggctttgttgtttcgcttatagaacacagacagagtagatgttctacaattcttaaggaccttagaattttcagaatggttaatgagcattggcttcaacttaaaatcactagttcaaatagctcctaaaaagagagatagcctatcctttgaagttttgaagcaaggattcaaaagatttgaagaggattggtttctctctctagttat

SEQ ID NO: 650882 - DNA, 527 bp, Homo sapiens
ttgaatatgactttgcccatattcatcagaggaattactatctatggcagctatagccttatgaaatgtatttctaaaataataagcctcgaaagtcaaaattgcttcttgatccatgggctgcagaatggatgttgcattagcaggaataaaaacatttatcttcttggatatcttcatccaagctcttgcatggtgaggtacattgtcaatgaaccacattattttgaaaataatctgttttctcagcagtaggtctcaacagtgagattcaactattcagtaaaccatactttaaagagatgtgctgtccttcgggctttgttgtttcrcttatagaacacagacagagtagatgttctacaattcttaaggaccttagaattttcagaatggttaatgagcattggcttcaacttaaaatcactagttcaaatagctcctaaaaagagagatagcctatcctttgaagttttgaagcaaggattcaaaagatttgaagaggattggtttctctctctagttat

SEQ ID NO: 650883 - DNA, 576 bp, Homo sapiens
gattttctgcttaatcttttttcacctagacttccttaacacatatctttcatacttctactccctctctggtgttgtgatgaaagaatggaactgaggagtaatttatggggtgggagtagtaaaaagtttagcaatttaacattttaaggcattattttcgttactcaaccaattgaaattgataaaagctaagctaatatcagaaagatgatgtattgaaaagatagtggatagctcaaaaatctaaatggaatgtatattagtttgttcccacactgctataaagaactacccaagactgggtaattaataaagaaaagaggtttagttgactcacagttccacaggctgtaccggaagcaaggctgggaggcctcaggaaaattaaaatcatggcagaaggtgaagggtaagtaaacatgtcttaccatggcagagcaagagagagacagagtgaaggggggcgtgccacacttttaaaccrtcagatctcacgataactcactatcacaagaactgcaagggagaaatccaccagtatgatgcaatcacctcccaccaggcccctccttc

SEQ ID NO: 650884 - DNA, 568 bp, Homo sapiens
attatttatcatgtcttttatacagccagaaaatttatgagccatagtatgaaaatggaggatagtacaatggccaattttgttttcttctgtggttattttttcaaactctgaatttaccagtttcatttaatttattttaaatttacataatgctttaagttttatatagcattttagtatgagaactagaaaaatctcccactgacagatttgagagaattgggaattatctatttcactcctacatgacaacaattataaacacagagtgtactttgtacttatagagttcttcaaaatgtttaatacgtttttgcaaccattctatatttctttaaatgattcttggaggatgagaaagcatatagaacttcattttataaaagaaagtaaagatagttattactgtaagttaacaatgtaatgaaaatttatatcttggtgttgatcttgctttttccgtttctaaaatgacayatgtaatacatggttttacttgtcatttaatttgtcttatcaagagccagtgaaaacattgttgaattaaaaataacatttaataata

SEQ ID NO: 650885 - DNA, 607 bp, Homo sapiens
gcctatgtactgagctttggaacatatggaataaaattaagcaaaatgggaaatccaaagtgatgtttgaatattttaatttgtctctcttgataattcatagatgatttgggaaacaaattaagtaacgacatagaaaatgttagcaacattattaaccaactagatccaattgttatttacracaattatttacaacagaacagttgtaaatgtaattaaacatttatagaaaagcaacttctagtttctattattttaataaacaaagtagtcatggatagcttttaatcaaattgcagtatcagcatgtaaatattatttttaatgaatattttcatgttctatattttaggaattattttttatgaaggcagtgttactcaatgatgttccagtctctcactaagttgaagtacagtcatgatacttgtagtaattgtttcagatttctcattgtaatttataaagtacatgtatagctatttggtagatatggctggttattgtcagtctgttcccccacatcagattcattttcaaaccttgttttttccactctgtgtctaaagataatgagcattattaccttattacctccaaaact

SEQ ID NO: 650886 - DNA, 574 bp, Homo sapiens
ttgactaaacccattttataccacagtcaaatcctcaagggcatcaaaaaatatgaaagcaaaaagccacagccaaaagacagcaacttcagagattaaaagaacatcatcagcacacagagatgagaaagacccagtgcaagaactttggcaactctaaaagccagaatgtcttcttacctcaaaacgatcatactagctacccagcaaaggttcttaactagactgaaatggctgaaatgatagatatagaattcagaatctagacagcaaggaagctcatagagatacaggagaaggttcaaactcaatccaaggaacacagtaaaacagcccaagagttgaaagatgacatagccatttttaaaaagaaccaaactgaacttctggaaatataaaaatttgctacaggaatttcagaatgcaactggaagcattaataacagagtagaccaagctgaagaaagtatctcagagcttgaatactgctcctttgaatcaatgcrggcagacaaaaatataagagaatttttaaaaataaacaaaacctctgagaaatatgagattatgtaaa

SEQ ID NO: 650887 - DNA, 595 bp, Homo sapiens
ctttcctgaagctactaaaatatgcatcagccctgctgtatcaagaaagaatcacatggtggaggttaaactttctgtctttattctcacatgtacctttggcccacacactaaatatctgcagtgtgattatctatagcttctcaggaattcaactgtcatagaagtaaagggcaatcaagctcagtagagtgcaaataggtcaatattgggcttcccaatctatgctatcatatcacattatctycatatctgtggcctccaaataggtgtaacagcatcttattttgttttcacagtgttagtaaggtgagttgtgagttatatttatgtagttaatttagcaaaagtctttgatatctgtggcttatgggtaggattcaattatcttccagtcttatacaaatttctcctaattttatactactttgcctattaaaacattgttacatataacactttgaacaagcttatgagttggtattaatatccagcttttaactgaatacactgaaattcactctggttgagtaagatgttccaggttaaatggttgagaagtggcaaagtgagagtgtgtaccctgcatgtttgg

SEQ ID NO: 650888 - DNA, 605 bp, Homo sapiens
ttttaagtaaaaaataaaagtacaactaattaaaatttgcaaaactcaactaaagcagtcctgggagggaaaagtatagcattcagcatatatttaaaaagtagaaagatctaaaattaataacctaagattctagttcagaaaattagataaagaagcacaaaaagcaactccagactatgtataatccatgaatatagagatatatgaaktatggctatgtttatatttgtttttcttaaatacacaatgatgtggttcttgacattttataaccaacaatgattgtcttaaatatcacagaaatactgtaagatctagatctcatttactacaaacattgctttagattactatgaagttcagggtatcagaatttgagtgagtattacaaacttaaaataataaacaagtttgcctttggaagtgatacaccaagatcctaatattttcataattttccttatattaattttacaatgaaagaataaaagggggtaatgtaaataaatatagataaaagcttaaaataaaaatgtaaataataaaaaggagtataaatttataactgtgacaaattaagtatagaatttaaatgtgtcaca

SEQ ID NO: 650889 - DNA, 617 bp, Homo sapiens
ctgttaacagtgggctgcttggacacgcgtgtgcatgtgcacgcatgctggtgtgcatgctgggctgcctggcaaatctggtggtgrtgggattcctcaaggagaaaacattccctcttgcaatggcaagaactaggggcagttctctgtccctcctcccaacccctcctttcccctgcccttgtcctgatgcctcaaggcttagagagaaacattgtatccagaccgagggctctgctgcttctttccagaaagtgattggcaaggctttggagagaagagcagttctgcagctggccttgttccttcatcatcccccttccttgtgcattatgcacttgctgctgcctcctgggctctgatagaagggcagggctgttgagcctggatgggtggaggcttaggtagccggacctgcctgccaccctcctctcccactcaggcacaatggtgcctaaagtgtttccaatctctgggacctctgtacccaaactgaaactctaaattggggccctaactaattttccttttgaggttgtgggcataagtgctgatctagaatacagtctgggtcccacactgtgtctcagtgagactgttgatgccttgagatgacc

SEQ ID NO: 650890 - DNA, 450 bp, Homo sapiens
tcatcattcacctgtgaagactactagtgtactaactcattattctgaaaattgataaataagtagaataaccatataatttgttgtcccaaatggaacattttaacgagtaatattcaattcaaagttcacacattacatttggttgatgtatctcttaattttcttttaacctataacttcacaaaccataagtataaattaaataagtttaacgtataactttatgctaacatcacctstcacctggactatcacaactgccttcactcttgactcctagaactcatttaccactctgcatcaagaatcatctttgtaaaaagtatatatcagaggaattaactggaggataacggtggtaacctgaattcaaatctccatacacatcccaaaaaaataaataatagcaacaaggagtacaaataaaacaaaatgttacacatgcca

SEQ ID NO: 650891 - DNA, 438 bp, Homo sapiens
gattttgaacttctggccttcagaaccatgcgagaatgaatttctgtagttttaagtcactaaggtggtaatttattataaaagccctaagaaactaacataaccttaaacayccatatcagtaaaaatgaaagaataataaaaaatgaattaagtcctcaactcaaaaaaactagaaaaagcctataaagtatttctaaaataaagcacaattaaggaattaatagaaataaaaacagaaattaaggagatgaagaacagaaaaatagtacatcaaattattaatatgaacatcccgattattttttaaaagtcaacaaaatagacaaaatactaggtaattcaatcaagacaaaaaggaagacagcaaaatataacaagaataactgttgatgaagaaaattttaaatcataaaatattttgtacatatctaaaca

SEQ ID NO: 650892 - DNA, 438 bp, Homo sapiens
gattttgaacttctggccttcagaaccatgcgagaatgaatttctgtagttttaagtcactaaggtggtaatttattataaaagccctaagaaactaacataaccttaaacacccakatcagtaaaaatgaaagaataataaaaaatgaattaagtcctcaactcaaaaaaactagaaaaagcctataaagtatttctaaaataaagcacaattaaggaattaatagaaataaaaacagaaattaaggagatgaagaacagaaaaatagtacatcaaattattaatatgaacatcccgattattttttaaaagtcaacaaaatagacaaaatactaggtaattcaatcaagacaaaaaggaagacagcaaaatataacaagaataactgttgatgaagaaaattttaaatcataaaatattttgtacatatctaaaca

SEQ ID NO: 650893 - DNA, 438 bp, Homo sapiens
gattttgaacttctggccttcagaaccatgcgagaatgaatttctgtagttttaagtcactaaggtggtaatttattataaaagccctaagaaactaacataaccttaaacacccatatcagtaaaaatgaaagaataataaaaaatgaattaagtcctcaactcaaaaaaactagaaaaagcctataaagtatttctaaaataaagcacaattaaggaattaatagaaataaaaacagaaattaaggagatgaagaacagaaaaatagtacatcaaattattaatatgaacatcccgattattttttaaaagtcaacaaaatagacaaaatactaggtaattcaatcaagacaaaaaggaagacagcaaaatataacaagaataactgttgatgaagaaaatttwaaatcataaaatattttgtacatatctaaaca

SEQ ID NO: 650894 - DNA, 493 bp, Homo sapiens
atcaaaccttttgaaagagacatgaaagttcaaagacaggagaaacatcttcaaaatgttaatgtagcctggtgcaacagggcaggcctgcaatcccagccactctggaggtagaagtggaaagacatgcttgaacccaggaagtccaggctgtagtgggctataactgcacttctgaatggcgactgcactccagcctgggcaacagagtgagaccctgtctctaaaataaataaataaagttaaataaaagtatatttccaaactaccaatcaagtgtgaaaataaaatacagacattttttaaaagaggttaagtccctaacatttacctcctatccaacttttctcaagaaacaattaaataacatttcagtaaaakgaaagagtaagccaagaaagggtccaataaaaagagatttccggaaggaccgcagcagacattagtttcagaatagtaacttgataccaaatcttgagaacaagtctacatc

SEQ ID NO: 650895 - DNA, 495 bp, Homo sapiens
aaataagaaacacaacattttggccaggcacagtggctcatgcctgtaatcccagcactttgggaggccaaggtgggcggatcacaaggtcaggagttcaagaccagcctggccaatatagtgaaaccccatctctactaaaaatacaaaaattagccggacgtggtggcaggcacctgtagtcccagctactcgggaggctaaggcaggagaatcgcttgaactygggaagcagagattgcaggttttaaaattctcacaggtaactcatgaacaatgccctctgcccttctgagtaaatcctaagcaaatgcatggcacagtactctcaacccaggctgcacccatgaagaggagatcctcagttaaaagttctaatggccaataatactggctactaggcaattattcgagaggatttaacccaaaaataggagcattaaatcaagaaactatacaggctaaggaagaggtattattaagcagaacaagcta

SEQ ID NO: 650896 - DNA, 380 bp, Homo sapiens
actgaaaagtctcggtaaggtaagtgtcaggcattgttcactgacggctctggctcacttctctgcaattctcttcactctgtcstgctccatatgttggcttaccctcacgctggcatcctcattgctgcaagatggctgccagcagctaccagggctatgcaatttctcctttaaatccagggaagagaaaatgtgacttctcacagtgaacaagagttctcagctttggagaccattgaactatgtgatagagtgtagaactggagagactgaatggagagatgtttcataacaggaaagggggaaatgaatgttgcaaagacaaccacaatgtccaccatggtggcacaatatatgcttagtgaatgacagtgcat

SEQ ID NO: 650897 - DNA, 436 bp, Homo sapiens
gtaactgaaaagtctcggtaaggtaagtgtcaggcattgttcactgacggctctggctcacttctctgcaattctcttcactctgtcctgctccatatgttggcttaccctcacgctggcatcctcattgctgcaagatggctgccagcagctaccagggmtatgcaatttctcctttaaatccagggaagagaaaatgtgacttctcacagtgaacaagagttctcagctttggagaccattgaactatgtgatagagtgtagaactggagagactgaatggagagatgtttcataacaggaaagggggaaatgaatgttgcaaagacaaccacaatgtccaccatggtggcacaatatatgcttagtgaatgacagtgcattccaaagttgttgtttcaagaaaataaaatatctatgaagacatattgaattc

SEQ ID NO: 650898 - DNA, 551 bp, Homo sapiens
gaccccaaatgatggagacagatttaagcgcactcttgtctccttgctgactggttttgtgataaagcctttcctttctcaaaagccagtgccatagttattagcttctgtgcacattgggcagtgagcccattcgccaaataaaaatatctctggaaggattaaaaaaaaaaaaaaaactagtaaaacttatactatttttggccacaatggaataatagagaacagatttatccccttgccttgcaaaacaacttaaaaaaaaaaaaacagacaaaataaaacaatagttttaagacactgagcgtcagacagtacaggactgctaagagaaggtaaaagaagggaaacaaaagaggagagtcctacrataacctcagcttacggcctgaagtttgcttccaggccacgatgcagggaggaggaactgaggcagagctcagtggtctccctgaattaagaagacagagattgcagttcagggtggccaaagcagctaaatttgcagagccaagaatcagagaagagaaagctgcatacagaagcgctcc

SEQ ID NO: 650899 - DNA, 542 bp, Homo sapiens
agaagcagctacctgcagctgggaaaggaccactggagaacaggaagccaagcaattttcagatatcacatagggctggaaataggttgtgttcccaacagccagagatgaaagacctcataatacgcggggcattgggtagaatactcagaagtgggggtacactagccctagactaaagactattctggatcagcataatgaagcttcaaagtaggatttcaggagcggatgattagggggcaggagtgaaagggggtgctcacagccagcgcttgaagtataactactttgtcactgtacatccttttatgctgttcrgaatttttactgtgtgcatttctttttaaaaacattttacaggaggaaaactctaaaatcaaactgccagggtgacaatctggctccagtccttgtgagctatgtaaactcaggcaagtcactcaaccaccccaagcctcggttttctcattggtggagtggattttctttggattgttgtgaagattaattgaaatgttcatagaagaactagaagtgcc

SEQ ID NO: 650900 - DNA, 576 bp, Homo sapiens
tattaatagtacctacttcattatgaggtttaatgttaatccacaaagcgcacttaggaaagcacctagcacatagtaagcttaataaaatgttagctataactgttatttcttgaagagagtaatctagaagcacctctacccacccacccccactgctacccagggcaggggaggcctctctttccaggagctggaggcaaggaaactttccctcttaaaaaatcttctgagaaaataggattgcagtgcagaaracaggggtcttctccctggattactgagggcacctatgccccacccctagggttcagcatgggccaggacacatcctctctcttcaagtctggttgatatcaagtaacatcatttaactagaacttgatcacttacaaaagatctcctccatatggtccatttgggccacatcacagtggtgtgaagtgtaattattcccatttttcatatggggacactgaggatcagaacagtcacgtgacttttccaacttcacagagcttgatgcagatgagatgaaaagcaaacccaatgttcttcccccagatcaatggccct

SEQ ID NO: 650901 - DNA, 576 bp, Homo sapiens
tattaatagtacctacttcattatgaggtttaatgttaatccacaaagcgcacttaggaaagcacctagcacatagtaagcttaataaaatgttagctataactgttatttcttgaagagagtaatctagaagcacctctacccacccacccccactgctacccagggcaggggaggcctctctttccaggagctggaggcaaggaaactttccctcttaaaaaatcttctgagaaaataggattgcagtgcagaaaacaggggtcttctccctggattactgagggcacctatgccccacccctagggttcagcatgggccaggacacatcctctctcttcaagtctggttgatatcaagtaacatcatttaactagaacttgatcacttacaaaagatctcctccatatggtccatttggsccacatcacagtggtgtgaagtgtaattattcccatttttcatatggggacactgaggatcagaacagtcacgtgacttttccaacttcacagagcttgatgcagatgagatgaaaagcaaacccaatgttcttcccccagatcaatggccct

SEQ ID NO: 650902 - DNA, 466 bp, Homo sapiens
gaattcctttcccagagtattaatatcaatattccttgctaggaaaagaatttagcgatatcttccctacttgcacatccattcacaggctctctgcaagaagaaaaatatggctctttttgcctgaccccctaggcagtcagaccttatggttgtcttcccttgttccctaaaaattgstgttattctgttctttttcaaggtgaactgatttcatattgttcaaacacatatgttttacaatcaatttgtacagttaatacaattatcacagtggtcctgaggtgatgtacatcctcagcttacagagataacaggattaagagattcaagtaagacaggcataagaaagtataaaagtattaatttgggaactgataaatgtccatattaaaatgaaatcacaatttatgttcctctgccgcggctccaactggtccctctgtttggggtccctgacttcctg

SEQ ID NO: 650903 - DNA, 466 bp, Homo sapiens
gaattcctttcccagagtattaatatcaatattccttgctaggaaaagaatttagcgatatcttccctacttgcacatccattcacaggctctctgcaagaagaaaaatatggctctttttgcctgaccccctaggcagtcagaccttatggttgtcttcccttgttccctaaaaattgctgttattctgttctttttcaaggtgaactgatttcatrttgttcaaacacatatgttttacaatcaatttgtacagttaatacaattatcacagtggtcctgaggtgatgtacatcctcagcttacagagataacaggattaagagattcaagtaagacaggcataagaaagtataaaagtattaatttgggaactgataaatgtccatattaaaatgaaatcacaatttatgttcctctgccgcggctccaactggtccctctgtttggggtccctgacttcctg

SEQ ID NO: 650904 - DNA, 447 bp, Homo sapiens
agtctgcccaccttagcctctcaaagtgctgggattacaggcatgagctatcacccacagcctagaatggattttttgaaacccgtgagccaactgtatgctgtgtagagaaatctacttcaaatataatgatataggtaggtaaaaattaaggtggggggaagatatatgatgcaaacattaaacaaacaaaaaaaagaaacagtggcagccatattaaaatgagacaaaaaaattgcagaaatgaaaaaattaaagactcagtttatcaaaaagaaatgacaggctgggcatggtggytcatgcctgtagtaccagcactttgggaggctgaggcaggtggatcacaaggtcaggagtttgagaccagcctggccaatatagtgaaaccctgtctctactaaaaatacaaaaattagctgggcatggtggtgcgtgcctgtagtc

SEQ ID NO: 650905 - DNA, 643 bp, Homo sapiens
gctgatggaaatttggagtaaccggaactttcacaccttgcaattggaaatgcaaaatggtgtggccactctggaaaacagtttggcagtttcttataaatttaaatcgacacttaccatatgatcttgcaaatcccatttatttgcctcagagaaatgaaaacttatgttcacataaaaacctgaatacaaatgtgtatagaagctttattcataattgcccaaaactggaaaacatttaactgtccttgaatggataaacaagctgtggtacagccgtgcaatggaataccactcagcaataaaaatgaacaaattattcatacacacaatttgaatgactcttaaaggcattatgctgagtgaaagaagagagtctcaaaaggttacatataatatgattccatttatatgacattcttgaaaacacaaaactattgtgatggagaacagacactgagtgccrggagcagaggtgagggaagaatgcgacaaggaagcactagcatgaggagcactagtctttatattttgaattattatttttaatgtacaaatcatagttgtgtacatttatgagatacaatgtgctattttgatatatttatacattgtggcatgattgaatcaaggtgattaacat

SEQ ID NO: 650906 - DNA, 569 bp, Homo sapiens
ggcagcaacacggagcagggcagggcatgtcagtgttcagtgtacaaacctgccacctgggatctcgttaacatgcagattctgattcagtaggtccagggtggggtccgagattctgcacctctaaccaattcccaggtgatggccaggctgatggtccacgggccacactttgagtagcaagaatgaaggcggaaagcccatgggttaggaagccttgactctaccattaattcactccaagtggacaagattgctgtttccagatgtggtttgcagaatataaaccccttgtgatgctccttaaaaaaagaaagaaagraagaaagaaagaaagaaagaaagaaagaaagaaagaaagaaagaaagaaagaaagaaagaaagaaaaagacgtttatgatcaaggttaggtagggttgggaaatactacatactttatgtgtacattacacttgctagcaaaggccctgcaaagttctgttttgatattatttaactctgtatacctcagcaggatgtacttactctctgggtgaagagatacttaaccctggagacagtctgttca

SEQ ID NO: 650907 - DNA, 459 bp, Homo sapiens
ccacattaaatataaatgatatgtaactatgtgagagtgagttgacttgtggttgatgagttgacatagttatatttcctagacatttaattaaacatttattaattttgattttgcaactttctttttgtttactatggccagtagtttatttttcctcaaggataactgttccttccagcccctgaagagctagtttataagctcttccacaagccactacccctaacacactcaatgggcaagatgggggtaggcctagggagggcttgggactttgcgtcttaacaagagcccccarggtggccctggtgaggtggtccccagaccactggccttcagagagatgagggtggatctctggggcaagcctgaagtcaaactggcaggctggatggagagccatcagggctgggagcaggagggagtctagagctccactgaccggcaggcacaccc

SEQ ID NO: 650908 - DNA, 528 bp, Homo sapiens
ttcaccacagacacagagggtaaccttggtagcacaaagccttcagagacaggatggacaggcctggtgagagacgatgggaagggtggtggtgtctgctaagaaatagctggaagcttggtgagagaaggggccggcaggctctggggaacacagtgtgatgggctgctgagcagctcagatgtgatcacgcaagaccccctgccaccaggcacttccagcaagctcagggatgaaagaactttgcaggggtgaggttccaggtaagtaggtaaagtccgaagccagggaaacaggtcaytgttgtccgtgtgactgattcacactctcatattggtaaggtctgagaaataggtcaccagggtgaacagtcagtggtgatggccagatggccagatcaaagagggagcttaatggcactgactttgattctgccccaaatggtagatgctcgggatcccgcaaagagctcagtcacagagtccatagatgtgaacaaaaccaagagaaaggaagcaaccaacctac

SEQ ID NO: 650909 - DNA, 528 bp, Homo sapiens
ttcaccacagacacagagggtaaccttggtagcacaaagccttcagagacaggatggacaggcctggtgagagacgatgggaagggtggtggtgtctgctaagaaatagctggaagcttggtgagagaaggggccggcaggctctggggaacacagtgtgatgggctgctgagcagctcagatgtgatcacgcaagaccccctgccaccaggcacttccagcaagctcagggatgaaagaactttgcaggggtgaggttccaggtaagtaggtaaagtccgaagccagggaaacaggtcactgttgtccgtgtgactgattcacactctcatattggtaaggtctgagaaataggtcaccagggtgaacagtcagtggtgatggccagatggccagatcaaaragggagcttaatggcactgactttgattctgccccaaatggtagatgctcgggatcccgcaaagagctcagtcacagagtccatagatgtgaacaaaaccaagagaaaggaagcaaccaacctac

SEQ ID NO: 650910 - DNA, 528 bp, Homo sapiens
ttcaccacagacacagagggtaaccttggtagcacaaagccttcagagacaggatggacaggcctggtgagagacgatgggaagggtggtggtgtctgctaagaaatagctggaagcttggtgagagaaggggccggcaggctctggggaacacagtgtgatgggctgctgagcagctcagatgtgatcacgcaagaccccctgccaccaggcacttccagcaagctcagggatgaaagaactttgcaggggtgaggttccaggtaagtaggtaaagtccgaagccagggaaacaggtcactgttgtccgtgtgactgattcacactctcatattggtaaggtctgagaaataggtcaccagggtgaacagtcagtggtgatggccagatggccagatcaaagagggagcttaatggcactgactttgattctgcyccaaatggtagatgctcgggatcccgcaaagagctcagtcacagagtccatagatgtgaacaaaaccaagagaaaggaagcaaccaacctac

SEQ ID NO: 650911 - DNA, 580 bp, Homo sapiens
tgagctcagtgagggccttttcagcaacgttgcagcacagttcagaaattttccagcaaagctactgtaataaactttacaaaacaggctgtaaagttagtatttacaaaaaaaaaaaaaaaaagtccaattaattttaaccattgataacaaaggaatcaatagcaggtgagttacgagctgcatgtgaaatgtgggtctctcacagggtgaatgatgtggtagagacagaggactcgtcggccagaatacttacagaaggttttccagtcgaggtagggctagacctggccagaattgtctaggggagagggggagagcccccctatttaatttatccaataaaacctaaaacrtgttattacacaaagctccaagacccagtgagtgtcccatgagagtgctccatcagacctgacagccattagctattatcatgcctgacgcacaccatgatacaggtctaggctgtgggcatgcaatgagggggaagataagatcccagccctcctgaaaatttcattctagctgaaggacaagtaaagaagttcagaagatcatttcagaagagaagcactac

SEQ ID NO: 650912 - DNA, 552 bp, Homo sapiens
tggcttgaacagggctgatactttgtaattatgttccaaatcattgtaaatggcctggaatttacaggcctcatagctgccaatgggccactccagcctcatagctgccaatgggccactctagggtgcttgcaactgtacatcattctatgtgagtgagggccatccttccactgtagctagtacattaaatcagatggcaagtgaattctcacactagctgcacatcttttctgccaacacaagcagtaacctggaactcagtaggtccctttgtcattgttcctgcaaaaccacctctgttactggaccagccacagtgaatgcatgcacgccagatggagaatgggaaagtgagagcttcctcacacaaatacacacaacatattttagagtcactattattacatttcttaaggtgaaaktgacttgactttgcccacatatgcttccattcaggccaatgagaacaaaaaaatttgttgcttaattgattactatgagcaacactgttacgtgtaataattgccattcttgcatatagcacaggga

SEQ ID NO: 650913 - DNA, 552 bp, Homo sapiens
tggcttgaacagggctgatactttgtaattatgttccaaatcattgtaaatggcctggaatttacaggcctcatagctgccaatgggccactccagcctcatagctgccaatgggccactctagggtgcttgcaactgtacatcattctatgtgagtgagggccatccttccactgtagctagtacattaaatcagatggcaagtgaattctcacactagctgcacatcttttctgccaacacaagcagtaacctggaactcagtaggtccctttgtcattgttcctgcaaaaccacctctgttactggaccagccacagtgaatgcatgcacgccagatggagaatgggaaagtgagagcttcctcacacaaatacacacaacatattttagagtcactattattacatttcttaaggtgaaattgacttgactttgcccacatatgcttccattcaggccaatgagaacaaaaaaattygttgcttaattgattactatgagcaacactgttacgtgtaataattgccattcttgcatatagcacaggga

SEQ ID NO: 650914 - DNA, 424 bp, Homo sapiens
aggtcaaccatccaaatctgggataagttttctaaatattagatctraactgatttatccctaaacacattgggccacaatcttcctgaatggattaagtcagaccttctatttttagtagctagctcattcagtcacatttccttactataaatacctgagtgcacttgttttaaagtagaattcttttgtcatctgattgtcccagactagatgagatgcagataagggacgataataaaaaatggaatggggagagaacagaagagagactgtatttctttagtcagctcactagctatttcacagactccaagacccacagtagactgcacacaggagaaagcccagaggttctagcccttttcaactcattaaccttgagaagttggcagctgtttgggactcagtggagacacccagg

SEQ ID NO: 650915 - DNA, 441 bp, Homo sapiens
tcaaccatccaaatctgggataagttttctaaatattagatctaaactgatttatccctaaacacattgggccacaatcttcctgaatggattaagtcagaccttctatttttagtagctagctcattcagtcacatttccttactataaatacctgagtgcacttgttttaaagtagaattcttttgtcatctgattgtcccagactagatgagatgcagataagggacgataataaaaaatggaatggggagagaacagaagagagactgtatttctttagtcagctcactagctatttcacagactccaagacccacagtagactgcacacrggagaaagcccagaggttctagcccttttcaactcattaaccttgagaagttggcagctgtttgggactcagtggagacacccaggctcttttctatcatctcatc

SEQ ID NO: 650916 - DNA, 570 bp, Homo sapiens
ttgttgtcttcctttaaaaattgttgggttttgttttgactggtagttaatttattggtggatcagcttgatccttttaagacttgttttaaagctttgttatttgtgggtctagtggagactttacttaagggctagtatgaccctaattctaagtttcggcctttctggagattcagctgaacacctggagagtctattgaggtctttgtccctygtctgttcagaatggcaccaggtactagcactgtataattttcaaaatctctattcgccttatagcttcccagtagttgttacctgctaggccaaaatgaagtcttttcacgcacttgcacagcttagtatatggccagagacttaaaagaatccctatggagattttgaatttccctttctgtgcatctccttcttctctggcaccccactgtgtaaattccagtgcccctcaatagtcccaaattctaatctctgccttctcagtccagtaacaccaccatgttttcttgggctccacctctttatactgcagaacataaaacaccttcaagcagaaagccagagcaattg

SEQ ID NO: 650917 - DNA, 526 bp, Homo sapiens
tcttctttcctgcctcaaccacagagaagtttttctttttcttttttaaaaaatttattttattgtgataagaacggttaatatgagatccaccatctttttctttttagcttctattttaaattcagggtacatgtgcaggtttgttacataggtaaacttgtgtcatgggggtttgttgtaaggattatctcatcacccaggtgttaagcttgtacccattaattatttttcctgatcctctccctcctcaaccctctaccctccaaaaggcccctgtgtgtgttgttctcttctatgtgtccattctttagatgtascctcttaaaacattttaagtgtccagtgcagtattattatctacaagtgtaaggctgaacaacagatctctagaacttactcatttttcataactgaaactttgtactcattgatagcaatgccacttttcccctccctcagcccctgaaaatcaccttctgttctttgtttctaggaatttgattattttaatatctcatataaa

SEQ ID NO: 650918 - DNA, 498 bp, Homo sapiens
catcttttaaggcatcttttaatctctacttctctgctgtgctgtgagtcctctgcctttggctgctgatgaaagtgagtgtggaggaccacacaagacattttatggacaggcctggaaggggcatcactttctcacattctatttatcgaagctggttacatggccccaactgaattgtaacagaggctgggaaaggcagtcttcctgggttctgaaaacgactcttttctcctggagggggtaatggattagaaaacatctaccaagtttctcctacagcgtccatggtcatccccccaccctgccagtgatggtttaagagtggggatgtaacccagcaatgtgtatgtakcccatccctggccaatgtgtctggaggtgatgacagctggagcttataagagaggctgtctcacacttcaggagatgggcccattgcttctttggagaaatccctacaactgctgcattctgattccttccttcccgaggaag

SEQ ID NO: 650919 - DNA, 603 bp, Homo sapiens
agatcttctaacatatgttgcctggaacctgccctgmctctggtcctccacggttaggggctaatcaatcatctcattgttgaagccagtttgaatttgaacttgctgttacttgtagctgagattatcctaacccatggcagggatggcaaacattttttgaagcagtgtccaaaactgagcaaaggatgtcaaactatattaataaatgagatcattacaggtagccagtgccagacaagttgattgggctcaaaagccaagaggcaagttggaaaaggggggaagcacaggctgtggattccagaagacctagattcaaggtcctagctttacctcttgccagctctgtgacccttggcaagttacataccctctctgagccctctctggtttttcatggagtcctaatgcctactttgcccagttgctgaaactcttcacgtaagtgctggtccacagaccacctttagtggctggtaggtaacttgttcttagcttaatggacttgctcagggaagaaagcttctatttctccaatgtgtcaagtctttgggcccaattacctcgtagatcacctcccctcacctgtgcagacaacct

SEQ ID NO: 650920 - DNA, 185 bp, Homo sapiens
ttgagttatattgggtttactgttgactaaaaccaccaattctytccatcactggcaggttctgagacccgtgttacacaaccaacccccatgtcattcattcatcaaccgatactcattgcactctttctttgggctgtgctgtgctcttgattctaggaatcctgcaatggaaaaaacaatgt

SEQ ID NO: 650921 - DNA, 616 bp, Homo sapiens
gtctaactaataaagaagtacattcctttgttgagaaaggagtgtgctggcgagaggcctggctgggggtctggattckgagtagggaccagtcagggctctgctagggttttgcaaagtagacctggtacaagttcccccgtgcctctgttttctcatccatcaaatgggtgtgtttgtgtagatgcctacttacatttcatgatcctttgaatctgtgaggactcgtgtgttgccctaacagccatcatgcagggtgcaaacggcatctctctttggattccctgtgccttgcacagtgcctgctcatggcagcctcaccataaatgtatgtgggctggggactggactgaatgttagacagccactgaaaatgttgaggatgattaccttgttgaacaataaacaaattaatagaatgttgggtaaaaaattgaccacgataaatgttttaagccatgatgacagccggtttaagtgtttcttctttcaaccccattgtgtgcctggtgggcactaagtgcaggagatgtctgatgagtgcacatggccctgccctccagcagccagcagaaaggtggggaaggcagggaaaggggcaggtgtaacagcaggg

SEQ ID NO: 650922 - DNA, 616 bp, Homo sapiens
gtctaactaataaagaagtacattcctttgttgagaaaggagtgtgctggcgagaggcctggctgggggtctggattcggagtagggaccagtcagggctctgctagggttttgcaaagtagacctggtacaagttccccygtgcctctgttttctcatccatcaaatgggtgtgtttgtgtagatgcctacttacatttcatgatcctttgaatctgtgaggactcgtgtgttgccctaacagccatcatgcagggtgcaaacggcatctctctttggattccctgtgccttgcacagtgcctgctcatggcagcctcaccataaatgtatgtgggctggggactggactgaatgttagacagccactgaaaatgttgaggatgattaccttgttgaacaataaacaaattaatagaatgttgggtaaaaaattgaccacgataaatgttttaagccatgatgacagccggtttaagtgtttcttctttcaaccccattgtgtgcctggtgggcactaagtgcaggagatgtctgatgagtgcacatggccctgccctccagcagccagcagaaaggtggggaaggcagggaaaggggcaggtgtaacagcaggg

SEQ ID NO: 650923 - DNA, 616 bp, Homo sapiens
gtctaactaataaagaagtacattcctttgttgagaaaggagtgtgctggcgagaggcctggctgggggtctggattcggagtagggaccagtcagggctctgctagggttttgcaaagtagacctggtacaagttcccccgtgcctctgttttctcatccatcaaatgggtgtgtttgtgtagatgcctacttacatttcatgatcctttgaatctgtgaggactcgtgtgttgccctaacagccatcatgcagggtgcaaayggcatctctctttggattccctgtgccttgcacagtgcctgctcatggcagcctcaccataaatgtatgtgggctggggactggactgaatgttagacagccactgaaaatgttgaggatgattaccttgttgaacaataaacaaattaatagaatgttgggtaaaaaattgaccacgataaatgttttaagccatgatgacagccggtttaagtgtttcttctttcaaccccattgtgtgcctggtgggcactaagtgcaggagatgtctgatgagtgcacatggccctgccctccagcagccagcagaaaggtggggaaggcagggaaaggggcaggtgtaacagcaggg

SEQ ID NO: 650924 - DNA, 616 bp, Homo sapiens
gtctaactaataaagaagtacattcctttgttgagaaaggagtgtgctggcgagaggcctggctgggggtctggattcggagtagggaccagtcagggctctgctagggttttgcaaagtagacctggtacaagttcccccgtgcctctgttttctcatccatcaaatgggtgtgtttgtgtagatgcctacttacatttcatgatcctttgaatctgtgaggactcgtgtgttgccctaacagccatcatgcagggtgcaaacggcatctctctttggattccctgtgccttgcacagtgcctgctcatggcagcctcaccataaatgtatgtgggctggggactggactgaatgttagacagccactgaaaatgttgaggatgattaccytgttgaacaataaacaaattaatagaatgttgggtaaaaaattgaccacgataaatgttttaagccatgatgacagccggtttaagtgtttcttctttcaaccccattgtgtgcctggtgggcactaagtgcaggagatgtctgatgagtgcacatggccctgccctccagcagccagcagaaaggtggggaaggcagggaaaggggcaggtgtaacagcaggg

SEQ ID NO: 650925 - DNA, 405 bp, Homo sapiens
tgggctatgactgatcttgggaacaacatcttcgatttttctttccagaagtttcctggtccctcctgggccctgattatgtgagagaactatcagggataagcacccagagcctggcacatggtgggggctcaagtgtgttttatttatttattacttttataggagagatggggtttttccatgtcagccaggctggtcttgaactcctggcctcatgtgacccacctgccttggcctcccaaagtgctgggattacaggtgtgagccaccacatccggcccrcctgtgtttgatgaaagaatgaatgaatgaactctcacaacaattcattcagccatttatctaacaagcgtttccagagtgactcctttgttctaggctctgtgcagtttctgggaattc

SEQ ID NO: 650926 - DNA, 581 bp, Homo sapiens
acaaacatggaaaatagagaaatccctgaaaacacaaagccttaatgtccaggttcttattcttagtttgccgatttgttgatttgcctttattttgtgatgggctctgtctcagatgtgattctgaggcacggggtaggacagtgggcagcctggagggttctagacctgctggtctcttctgtgtgagcctctctgagggtgaggctgattagaatctgctgattgctgctgcggcagagagaggaggacagccagcctcgcacctccgcatttgcacaacctggagtcccaaagcttctccctgcaggtatgccttagggaggagcggaaggtggaggttccatgtcctaatcagggcccsagactgagggacgcctcttcttcttcacagacaagtgggagctggactctgacagaatatcaaagtgaaaattaatgcccgctgcttgtatattgcctagacgttacttttgagaggaaaacaacaggagcagagcgaagctgtacatatgttaaattcacatcagtaataaagattaagtagaagttaatagcatcccagtcatgcttgtggaggt

SEQ ID NO: 650927 - DNA, 539 bp, Homo sapiens
tgcctgaaggaggatgactgaattggaagttgaacaatgaaaagaattcagtgtagacaggattgggaggaggccttaacagtgaggggatgtatgaacaaagggacagatttatttatttatttatataatttattttttatttcaatagtttttttgggggagcaggtggtttttcagttctgcataagttctttagtggtaatttctaagattttggtgcacccatcacctgagcagtgtatactgtacccaacgtgtagtcttttatcctcccctcaccaaacccccaaagcccattatatcattcttatgcctttgcatcctcatagcttagctcccacttacaagtgagarcataagatatttggttttccattcccgagttacttcacttagaataatggtcttcgactccatccaggttgttgcaaatgccattatttcgttagagggacagatttttaaaagacagttttgtatacattatgtattgtataacagaccaacccaaaatgcagtgacttaaaacgacatgc

SEQ ID NO: 650928 - DNA, 495 bp, Homo sapiens
ctctttgtttatcttttatattgtgttttttttgtttgtttcaatttcatttaattctgccctgatcttagttatttctttacttctgctgggtttgggtttggttgattcttgtttctctaactccttgaggtgtgaccttagattgtctatttgtactctttcagacttcatgatgtaggcatttaatactatgaactttcctcttagctctgtctttgctgtattccagaggttcagatattttgatagtttgtgtcactactatcattcakttcaaagaattttttaatttccatcttgatttcattgttgacccagtgatcattcaggagcaggttattgtacttccatttatttggcatggttttgagggttccttttgcagttggtttctaattttattctactgtggtctgtgagagtacttgataagatttttattttttaaaatgtgttgagacttgttttgtggcctatcatatatggtctatc

SEQ ID NO: 650929 - DNA, 619 bp, Homo sapiens
ggcactttcatgctctgctggcgggaatgcagattggcacaagtcctggggcgggtgattaggaaatatggatcaaaagccttaagaaaatgatgaaatggtatatgtaataacatgaaaaaacagtctcagttcattgctaagtggaaaaaarcaagttataatctggcgcagtggctcatgcctgtaatcccagcatttttggaggccaaggcaggtggatcacttgatgtcaggagtttgaagccagcctggccaacatggtgaaaactggtctgtaccaaaaatatgaaaattagccattagccagacatggtggctaatcctagctactcaggaggctaaagcatgagaatcacatgaaccttggaggcaaaggttacagtgagccaagatcatgccactgcactccaggctcggtgacagagcgagactccatctcaaaaaaaacaaacaagttaccaagttatacaatcatacgtttgtaatatttaagcacacattctgaacagatatatatgaaaatatcattatctcagagagtggaagagggatgagtatttatattttatttacatgttttctaatgtatctgtatccaacataaattactgtttcg

SEQ ID NO: 650930 - DNA, 619 bp, Homo sapiens
ggcactttcatgctctgctggcgggaatgcagattggcacaagtcctggggcgggtgattaggaaatatggatcaaaagccttaagaaaatgatgaaatggtatatgtaataacatgaaaaaacagtctcagttcattgctaagtggaaaaaaacaagttayaatctggcgcagtggctcatgcctgtaatcccagcatttttggaggccaaggcaggtggatcacttgatgtcaggagtttgaagccagcctggccaacatggtgaaaactggtctgtaccaaaaatatgaaaattagccattagccagacatggtggctaatcctagctactcaggaggctaaagcatgagaatcacatgaaccttggaggcaaaggttacagtgagccaagatcatgccactgcactccaggctcggtgacagagcgagactccatctcaaaaaaaacaaacaagttaccaagttatacaatcatacgtttgtaatatttaagcacacattctgaacagatatatatgaaaatatcattatctcagagagtggaagagggatgagtatttatattttatttacatgttttctaatgtatctgtatccaacataaattactgtttcg

SEQ ID NO: 650931 - DNA, 605 bp, Homo sapiens
catgcttccagtacagcctgcagaactgtgtgtcaattaaatctcttttctttataaactacccattctcaggtagttctgtgtagcaacagactaatacagtcattgatacaaaaacctgcacaaatcttaagtatggaatttaataaattatcacaaagtgtttattactttttcccattaaaaaaattaattaggcagattttcaaacatacacaaaaacagagagtaatataatgaataaggtaatattcactataagtaacataatgaatcytcatgtgcccaaaacccattttcttttttttattattattatactttaagttctgggatacatgtgcagaacatgaaggtttgttgcataggaatacatgtgccatggcgccaaaatccattttcaacaattgtcaacacatgagcaatctagtttcatgtacactcccactcaccaccctgccactggattattttgaagcaaatcccagacatcatattgttccatctataaatacttcaaatacatctctaaaaacaatgttttctgctgggcagggtggctcatgccggtaatcctagcactttgggaggtcaaggcaggcagg

SEQ ID NO: 650932 - DNA, 648 bp, Homo sapiens
tacatgtgagggggatagaagaataatcccttatgccttctctagctcagtgatctgcatttttacatcagaggaagcaatcagatattcacatgtctcagaggagcagagggatgacttagagttctgtcctttgtcctgtacctgggaagataagctattatttacattgttgggataaaattcaacagagctattttagggtaaagatcttgggccccacaaggaatttcccagtggacaaattgtgaggcaggtgtgttagcttttttatctttgtagctgtcttatttaggaataaattgggaggcaggtttgyctgatgcagtttccagcttgagtcttccctttggcttagtgattttggggtactgagatttactttcctttcacataattattttaaaatgtacaattaaattattttttactatagtcacccttttgtgctagcaaatatggggccttattcattctttctaactattttttgtactcattaaccatccccacttccccttctaaccctgttactcttcccagtctctggtaaccatccttatactctctgtctccatgagttcaattgttttgatttttagatcataaataagtaaaaatatatgaagtttgtctttcggtgcctgg

SEQ ID NO: 650933 - DNA, 547 bp, Homo sapiens
gattgtttcttatgctagttccatcatagcaggcattccattcacggtcccaagacgtaattcttggggttgtatatttcctcattcatgttcagcaggaaacagagaatctgtgtcccccagtagttaaattaaaatmtaagagatgaaatccactggctctgactgctttgaattacatgatcctttaactaatgactgtggctaggtgaaatgggtatgttgattatacagtattaagacaacctacactggaggtttaatcaattccacccaaactacatgactgggaaatgtggtacagtgctaggaagagggaatggaaaatgactgctggacagacaacgaacaaatgtcaattacaagaggaatttcttaagtctctatctcctgaaatagcaagctgattaattttgcaataagtagcaatgagctcattagtaactactgaacagtcagtacattgaccaagtttcactttttgattactagaagtagataactgagttaggaaggtaaagaagtaatttaaaaaagcaactcttca

SEQ ID NO: 650934 - DNA, 549 bp, Homo sapiens
tcaaattatcacaagtcagtgactgtctatactttcttcttrctgtccaagttaagatgttagaagaactgaaaggcttttggatataagagtgaaaagcattctaatttctcaaagtcacttatcaaaataatcccacagttataaagttccctgtgtagttagctctaagaggctttttagaaagttaagggagagctctaagttcagtggtccaggaaattgattccttgtcatcactttggctaaccaagatttatcatttatatgaatcgagagtggagaaagagtgtggtaggtaatagaatgctgaaaggaaaacatactacctaagcctttcaaatataaaatgtggacataaatccatctgctattgattataaattcttcaaaagtttactcatgcccattgtaacggcattgatgctgcaacatttaaaagccaccattatacataatctatgtgagaggttactgtaagatcttttttcacataacaactattcactgcgcttaccaaaagagctgaaaaggcaatgtcaaaacata

SEQ ID NO: 650935 - DNA, 504 bp, Homo sapiens
tgcaccatgaaactagttctctttataatatgtacttaattttatacaatttcaaaatgaaaattttacttaactcacaatgtaatggcatacacttgaaatgatacacttgagaaacaactactgttcttatggactataaagaaggtaacacagatctgtctcaagttttatggcttctcgtttttttctttatgttaccctggctttactcwatgggaaaaaaaggaaagtctggaaagcaaaataaaacagtttttggcctaacgttaaatttgtcagggattacaaataaaaggtatggcatctgattaccttctactttattctactggatcatgttattttacttcagttaacatctgactttacagtattgacaaataattcccctttcaactggaatcaaaactaaaataacatgtaggaacagcatattatattaaagtcaatggagaaaataaaaaacatgaaggacttaatgaaaacatagggtatattcat

SEQ ID NO: 650936 - DNA, 504 bp, Homo sapiens
tgcaccatgaaactagttctctttataatatgtacttaattttatacaatttcaaaatgaaaattttacttaactcacaatgtaatggcatacacttgaaatgatacacttgagaaacaactactgttcttatggactataaagaaggtaacacagatctgtctcaagttttatggcttctcgtttttttctttatgttaccctggctttactctatgggaaaaaaaggaaagtctggaaagcaaaataaaacagwttttggcctaacgttaaatttgtcagggattacaaataaaaggtatggcatctgattaccttctactttattctactggatcatgttattttacttcagttaacatctgactttacagtattgacaaataattcccctttcaactggaatcaaaactaaaataacatgtaggaacagcatattatattaaagtcaatggagaaaataaaaaacatgaaggacttaatgaaaacatagggtatattcat

SEQ ID NO: 650937 - DNA, 482 bp, Homo sapiens
attcatgcatcactttttggaataaattaggatgcaagtatttggcttatttgagtttaataatagctcttatgtgtttaattagatttatgatatcacagcacatattcaactgaagaactcaaagagttttggctttttatgacatgaaaggcagcatgataaagaggatgtcctttggagtcccatggtatgatttccaatactggactttcctcttcctagctgtgtaaccttggatgtgacatttaacacttagagctttaatttcctcatccataatatggggaaaattaagtagggtaatgtatgtgaaagtgaaaactattgtaagtaaaaataaaatagaaattgaagttgttcttattatctttatgaatattttaagtcacatatattttatataggtagaatctgaggcacaataagaataaagaatttgctacaaatcatgctagraatcagtgacaaataatagatga

SEQ ID NO: 650938 - DNA, 547 bp, Homo sapiens
ggaaaattcaaaggtggattacaaggtgtcctcagcatgccctatggcctatgtgcgaagcaagaagaattgactgatttacaggacttctctttatgtcaatcttaagaggatggatgaatctggacatttgttccacccgacctctgactgatggtttggaaaataactttaattaggatcatatgaccattgaaaaaggaaaaatgtagactctgacttccgtcccactgaaggattaatgaaaacctttactagcatttagagcttttcagaacatccccactgtcatgtgtctcagcagtggagactgcaagtaaggcttttaattttaggaggttttttttttttttttttttyccctaaatggtatggccaaaagtcagagttaaaatatatatagttagattccaacttcctccttcactctaaaaatagaatccaaacccactcttcatatatgcttccagaatggggcttaagtaccaatctctgctttgcaatgggcacaatcttggtcatgtcctgaggctctctaagaaaagag

SEQ ID NO: 650939 - DNA, 419 bp, Homo sapiens
tctttttcaaatgtgcctggtgaattcttgaaaacaccttgttctattgttcttatttttaattatctttcaccccccccccccaaaatttaaagcatactttaaaataatttgtatctgattcttcaatatctgatgaccatgggttatttttctactggctcttatttttagtacattatttaattgagtttttgataattttctattgtaagctttcctttggctgatattaatttatagggatcytgaggaacctaggttaagaaaacgtatctccacacaggatctgtgtttcttctgccaggcgtcctgggctactatcagcctggagacccttaaacattaattttgcttgtggtctactagaatgcaaagataataaatgttcaaatctccaacccatgtgagggcaggct

SEQ ID NO: 650940 - DNA, 419 bp, Homo sapiens
tctttttcaaatgtgcctggtgaattcttgaaaacaccttgttctattgttcttatttttaattatctttcaccccccccccccaaaatttaaagcatactttaaaataatttgtatctgattcttcaatatctgatgaccatgggttatttttctactggctcttatttttagtacattatttaattgagtttttgataattttctattgtaagctttcctttggctgatattaatttatagggatcctgaggaacytaggttaagaaaacgtatctccacacaggatctgtgtttcttctgccaggcgtcctgggctactatcagcctggagacccttaaacattaattttgcttgtggtctactagaatgcaaagataataaatgttcaaatctccaacccatgtgagggcaggct

SEQ ID NO: 650941 - DNA, 619 bp, Homo sapiens
ctcaactgagattatatcataaaaactgggaaattgatgaagaaatgaaagagtaataacataaaatcatgtmatgtaatgcagtgggggaataaatggatacttttcattctcaattctaatagagaaactagtttctagtatcttttttaagatagaagttaattagttcatcattgctagaaagaaaacattatgtaaaccttccaaatcactagagaaaaaaaagaaaagataacctcagataaatcctatgatatagtattaaacaaaattaggagtaactttatatactaaaatgtcaacaatggtgaattctatgttatccaagtgtgaaacacattgacttgtttacttatgtagtcttgtttgtatcttacattttataataaatacagattaattatataataaaaacagataatttatttttgagtcagtgtagcaaatgatatagaacaagcaaaacttatttttaaatacagaaaaatgctactgtgatatactatcaaatgaaagaaagcaggacgtttccacttttgtaaataaggacacatgtaaatagaacaaaatatctctgaatggagaaaatagggatgagatttatatcatttgtcac

SEQ ID NO: 650942 - DNA, 670 bp, Homo sapiens
gaggatggtgaacaagattctatatgcatccttttcactcttctgatgacacatcacttgaatagcttcatgggaaggtaaggtaataaaatttccattatactcaacccagtaatttgaaaaagctattaaaacatttaaacagtgcatcacagctgtccctctgacctcgggtctcaaaattcagttgttcttctctgtggaaacagtcacaggtgatgagaggcatgaagcgtctcttttatccagtgcttgcaccactgtggctctagggacctctaagctgggctacctgaattgcacaggagaaattctctgcgtatcagctgtgtattacatgtagttcactgtggaattgcacttagcacagtacatggttggcaggctgactccaatctgcttcccgtataattttggctcatgtgcccagatgttgcattatattaaatatttaagccctyatagcatctatgtaggtaaaatagaaagggactcaatctattgcttcaagttttgtaccacatttcagtttgcaaaatactttcacacccataaccttacttgccctcagaaagctctatgaagttgacacagttatctccattttatagttgagcacacaagactcagaaaggtcaataactttgataaatggcagagctagaacctg

SEQ ID NO: 650943 - DNA, 447 bp, Homo sapiens
acaaaactacagacagaatccaaaggacaccctggtttggatgtgttagaaggttcacttgacttgtcagcttttaggttggcagttatcaggaaacaggaaagggcatataatccttgttaaataattgagtcttaggagcacagttttatcatcttcctaatgaatcccatattctattggctttgaggagagtcaacacccaaacaatgtaataaacattgcatttcaaagcaggaaagtattcacaggggcggggtgaggagatgcttgacaacagaatcctgggaacatcactagaaagaaagaaagtgggggaacaatgccagaatgggagasaaagctgacccagatagaagtacaggtaacatgtacaaggagaggtaaacccagggcacttacacaggcaggagaatgaaagacatagttaaaaagttgtcttcaatt

SEQ ID NO: 650944 - DNA, 459 bp, Homo sapiens
gcacttggcctacagcaagagctcaagaagtatttgtgattttattatcgctaagtaaaaataaatttgagtttcactaagatttttgaaattcacattttatttgcatggcataaaactagcctattcaacaactccccataattaaacttgaaaagatcctgattatttataacagaaaataattatgtccctaattcatttatttgccttttttttttctggttgcctttgattgacttctgaccttaagcatgaacagaaatgtgtsctaaaaagcctggtctttccagtgaagagtcaatcagtttgccaaatgcttactccataattttaatctaataacattttactaataacattttatgaacaagaacttactttcacatccagacaatatttttagaataaagctcattgcaccttataatgtgctttatttaatgtcatcttctacca

SEQ ID NO: 650945 - DNA, 438 bp, Homo sapiens
actctttctgccacagagcaaagctgagaaacaggcccactttaaaagacatgctaacaaacgaagccaaggcaggagctacagcagctaatccagaccactgggcacgtcaataccacccaagcatcattaaaccccgtgtgctttaytaagtaaattagataagcaaagaatgttctgaaactgattaggttttgctgttgttggttccatacctttcttttatgccttttgaagccatttctccttcggcgattcataaccttaatgctgtagagggctcccaagatgaacaaggctccagctatcccaacccctacaggcaccagcatcccagacatgtaaccagcctgcatagaaaaggaaacacacattaggatgctaaacagagcgcgccgccctgggtttctcatttctgctggatggcagcaggttttt

SEQ ID NO: 650946 - DNA, 528 bp, Homo sapiens
gaatccatccactcttcttcctgtcccagtaaaagccatctttcctgttgcccagtctattgtgacaagctcctcactggcttcctcacatctattcttgttacttcttcactccacttccactctttatatagcagtccttacaagacatcctgcagccggagtgatgcctttaaaattcaaggagaacattagcatatgtgctrttctatcctattttatgtgccattccatggcacccatgtgctattccacggcaccccattgctcacagcataaaatcccaaaccctcaccctgcacagcagggtcttgcagggtttggtccctgttggttcaccagcccccagtgcacttcctgctggctccaggcacagtggccttctctgaagtcttcaaaaacttcttcctgcccccacccttcatagatcaattcccttcctcagcccctgcttcccttctctatatatctcggttcataaacacattcccagggaagccttctctgacccccatcaggccaaggccc

SEQ ID NO: 650947 - DNA, 435 bp, Homo sapiens
atgatctttaaagacaagctctaatggtctgcagcaaatgtgcaaagacccagctgtcccttattcactaccacctatgcaaccactctactttcaaatcaacaagagagaggaccttgctagagagataggttagtaaacctatttgagtacggcaacacaggaacagtacagtatgagagttcaaacaagcagtataaaacaaccacagtacacacagaaactcaaatgcatggagcttcagcatgtcataggttgtttactctttttcctgttcaaatctagttttcactttttcttcagcaaaggaagatagtatagtcatccccagtatcaygggaaattggttccaggacaacccttggataccaacatctgaggatgttcaaggtaatgatataaaatggtgtagtatttgcatgtaactatgcacat

SEQ ID NO: 650948 - DNA, 599 bp, Homo sapiens
tttgaaatattttcagggcttcacagtttctacagtttcctcatttttaaaatggggataaaaacacaacttacttcctagaactatcatgaggataaaatgagatggtgtacttaaagcaatttgcatttgtttgcatgtagtaagaactcagtaaatgtaaaatagtattatcatatgaaaactggatatgatatatgggtggaataaggactgagggcttctcctcaacttaaggggcatattccagtggtcccctggctgtgtaaaggaagaatgtgctacctcaagaaggagtaaaatccctatcacaggaaaattcccakcctcatctggagagttacctggcagtgcttttaccaggaattcttgataccagattgaagttaatatttctcttgatttggaggtacattgatgacaaagtaccccattatattttaaatctagacattgatgtctagcacttttaaaacaaagtttctctgaagatacaacatttgggcaatgacactaatttttctacattaaataaaacatcatttaaagtgttgaagtttgtagctgtgctcagaatgtatccaggaggacactgggca

SEQ ID NO: 650949 - DNA, 618 bp, Homo sapiens
gcttctaaatgtagcccccacaaatggtatcatctataaacagagcacaaaaataggcttctgaatatttgggttttggaatgagttccagtgagtctcatttagaagtttccaggtatttataccaatatgaaaaataatattgactctggatgcaaacagatgactactgaagtgctaagaaatttaaatatctttgaatatatcttcttcaggtagcaatgaaactggtagcagcaaaatcatgagtaatctccatgccctgtcatgtttccagaagcatccctagtgagtgattgttttaaacagaaactytgtagccactcaaaagtaacaacttgtatttatatagtcaggttttccagacacttcaaccaagactagcaaaacaagattagtttgctagactaacaaggtggcagaataaaaatgaattatctaaataacaaaattaggcatatctgattcataagattgttacatctctgcattttctgtttatatgctatggcaccacatcagtgtgcttgaaagctgcaggttaaaacacatgcattcatggcatacaattaggtttaggacatacaacgattttctgtctgagtttaagaaaggtgg

SEQ ID NO: 650950 - DNA, 618 bp, Homo sapiens
gcttctaaatgtagcccccacaaatggtatcatctataaacagagcacaaaaataggcttctgaatatttgggttttggaatgagttccagtgagtctcatttagaagtttccaggtatttataccaatatgaaaaataatattgactctggatgcaaacagatgactactgaagtgctaagaaatttaaatatctttgaatatatcttcttcaggtagcaatgaaactggtagcagcaaaatcatgagtaatctccatgccctgtcatgtttccagaagcatccctagtgagtgattgttttaaacagaaactctgtagccactcaaaagtaacaacttgtatttatatagtcrggttttccagacacttcaaccaagactagcaaaacaagattagtttgctagactaacaaggtggcagaataaaaatgaattatctaaataacaaaattaggcatatctgattcataagattgttacatctctgcattttctgtttatatgctatggcaccacatcagtgtgcttgaaagctgcaggttaaaacacatgcattcatggcatacaattaggtttaggacatacaacgattttctgtctgagtttaagaaaggtgg

SEQ ID NO: 650951 - DNA, 573 bp, Homo sapiens
tcccctacttactcttgaatgctaatgagccttcacattttgtgccatctgcatggaaagctcttcctccctgatacctgcatcactccctctctcctttccttcaagtcttcttaaatgggaccccatcagagaggccttcccaaaccaccctttctamacaacacatctttgctgacgtttttctacctcctcaccctgccttattattttagtatatatttctacctcatatgttacatgtttattaggtttttttattgtctttctctcccccaaaagaaggcaagctccatgagggcagagactttgattagtttgctgcaatgtgttgagcatctggtacactgctgagtaaataattttttctgtctttatgcttcatcttcaacccttggttttgtagtagggaagagagatcaggttcaactctcaacacaataaggaaaagtgggaatttgtagccaaggaacaggggaaaggggatcaacagatggaaaattcttaagagaaaacatcaggagtaagagaggattctggctatcagaattcttgctaaaggcaagccagacc

SEQ ID NO: 650952 - DNA, 589 bp, Homo sapiens
ttcacatgccttgcctcctctcatgtttgctcattaccatgagcagtaaacctccctgttcaatctgccacaaaacctgtgagatggatagagacacaatatatgcacgttgtttccttatcttcagttaaaaactcacgtttctttctgtatgaaacgtgtatcttccaaaagccacttaaatttatttaaccatgctagttcaattgaattacagtgctgccagtgggtttactctgcgttgcctttggttataaattcttctgacttcctaattcccaagtcagatatgaaacmttaataagaatatacataaaaatcaggccagttgcagtggctcaagcttgtaatcccagcactttgagaagtcaacgcaggaggatcacttgagcccaggagttggagaccagcctgagcaacatggtaagacctcatgtctacaaaactaaaaaattagccaggcatggtgacatgcccctgtagtcctagctattcaggaggctaaggcaggaagattgcttgagcccaggagctcaaggctgcaatgagcaatgatcacacgattgcactgcagcctgggcaacagagt

SEQ ID NO: 650953 - DNA, 449 bp, Homo sapiens
tttcaaaatccttcaaacaytttctcaaagtgtatttaagattaggagcctgtatgagattgattcatatgaaattaccaatattcagtcatttttgtcctatgtaaatggcagtttcaaaagttcagcctaatcattcattcacatgtgaccctgtagactgactattcttcagtggatttactttgctcactgacattcctccacgcactcagccacccaggtgaactgatcctggctggtcactcagtcctgaagtgtatcaagcttggcagggcattcaggaatatccctagctcctggaaatacagaattctatccaaccaacaatgtacaaaatagctgaagtccctgtctcaactttcttgaaatctatgaaggaaatccaagtataaatccctagccaaccacactactttcccatttcacatcagctccaaagcctcctt

SEQ ID NO: 650954 - DNA, 449 bp, Homo sapiens
tttcaaaatccttcaaacackttctcaaagtgtatttaagattaggagcctgtatgagattgattcatatgaaattaccaatattcagtcatttttgtcctatgtaaatggcagtttcaaaagttcagcctaatcattcattcacatgtgaccctgtagactgactattcttcagtggatttactttgctcactgacattcctccacgcactcagccacccaggtgaactgatcctggctggtcactcagtcctgaagtgtatcaagcttggcagggcattcaggaatatccctagctcctggaaatacagaattctatccaaccaacaatgtacaaaatagctgaagtccctgtctcaactttcttgaaatctatgaaggaaatccaagtataaatccctagccaaccacactactttcccatttcacatcagctccaaagcctcctt

SEQ ID NO: 650955 - DNA, 449 bp, Homo sapiens
tttcaaaatccttcaaacactttctcaaagtgtatttaagattaggagcctgtatgagattgattcatatgaaattaccaatattcagtcatttttgtcctatgtaaatggcagtttcaaaagttcagcctaatcattcattcacatgtgaccctgtagactgactattcttcagtggatttactttgctcactgacattcctccacgcactcagccacccaggtgaactgatcctggctggtcactcagtcctgaagtgtatcaagcttggcagggcattcaggaatatccctagctcctggaaatacwgaattctatccaaccaacaatgtacaaaatagctgaagtccctgtctcaactttcttgaaatctatgaaggaaatccaagtataaatccctagccaaccacactactttcccatttcacatcagctccaaagcctcctt

SEQ ID NO: 650956 - DNA, 577 bp, Homo sapiens
ttatatgtatatgtgccactgcttttcatggtcttgcacactgtaagtgaggtatgagaaaatccctaataaaccttacaattaatatgatttccttctttggggaagatatctttaccattccttttataaaaaggaatataacaatgaagtagggttggggggggggggtggatatatatagccaaaggcacagtgatgccttagagaggggatgaaaagttgaatgactcacacacccttggcygacttggagaagatatcaccagtgtttccaaaagatgtgcccaatgtatgtccttccctcacctgaagtggagcctgcgattccaaagctgccctctggtctccttttctgtcctgctgagtagaggagatgcaacgctgaaataagccacagacttagaaaataaaaagaagcacagccaagtgaccagacttaagaatgaaggccacattccccaaagccattgttccaaccttacttaaaggtgcagcatatgtgacctgcctcagagatggcccctgcaagtgacaccccactgacactacatgaaggtttggctgggtcagccgt

SEQ ID NO: 650957 - DNA, 577 bp, Homo sapiens
ttatatgtatatgtgccactgcttttcatggtcttgcacactgtaagtgaggtatgagaaaatccctaataaaccttacaattaatatgatttccttctttggggaagatatctttaccattccttttataaaaaggaatataacaatgaagtagggttggggggggggggtggatatatatagccaaaggcacagtgatgccttagagaggggatgaaaagttgaatgactcacacacccttggccgacttkgagaagatatcaccagtgtttccaaaagatgtgcccaatgtatgtccttccctcacctgaagtggagcctgcgattccaaagctgccctctggtctccttttctgtcctgctgagtagaggagatgcaacgctgaaataagccacagacttagaaaataaaaagaagcacagccaagtgaccagacttaagaatgaaggccacattccccaaagccattgttccaaccttacttaaaggtgcagcatatgtgacctgcctcagagatggcccctgcaagtgacaccccactgacactacatgaaggtttggctgggtcagccgt

SEQ ID NO: 650958 - DNA, 643 bp, Homo sapiens
tttgaattttgaaccatattaattacattacctctttaaaaattacgttacctatttaaagaacaactttaaataagagagagaatgaaaaatctctctgaatgtaactagcccttctagagtttcccagcacaagaccacagctaggacccatcagacaatgaaattaagtgtttatgtgtttctgagtattggaaacaattatgtaaccctagatgcaattgaaatctcataccaagaagtttcaaggcatttggccataatttcccactgcattgagttttgtatatttcagaattgaaagacatttctttagaaaaatctaagaccaaaattttttcaagaggtcaactctaattccatttcagccaagaggtttccctgccttgattaaagccatcaaattgytccacaatggcaatcacgttttgtgtcttcttatcttagaagatcccgtaaagatttcactcacagcttccttcccaacagagaaagcttaaaaaggtctttgtccaagtgaattttctattcttctaaactgctcatttcaggccagacatggtggctcatgcctgtaatctcaacattttgggaagccaagacaggaggatcacttgactccgggaggtcgagaccagcctgg

SEQ ID NO: 650959 - DNA, 643 bp, Homo sapiens
tttgaattttgaaccatattaattacattacctctttaaaaattacgttacctatttaaagaacaactttaaataagagagagaatgaaaaatctctctgaatgtaactagcccttctagagtttcccagcacaagaccacagctaggacccatcagacaatgaaattaagtgtttatgtgtttctgagtattggaaacaattatgtaaccctagatgcaattgaaatctcataccaagaagtttcaaggcatttggccataatttcccactgcattgagttttgtatatttcagaattgaaagacatttctttagaaaaatctaagaccaaaattttttcaagaggtcaactctaattccatttcagccaagaggtttccctgccttgattaaagccatcaaattgttccacaatggcaatcacgttttgtgtcttcttatcttagaagatcccgtaaagatttcactcacagcttccttcccaacagagaaagcttaaaaaggtctttgtccaagtgaattttctattcttctaaactgctcatttcaggccagacatggtggctcatgcctgtaatctcaacattttgggargccaagacaggaggatcacttgactccgggaggtcgagaccagcctgg

SEQ ID NO: 650960 - DNA, 599 bp, Homo sapiens
tttccttctctaagtgcctgcctgtctgtggatgacatgatgaggtttgaatcatgcagttgatctttttggaaacctagcatgcagcagcctgcataaactttccactggcacctcatccacygccctacacgaagcacctcatctcattaatttctcgccttcccaacctgcctccagcttccaagatacattccagaatgaattcatcatattcaaaatgtcgttaccttgtctttctcttggaaggagtgtctcattaattgccctggccaggtaatcttgctctctgacaagctcccatcagccttcgctgggaaattcccagtccctttgctgggaaacttgaatctggaacaaatctagatactcccacgttgcccctaaagaggctgcctccaactcaggcccactccttgctgagctgacaagcagaagccaagaaagggtcattgctactgaatcttgcattgctggagagagaaactggtcacctcaaaggatttcttgatctgtgagcctcaagagaacctcgaactgtggcagtttcctatggaaacactggttcattggcagcatcatgagccctacagaggcaa

SEQ ID NO: 650961 - DNA, 599 bp, Homo sapiens
tttccttctctaagtgcctgcctgtctgtggatgacatgatgaggtttgaatcatgcagttgatctttttggaaacctagcatgcagcagcctgcataaactttccactggcacctcatccaccgccctacacgaagcacctcatctcattaatttctcgccttcccaacctgcctccagcttccaagatacattccagaatgaattcatcatattcaaaatgtcgttacmttgtctttctcttggaaggagtgtctcattaattgccctggccaggtaatcttgctctctgacaagctcccatcagccttcgctgggaaattcccagtccctttgctgggaaacttgaatctggaacaaatctagatactcccacgttgcccctaaagaggctgcctccaactcaggcccactccttgctgagctgacaagcagaagccaagaaagggtcattgctactgaatcttgcattgctggagagagaaactggtcacctcaaaggatttcttgatctgtgagcctcaagagaacctcgaactgtggcagtttcctatggaaacactggttcattggcagcatcatgagccctacagaggcaa

SEQ ID NO: 650962 - DNA, 567 bp, Homo sapiens
tctttcagttcctccaaagtaaaggaaacatgccaaatgacttccaaaaaacaatgacatgacatttttatcccatgcggtgatggaaaaccacctgccacattgatgcaatgccttcaagtgcatacaaagtttgtttttaaatctttctttaatgttgagtcttgacaaagaaattcaacaggaagtagaacaataagtaaaaagctgccaaaccaagaaaaaaatcctatactgatggtaaccctatcatcaatggcgttctctckcacagtggagcagcggcctcactcacaagtcctcaggggctcagaacgggttgcccaagaagccatcaccccggagaattggctgcctggcctattctcaaggcatctgcaacggctcagctcctcccgctcgccaggccccactgccactctggggcctcctcctgccctgcagaactcagggttcccagtaccttggcatagcttgtggtccagacccaggcctttggggccaaccctgaggctgaccaacatttggacagagatactcactcatgggctggcggaaatcaacatt

SEQ ID NO: 650963 - DNA, 434 bp, Homo sapiens
gaattcaagcctgcagtaagctatgatcatgtcacttccctccagcttgggtaatagagtaataccctgtctcaaaaaaagaaagaaaaaaaaaaagaaaaagaaaaagaaaaacaagtaagtattggcaagccaaaaaaaamccaaattcgtttatagcaatgttctccagaaccaaatagagaaatttgaaaggtaagtggtttaatggtagagaaattattaatataataaaatccgttttttaaaaaatgatcctgacaaatgacacgagagcacatgataaaatttaatattcattctcaatttaaatttctaaattttttttaaattgtgaaaagtagaacatcaaacttaatgttacattccatggtgacatatttcagatattgtgcttaaatttggaaaagaaaagaatgccaggggatattttc

SEQ ID NO: 650964 - DNA, 616 bp, Homo sapiens
ctgccgggatgttgcttagaagaaaaatgctttacattgttcttgctcttcctcccaacagtagtggctgttttgggggcaaaatagactctcaactcagacacaaagggatgcatatgaggtgctccattctttacctcgatggctctgggcaaatcatactcagcatctgggtctccatttgcacatctaggcatcaggactgtgcaaaactagttggcaggggagttgggaggagcaaacattcaacagcacaaagacaggccagcactaggtgctcaatgcacattagwccccttagtggcacacaggcaggtcgctgaactcctgcgcatctgtgtttcccgtgtgtaatgttctgctgtccccacaggtggtccataaggctgtgcttgatgtatttgaggagggcacagaagcatctgctgccacagcagtcaaaatcaccctcctttctgcattagtggagacaaggaccattgtgcgtttcaacaggcccttcctgatgatcattgtccctacagacacccagaacatcttcttcatgagcaaagtcaccaatcccaagcaagcctagagcttgccatcaagcagtggggctctcagtaaggaactt

SEQ ID NO: 650965 - DNA, 547 bp, Homo sapiens
agcaatgctgccttgttattctttactccactgagatgtttgggtggagagaaacataaatctggcctacgtgcacatccaggcatagtaccttcccttaaacttaattatgacrtagattcttttgctcacatgtttgttgctgaccttctccttattatcaccctgccctcctactacattcctttttgctgaaataatgaagataataatcaataaaaactgagggaactcagtgccggtgcaggttcttggtgtgctgagcaccggtcccctgggcccactgttgtttctctatactttgtctctgtgtcttatttctctttcccggtctctcgtcccacctgactagaaatacccataggtgtggaggggcaggccaccccttcacagtgtgcaaatgcctatttagagactggcctttaggggaggtgagagagagggtggtgggtagtgagtgctaggctgaagttagctgcagtgcttgacagatgtgagagccttgaacaagctttcataaccatagaaaggattcaggaggcagggt

SEQ ID NO: 650966 - DNA, 547 bp, Homo sapiens
agcaatgctgccttgttattctttactccactgagatgtttgggtggagagaaacataaatctggcctacgtgcacatccaggcatagtaccttcccttaaacttaattatgacatagattctwttgctcacatgtttgttgctgaccttctccttattatcaccctgccctcctactacattcctttttgctgaaataatgaagataataatcaataaaaactgagggaactcagtgccggtgcaggttcttggtgtgctgagcaccggtcccctgggcccactgttgtttctctatactttgtctctgtgtcttatttctctttcccggtctctcgtcccacctgactagaaatacccataggtgtggaggggcaggccaccccttcacagtgtgcaaatgcctatttagagactggcctttaggggaggtgagagagagggtggtgggtagtgagtgctaggctgaagttagctgcagtgcttgacagatgtgagagccttgaacaagctttcataaccatagaaaggattcaggaggcagggt

SEQ ID NO: 650967 - DNA, 585 bp, Homo sapiens
tgccaccatcaatatgatgggctccctgactggctgaaggacaatgactgtctgcaggacaatgactgtctgctctatggccatagacaacccatgtcctccttctgggcttgcttcaagagcatcttctatatccatacagaaaycggcagcagccggacacatctgcttggtttcgtgctgtttctctttttggaaatcttgaccatgctcagaccaaatatgtacttcacggcccctctacaggagaaagtgatttggaggatattccttttgggtgcagtgctctagcctcagcttctcctggctcgtccgcactgtctactgtcattcagagaaagtctctcggactttttccaaactgtactattcagggattgctccactgctcataaggagcttcgtcccctggctctgttactccttctactgctcgccacagccacggctcatctacttctccatcatctatgtcctgggcatctctgccatcattgtgacagtgggaccggtttgtcactcctaagcaccggcagacaagggcaggggtgttgctgggacttggcttgagcggtattgtgccca

SEQ ID NO: 650968 - DNA, 554 bp, Homo sapiens
gacagagtctctctctatcacccaggctggactgaggtggtgccatctcagctcactgcaacctctgcatcctgggttcaagcaattctgcctcagcatcctgagtagctgagaccacaggcgtgcaccaccacactcagctaatttttgtatttttactagagatggggtttcaccatgttggccaaggtggtctcaaattcctgacctcaagtgatctacccaccttggcctgccaaagtgctgggattataggcatgagccactgtgcccagcccaggtgctttttaaaaataacttcttcactgaagtgagaggaggagtctgagttgtctgtttctagaagaaactcttagagatttcagtaccaaccaagcttcagcccactttcacacccactgggcratacactttccatttccactctcctagctgaggatggggcatggtgaaacttagccatcccctcctcggcagtcgctctctttggcaaagcaactaccagtccccacagagacagtactttgaacctcatgttgagattttaccccaac

SEQ ID NO: 650969 - DNA, 239 bp, Homo sapiens
aaatagatacattgagtaggccgtgtgttgaagaagtgaggtgtgttgtatatgatataatatatggaagagactcaaaaggaaagcattccaaatgtatgataaattgggtagaccagttttgatgtgatgagaccttttccttgatgaagttttttyttgttaataaggagataatgtgtatatttcaagatcaacaaaattgaaacctgaaaccaaagtgaaaaatgtgtttttat

SEQ ID NO: 650970 - DNA, 585 bp, Homo sapiens
caggggcggggacacagggctgcctcatcacattctcattttaggaactgacatgagcatgtgacaagggcatggagtctcgtgacaggtaccaactattcctcctggggcttcgggtatcatttagccacggatggacaaaggacaatctgtcatttactttgaaaaaaaccttgaccttgtgtcctaggaaagcactgaacactcttccttcagctgcctcttcccagcccagctctgaaaagaatgatttcctgttaatcatgctggagctgtctgccatttctagtcttgctggtgcctgagaacatacatgcagctttgtcccttcagggtcctgagcctgctgggctgggaccggcctcgtcagtggcacagccactacccttcttgcaaccccaggagaggctgatttatcacaggattcrcttattatttatgaaaatatctgagagagaacaaatacgctgcctgaagggaaatttaaggagctcccctaaccactgctcagcctgaatctgcaggggcacctggtgtcctcagcctgcagttttcctcctccatgccctccttgttctacgattt

SEQ ID NO: 650971 - DNA, 546 bp, Homo sapiens
cagggccttgcctttgttattgagaaaatggctcatctctaaatggtgtgagagccaggagacccatgttggaygtgcagacagggtgcactttacttaatctccttggacctcagtttccttgtctacaacatcagagggtgaatactcatcaagcttcctcctgtggcaagattctgaagttcccaggccctgtggagagcgtacagggaaaccttacttaggtgacctgcttaggagtctggtctccatgactgtgcagatccacctcctgccaaatggctcatgacaatcccaggagcaggctgtggtctccctgatcctgaggttcagagcttttggtgttcccgtcactggcattcacgccacactgtaggagccttcttttcattgatgtaaactctgttcacaaaaagggtctggggaaaataaagttgatttggaaaaagaaatttctctagaaacccaaataaggcttcttatttctagaaacccccaaataagacttcctgaaatgtggagtcagatgaaccagcctttaaatcc

SEQ ID NO: 650972 - DNA, 337 bp, Homo sapiens
gaattcttccagattttatccaagactatcaaagttggtacctctatgagtctgtaagaaccatagcattattgggcttggggtgcctcctaatgccartacagcttagaccatgacacccaggtgattttaaatagctgggagaccttctcaagaaggatggatacaaacaaacccagactgtgtaaactacaataaatgcccaactgtttaatgcccagacacagacaaacatccacaagcatcaagaccatctaggaaaacatggcctcaccaggctaaatggggccccagaactaaatggggcaccaggaaccaattctgaagaaacagagac

SEQ ID NO: 650973 - DNA, 577 bp, Homo sapiens
gccttcaggagactcacctagcacataaggactcacataaacttaaagtaaaggggaggaaaaaggcatttcatgaaaatggacaccaaaagtgagcaggrgtagcaattcttatatcagaaaaacaaactttaaagccacagcagttaaaagagacaaagagggacattatataatggtaaaaggccttgtccaacaggaaaatatcacaattctaaacatatatgcacctaacactggagctcccaaatttataagacaattactaatgaacttaagaaatgagatagacagcaacacaataatagtggggacttcagtactctactaacagcactagacaggtcatcaagacagaaagttaacaaagaaacaatagatttaaactataccttggaacaaatggacttcacagatatatacagaacattaccatccaataaccacagaatacgcattctattcaacagtgcatggaactttctccaagatcgaccatatgataggccataaaacaagcctcaataaatttaagaaaattgaaattatatcaagcactctcccagaccacagtgga

SEQ ID NO: 650974 - DNA, 573 bp, Homo sapiens
gatcaaaaaactgagtttcaagtaacttgcccaaggtcccatattaactggcagaactgagattgaaccccgggtatctgtcttcacagtttatactcctaaccaccaaagtaaactggatgatggatggatggatggatggatggatggatggatggatggatgaatgggtgggtggacaatgggccactttgctgtactttagcctagctaaactgacaagcatacatttaagtatgttagggatatacttaagtatgtatgggacagtatgcatagctatatgaatttgaaacaaagaagtctagttccaaagccctcacctgctcttaaacagtcactacaccaaaactgcaaaagaaaacagtatgctagggttatccttaatggctgaaaatcactataggacaatgtaaggagttttacatctccaacaaattggctatatgttaggcttccctctatyggactactattttttgtttacctatgagtatcttctcccaattcattcattcatttcaatctttatcatacctatttgttcattattagttattatgtggctgctca

SEQ ID NO: 650975 - DNA, 573 bp, Homo sapiens
gatcaaaaaactgagtttcaagtaacttgcccaaggtcccatattaactggcagaactgagattgaaccccgggtatctgtcttcacagtttatactcctaaccaccaaagtaaactggatgatggatggatggatggatggatggatggatggatggatggatgaatgggtgggtggacaatgggccactttgctgtactttagcctagctaaactgacaagcatacatttaagtatgttagggatatacttaagtatgtatgggacagtatgcatagctatatgaatttgaaacaaagaagtctagttccaaagccctcacctgctcttaaacagtcactacaccaaaactgcaaaagaaaacagtatgctagggttatccttaatggctgaaaatcactataggacaatgtaaggagttttacatctccaacaaattggctatatgttaggcttccctctatcggactactattttttgtttacctatgagtatcttctcccaatycattcattcatttcaatctttatcatacctatttgttcattattagttattatgtggctgctca

SEQ ID NO: 650976 - DNA, 531 bp, Homo sapiens
ttaatgagtcacaaagaggcattctttatttcaggtgcatcctgtattctcattggaatgagtccacaaagctgctgggtccccaaactcttcatttgtaattcccrgggcagtcacacagacaaggccaaggtttttgttagctaagcttcgaagcaacagcacttcatttgttagcgcttgactttgttccagaaaagattcctaggctcctggccactgactatgcacacgtgtgtctgtgtgtgtccatctctacgctccagtgatgggaggatggagaaggggagaagagagctgttctactcgccagagtgttatatcatttaactaacaggtattaagcaactactgtctcacactggggtcgctgggtttattttaaaaaattaaaatataatgatgttgggaggtggtgggcggggggagcgggggtgagctaacaactgggagttctcaaagatttctttcctccttcctttccttttcctactccctccgtccctccttctctctgggattctgtatttt

SEQ ID NO: 650977 - DNA, 602 bp, Homo sapiens
aacagcacttcatttgttagcgcttgactttgttccagaaaagattcctaggctcctggccactgactatgcacacgtgtgtctgtgtgtgtccatctctacgctccagtgatgggaggatggagaaggggagaagagagctgttctactcgccagagtgttatatcatttaactaacaggtattaagcaactactgtctcacactggggtcgctgggtttattttaaaaaattaaaatataatgatgttgggaggtggtgggcggggggagcgggggtgagctaacaactgrgagttctcaaagatttctttcctccttcctttccttttcctactccctccgtccctccttctctctgggattctgtattttattgagcacatcatcgagtgttaccatatgtcagatacatacaaagaaaatttgatgcacatatgaacgaagctaacaagctgtcctcaaagtgtcaatagtctaaagaggatgataaataaatcaacatatatggacctaaaaactgcatccttggtcatttaccccagagaaatggaaatttatattcacataaaaacctacacatgttcaaagcagctttattca

SEQ ID NO: 650978 - DNA, 551 bp, Homo sapiens
gaacagaactaaatgaaatttaaacaaaaaaaatwcaaacataaatttaaaagctcattctttgaaaagataaataaaattgagagacaagattaaccaagaagagaagagagaaaatccatataagctcaattagaaacaaaatgggagatattacaactgacaccacagaaatacaaaagatcactcaaggctactatgaacacctttatgcacataaaactagataacctagagaagatggataaattcctggaaagacacaaccctcctggcttaaatcaggaagaattagatatgctgaacagaccaatagcaagcagcaagattgaagtggtaatttaaaaatggccaacaaaaaaatgccaggccagacagattcacagcaaaatcctaccagacattcaaagaataattggtaccaaacctactgacactattccacaagatagagaaagagggaatcctctctaaatcattctatgaagccactatcaccctaataccaaaaccaggaaagtacataaccaaaaaagaaaactataaaccaa

SEQ ID NO: 650979 - DNA, 551 bp, Homo sapiens
gaacagaactaaatgaaatttaaacaaaaaaaattcaaacataaatttaaaagctcattctttgaaaagataaataaaattgagagacaagattaaccaagaagagaagagagaaaatccatataagctcaattagaaacaaaatgggagatattacaactgacaccacagaaatacaaaagatcactcaaggctactatgaacacctttatgcacataaaactagataacctagagaagatggataaattcctggaaagacacaaccctcctggcttaaatcaggaagaattagataygctgaacagaccaatagcaagcagcaagattgaagtggtaatttaaaaatggccaacaaaaaaatgccaggccagacagattcacagcaaaatcctaccagacattcaaagaataattggtaccaaacctactgacactattccacaagatagagaaagagggaatcctctctaaatcattctatgaagccactatcaccctaataccaaaaccaggaaagtacataaccaaaaaagaaaactataaaccaa

SEQ ID NO: 650980 - DNA, 453 bp, Homo sapiens
gaattcattcttgcacaagatccaagaaccctctcttggggtctggatcgggccccggtcctgtaatgttattatgtttcaaaatttgtgcccaatcctaattaaagttaaaatgaatagtcaaccctcataaaatttgaggacaatatattcctcaatcagtctaggtggattccaatcactacatttggattctggtgtccagagttggataaaatgaggaaaagcagcacttaaaaatttgatgtgctttgtttggccctcastattaaaaatcagttgagcaaacatttatttgacttttttaaggcagcattgtctctatttttttttaatagagatggggtctctttatgttgcccaggctggtctcaaactcctggggtcaagtgatccttccacctcggcctctcaaagtgctaggattaaaggcatgagccactggcactgggc

SEQ ID NO: 650981 - DNA, 695 bp, Homo sapiens
ttagctacagctttatgcactcatttatttcatagacaataaacttagtatggtcaccgatgttgccaccaaatttgagcaccacttttgctggccaactcttatttgccatttatcatgaagcacgatcatggcaatagctctctgacatacgagttggttagaattagaaccatactttgtaaaattcatttcctctgaccagacaaaaaaggaggactgattacaataggactgctaagctaattacttagtggcaagctgtaattccaaaaccacaaaagaagaaggcaaaagacattctaataaaaatwtgcttcagcaaggccttaggtcatatggtatgaacatttgcaggatttgttttgttttgttttgcagcctgagttccatgctataatcagaaatatgtggcacattttgaacaaaggaaatatatacccaacaaagtgttaaaatggagctgccaaccagacaaaccctagaaatatgtagccacttacaggcagaacacaactacatgtgttcccaatgtggaaggcattccggaagtgtatgcatccacatttctacatgaggttagtttcactgtcaatgtatcaaaaatgggagatgataatgtgcaaattataacccttcaatacaggaatgcattgtcttaatttttgttgtagacattaaaagtgaacaaaaac

SEQ ID NO: 650982 - DNA, 695 bp, Homo sapiens
ttagctacagctttatgcactcatttatttcatagacaataaacttagtatggtcaccgatgttgccaccaaatttgagcaccacttttgctggccaactcttatttgccatttatcatgaagcacgatcatggcaatagctctctgacatacgagttggttagaattagaaccatactttgtaaaattcatttcctctgaccagacaaaaaaggaggactgattacaataggactgctaagctaattacttagtggcaagctgtaattccaaaaccacaaaagaagaaggcaaaagacattctaataaaaatttgcttcagcaaggccttaggtcatatggtatgaacatttgcaggatttgttttgttttgttttgcagcctragttccatgctataatcagaaatatgtggcacattttgaacaaaggaaatatatacccaacaaagtgttaaaatggagctgccaaccagacaaaccctagaaatatgtagccacttacaggcagaacacaactacatgtgttcccaatgtggaaggcattccggaagtgtatgcatccacatttctacatgaggttagtttcactgtcaatgtatcaaaaatgggagatgataatgtgcaaattataacccttcaatacaggaatgcattgtcttaatttttgttgtagacattaaaagtgaacaaaaac

SEQ ID NO: 650983 - DNA, 695 bp, Homo sapiens
ttagctacagctttatgcactcatttatttcatagacaataaacttagtatggtcaccgatgttgccaccaaatttgagcaccacttttgctggccaactcttatttgccatttatcatgaagcacgatcatggcaatagctctctgacatacgagttggttagaattagaaccatactttgtaaaattcatttcctctgaccagacaaaaaaggaggactgattacaataggactgctaagctaattacttagtggcaagctgtaattccaaaaccacaaaagaagaaggcaaaagacattctaataaaaatttgcttcagcaaggccttaggtcatatggtatgaacatttgcaggatttgttttgttttgttttgcagcctgagttccatgctataatcagaaatatgtggcacattttgaacaaaggaaatatatacccaacaaagtgttaaaatggagctgccaaccagacaaaccctagaaatatgtagccacttacaggcagarcacaactacatgtgttcccaatgtggaaggcattccggaagtgtatgcatccacatttctacatgaggttagtttcactgtcaatgtatcaaaaatgggagatgataatgtgcaaattataacccttcaatacaggaatgcattgtcttaatttttgttgtagacattaaaagtgaacaaaaac

SEQ ID NO: 650984 - DNA, 610 bp, Homo sapiens
tattttattcattactgatatccttcaaaacgcacctttacttcacaagtagaaacwtattgacaacctaataattgggttgataacttgttaggtggaaacccaattcctgagaaagagaaagcaacactgattcttccttttctcaagcaaacaccacaacacaaaactgagcaaatctaccagtgggcaagagcctaggattgataaaaatggaggttcccatctttatttttcttctctccctcctgtttctccagggcagcctgcctcctcccctcaccccccagctttagttgctggtgcccagatcatatcgtggaattgtacaggtgtaagttaaaaataaacttagagcaaatgattctcttttgattccctacccaatccacactcttccctgtcccctctatgtcattcctggcaggtggacatgaagctccaggtaagaggcaagcatccgtgttcaaattaccattcccagtttgaatgactttgtttgcaggatcttacttctgcttaactaaatttgtaccccaccctctatgcacttaaaatccctttaaaatttgttgatccttagttacctccctggagctccttctattta

SEQ ID NO: 650985 - DNA, 610 bp, Homo sapiens
tattttattcattactgatatccttcaaaacgcacctttacttcacaagtagaaacttattgacaacctaataattgggttgataacttgttaggtggaaacccaattcctgagaaagagaaagcaacactgattcttccttttctcaagcaaacaccacaacacaaaactgagcaaatctaccagtgggcaagagcctaggattgataaaaatggaggttcccatctttatttttcttctctccctcctgtttctccagggcagcctgcctcctcccctcaccccccagctttagttgctggtgcccagatcatatcgtggaattgtacaggtgtaagttaaaaataaacttagagcaaatgattctcttttgattccctacccaatccacactcttccctgtcccctctatgtcattcctggcaggtggacatgaagctccaggtaagaggcaagcatccgtgttcaaatkaccattcccagtttgaatgactttgtttgcaggatcttacttctgcttaactaaatttgtaccccaccctctatgcacttaaaatccctttaaaatttgttgatccttagttacctccctggagctccttctattta

SEQ ID NO: 650986 - DNA, 547 bp, Homo sapiens
ggacatgaagctccaggtaagaggcaagcatccgtgttcaaattaccattcccagtttgaatgactttgtttgcaggatcttacttctgcttaactaaatttgtaccccaccctctatgcacttaaaatccctttaaaatttgttgatccttagttacctccctggagctccttctatttatacacaataactggtttccaaatattgaaaatcaactcttgtagcccctctagtttttgtttacttacttgcttcattccccacgggctgaacactccagttccctggacttttctcatatgatatgtactcgagctctttatgcccagatttttggggggtgatttactatcttagcaggctatcaaatctctggctttgctccccagyataggactatgcacctcctcacactgtccgcctgcagccatgcctgatctatgtctcaggttgactttatatttcagtagccctcttaggttgcaacttttcttcctaaaaactcatgctgagctcctctgaggacccaggtgtatgacttgatgt

SEQ ID NO: 650987 - DNA, 705 bp, Homo sapiens
tagaacagcacctgacacaatagaaataatagtgtttattatggttgttgttgtaaaggcctccatatgttatgttcacatttcaggattcctactaactgcttgttttctagacaaatctattctggtgtgttaaggtattatgcaaactagatcttcaaacagtccacattttgggaaagatctagggagagaaaatcaaccraagataactttgagtatcaatatgatactcaaatatgttattgatgtctgggtggtgatatgtcaatgacagtggctatcaactgtattttatctattaaatctgaatctaaatgagaatgtaggagaaggtgagactgtatatagctttcgtttttagaaaaagtatactttcctatatttcccaaattttctgtaatgagcacatattcatgttaaaatgagtaaaaaaattgttttaaaaataaaagaaataatataaatctagctctttccatcctccctaccccttgcaaccccactaatgtattggagtccctgccatgtgccttgcttgtttcttctctgctttaatgggaaaatgtgtattcaaagttacgtacaaattctattaagttaaaaagattggaatgtgactcccttttatgccatttagaattgtagaatgcttcattgagaaccctggttatcagtatgtaatcctgataagaaattttgaag

SEQ ID NO: 650988 - DNA, 600 bp, Homo sapiens
cttgggactttttatatatgaatttcttatactttacaataattcagtgtgattttgggagaggaagttagtacacatgttctgtctttgatcttgaactggaagcccagagtaacttttgagttactatctctgtcttagtccattcaggctgctataacagaataccatagcctgggtggcttataaacaacagaaatttctcacagttcttgaggctagcaagtccaaaatcaaggcaccagtaaatttggtgtcagttcctggtgaaggcctgcttcccagttcacagatggctatattttcactgtcttctcacatggcagaagggcaagagagctctctggrgtctttttcatgagggtactaattccattcatgagggctctgccctcctgacctaatcacttcccacaggccccacctccaaataccatcacattggaaattaggtttcaacacatgaattttagggagcaccaatatgcagtgcatagcaattcctgtgaatgactgagtataggaaggtagattagaaggcctgggctttgtttcattctcatggaaaaacacaaccgtgggtctcatttcttgaatctt

SEQ ID NO: 650989 - DNA, 574 bp, Homo sapiens
tcaatcttatgtgaactctatgtaccacatggatttgctgtccctcagaattcttgccttccctttggcttccataatattgttctatgctggttctcttatgtgataaccatggcctctaagtctcctgtctctcatcattctttaagtattaacartctctgaggttcttttctcagtgttctctcccttcctctttcttcatttttctctttttgatttgatattcagaagtcttcctgaataatcttcattcccatttttcactcttaaactatatctttagctctgacaccaattaaaataaagactgaaaaatattcactaaaatgagcactctagaggtctttgttgacctcagctacttctctattggtgcagtggtgggacagagccatgaagggcaggctgaggagtgggaaggaagtgaggaaaaggaaacagtaagggtaaacaactattgacaaacatggctatgaaaggaggctaaagcgtgtgatccttaggcagaagggccacctccttcatcagaaggaaggacgattatgcagatgcaggtatatttgctgagaag

SEQ ID NO: 650990 - DNA, 588 bp, Homo sapiens
acaatattttttatttattttgttgagatgggatctcactctggagagggagattactccagaggctgaagtgcagtggtgcaatcttggttcattgcaacctctacctcctgggctcaagtgatcttgcctcctcaggtttgcaccaccacactcggttaattttttgtatttttggtagagatgggtttcaccatgttgcccgggctggtcttgaactcctgagctcaagtgatctgcccacctcagcctcccaaagtgctgggattagaggcatgagccaccacgtctggcctaacctcataacgataacttattttgtacagcactttacaaattactaagttccaccctaaatacaatagatctgaaattgctttcatgtgtttcacygcatattgcactctgaaaaaacttgtgacataggcaggagagcttatgaatcttctctgtacaagctcaggtggttgtttccccaacgttgcatagttagaaaatggcaaagctggagttggaactcataccttttaactctgtccagtgttctttccaatttttgagtaattataacctagatatttattagtc

SEQ ID NO: 650991 - DNA, 597 bp, Homo sapiens
gctttcatgtgtttcactgcatattgcactctgaaaaaacttgtgacataggcaggagagcttatgaatcttctctgtacaagctcaggtggttgtttccccaacgttgcatagttagaaaatggcaaagctggagttggaactcataccttttaactctgtccagtgttctttccaatttttgagtaattataacctagatatttattagtcataagcttcccttgttcggggaggctggtatggaagtcttagggaccagaaatcagatgcacttttttttctcccttcaactctccctgcttcttcaaatttctttttccagatatcaagttggtatgcttattagtttccatcatttttttccttctttccactttgtgtttaggccttcactttctcttaccaggcctatcatcatgcatccaaactggtgcccaatagtgccttaagcatgatttttccccaaagtaacttcrattataaaagtccctgactttaaattcttcgatggctctctttcacctagagcagtatctccaggcccctgaagtaacattcttatgagaataatgaggtgatgctcaagttgtctag

SEQ ID NO: 650992 - DNA, 573 bp, Homo sapiens
taatggatgctggaggaaagtggactcatgtagtggtggaaatcttggtagcaatgttgcctgaagtaatgtgacaaataaaaaatgcacttaatgaatgctctagctaaggaaattttcaggaagaatgttggaagtgctgcctggtttcttctcactctctataataaaaagtgagaggagatagaagagctaaagaataaactactaaatataaaaagccaggacttattggaattaaaaataaggcatttctcattcccagcttctccaggtggccagacaactctcaagaaagggcttcaagccaaagatcaaatccaggataggwttattagatccttcgttcagacctcaggaagatctggggcactgtgtggtagggcagttcccagtagtacttttcagatagatgaaagttactctaaggatgtttttttaaaaatggctacatattttacatatttatgcattacatgttttattttgttacatgcatggaaagtaatgatcaagtcaatgtattaggggtattcatcttgagtgtttattatttctgtgtttggaacaatt

SEQ ID NO: 650993 - DNA, 545 bp, Homo sapiens
caccatgcctggctaattcttttagtttgttgtaaagatggggtctcgccgtgttgaccaggctaatctcaaactcctgggctcaagtgttcctttcaccttgacctcccaaagtgctgggattacaggcgtgagccatcacacccgaacatctcttttattattattattattttagaattrcatcaaaaccagagtgattattctcaatctacttatgacagttctctccttcaaattcttccatgattccctgatacttgtgcaaagctgtctttgaatgagacatgacacagatgtctcttctggtcttctcagtcaagtcatcttttctgtttttctcctctggcaaacccctctggagagaataaatgtctgctcttgggggtctggaggtgtagctctaagcataccactgtaagttctagatttcattgaaatcccttacaaagttatccaaatgttgcaaccgtgccacagtatctgagtttattatacaaacgttgcaatccacaccacagtatctgagtttattttaatagaaa

SEQ ID NO: 650994 - DNA, 477 bp, Homo sapiens
tgtctctgagaatagtgagttatgtgtgagttttctagaaataccctactagtcttataataaaaagtttactataaaaattcttggatttggaataagccttaaaggttaccttctaagaccagcaactcatttgatgcttgagtgtgtcccacagtcaccctatcaagtgagtctccagttttttgttttttgcatatcccaaatgttgaaaaatttattgccaaatcagtccttccgtattctgacatcttttactatagggtgtctagcttgggctccctctttctcccctctcttggtcctggtttcaaatctttgaaatgtacagaacaagtctgatcaatcttccgcaaggaaaccatgtaaatatttaaagatggctattttggtccacsttgaatcttttctagtcctcggggacctcccatattcttcagccattcttcttgtgaaatagatttggttctttcttga

SEQ ID NO: 650995 - DNA, 456 bp, Homo sapiens
ctccctttgcactattttttttaaactactttgagtttctattacttgcaaacaagggtgctaagttataaaatagaatgttctttcttttcccttaccccatctacacaggtacataaacccaactatcagggctcagctctaaggtcattttcatcccagaaccatgtttgatccatatcatttaacwaatctctcccttctctgaactgctgtgatattttatgcatctctcatattagttagattcatattttctatcttccactatactatattttcttcaaggataaggtctgtcatctttgtaatcttccaagaactgagtacagtatttttgccaccacagaaaatcagtagatctttgctgaataattgaattaaatgaatgaatgaacataactaaagaatagccagaatccttatgttttattacaggaaagtttagtctgaatg

SEQ ID NO: 650996 - DNA, 551 bp, Homo sapiens
gcaccatggtcaggttttgaaagtgctgtggctcaaataacttagagataaagatgatgtgccctgaaaaattctgttagaggtctcaacaaagggcacagtgatgataatcatgacgataaggacactaatattgaagctaaacatgaagagttcaaataaaattgcttcctattaaaaacagtataataaagaatccaaaatttttcatagtcttcatctattaactagtgtttctctttgcagtggaggggaaggtatgtccttttgtcagaactttttgaaatatacactttcagatgggtgagttttgttgtatataaattataccamaatagagctgatttttaaaacatgtcaactattagattgaagaggaccttagatattttatctagtcatccccaatcttttcatccaagtattccttttattttgtttccaattatagaccacatatctttaaatatcttgtcacctaaatgaaataataaaaaccactgtgatgaatagtacctataagcaataaaattaagtgggtttacagacaa

SEQ ID NO: 650997 - DNA, 551 bp, Homo sapiens
gcaccatggtcaggttttgaaagtgctgtggctcaaataacttagagataaagatgatgtgccctgaaaaattctgttagaggtctcaacaaagggcacagtgatgataatcatgacgataaggacactaatattgaagctaaacatgaagagttcaaataaaattgcttcctattaaaaacagtataataaagaatccaaaatttttcatagtcttcatctattaactagtgtttctctttgcagtggaggggaaggtatgtccttttgtcagaactttttgaaatatacactttcagatgggtgagttttgttgtatataaattataccaaaatagagctgatttttaaaacatgtcaactattagattgaagaggaccttagatattttatctagtcatccccaatcttttcatccaagtattccttttattttgtttccaattatagaccacatatctttaaatatcttgtcacctaaatgaaataataaaaaccactgtgatgaatartacctataagcaataaaattaagtgggtttacagacaa

SEQ ID NO: 650998 - DNA, 482 bp, Homo sapiens
catagtaatcaattatgccacctagtaagatatgggctgggcagagactgagcttggagtttttagggtcagtaagtagagtaaaagagtaggctccaatattggaatccaaatgtcccaggctagatatgatagtagcaaaaaggcaccagcagacaccaagagccaaaggggaaaaatctgtagttcaaagggaacttcacaatgaaggtacaaggaraggattatcagctattgctcaggaaagttagtgagtggagattgaccttccaaagccaaagtcagagaaagaaacagtagtataggaggacatcacactgaaaaggctgcccgccaggcagagttcagtgcaggacttcaaggcaaagccaaggctgagacaagatgagctgaataaacttgtggtaccagaaaacaaggacattctcaagaaaaggatggagacaaatcaaaaggatacaggagccaacccaaaggagtcc

SEQ ID NO: 650999 - DNA, 625 bp, Homo sapiens
aacacattcttgacaggaaggcaccataatatttgtgcttccaggtgggagcgatagagcttccatcaaataaacatgtgcttattcatttgttaaactgcaaaaaccaagaaaggtaattttacataattttaattcacctaaatggaaaacattaaatttatttcccctgtccctcctccacccttccctcagaaaagactgaggaggacaacaaagaacatcctgtcttaggcaccttagctgagtcaccatgaatcactgggcatattgtttcttamtttgtatctacttcttaatgtggcgttcttgatcaatattttttagaatccttttaaatatactgttacttaatcttgaatcccagctacaaaatataacatgttgttggctccgaattacttctcaaacttgtatgaccgctattgccttctgcatagattctttggctcccttcctttcacaacagggatttagcagttatcccaaggaaatcaaagacccatgactattttatatctcaagtaaaatatggcaattcagactattcctgattctttttcttcatttgctctgtagagtcagaatttgagtgaggccctagggatcctccccatctcagagc

SEQ ID NO: 651000 - DNA, 625 bp, Homo sapiens
aacacattcttgacaggaaggcaccataatatttgtgcttccaggtgggagcgatagagcttccatcaaataaacatgtgcttattcatttgttaaactgcaaaaaccaagaaaggtaattttacataattttaattcacctaaatggaaaacattaaatttatttcccctgtccctcctccacccttccctcagaaaagactgaggaggacaacaaagaacatcctgtcttaggcaccttagctgagtcaccatgaatcactgggcatattgtttcttaatttgtatctacttcttaatgtggcgttcttgatcaatattttttagaatccttttaaatatactgttacttaatcttgaatcccagctacaaaatataacatgttgttggctcygaattacttctcaaacttgtatgaccgctattgccttctgcatagattctttggctcccttcctttcacaacagggatttagcagttatcccaaggaaatcaaagacccatgactattttatatctcaagtaaaatatggcaattcagactattcctgattctttttcttcatttgctctgtagagtcagaatttgagtgaggccctagggatcctccccatctcagagc

SEQ ID NO: 651001 - DNA, 506 bp, Homo sapiens
ctatatgttgttagagaatttccttgctttataaatttttggtatagaaaatactgaattttgataacaaatctattacatttctggttatgtgcattatactctgagtaaataagaaatcagattttttcttttgaacccaaattttattmttttaagagatatattcaaagaagtaaaaactagcaggacctttgggcaattatatgaactttggttacaaatctgtttatttacctactgttactaccactctggtagagagaacacatttctttctcaactggtgaattaatcaacagtgaccaactcaactcagtaattgtaaaatctcagtaaaaacctgcccaaaaaaatcatggaactttctccacctgttgataacttgcctaatttcctatccatacgtccctcctttatacttggagcctcttgatccagatccacatcctcactccctccactctctcaagctctgagatttatactccctccatcatggatct

SEQ ID NO: 651002 - DNA, 668 bp, Homo sapiens
ctaataatgatgaaggatctaaatggttacaatgctttgcttttgaaaacattgagtgcatcgtggccattttaaaagattgcttcagttccgattatttggtaaagctaaagcaaaggagtaaaaacatttgctttagaaagccaattctaactaactatggggcaaatgcaaaccatcgcatttatccacttatccttggaatctagagaaaacaaatgtgcatatagtgatacagacaggagtaacctaaaatcatttttttaatcttgaagggacatggccattataacatgccaaagstcttttttactttgtttaaaaataaccacttatctataacactggagttagactaatgttagagaaaaaccccttcagaaacgtttccaaaccatacctgtatagtaaggtcaggagagggcagaccattcaactatgttcaacataatggatttatgtaaaccagtgagcatcactgtatttcagtcataaaactccattatttatgtttcatgattgtgtcttactgttttaaaacaaacaaacaaacaatgctagcgtaggtcagaccaatgatccatctacttcagtagctctttttttttcctaactataacttacttaattggagaaaaggccaggcaatattcctcccctacatgttc

SEQ ID NO: 651003 - DNA, 668 bp, Homo sapiens
ctaataatgatgaaggatctaaatggttacaatgctttgcttttgaaaacattgagtgcatcgtggccattttaaaagattgcttcagttccgattatttggtaaagctaaagcaaaggagtaaaaacatttgctttagaaagccaattctaactaactatggggcaaatgcaaaccatcgcatttatccacttatccttggaatctagagaaaacaaatgtgcatatagtgatacagacaggagtaacctaaaatcatttttttaatcttgaagggacatggccattataacatgccaaaggtcttttttactttgtttaaaaataaccacttatctataacactggagttagactaatgttagagaaaaaccccttcagaaacrtttccaaaccatacctgtatagtaaggtcaggagagggcagaccattcaactatgttcaacataatggatttatgtaaaccagtgagcatcactgtatttcagtcataaaactccattatttatgtttcatgattgtgtcttactgttttaaaacaaacaaacaaacaatgctagcgtaggtcagaccaatgatccatctacttcagtagctctttttttttcctaactataacttacttaattggagaaaaggccaggcaatattcctcccctacatgttc

SEQ ID NO: 651004 - DNA, 650 bp, Homo sapiens
gggcgagttcaccctgagcaggactgttcttctggctggaagtgaaggtggcaggaggaggtttccctgctgttcaggaccagcatcacagcctgttccatgctgctggggttgtggcattcagccactggtgtgggctttgtgaaacgaagatggagcccagtgctagagaggtgcagtagctactggctcccaaacaagggcacactccagaggtggctctagtctcaagatggcatcatgctgcagcagcttgggtaacaaggaatgggctggggtggggagtgcgtaccttgcgctccttatccagggcaattcagttgcatgaattcccagcaggtctccaaactgggagactgtgtgattctcttgtaaggactgtaggtgtttgctgtggcaatgagggctggtgggaatcttctgcttactttttccccaaaataggaagtycttcctgactccaggcagatcggatccaggtggagaagacagggctacagaggccagattcctccgcactgtcctcctagacttccaatcaccacaggtgcaactccactcccccactgcacaccagcactctacctttgacactccagtgaaatcttggctgcttattcaattgccttggtcctctcttgttgaaacag

SEQ ID NO: 651005 - DNA, 363 bp, Homo sapiens
atcagttttctcatgtctaaaatgggaccgaagggatgcagaaaaaagttckaagagggaagtttatagcaataaacaccaaaatcaaaaaagaagaaagatctcaaataacatagtattacacctcactaaattagaaaaagaacaaactaaacccaaagttagtagaaagaaggaaatattaaagagcaaagcagaaataaatggaatagacaccagaaaaatagtaggaaaaaaacaataaaactaagagtggcttttttaaaagataaacaaaattcaaaaaagagaagactcaaataaattcaatcagaagaaatgaaataggagacattacaactgataccatgaaaatacaaagga

SEQ ID NO: 651006 - DNA, 518 bp, Homo sapiens
actgggaattaaaagccctctaaggccaaggagggtaaagcccaagaactcagcttttcagcacaagcaaaagatgaccatctccactgcctccaagtggcggttagttcttgctgcagagcaccagcaccacctcgtgtgcaaaagcgttttcttttgtttcctcgagaaccactagaagcctacagtctctgcattctgaatcacagtctttaccagattttcagaagaggctgcaggcagagaaagcccaaaaagactgttcctgcctctggccagaaggtgaaatcttgggaattatctgtaagcactatgtccagtatagtctttagcacgttgtaactatttgtttactcacttgacaccccactgaccctgaactcacagaaagaagagactttcttcyatctttttattcccagagtatcccagcccttggcacagagttggcacatggtagagatttaacaaatacctgatatatgaaaaggattcagtagaatttttaggtgggaaaa

SEQ ID NO: 651007 - DNA, 615 bp, Homo sapiens
ctgctatgtttaaatttctactttatcttatttatgttcctctttttattcataaaattggttatagcttcttccttctcttgataaatcttgtcagcaatttatattgttagttgttttgaaaacttaacttttgtctttgttggcctctatttaatctttgctttatatttcacttttattgtattttccttctgtattctgtaggtgtattttctttttcattcaccaatatcttaaaatgggcattaatctcattaatttcaagtctttataaatttcctagaagcacaatttttcttgcatcccgcaggcttctacatagtaattattattcacttctagggtttttaaatttatgctttttaagaaaactatgagttactcagcaaattgtgttttatagattttgaaataggcagtattaagttttttaygtttttgtaactaatttctaacctagctgcattgtggtcagagattatcagtgtatgtaatagctaacctctgaaatttactgaggctttcttaatggtctagtgcatgaataatttttgaagatatttcaaaagtgcttgataattgttggatacagaactctgtattcatgcatta

SEQ ID NO: 651008 - DNA, 224 bp, Homo sapiens
gaattcttgtttgttttttkgggggaaggtcatagtttgctgttgtttcttgtgcatatatgtctatgtctttgcattgaaagattatttatttagtccagctttctgtgtttagcttgttctcaatttttattggatatattcagcatcctcaagtggaggatgatgaatttgatcagatacaaagaatgatcagatatcaaagatgggagattcttgctaaa

SEQ ID NO: 651009 - DNA, 604 bp, Homo sapiens
agtccattcacaacccctccattactacagttgcagtggtacagtsctaacagccctcagactgggaagaaacaaagggcttagtcattatgctggcacctccagcacgtcatagccaccatacggagaagagtccagttccttttccctgggaacccccaacccacactcttcatcaggcaggtcccctggctcatgaatgcagaacaatcaccgcacccatggctgagcgtacccactggtagtggcctggagtttccctagggagaggctccaagaggcatatggctgtccctctgccactgccacagcaacagttctatccctacttccctcagcctggggaagaaacaaagagcctgaggcctataccaagtttacagcacaccacagtcaccatgtggagaagagaccaatctctcctcctagtgagccttcaactgcctttttccccagtaagtggaaccccacgctcatgccagcagtgcagccatgccaccccacagactgaacactcccagtaatagctgctctgtgtttcttgggggtggagcccccaggggcaactaaaagcctgtctgccattgcctctgatgtggtacta

SEQ ID NO: 651010 - DNA, 644 bp, Homo sapiens
gttgttttttgcaaaaattaataagctaaataggttgctagctaaactaataaagaagacaagagagaagatccaaataaacacaattagaaatgacaaaggggacattaccactgaccccacagaaataaagataactatcagaaactactacaaacacctatatacacacaaactatgaaacctagaagagaaggctawattcctgggtacatacaccctccaaagactgaaccaggaagaaatagattctctgaacagaccaataacaagcttcaaaatagaatcagtaataaatagcctacttacaaaaaacagcctaggaccagacagattcacagcttaattctaccagatttacagagaggtcctggtgccagttttgccaaaactattccaaaaaattgagaggagggactcctccacaactcattctgtgaggccagcattatcctgataccaaaacctggcagggacacaatggaaaaagaaaacttcaacttaatatccttgatgaacaatgctgggtatatactcagaggaatgttgatcattctaccataaagacatatgcatgctaatgttcattgcagcactagtcacaataacaaagacatggaatcaatctaaatgcccatcaatga

SEQ ID NO: 651011 - DNA, 644 bp, Homo sapiens
gttgttttttgcaaaaattaataagctaaataggttgctagctaaactaataaagaagacaagagagaagatccaaataaacacaattagaaatgacaaaggggacattaccactgaccccacagaaataaagataactatcagaaactactacaaacacctatatacacacaaactatgaaacctagaagagaaggctatattcctgggtacatacaccctccaaagactgaaccaggaagaaatagattctcygaacagaccaataacaagcttcaaaatagaatcagtaataaatagcctacttacaaaaaacagcctaggaccagacagattcacagcttaattctaccagatttacagagaggtcctggtgccagttttgccaaaactattccaaaaaattgagaggagggactcctccacaactcattctgtgaggccagcattatcctgataccaaaacctggcagggacacaatggaaaaagaaaacttcaacttaatatccttgatgaacaatgctgggtatatactcagaggaatgttgatcattctaccataaagacatatgcatgctaatgttcattgcagcactagtcacaataacaaagacatggaatcaatctaaatgcccatcaatga

SEQ ID NO: 651012 - DNA, 547 bp, Homo sapiens
agcgaattctcccaacaaccagagagtttggaaaaggatcacaaggatgagaaggcatccctggatgacagcttgattttatcctggtgagatcctgagcagacgatccagacaacacgtagctggacacctgatttacagaaactgttggataataagtttgtgttgtttgaagtttgtagtaatttgtaatgcagcaatggaaaacaaatacaactttaaattcctaactataaaaaattactttatctctaccttatttcccttctcattatttaactgttatattaattttagttcttcaaatgtktaattttatttgtttaaccttttctgcttctatttattgtactttcaaacttacgtcagtgttgtgattcctgttaatgtgacaggatattagcaattctactcttccttcttcccagttgctacctttcacctggagtgagactgctggtgagagaaacctggctcatatttagggcatctggggacatgcagttgtacaattgatgaaacgattgtgtaataaaaatgcaatgca

SEQ ID NO: 651013 - DNA, 515 bp, Homo sapiens
aacagaaattaattttctcatagttctggaggctaaaagtccaagatcaaggtgttgccaggtttagttttcctgaggcctgtctccttagcttgcagttggctgccttcttatggtgtcctcacgtggcctttcctcatgtgcttccctggtgtctcttcctcttaaaaggacatcagtcatatcatattagggaccccaccctaaaggcctcattttaacttaaccacttttaaaaagactatcttcaaatatggttacattctgaggtactggggggttgggattacaacatatgaattttagggggatgcagttcaartcataaaagtgagtgtaccatcaagaagtaaagtctcaaaaatgactgctgtttaaaacataaattttacagtcagaacattaatttgctaccaagaaagacttaatgaaataatcactttaaatagctaatttcaccatattcataaaatttaaataacattttatatactagtcatataaagaaagttaat

SEQ ID NO: 651014 - DNA, 614 bp, Homo sapiens
ctaggaacaatacctaaaatcatgacctgaaaggacaccactgctgtgctgctgagcctgtgctgtactttgcatcattaacagcagtattaatggaccctggattggggctactagcactgctgccattgctaccccaggaatattatcatggtccaactcctgtcattgccagagtaaattgctcacattgtcccctactttgcatcacttctttacagttcaagatccaagcgatgcatttgataagtgcaaagtgggtcttaagtccatgctctwgctgccagggccactaaggaggtgagtatgtggcattttcttttttatagtgtgtggcagtctctgccacttacctcataccttccttcataaggtggagaaaatcaaaacataggaagtaggttgtggcaaatactataggctggctcactcaatacccattccaatcttctgctagattgatcttcacctaggaagtgatgaattatgttcctaggttccatagctgctgcagagttgtacaagactgcaactggagccaagtcacctgatgtggtggttgcatgcagggagactagagcttatgtaagcatgcttgtgaaggtgacttgagc

SEQ ID NO: 651015 - DNA, 614 bp, Homo sapiens
ctaggaacaatacctaaaatcatgacctgaaaggacaccactgctgtgctgctgagcctgtgctgtactttgcatcattaacagcagtattaatggaccctggattggggctactagcactgctgccattgctaccccaggaatattatcatggtccaactcctgtcattgccagagtaaattgctcacattgtcccctactttgcatcacttctttacagttcaagatccaagcgatgcatttgataagtgcaaagtgggtcttaagtccatgctcttgctgccagggccactaaggaggtgartatgtggcattttcttttttatagtgtgtggcagtctctgccacttacctcataccttccttcataaggtggagaaaatcaaaacataggaagtaggttgtggcaaatactataggctggctcactcaatacccattccaatcttctgctagattgatcttcacctaggaagtgatgaattatgttcctaggttccatagctgctgcagagttgtacaagactgcaactggagccaagtcacctgatgtggtggttgcatgcagggagactagagcttatgtaagcatgcttgtgaaggtgacttgagc

SEQ ID NO: 651016 - DNA, 597 bp, Homo sapiens
tgtctttaaattggagtactgaggccatttactttcactgttagtattggtaaataaggacttactactgctatttttatagcttgttttgtggttgtttagcaactcctctcctccttattgtctttctttgtgattatgtgactttctatggtagtrtgttttaatttgttgcttttatttttgtatgtctattataggtttttttcattgtccttatcttgaggcttacaaaaaaattttataggttaaccagttattttaaagggatgacaacttagatcacacacacatagaatagaagcaaacaaacaaaaaacctttatactttaattctgttcctcctccaccaccattttgacttttggttgtctcaatttacatttttatattgcctatctcttaaaaggttgttgtagtattattgtttttgatatatttgtcttttgggctttatactagacatgagcggattgcacacaattgctgtattggagtattctggcattgtctttgtgcttaattttgccaatgggttttatacctttaattgttttattcatgcacattagtgtttttttctttcagattgaagaa

SEQ ID NO: 651017 - DNA, 543 bp, Homo sapiens
ttcaaatagcctatcttcaatctcactaattctttcttctgcttgatcaattttgctattaaaagactctgatacattattcagtatgtcagttggattttttacctccagtactttggcttgattctttttaattatttaaatctctttgttaaatttatctgatataattctgaattccttctctgtgttatcttgaatttctttgagtttcttcaacacagctattttgaattttttctctgaaaggtttcatatttgtgtttctccaggattgatgtctggcaccttatttagttggtttgctgaggtcatgttttccatgggtggtggtgatgattgtagatgttcrtcaggcattgaagagttaggtgtttacttatagtccttgcagtctgggcttatttgtgcttgtcctgcttgggaaggctttacaggtattcagaatgacttgggtgttgtgatgtaagctgtatctccattagggggcaccccaaggccactaatgctgtggttcttgtagatttgtataggtactacttt

SEQ ID NO: 651018 - DNA, 660 bp, Homo sapiens
ggggctcagctttgtgtctgttactggtaggttagataatctgtagtagcatagcagtagctagttcagccttggtgagagagagcccatactgttgggcccatgcatagcctccatccctgttgccgtggctgctttgtcctaaattatactagcactaagacggccaatgacagaaactggataatttcagttggttagtattctgtatacttacttgtttagtgccttcttcatgcagaatgttctctggtgrgtgttaatgagtcacccaaagatcttcatactttatgtttacccccctaggtccattctcatgccccttttccaggaaaaccaattaagagacttggcagtcttttagatgagagtcgaggccctgagctagcagagcggcagtgagaatataaataaacaatgatatatgagtggaattttaagttaggcttgtgacattttggagaccttaaagttcctaatctgattgattaggaagatcagaagtttgtttgtttgtttgtttgtttgtttatttatttgagatggagtcttgctttgtcacctagactggagtgcaatggcgcaatctcagcttactggagcctccgcctcctgggttcaagtgattctcctgtctcagcctaatgagtagctgggatt

SEQ ID NO: 651019 - DNA, 596 bp, Homo sapiens
tcatttatttttaatttggataggagaaccttatttctcagaaagggttgtagcctacagggtggccattctgacaggctaggaagtgtagcctccggccagaagccataaacagatacttcaagggaggggcaaagagcaggaatttttgctgagcaggatggccaaatatacatatttaataagttataggaggagtcataagtatttatgaaaggagaaacatgtgcatgcacaattgagcttcatactccttcacgggtcccatgtacaaaaawtgtcagtgttagcgtgatctgagggtggaattttcggtcctctgatgccaaaaggtgaagcagaggacattaaaacccttatgtacattcttcgtagattggccagaaccactccatcatcattggtctcttatcgggtgaaaaggaggggaagcatcaggctgttggttgatatcagtggtgtagtcttttgaaagggctggtttctgctaagcccttagggaagaaaggctaattatggttagcaaggtagcgagtataacaacatgtgtctgacctctccatcccatcaagactgagaactcagttttcaagatt

SEQ ID NO: 651020 - DNA, 596 bp, Homo sapiens
tcatttatttttaatttggataggagaaccttatttctcagaaagggttgtagcctacagggtggccattctgacaggctaggaagtgtagcctccggccagaagccataaacagatacttcaagggaggggcaaagagcaggaatttttgctgagcaggatggccaaatatacatatttaataagttataggaggagtcataagtatttatgaaaggagaaacatgtgcatgcacaattgagcttcatactccttcacgggtcccatgtacaaaaattgtcagtgttagcgtgatctgagggtggaattktcggtcctctgatgccaaaaggtgaagcagaggacattaaaacccttatgtacattcttcgtagattggccagaaccactccatcatcattggtctcttatcgggtgaaaaggaggggaagcatcaggctgttggttgatatcagtggtgtagtcttttgaaagggctggtttctgctaagcccttagggaagaaaggctaattatggttagcaaggtagcgagtataacaacatgtgtctgacctctccatcccatcaagactgagaactcagttttcaagatt

SEQ ID NO: 651021 - DNA, 596 bp, Homo sapiens
tcatttatttttaatttggataggagaaccttatttctcagaaagggttgtagcctacagggtggccattctgacaggctaggaagtgtagcctccggccagaagccataaacagatacttcaagggaggggcaaagagcaggaatttttgctgagcaggatggccaaatatacatatttaataagttataggaggagtcataagtatttatgaaaggagaaacatgtgcatgcacaattgagcttcatactccttcacgggtcccatgtacaaaaattgtcagtgttagcgtgatctgagggtggaattttcggtcctctgatgccaaaaggtgaagcagaggacattaaaacccttatgtacattcttcgtagattggccagaaccactccatcatcattggtctcttatcgggtgaaaaggaggggaagcatcaggctgttggttgatatcagtggtgtagtcttttgaaagggctgktttctgctaagcccttagggaagaaaggctaattatggttagcaaggtagcgagtataacaacatgtgtctgacctctccatcccatcaagactgagaactcagttttcaagatt

SEQ ID NO: 651022 - DNA, 646 bp, Homo sapiens
aagcagggtattaatgagtttgttaatattctctactcctccatccatcttccatttgcctagaaaataaatcccagttactatctgactatcagtatttaccttatttgccattgatgttgtttttgttttgtttttcctttagggtttgtcttggtccattttatgctgctataacagaacaccacagactgagaaatttataaggaatagaagtttatttgcctcatgtttctggaggctgggaattccaagatcaaggggctgcatagattgaggtcctttttgctgactcataacgtggaaagagagtgcactgcatagaagaaaggaggccaaactcattcttttatcatgagcctactcctgaaataactcactctcaagataatggcattaatccattcatgaaggcagaataytcatgatgtaatcacctcttaaaaggtcctatttcctaacactgttgcattagggattaagctgtcaacacatgaatattgggggacacattcaaaccatagcaagagttctttgtctttgtgactcggtgtggttcagcaaattgcgattggtctgctatagcggactttcccctcacctcccaaatgtttattatgaaaaatttcattttaaagaaaggtgg

SEQ ID NO: 651023 - DNA, 304 bp, Homo sapiens
ggatatcatcaatcatcaagacactgtgctaagatcatacataaattttttttttttttgagacagtcttgcctgtcacccaacytgaagtgcagtggcatgatctcggctcactgcagactccgcatcctaggttcaagcaattctcctgcctcagtccccaagtaactgggattacaggtgtgtgccaccatgcctggctaatttttgtatttttagtagagatggggtttcaccatgttgaccagactggtctcgaactcctgaccttgtgatctgactgccttggcctcccaaagtgctg

SEQ ID NO: 651024 - DNA, 517 bp, Homo sapiens
cagaggaccgcgtcattggtttgtcagtctaggtgtagcatgtcgctgatatcacaactttttctaaccaagccactcatgagttgattgtgcaagacctctctccataaagcagggattgatagttcatatatcaaaggaatcagatacgtgtagtgagagaagaaytgggtactgtgcaatatagggagatggaaagattttgtcttacaggaggatgcttttcgcaagtgggaaagtgggctctgtgtttccagatttcctagtttttcaaaagtaactaaaatcctcatttttaaaaaggttaaaccttcagattgccaatttatttacattaaaaatattctgtgggcataacaaaaccagatttagtcttcagggcaccagatttcaaattctttaccaaagttctcaaaactgtgggccaaggccatattttgtctctgtagctaggcctactagctaatccccgcattttaagtccacttccagagctatttttttccctatctatccc

SEQ ID NO: 651025 - DNA, 469 bp, Homo sapiens
ggaattcatctttagaggaggaagtctgcgttggtgagctacatgacagaggaccgcgtcattggtttgtcagtctaggtgtagcatgtcgctgatatcacaactttttctaaccaagccactcatgagttgattgtgcaagacctctctccataaagcagggattgatagttcatatatcaaaggaatcagatacgtgtagtgagagaagaattgggtactgtgcaatatagggagatggaaagattttgtcttacaggaggatgcttttygcaagtgggaaagtgggctctgtgtttccagatttcctagtttttcaaaagtaactaaaatcctcatttttaaaaaggttaaaccttcagattgccaatttatttacattaaaaatattctgtgggcataacaaaaccagatttagtcttcagggcaccagatttcaaattctttaccaaagttctcaaaactgtgg

SEQ ID NO: 651026 - DNA, 502 bp, Homo sapiens
gtaaaaagaaatgagggattgaagggaattcatctttagaggaggaagtctgcgttggtgagctacatgacagaggaccgcgtcattggtttgtcagtctaggtgtagcatgtcgctgatatcacaactttttctaaccaagccactcatgagttgattgtgcaagacctctctccataaagcagggattgatagttcatatatcaaaggaatcagatacgtgtagtgagagaagaattgggtactgtgcaatatagggagatggaaagattttgtcttacaggaggatgcttttcgcaagtgggaaagtgggctctgtgtttccagatttcctagtttttcaaaagtaactaaaatcctcatttttaaaaaggttaaaccttcagattgccaatttatttacattaaaaatattctgtgggcataacaaaascagatttagtcttcagggcaccagatttcaaattctttaccaaagttctcaaaactgtgggccaaggcc

SEQ ID NO: 651027 - DNA, 481 bp, Homo sapiens
aatttgaaaatttctgagatcagtgttgttcttttagtatctttcttccctatggaacttttaaatttaagatagaaatcttcagtttagaaatcaggggaaaatggtgaataggaggcaggactaacttgcagctgccacttggatagacaaacaaggtgtggagactcacatcatgaacttttattccaagaactaacacaggaacatagcagaaaaactgaaagaattcacaaaccctttgaaagaaacagcttgctgctgcaaactccatgagacagctgaaaaatttttccccaaagtgtgagaaggtgaaagtcagcctctgtccagacaccctcactggaggcctgaaaatccagatcaygagagaaggatttaactttacctagagctgaaatgaatgtagagagctgagcgaaacataaaagtagaagaagcagtgggaagagccctgtaggcactcccagtccccagaaag

SEQ ID NO: 651028 - DNA, 606 bp, Homo sapiens
ctgcaaactggagaaccataaattctggtggtgtgattcagtgcaagtcaaaaaaggcctgagaatcagagggctgttgggtataaatccaaaagcccaaaaaccacttgtgtcaatgtccaaaggtaggagaaaatgaatatctcagctcaagcagagaaagtaaacttgcccttcctctgcctttttgttctattcaggccctcaatggattgaatgatgcccacagatatttgtgagagcagatcttccttactcagtctactgatttaaatgctaatctcttctagaaacagtctcatacttgtacccagaaataatatttagcagctctctagatatcccttagcctagtcaagttgacacacaaaagtaaccatcacagatattttatttggcaattgtattaaaattaaacaattttatatcctcccaaaaaggagaggaataactktagtgactttctgtgtttcagagtattgagaatctatacttaaggaaatggctcttatttataggaaatagtttgctatatttgatcttaaaacacctagctttgcaaactgttaaacccaaacactgttgtctcaatccgaaaatgtggaa

SEQ ID NO: 651029 - DNA, 257 bp, Homo sapiens
tagctgggtgtggtggcaggcacctgtaatcccagctactcgggaggctgaggcaggagaatctcttgaacccaggaggcagaggctgcagcgagttaagatcgtgccactgtactccagcctgggcagcagactaagactctgtctcaaaaacaaaaataaaataaaataaaaaactggaaggaaatatgccwctgttattagcaatgcccactgcactggaggaatatataatagatataatttatttttgcttg

SEQ ID NO: 651030 - DNA, 594 bp, Homo sapiens
tgccaggctttaagtcttccagctgaggtttttcctaaacattctgggagagaaacaagctattcttgtgtcctcttggaatttctgatccacagatttcttaagcataattattgtttcacaccagtcccattttagggcaattttttggtaaaccataataactggaatagcaccctaggtcaagacactgctatcttatgcctgaactactgagagaaaatgttctttcaacttactccactagcattcaatcctctgaaagtctattgcttctgcattcaaaagatactatgaatctgatgaattctcattgtttcatgtttatgaaaactatttcctgaacttcagttctgtctcttatagtttaccagatggcagmcagaatcacatatatttaacatatatattacatcatgtcttgtcactgctcaaaactctgtttcccagtcatactgaaattgaaatttaaaatctttaatgtggctataaatttcctaggaagctttctgatctaatattctactacatcttccatgtccacttcagctccagtgatagtgttacaggaatatacaatcttcattttcacgt

SEQ ID NO: 651031 - DNA, 236 bp, Homo sapiens
ccaatccaagaaagacaaagaaaaaagaataagaaaaaatgaacaaaggctctaagaagtctgggattatgttaaatgaccaaacctaataatcggtgtacctgaggaaggagagaatgctaaaagcttggaaaacatattkggaggaataattgaggaaaacttctccagccttgctagagacctagatatccaaatacaagaagcacaaagaacacctgggaaattcactgcaa

SEQ ID NO: 651032 - DNA, 236 bp, Homo sapiens
ccaatccaagaaagacaaagaaaaaagaataagaaaaaatgaacaaaggctctaagaagtctgggattatgttaaatgaccaaacctaataatcggtgtacctgaggaaggagagaatgctaaaagcttggaaaacatatttggaggaataaytgaggaaaacttctccagccttgctagagacctagatatccaaatacaagaagcacaaagaacacctgggaaattcactgcaa

SEQ ID NO: 651033 - DNA, 620 bp, Homo sapiens
aacatagcaagacatcatctttaaaaaaagaaaaagaaagaaggaaagaaasagagtcaattttaatttttaaaaatgggggagggggagatgtcaaccaaaagcaaaatgatggcaaagtttccattatagtagtggaaacataggtattttttttccttcttctcaatattctaattttaaaaaatagtaagaataaactattttaatgttattcttatttcaaagatgaaaaaacagatgcaggaagattaatttgccagagtcatacagctaatgttacagagctcagacctgacttggagatctgtgactttaactgggtgcagtggctcacacctgtaattccagcactttgggaggcccaggcgggtggatcgcttgagctcaggagttcaagatcagcccaggcgacatggtgaaaccccgtctctacaaaaaatgcaaaaattaaccaggcttggtggcatgcgcccttagtcccagctacttagggggctgaagtgggaggattgcttgagcccaagaggtcaaggctgcagtgagccatgttcatgctgctgcgggataattaagaaaccaaagggaccgaggggttgaggaggaattatttaattatt

SEQ ID NO: 651034 - DNA, 543 bp, Homo sapiens
tacatttgcctggcctatgggccttctccatacaggtcgagaagtttcattcctccagggagctctgtccctctcagcacagagcccaggctcctcaggccccaggtggactgagcagagcctgtgaggatgggcaaggggctggggctcctgagaagtaggccaatgcagaatacccatttccagagacctcctgtgtgcctggccccagatcaggtgccagctgtcctatgcacactgacctggcatctgcyacacggcacctgcctggccttgaggataagtaaaccacacttgacttctgcaaggcctatttagatgtggcctctgacctcaacgttagtcccactctgggctgtttgaccttcacacttatttttcctttacagctgcactcctgcagggctctccctgggatgctggctgagctgactcccacagctcccaaaggggccccaaggctccatcccacaggattgccctggctacagaggatcacagaggtccatctctgcccagggtgcacaatgttggggaagccag

SEQ ID NO: 651035 - DNA, 543 bp, Homo sapiens
tacatttgcctggcctatgggccttctccatacaggtcgagaagtttcattcctccagggagctctgtccctctcagcacagagcccaggctcctcaggccccaggtggactgagcagagcctgtgaggatgggcaaggggctggggctcctgagaagtaggccaatgcagaatacccatttccagagacctcctgtgtgcctggccccagatcaggtgccagctgtcctatgcacactgacctggcatctgccacacggcacctgcctggccttgaggataagtaaaccacacttgacttctgcaaggcctatttagatgtggcctctgacctcaaygttagtcccactctgggctgtttgaccttcacacttatttttcctttacagctgcactcctgcagggctctccctgggatgctggctgagctgactcccacagctcccaaaggggccccaaggctccatcccacaggattgccctggctacagaggatcacagaggtccatctctgcccagggtgcacaatgttggggaagccag

SEQ ID NO: 651036 - DNA, 602 bp, Homo sapiens
cccagcctcctggactcactctggctggtccattcatggaaaccttgggctctgcacttcatgggttcatggaccccacttctccatggaacaggaagctaggtctgtccctttggggtcccttaggggaccaaagcttggcaaatgatcctcatttgatcctcatcaaattctgtgccttacrttgaggtgagacagaagcaaattgggaaatggtttttaacagaattctgttttctttgggatactgatctttcatttctaagatccagaagactcagtggactccattttggtcacaatataataatgatcaattgcattgctagagctttttattggtttcaaaggtatttatttgtttaaaaacatttattaggtagctacaatgatccaggctctaagctgggcactggagataaataaataaataaataaataaataaataaataaacagtatcagctcagctctctgtcccctaggaggtcacagtctagttgggaacactctcaggagggtgtcccaggaagacccaagaagcttgtctgtgaagcagaggccatcatgagattggtgctggagcactcagacagggccggg

SEQ ID NO: 651037 - DNA, 602 bp, Homo sapiens
cccagcctcctggactcactctggctggtccattcatggaaaccttgggctctgcacttcatgggttcatggaccccacttctccatggaacaggaagctaggtctgtccctttggggtcccttaggggaccaaagcttggcaaatgatcctcatttgatcctcatcaaattctgtgccttacgttgaggtgagacagaagcaaattgggaaatggttttyaacagaattctgttttctttgggatactgatctttcatttctaagatccagaagactcagtggactccattttggtcacaatataataatgatcaattgcattgctagagctttttattggtttcaaaggtatttatttgtttaaaaacatttattaggtagctacaatgatccaggctctaagctgggcactggagataaataaataaataaataaataaataaataaataaacagtatcagctcagctctctgtcccctaggaggtcacagtctagttgggaacactctcaggagggtgtcccaggaagacccaagaagcttgtctgtgaagcagaggccatcatgagattggtgctggagcactcagacagggccggg

SEQ ID NO: 651038 - DNA, 579 bp, Homo sapiens
tctctgtccctggggatcccctatggccrtgtcgacaaaaagaggttagtattggccatgggggaacagaaaacccggggggagtggagggatcttgagtctggaggtcaggacccctaagtctactttcaattctgcaacttactagctatatgacctggggcaggtcacttccccttttctgggcctcagttcctttattaataaaaatgggaaggagataagctacttcgctatgctgtagaagcatatgtgagctaagatgtgtaggcagcttgtaaggggtaacatgattatttcgtggggacccctcatcatctccaggcagctgctggccctgcagcctggtatgggccagagactcatagacagcacatggctgcagtggcccttccctgaccatgtgccttcctggaggcgaaggcagccaggtaatggtcacccagaatcaccaatcccgaagctaattccagacttaccaggcccttcccaagcctctcccatgggttgacaccactcagagactttacattggccaattatccatgtcattacctcacacagccctggaaggtagga

SEQ ID NO: 651039 - DNA, 579 bp, Homo sapiens
tctctgtccctggggatcccctatggccgtgtcgacaaaaagaggttagtattggccatgggggaacagaaaacccggggggagtggagggatcttgagtctggaggtcagsacccctaagtctactttcaattctgcaacttactagctatatgacctggggcaggtcacttccccttttctgggcctcagttcctttattaataaaaatgggaaggagataagctacttcgctatgctgtagaagcatatgtgagctaagatgtgtaggcagcttgtaaggggtaacatgattatttcgtggggacccctcatcatctccaggcagctgctggccctgcagcctggtatgggccagagactcatagacagcacatggctgcagtggcccttccctgaccatgtgccttcctggaggcgaaggcagccaggtaatggtcacccagaatcaccaatcccgaagctaattccagacttaccaggcccttcccaagcctctcccatgggttgacaccactcagagactttacattggccaattatccatgtcattacctcacacagccctggaaggtagga

SEQ ID NO: 651040 - DNA, 469 bp, Homo sapiens
agtctgtttccttctcggctttcagagtaccactctcctggtcttcctccttcttcacttcacctcctacttgacctcgttagccgtgttctcctaccaccattaagaacatcaggaatccataaaaaatgataagaaagagggctggtccaggccacccagggatctggcagaagccaccccagcctggagtggactgagccactctcagttcctgctccaggccagcctattttccaggagctggggacatctccttccaagcccagtagatggaatgactgcccaaggtcaggtagtcccatgggagattttgggaagctccgattcaccctctagtggactgtgagggggcagctctgacagattggggtgcacattggggtgggtgagccagaaytggccctttctccagcttggctggagagcattcaggagaggcctggcctttggggcagaaaaaggccac

SEQ ID NO: 651041 - DNA, 488 bp, Homo sapiens
tggtttctccccatctttgtggttttatctgcttttggtctttgatgttggtgacctacagatggggttttggtgtagatgaccttttttttttttttaatttggatgctattcctttctgtttgttagttttccttctaacagtcaggtccctcagctgcaggtctgttggagtttgctggaggtccactccagaccctgtttgcctgggtatcaccagcggaggctgaagaacagcaaatattgcagaacagcaaatattgctgcctggtccttcctctggaagcttcaacccagaggggtggccacctatatgaggggtctgtgggtcccttctgggaggtgtctcccagttaggctacacagggatcagggacccacttgaggaggcagtctgtytgttctcagagctcaaacgccatgctgggagaacaactgctcttttcagagctgtcagacagggacatttaagtctgcagaagttgtct

SEQ ID NO: 651042 - DNA, 601 bp, Homo sapiens
atgggaactgttttaaatgctccatattaataagccatttgaaaaatgtttcttttcccctccccctgttccgcaccatctttttcgtttattcaagaaagagtaaagagaaacraaaactagaatacagagattttcaactttttataagatgctatatattactgtatttaagacaatcttttgaaatgtaaaaaaaattccccctgaattaggactgacttcatctgagtagataccatctactgtaacagcccaaccctgtcccctcaggtcttggcagctaaaggtgagtagggcccccctccttccccatacccctgcctgagaaactgccaggaagctctcaggcagcatcagcaggcaggaagtggggtgggagtgagggggtctccacccattagcagctgcttatgcagtaggcagggaaactttcctacagaaagatcaggtcagcagatactccaaaccaatttctaccacatgctacctagttgtggaattaaattaaaaagctaagaagggacctggaatgccaatccccttgttttcctcctaccttgtgcctggcacccaaaagaataaaacaagaacagctgga

SEQ ID NO: 651043 - DNA, 563 bp, Homo sapiens
caagaagacatgggcaagcacttctctgaagtgacagaatctgccataccttagacttttgcatcaaatcttacactgcttctctggaagaggactaaagtcttctaagtacacagaaggtcttcattttaaaagtgatggggtaaaatattaaaaagaggtgtgatgcaggagagaagaagaggcagctgggagaagcataaggatttaatatgaaaagagctgggaggtccagagccctctgctttgtgttgacgatgcttcattgatgtgccctacttcccttctctctgctcagctactttcatgtgcgatcgttcccctcctcccataccaccatcctgagcttccaaattgagaatgagcaattttaacaagaagttctcaaagaccacaggcagcctttgttggtaaatggaagctaggactacctacctcctsgcattgcttttaccgtatatccatgcaatagaggactgtggaacactcaggtcagcaccgcttctgctgaggactgccccatcaagttgttttaaacacattcgtataatatgatacaatat

SEQ ID NO: 651044 - DNA, 588 bp, Homo sapiens
tttgtaaatattattgtaagtaaaaatagacaaatctgttgaaatcttactatgtaatagcttttgtgttaagaataaaaacatgtaggtatatgtacacatggtaatctcaatcaactttcacaacaatcctttaaagtatttataattattttcctcatttkgctggtgaggactaccatcatgtcaatgccaaataagatatagcaacctaaatcaagttctttatgtccttgaccaccaggctatactgtatagctttttttaaaacaactattttaataaaagcttttgaaaaattgtttatgttacagcaataccttatcatttcttattttagaaggaagcaggaaaggccactgaaaacaggtctctattccaatttttattcagttctgttttaaagtaatatgaaatactatataactgatagaactggtctaagatgaataaaatcatttttgtgaaagtttttgggatattgattaaatattttctagttgtttcagaatgaggaaaaaatgagccctaggataaactttttcctccccaagatagacttttgcccttaagaggcacaccaggagg

SEQ ID NO: 651045 - DNA, 588 bp, Homo sapiens
tttgtaaatattattgtaagtaaaaatagacaaatctgttgaaatcttactatgtaatagcttttgtgttaagaataaaaacatgtaggtatatgtacacatggtaatctcaatcaactttcacaacaatcctttaaagtatttataattattttcctcattttgctggtgaggactaccatcatgtcaatgccaaataagatatagcaacctaaatcaagttctttatgtccttgaccacyaggctatactgtatagctttttttaaaacaactattttaataaaagcttttgaaaaattgtttatgttacagcaataccttatcatttcttattttagaaggaagcaggaaaggccactgaaaacaggtctctattccaatttttattcagttctgttttaaagtaatatgaaatactatataactgatagaactggtctaagatgaataaaatcatttttgtgaaagtttttgggatattgattaaatattttctagttgtttcagaatgaggaaaaaatgagccctaggataaactttttcctccccaagatagacttttgcccttaagaggcacaccaggagg

SEQ ID NO: 651046 - DNA, 558 bp, Homo sapiens
gattgtttatgctggggagcccatcacacataaaaccccatcccattagtgtgattgtctgtgaaagaaccccttaccacagatggaatacagagaagctagcagaccaaagtcacacagcaaatatgaggagggggtaccaggactccaaagccactagattgtgatggtttatagactaatgagaggtatttttcacaaacctaagcagatacacagtgctacaatattggatcacatttgtttttaattgtactmcttatgtacatctgtaaaatgaagatcaaaaactacatcacgtgttcttctcaaagacagctcacacatagcttatttgaagtacagatttctgccaaaccctacaaaataattttatccctcattcaacccccccacccccatcttaaaagtgtgaagctatctaacatatgggtggctacgaggtcacagagcaaccaatgaaaagatgctgactgtatggaagcaaggaaatgtgaaatttcctatgagttccagcttgtgtccagtctctgtggttcatgtagagcaaggcaaacc

SEQ ID NO: 651047 - DNA, 623 bp, Homo sapiens
gattcgcgaatcgttctttgctcaattaaattcttctaaatwtaatttggctaaagtattttatttttatcatcagtgaatagcaactccatctttccagttactcaggccagaatctttgaaatcatgcttgagttctttctctacttcatgtctactatcctggtgtaagccctgatcatatcttactctaaacattgcaatagtctcccaactggtttgcctacagtctcttctccaagcagtaccagaatgctcctattaaaataaaaaatggctcatgtcactcttctgtgcctaatttctcaatgccttcctatctccctcagagcaaaaccaaagtctcctcaaagagcaggcacactgctcccctcctgctgcattctaccttcccattaatcacctcgtgctctggtctgggatccctctccaaccccactggccttcgtcgtgttccctggcccaggtacaccatcactccagcgcctttacacatgctgcgccttgcctgggatcctcacctcacaaagccgcagggctcactgttcacctccttcacatctttgcacaaacattaacttccattacctcccctttattctatttaatgttgcagcaccccc

SEQ ID NO: 651048 - DNA, 623 bp, Homo sapiens
gattcgcgaatcgttctttgctcaattaaattcttctaaatttaatttggctaaagtattttatttttatcatcagtgaatagcaactccatctttccagttactcaggccagaatctttgaaatcatgcttgagttctttctctacttcatgtctactatcctggtgtaagccctgatcatatcttactctaaacattgcaatagtctcccaactggtttgcctacagtctcttctccaagcagtaccagaatgctcctattaaaataaaaaatggctcatgtcactcttctgtgcctaatttctcaatgccttcctatctccctcasagcaaaaccaaagtctcctcaaagagcaggcacactgctcccctcctgctgcattctaccttcccattaatcacctcgtgctctggtctgggatccctctccaaccccactggccttcgtcgtgttccctggcccaggtacaccatcactccagcgcctttacacatgctgcgccttgcctgggatcctcacctcacaaagccgcagggctcactgttcacctccttcacatctttgcacaaacattaacttccattacctcccctttattctatttaatgttgcagcaccccc

SEQ ID NO: 651049 - DNA, 605 bp, Homo sapiens
accaaatttaaacatttccaaatgtttcatcataaaagcaatacatattcaagataaatattcaaacaatacataaggatggaaagtgtgaaataaaagtgtaaatgggactttttgctcacattctgagaacactatttcccaaacattctctgctgtagaaataatactttcttgattccaattctcatagaccaatacttttgtaaaatacattaaaattactgagttgggcgtggtggctcatgcctgtaatcctggcactttggaaggctgaggtgggcagatcacttgagcccaagggttcragaccagcctgggcaatatggcaaaaccccatctttacaaaaaaaaaaaaaaaaaatgacccaggtgtggtggcatgtgcctgtagtcccagttactccagaggctgaggtgggagaattgtttgagcctgggaggcagagattgcagggagccaatattgcaccactgctctccagcctgggtgacagagtgagatcctgtctcaaataaaaataataataattactgaaataattacaaaaaagtacccaaatacatataaagtacaaactcactagaaacaatacaaagttcaa

SEQ ID NO: 651050 - DNA, 290 bp, Homo sapiens
gtttaatattattaaaagaattattcccatgaggtgagcgtaaaccgttaaaaatcccagagggcagggaagatatctgtctttggttgttgacccaaggctgaacggaagcagttgtgttatttaagactgtgtgtccaagattgagactgagtttgtttgctgtcaagygggaattgtgtctcagagctggaaggaatttgaggagattattggttcagcctcctgcctctagacagttaactccaaaactccaaacatacttctaagggacttatgggtgtgagggt

SEQ ID NO: 651051 - DNA, 573 bp, Homo sapiens
cttagtgagttgtgggactaatcaaagtgtctcatattcatttaactggagtcctagcaggagagaagacttggggaagagaagtggacataaaatgtaattgaagaaataatggcccccaaaatccaaatttgttgaaattaaaaaaaacatagatccaaaaaccccaagcggaataaatataaaytaaacctctttaggcacttcataatcaagttattgaaatccattaataatgagaaaacattttaaagcagtcaggggaaagagatacaccacataaagagaaacaaagataaaaaatgacagctgacttaccagaaaccacacaggtcagaagacaacagaacgtctttaaagtgctgacagaaaaataaaataaaataaattgttggcccagaatactacacccatgaaaatatatctttcaaaaatcaaggtgaaagaaaaccattttaagatcaacaagaggggaggagttgctattcgacaattataaaatttcagttctgtaagttagttaagttctataaatctattgtccaatctgtagttaatgatactgtattgtac

SEQ ID NO: 651052 - DNA, 573 bp, Homo sapiens
cttagtgagttgtgggactaatcaaagtgtctcatattcatttaactggagtcctagcaggagagaagacttggggaagagaagtggacataaaatgtaattgaagaaataatggcccccaaaatccaaatttgttgaaattaaaaaaaacatagatccaaaaaccccaagcggaataaatataaattaaacctctttaggcacttcataatcaagttattgaaatccattaataatgagaaaacattttaaagcagtcaggggaaagagatacaccacataaagagaaacaaagataaaaaatgacagctgacttaccagaaaccacacaggtcagaagacaacagaacgtctttaaagtgctgacagaaaaataaaataaaataaattgttggcccagaatastacacccatgaaaatatatctttcaaaaatcaaggtgaaagaaaaccattttaagatcaacaagaggggaggagttgctattcgacaattataaaatttcagttctgtaagttagttaagttctataaatctattgtccaatctgtagttaatgatactgtattgtac

SEQ ID NO: 651053 - DNA, 538 bp, Homo sapiens
attctgtttcagatcttcttaggtaaccactcaaagtctttgtggccctgtttttctatcagtaaggttgtgctagtataggttctacctgcttcaaaggatttccttttaagatatgtggggaggtggccgggcrcggtggctcacgcctgtaatcccaacactttgggaggccgaggtgggtggatcacctgaggtcaggagttggagaccagcctgaccaacatggtgaaaccccaactctactaaaaaatacaaaaattagctggacatgatggcatgtgcctgtaatcccagctactcgggaggctgaggcaggagaattgcttgaacccaggagggggaggttgcagttagccaagattgcaccattgcactccagcctgggcaacaagagcaaaactccacctcaaaaaaaaaaaatgtggggagatgccctattctacatctggctgattaaaactactgcaagagggactagtggatcattgatctgatttattagacaagtcaatggcataaagaagagagggaaaga

SEQ ID NO: 651054 - DNA, 538 bp, Homo sapiens
attctgtttcagatcttcttaggtaaccactcaaagtctttgtggccctgtttttctatcagtaaggttgtgctagtataggttctacctgcttcaaaggatttccttttaagatatgtggggaggtggccgggcgcggtggctcacgcctgtaatcccaacactttgggaggccgaggtgggtggatcacctgaggtcaggagttggagaccagcctgaccaacatggtgaaaccccaactctackaaaaaatacaaaaattagctggacatgatggcatgtgcctgtaatcccagctactcgggaggctgaggcaggagaattgcttgaacccaggagggggaggttgcagttagccaagattgcaccattgcactccagcctgggcaacaagagcaaaactccacctcaaaaaaaaaaaatgtggggagatgccctattctacatctggctgattaaaactactgcaagagggactagtggatcattgatctgatttattagacaagtcaatggcataaagaagagagggaaaga

SEQ ID NO: 651055 - DNA, 573 bp, Homo sapiens
cttagtgagttgtgggactaatcaaagtgtctcatattcatttaactggagtcctagcaggagagaagacttggggaagagaagtggacataaaatgtaattgaagaaataatggcccccaaaatccaaatttgttgaaattaaaaaaaacatagatccaaaaaccccaagcggaataaatataaattaaacctctttaggcacttcataatcaagttattgaaatccattaataatgagaaaacattttaaagcagtcaggggaaagagatacaccacataaagagaaacaaagataaaaaatgacagctgacttaccagaaaccacacaggtcagaagacaacagaacgtctttaaagtgctgacagaaaaataaaataaaataaattgttggcccagaatactacacccatgaaaatatatctttcaaaaatcaaggtgaaagaaaaccattttaagatcaacaagaggggaggagttgctattcgacaattataaaatttcagttctgtaagttrgttaagttctataaatctattgtccaatctgtagttaatgatactgtattgtac

SEQ ID NO: 651056 - DNA, 573 bp, Homo sapiens
cttagtgagttgtgggactaatcaaagtgtctcatattcatttaactggagtcctagcaggagagaagacttggggaagagaagtggacataaaatgtaattgaagaaataatggcccccaaaatccaaatttgttgaaattaaaaaaaacatagatccaaaaaccccaagcggaataaatataaattaaacctctttaggcacttcataatcaagttattgaaatccattaataatgagaaaacattttaaagcagtcaggggaaagagatacaccacataaagagaaacaaagataaaaaatgacagctgacttaccagaaaccacacaggtcagaagacaacagaacgtctttaaagtgctgacagaaaaataaaataaaataaattgttggcccagaatactacacccatgaaaatatatctttcaaaaatcaaggtgaaagaaaaccattttaagatcaacaagaggggaggagttgctattcgacaattataaaatttcagttctgtaagttagttaagttctataaawctattgtccaatctgtagttaatgatactgtattgtac

SEQ ID NO: 651057 - DNA, 520 bp, Homo sapiens
ctcgcctgcggaatacctgtctgaagggcgcgtcagtagaagcttcgtttcatactacctttcttactgttctcttcatctaaatcgcaggacattattctcggcttcatttccacatagcattcggcagtggacaaggagtaggcggacccgaacctgaacctgacagctgatgccgtgaagtggacacttgaagttcttggtttggctttagggagcgtttagggaatgtgttaggcagcaatcgggcaagcatgagctgtagcccaacccttccctccgtgggaaaattcaagttaggacgcaatgcgaggcctcttaaatctttaagatcctcgggtcagctcraagagtctttagcaattcgttgttttgtcttgagaccattatcggtccctaagcacctaattatttaatggcagccctctgggtatatcgggtagactgataggtcttatctaacattcaaacacaagtttctggaggaaactctcatctgacttcctcctttcccacccgc

SEQ ID NO: 651058 - DNA, 362 bp, Homo sapiens
ggctgcagtgagccgagattgtgccactgcactccagcctagatgacagagtgagaccctgtctaaaaaaaaaaaaaaaaaaaaaaaaaaccacagaggaaaagaaaagaaaaaaaaaggtgaatgaataagcaaatactgttcagccataaaaagataggagctgctgggagcaatggaatcccagcaccttgggagactaaggkgggagcatttcttgagcccatgagtttaagagcagcctgggcaatacagtgagaccctgtctctagcaaaaataaaataaaatataataaataaataaataaataaacaaacatgaactatcaagtcttgagaagatatggaggaaacttaaatac

SEQ ID NO: 651059 - DNA, 570 bp, Homo sapiens
aagcttccagaggaaggatcagacagcaatatttgctattctgcagcctctgctgtgatacccaggcaaacagggtcttgagtggatcttgctsagtaggccaagcctcagcaaaccccaacagacctgcagctgaggggcctgtctgttagaaggaaaactaacaaacagaaaggaatagcatcaacatcaacaaaaaggacacccacaccaaaaccccatctgtaggtcaccaacatgaaagaccaaaggtagacaaaaccacaaagatggggagaaaccagagcagaaagtctgaaaattccaaaaaccagaacacctcttctcctccaaaggatcacaactcctcgacagcaaggaacacaaaccggatggagaatgagtttcatgagttgacagaagcaggcttcagaaggtcagtaataacaaacttctctgagctaaaggagcatgttctaacccatcacaaggaagctaaaaaccttgaaaaaaggttagatgaatgactaactagaataatcagtgtagagaagagcttaaatgacctgatggactgaaaaccacagtatg

SEQ ID NO: 651060 - DNA, 570 bp, Homo sapiens
aagcttccagaggaaggatcagacagcaatatttgctattctgcagcctctgctgtgatacccaggcaaacagggtcttgagtggatcttgctgagtaggccaagcctcagcaaaccccaacagacctgcagctgaggggcctgtctgttagaaggaaaactaacaaacagaaaggaatagcatcaacatcaacaaaaaggacacccacaccaaaaccccatctgtaggtcaccaacatgaaagaccaaaggtagacaaaaccacaaagatggggagaaaccagagcagaaagtctgaaaattccaaaaaccagaacacctcttctcctccaaaggatcacaactcctcgacagcaaggaacacaaaccrgatggagaatgagtttcatgagttgacagaagcaggcttcagaaggtcagtaataacaaacttctctgagctaaaggagcatgttctaacccatcacaaggaagctaaaaaccttgaaaaaaggttagatgaatgactaactagaataatcagtgtagagaagagcttaaatgacctgatggactgaaaaccacagtatg

SEQ ID NO: 651061 - DNA, 267 bp, Homo sapiens
tgaactctggagtttgagacaagcctgggcaacatagcaagaactcatctctactaaaacataaaaaagttagccaagtgagatatcctgtctttaaaaaaatgtatatatgtatatatatatttatatacacacacacgcgcacgcrcacacacacacacacacacacacaaaaaacaccttgaccaggtgatcaaaattagcatcataaatgagacatatataaacatcatgggcctcaggttgtggatattttaaaagaacaca

SEQ ID NO: 651062 - DNA, 267 bp, Homo sapiens
tgaactctggagtttgagacaagcctgggcaacatagcaagaactcatctctactaaaacataaaaaagttagccaagtgagatatcctgtctttaaaaaaatgtatatatgtatatatatatttatatacacacacacgcgcacgcacacacacacacacacacacacacamaaaacaccttgaccaggtgatcaaaattagcatcataaatgagacatatataaacatcatgggcctcaggttgtggatattttaaaagaacaca

SEQ ID NO: 651063 - DNA, 554 bp, Homo sapiens
ccaaaatacaacaggcccctttgtaggacacggaccactggagaacactagctatttacattgaacattctcattgtcaatactctagtgtaaaagaagggagaagaggcaataagcacaaaagagtaagaataaagagggagaaataagagaaaatgggagatgaagtaacaaaaatcagaaattttaagtagagtgctttggcacagaccactaattgtcctccaatattcattctcctgttccttccttgtaataatagaatatttcccattacttcttacttttagctggacacataattgcctatcsccaaactatacttcgcagagtcctttgcagctaggtgtgaccatataactaagttccagccaatgacatatgaaagaaaggaagtgatgtaaacaatttcaggccacatttgtattaaggaagtggctttccctccgttcttatgactatccaccatcaattgaggctaggacaagaacagagttgtggtaatccacctttactattagatgggagtcatattttggggaaagaagggaaaa

SEQ ID NO: 651064 - DNA, 569 bp, Homo sapiens
taaacaaggactgatttgagcattagttgtgctgactatcacagacctggcaattcactgagattagatcaacagtacaacattacaaaaccatcatcaaggcttgacaatattggtgatttaccaaagccaccaaaatggtacttggccaatatcaatgccctcactataatatacctaattttttttttgaggtgtgagtcaacatgcccagccaatatacctaaattaagggcttytgtggaatttatttaattatacatataatatttatcctttaatttctatttgtgatactagataaacattgcaactgtatattttacattacaagtttttgagtcattgaaagacatttgttacaaggagttatgtataggtatgtaattacgtatttttgcataattatataatacatgcaatgtaccataaaaataggaggctactggcacattgatttccacaagttactatgttcaattatagcaaaaagcctacacgaacatgtcaacctgattctgcttaacaaacatttacaaagtagctgctaggtacagggcacaggaaaa

SEQ ID NO: 651065 - DNA, 547 bp, Homo sapiens
tgaaaagtgtgacatgtctcatgtttattcaaatgtaagaatacatagattcatatacgccgcacaaaacataaaaaatgcaggtattttccaatctagaaatagttaatttgctaacaacttgtacatactaatgatcactacagctcccattttctccaaccttaatgcctcctaattcccaactctggtttgcacttgccctttggttcttctctgctgtcggactgttcaccaaccatccatttattcrttgcacaaggacgtactaggaaccactggagtgagaccctctagaactccttcacccttgtctcttaggactagggcctcttggaagttgaaagagacccaagactcttctactaattgggaactctcaaaatactattataaaaaataaagaaatgccagttaacagcgttattaaaatttactttaaggacttacatttcacatagtaattcttttaacagacacaattgcaatgacaaaggcaatgactttatatctgcccatatttgaaagaaatgtcaaaaattcaaat

SEQ ID NO: 651066 - DNA, 586 bp, Homo sapiens
gttcattgtgacttctaaagatgacaaaaagaatgaatgaaaagactgaactcaaaatagaaatgagaaaatgataatttgtttgaaggtctgatattagtttcaaaatatatctctgaaacatctttgaaaaccattagcgtccactgactctcaatttcattttatttcaatttttttttttttttgacagagtctcgctctctcacccagactgaagtgcagtggcacaatctcagctcackgcaacctctgctccgggttcaagcaattctcctgcttcagcctcctgactagctgggactacaggcgcctgccaccatgcccagttaatttcattttatttctgctatataccttaaaaatgtgagcctgcagagcgcagagaagtcagaaacacagttctggaagtcacctgcaaacagacaacactgaagccaaagagtggatgggtttgtttggggagttagaatgtgtaaaacacaagaagaaaaaaactaaataaaatgaatttaaaataaatttttaaaagactgtgtaaagcaaaaaacttacaaacatgtagaatatcaatttttgaggaaag

SEQ ID NO: 651067 - DNA, 586 bp, Homo sapiens
gttcattgtgacttctaaagatgacaaaaagaatgaatgaaaagactgaactcaaaatagaaatgagaaaatgataatttgtttgaaggtctgatattagtttcaaaatatatctctgaaacatctttgaaaaccattagcgtccactgactctcaatttcattttatttcaatttttttttttttttgacagagtctcgctctctcacccagactgaagtgcagtggcacaatctcagctcactgcaacctcygctccgggttcaagcaattctcctgcttcagcctcctgactagctgggactacaggcgcctgccaccatgcccagttaatttcattttatttctgctatataccttaaaaatgtgagcctgcagagcgcagagaagtcagaaacacagttctggaagtcacctgcaaacagacaacactgaagccaaagagtggatgggtttgtttggggagttagaatgtgtaaaacacaagaagaaaaaaactaaataaaatgaatttaaaataaatttttaaaagactgtgtaaagcaaaaaacttacaaacatgtagaatatcaatttttgaggaaag

SEQ ID NO: 651068 - DNA, 586 bp, Homo sapiens
gttcattgtgacttctaaagatgacaaaaagaatgaatgaaaagactgaactcaaaatagaaatgagaaaatgataatttgtttgaaggtctgatattagtttcaaaatatatctctgaaacatctttgaaaaccattagcgtccactgactctcaatttcattttatttcaatttttttttttttttgacagagtctcgctctctcacccagactgaagtgcagtggcacaatctcagctcactgcaacctctgctccgggttcaagcaattctcctgcttcagcctcctgactagctgggactacaggcgcctgccaccatgcccagttaatttcattttatttctgctatataccttaaaaatgtgagcctgcagagcgcagagaagtcagaaacacagttctggaagtcacctgcaaacagacaacactgaagccaaagagtggatgggtttgtttggggagttagaatgtgtaaarcacaagaagaaaaaaactaaataaaatgaatttaaaataaatttttaaaagactgtgtaaagcaaaaaacttacaaacatgtagaatatcaatttttgaggaaag

SEQ ID NO: 651069 - DNA, 618 bp, Homo sapiens
tttttattatgaatatttgttctggtgcatatttttctgtcagactaagtcyccaagtgtggaatggcctcctgccacgtatctaaaaatcgattgttcaaaaatcttaattataagaaagtaaacaaagagtgggttgaagcagtgcagagttctaatgaattaatgtaacaaaattcaagcaaagtcaactgtctttaaagccagcaggctcagctctgacagtcatccatcaaactgaaggtctccttaataaatgccaattacagggcatatatgcacaaacgtggctagcataagccataggatcatttccttctgagaaaattagtaaccaagaaaacacccaggcagtgcaaacgaccggcccacccgacagtaaggcttgtccctgatcagaatactaaccagcattatttctttcttactctctctctctctcttttcaacttaggaaaagttcagaaccacacagaattttgtttggggttatacaaattccttcacaatttgtatagaagtctaacataactttttaaaagccatgacatgcccataatgtatacagagtctctgacttccgccgtaagcgaggctttttcctaacttaatcatact

SEQ ID NO: 651070 - DNA, 542 bp, Homo sapiens
aatatattccactggtatgttattagctcttactgtagaactcacactactatatgaatcccaactttcaaaaacgtttctgctgccttttttattatccacctggccaggcactgagcccatccccaaacagrtttcttggagccatttgatgacatcaggggaggggaggagactttcttagagagtaaggccacggatcttttgtcacaaggcaaaggctcaaattttataccacagctctacttcttcaatgggaataggtgggttttcaaaaagaagggctgtgtcctcctatgatgacggagataactaatggagtaaatgaaaacattcatgtttgatatttttatgcaaatggattaaaatattctgctttagccccaagttgatgtcttatctaattgccctttaaagtgacatcttccatcgcacatgtggacccgtgctaaattcatttatttcatcttgcctgaaattatgatgaatggtctaagctctattcaattatttaaaatgtgcaaagaaacagaaacaatgaa

SEQ ID NO: 651071 - DNA, 590 bp, Homo sapiens
ctacttataggtagaccccattttattgcattttgctttatttcactttgcagattttggattttttacaaatcagagatttgtggcaacccctggcatcaagaaagtctattggtgccatttttccaacagcatctgctcacttcatgtctttgcatcacattttggtaattctcacagtatttcagactttttcattattattatatctgttacagtgatttgtgatcagtgatctttgatgttactgttgtrattgtttcagggcaccacaaaccacatccaaataagacggcgaacttgataaatgttgtttgtgttctgacgtgttccactgaccacgcatttatccatctctctccctctcctcaggacctcctgttcactgtgacacagtgatattgaaatcaggccagttaataatcctacagtggtctctaaatgttcaagtgaaaggaagtgccacacatctctcaaatttaaatcaaaagctagaaatgattaagcttacttagagaggaaggtatgtcaaaagtcaagataggccaagagttaggcttcttgtgccaaacagccaagttgtgaatgaa

SEQ ID NO: 651072 - DNA, 579 bp, Homo sapiens
taaaacacaacattatgttgttttgattaatctatttcacatgttaacttgcatttctattgcaagagaaaaatcattggcatacctgtataaagaaagtgaaatgcaaagttttctaaccattggtttatattagttaatgtgtttaattttagttcagtggagtatttaaaataaggagaaatagaaaaggaaartgttttccttttagagtcattcaggggcttaatatattaagaactagaaggacagttttttgtttcgttttgttttgtctgaaaagtaagtataaacatgcctatgggctgggtgcggtggttcacgtttgtaatcccagcactttgggagactgaggtgggcggatcacctgaggtcaggagttcgaaaccagcctggccaacatggtgaaacctcgtctctactaaaaatacaaaaattagccaggtgtggtggtgggcacctgttatcccagctactcgggaggctgaggtaggagaatcacttgaacccaggagaaagaggttgtggtgagctgagaccgtgccattgcactccagcctgggtgacagagtaagactc

SEQ ID NO: 651073 - DNA, 550 bp, Homo sapiens
aataatatacttaattatctatgggagagaaaaatactccaaagtggaattttaaaartattcgatagttactttttgggaaataatattattcaaacagatacttaaaaactattttagatgatttaggccaggtccggtggctcacacctgtaatcccagcactttgggaggccgaggtgggtggatcatttgaggtcaggagttcaagaccagccatggacaacacggtgaaacttcatctctactaaaaatacaaaactcagcccaggcagtagtggtgcgcacctgtaatccagctattcaggagactgatgcaggagaattgcttgagcctgggaggcgaaggttgcagtgagccaagatcacagcattgcactcccatctgggtaacagagtgaggccttgtctcaaaatatatatatatattttatattatataaaattatatataaatatattttacatgattttgttataacagtcccagaaatatttttagttaataatattgtacatgtctattcaattctttcagagatggggaata

SEQ ID NO: 651074 - DNA, 433 bp, Homo sapiens
tcacatctagttgtgtccgtggaagtaattcctacatatatatgtgtttttttaattcctggcttataatttttatatcataattctgatatggctttatagtataaagctaaaactttgtaaaaaatagctatctcaaaaaatatcaaaaagtgataaatctgtgaaggaaatagaaatatgcatgtagccatatacctactattaattttgaggtttctccaacttatttacccttgaatatgttttaataaattaattagacaaaacttatttttaaaactatgaaaatgaggatgaaacagtttctgattagagaaaatttgtatctcaagagttttgacaccacaggtactttttaccaatactgggtagrcaaaagtaaaaattgctgaggagtgggaatactccagcacttcttgggggctagaat

SEQ ID NO: 651075 - DNA, 567 bp, Homo sapiens
tatggttttgtaagacatccataaagaaattgtgttaggagacagttaataaagaaactatatgagacctaagaactgtagcaagctggtaggtttagtgcagaaattgttttttaaaactgtactgacttgacagcagcatgcaagctcaccagtttttcatttaaaaaggactaataggccgggtgcggtgattcacacttgtaatcccagcactttgggaggccgaggtgggtggatcacctggggtcaggagttcaagagcagcctggccaacatggtgaacccygtctctactaaaaatacaaaaattagccaggtgtggtggtgggcacctgtaatcccagccactcgggaggctgaggcagagaatcgcttgaacctgggaggcagaggttgcagtgagccgaaattgggccactgcactccagcctaggcgacagagcgagcctccgtctcaaaaaaaaaaaaaagactaatacaatttaagtgatcttagaaatgctttattattcacccagtttaccagaatattctactcttcactatatatgagactgttagatc

SEQ ID NO: 651076 - DNA, 607 bp, Homo sapiens
tttcattctaacctccactggcrttaactaaacctacattaccttgtcgtggaagcagacaaggtctgcttgtggtcccacgagacagtggcctcataagattagaatacagtattttagtataccttttctttgtttagatatgttcagatacactaatgccattgtgttataattgcctgaagtattcagtacagtaacttgctgcacagatttgtagcctagacgtgataggctatgccatataacctaggtgtgcagtaggccagaccatctaggtttgtgtaagtatagtccatgatgtttgcacaatgacagaattgcctagtgatgcatttctcagaatgtgtccctgtcattaatcaacacatgactgtatatactatgaatatgaccatttattttatagctaaaatatgtatataggagtaactcaaaatgcaataactaataatgaattaattgtgctggggtagtggattgcgtatactttttctccctttttctggattatcattagttttgttatgttactcttacaattaaaaggaagaaaaagaatcacatagttcacattattgttttctatttatttcctgttccccac

SEQ ID NO: 651077 - DNA, 607 bp, Homo sapiens
tttcattctaacctccactggcattaactaaacctacattaccttgtcgtggaagcagacaaggtctgcttgtggtcccaygagacagtggcctcataagattagaatacagtattttagtataccttttctttgtttagatatgttcagatacactaatgccattgtgttataattgcctgaagtattcagtacagtaacttgctgcacagatttgtagcctagacgtgataggctatgccatataacctaggtgtgcagtaggccagaccatctaggtttgtgtaagtatagtccatgatgtttgcacaatgacagaattgcctagtgatgcatttctcagaatgtgtccctgtcattaatcaacacatgactgtatatactatgaatatgaccatttattttatagctaaaatatgtatataggagtaactcaaaatgcaataactaataatgaattaattgtgctggggtagtggattgcgtatactttttctccctttttctggattatcattagttttgttatgttactcttacaattaaaaggaagaaaaagaatcacatagttcacattattgttttctatttatttcctgttccccac

SEQ ID NO: 651078 - DNA, 588 bp, Homo sapiens
tcatcgtatataattttcatatttctttggagtatatcatgcatatagcaatcagatagaatagaatcatacttatttctagagttttcccattcatgtaaaacctgaaaaaatatttttttcaaattttcagccctcagtatggagcagrtttgacattttaaaggcaatttaaatgattattatttgcctagtaaattctcaagattccttgtatgctcacacagtttgcaatgagatgaaatcatgtgaaaagcaatgcacctggcatttatatccattatatccaaaagaggtgtcgaatttaactaaaatatactttaaaaaatttcctcactggtttaagcttgattttaatactatttaactccttatttaaacaaaaaaaaaacaccataagaaattcaatttatgaggtctgaagaagttttgctgggcacagctaaggattccagcctatctttgtgttcgctgacttattaagtgtcgtttagaattggattaattttggtctcaactcttagtcctcatcacaatcagagttggtattcacataagcctttctttgaataggcttcagaaacaaag

SEQ ID NO: 651079 - DNA, 537 bp, Homo sapiens
taaaactctgtgaaataaatagcawtctatacctttcttatttaaaggtttataattaatgtgtttggacaacaatgcacaacattaatatatgctctcaggcttgagctgtctgcatttctgatgatgggacttattggcctgtgtggttttagagtcattccaaggcgaacaatggatcagggatactcatattatcctttgtcatagtctatttgacaatcaccacctagaaccaggggccccctgggttctgttttcagtacaccatggcatgccattatgtaatatcccatcttctaaagaagacacatccttggatgagcctcatgagttgccaaaatattactgtataaaattatatatattatctcccaacacttactataactttctttttcatctttcgttatgaattttgcaaaaatttatatatctttttcccttttttatagtaattctttcccctctcttctctgtgtctcatctaaataagtaagtctaatgtttttctaaaaatagaaaggcaaaaataca

SEQ ID NO: 651080 - DNA, 478 bp, Homo sapiens
agtaaagtggcatgatcttggctcactgcaacctctgcctcctgggttcaagcaattcttgtgcctccgcctctcaagtagctgggattacagtcgtgtgccaccacagccagctagtttttgtatttttagtggagatggggtttcaccatgttggccaggctggtctcgaactcctgacctcaggcgatccgcccacctcracctcccaaattgctgggattataggcgtgagccaccgcacccgactgcaatgcattcttaaaaactagataatatatatccatacacaccttcaggttcattttggcttattattttgtacaacagaaatgttacaagttgcttcattattctcgtctatataatgtccatgctttatcatctaatgttcatattttttaaaggtattgcatgatattgttttctcatctttctagactatttaacaaagttgaatgaagtgattatacatata

SEQ ID NO: 651081 - DNA, 591 bp, Homo sapiens
aaaagcaagtccttcagttctctattcattaacctttattataaattccaatcacaatcacttgaaaaaattaaactactcaccattttttgcaacaattgcacttcccttcagcttgaaaataagsagtccttattcatattaactaatacaacttttttccccgttattataaaggctatatgtaactgtcctgaagatcctaatgcatcacattgtagtcagttctcaaaaatgtcttcataaattctcatagatgcaataagaatagttcaaaatgacagttgatgaaaaacagatgttatcatttgacattgagatttttaaattttatccttacatttcatttggagagtctcttcaatatctttaataatgttaatgatgtcattgtcaatatagcactgcttggaaattatttcccaatttctgactagcaactcctctgcaactcatttgaggctggaaatagatgatgctcatttaagtctgatctgtgagatatacctttcttctgattgctttgccttgggggatactattttatgtgtttcaaaggattttgctgagagaaaataaagagagaaaagt

SEQ ID NO: 651082 - DNA, 591 bp, Homo sapiens
aaaagcaagtccttcagttctctattcattaacctttattataaattccaatcacaatcacttgaaaaaattaaactactcaccattttttgcaacaattgcacttcccttcagcttgaaaataagcagtccttattcatattaactaatacaacttttttccccgttattataaaggctatatgtaactgtcctgaagatcctaatgcatcacattgtagtcagttctcaaaaatgtcttcataaattctcatagatgcaataagaatagttcaaaatgacagttgatgaaaaacagatgttatcatttgacattgagatttttaaattttatccttacatttcatttggagartctcttcaatatctttaataatgttaatgatgtcattgtcaatatagcactgcttggaaattatttcccaatttctgactagcaactcctctgcaactcatttgaggctggaaatagatgatgctcatttaagtctgatctgtgagatatacctttcttctgattgctttgccttgggggatactattttatgtgtttcaaaggattttgctgagagaaaataaagagagaaaagt

SEQ ID NO: 651083 - DNA, 427 bp, Homo sapiens
tgtgatcacgccactgcatttcaatcttggcaacagagcaaaaccttctctcaaaaaaaagaaaaaaaaaaaggaagatggatgactagatgcaacaaggaggagagtctaccaccaaggaactgggacaccaggaagactagcatactccaagcagatctgcacacggaaggcattgagagtggacagagggaggacacagatgctgggctgaagagggaggaagctgggaactctgcaaggggctaccacatactaggactagttcctggcccccagtgactcctggggaatgagtgtgttaagcaggcatggtgcarcctgctcatgcacagacctctggaaccctggcaggagaagtctccccaacccccatggaaacttgagggaaactggcaggaagagctacttagagaagtgacaagtg

SEQ ID NO: 651084 - DNA, 669 bp, Homo sapiens
ttgtgtgcattaaattttttaatgcagaaattttagcaaataatcaaacaccacataaagatactaaacatcccagaaaagcttacagaaggagcgaggaactgtaccaattaaacgttttagttttattttagtaaaagtgccatagagctataatagcaactatttactgagcttgtattatatgccaggcacttttcattttaaactcagataattttmcaataactgtatgaagttgcaactattattttctccattctgcagactgggatgcaaaggttaaagaaacttaacttgaccaggctgttccagctggtgtattagggatccaaacttacataatctagtttctctgttgttctgctcaaggtgatgaaattttggaagctgagtttacttctggctgtaatccagaaaaattgtctttaaaatgcaaccttggaaaatacatagaattctaacaagtgcagatgaatttctgagaagatcattcctgacccaggggattgtgtgaagaaaggatcaggagtgggaatgtattgggcaggatttggaatgacttttgcagatgtctggagagaattgaagaggcaattaattacaggttctgatagttgggatagatcagattgtggagtcttaaatgtcactgtctggagtttgtgt

SEQ ID NO: 651085 - DNA, 669 bp, Homo sapiens
ttgtgtgcattaaattttttaatgcagaaattttagcaaataatcaaacaccacataaagatactaaacatcccagaaaagcttacagaaggagcgaggaactgtaccaattaaacgttttagttttattttagtaaaagtgccatagagctataatagcaactatttactgagcttgtattatatgccaggcacttttcattttaaactcagataattttacaataactgtatgaagttgcaactattattttctccattctgcagactgggatgcaaaggttaaagaaacttaacttgaccaggctgttccagctggtgtattagggatccaaacttacataatctagtttctctgttgttctgctcaaggtgatgaaattttggaagctgagtttacttctggctgtaatccagaaaaattgtctttaaaatgcaaccttggaaaatacatagaattctaacaagtgcagatgaatttctgagaagatcattcctgacccaggggattgtgtgaagaaaggatcaggagtgggaatgtattgggcaggatttggaatgacttttgcagatgtctggagagaaktgaagaggcaattaattacaggttctgatagttgggatagatcagattgtggagtcttaaatgtcactgtctggagtttgtgt

SEQ ID NO: 651086 - DNA, 651 bp, Homo sapiens
caatatcacctctaatggaactcccacgccaaaatccaggacataggcatccagagaatcaaatgctcttccataatggagagtgatttcagcaactgaacattcattgaaagaaaatggatttcttaaatgataacggggggtggacggggaaaggaggaaggattaaaacaacaaaacccagacgaaaatacatagaactgctgttttcccacctgaaaaataaacagaatgcttcatttcatttcacytgtgacttagctattaggaaagtataggtagttagatattatcttcattactgataaatatttattgaacacctaacgtgtgcaaaatattggcaagtttcagagatgcaataaaatataagacaacatatatacttttatgccatattttttctattatgaactatatcctatagtattgtttttataagtatatatacacatacacacatatataaatacattacagtcacacacatatgtatacacatacttgtatgtatgcaatgtatatgtaggaaaatatcaggaataaatatttcaaaatgtcagtaacattaaaatagaggtgacattttcttttaccttttagtgttttccaaaagctttcaaatgtccacactattatttgaaaaaatta

SEQ ID NO: 651087 - DNA, 607 bp, Homo sapiens
aagtcgcagatcagggtgcagcatagtcgctttytggtgagggctctcttcttggcttatagacagccaccttcttgctgtgtgctcatggggcctttccttaatgcatgcatatgtggagggttggcagtatgagagcaaaagagtgctctttggtgtctctgcttataaggacaaccagtcctatcagatcagggctcttcacccttattacctcatttaacctcaattacattcttataggccatatctccaaatacagtcacattgaatattaggggtccaacctatgaattttggaaggaacttaattttgttcataatagtcagcaaagccaaggaataggtagaattgctgatgctttgcatattgaaaatataagagtataagagccaaaggaaaagtctgatagtaaagaatgatgaagactaagagaaaccattgactctgggtagtaaagtgccatcatgagagaaccacactggaatggtggaaaaaggacctccaaaaaaaactgttcttcagagagagagagagagagagagagagagataatactggtgaaacctatcaacatgaacttttttagaattctagaagtaactc

SEQ ID NO: 651088 - DNA, 607 bp, Homo sapiens
aagtcgcagatcagggtgcagcatagtcgctttctggtgagggctctcttcttggcttatagacagccaccttcttgctgtgtgctcatggggcctttccttaatgcatgcatatgtggagggttggcagtatgagagcraaagagtgctctttggtgtctctgcttataaggacaaccagtcctatcagatcagggctcttcacccttattacctcatttaacctcaattacattcttataggccatatctccaaatacagtcacattgaatattaggggtccaacctatgaattttggaaggaacttaattttgttcataatagtcagcaaagccaaggaataggtagaattgctgatgctttgcatattgaaaatataagagtataagagccaaaggaaaagtctgatagtaaagaatgatgaagactaagagaaaccattgactctgggtagtaaagtgccatcatgagagaaccacactggaatggtggaaaaaggacctccaaaaaaaactgttcttcagagagagagagagagagagagagagagataatactggtgaaacctatcaacatgaacttttttagaattctagaagtaactc

SEQ ID NO: 651089 - DNA, 616 bp, Homo sapiens
acctctagcagggtgcatgagtgaacacaagatatttttgaattatctgagtatattcatttgaagtggcaagaacaagggtcattaacttattaaccatgtggaaaaactagaaaattgatggtgtcatctgctcagaagttatattcagttcattgctttggatcatgcttatgtcctaaactcttttatactgaagtgtcaacgatttaaccagccatctccttatttcaaggttagtgtttactttctgcttgtacatcttaagacaataaggcaaattataataatccatgagacagtgaactccgtkcctgatgttgtttgtcacactttcataattgcaattattattttctgcattttttaaatatttttctacttcccattctttttgtttttttagagtgcgtgcattactctataacctaaaagataaaatacttttatagatctattttctctgctgttgtcgctgggacagggtcttactgtgttacctaggctggagtgcagtggtgcaatcatggcttacagcagcttcgacctcccaggctcaagtgattgccccacctcagctcccaagtagctgggactacagatgtgcaccaccatg

SEQ ID NO: 651090 - DNA, 616 bp, Homo sapiens
acctctagcagggtgcatgagtgaacacaagatatttttgaattatctgagtatattcatttgaagtggcaagaacaagggtcattaacttattaaccatgtggaaaaactagaaaattgatggtgtcatctgctcagaagttatattcagttcattgctttggatcatgcttatgtcctaaactcttttatactgaagtgtcaacgatttaaccagccatctccttatttcaaggttagtgtttactttctgcttgtacatcttaagacaataaggcaaattataataatccatgagacagtgaactccgttcctgatgttgtttgtcacactttcataattgcaattattattttctgcattttttaaatatttttctacttcccattctttttgtttttttagagtgcgtgcattactctataacctaaaagataaaatacttttatagatctattttctytgctgttgtcgctgggacagggtcttactgtgttacctaggctggagtgcagtggtgcaatcatggcttacagcagcttcgacctcccaggctcaagtgattgccccacctcagctcccaagtagctgggactacagatgtgcaccaccatg

SEQ ID NO: 651091 - DNA, 584 bp, Homo sapiens
ttgggtgaatttcagatgggaagaatcatgaggttaatagacagaggttagagcatttgaagagaccataaatagaagagcttgattagagtagaaggcttttattgattaatagcaaagaaactatgtgaaggtcagcttaggccagtttatggaagtcttggaaactagattggaatctcccttacrtgcagtgaggaaccaatttgagagagggagagtggcatgcatgcagtggtggttttgaaagactgatccatagtgctgtatttgagtatttagaataggggaaaactgattcagagagaccagtgaggagagtatttaatctgtgcacaattgatactacctcaaaccagattggtggcagggaaaatggaaaataatggatgattagaacggatacaatggaaaaaaatagatcttgatgattcaagggatataaatgtggggattaagtttaggagaaagttaccatttgttatcaaatctaagaagccagaaattctcaggcaccattattttatgttccactaagaaaagaaacaatactgccaattaactgtgacacactatgatgtcta

SEQ ID NO: 651092 - DNA, 559 bp, Homo sapiens
ttgccttctgtattagggttccatatatatatatatagaatatatatatatatatgctttcctattgattctgtttttctggagaaccctgacatatatatcataaacacagatatatatacacacacacacatatatacatatacatatatatacacacacacatacaaatatacacacacatataygtataaacatacacagagcagagattttatgcaattggctcctgtgattataggggctagcaagtctgaaattcacagggcagggcaggctgataagatggaaattccagcaagagttgatgttgcagtcttgcatccaaagggaatctggatgcacaattcctttttcttcaggaaactttggtcttttttcttaaggccttcaatgaatgggataaggcccacccacattatggatggtaaactgctttacttagtccacttatttaaatgataatcacattgaagaaatgtcttcatagtaacatcttagactggtgtttgacaaaaaaattggatccacagcctagtcaagttaacaaaattaaata

SEQ ID NO: 651093 - DNA, 418 bp, Homo sapiens
gaattcctatatattgagttattgtgctcacagataacattattttactttttgcttatctggatgacaatctgtgtggtagaggtacaatggtatcttataaatatgtcttgtcagtcttctaaatttctgttgtgaaaaacattacttttatgagctatggaaagttactttaataactaaatgacatagaagataatagatatataccatatgttatagatgcattcaaagtasaagtaaaagtttgtatgactaaattagaagataaaattaaattctacaccagagaagattaaaaaatggttagcttgaaaacctgaattggcatgcatttctttctttagacattcagccttcttgtgagttatttctaaatttattgaagctttgcttcaacagaaaatattttgaattg

SEQ ID NO: 651094 - DNA, 559 bp, Homo sapiens
atctttcatatgcttatttgtcacgtgtctatattctctggtgaagtgtctagatattttgcccactttttcgatgggttatatgttttcttactgttgagctttaacagttttttatattttggatactagtcctttatctgacatgcaagacaaaggaaaccacatcataaagttcacagggataaaattcacaaggcaaagaagatcagaaaatggatctggctaggatatagggctagcaaacagggttccaagagagaaaacgacaataatagagatttttttcatgtcagtatatatgacacttgtttaaaattaaaaatataaaactaatggggacaaaggttaaactttaagtttgaaaatctttcccttcaatcatggattgagtaatgaacatgaaatacacaccraggaacactacaaagccataaaaaaaatgaagtcatgttctttgcagcaacatagatgtaactgaaggtcattttcctaagcaaactaatgcgggaacagaagaccaaataccacatgttctcacttataagtgaaagctaag

SEQ ID NO: 651095 - DNA, 544 bp, Homo sapiens
taggggtccagtctctttctgcatatggctaaacagttatcccagcaccatttattaaatatagagtcctttccccattgctgatttttgttgattttttcaaagatcagattatggtaagtgcacaggtttatttctgggttctttattctgttcccctggtttatatatctctttttataccagtgcaatgctgttttgatttactgtagcctcatagtatagtttgaagtcaggcaatgtgatgcatctggctttgyttttttgtttgtttagaattgctttggctatttgggctcttttttggttccaaatgaattttagaatagatttttcttaattccatgaaaaatgacattggtattctgataaggatagtgttgaatctgtaaattgctttgggcaatatagccattttgactctatttttccaatccatgagcatgggatatttttccatttatttgtgttgtctctgatttctttcaacagtgttctgtagttctccttataaagatcattcatctctttcgtcagatgaatt

SEQ ID NO: 651096 - DNA, 490 bp, Homo sapiens
gtcctacagcagctgccatggacaaaacatattattttctaccctatcattcacctgagacttcatggtggaaagagcacaaatatggctgaggcatcaagataatttccggcttcaatggttccatatatctctttcagaattaaatatattttaagaagggagggaacaaacagcaaagtaatctctagtttaagtaaactgtttattaatcttctaagtattttcatcttcggctggttagtaattgaacaatagtttttaaacgactatgtgtgacttcctagtactttgcagaagagcctctgggattctgcacacattsgacttaaatttttgagttttgtgtaaaaattctttgatcattccaaagtcatgttaagagtgtatgacataaacatcattttaacatgttaaaagcaggatgcagtggctcacacctgtaatcccagcactttgggagggccaggcaagaggatcacttgaggct

SEQ ID NO: 651097 - DNA, 490 bp, Homo sapiens
gtcctacagcagctgccatggacaaaacatattattttctaccctatcattcacctgagacttcatggtggaaagagcacaaatatggctgaggcatcaagataatttccggcttcaatggttccatatatctctttcagaattaaatatattttaagaagggagggaacaaacagcaaagtaatctctagtttaagtaaactgtttattaatcttctaagtattttcatcttcggctggttagtaattgaacaatagtttttaaacgactatgtgtgacttcctagtactttgcagaagagcctctgggattctgcacacattggacttaaatttttgagttttgtgtaaaaattctttgatcattccaaagtcatgttaagagtgtatgacataaacwtcattttaacatgttaaaagcaggatgcagtggctcacacctgtaatcccagcactttgggagggccaggcaagaggatcacttgaggct

SEQ ID NO: 651098 - DNA, 588 bp, Homo sapiens
tttttgttagtttctacctaagttctatttttaaaattcttatctttccttagtttaggaggcaaaatgttttgttagaccaaaggcaaggcrtaagagaaattttagttgttgtgtagtttagcatggtgggagtaactttcattttggctttgcattttagaaagagctaatagagcacagaggtgaaaatgtagaatggaaaagtctggaacacttaaaatatttatcctttgtcatcccaggcttttcccttatgtagagtagcaggacttctggggaagagggcataaagactgcatataaaactatatatcagaatcctactatgagtgcccaggaatttttggaggctctggaacataccgttaatatagtcataaatgactttttcaagataaaagagaatcttatcatttctttcctcatctttattctccattttttgtcttcctccattagtaccaacaaaaaccttttctaaatcttcatttagaaagagtatgctaaaagagcaaagaaagaagaaaaaaaaaggaaaataaaagaaatagagtatgctgatattcaagtcactaggaagttata

SEQ ID NO: 651099 - DNA, 588 bp, Homo sapiens
tttttgttagtttctacctaagttctatttttaaaattcttatctttccttagtttaggaggcaaaatgttttgttagaccaaaggcaaggcgtaagagaaattktagttgttgtgtagtttagcatggtgggagtaactttcattttggctttgcattttagaaagagctaatagagcacagaggtgaaaatgtagaatggaaaagtctggaacacttaaaatatttatcctttgtcatcccaggcttttcccttatgtagagtagcaggacttctggggaagagggcataaagactgcatataaaactatatatcagaatcctactatgagtgcccaggaatttttggaggctctggaacataccgttaatatagtcataaatgactttttcaagataaaagagaatcttatcatttctttcctcatctttattctccattttttgtcttcctccattagtaccaacaaaaaccttttctaaatcttcatttagaaagagtatgctaaaagagcaaagaaagaagaaaaaaaaaggaaaataaaagaaatagagtatgctgatattcaagtcactaggaagttata

SEQ ID NO: 651100 - DNA, 588 bp, Homo sapiens
tttttgttagtttctacctaagttctatttttaaaattcttatctttccttagtttaggaggcaaaatgttttgttagaccaaaggcaaggcgtaagagaaattttagttgttgtgtagtttagcatggtgggagtaactttcattttggctttgcattttagaaagagctaatagagcacagaggtgaaaatgtagaatggaaaagtctggaacacttaaaatatttatcctttgtcatcccaggcttttcccttatgtagagtagcaggacttctggggaakagggcataaagactgcatataaaactatatatcagaatcctactatgagtgcccaggaatttttggaggctctggaacataccgttaatatagtcataaatgactttttcaagataaaagagaatcttatcatttctttcctcatctttattctccattttttgtcttcctccattagtaccaacaaaaaccttttctaaatcttcatttagaaagagtatgctaaaagagcaaagaaagaagaaaaaaaaaggaaaataaaagaaatagagtatgctgatattcaagtcactaggaagttata

SEQ ID NO: 651101 - DNA, 442 bp, Homo sapiens
tataggaacacaaaaacatccagcatttaacaagataaaattcacaacaacaggtatctcataaaaaattacatgcagaaaagcaggacaatttgatccatgttaaagagaaaaagcagatagccaaaatgataccagaaatgacacatggcagattcaataaataatgataataattttttgtaactgtcttccatgagctcaagaaggtggaggatttactgaacatattaagtagattcttggaaggtatagaaaagacccaaacttaacttttcacatgaaaactayatgtttaatgttcctgagataggaagtatattaaattcttacttgacctttataagtagaaaattctaggcctagtgactacacaaattttgataatttgactagaattatcaaaataaagtcatggcttctgtattagtttgttttcata

SEQ ID NO: 651102 - DNA, 547 bp, Homo sapiens
tataggaatatattgtggaaaaattttcagattatttctattgttgattatgcctttttcctataattgttgtaccgtgtatgtgaattagaccagttgcaagatgattcgggtatttctgaataattcttattagcaaaaaaactcaaaaatttaaagatagaaacctggacagctggcatcaggaaatagggttcttctgaagttttcagacatcattgtaatgacaattagcttagagtgaattcagaagaggggggtagggaggcttcttaaagaatggaccatttacttctgaatccattatgtacctctttctgcttcattgctttgtttgttggccttggagtgaagtaaagaggacaagtgttgcctcttcagattttttaaatattgcagttttaatgcaattgatataaggaaatktatactgttatgcaagaagtaaaataatgcttcagaattcatgttaacttaagagctaaatttgattaaatatgttgacagtgtagtacagtaacctactggaatatgggaagtttccttg

SEQ ID NO: 651103 - DNA, 528 bp, Homo sapiens
agaattattacaatgtatcttttctccattcgaggaatataggcatactttgctttaccctgagaaattttgctttgctcttttctccttagatttttgtttttttttttttttatatattttagatccctgttaaagatttaggacaacacttaggaatagctaagagactttttatttaaaagatttggagaaatcatagagttgtggaaatagatcaaagtgatgaagttcagatgatctcttctaaaactttcatttaacagttgagaaaaccaaggtaccaagagattaagtgatttacgtaaggtttctctaatgccagtaattgtcctgtagctttgaaatgtgttttctgaatttgtggtgcaattgtrgtaggtacttcattctcttgttttgttctactttttttttccctcccttctggatgtgactctgaggaagtaagtccttacctcctctctctcctagtcttaaaatgaatatatgttctttaaaaaaaaaaaaaaaactgagatgatggcc

SEQ ID NO: 651104 - DNA, 576 bp, Homo sapiens
gttcacaatatttttatttttagaaaaaagtgcataggaaaagctttgaggttctatggagtcttggcagtgaagccattaaaaagcaaactgcaataaataatgttcttttatgacagaatgctcaactttaaattcatattccagttctcatggacataatattcattttttatttttaaaattatgcttttatccaagggttttactgaagcaccttcaaatcagtcaggagattgcgttaaaaataagtagawactgcattgcaatgaggataatttagataatttaaatttaaggtataagtaaagaatgtaaacattttttgactacttaaaatatgcagaataagtacaatttcgggtttgggaaatgtttcaactaacagttatctgaattctatatcttttgcaatttctgtgttttaaaaagccagactctgaatttcattatgttttcatttaaactgactctatcacagttaatagaaaatgggattgtgttgtttttaaattctttagactatacaactaaaagttacttgttgatcagttatggcttaatgagaccttacat

SEQ ID NO: 651105 - DNA, 576 bp, Homo sapiens
gttcacaatatttttatttttagaaaaaagtgcataggaaaagctttgaggttctatggagtcttggcagtgaagccattaaaaagcaaactgcaataaataatgttcttttatgacagaatgctcaactttaaattcatattccagttctcatggacataatattcattttttatttttaaaattatgcttttatccaagggttttactgaagcaccttcaaatcagtcaggagattgcgttaaaaataagtagatactgcattgcaatgaggataatttagataatttaaatttaaggtataagtaaagaatgtaaacattttttgactacttaaaatatgcagaataagtacaatttcgggtttgggaaatgtttcaactaacagttatctgaattctatatcttttgcaawttctgtgttttaaaaagccagactctgaatttcattatgttttcatttaaactgactctatcacagttaatagaaaatgggattgtgttgtttttaaattctttagactatacaactaaaagttacttgttgatcagttatggcttaatgagaccttacat

SEQ ID NO: 651106 - DNA, 470 bp, Homo sapiens
gacaagtgctatgacagaagaaatgtaagtatgctttggaggcacaaggtacaggtgcccaacgatcatggagtaagcatgagatgactaatcaaaaacaagaagaataagaaacaagaaaaagtgtcacaaaggattccatgagggaaaaaatgagtcatcaggtagggacgttgtgctgcacatctctaggggaccccactcacatcacaatgttagattcatgcagtgcacagctgygaagccctatatgacagtcctaaagtcagaagctaaaatgaatatgctggcgttagggaaccaacaacattcaacagcactggagtatatacagtgagtcaggcagtgtaatgctgaaatcaagatgtaagtacagagttgtacaaattgttcaaagtctaaaaatattttaaacaagagattcagatgacaaaaactgacggttatgatggattagagattgtggggca

SEQ ID NO: 651107 - DNA, 314 bp, Homo sapiens
taaaacatagtaagttccatttaaaaagttaacaaaaaattaacatagccctttaaattagtattacatgttttaaccagatgtaataaaagtagtttttgtggaagaaacaatctgaagctacattaggcaaatatataaatgtaaggggaaaaaaaaagactcaatgagaaggaaaaggacaattgtagttaatttgcacaatatctgtcatgtagatactatkgtaatgtctgaagtgtcaggaaaaggattttagctctctatgccaatatattttgggaaggttacttattatataattagtccacaag

SEQ ID NO: 651108 - DNA, 463 bp, Homo sapiens
aacgtgcattttgaatagtgcctcaaaatattgttatctttttgtttccacactgagtcttttttccaaggaaggcaacaaggtatgcttatttctttctctgtctcctaggagactatggtggtataactgaggataaatgaaggtatgataagtgtaccacatccttctggagtatcatttttaccaaatggtaagcatatttgtttrctagggctaccataacaaagtaccacagaccaggtggtttaaacaacagaaattcatttactctcatttctagggctgaaagtcctagatcaagatgttgacagggttagtttcttctgagagcctctttccttggcttggagatagtggcctttttccagtatcttcacatggtctttcctctgtatacctatctgtgtactggctccttttttttctttttttttgagactgagtctcactctattgccca

SEQ ID NO: 651109 - DNA, 630 bp, Homo sapiens
tgggaagtccaaaatcaaggtgactgaagattcagttcctggtgaggaaaagcagagagtagttactcccctggatgggaaaggactaacaaggcaaccagtgcttactgtcaaagcaaacattatctatgaatgaaatcaccacatagtataattcatgagaaaacagggaggctcccacctcccagcgtttccaccatacaaattcaaataatcattaagttgaaataaaattctaggatagattaagtgggtggtatatggagaggttacaaaacatgtgaggactaaactctgatttttatcttgcccaaattcctatttcctatctgaagggtctggggagtcatgccatacaaatmataaattcatatcagatgggttttatttaaccctgtgtgtcataacttactttccaacctgactctggcataacattatgagacaaggaagaaaatcaaaatattttaccccaaaacatgtttctttgccatattttgaaatatttgaaatggccctgcaatgacccctctgttctttgtggggtaaaatttgcatctttaaacaatctctattaacatagaagtctttcttccagaccctcccaatcctaaagagattaactaagat

SEQ ID NO: 651110 - DNA, 572 bp, Homo sapiens
gtataatcctgcatagaaatacagaaactgtatgttctttctggctttcttgtcaggatgttacattctctctaggaatgacaaactagagttatttttaagattttgtactgctaaatcatactttgaaaatattttgtattgagggagttttgttagctagttgagctggagatgaatggctacttgagtaactagaaactagaaaccatactaactgctaggaattactaatgtaaagaacacctatgytctcaatgactagtatccatttgattccattgacaagcagaagttttcactttgtaagtagaaaaggataggggaactttggctggagtcagggcatcaggagagggaggagaaggacacaggggattccatggtatctatcctcaacctattatttgggattgttttagtacttctatggatagagagattgaggtgggatctgaaaatatcttgaagtttggggcacaagtaaagctgctttgtatctaggagacagagtggggcataaagtaggtaaggaagccattcgccatattccacatggaaccatgaattgc

SEQ ID NO: 651111 - DNA, 345 bp, Homo sapiens
gacataatttattatttttatttatttttatttttgagatggagtctcgctctgtcgcccaggctggagtgcagtggtgagatctcggctcactgcaagctccgcctgccgggttcacgccattctcctacctcagcctcccaagcagctgggactacaggcgtkcagagaaatgacataatttatgtgacagttctgcatactatcagatctgatactatcaaaaagggtgtggttttattttttcaaaaaatgataagttatgtgtctttatttttacttcttttaattttgaaaaaaaaattaaatttgcagaaaggctgcaagaattgtccgttttgattc

SEQ ID NO: 651112 - DNA, 580 bp, Homo sapiens
ctttaagtgttccaaagaaaggtagaataaattatggaaattgataatgacattaaacggttatataccctatatacatgcataattggttcatttttaagcatcagttttatcacatatcatggttgaaatggatttgcaggcttactattggaagacagtgccaaggattggaagaataaaggctggaagattgccctaatttagctagaggtgagatgtgaggtgtgtttgcccttttgcatgcatgacccctaaggttttcattaatgcaagaagaaacccccatctatggctctgattatccacacactacagataacagaacacattatggcaggargctcatttttgtcatgtagccacttaagactctcaattacttctaagttttcagtaagatgaaagataaaaaccactgttccttcaggagatacagatcatactaaatagttttcactggaaattagtttagcacagaagtctgtgtcactcagcagtgtagaatgtaagcaacatgcaaaggactctcctcagaaaccatgaggacgtctccatggttaggaattaaattcagcag

SEQ ID NO: 651113 - DNA, 547 bp, Homo sapiens
ggaattccatacactgtgcctttttcaagtactaagatgctattatttcataaattcatcagcagctttattcactctttkcagttttctgatcagtgcttcctctttctctcttccctgcctccccccttaccaaccctgacactacctcagccattccagttctttttctgttaagctcctgcaactcccctaacccctcccatcttcctttacttaaaagactgtgcatggacatgctgggtgaagccctctgaagtgaactaatctccccagtaggaaggaaaggatttagaccacaggtaacaccaaccctcctgagttatctgaaagagaaatcgagactgctgctatttagagctactggaaaaggcagtgggctttctctgagatggtgaccttcaaagttccactcagagcagctcaacatagtaggaagattctgagactctctccaaaacaccagtaacatcagaagtaattcttaggatatctttggagagaaatggaaggtagagccgatatcaaagaaagtcataaggaataa

SEQ ID NO: 651114 - DNA, 547 bp, Homo sapiens
ggaattccatacactgtgcctttttcaagtactaagatgctattatttcataaattcatcagcagctttattcactctttgcagttttctgatcagtgcttcctctttctctcttccctgcctccccccttaccaaccctgacactacctcagccattccagttctttttctgttaagctcctgcaactcccctaacccctcccatctwcctttacttaaaagactgtgcatggacatgctgggtgaagccctctgaagtgaactaatctccccagtaggaaggaaaggatttagaccacaggtaacaccaaccctcctgagttatctgaaagagaaatcgagactgctgctatttagagctactggaaaaggcagtgggctttctctgagatggtgaccttcaaagttccactcagagcagctcaacatagtaggaagattctgagactctctccaaaacaccagtaacatcagaagtaattcttaggatatctttggagagaaatggaaggtagagccgatatcaaagaaagtcataaggaataa

SEQ ID NO: 651115 - DNA, 566 bp, Homo sapiens
agtataaaaccctctcttctttcttataaaagtaataaacacatatttattgactaacaagtagaaaactgacgctaaactgtgggcttttacaaagctgactctccatgacactattagttggattttatcatctccttatactgaagataaaaacagccttgcagagagcagatggcttcccaaggtcattccacccataaatgagctcagattcagtcctaactccagccccagtgttatttccactacttgatgctatgactctccatttgaaaatttaatcataaagaatactacatcattaatctacaaacatgttttcgttctaccctgtaaaacttgctgagtacaaaatgctgtcctctgttaaattgcataaccttgggcagagctagggtagggtttgatctatgaaaaagatctgattaaaaacctaaatcaaaatatagaactaagaatatgaaaagcaaaagtacattttcaagytcatggtgaattgtgttttcagcaagaatgtttttagatgatttataacgggtatttttcaaattacttattacaat

SEQ ID NO: 651116 - DNA, 619 bp, Homo sapiens
tttaagaaggaaaaagacatgagcagacttgccttttacaaagcatgctttattatagtatatagaagttgctcagaatatctaatactagcagttccttttgtcactctctctgccttctgagaaactggctatggccctctctaggttaaggaatctgactggtcaagacctcaataaatcttaggtagttcaggagaacacttgacttctttggctgtaaagaatatgggcttgagcgatgccctatacagccattatattcaaggcagggagaacaaggataacaatatgatttttttctactttattcccattttttaaattgtagtagatgaagaaaaactccttttcaccttgtaaytctgttttgttagctgatatgatttgattttctttttataagattgtaataatatattatttgtttctacaaggaatctaaaatatgaaagcatagttaaaccgttttctttttttatataaattgggaattttattaaaatcttggaattctaaaatcttttcatttctaggtaagcactattaaatagagatacaatgtgagacacaaatacgtatgtaatttaaaattgtcttgcagtacattaagaaaaag

SEQ ID NO: 651117 - DNA, 553 bp, Homo sapiens
ttgtcagggtctgacatgactgaagaaaatatgtttgttctgatttgctgtgcatgaaaaatattaatcccacaacatgtagacctatatttacaagccattacaaattgacgctccgcatattttggtcacagataattctgacatggttgaacgtgaaattggccacgtaggattaggaagataaaaaagaaattattgcatgtattttgttatttgaatttgatatataccactaatcatagaacttttaattttgataacctgctgttaagaacaaagcagtatttaaaggctcatgaaatattttatgcactgtctgattgaaaaacaagaaaataatctatttaaacactaaagtataaaattccagatactattattatgaaagaatataggaaagaagctatttttgaggtagagagtgatatgattctatagtraaatggaaacacaatgcaggtgaaggtaatttcttgaaaataattatcaaataagcaaaatgttcaaaagttttatctatctacgattgcagcaaaactgaaattttaca

SEQ ID NO: 651118 - DNA, 585 bp, Homo sapiens
gctcaatcaaaaaaagatcattcttgaaatgatggtggctaaaaagtcgtcaagttacataaaataataaaccaaatcatatttaaaactgtatttggggtttgtgagagactgactgcttttgagattaatgggtaagatactataagccttatgatctgaatgtggctttagccagygatttgagctaatgaagctattaggtgattcaccttaaatttcctacaaagtcattagccacagaattattttccaaaaattgttctgatggttattatcaaacaaatagaaggagattgaaattagagcaaattcagccttttataattagacactattttggtctttgttattatactctaattgtttttatatataagataaattatgaaactataaaggtatgtaatgtgatatgcttgattacataaatacagtggaattatatatgctggaaacaggagtacagaagtgatgcattattttgtcttaacaaaaggataattaatcgatgatattcactctgcttaacttaccttcatcacttaagaacctttttaaaaaatatcctaaaacagtagactc

SEQ ID NO: 651119 - DNA, 628 bp, Homo sapiens
gcccatcaatattacttgcactgttattttaacttggcagattatctcacccaacagcaatgattgagcatctacatgaaaaatgacaaggtttcaaaaaccctggttttcattctattcctcatatrtgcactgccagttatctataaaaataagttaatagtcaaaagggaacacacctagctatcaaattcacaagatatagaatacagcaacctgatcatctaaacatggactatgacccttcaagcaaaacagtgttatatatgataattaaagatagttaatttatatgaaaaaatggaaaacaaaaccttggaatagcaacaatactttgctctgacctctacagtagctctacgtgagtaaatacacagatttatatctgaaaagatgcaagaaaggcccttcaaataacaacttactttatcagaatgtcagtgttattgactcagtataattttgatattttaatgttttatagaagtatgccatatactcatagagtgataacattgtaaaaggctttagatatcaaataaactagggctctccagtttgaggaaatggatcaggaaaatgaagcccaaagagctgcagtgccttgttcaaaaatttcacagctaat

SEQ ID NO: 651120 - DNA, 604 bp, Homo sapiens
atgggatgttcgtagagttgtcttcattttagacagccagaaattacaacaaataggtggaagctcacattgataccaaccagtctccagtagcttgtgtgtgaagaattgtgatctgataacaacaaaaagggcttgattaaagccatagctgtctgttttggttttgcttctgtgttgcaattctgataactgtatgttgaaaacagaagggcaatgaatattatcataaaagccacccattggcaaataggtctaacacctgccacaaagattaaccctgttctgtattaagatcactccatttatcatagttggtacataaaggttatgatgtgactttcatactgtgttacataaagtttgatgcagcggrattcttaaaatttctccaggagtattatcattgtaaatattcttgcttaatggttttctgtttctggtttgcccttaccacaataaatagtcattattacaactgtatggttttaattgatcacagagatttttgtcttcaatggataatactttggctttactggtttcgagctagcctgtggatattatgaaatacagtgcagatatgaataaattgctctagttt

SEQ ID NO: 651121 - DNA, 604 bp, Homo sapiens
atgggatgttcgtagagttgtcttcattttagacagccagaaattacaacaaataggtggaagctcacattgataccaaccagtctccagtagcttgtgtgtgaagaattgtgatctgataacaacaaaaagggcttgattaaagccatagctgtctgttttggttttgcttctgtgttgcaattctgataactgtatgttgaaaacagaagggcaatgaatattatcataaaagccacccattggcaaataggtctaacacctgccacaaagattaaccctgttctgtattaagatcactccatttatcatagttggtacataaaggttatgatgtgactttcatactgtgttacataaagtttgatgcagcgggattcttaaaatttctccaggagtattatcattgtaaatattcttgcttaatggttttctgtttctggtttgcccttaccacaataaatagtcattattacaactgtatggttttaattgatcacagagatttttgtcttcartggataatactttggctttactggtttcgagctagcctgtggatattatgaaatacagtgcagatatgaataaattgctctagttt

SEQ ID NO: 651122 - DNA, 396 bp, Homo sapiens
tttgttgttgctgctgttgttctttgtcttacttaaagcaatttacatgtgtatgtgtttgtatgtattatatatggagttctgcaagaaaatgaaaggctttataagttgtcttaagaaaacgttcttctcacagtgttctgacaaatgtgcactgctttgtgtacaaatgactgatggtgggcccctcaaggaggtsattcactgtactggcttttgtgttcagtttggtgggtgactgaagatagttacgatgttggcacacccaggagggagtgagcagaattgcaggaggagaaataaattttctgtactttggacaaactactcctgaaaatggcattgtttcacagaacatttttaataaggtttttatgagtggtctagttattagat

SEQ ID NO: 651123 - DNA, 415 bp, Homo sapiens
gaattcaggtggtgggatttttgttgttgctgctgttgttctttgtcttacttaaagcaatttacatgtgtatgtgtttgtatgtattatatatggagttctgcaagaaaatgaaaggctttataagttgtcttaagaaaacgttcttctcacagtgttctgacaaatgtgcactgctttgtgtacaaatgactgatggtgggcccctcaaggaggtcattcactgtactggcttttgtgttcagtttggtgggtgactgaagatagttaygatgttggcacacccaggagggagtgagcagaattgcaggaggagaaataaattttctgtactttggacaaactactcctgaaaatggcattgtttcacagaacatttttaataaggtttttatgagtggtctagttattagat

SEQ ID NO: 651124 - DNA, 415 bp, Homo sapiens
gaattcaggtggtgggatttttgttgttgctgctgttgttctttgtcttacttaaagcaatttacatgtgtatgtgtttgtatgtattatatatggagttctgcaagaaaatgaaaggctttataagttgtcttaagaaaacgttcttctcacagtgttctgacaaatgtgcactgctttgtgtacaaatgactgatggtgggcccctcaaggaggtcattcactgtactggcttttgtgttcagtttggtgggtgactgaagatagttacgatgttggcacacccaggagggagtgagcagaattgcaggaggagaaataaattttctgtactttggacaaactactcctgaaaatggcattgtttcacagaacrtttttaataaggtttttatgagtggtctagttattagat

SEQ ID NO: 651125 - DNA, 590 bp, Homo sapiens
ctgtttctaacagttactctttggtagaggaaaggagagacttgggttcaatgttgaaaacctttataaactcacacatttagaatgacctggttgtttcgttttgttttgtttgtttttgtatagacaggatcttgctttgttgcccaggctggtcttgaacttctggcatcaactgatccccccacctcagcctcccaaagtgctgggattacaggtgtaagccaccatgcctggcccctagagtcacctaacttttgacaaaagcaacattctacttcagtgggatgtgaatgcacacttaaaagtgctcaaattaatcagtcatcagataaatgcaaattaaaactataatgagataccacctaggtacccatcaaagtggttaaaatcaacaytttggttaaaatggttaaaaagatcaacaatatcaagtgttagtgatgctctgagacactttaattctcatacactgctaatgcaaggaaaaattgctgcaaccaacttggagaatattcgacaatatctactaaagctgaacacaggtatacactacaaatgaataattccactcctagctatatacccag

SEQ ID NO: 651126 - DNA, 482 bp, Homo sapiens
ttttcatattgtggaaatccagtaagctacacacatgatatgtgcactcagctttttatttacatgtaattttaaaagatctttataaggtttgttttagttttcactcaggtgtccagtttggttcatgtgtctgtgtagttccaataatcccttctgcttcaggtgaagtccatttctttcttgctcttccacttctcagactcctctttttttaagttaagaaatcatttccttacctgtctcttggccttttccttctaacacttcaattgcagaaccatttgcatataatctcatggatttaaataccatatataatggcaaacttccaaatstggtctttcctctagactctaaatgccagtatttgctttctccaaatttgcttctcctccagcctcacccatctctgtaaatggcaccaccttgttcaattgttcaaactgaaaacctagaagccatccttgatcctgcttttt

SEQ ID NO: 651127 - DNA, 571 bp, Homo sapiens
accagggtcaacttcagaaccctggcatagagaaggtaaatagaccctgatgcaatgtgaagtatttgctctctctcttcctagaaaaattagcttttgtctggaaataaatgaatatataatgaatttaggatgcaattatgtttttgatgtctaacaaatctatccaaaaaagacagtaactcaatgcaaaattatgataaaaaattctttaaatggtttgcttgaaatgccctgtagacaaaaattatatgtttgcttttggctaattcccaccccccaactgtatttctgcattggaacaaagctggtagagtcacacagaygaggagccacaaaacaagaaccatggttgaagaagaggcagggtaaaaatgtgtataaatatttgtggcagtttttaaaaaatgttctcacatttgttttacattcttcccaataagagatggagtgtatgttctctcttcttgaatctgggcaggtttgtgacttttttgacaagcagagtatgatagaagttatcctatgtgacttccaaggctaaatcagacaagaccatttagcttccacc

SEQ ID NO: 651128 - DNA, 571 bp, Homo sapiens
accagggtcaacttcagaaccctggcatagagaaggtaaatagaccctgatgcaatgtgaagtatttgctctctctcttcctagaaaaattagcttttgtctggaaataaatgaatatataatgaatttaggatgcaattatgtttttgatgtctaacaaatctatccaaaaaagacagtaactcaatgcaaaattatgataaaaaattctttaaatggtttgcttgaaatgccctgtagacaaaaattatatgtttgcttttggctaattcccaccccccaactgtatttctgcattggaacaaagctggtagagtcacacagatgaggagccacaaaacaagaaccatggttgaagaagaggcagggtaaaaatgtgtataaatatttgtggcagtttttaaaaaatgttctcacatttgttttacattcttcccaataagagatggagtgtatgttctctcttcttgaatctgggcaggtttgtgactkttttgacaagcagagtatgatagaagttatcctatgtgacttccaaggctaaatcagacaagaccatttagcttccacc

SEQ ID NO: 651129 - DNA, 512 bp, Homo sapiens
tctctcctgagatctccctgggggccataacatttacacattctttgcatatgtacttctgtgcaggaatggagaaaatgactgtatgtgaaaaaactatttttattacagactttttttttctttaattgcatttaaaatgctcacatcagaaaaatcaagaagaaaactgcacaccaaaataaatttggtctgggttagagagttaagtgcaaacacttcaatttgtttatttaaaaaatgaagaaaaatactgatgagtayattttgcaaatgaaggagggtgtaactttcccagcatgacttttttcagtataacttcaaagaaaaattgatagacttgattacatacaaactcagaatttctgcataataaaaatattcacaaataaaattaagagattattgatgagctagaggaaaatatttctggcatatgataaaacaaattattaataaccttaatatatattttttaaattccagttagtaagaaaattgactttctaaca

SEQ ID NO: 651130 - DNA, 440 bp, Homo sapiens
aatatattaaaataaatataacattaaatatataaaatatgtaatgcatattttatataattatatgtgtctatagaggttatatttatttagagcaaatgttatgtcaatattctttttaatacaaaattaaaaaatcccaccaaaatgtttgtattagctatctgcaaacatagaacttataagtagtttgtattttcttctttgtactgttttatattttctgaactttttacaacaaccwttgtaatgttgaaaatagaaatgtagatgtacagatccaagcagacaggtataatattttgtgaaatgtactaactattcatattctatgtgtaaacaaaaacaaaaaagccagctcatgataaagacctatttgataagaaagaggatagaaataaaagggaacaaatgaagctcaaaagaatcacaggtgcccg

SEQ ID NO: 651131 - DNA, 517 bp, Homo sapiens
atttttgtaataatactaggaaatcattttccattcactaacattttcctgtgagtatacagaggagttttccagaggctacctggcatgataatgcaacagatagaatgcagaagtgtgagaatccagttgtcttctattagccactctttcaacatatttttaataattagaaaaataccacacttctcgataatggtttygttttggaaatatgatttttttcataaaaatatgttatttatgttagcatgtaatttagttttaaataaattaagcattttaacaatttccattttaatttctaatactgtaaatattgattgacacaacccatataaacaaaattctttggattttcaataatttgtacgagtgtaaaggggaccttgagccaagaagtttgacaaccagtgacttagcttgctaatttttctacgttaaactcatgtaggagaaagagggaaagagaaagaaatggtcaagattgcaagaataagactaagactaatactgg

SEQ ID NO: 651132 - DNA, 457 bp, Homo sapiens
gtgaagccagctggacttctgggtcaggtggggacttggagaacttttctgtcttacaagaggattgtaaaatgcaccaatcagcactttgtagctaggattgtaaaacgtaccaatcagtgctctgtggcttgctagaggtttgtaaaatggaccaatcagcaccctgtaaaatggaccaatcagtgctctgtaaaatggaagaagcagcattctgtaaaatggaccaatcagtaggatgtgggtggggacaaamaagggaataaaagctgaccaccccagccagcagcggcaacccgctcaggtccctttgcacactgtggaagctttgttcttttgctctctacaataaatcttgctgctgctcactctttgggtccatgccatctttaagggctgtaacactcactgcgaaggtctgcaactccattcttgaagtcagcaagaggacgaactc

SEQ ID NO: 651133 - DNA, 543 bp, Homo sapiens
ttctgtaaaatggaccaatcagtaggatgtgggtggggacaaaaaagggaataaaagctgaccaccccagccagcagcggcaacccgctcaggtccctttgcacactgtggaagctttgttcttttgctctctacaataaatcttgctgctgctcactctttgggtccatgccatctttaagggctgtaacactcactgcgaaggtctgcaactccattcttgaagtcagcaagaggacgaactcactggaaggaaccaactccagacacaataggaatccttctctggctaattaatatatttcctcttattcttttcaaaaaattatttgacaaacttcttgtgggtgagatagatttcctagacttaatcagtktgttctttcttaatggatgtgtgactcttcagtatgaagaaattctgatctagatcttgatattatatttgtggataattggaatacagcatttcaatacccagaaaatttgtgagctcctccctgaaattattttaaaatacttgtattattagcttaattttct

SEQ ID NO: 651134 - DNA, 367 bp, Homo sapiens
gcacaattgatatgttctgtatctaatttataatccaacatgcaaaaggatctctcggttttgttagtttacctatgagatcatccatgcatttagggctaaagcaactgagaatacaacaggaatcaaaaatatagtaaagtaatggctrtcatgcgtaagaggagagactatgttcattattaatgataaggaacattgttattggatcttcaaatttcacatcaagtcacatggcatcccagagctattggtgcacaagtgttcagatagaaataaaaataaaatcatctaaaaattttctcttattcaatattatacagatcaaacattttgtttttaaaattaattttattttgctttatta

SEQ ID NO: 651135 - DNA, 522 bp, Homo sapiens
tgaatatatattctaccactataaatttctttaaaacatacttattggatatttaatatgtaaaagacaaaaatggtgtggtattctttttattggcatgtgaagaatctataaaataatgatacaaatcaagttaaaaacaacatataaaatatcattctatttgtattaaactatttatataggtatattttatatgtgtgcatgtgttcacacacacacatattgactcaaactggttccattcagagcttttcttgcatctgccttgtttttcatgctatgcagtttaagatcttttttaaaaataaaatcaacaagaaaataaaaattattgagcattaattacctttttaaatatgcacttcaagtwcattaagtctcaaaaccttagcaacataagaaacaagattttaatgtgaaatctcatcacagagcacacaggagatgttattttcttaaagggatacatatgtcaataaccctccatgcaatgaaattggcccattttttaaaaaatag

SEQ ID NO: 651136 - DNA, 566 bp, Homo sapiens
aacagtacttatatcagacaaaatagattgcaagacaaaaactaagaagagacaaagaaggtttttatataatgataaaggagtcaattcaccaagaagatatactggttgtaaatatttatacattgaacactggaacacctagatttataaagcaaatattcttagagctaaagagagagatagacgccaatamaataatagctggagacttgaacatcccattttaagcaatggatagatctcccaaacagaaaatcaacaaagaaacatcaaacttaatctacactatgaaacaaatacacctaatagatatttacagaacatttcattcaacaggtgaataatatacattattttcctcagcacatgtcattttcaaagatagaccatatgtcaggtcacaaaacaaatcttaaacattcaaaaaattgaaatactatcaagcatcttctctgatcgccatggaataaaactagaaatcaataagaacaggaattttggaaactatataaattcatgaaaattagacaatatgctcctaaataacaagtgggtcaatgaag

SEQ ID NO: 651137 - DNA, 646 bp, Homo sapiens
tttgccttccctggagtaactgggtaagatgcttgtctgacattgaaaatgggaagaagttgggaggcaggagaaaagggaagaggaaaagcaaaggcaaaagaaaactgtgcttatgctgtagcctcttgagttttttctagaagaaaaaaagaatgattttaatttaatgaagagagaaaaagtagagagggacaatatgagaggcaacaaaattgaatacattaaaaagggagaagatacaagtgtttaaaaaagcatcaagaaagaaagtaaaagataaatgagagcaaaaattaaagatattgttgaatgcctgcatgattttcaaagattctttttctaattagatgaacakgggtgatattactattcataaataaccagatcgccttcagcagtgcaaattgcattttcagctgactagtttataataaataaatattcacaaaagtgcatgcttcttgagattgggtcatttagaaacttccattccattaaaagtaagttttatttccttgacaaaggccactagccaaaacgtcaattgcctgtcctaatggatgacacctgtaagtaaaataaacatatttttaatggaatagatggtcaaagtgaccttatctcaagatagcatgcactttgg

SEQ ID NO: 651138 - DNA, 565 bp, Homo sapiens
gctagctatcacccagaacctcagttcctctccacataggcctgtcaacagggcagttagcttcacacagagtgagaaagagaccaagcctaaggcttcagtgcctttcataacctagcctcagaagacatacaatcacttccaccatattctattggtcacacaggaccagtcctaattaaatgtgagaggaggctgcataagggcatgaagaccaagtggcagttatcattgaaagaaaacttgcaggctgactatcacattyttccccatagtctccaatgattcataaggtccagatatagatgaggcttttagctgtggttcctctactctttgagcagattgcctttcaatgtcaagacttgtgaatgaaagaaacaagatacctgcttgcaggcacgtgtgcacaaacacacacaccatacaacaaagggagaaacataagataactgctgtagatacaattttaaaaaaagaaaacagaaggcacataggaatcactggtttatagaaattctaaaatccagccagatgtgttggcagtttcttaattaggacgggg

SEQ ID NO: 651139 - DNA, 643 bp, Homo sapiens
aaacaataaaataacagcaataaaaataatcaaaacaaaacagacaaaataacacctgtactgcaaagaatctcatcaggacaaacagtgtctgacttacaaatgagtagtactctaaaaggttttttataagccagatgcagtagctcatgcctgtaatcccagcactttgggaggctgaggcaggtggatcacttgaggtcaggagctcaatacsagactggccaatatagggaaaccctgcctctactaaaaatacaaaaattaactgggtgggaaaagtgcctgtaatcccagctactcaggatgctgaggcaggagaatcacttgaacctgggaggtcaaggttacagtgagctgagatcatgctactgcactcgagcctgggcaaaaaagtgagactctgtctcaaaaacagaaacaaaacaaagaaaaaaaatttaaaaaaagctttatgtaagataatgcccagcattcaaagttaattttttctacagaaaaaaatgtatagatcacaaagacccaatggtgaatctttcacactggacttcgtacacaatcaacaggaaccagctaattttctcttcttttgactgaggaaactaggtacaagatctcacttgcttacattaaatatgtgtag

SEQ ID NO: 651140 - DNA, 579 bp, Homo sapiens
cccatgcacacgcctaagcccagtgaacaaatcagatttaaaggaaagagcaggtgcaayaccaacatatttatcctatctatgctgtagaaaacattttcctaggatagttaaactcacagttagagccatcttaatgtctggatcagaagaattctgagtttagtcatttccaaccaattcaaaagccatcaacaattaaaaaaaagattgctgctattaatatggtatcatatgctatcaaattatttccaaagaaatacttctttttgtcagagtttaaggtttaaaatcagatactaaatgaagttgattcttagtaagatttcaatattgttatgtgaaacattgagtatcttagctttcagatcattttgtgcattcaagaaatgtctgtcatttcactttagttccatgctcaatcatttagaacaaaacacaacacaacaaaaatctcaatccattctgccagctcaacaaaaggctttgtgtgggtgtgtgttagaaagtaattatgaggtttttatttcactaattattctgcagcctttgaaatgtcagtgtaggtcaaagtggcag

SEQ ID NO: 651141 - DNA, 579 bp, Homo sapiens
cccatgcacacgcctaagcccagtgaacaaatcagatttaaaggaaagagcaggtgcaataccaacatatttatcmtatctatgctgtagaaaacattttcctaggatagttaaactcacagttagagccatcttaatgtctggatcagaagaattctgagtttagtcatttccaaccaattcaaaagccatcaacaattaaaaaaaagattgctgctattaatatggtatcatatgctatcaaattatttccaaagaaatacttctttttgtcagagtttaaggtttaaaatcagatactaaatgaagttgattcttagtaagatttcaatattgttatgtgaaacattgagtatcttagctttcagatcattttgtgcattcaagaaatgtctgtcatttcactttagttccatgctcaatcatttagaacaaaacacaacacaacaaaaatctcaatccattctgccagctcaacaaaaggctttgtgtgggtgtgtgttagaaagtaattatgaggtttttatttcactaattattctgcagcctttgaaatgtcagtgtaggtcaaagtggcag

SEQ ID NO: 651142 - DNA, 483 bp, Homo sapiens
acaaatcagatttaaaggaaagagcaggtgcaataccaacatatttatcctatctatgctgtagaaaacattttcctaggatagttaaactcacagttagagccatcttaatgtctggatcagaagaattctgagtttagtcatttccaaccaattcaaaagccatcaacaattaaaaaaaagattgctgctattaatatggtatcatatgctatcaaattatttccaaagaaatacttctttttgtcagagtttaaggtttaaaatcagatactaartgaagttgattcttagtaagatttcaatattgttatgtgaaacattgagtatcttagctttcagatcattttgtgcattcaagaaatgtctgtcatttcactttagttccatgctcaatcatttagaacaaaacacaacacaacaaaaatctcaatccattctgccagctcaacaaaaggctttgtgtgggtgtgtgttagaaag

SEQ ID NO: 651143 - DNA, 483 bp, Homo sapiens
acaaatcagatttaaaggaaagagcaggtgcaataccaacatatttatcctatctatgctgtagaaaacattttcctaggatagttaaactcacagttagagccatcttaatgtctggatcagaagaattctgagtttagtcatttccaaccaattcaaaagccatcaacaattaaaaaaaagattgctgctattaatatggtatcatatgctatcaaattatttccaaagaaatacttctttttgtcagagtttaaggtttaaaatcagatactaaatgaagytgattcttagtaagatttcaatattgttatgtgaaacattgagtatcttagctttcagatcattttgtgcattcaagaaatgtctgtcatttcactttagttccatgctcaatcatttagaacaaaacacaacacaacaaaaatctcaatccattctgccagctcaacaaaaggctttgtgtgggtgtgtgttagaaag

SEQ ID NO: 651144 - DNA, 617 bp, Homo sapiens
gtgttctaggccttgcttcttcatgtgtattttccagatctgtagccttggcatcatctcaagccccttcccagactaactcactcagattctatattaaacaaggcctccttctgcccccatgacttctatgcatgccaaatttgagaagcactggtctagtctatagctactttggggagtgatagagttctcaaaattaagcaacagcattgtttagaaaaaaatctgagatactsggtacagcttgagatcagaagaccaaatgagattttcagaaaaattctctccaaaatgtacttaaaagattagcttcaccagaatctgagctgtatctggaacaaaaataatctctgaagattacattggcttgcctgattcctgacatctagcccagtactttctaacagaaatataatataaaccacaaaactgagcccacttgtaattttaaagtttctattagccacattaaatgtaaaaataaacaagtaaattaattttaataatacatttcaactcaacatactcaacataccattcaacattgacataaagataattagtttacattttctgtactaagtcttcaaaatctaatgtgtagtttacactta

SEQ ID NO: 651145 - DNA, 617 bp, Homo sapiens
gtgttctaggccttgcttcttcatgtgtattttccagatctgtagccttggcatcatctcaagccccttcccagactaactcactcagattctatattaaacaaggcctccttctgcccccatgacttctatgcatgccaaatttgagaagcactggtctagtctatagctactttggggagtgatagagttctcaaaattaagcaacagcattgtttagaaaaaaatctgagatactgggtacagcttgagatcagaagaccaaatgagattttcagaaaaattctctccaaaatgtacttaaaagattagcttcaccagaatctgagctgtatctggaacaaaaataatctctgaagattacattggcttgcctgattcctgacatctagcccagtactttctaacagaaatataatataaaccacaaaactgagcccacttgtaattttaaagtttctattagccacattaaatgtaaaaataaacaagtaaattaattttaataatacatttcaaytcaacatactcaacataccattcaacattgacataaagataattagtttacattttctgtactaagtcttcaaaatctaatgtgtagtttacactta

SEQ ID NO: 651146 - DNA, 459 bp, Homo sapiens
gataggctcttcaataattggtgtttggaaaactggatatctacatgcaaaagaatgaaattgtcccttatcttacaggatgaacaagaagcaactcaaaatggattaaagacttaaacagaagacttgatgctgtaaaactcctagaagaaaacacaaggaaaaatcttcttgatattaactttgacaatgatgttttggatatgataccaaaagcacaggcaacaaaaacaaaaataartaagtgagactacatcaaactaaaaaatctctgtaccacaagggaaacaactcacagagtgaaaaggcagccttgaaatgggaaaaaatacttacaaatctaataaaagataatatccaaaacacgtgaggaactcaaacaacccaatagagaaaaacgacctgatttaaaagtggacaaaagacctggatagacatttctcccaagaatacatacaa

SEQ ID NO: 651147 - DNA, 459 bp, Homo sapiens
gataggctcttcaataattggtgtttggaaaactggatatctacatgcaaaagaatgaaattgtcccttatcttacaggatgaacaagaagcaactcaaaatggattaaagacttaaacagaagacttgatgctgtaaaactcctagaagaaaacacaaggaaaaatcttcttgatattaactttgacaatgatgttttggatatgataccaaaagcacaggcaacaaaaacaaaaataaataagtgagactacatcaaactaaaaaatctctgtaccacaagggaaacaactcacagagtgaaaaggcagccttgaaatgggaaaaaatacttacaaatctaataaaagataatatccaaaacacgtgaggaactcaaacaacccaatagagaaaaaygacctgatttaaaagtggacaaaagacctggatagacatttctcccaagaatacatacaa

SEQ ID NO: 651148 - DNA, 602 bp, Homo sapiens
caatattactatgcagctcacagatccacagacattttttcagtcagaagagaattagagataaccctgtgaagtggtttccaaattatattttagcagtggaatctatggtttaaagaaaattctacatgagatcacaatatataaaactgatgaaagtgaagctcctctttgaaacaaagaagtaaggaaggcacagagtccctcatcctcatcctccctcttgccttcaagaaatcctggtctcctcagagcacaattttaaatccttgatcttatattagcccctatcttargaccataaagatccgaggtaacacatcttttaagttacaaggacacaactacaatccagctttctgaatctagaactgtaggtgttcttgttcttattttaataaaatgcgaattcagtgctgaagaaaacagaatagccttgagtgagggatggaacagttatgtcacatcaacaaacatttatttagcattgactctgttctaggcagtgagcaggtggtatacatattaaaaagatttattcctacaagatgcttaagagtccagttggtggaaagaagtgcaaagcaaaacaaaacaaaaaa

SEQ ID NO: 651149 - DNA, 517 bp, Homo sapiens
ggacacaactacaatccagctttctgaatctagaactgtaggtgttcttgttcttattttaataaaatgcgaattcagtgctgaagaaaacagaatagccttgagtgagggatggaacagttatgtcacatcaacaaacatttatttagcattgactctgttctaggcagtgagcaggtggtatacatattaaaaagatttattcctacaagatgcttaagagtccagttggtggaaagaagtgcaaagcaaaacaaaacaaaaaacaataaccatcaagtttgagaaaaaaaatgcagaaagaacaggcaatttttcctatggggccacagagtgcttaaaaatgcatgactctggccacaaagaggagctagcattttagtcgcaatgtggaagaacaggagctagccagaaaagggatgcttcagggaaaggatccagcatgtaygaaagcatggaggcaggaaagggtatggcagagtcccggagctgcatgtagcttggtggagcatgcaat

SEQ ID NO: 651150 - DNA, 440 bp, Homo sapiens
gtacacgtactcagtaccaagttattcacaaatataaaatactcttaaaacttaagtactacttgaaactctctagtatgtgtactccaagatcattagtgacctcctagatccagtgggatcttccaggaaaagaaaacacattccaaagcaccacaatcattagaggctgttgaactaggggtcagcctacctggacttgagagccaccatagaggtgtgcctctgagaacactgatagtgctaccaggctcctgcagatcccggaacaaaagcaagagggagagccmcctgtctacttgccaaaagaccctgtcctggactgtatacctcttagtactttttactaaaaataaaactccagaaatctgcattttgcatgttgaaaggctatcacttgtagtactcagtttctgtcaaccccggcctcagtgaaaact

SEQ ID NO: 651151 - DNA, 411 bp, Homo sapiens
actattcttcactgaagatatgaggcattaacattctgatgctctacttgtgtgacaaagattgtaatgaaaacagaaaatgccacaagattaatgtgttctcatgataagaattatcataaggaaaggaaagtgtagaacaaatttaacccactcctgtcactgaagcaggtggagagataggtttaggctaagggctgtggtagttcagcctggtccttctgaagatgagcatgtcctccttctttagtggagtaaccaaagccaaggaactaactcaggagcaagtcaggtcmcattttggatacttcattggagtcctggttgtctatttgtctcattttctagatatctgtctctcaatcagattactcactagaccttcaaacccatctcacaagtgcctcctgg

SEQ ID NO: 651152 - DNA, 668 bp, Homo sapiens
gaccttcaaacccatctcacaagtgcctcctggaaatccactgaatgcccacaacagaattcaccatctttgccccaaatcaaatccaactcctgtggacagaagagaatagtgtttcaatatcaaagttctggaggttcacacaccagcatccaaatcccactttggccacttattgctcaatcctggggaaaatgtttgtcttttccattcctccattatcctattggtaaaatgcacttaatagtagatactgctatagtgaagtgagataatatacctaatatagctaataatatatgtawtactataccttagcacatagaaagtactcaataaatgtcagctacttttaaaaattacgattccttcattattatgaaatccatccagttacttaagcaggaaaatataaaactgggaattattctatatttctcaatttctattaacctcacacaggcagaatgaagccaagacctgtcaatttattgccttaatctcccgaatatcttttcttccaacttcctttgctgctgccttagtttggacttcataactcttcccaaaattaatgtagtcatcatcttcctacctatacttttgccctgttctaaaccatcagccaaattggagcaaaaattatcttcaaatgcatgaacatcata

SEQ ID NO: 651153 - DNA, 570 bp, Homo sapiens
catgtatgaccctgaagaaaagaacactagagttaagaatatctaattattttagatgaaaaaatacttgagaaagagttgcaaccaatcttgaagccctaagtaatggtaagtagattttaagaaagataaaggagtaaagaatatggtgtcactaagatttgatgatctgatactctggttaaaatamcagttgaaatgtattcccttttggttataaagctcattagaaggaagggttagtaagccccactcaatatggccctaaagaggatatccacacacatatcccacttcctgcagtggcctctagagggcagaaaagcctctgggttgacagggtaagtactggctgttactgcaaagaattctgccatcccagaaaacccagagctaccctgagttttatccaaaccagaggttaagtactgaatgcagatgagagatcataatcctggaaccatatgaaattaatgtccagcatcagtactaatgtcgaaaaaaatcatattcaaaagatagtgtgtgaatagaaagagtaatagataaacaagccaagctaataacaat

SEQ ID NO: 651154 - DNA, 570 bp, Homo sapiens
catgtatgaccctgaagaaaagaacactagagttaagaatatctaattattttagatgaaaaaatacttgagaaagagttgcaaccaatcttgaagccctaagtaatggtaagtagattttaagaaagataaaggagtaaagaatatggtgtcactaagatttgatgatctgatactctggttaaaataacagttgaaatgtattcccttttggttataaagctcattagaaggaagggttagtaagccccactcaatatggccctaaagaggatatccacacayatatcccacttcctgcagtggcctctagagggcagaaaagcctctgggttgacagggtaagtactggctgttactgcaaagaattctgccatcccagaaaacccagagctaccctgagttttatccaaaccagaggttaagtactgaatgcagatgagagatcataatcctggaaccatatgaaattaatgtccagcatcagtactaatgtcgaaaaaaatcatattcaaaagatagtgtgtgaatagaaagagtaatagataaacaagccaagctaataacaat

SEQ ID NO: 651155 - DNA, 570 bp, Homo sapiens
catgtatgaccctgaagaaaagaacactagagttaagaatatctaattattttagatgaaaaaatacttgagaaagagttgcaaccaatcttgaagccctaagtaatggtaagtagattttaagaaagataaaggagtaaagaatatggtgtcactaagatttgatgatctgatactctggttaaaataacagttgaaatgtattcccttttggttataaagctcattagaaggaagggttagtaagccccactcaatatggccctaaagaggatatccacacacatatccyacttcctgcagtggcctctagagggcagaaaagcctctgggttgacagggtaagtactggctgttactgcaaagaattctgccatcccagaaaacccagagctaccctgagttttatccaaaccagaggttaagtactgaatgcagatgagagatcataatcctggaaccatatgaaattaatgtccagcatcagtactaatgtcgaaaaaaatcatattcaaaagatagtgtgtgaatagaaagagtaatagataaacaagccaagctaataacaat

SEQ ID NO: 651156 - DNA, 570 bp, Homo sapiens
catgtatgaccctgaagaaaagaacactagagttaagaatatctaattattttagatgaaaaaatacttgagaaagagttgcaaccaatcttgaagccctaagtaatggtaagtagattttaagaaagataaaggagtaaagaatatggtgtcactaagatttgatgatctgatactctggttaaaataacagttgaaatgtattcccttttggttataaagctcattagaaggaagggttagtaagccccactcaatatggccctaaagaggatatccacacacatatcccacttcctgcagtggcctctagagggcagaaaagcctctgggttgacagggtaagtactggctgttactgcaaagmattctgccatcccagaaaacccagagctaccctgagttttatccaaaccagaggttaagtactgaatgcagatgagagatcataatcctggaaccatatgaaattaatgtccagcatcagtactaatgtcgaaaaaaatcatattcaaaagatagtgtgtgaatagaaagagtaatagataaacaagccaagctaataacaat

SEQ ID NO: 651157 - DNA, 614 bp, Homo sapiens
ttctgttttctgctccaattcacctgctattgtttacatttctgtcattaggtagttgtctttcgtgtgtcttctaacaggtcttcagttgttattactgggatagactttacagggcctattccttcttggtagatactagaagtcccagcttcctttctatgtctttccatggrgaaggccagctttatgagggcacaacctgcacagtcctacgtggtcctgtgctcagaagggccctgtgctcagtttaatgctctattgttgctgtcttgacattcttaatgattttatctttgaacatgggtgagtgaagttccatgaactaatggtgcacatgcaggagcaaaagataacacagaatatccatgcgcactaccaatcctttccatccccattagcatgtagcattcttggtgtcccgtgagtataaaatttcagtagatccataatgcatgagagttcagtgagactcaaagtaagcacaaggtcagggcaatacatctataactgagtaaaaaggggtgctgatagccataatctctgtcagagagaacttgctttgaacacagaaagaagacagtggtgttttaaaaaacataaatgcaccgggg

SEQ ID NO: 651158 - DNA, 644 bp, Homo sapiens
tgtgctgggcactgtactaagcacatgtacatatagcagctcatttaatcccaactatcccgagatacaggtcctctttttatgcccatttactgatgaggaaactgaggtacacacctgcccaagatcatcagctaataacggattcaccaatattcaacccaagcagtctggcttcaaagtctgtgctctgatccccaacgctgtgcagcctccaaaaagcagcagggagacgaatgcttgtgcatatattaaagagagcccttccctttttctgtagcaacagaggtgggagtcctcgaagtataaactctcaaagctacctgggcagtcttacaccacagaatccttctcctggtaacccagaaacacaatatgtgytttaaggaatttgaagtcacgaaaatttgaaacttatgcttggcaaaacaacagtaacaacaataaaacagtgtaagcaaagacatatgtcaaatgattggaaaaatgctaacaattcatatcacagccaaggatgtaatattcattatatttcaagagattctagaaatcaataagaaccagcaacccaatagaaatataggcagaagtcatgaacagttagttttaaaaacaatatgaacatatatataaaatgtgtctaa

SEQ ID NO: 651159 - DNA, 545 bp, Homo sapiens
tcaagatgtgacaccttgactttcagagtttcctctaagccacagcaatattgtttsgttccctgtagaggtgatggcctgcttgctcttctgtaaacatttggtcctttaactggatgcctctgaaaatttttgacaatatgtttattacaaagcaggcccgtagaccagagcagagcattttcaacaatgacatgatgaacaagagtttcatcaagcaaggagtaaacatggagttcccacaaaaggcacatcatggtgccaaaagtacagtctctactcacactattgttctgagatccacacggatccatctctagctgttaaaggaaaccgtacttgcaacattctactagataaagagccatgcaaatgcttcccatactctttgccatgaagtgtcgtgtgccactcccaactgacaaagaactctatcccttgtatctgagggaatgcacccttaatgcaaagcacagagattgcaataatggaacaacaagctagatgatgctctcctctgataagaggcatccactactgcattt

SEQ ID NO: 651160 - DNA, 614 bp, Homo sapiens
ctgtaatagctaccattcattgaacactttctatttgccaggcactgaactagactgtaagctgcaagtgagcaagagctgtttctacgttgttacatatttaatccctggtccttggcacggtgctgcatcagtcaactatrtgtgttagtggggacaggccagactatactttggttacaaatgaatccccaaatctcattggtttaatccaactaaggttaccctctcactcatgttacatgtctaacacaaatttggaggtgttataggtgttatgggctgaactgtggctcacaaaaaagaaatgccaaagtcctaatccccatatctgtgaatatgaccttatttagaaataaggtctttgcagatgtaatcaggtgaagatgagatcattagggtggaccctaatctaatatggtgggtatatttataaaaggagaagcatgctatgtgatgaccaaggcagagatttgagcaatgcacctacaagtccaggaacacaaaggatgaaggcacacatcagaagctaggaataggcaaggaaggattctacctaaagtctcagagggagcatggccctgttgacatcttgacttcagacttccagcttc

SEQ ID NO: 651161 - DNA, 427 bp, Homo sapiens
ccagaattcagagagatgaagagatgggaaaattaaaatacttaaaggaaagtttgagaagttccaatatgtgtccaacaggagttcaagattgtggtggagaggaacgtttaaagagacagtagctgaatgttttcaaacattaagaaatatatgagtcccgagataaaaggtgtaaactcagtacaaaacaatataagtaaaagtccacatctgaatgcatcacagagaaagggaagaatatcatggacaaaattaatcttaaaggcaaacagcaaaaacaaatgaccttcagaggataacatttagattgacagtgccctcagtggaaacaatagatgtcagaaaattaaggtaatttgttcatcacrgacaatttttgaaaaaagactggttacattctggtatttccatgcattgaaataac

SEQ ID NO: 651162 - DNA, 387 bp, Homo sapiens
ttaataatgtcttactagtttctatcactgaagcttttggtcacctatggaaatgtttctaatgatgatgtgaaaataatcactctagattcatttttttattaaaaaacttttttaaatgtttaagcaaatacaaaagactaaaggactgtagagtcacaacmctcaccgtgcctccatgacaaaagcaaagcagagactctgcgggcagacacctgtgaacccactgaatgctggagatcaatacacagaggagggctggaggggcagttctcctaaccaggtggtaggttatcccctcagccgacaccagatacagcaagaaaagaaactgggttaggagatgtaccatgaggaagtgagagaatgtgaagatgaagacagtgt

SEQ ID NO: 651163 - DNA, 582 bp, Homo sapiens
acctaccaaaaataataacatttttaaaaaggaatgagaataagagagaagatgacacaagggaagcaccaccacaaacygaaagctatgggacacacctgccaaacaacatctagtttaaaacctagatggtggaggatactaagcaaagaaaaactccaccagcttggatctcaagcggagtacgttgtccctaaaatgccaactttttgagcaatgtagccagtgtgtagccaatgtgtagccaatggttctttgattaagattctagaattgtttgcaaaatatagaagaggtgagcaatgcccttctggagatctcatccaaaaatataaattgtctgaagaagtgtgggctgcaggactcatggcctcattgtctcttagcagataaatattgtggaggtcaaaaggatcccaagagggagagcaggtgggaattcaagatggcagcacagagaatctgcagccttactcttagccacagcagcatttgaacattaaaaactgaggcaacaacaaaaaaatgccttgtatctcccaggatacaagacatcctaggtattgtgaagaggatgaaaga

SEQ ID NO: 651164 - DNA, 582 bp, Homo sapiens
acctaccaaaaataataacatttttaaaaaggaatgagaataagagagaagatgacacaagggaagcaccaccacaaaccgaaagctatgggacacacctgccaaacaacatctagtttaaaacctagatggtggaggatactaagcaaagaaaaactccaccagcttggatmtcaagcggagtacgttgtccctaaaatgccaactttttgagcaatgtagccagtgtgtagccaatgtgtagccaatggttctttgattaagattctagaattgtttgcaaaatatagaagaggtgagcaatgcccttctggagatctcatccaaaaatataaattgtctgaagaagtgtgggctgcaggactcatggcctcattgtctcttagcagataaatattgtggaggtcaaaaggatcccaagagggagagcaggtgggaattcaagatggcagcacagagaatctgcagccttactcttagccacagcagcatttgaacattaaaaactgaggcaacaacaaaaaaatgccttgtatctcccaggatacaagacatcctaggtattgtgaagaggatgaaaga

SEQ ID NO: 651165 - DNA, 582 bp, Homo sapiens
acctaccaaaaataataacatttttaaaaaggaatgagaataagagagaagatgacacaagggaagcaccaccacaaaccgaaagctatgggacacacctgccaaacaacatctagtttaaaacctagatggtggaggatactaagcaaagaaaaactccaccagcttggatctcaagcggagtacgttgtccctaaaatgccaactttttgagcaatgtagccagtgtgtagccaatgtgtagccaatggttctttgattaagattctagaattgtttgcaaaatatagaagaggtgagcaatgcccttctggagatctcatccaaaaatataaattgtctgaagaagtgtgggctgcaggactcatggcctcattgtctcttagcagataaatattgtggaggtcaaaaggatcccaagagggagagcaggtgggaattcaagatggcagcacagagaatctgcagccttactcttagccacagcagcatttgaacattaaaaactgaggcaacaamaaaaaaatgccttgtatctcccaggatacaagacatcctaggtattgtgaagaggatgaaaga

SEQ ID NO: 651166 - DNA, 468 bp, Homo sapiens
atttattcatttcacaaacctctcttgcttttctactcaatacctggtcctttgattgacacctgagagccggagaagcctgaggctgaacctggcaggaccgacaaatatcccatcttttctgccattgttatgagcccatargaggtgctccataatcatttgtggaatgattgattgactcaaaggcaggattgggacttgggagaccttgtgtctaaccaagactttgccacaaatttgcaggctgaccttgaaaaagtcaatggtcctctcatgttcatagtttctccttctgcaaaatagggagagggaagggccagactagaaaacctgtttcttgtcttctttttgtctgaaccctagagtctataaatgtggatcaaatggcaataggagcagcatcgtgaataatatctcctccagtcatcacaaaaaccttgtaaaatagagaattattccagtttt

SEQ ID NO: 651167 - DNA, 468 bp, Homo sapiens
atttattcatttcacaaacctctcttgcttttctactcaatacctggtcctttgattgacacctgagagccggagaagcctgaggctgaacctggcaggaccgacaaatatcccatcttttctgccattgttatgagcccataggrggtgctccataatcatttgtggaatgattgattgactcaaaggcaggattgggacttgggagaccttgtgtctaaccaagactttgccacaaatttgcaggctgaccttgaaaaagtcaatggtcctctcatgttcatagtttctccttctgcaaaatagggagagggaagggccagactagaaaacctgtttcttgtcttctttttgtctgaaccctagagtctataaatgtggatcaaatggcaataggagcagcatcgtgaataatatctcctccagtcatcacaaaaaccttgtaaaatagagaattattccagtttt

SEQ ID NO: 651168 - DNA, 468 bp, Homo sapiens
atttattcatttcacaaacctctcttgcttttctactcaatacctggtcctttgattgacacctgagagccggagaagcctgaggctgaacctggcaggaccgacaaatatcccatcttttctgccattgttatgagcccataggaggtgctccataatcatttgtggaatgattgattgactcaaaggcaggattgggacttgggagaccttgtgtctaaccaagactttgccacaaatttgcaggctgaccttgaaaaagtcaatggtcctctcatgttcatagtttctccttctgcaaaatagggagagggaagggccagactagaaaacctgtttcttgtcttctttttgtctgaaccctagagtctataaatgtggatcaaatggcaatagragcagcatcgtgaataatatctcctccagtcatcacaaaaaccttgtaaaatagagaattattccagtttt

SEQ ID NO: 651169 - DNA, 465 bp, Homo sapiens
ggaaaaggattctcacctgaacctccagaaggacccatccctgctgacaacttgattttagaattctgaccaccagggctgtaagagaataaatttgtgttgttttaagtcactgagtttatggtaatttgttacagcagcaatagaaaacattactctccaaaatttggggagccatgcrgtccatagtgtcacatcctggagtacctggccttctataaacaacctccccaccccgtttcctcccccattttccccaagagcatcaggtggaagtgctttcattggcagggaagggaaaatctaagcgccagcgcccatgcacctaactcattattttccccacacaaccagggcgtgcaggtcaacgtaggcatggtatgacggcggttctcaaaattcttcactcaggatgccaaggaggctgctgtgactttacaaattatattgacaccaaattctaga

SEQ ID NO: 651170 - DNA, 465 bp, Homo sapiens
ggaaaaggattctcacctgaacctccagaaggacccatccctgctgacaacttgattttagaattctgaccaccagggctgtaagagaataaatttgtgttgttttaagtcactgagtttatggtaatttgttacagcagcaatagaaaacattactctccaaaatttggggagccatgcggtccatagtgtcacatcctggagtacctggccttctataaacaacctccccaccccgtttcctcccccattttccccaagagcatcaggtggaagtgctttcattggcrgggaagggaaaatctaagcgccagcgcccatgcacctaactcattattttccccacacaaccagggcgtgcaggtcaacgtaggcatggtatgacggcggttctcaaaattcttcactcaggatgccaaggaggctgctgtgactttacaaattatattgacaccaaattctaga

SEQ ID NO: 651171 - DNA, 569 bp, Homo sapiens
gtaaatcaagaaataaagagagaaggtacaaatagcaagtgtcaggaataacaaacaggaatttgctacagatccaagagacactaaaaataataagagaacattatgaacaatattatgccaataaattactaaaactgatgcaagatgaaatagaaaacacaaataattttatatctacctaagaaattaaagctgtaattagacactttccacacagaaaattttgtagcccaagtgactttactagttaattctatcacacatttaaggaagaaattgtaattaaattccctcataaaagtaaggtgaagaaaaatacttccaaattaatttaatggggctaagttaactttattaccataactagacaaaaacaaagatattataataaaataaaattacagaacaaagtatccctcttgattataggtaaaaaaaatcatttacaaaatattaacaaatcktttcacatgcataaacacgcacacacataaatatgtgtgtgtgtgtatatatgtatatacagtgtgatacatacaatggtaatatatatatggacacacata

SEQ ID NO: 651172 - DNA, 499 bp, Homo sapiens
tttatggctgcttttcattgcaatggcgggattgaggattcgggacacacaccaaatagcccacaaagcttgaaatatttattatcttaccttttaccgaaaaagtttgccaacccctggtatagagaaatgttcataaaatgataggtgtaaagggcagaacattaaaaaaaaaacccaacatgcttacagatattaygactgcaatttccttccagctagtttcgatcagccgcttatgttattccatttgatgatggctgatgagtgtcactgcttcctgtgcttcagtcactgccctgcctacctcctgtgcactgacaacccaggggtgcatcaggtaaccctaccttcaagaagttcacagtttaggcaactggtataaaatattactggagagaaaatagaacttatttataccaatttctttgaaaagaaagcagaaactagaaaattacgaagagtacactttatcatgaagaactataaaaatgaattc

SEQ ID NO: 651173 - DNA, 603 bp, Homo sapiens
gtatatcacaacttttgtgaaaagctaaattaatatttaagacaaatgcatagctttactgaatttattttaataagaatttaaaataaattgatatgattgaaaatttgtaaacaacttgttaacattaatgcaagaattaagcaagtttgttttaacaagattaatattcaagaaagttgtttcttatttaccaataatagccaattactaaaaaaactaacaaaaacattatattaacaatagcaacacttctgtaagatacagtaataatctatcaaaagatgtgtcacatatgaaaataattacaaaagtgccattgaagtgagagacaggactagctggatttcctaggccaactaagaatccctaagcctagccgggagggtgaycgcatccaccgttaaacacagggcttgcaacttagctcacacccgaccagtcagttagtaaagagagctcactaaaatgctaattaggctaaaacaggaggtaaagaagtagccaatcatctatcacctgagagcacagtgggagggacaatgattgggatataaacccaggcattcaagccggcaacagctacctgctttgggtgccctc

SEQ ID NO: 651174 - DNA, 494 bp, Homo sapiens
aggctttggaaaagagtagttgggcaagagggaaagggtagttgggcaagaggccaggcaactgaaatcacacacctagtcttaccaaaggaagtgtagttgggtacccccggtggcacctctgcagtttgcctgccaccagcacagccacaatcagtggctatgctccagtgaaccatgcatgttacccygtctgtcacatttgctggtactcactgatgctgctacctccatcttcattctagtagtctatggattccctcatttctcaggcactgtcttatgccctgagaacagagcactgaataaaaccaactgtttgccctcaaagggctgacactgcggaggggatgatggacaagaaatgaattgtatttatacctgcatctatatctatatctacataattggtgacacgctcaagattcaggaggaacacgtgattgtttaacgtcagatgctatgtacactataggtgccaggaagccagaaga

SEQ ID NO: 651175 - DNA, 494 bp, Homo sapiens
aggctttggaaaagagtagttgggcaagagggaaagggtagttgggcaagaggccaggcaactgaaatcacacacctagtcttaccaaaggaagtgtagttgggtacccccggtggcacctctgcagtttgcctgccaccagcacagccacaatcagtggctatgctccagtgaaccatgcatgttaccccgtctgtcacatttgctggtaytcactgatgctgctacctccatcttcattctagtagtctatggattccctcatttctcaggcactgtcttatgccctgagaacagagcactgaataaaaccaactgtttgccctcaaagggctgacactgcggaggggatgatggacaagaaatgaattgtatttatacctgcatctatatctatatctacataattggtgacacgctcaagattcaggaggaacacgtgattgtttaacgtcagatgctatgtacactataggtgccaggaagccagaaga

SEQ ID NO: 651176 - DNA, 494 bp, Homo sapiens
aggctttggaaaagagtagttgggcaagagggaaagggtagttgggcaagaggccaggcaactgaaatcacacacctagtcttaccaaaggaagtgtagttgggtacccccggtggcacctctgcagtttgcctgccaccagcacagccacaatcagtggctatgctccagtgaaccatgcatgttaccccgtctgtcacatttgctggtactcactgatgctgctacctccatcttcattctagtagtctatggattccctcatttctcaggcactgtcttatgccctgagaacagagcactgaataaaaccaactgtttgccctcaaagggctgacactgcggaggggatgatggacaagaaatgaattgtatttatrcctgcatctatatctatatctacataattggtgacacgctcaagattcaggaggaacacgtgattgtttaacgtcagatgctatgtacactataggtgccaggaagccagaaga

SEQ ID NO: 651177 - DNA, 581 bp, Homo sapiens
tctggtaaagttcatttgtaaaaaaacaagatttggtgtctttctaaaagagatacaacttatgtaatttatatatcagtaagtttactttttaatggtaattggtgtatctatatattttctttcatttcgtctgattatagtcatagttttaaataattatctatttcatctaaattgttatatttactgcaataaagttgttcctaaaaatcttttcctgtcacaaatatttttgttcctaatatttttatttttgctttttctccattaattttaccagaggtttttctgtttcagtagtcttttaaatagttacctttgatttctttaaccctttaatttttttttttgtaatatttgctcttatgtttattatatctttgcttctactttctttggacttactctattgtcttcattaatttattgagttaaaagcctatttaatttttaaactttagtatttcctaatrtgtgccttaaaagttacaaattcccatctaaataacactttaattttacctgacttttttattggtaatgatattcttatttagttttaaatattttcttattta

SEQ ID NO: 651178 - DNA, 581 bp, Homo sapiens
tctggtaaagttcatttgtaaaaaaacaagatttggtgtctttctaaaagagatacaacttatgtaatttatatatcagtaagtttactttttaatggtaattggtgtatctatatattttctttcatttcgtctgattatagtcatagttttaaataattatctatttcatctaaattgttatatttactgcaataaagttgttcctaaaaatcttttcctgtcacaaatatttttgttcctaatatttttatttttgctttttctccattaattttaccagaggtttttctgtttcagtagtcttttaaatagttacctttgatttctttaaccctttaatttttttttttgtaatatttgctcttatgtttattatatctttgcttctactttctttggacttactctattgtcttcattaatttattgagttaaaagcctatttaatttttaaactttagtatttcctaatgtgtgccttraaagttacaaattcccatctaaataacactttaattttacctgacttttttattggtaatgatattcttatttagttttaaatattttcttattta

SEQ ID NO: 651179 - DNA, 605 bp, Homo sapiens
attgtggtctattggatatacaaatcaaatagtatcgaaaatattggctgaaactttcattcagtttactacatggtcagtgtttgaaaatagtacatagatattcttgaaaatgaatattttctgtgtttttcagaattttatatatagcttaagtttttcagcatgttgttcacattttctgtatctttactaacagtttcaaaagaggcttactaaaataatcttactctgattrtgaatttgctaatttctccttataactctgcaaacttttgctttatatgttttgtagttgtgttgttagttgcattcaggttcatgattattgtatactcagataaaatattctttttattataagtaatgacaaaccaaatccctaataataattttttattttgaatttttttgatattaatttgaaaatattacctatttttaaatttactcatttttaattgccaataattgtacatatttatggaatacaacatgattttttaatctatgtatacattgtacaaagattcaatcaaagtaattaacatatctagcacctcaccaactttttttggtgagaatcttaaaaatctactattata

SEQ ID NO: 651180 - DNA, 591 bp, Homo sapiens
aatgcagctgggtaccaagcccccttaacaaccagtcactaacattttgtccttgagtaagtcgcctaaacttatctggacatcagtatttctctgggtcaaatggagatgrtaagttcccatcttccactctgcccgattagggtatctatgataattgagttaggataataggtatgagaagtgtatttagtgttctgtaattcagcagacatgctctgagcattcctccttgttgttcatttattctatcagtaaagacatactgagggcgtaagatgtgccaagaagcaaatcaggtgccagaaacattgagaggaatgaattggctgtctaatggggaacagaaacaattgcactgctttgcagcatgtgttttgagctctcaccagcacagcctgtagcaagagggaagcctgagctcaatccctcagagcagagagattccagggcagcagcttgcagccttgctgtgagcaggaagggatgcccttccaggggtggccagctctccttactcaagtctcagcccacggatggaaagccagggccatgcctcccttgctgtcccaactagatagtgaaaactgt

SEQ ID NO: 651181 - DNA, 398 bp, Homo sapiens
gagggtcaataagaacgatcacttatgaggatggaaatttctccatgtaaaaacttaacagcaaatcctatcttgcaacagcrcatctcttcccagaaccacacgtacactctcctggtgctccccacaatgggagacacaaagtaagatgccttcaggatgaacgacaagatgtgaaccctgaagttacaggaaacagagaattgcagggcagcaggggatgtgacagcactcatccctctgaaagttatttaaattttctctttttgaaaattttattaataatttttttttgaaacacagtctcactctgttgcccaggctggaatggagtggtgtgagcttggctcactgtagccttggcttcctgggctcaatcgatcctcctgcctcagcct

SEQ ID NO: 651182 - DNA, 460 bp, Homo sapiens
agcatcataatatctcacatgtattttcaagcaaacggaactttacatcacaaatacacttggagggtcaataagaacgatcacttatgaggatggaaatttctccatgtaaaaacttaacagcaaatcctatcttgcaacagcgcatctcttcccaraaccacacgtacactctcctggtgctccccacaatgggagacacaaagtaagatgccttcaggatgaacgacaagatgtgaaccctgaagttacaggaaacagagaattgcagggcagcaggggatgtgacagcactcatccctctgaaagttatttaaattttctctttttgaaaattttattaataatttttttttgaaacacagtctcactctgttgcccaggctggaatggagtggtgtgagcttggctcactgtagccttggcttcctgggctcaatcgatcctcctgcctcagcct

SEQ ID NO: 651183 - DNA, 484 bp, Homo sapiens
atcataatatctcacatgtattttcaagcaaacggaactttacatcacaaatacacttggagggtcaataagaacgatcacttatgaggatggaaatttctccatgtaaaaacttaacagcaaatcctatcttgcaacagcgcatctcttcccagaaccacacgtacactctcctggtgctccccacaatgggagacacaaagtaagatgccttcaggatgaacgacaagatgtgaaccctgaagttacaggaaacagagaattgcagggcagcaggggatgtgacagcactcatccctctgaaagttatttaaattttctctttttgaaaattktattaataatttttttttgaaacacagtctcactctgttgcccaggctggaatggagtggtgtgagcttggctcactgtagccttggcttcctgggctcaatcgatcctcctgcctcagccttctgagtagatgggaccacaggcgcat

SEQ ID NO: 651184 - DNA, 484 bp, Homo sapiens
atcataatatctcacatgtattttcaagcaaacggaactttacatcacaaatacacttggagggtcaataagaacgatcacttatgaggatggaaatttctccatgtaaaaacttaacagcaaatcctatcttgcaacagcgcatctcttcccagaaccacacgtacactctcctggtgctccccacaatgggagacacaaagtaagatgccttcaggatgaacgacaagatgtgaaccctgaagttacaggaaacagagaattgcagggcagcaggggatgtgacagcactcatccctctgaaagttatttaaattttctctttttgaaaattttattaataatttttttttgaaacacagtctcactctgttgcccaggctggaatggagtggtgtgagcttggctcaytgtagccttggcttcctgggctcaatcgatcctcctgcctcagccttctgagtagatgggaccacaggcgcat

SEQ ID NO: 651185 - DNA, 579 bp, Homo sapiens
tctgtcaacacaatgaccactgccccagagtggtttctgtagacacctggctcatgtcctccatcagccacccgatcccccaccaaacgctgcatcccacctcagggtttatctctgctaccatctgggtctccatgcaaggtgttgctcagccgaggctctttccactccggctctgacactgtttgtcctccgtaatcccccctaacactgctccatcagggtggctcaacagctgggtgcggtgcactggggtgatcatggtctttgtttcacagcagtggatttggggaggtggttctaaaaggctgacagcttttgcaacacyatgcttagctcctaagtgctgcagacaagagatgcaaatccagccaccaaaagcaacaattgagcccctgtgaaaaaagtactacttttggagctcacccccttatcaggctccaacatcgggtttggtgataataagaagtccagtcacccacgacacacacaaagaaagcctcatcacattgcagccgtcctgaaagatgctttcttgggggcagtcattcattcacttgagggagtatttctgggggc

SEQ ID NO: 651186 - DNA, 579 bp, Homo sapiens
tctgtcaacacaatgaccactgccccagagtggtttctgtagacacctggctcatgtcctccatcagccacccgatcccccaccaaacgctgcatcccacctcagggtttatctctgctaccatctgggtctccatgcaaggtgttgctcagccgaggctctttccactccggctctgacactgtttgtcctccgtaatcccccctaacactgctccatcagggtggctcaacagctgggtgcggtgcactggggtgatcatggtctttgtttcacagcagtggatttggggaggtggttctaaaaggctgacagcttttgcaacaccatgcttagctcctaagtgctgcagacaagagatgcaaatccagccaccaaaagcaacaattgagcccctgtgaaaaaagtactacttttggagctcacccccttatcaggctccaacatcrggtttggtgataataagaagtccagtcacccacgacacacacaaagaaagcctcatcacattgcagccgtcctgaaagatgctttcttgggggcagtcattcattcacttgagggagtatttctgggggc

SEQ ID NO: 651187 - DNA, 539 bp, Homo sapiens
tatgactcttaagtagttaaataaaaacaacaaagctttagcrttagagcaataacaggtcaaatccagtaggtatgaaatatacaaccttgtatctgtcagattatgtatattcttaaggccttttattcttaaccctagaatatggtgataaaatatctatcatgcaaaatggtagacagaattaatgtgttttaattttgtaaaataccttgttacaactccagacatgtgagagtcactgaatgaatgttcatttatgttctatgaatggtgaaagaagtggcagatgttgatctagaatactggcaaccaaaaagccagaatgactggactgacattttcagggactttttgagagccatgttcagtacctatgccttgtgccttcagaaaactgaataatagagaccatccctatgttgtcctggcaagatgccaggtaagcttaggtccatcacccctctcattaagcttgtacttcactcttctattaagtctttccagacattttccaattttttccaaagctgaattcc

SEQ ID NO: 651188 - DNA, 608 bp, Homo sapiens
gagaggtatgtaggtgggagagaggatgggtggttatacatgacaagaagctaataaaatgaagaagttatataacatatgaggaaatgaagataatgaaagagggcaaggatgcatagaggcatgagtggaggtggcattatagggaatcatcagggaggcctttgtgcccctgcttgccatggagaaattgtgagccatgacccacacaaagccccaggcagcttttttttggcacataccaaagacccatcagaggtagttccctttggctactctgcccgcattctggacacagaaatttaaggatatggagtgattattctctaatcactgatatctgagttctycagacatctgatgaggtgatgtgtgtgtgagggagggaagagaactaaaattcttgcaggtgtatatgcagcaggtggtctgcagggtgctttgctcacaccttctgaacttcctgtcactctcctgaccccatgggggtacactggttttatctccctgacacagggaaattctcaaccatcctacttgcattttggcttgctcaccatttaatgtccagtctgtagcacacagcctaccacatagaaatatgtaat

SEQ ID NO: 651189 - DNA, 576 bp, Homo sapiens
ggtagattttcagtccccactgcaggtttgcggtcctttgccacacctagattgccagatgtggtcccctgcccctcctaggacctgaaaccctcgacacagccttgtgcatggctctcagctcttttcccggcaccctyttgggccctagtgattcagcccctagtaaccatcccaagcaccctccttttcaggaaatatttccatttctggtatctgtagattgcccattcttgtttcagggccctgctatgtaattagtatggcttactaatattattcctatcttccttatgtgttcagagaagtgggggaaagttgtagtatttatttggtgcaccattctaaactaaaattctcactgctttttgaatacaatggagtaatcatatccatctctcaagatggctttaagaaccatatgagataaatgctttggaatccataaagtgtctaaaatataacaaatattcattattccgttttacattgcagcaaaaccccacagatacagtgccaatgacagaaattaagattaactgggggcgacacagatttctgtgaatgccagtgctg

SEQ ID NO: 651190 - DNA, 427 bp, Homo sapiens
agaccctcccctgtccccgccacagtcttatggggtcttcatgtctactggcattattattgcctccaccgtcaggctcggggctccagcagcatctgaatttgattcatccctgttatcccaggatccagtgtagggcttgatggagttgatgaggtcctgtacatcccacaggagaagaatgaccaagggctagaattccagtagctgtacccagcctagcatttgccactcatccaccacgcatgtgatgtgtttgaytcttgctcccagtagctcacatttatgacgcatgcttcctatgctaggttatactctggtgtgttgtttattcatagccagtatttccacttgatgagatcctatgggattttgcaacttatgtaacaaactcttagggagcatttgctgtgagctgaatactttt

SEQ ID NO: 651191 - DNA, 488 bp, Homo sapiens
ttttcctccaatatatgtatggaatgcctgcaaattatatacaagcaccactgtcagaaattaatatctcaaggcttggtatgcatttagtgcaatgatggaaataaatccacatttcaaatagtccccttaagaatctcaaattcgagggcaggaaattgttccagatttgtcactggttttatttcatattctgtcatttgctttatttttttctcctgtgcttaagtaastagtactgtcttcacttcgtaggtcctttgcaggagtccttttaagtcatctatccagtaggtgagggctgatttaatgaagagtagatactttgcaaacccagtttcctggacaaacttgaactgccttacagcactaatgaaggaagctcattaaccccttcacactatggccacctgacccaggattacctcaatatcaattcgtaaatgaaatatgagtaaatcctcatttctttcctcatttttacacaa

SEQ ID NO: 651192 - DNA, 593 bp, Homo sapiens
aaagggaacagcactgttctctttcaagataaaataatgatgccaataaaatgtgctgggtggttgtaagcctcaaatgacctaagacatgagcatatttacagcagcgccacacatgtctccagggctccccaacatccagtccagtgcctgctgctccatctgaggctggggggtccctggagaaagctctgtgccctcctggaagaggctatgtcaggagcaccctagaggacctgccctatcccaggggctgggccaagccattattctgcccaccctsccccctccctaaacacttggacccccgtgttgtgatttctaggctgccattcccacaccccaggctctaccagtctaatttgttcagatattcatttcctctcccttcctatctcccctcttcagacaagaatctctccctccccacaaatctcatcccagctgctaatttcttctgaaaacctgaccctctctgcatgctaggatgtaaatgacttgccaggggctccacttaagaggatatgaggaaaccactttatgcccctgttggaagctgtttgattaatagcgcttttcaaggtgttgttcaa

SEQ ID NO: 651193 - DNA, 552 bp, Homo sapiens
ctccacaaagagtgagtgagctcagtccccacttacccacagcaaccccatgcaacactgaggayatcccctcacctctcaggccctgcagacagagagtgcaacaggccagctggggctggagtgatggctgagccgagagctgggatttgggcagggcctcggctcccagccttccctccaccagtgcccatttggcttcaccagctcctccccaccctcatatgatcgctgcctttaatccagcaaaaagcttttaccttgtttcatctgcagaggagcccgaggatttagatttttgcattttaaatgttattcatgttttgatttaaatccctaaaactaattctaggcattccataagccgcatggccccctaagatcctgaacccttctctcgttccaggccagtgtctcatcagactaatgtgatacggtgggatttgtatgtgtgtctgtttttaatagagaaaaacaaaaaccaggagggttttggaaacgttaaactgttgtttcagtcttttaaattttggatggtttccatggtaactg

SEQ ID NO: 651194 - DNA, 552 bp, Homo sapiens
ctccacaaagagtgagtgagctcagtccccacttacccacagcaaccccatgcaacactgaggatatcccctcacctctcaggccctgcagacagagagtgcaacaggccagctggggctggagtgatggctgagccgagagctgggatttgggcagggcctcggctcccagccttccctccaccagtgcccatttggcttcaccagctcctccccaccctcatatgatcgctgcctttaatccagcaaaaagcttttaccttgtttcatctgcagaggagcccgaggatttagatttttgcattttaaatgttattcatgttttgatttaaatccctaaaactaattctaggcattccataagccrcatggccccctaagatcctgaacccttctctcgttccaggccagtgtctcatcagactaatgtgatacggtgggatttgtatgtgtgtctgtttttaatagagaaaaacaaaaaccaggagggttttggaaacgttaaactgttgtttcagtcttttaaattttggatggtttccatggtaactg

SEQ ID NO: 651195 - DNA, 405 bp, Homo sapiens
caattctcctgtctcagcctccccagtagcatggaattacatcatgcctggctaatttttgtatttttagtagagacggggtttcccaggctggtctcaagctcctggcctcaagtgatccgcccrccttggcctcccaaaatgctgggattacaggcgtgagccactgtgccggcctctggtttggttttgactttggaggccttctactttgggtagaggaagggttggggactgggcagaatggtgaaagctttcccaagctcacccagcctaagttcctcttggccacattgagccttactcttccctaaacttgaccacactccctttcctctgcgcctttgctccagctgttctgatctctggattactgctcattctttcacccagcccccaacccca

SEQ ID NO: 651196 - DNA, 608 bp, Homo sapiens
ggagcggttcctctttcctcccctagaggagtatgtccttagccccctgtgttcatctaccagcgacagcatcccatccttccccaggacccacagtctcactttgttccacagcttctgcttctcacttgacatagaacgtcagggcttctgcctcctggtaccactcacatcatatatgcccaaaaccgaatgtgatggtgccccctgcagctgggcagcagccttgccaggcagtgagcttcttggctacattcccacctccaccagtgctctgggcaatttttagccaacatgtcattatcatcaccagtcaccatgcagtgcctggctcctgtcacagaggcttcagttctggctggctcaagaagtttttccagcttttcaacaccatttcttggttgcttttccctcaactcttccccaagagacgccaacytgagtcagtacccaccacaccctgggagagttagaatgctcttgtggggactttccctctggggcccttctgtcttttagggcaaccttggggacctgccctcccttctcactggctaacctgtttcgtcttcttccccagccaggaagtgtgctacaggcacgtggca

SEQ ID NO: 651197 - DNA, 638 bp, Homo sapiens
tggtctcacagctcgtagggggcaaactctgctcttcccactgtggtgcataccatgcacaggctctcaaactcattgtttgttttgtgccatgagggccaagtagcagttccagaggagagaactccatccctcaggcccttacccagcccgtctgggcctgatcctgggctgggcaagcccctgggtgtagkgagggcacacacatgctgtgttcctgggcctgcggctgtcatctttgatacagacttacacgtgctgccccgtccccgcctaggaaaagcacggagggaaagcagagcaggccagagcctggccttctagatcagccttctgggacaggggcaggcttcatcttcagacagcgagttcctgagaaagaacaatggcttggggtggggaaactgaggggaggaagcagaggaccccctgcccacttgcccacccctccctcacacacagcagctctcctggtggtggctgccaccttcgccattaggccaaagctgagaaggaagctatgttgatctttgccccagcctgggcccctgggaatgctatgatgtgtcacaaagtagggctttcctcatgtcaccataccatggtctctggcagctcagtgaacagagcctgaaccc

SEQ ID NO: 651198 - DNA, 638 bp, Homo sapiens
tggtctcacagctcgtagggggcaaactctgctcttcccactgtggtgcataccatgcacaggctctcaaactcattgtttgttttgtgccatgagggccaagtagcagttccagaggagagaactccatccctcaggcccttacccagcccgtctgggcctgatcctgggctgggcaagcccctgggtgtagtgagggcacacacatgctgtgttcctgggcctgcggctgtcatctttgatacagacttacacgtgctgccccgtccccgcctaggaaaagcacggagggaaagcagagcaggccagagcctggccttctagatcagccttctgggacaggggcaggcttcatcttcagacagcgagytcctgagaaagaacaatggcttggggtggggaaactgaggggaggaagcagaggaccccctgcccacttgcccacccctccctcacacacagcagctctcctggtggtggctgccaccttcgccattaggccaaagctgagaaggaagctatgttgatctttgccccagcctgggcccctgggaatgctatgatgtgtcacaaagtagggctttcctcatgtcaccataccatggtctctggcagctcagtgaacagagcctgaaccc

SEQ ID NO: 651199 - DNA, 518 bp, Homo sapiens
gaattctgctttctcaacaactctatcatcaacatactgataagcaaagaaaagtcaccataggataggaagtcagcagatgttggagatatactggcagagtgtggcatgatgagcacatcagattacataccaaacttagaaaaagatgtttgcttgcatccaacctttttmttacagtaagacttggctcttatctctaaaacctgatttctttacctctcgtcagcaatactgaaagccaggctccacataaagcatcaagacagtccccaaaaaggttcatgtattacagcacgcctgttaactctgcagtcagagtcaccaattctgaactctactggtcagggcagatggacagtgggcaacagaaagattcctaagcagttactgaatggcaataaaaataaagtaaaaataaaactgcataactatcaaccttaaagaaatgacaagacattccacaaagacacagcaatcaaaaatagaaaaaggatatgaagtccttaagactaatg

SEQ ID NO: 651200 - DNA, 519 bp, Homo sapiens
tgaattctgctttctcaacaactctatcatcaacatactgataagcaaagaaaagtcaccataggataggaagtcagcagatgttggagatatactggcagagtgtggcatgatgagcacatcagattacataccaaacttagaaaaagatgtttgcttgcatccaacctttttattacagtaagacttggctcttatctctaaaacctgatttctttacctctcgtcagcaatactgaaagccaggctccacataaagcatcaagacagtccccaaaaaggttcatgtattacagcacgcctgttaactctgcagtcagagtcaccaattctgaactctactggtcagggcagatggacagtgggcaacagaaagattcctaagcagttactgaatggcaataaaaataaagtaaaaataaaactgcataactatcaaccttaaagaaatgacaagacattccrcaaagacacagcaatcaaaaatagaaaaaggatatgaagtccttaagactaatg

SEQ ID NO: 651201 - DNA, 550 bp, Homo sapiens
gcctccccagaagcagatgcacagcattatgcttcctgtacagcctgcataaccacagccaattaaagctcttttcttataaattacccagtctcaggtatttctttatagcaaggcagttgacacagaagacaagctataaactggycaaaggggcagaaggaggagttgcaggtgtcactggaatggaaaaacaagtttggtaggaattgagagaatgagaagaacaggaggttgtggtcacagaggagttatttagatttaagattttgtagccgggcgcagtggctcacgcctgtaatcccagcaatttgggaggccaaggctggtggattgcttgaggttaggagttcaagaccagcctgaccaacatggtgaaacccatctctactaaaaatacaaaaattaggtgggtgtggtggcaggcgcctgtaatcccaggtacttgggaggcagagtcaggagaatctcttgaagccaggaggcagagtttgcagtgagccgagatcatgccactgcactccagcctgggcaacagagcaagactctg

SEQ ID NO: 651202 - DNA, 559 bp, Homo sapiens
tcctgtacagcctgcataaccacagccaattaaagctcttttcttataaattacccagtctcaggtatttctttatagcaaggcagttgacacagaagacaagctataaactggtcaaaggggcagaaggaggagttgcaggtgtcactggaatggaaaaacaagtttggtaggaattgagagaatgagaagaacaggaggttgtggtcacagaggagttatttagatttaagattttgtagccgggcgcagtggctcacgcctgtaatcccagcaatttgggaggccaaggctggtggaytgcttgaggttaggagttcaagaccagcctgaccaacatggtgaaacccatctctactaaaaatacaaaaattaggtgggtgtggtggcaggcgcctgtaatcccaggtacttgggaggcagagtcaggagaatctcttgaagccaggaggcagagtttgcagtgagccgagatcatgccactgcactccagcctgggcaacagagcaagactctgtctaaacgaacaaaaaaaaggccaggcacggtggctcaagct

SEQ ID NO: 651203 - DNA, 437 bp, Homo sapiens
ctcaagtgtgaacaaatgccatataacaaatcacccccaaaatttagtggctccattaagatacatactatctaattgggagataagacgtaaacacatgaaaagtttcacaataataaaagagcttaacaaaaataattcaagagatgtaayagagcaattctatcaataggagacgtttgcttggaagcaacgcaaactgacttcttgtaacttaagcaaaagaagaatattataaaggcagacctcacagaaccaaagaaaaggagaatcagtcaggcttcaggaagaataggaaccagagtgtttctagggaactagtcagcaagacctgatgcacagcctttgcatggtgctgggcattttcagttcctggtatgtaccaagttcttcctgcttccagtacttggcagatgctgtttttcctgcccagatct

SEQ ID NO: 651204 - DNA, 437 bp, Homo sapiens
ctcaagtgtgaacaaatgccatataacaaatcacccccaaaatttagtggctccattaagatacatactatctaattgggagataagacgtaaacacatgaaaagtttcacaataataaaagagcttaacaaaaataattcaagagatgtaatagagcaattctatcaataggagacgtttgcttggaagcaacgcaaactgacttcttgtaacttaagcaaaagargaatattataaaggcagacctcacagaaccaaagaaaaggagaatcagtcaggcttcaggaagaataggaaccagagtgtttctagggaactagtcagcaagacctgatgcacagcctttgcatggtgctgggcattttcagttcctggtatgtaccaagttcttcctgcttccagtacttggcagatgctgtttttcctgcccagatct

SEQ ID NO: 651205 - DNA, 430 bp, Homo sapiens
aaactgatgaagtcttccagatggtggagaacaatatgaatgctgctgtctccacggtgagtgccaacatcacccctccccaggagctggtcagggatggcacagcgtggctacctggccatccaatgactcaccactgaccactgctttttatgcsttgacctttgtacccaccgtccccagcccacccctgagttcccagacaacagattatggaccgagagactactcccttgggtttactctggctcatccaagtcatacccagcaaactcctcccatccctgcaggtaaaggatttcctgtctcagctcaggagcagcaataggagattttctatcccagagtcaggccaaggagggacagaaatggatggctttaggagaaccatagaaaaccagcactctcgtaatgatgtcatggtttctga

SEQ ID NO: 651206 - DNA, 427 bp, Homo sapiens
ggccttgaatagccccacttgggccttcggcttcccgcgccccgcccccaggtgtcctattttctcttcgtcatcttcacggcgtatgccatgctgcccttgggcatgcgggacgccgccgtcgcgggcctcgcctcctcactctcgcatctgctggtcctcgggctgtatcttgggccacagccggactcacggcctgcactgctgccgcaggtgagcacgcaagtagcacaggctgcgctcaggacggctctgccacgtgctagtaggctccttttagggggttgttgagctgtgactccaagkcaaggtgcaacgctgggcgcaggatacccaaccgtgctttcgcagagctggtacaacagtgtgatgcaatgcctgctgttaccagaagagggatccaggccacacggaagggagtcgtgtc

SEQ ID NO: 651207 - DNA, 556 bp, Homo sapiens
gtagttcccgctcgcgccgcctggccggctccgcccagcttcgccaaggccccttccggtggagccagcgctgcgaccgcctgcagaaggttgactgcgtggtagggggcccagagcaagccgaaggcaagcacgatggcgctcaccagccggcccacccgcgccccgtgccgcccggagccccagcgggcgccccgcagccgtgccagcgtcacgctgtagcagccgagcatcagcccgaaaggaagcacgaaagcrgtcagagtctccaggctcaggtgggcggcggcgtggaccggcgacgggtggcacagctggcatacgcggtccctccacaggtggcggtagacggcggccgggacggcgagcaacagggcggccagccagaccgccagcagcaggcggcgggccagggccgggctgcgcagccgaggcgccaggaaggggcgggtgactgcgaggcagcgctgcaggctgagcaggccggtgagcagcacgctggcgtacatgctgagcgcgcacacgtagtacaccgccttgcagcccgcctggccca

SEQ ID NO: 651208 - DNA, 556 bp, Homo sapiens
gtagttcccgctcgcgccgcctggccggctccgcccagcttcgccaaggccccttccggtggagccagcgctgcgaccgcctgcagaaggttgactgcgtggtagggggcccagagcaagccgaaggcaagcacgatggcgctcaccagccggcccacccgcgccccgtgccgcccggagccccagcgggcgccccgcagccgtgccagcgtcacgctgtagcagccgagcatcagcccgaaaggaagcacgaaagcggtcagagtctccaggctcaggtgggcggcggcgtggaccggcgacgggtggcacagctggcatacgcggyccctccacaggtggcggtagacggcggccgggacggcgagcaacagggcggccagccagaccgccagcagcaggcggcgggccagggccgggctgcgcagccgaggcgccaggaaggggcgggtgactgcgaggcagcgctgcaggctgagcaggccggtgagcagcacgctggcgtacatgctgagcgcgcacacgtagtacaccgccttgcagcccgcctggccca

SEQ ID NO: 651209 - DNA, 518 bp, Homo sapiens
acgaagccgttgccaggcagccccagcagcgccgccagcagcaggaaggctgtgcctgtggcccgcgaagtcttccagctcagcagtgtctcgttccctgggggacggtagcagaccgacatccttctgggcctacaggtgggtggaaggcgccacagagggcgttcaggggtggggcaaaaccccacctgtgatgcccgatgagaaggtgccatgcctcctccttacttccctgcagcctgcctcttttctgcctgggagtcctgacttccacgaggacccagaccccacctcaaacacaactccttcttggaacccagatcccctgctcccagtcagttgacctgccccactcctggcctccttcccagagctcagtggtaaacaggcataaagtcmtcaccccaggctgtcactatctctaccaccactcctctagtctggcccctccttctttgtccagccccattctagcacatctgggcaaaactggatggtggggtgtaaagggacgtgca

SEQ ID NO: 651210 - DNA, 421 bp, Homo sapiens
cattaaaaagatcattcatcatgaccaagtgggatttatcctaagtatgcaagaatggttcaacatatgcaaatcaatcaatgtgayactttatattaacagaatgaagaacaaaaaacatgattattttgattgatgctgaaaaaacatttgataaaattcaacatccatttatgataaaaacccttaaaaactgagggtagaaggaacatacctcaacataatacaagccatatacaacagactcacagctagtaacatactgaaggggaaaaaaactgaaagccttttctctaagacctggcacatgacaaggatgcccacctttgctactggtattcaacatagtactggaaatcctagctagagcaatcaggcaagagaaacaaatgaatggcatcaaaattggaaagaaagaagc

SEQ ID NO: 651211 - DNA, 596 bp, Homo sapiens
gtgctccttggccgttaatgtcacaaacactgggggggctttttcttaatgcagcatcctaagaccctccctagagctagagaagcagagtctctgggtgggatccaagagtctacccctgaataaaatagctgcctctggccttggacctcctttaacctaacacagcccctattgcagacaactggaccctgaagaaggagaaaggagatggagcccagtcaatctgcacrcttacctccaaggggatggatgcaacaccacttctgtgcccccttcatccccaggatccctcgctctctcctggtgcttgggccccaacaggcagagtgggacaaaggagggcaaggaaacatctccaatatgttttccaaagcacggtgggtgagaggagcaagagggtcaatggggcctacctcctctgtccattgagggatacaagtgaaatgcggagggactgataccctggacagtacccaggggctccatcaactgggggcggaagaccagttctgggggtgggggaggttctttcagactggccctgctgcctgcagcacgaggaagaccctctgtccactcctacatctccccca

SEQ ID NO: 651212 - DNA, 359 bp, Homo sapiens
taagtgactagaggaacactaggactttattggactcgggattgaaggcaacaaattaatcggtttaggctaagctttataaattgattcctatattatatcccagttgcatctcttgtggcattcattagagtggggaattyttttttaaagcagtttttggtgacagcaggacgggctcgaatttaacttgtgcatcccttaatggtgccttctcgcacattatctgtaacggccgcccgccccccccccccccccgccctttggaggaacaaagctttagcatttaaattgctgatcaagggcagattagtgagaccaaagtggagagtgtttgtataggaagttaacaggcatcc

SEQ ID NO: 651213 - DNA, 588 bp, Homo sapiens
ctggtatagtaagttgttcagggctcatcttatccttttcctgctctggacctgaaatgaaaccacttaggagccctgtttccttttwgccttggttctaccaagaagataatgcttcatgtgcacccttaccctgggtgtcattaattctaggtcccagcggatggagctaagaagaagatgtatgtgcatatatatgtatctatagatgtatataaaatcataagtatatgtgtgtgcatatatgtctgcatactccaatatgcatctatatctctattaaaataaaaaaaattttatattaaaaaccaatgtttctttcaggtatgttcaattcagtaccacagggtttattctatccttcccacttttccatatttgtaactcattctctatgagaaacctgctcccgttatcaaatatatttacttatttgctcagtcctagaatatatagaatagtttcagagtttctagctcatacctctgttagaaagaagcttaggagttagagcccagtatttgtttaatgttctgagaatatatagtacaaaatataatgttcaaaagttaagtgggttattcccct

SEQ ID NO: 651214 - DNA, 557 bp, Homo sapiens
tttctctagtatgtggtaggccctctttatatgtattttttcctataaagttgtcttatagtattttttcctataaagttgtcttatagctttaaatagtagttttgttccattgttttattttatttaagaactcccggccaggcgcagtggctcatgcctgtaatcccagcactttgggaggccgaggcaggcggattacctgaagtcaggagttcgagaccagcctggccaacrtggtgaaatctcatctctactaaaaatacaaaaattagccgggggcggtggcacacgcctgtaatcccagctacttgggaggctgaggcaggagaattgcttgaacccgtggacagaggttgcagtgagccgagatcatgtcactgcactccagcctggccgacagagcaagactctgtctcaaaagaaaaaaacaactgccgttatatataaattgactcttctttgcttgctttttatttcagccatctttttatttctttatttcattttcattctcttggtttttttcttttctttagtgcctcttaccaagtttt

SEQ ID NO: 651215 - DNA, 644 bp, Homo sapiens
aattgacctggttttagtttcctagaactgctattaaaaattaccatgagctgggtggcttaagacaacagaaacctattgtctcacagttctggaagctagaagtccaaaatcagggtattggcagggccacgttgtctccaaaagctctagagaagaacccgtcaacttgccttgcctgacttctggtttctgttgacaatcctcagcattccttgccttatggctgcattgccccaatctccactgccatctgcatgtggcctccttccctatgtgtgtatgtatctttgcctccacgagtcgtattgggttagaacccaatatgaccagcctgacctcatcctaatttgatcatttctataaatacttattttcaattaagtgtgacatttacagatatcaggggttaggacttcaacttatctttttaggagacaccattcaacccaaacagacctcaaccctccctttagacacatgagcagttagagcaaggcaggaacccacaggsaaaggccccatggtgtgaaggaacaggccaggaccaccctggagacggtgctgcttccatgacatgctagttgggtgaaatgtgtgtgtgtgtgtgtgtgtgtgcgcgtgtgtgtgtgtgcatgtgcatg

SEQ ID NO: 651216 - DNA, 576 bp, Homo sapiens
tccccagggcgccttgcccagcccagcacgagcccagaagcagcctttgatttgtgaactgctggrtttagggtggatttggcaactgggtttccagttggtttccagggggagatggatttacagctgacacaggtttgcagccttgctgggatctgcagcaggcagtgggcaggaagttattgacttgacccccgaccctggggagggaaaaataaagaagttaagaaaaatccatctttgtggggtttatcctgagacccttgaagagacaatttctacttttgatgcagttacatctctctgcaaaggccaggggaagaggacccagagaatgagattctcctcccgtcttccctcctggcctcttggaggattgaagtctgtgaaagttcctggagactccaaaaatcagaactgccctgcttgccctcctgcaggccccagctggcccctctgtccctgcagtgccctccccactgtggggtcatcgagccttctgcaggctttgagaataaggcaggaagaaggaaaccaccttcactgtgggtttggaacaaacggcctagggtttga

SEQ ID NO: 651217 - DNA, 576 bp, Homo sapiens
tccccagggcgccttgcccagcccagcacgagcccagaagcagcctttgatttgtgaactgctggatttagggtggatttrgcaactgggtttccagttggtttccagggggagatggatttacagctgacacaggtttgcagccttgctgggatctgcagcaggcagtgggcaggaagttattgacttgacccccgaccctggggagggaaaaataaagaagttaagaaaaatccatctttgtggggtttatcctgagacccttgaagagacaatttctacttttgatgcagttacatctctctgcaaaggccaggggaagaggacccagagaatgagattctcctcccgtcttccctcctggcctcttggaggattgaagtctgtgaaagttcctggagactccaaaaatcagaactgccctgcttgccctcctgcaggccccagctggcccctctgtccctgcagtgccctccccactgtggggtcatcgagccttctgcaggctttgagaataaggcaggaagaaggaaaccaccttcactgtgggtttggaacaaacggcctagggtttga

SEQ ID NO: 651218 - DNA, 576 bp, Homo sapiens
tccccagggcgccttgcccagcccagcacgagcccagaagcagcctttgatttgtgaactgctggatttagggtggatttggcaactgggtttccagttggtttccagggggagatggatttacagctgacacaggtttgcagccttgctgggatctgcagcaggcagtgggcaggaagttattgacttgacccccgaccctggggagggaaaaataaagaagttaagaaaaatccatctttgyggggtttatcctgagacccttgaagagacaatttctacttttgatgcagttacatctctctgcaaaggccaggggaagaggacccagagaatgagattctcctcccgtcttccctcctggcctcttggaggattgaagtctgtgaaagttcctggagactccaaaaatcagaactgccctgcttgccctcctgcaggccccagctggcccctctgtccctgcagtgccctccccactgtggggtcatcgagccttctgcaggctttgagaataaggcaggaagaaggaaaccaccttcactgtgggtttggaacaaacggcctagggtttga

SEQ ID NO: 651219 - DNA, 576 bp, Homo sapiens
tccccagggcgccttgcccagcccagcacgagcccagaagcagcctttgatttgtgaactgctggatttagggtggatttggcaactgggtttccagttggtttccagggggagatggatttacagctgacacaggtttgcagccttgctgggatctgcagcaggcagtgggcaggaagttattgacttgacccccgaccctggggagggaaaaataaagaagttaagaaaaatccatctttgtggggtttatcctgagacccttgaagagacaatttctacttttgatgcagttacatckctctgcaaaggccaggggaagaggacccagagaatgagattctcctcccgtcttccctcctggcctcttggaggattgaagtctgtgaaagttcctggagactccaaaaatcagaactgccctgcttgccctcctgcaggccccagctggcccctctgtccctgcagtgccctccccactgtggggtcatcgagccttctgcaggctttgagaataaggcaggaagaaggaaaccaccttcactgtgggtttggaacaaacggcctagggtttga

SEQ ID NO: 651220 - DNA, 566 bp, Homo sapiens
atagttaaaatctgtgtaaatataacaaattactaatcgcttcttgagtttttaaagatatgtttcatgttcaaagtgaaaaaatatgataatgtttgataggattttcaatgtatgtaaatgtaacatattttttaaactacaatataaaaagtggagggtaaaataacttagatgtttagaaagcttctacattcaatttgatgtgataaaatattgattctaagtatacagcccaaatttaagtatgtttagtacartccttagactaatcatgaaaaaacgacagtgtcatagtctgttgtgctgctataagaaaatacttgagactgggtaatttataaggaacagaaatttacttctcccagatctggaggctgaaagtgttggcaggttcagtgtctggtgagagcttctctctacttccaacatggtgccttgttgctatattcattggaggggacacatgttatgtcctcacatgacaaaaggcacacaaaggcagggcctaagctagttccttccagcccttttataaggcactactgtatgcatgagtgcaaagt

SEQ ID NO: 651221 - DNA, 457 bp, Homo sapiens
acacagcttctaaagatgctttttgtttttagttttattaaggaagcattattttatcttaaactgaatgaatttttttttaagttaaaacaattgagtttggcccgaaaaaggatttcatctaactcttccaatwtcactgaatatctaggatgacagctttattaataactgggccctttaacattcaaattccacagcaaaaattcctaataaaataggactgaaacaagaaatgtgttgagtgcttttaatgagtatccaaagttcttatagactgtgtatttaatgcatactttatatgaatatatgagttaactttaaaaatattcctctcttgaagtaattttgagaattaagtataatttgtattccatgataacaaatttttgacaatagagaagtggaagataataaacaatgggaatttatagtacagaaggcagggagaagatgg

SEQ ID NO: 651222 - DNA, 505 bp, Homo sapiens
ctagtctcaaattcctgggctcaagtgattgtgtccacctcaacttcccaaagtgctgggattacargtgtgagccactgcacctaggcagttcatctaattttaatttaatcagtgattcattggcatgaaaaacaagaactactgagatctgaattaaactctaatttagcagggtttcctatatttatagttatagtctcagattttagcaaatttagctattgaaaaatatgctttcagtctgtttatttcatgttcaaaactagtagcagaggctgggcatggtggcccatgcctctaagtctcagcactttgggagactgaggtgggaggatcccttgaggccaggagtatgaaaccagcatgcgcaatgtagggagaccctgtctctacaaaaaaatttaaaaattagccaggcatggttgcatgcacttgtagtcccagctacttggaaggctgaggcaggagaactgcttgatcccaggagttcaaggctacagtg

SEQ ID NO: 651223 - DNA, 545 bp, Homo sapiens
cacaaaaagaaagaaagaaagttgttgcttatagaaacaaatttcaaaamaaaaggaaatgtaaacagtatagtataaaagtaatttttgaaaatataaaaattagcctggggtgcacgcctgtagtcccagctgcttgggaggctgaggcaggagaatagcttgaacctgggtagctgaggttgcagtgagccaagatcacaccactgtaccccagcccgggcgacagagtgagactccatctcaaaaaataaaaatgaaaataatttttgatagctgtactattagacatttgtttttagcaggagaaaataataccaattttattaatattaattttatgtgcacagggtgcttttatacaaaagaagtaaaactctccctaacagatattgctaaaaatccaaaaatactcccatgtaaccaaggcaaaacaattattttagtactaatttaaacagtttttcagatatatatatatatatacacacacacatacatatacatttttttaaatcactgagcaaatgtcctcaaaatttaca

SEQ ID NO: 651224 - DNA, 545 bp, Homo sapiens
cacaaaaagaaagaaagaaagttgttgcttatagaaacaaatttcaaaaaaaaaggaaatgtaaacagtatagtataaaagtaatttttgaaaatataaaaattagcctggggtgcacgcctgtagtcccagctgcttgggaggctgaggcaggagaatagcttgaacctgggtagctgaggttgcagtgagccaagatcacaccactgtaccccagcccrggcgacagagtgagactccatctcaaaaaataaaaatgaaaataatttttgatagctgtactattagacatttgtttttagcaggagaaaataataccaattttattaatattaattttatgtgcacagggtgcttttatacaaaagaagtaaaactctccctaacagatattgctaaaaatccaaaaatactcccatgtaaccaaggcaaaacaattattttagtactaatttaaacagtttttcagatatatatatatatatacacacacacatacatatacatttttttaaatcactgagcaaatgtcctcaaaatttaca

SEQ ID NO: 651225 - DNA, 599 bp, Homo sapiens
ctttaactttttatgccatgaagtcagaaggatatcagaagcactaacacaaaaatagataacttgaatagcctcatagttaagcaaaagtaatttaaaaccctccccacaaaaaacacagcattgaagttaaccattttatttgaagtctcaaaatttaccatagaattcttcctaacatcacatcacgtgccaccactaaaccaaccattgccaaacaatgattagtctacgatttagactttgccatttcctaagagatccatgcctgaacaaaatgagagttttaaaaaattagcataggcacggtggctaacacctgtaatcccagcactttgggaggccgaggtgggtggatcacctgaggtcagaagtttgagaccagcctggccaacatggtgaaactaaaaatacaaaattagctgggtgtggtggcacgtgtctgtaatcccagctactaaggaggctgaggcaggaggattgyttgaacctgggaggcagaggttgcagtgagcagagatcgcaccactgcactccagcctgggcaactccatctcaaaaaaaaaaaaaaatagcataaaattgtgcattatagcctc

SEQ ID NO: 651226 - DNA, 575 bp, Homo sapiens
catcatcaagaccagtttacaaagtatgtcctttccctgacattcaagatggtgcgatttcagtttacacagaatttaacttttagttttataccatttctatacagatatggaattttttttaaacctacttttgcaatcagcagttctacctcaataaaattgacttttaaaaaatgagccaggcttagctaatcttaaacaagtaccacaattaaagagaagattataaacacagcttccctccctggttcctttagttgcatgcaagcttgtagttaatataaaagtaaaacattaccaccatgtcaaaagaaaagaggaaacttaaaaaaaaaaaaggttcacctaccagcctgataccacaagtggatagactgaaaatgaaacaaagtgaattgctccattaacarcattcttcttctgaaagaaaaaggatgggagggttgggttcaaagactcaaccttatcctacagtgctttttcatctttccagggcatgtggtgagtgggagttaaggtcagtaccttgcataagatttctcagccaattcttgatggagctaggcaaaaat

SEQ ID NO: 651227 - DNA, 308 bp, Homo sapiens
atctcctaggcctgttgtgagaattcagggaatgacatttgggagtgacatctagcacactgcgtggtgtgcactcaaagggtgtgagaagaatttctattataggyacttgttatgtactgaatgtttgtggcctccccaaattccgatgttgaaatcctaacctccaatgtaatggtattaggaggcagggcctttgggaggtgactgggttatgagggtggcaggctcatgaatggtattagtgcccttataaaaagacacaagagcttgctctctcttttctctctgccaagtgaggacacagc

SEQ ID NO: 651228 - DNA, 449 bp, Homo sapiens
tcaaggcttccactaccaccaatgaactgaaattgcaatgacaaagctaccactgccttagaaatatgcctgttctgatactttgcccatttttgaattgggttacttgccttttctttgctgagttataagatttatatactctagatataagttccttgccagatatatgatttgtaaataattttcccattatgtgggttgttttctcacatttttgatggtatactttaaaacacagaagttttatatttttattaggcccagcttaactgttttttagttgttgcttgggattttggtttcgatctaagaaagctttgcctaactgaaggacscaaaaatttgcagttatgttttttcttctaggagttttatagttttagctttaacatttagatttgtgaaaaattttgaattacttttgtatgttgtatgatgaggtatgg

SEQ ID NO: 651229 - DNA, 571 bp, Homo sapiens
taggcattacatcaagacccgtgagtcatccaagtttgttctttttcaagattgtttcggctgtatcagtttttatattaggattactagcttaatgaatgatataaatttctacctttcactgtggtcttgtttagattgcattagaatgatcttggcttaagtagtaaataggatccgttttttaaatcatatagtcktagtgcctttttatacagtgaattttaaattactttttcagttgtttcaatacatccgtctacttttctgcttcttaagtcaattttagtggcctgtatattttgctaggaaagtaccttctttcctttgactccctctcccttcttcctttccttccgtccctccctctcttttctttcatcccttccttcttacattctttccttccctccctccctccctttcctccttccctcctccccggcatataagtctgtgacattttaatatcaccacaatgggaatacagaatggttacatcactataaagaaatacccccttgttacctttccatagtcatagcctgttcccaaacctaactcctagcaa

SEQ ID NO: 651230 - DNA, 571 bp, Homo sapiens
taggcattacatcaagacccgtgagtcatccaagtttgttctttttcaagattgtttcggctgtatcagtttttatattaggattactagcttaatgaatgatataaatttctacctttcactgtggtcttgtttagattgcattagaatgatcttggcttaagtagtaaataggatccgttttttaaatcatatagtcttagtgcctttttatacagtgaattttaaattactttttcagttgtttcaatayatccgtctacttttctgcttcttaagtcaattttagtggcctgtatattttgctaggaaagtaccttctttcctttgactccctctcccttcttcctttccttccgtccctccctctcttttctttcatcccttccttcttacattctttccttccctccctccctccctttcctccttccctcctccccggcatataagtctgtgacattttaatatcaccacaatgggaatacagaatggttacatcactataaagaaatacccccttgttacctttccatagtcatagcctgttcccaaacctaactcctagcaa

SEQ ID NO: 651231 - DNA, 559 bp, Homo sapiens
ttgttttcatctatctaaagaagaaaagtgcattagacaaatataacaaagttattataagcctaccactaagaatatcaaaatgaagttaaatacattttgtggaaaaacctgacttccaccaaatctcrtacttcttagacagattaaaaatattttctacattaaaatgtcaccattttcctcaattttggtacatgattccagcttagtgaattacacagctaatgccatgatattgctctgtaatatgcagcaaaaaaacaaatttaagacagcaaagtagaatataatattcttggtagcaaatcttttcttattgtacaataaaaactgatgaatcttttctgtttctcatggatttctttttttaaaccttaacaggttagcatgagaatgcaagcaccttgagggtagagacaactactgtgtacaggcactatactgggaactaggcaaaagataaaaagtagaatgaaaagtcacaagcaccttaagaaaaaaatacaattagtagaattaaaaccatgtcctttttcataattactcgatctataat

SEQ ID NO: 651232 - DNA, 579 bp, Homo sapiens
gaagcttccagaaaaaggaacagacagcaatatttgctgttctgcaatatttactgttctgcagcctccactggtgatacrcaggcaaacagggtctggagtggacctccagcaaactccaatggacctgcagctgagggacctgactgttagaagaaaaactaagaaacagaaaggaatagtttcaacatccacaaaaaggacacctacaccaaaaccccaactgtaggtcaaaaacatcagagaccaaaggtagataaatacataaagatggggagaaaccagagcagaaaagctgaaaattctaaaaaccagagtgcctcttcttctccaaaggatcgcagctcctcaccagcaatgaaacaaagctagatgcagaatgactttgacaaactgacagaagtaggcttcagaaggtcagtagtaacaaacttctccaagctaaagaagcatgttctaacccatggcaaggaatctaaaaatcttgaaaaaaggttggacgaacaactaactagaataaacagtgtagagaagaccttaaatgacctgacagagctgaaaaccatggcacaagaatgt

SEQ ID NO: 651233 - DNA, 579 bp, Homo sapiens
gaagcttccagaaaaaggaacagacagcaatatttgctgttctgcaatatttactgttctgcagcctccactggtgatacgcaggcaaacagggtctggagtggacctccagcaaactccaayggacctgcagctgagggacctgactgttagaagaaaaactaagaaacagaaaggaatagtttcaacatccacaaaaaggacacctacaccaaaaccccaactgtaggtcaaaaacatcagagaccaaaggtagataaatacataaagatggggagaaaccagagcagaaaagctgaaaattctaaaaaccagagtgcctcttcttctccaaaggatcgcagctcctcaccagcaatgaaacaaagctagatgcagaatgactttgacaaactgacagaagtaggcttcagaaggtcagtagtaacaaacttctccaagctaaagaagcatgttctaacccatggcaaggaatctaaaaatcttgaaaaaaggttggacgaacaactaactagaataaacagtgtagagaagaccttaaatgacctgacagagctgaaaaccatggcacaagaatgt

SEQ ID NO: 651234 - DNA, 637 bp, Homo sapiens
ccattccctgagcaatctaccaggggaataatggaagggtgactacactggaccatttccattacagaaaggattgtgctctcttcttattagaatagacacttcctctggatatggatctgccttccctacacacaatgcttctgccaaaaaaaaactgtctgtgaacttacagaatgcctttatctaccaccatggtatcccacagagcattgcttctgattcaagaactcacttcacagggaagcacacatgagcagtgagcctgtgctcaaggaattcattagtcttaccatgtcccccatcatcctgaagcagctagcttgacagaatrgcaaaatggtcttttgaagacttggttacagtgccagctaagtggcagtcccttgaggggctgggtaagattctccaaagtaacatatgtactctgtatcagagtctattatacaatgtttttttatccatagccaggattcatgggcccaagaattaagggataaaaataggaatgactccattcacttttacccctcgtgatccactagcaaaatatttgcttcctatctctgcaaattaagatgctgttaattcaagcatcttagttccaaatggagaaaagctttcgcgggaggacata

SEQ ID NO: 651235 - DNA, 529 bp, Homo sapiens
attcacctgtttaaaaaaatgaacttcaatctttatcttaccatacatgataagtaactcaaaataaatcacagactaaaagtgaaaactaaaacattaaagcctgtagaggaaaacaagctgtcagctttgcaaacttgaaatgmggaaagattccttaaacaagacaactaaaatactgataaattagatgtcatcaaaatttaaaacttcttcccatcaaaagatggtattaagaaaataaatacgcaagcaaaaactgggagaaaatattttaatacacgtatctgacaacggacttcatccagaatcaatcagaaccacatccagaaccacaaatcagtaataaaaagtcaaatcatccaaaataaaattgggcaaaatacataaacagatgtttcaataaagaaaatatatgaatggccagtaagtatctgaaaaagttcacaacagcattagtcactgggaggtgcaaattaaaatcacaatgatataccaatacatgcctactaaaatagctacaattaaa

SEQ ID NO: 651236 - DNA, 529 bp, Homo sapiens
attcacctgtttaaaaaaatgaacttcaatctttatcttaccatacatgataagtaactcaaaataaatcacagactaaaagtgaaaactaaaacattaaagcctgtagaggaaaacaagctgtcagctttgcaaacttgaaatgcggaaagattccttaaacaagacaactaaaatactgataaattagatgtcatcaaaatttaaaacttcttcccatcaaaagatggtattaagaaaataaatacgcaagcaaaaactgggagaaaatattttaatacacgtatctgacaacggacttcatccagaatcaatcagaaccacatccagaaccacaaatcagtaataaaaagtcaaatcatccaaaataaaattgggcaaaatacataaacagatgtttcaataaagaaaatatatgaatggccagtaagtatctgaaaaagttcacaacagcattagtcactgggaggtgcaaattaaaatcacaatgwtataccaatacatgcctactaaaatagctacaattaaa

SEQ ID NO: 651237 - DNA, 593 bp, Homo sapiens
tggcacaactttggaaaaacatttggcattacctaataaagctaaacctatgactcaactattcttttcttttgtatgtgcctgtatatgtatcaaaataaataaatgctwaggcccgccaaaagatatgttcaagaatctctataatacttcatgcataataggttaaaaatgaaaacaatctaaatttctgtcatctgtttaacatgtttaatatgcaaataaatcatggcatattcacacaagggaacatcacaccacaatgaaaaagacacattattaataattattaacaatacagatcaacatacagtagttaacactgggtgacagaaattagacacaaggagtatataacatatgactccttttatatgaagttttaaaacatgcaaaatgacccatggagacagaaataagaggagtgattatctttggtgagaaattccgactgggaagagacaagaaagagcctcctggagtactagcagtgttccatatcttgatcaggatgctgctttcaagggaacacacatatataaaaattcatcaaatccttcacttgagattacttcccttcaagttataccctc

SEQ ID NO: 651238 - DNA, 593 bp, Homo sapiens
tggcacaactttggaaaaacatttggcattacctaataaagctaaacctatgactcaactattcttttcttttgtatgtgcctgtatatgtatcaaaataaataaatgctaaggcccgccaaaagatatgttcaagaatctctataatacttcatgcataataggttaaaaatgaaaacaatctaaatttctgtcatctgtttaacatgtttaatatgcaaataaatcatggcatattcacacaagggaacatcacaccacaatgaaaaagacacattattaataattattaacaatacagatcaacatacagtagttaacactgggtgacagaaattagacacaaggagtatataacatatgactccttttatatgaagttttaaaacatgcaaaatgacccatggagacagaaataagaggagtgattatctttggtgagaaattccgactgggaagagacaagaaagagcctcctggagtactagcagtgttccatatcttgatcrggatgctgctttcaagggaacacacatatataaaaattcatcaaatccttcacttgagattacttcccttcaagttataccctc

SEQ ID NO: 651239 - DNA, 297 bp, Homo sapiens
cggaattcaggtcatccacccgccttgccctcctaaagtgctgggattacaggctgcaattatcttttttatccctgaaaacatcacttttcctttttcctggttcatttttatcaatacaacaaccacatgtgctagaacatccyattaaaaaaagaaaggaaaaaaaaaaaaacctcccaagataccataagccctctctccatctaatgccaatttttctgcctacattacaggagggggaaaaaaagttgtattcactgtctgcacttcctctatttccattttctcctcaaa

SEQ ID NO: 651240 - DNA, 444 bp, Homo sapiens
cactatacagaagacataattagaaaatgtctgatgctaaataatagctttaaaatcaaggctgggcaggtggctcacaactgtaatcccagcactttgggaggccaaggtgggcagatcatttgaggtcaggagttctagaccaccttggccaacatgatgaaaccccatctctactaaaaaagtacaaaaaattagccaggtgtggtggcacccgcttgtaataccagctacttgtgaggytgagggaagaaaatcgcttgaacccaggaggcagaggttgcagtgagccaagacagtgccactgcactccagcttgggtgacagagtgagaatccattctcagagtaagtaaaaagttaattaaattaaattaaggcaaaatccctgtggtattctttcccaaaactcaaaatctcactttaatcatgagaaaaacaaacc

SEQ ID NO: 651241 - DNA, 534 bp, Homo sapiens
gctaagtcagccacttagcatttggatctcaatcttgttttgttattattctttataactgatataattatagtgataaatggccaggaaaaaaatatataactrgttaaaataaaaaaatgattacttcaagatttgaaaatctgcatagatgcaagtaactttcaatacaaacatgagtctggaaagagaaaaagttgatacttgtatttctctacttgtatttttttaaaagtttcaggaaatatcacggatatcacagatattaaagatagattatgtcataatttagtctcaagtagattatatagagtagggatcagccaagtttttctgcaaatggccaaatagtaattattttaggctttaccataggctctcttatcatagctactaaattctgcctccatagtacaaaagcagccatacacaataagtgatcaagtgtagttgtatcccaataaaactttatttacaaaacaggtagcaggctgaatttcaacataagttcttactttgcaaatccttgataca

SEQ ID NO: 651242 - DNA, 534 bp, Homo sapiens
gctaagtcagccacttagcatttggatctcaatcttgttttgttattattctttataactgatataattatagtgataaatggccaggaaaaaaatatataactggttaaaatwaaaaaatgattacttcaagatttgaaaatctgcatagatgcaagtaactttcaatacaaacatgagtctggaaagagaaaaagttgatacttgtatttctctacttgtatttttttaaaagtttcaggaaatatcacggatatcacagatattaaagatagattatgtcataatttagtctcaagtagattatatagagtagggatcagccaagtttttctgcaaatggccaaatagtaattattttaggctttaccataggctctcttatcatagctactaaattctgcctccatagtacaaaagcagccatacacaataagtgatcaagtgtagttgtatcccaataaaactttatttacaaaacaggtagcaggctgaatttcaacataagttcttactttgcaaatccttgataca

SEQ ID NO: 651243 - DNA, 580 bp, Homo sapiens
agtgttcccatttatgaacactatgtaattctccgtttacatgggtcttccataattgttttcagcaatctgtagttttcagagtacagtgttaaattcatccttaaatttctcataattttgtatgcaacctttaaaaagctactagaataagttaattcagatcaatatgtaaaaatcaattgtatttccatatattagcaatgaacaattagaaaatgaaatttaaaagttcagtttcttttaaagaatccttaggaatccttaggttgtgtacaacatatcatctgcaaataaaagcagttttatttttccaatttttaataattatgggttccttcagaaagttcaagtgggaagatcatccttgctttgttcttgaycttacatagaaatcatagcctttgtcattaaatataatagctgtaaatttcctcctgatgttctttatcagtcagactgaacaactgaatgggttttgaatttcatcacatgctttttctgcatccactgaaatgattattttctcttccttattctgttaacatggtaaattacattgattttcaaatgttaaacc

SEQ ID NO: 651244 - DNA, 590 bp, Homo sapiens
gaattccctgctccactcctactcccattcacacacacagagtaggagtgaaaactgaatttggctaaccaaattcagtaggagtgaaactagacaagatacaaaggaacagtcaaacatggccagcaatagyatagtgtctgtgttcatttgctttgtgttgctataaaataatacctgaggcggggtcgttttaaagaaaaaaaaaaggtttatttggctcacagttcttatgtctggacaagttcaaaattgggcttctggtgagggcctcaggctgcctctgcccatggtggagctggcttgtacacagatcacatggtgagaaaggaagcaggagaaagaggcgggaggtgtgggatgcttttaacaactatctttaatcgagaaagaacaaatagagtggtaactaatagagtgagaactcactcattaccatgagaaaggcaccaagtcgatcacgcaggatctgctcccataaccccaacacctcccactaggctccacctcccagcaccaccacactggtgattaaatttcaacatgaggcttgtaggggccaaacagccaagctacagcagtgtctaaat

SEQ ID NO: 651245 - DNA, 327 bp, Homo sapiens
caggtttgttacatatctatacatgtgccatgctggtatgctgcacccattaactcgtcatcagttattttcttttgtatatttaaagcattattctaatgtctcctgaattccacagttctatgtagaggtcatcttcaagtctaattgttgctcatttgaaaggaatctgtatttttcctttggctggctacttttataattttatgttagaatgctagatgtttagaattmcttcatgttagaattcctcaatttgattatggtgtgattgggtttagatttcttatcttgctgtggatagatatcttccattagttttagaaa

SEQ ID NO: 651246 - DNA, 456 bp, Homo sapiens
tgctacacacaattcttctaaatgctgcctttttgaaatttaaaaatacttaggccacaattcctctaaaatttaaaaatactggaacaagactcaagcattcagaactgctttcaataggctgcacgtaagatatctcattttcacaccaatttcaatgcatttcaatttaagaatttcactggatggcttaattacctgggataaacacctgcattttytcatccataacacagatgcccactgttcagcatgcctttcctattttgctcattggcagactcataaacatcctcacagctaagtctttcacatctttttcctatttcatttcagcttctgcatacatctattatagtactgatctaattttatatgcattttggggtacgtttatctccccaaaaggtggcaaattttttccttttccttcctgtgttttcggactgtagtacg

SEQ ID NO: 651247 - DNA, 225 bp, Homo sapiens
aattcatcacaaaaaatcatcacctargcgcattgtcatcaggttatctaaagttaacatgaaagaaagaaccttaagagctgtgagacaaaaggaccaggtaacctattaaaaaaagcctatcagattaacagcagatttctcagctgaaaccctacaagctagaagggactgggaccctatcttaagcctcctcaaacaaaacaattatcagccaagaatttt

SEQ ID NO: 651248 - DNA, 467 bp, Homo sapiens
ttttagagataaatgaataagcacatgacctccartagtccaattcaagtttaaaagacccaattctagaatttctgtttttatttttgataaaaaacttttttttccttctagccttcaactggtaagttgagaaggcagaagcttctacctcatgaatgttaagccaatacatagaggagagcaaacaaaacctagatacagaacaaaagttttggggtcctacgcaagaatttgctgaagttaaaagagaaatgagctactattacacacgacatggatgaatctcaaaatcatcatgttgaaagaagccagacacaaaagagtaggtattatatgactctacttgcatagcattccagaaaatgcaagtgaatttatagtgacaaaaaagcagatgagtggttgtttgggctggggatagaggttgggaggcagcacaaaaaaaatattttggtgggatgata

SEQ ID NO: 651249 - DNA, 582 bp, Homo sapiens
tttgtctattttggtcaagattactttagctctttctgtcatttgtgggtccatacaaaattgagaattgtcttttctatttctgtaaaatatgtcattggaatttgataggaattgcatggaatctgtgacctctttggatagtacagacattttgacaatatgaagtcttctgatccatgaatactgaatagctttccatttatttgtctttaaaaatttccttcatcaatattttatagttttcagtgtacagatttttcatttcattgtttaaatttatkcctaagtagtttttaaaatgttgttatacatgggactattttctccattaacttttggatagttctttgtgtatagaaatgttattgatttttgtatgttgatttttgtatcctgcagatttactgagttttttaattagttataacagggtattttttgtgaaatcttagggtttctgatcatgtcgtctcatctgcaaacacagacaattttacttctttctttctgatttggatgcctttaatctctttctcttactatgacttctgacactatgttgaaaagatgtggtaaggg

SEQ ID NO: 651250 - DNA, 582 bp, Homo sapiens
tttgtctattttggtcaagattactttagctctttctgtcatttgtgggtccatacaaaattgagaattgtcttttctatttctgtaaaatatgtcattggaatttgataggaattgcatggaatctgtgacctctttggatagtacagacattttgacaatatgaagtcttctgatccatgaatactgaatagctttccatttatttgtctttaaaaatttccttcatcaatattttatagttttcagtgtacagatttttcatttcattgtttaaatttatgcctaagtagtttttaaaatgttgttatacatgggactattttctccattaacttttggatagttctttgtgtatagaaatgttattgatttttgtatgttgatttttgtatcctgcagmtttactgagttttttaattagttataacagggtattttttgtgaaatcttagggtttctgatcatgtcgtctcatctgcaaacacagacaattttacttctttctttctgatttggatgcctttaatctctttctcttactatgacttctgacactatgttgaaaagatgtggtaaggg

SEQ ID NO: 651251 - DNA, 571 bp, Homo sapiens
cttatttaaataatctttctgccctttttctctttctgttactctcataatatgaatgtacctcttttgacagtgttctataaatcccacagcctttgctcattccttttaattcctctttttaaattttatcctcaactggatagtttccaatgacctatcttgaagttcacagattctctattcagattgatcaagtttgttgtttatgctctctattacatttttatttcattcattgtatttttcatctccataatttatttttaacatgattttatctttttattaaactagttgttttgttcattttttaaaaatttcagtgagttgtctatgttctctcatagttcactgagcttacttaaaacaattattttaaattctttgtcaattcatrtatctgcctttatttaaggttggttagtggaatatcattgtatttctttggtggtatcatgttttcctgatttttttttttcatttcttgaagttttgcctttctgattttacatttaacatgcagtcttctcctccagtctttattgcctagttttaggagataaacagc

SEQ ID NO: 651252 - DNA, 617 bp, Homo sapiens
ttttgaatgaataattgaatgagcacttaaaatgaatgtgaaaatggccttgcataccttgaactagaatagtttcatttaagagaagtttagacactcaatgcagagctagttaatataaatattatgtgcaattttaagataccaggtgaaatcatgtttctgtgtaataaaaaaatccaagccatcagttatacacatgacaatgaagcatcccagcaagcaggtacactgacaacaaaaagccatagccattgagccatctaataattcaagttaaaataaaaaggcataatagtccaagtccccctagagtaaggccaaacagacagtcaatatctctaaatacatgacttaagttactgctgtctacaaaaactgatgaccctgaggataaaaaatttaaataaacayatattttattatccacaatttatagagatgtaaaagagcaatcaatgtatttgttaaagcttttccacaaaagttgtaaaactcaataacactccaagcttaaaagtttagattgtatttctacaaaataattttataggaaatatctttgatgctggataaattaaattgttccttgtatgtgttttgtatatataatgtac

SEQ ID NO: 651253 - DNA, 572 bp, Homo sapiens
ggggccagcaagtggatgctgtagctctttttcagaatcctcttgtaaaagacaaaatgataggtaaggagggacttaartaagaagctgatggaagttataaaataatagtggagttactctatagaggttcagtccacaagagatgatgttcaacgatatgtgaaatctaaagagaaggaagagttataatatacccatatatattttagcatggacaattagaagaatagcaatgccatcagcagaaatagggaagtcaggaaaataaatttatggaagtagggggataaatgataaacttagttttgactatttttagtttgatgggctggaaaaaaatgcaagagtgggacatttgtaatgcagaactgctatgtgcaatccttcacaatttctgtttgttgttctgatttattatgataggtgatttcaagctctccaaggaacatgagatgagatggtgaatgacactgagcatatgagttaatgacaataaaccagcaatgcattgcttaccagtctgatttataatctctaaaacagatttctgtagttttaaaaccacttgc

SEQ ID NO: 651254 - DNA, 608 bp, Homo sapiens
taaatttcttatttaattaatataattttatgaatagtggatgtgttaggagtaattgtgatgggctccagctgtgtgtgaagcaaagacaggcattgctatttaaatcaacaaaagtatgcttaaattcatgccaatctacacaaagaatagttggtggccacaaaaagacttcctagtctcaatcacagtatcattgcgaagggcatagcaaaaagatttttttaaatgaatttgatcaaatgatggacagtaagtgcattttttttagtgtgacttyataaggaagtaagtagtgatcaaaacatttcttttattatgtatcagccaggatccagtcaggaaacagaaaccagaccagtaatttgagcagggaaaatccaatgtaaagaattgttaactggtaattaactggtaaacaaggataaattgctaagaagcatgaatggaactctgaagaattcagcagtaacatataaagggagcagccactaactctagggctgtcatagagaaccaaagaaggaataaactctccctctccaccgaggctgagattaagaacccattggtgtgggtctggtcatagaccaccggatgacaaggaa

SEQ ID NO: 651255 - DNA, 608 bp, Homo sapiens
taaatttcttatttaattaatataattttatgaatagtggatgtgttaggagtaattgtgatgggctccagctgtgtgtgaagcaaagacaggcattgctatttaaatcaacaaaagtatgcttaaattcatgccaatctacacaaagaatagttggtggccacaaaaagacttcctagtctcaatcacagtatcattgcgaagggcatagcaaaaagatttttttaaatgaatttgatcaaatgatggacagtaagtgcattttttttagtgtgacttcataaggaagtaagtagtgatyaaaacatttcttttattatgtatcagccaggatccagtcaggaaacagaaaccagaccagtaatttgagcagggaaaatccaatgtaaagaattgttaactggtaattaactggtaaacaaggataaattgctaagaagcatgaatggaactctgaagaattcagcagtaacatataaagggagcagccactaactctagggctgtcatagagaaccaaagaaggaataaactctccctctccaccgaggctgagattaagaacccattggtgtgggtctggtcatagaccaccggatgacaaggaa

SEQ ID NO: 651256 - DNA, 571 bp, Homo sapiens
gatgtatagtttgcaaatattttcttgaataccgtaggttgtttcttctaccagcattttttcatagtaaaaagttacaaacaatatataggtaatagggcaatggagatgtcatataattgaataccatagagaagttaaaataaataaactagaagtggccgggagcagtggctcacacctgtaatcccagcactttgggaggctgaggcaggcagatcacaaggtcaagagatcgagaccatcctggtcaacatggtgaaacccagtctctactaaaaatacagaaattagatgggcatggtggagcrcacttgtagtctcagctactggggaggctgaggcaggagaatcgcttgaacccgggagatggaggttgcagtgagccaagattgtgtcactccagcctggtgacagagtgagactctgtctccaaaaaataaaaattaaagaaataaactaggggtacaaatttcaaaatgaaaaccccaagaataataatgcttaacagaaaaacaagtttcagaacaatatacatggtatattataattaaagtacacttgaaatagg

SEQ ID NO: 651257 - DNA, 605 bp, Homo sapiens
ctaacagctgtgtcagttctggtttattttgattaattgaatctttctccttattttggtttattkttctctacttctttgctaactggttaattttgattcaatgccatacattttgaattttatctttttgtggttgaacatttttatattgctacaaatatatttaaatgtttttctaagatgcagctaaattacttggcaacagtttgatcacccagatcttgggttttaaaatctgttaggaaaagagcagcctttaggctaaagctgattttgtgctaataatgaatcaagacattttattcaaagacctatgaattacgatgtttttcagtttggctggccctgtggtaacatcaactctcatttcctctactcctttttggatggttctttacctgatcttgcatagtttattcagtgctttgttgacaagtattttgttgaatacctaagggggacccacggcagacctttgaagttttctttctagtaagttcttctctctgtggttcttcaccttggtcttcctggactgtcaactcaagaggtccgctggtttcacacgggtactccctttctattccataccctggaaactc

SEQ ID NO: 651258 - DNA, 605 bp, Homo sapiens
ctaacagctgtgtcagttctggtttattttgattaattgaatctttctccttattttggtttattgttctctacttctttgctaactggttaattttgattcaatgccatacattttgaattttatctttttgtggttgaacatttttatattgctacaaatatatttaaatgtttttctaagatgcagctaaattacttggcaacagtttgatcacccagatcttgggttttaaaatctgttaggaaaagagcagcctttaggctaaagctgattttgtgctaataatgaatcaagacattttattcaaagacctatgaattacgatgtttttcagtttggctggccctgtggtaacatcaactctcatttcctctactcctttttggatggttctttacctgatcttgcatagtttattcagtgctttgttgacmagtattttgttgaatacctaagggggacccacggcagacctttgaagttttctttctagtaagttcttctctctgtggttcttcaccttggtcttcctggactgtcaactcaagaggtccgctggtttcacacgggtactccctttctattccataccctggaaactc

SEQ ID NO: 651259 - DNA, 448 bp, Homo sapiens
cttttatgctagagttaaaattgacttatgcaccaccattacagtgttagtgtgttctgaatttgactatattcatttctttacagtgagttttatgctctcatatgttttcctacgtttagttrgcatcccttcatttcaacttgagtaacttcctttagcattttctgtagcacaagtctagtggtgatgaattccttaagcttttgtttgggaatatctgaatctctacttcatttctgaaaaacaattttggcacgtattttattcttggtagcattttttgctttcagcactttggctatattatactaatatgtcttagcctaccaagttttgactgataaatccatttatagtcctacgaggggttcccctgtaagtgataattcacttttcttttgctgctttcaaaattccttatttttttcttttgagaatttcatta

SEQ ID NO: 651260 - DNA, 583 bp, Homo sapiens
ggttcccctgtaagtgataattcacttttcttttgctgctttcaaaattccttatttttttcttttgagaatttcattattgtattttggagaagaactctttgcactcgatctatttgaatctatttgggcaaactgagtattcattttcctttccagatttggaaagttttctatcattgtttctttaaataagctttctgcttttgtctctttctgctccttcttaaactttcataatgcatataatgcttctctggatggtgtttcttaagtcctataggatttcttcactcttttccttatgttttctattcgatcctctgactacataattttaaataacctgtgttcaagctcactgagtctttttttctgcttgagtaagtctactgttgaatcactctattgaattttttagttgagtctttgtattcttcagctccgcaattttcatttaattctttcttatgrtatctatctcattgttaagcttcacagtttgtttatgtgaacataaacaaattttgattttattttaattgtctgtcttcccttattggtcattatcttctttcagata

SEQ ID NO: 651261 - DNA, 409 bp, Homo sapiens
atacttttctctacctctacacatcaattarggtagacttctgtgggttgcagaaacctctaaatagggacttaaacaaataggaggtttcattttcgttttacatgacagtagtctgcaagtgagtattccagggccaatataacaacctgtattagtccattctcacactgctacaaaggatacccctcgagactgggtaattttgaaggaaagatatttaattaactcatagttttgcatgactggaaaggcctcgggaaacttacaataatggcagaaggggaagcaggcatgtcttacacagtggcaggtgagagaagtgaggtgcgagcaccagaaaaattgccatgtttacaaccatcatatctcatttgattcactcactatcacaagaacatcatggggt

SEQ ID NO: 651262 - DNA, 467 bp, Homo sapiens
gaccttctggttctcctaaatcttatttttcctgaaagyaacattaaaaacaatgtgtgctatccttgttgttgagacatacaactttctgctagaaatagggatttactaaacttgctaattattattatgtgagcaggtatattatggcatgcctggcaaattagacatcacctctttgtgggtccacaataacagaaaaattatattttagcacttacattccttttgttaagacatatgcacatttgtcagatgtctagtcagtagtctttctcatttttatagtatctctaatacaataacatattatctcaggaagtctgaattctagcaccataaaaaatccttctccctgtaaatatataatcttggatgtaaacttatttggtgaaggattactctgattaaattattttataagatgaactaaagatagttaaatgacagttgataaagtaatcttt

SEQ ID NO: 651263 - DNA, 467 bp, Homo sapiens
gaccttctggttctcctaaatcttatttttcctgaaagtaacattaaaaacaatgtgtgctatccttgttgttgagacatacaactttctgctagaaatagggatttactaaacttgctaattattattatgtgagcaggtatattatggcatgcctggcaaattagacatcacctctttgtgggtccacaataacagaaaaattatattttagcacttacattccttttgttaagacatatgcacatttgtcagatgtctagtcartagtctttctcatttttatagtatctctaatacaataacatattatctcaggaagtctgaattctagcaccataaaaaatccttctccctgtaaatatataatcttggatgtaaacttatttggtgaaggattactctgattaaattattttataagatgaactaaagatagttaaatgacagttgataaagtaatcttt

SEQ ID NO: 651264 - DNA, 528 bp, Homo sapiens
tgccgcatgacctaaacatctcccatcaggcttcagatccagcattaggacttacaattctacatgagatttgagtggggacaaatatccaaacttctctatctatctgtctgtctgtctatctrtctatatgtatatctatctatctatctatatatcaaaatagttaaaatagttattacagtgaaataaattattgcatccttcatctcatatagttactcttttttccaccccatgacaaaagcagatataatctactcatttagtgacaattctggatataatacactattattaactatagtcctcatgttgtatattagatctttagacatattgatactacatatctgctacattgcataatttgacttacatctcccattttctccctgatgacctgcctctggtaaatactgtgttattctctctgtatgcccttccccccttttttttgattcaacatgtgagtgaagccatgcgatactttttgtatctggcttgttttacttagtataatgtcct

SEQ ID NO: 651265 - DNA, 465 bp, Homo sapiens
ggcacctggaggatgcgtgagggtgagctccccctgccggctgtgcctctttctgcagggtgtgcagagcttcccaccctcacactccacccgtcattcatgcaaaacttactcttcaagaaggaaccaatgagcagattctcccctcagtgtctagtccatgaagagtgtttgcactttagcccatacacaaaattttagcccagagaagcagctcatcccaaacatgggctttgaaatctgcagaayctgaagtataatccggaccccctaccttcccctatcatctgtgacccccgcgcaagtttcttgatgcgcagggtgttggttttctcatctgcaaaatggaataaccccaggaggttgctgcggtaatagatgtaaatctggcacagtgcctgggacacagtagctatccaatggttggttcccactgtgactggctgagcgatgtcagtcagccca

SEQ ID NO: 651266 - DNA, 595 bp, Homo sapiens
cagttggggaactgagccgcattcctaaaaacactgtcagggaaagagtaaatactacatttcagacaccttacatatatactgactctcggaagtggcccacttgtaaatcagaagtatccaggattattcttctgaggtcaatcatttttcagtttggttgagaaacwgaagttaggctgaaactgaagttaggctgagtaatttctgcaacagtttcagagaccaaaatgaggagaaattcgcagacatgtctagtctacagattattcacctcattcatcctgcagattgttattttgtttatatatagacttacttgtttaaaaaaatgagccaaagcattgctccaagtgaaattttaaatgtgaacattaaaaaaaaaatccttttgggtaggcaggacagtagattttaacggagttcttctatgactcaatggaaagaatcagttctaacactactgtcaccatcccagtgttcagataaacatcattttaaacttcatgttttgcacatcttgtacttgtagagaagaaaaaggaaatggaaaagggagcttcaatctgaaggtgtgtggctgactttggcactt

SEQ ID NO: 651267 - DNA, 500 bp, Homo sapiens
ggaacttcattttttctctattctctgagaaaggtatgagaatgcataagtgagaatgatattccagaaggctggaaagatgaaatatataaggatctagattaagttacatatcggaaagaagttttccatcattcagaatgtgaatagggccacctctgaaagagctgagcatcccttacctggcacatattttagcagacaagaagactaccttctaggtatttagaagagaaatttttgcactgagggtcagagggrgtccatttcctctaaatttataacttatatagacataatctttaaccaaatcatctctatatcataaacaacacatcataacactgttttcaaagcgtgtgatctttctaacatggtttccacaggcaaccacaaataatttctttatgtttatcactattctaaggcaggaggatctcaggttcttgttcaaaatggaaaaacaaactgaattattgtgcaaagcatcttcacttact

SEQ ID NO: 651268 - DNA, 542 bp, Homo sapiens
gaggaattgtggcatattagatgttgaatccagtagtctctcttgagtaatctcagacactgatatgatttggctctgtgtcctcacccaaatgtcaccttgaattgtaattccccctagtccccaagtatcaaaggcaggaccaggtggaggtactttaatcatgggggcagtttcccccatgctgttctcgtgataatgagtgagtctcacaagatctgatgattttataagcatctggcatttatcctgcttgcacttctccttcctgtckcattgtgaagaaggtaccttggtttccctttgccttccaccatgattgtacatttcctgaggcctccccaaccatgatgaactgtgagtcaattaaacctctttcctttagaaattactcggtctcgggtataactttattagcactgtaagaacagactaatacagtaaattggtaccaaggcagtgggatcctgctataaagatatctgaaaatgtggaagccactttggaactaggtaatggacagaggttggaacagtttggag

SEQ ID NO: 651269 - DNA, 542 bp, Homo sapiens
gaggaattgtggcatattagatgttgaatccagtagtctctcttgagtaatctcagacactgatatgatttggctctgtgtcctcacccaaatgtcaccttgaattgtaattccccctagtccccaagtatcaaaggcaggaccaggtggaggtactttaatcatgggggcagtttcccccatgctgttctcgtgataatgagtgagtctcacaagatctgatgattttataagcatctggcatttatcctgcttgcacttctccttcctgtctcattgtgaagaaggtaccttggtttccctttgccttccaccatgwttgtacatttcctgaggcctccccaaccatgatgaactgtgagtcaattaaacctctttcctttagaaattactcggtctcgggtataactttattagcactgtaagaacagactaatacagtaaattggtaccaaggcagtgggatcctgctataaagatatctgaaaatgtggaagccactttggaactaggtaatggacagaggttggaacagtttggag

SEQ ID NO: 651270 - DNA, 542 bp, Homo sapiens
gaggaattgtggcatattagatgttgaatccagtagtctctcttgagtaatctcagacactgatatgatttggctctgtgtcctcacccaaatgtcaccttgaattgtaattccccctagtccccaagtatcaaaggcaggaccaggtggaggtactttaatcatgggggcagtttcccccatgctgttctcgtgataatgagtgagtctcacaagatctgatgattttataagcatctggcatttatcctgcttgcacttctccttcctgtctcattgtgaagaaggtaccttggtttccctttgccttccaccatgattgtacatttcctgaggcctccccaaccatgatgaactgtgagtcaattaaacctctttccttyagaaattactcggtctcgggtataactttattagcactgtaagaacagactaatacagtaaattggtaccaaggcagtgggatcctgctataaagatatctgaaaatgtggaagccactttggaactaggtaatggacagaggttggaacagtttggag

SEQ ID NO: 651271 - DNA, 569 bp, Homo sapiens
tagaggctaaaaatgatataattaaagccaaaataagtataatgaagaaaacaataaagacacaatcaaaaaccaaaaacataaaattgatcaacagtaggaaaaaattactatgacatgcattggttctctaaaaatatgaatgctattttttaaaccctagtaaaactactaaaaataaagagaataaaattaaactatcaatgtcaggaataaaagaggctctatagatattaaaagtttaataagactataatgaataagaatagaactccctctaataaatatggaacagaagttggascattagacaaattcaattctcaagttgtttttgtaaaaacgtaatggttttattggaacacaattatacccatttttatacatatcatctatgtttgctttcacactactcatatagccgatagagactaaaatatttattatatgttgttttaaagaaaaagttaaccaatccctttacccacaaaaatccacagctaatacattaagtggtaatatacattgaatgaattttttcctgagatcagatcggtaccagggcaaaa

SEQ ID NO: 651272 - DNA, 635 bp, Homo sapiens
gtacaatgtgctcatatattggaaaactcaaaatgataagaggtcaattggtttcaaattgatgtatagatttacacaaactctcccygcaaagaaaccacagcagtggttattttagaaattgacaagttgatccaaaaatctatgtaagaataaaatgtatctaaattaaccaaatatttttgaaaaagaccaaagttgggggacttataccatctcaagacttactatgaaattacaataaatgagacaatgaggtaatggtgcagagagaaataaattaatcaataaaatagaatagggatttttgaacaagaccaagctgtatatagatacaagcgttttaataaaggttccaaggtaattcaagggagaaaaggtagctttttcaataaatgggtatctctctagagaaagagaaaaacatgaacctcaaatcctacttcacaccgtgtataaaaactaattcaaaatagacttcagaccaaaatcagtgtatttgttaaaagtggagaaggtgtgtacagccaaagaagctctggtggatactctgccatcattggcagcctgaggtattctaggagtcatctaggcatcttgactttctgaacttctgctctaaccttacatgctaa

SEQ ID NO: 651273 - DNA, 530 bp, Homo sapiens
gttgtaattgagttatatatagggttcttattttgcacgtctctgtagagtagtagtttccatactgtgcggtatttgcctgttcacttgcctgttcctttgtgagctctcgagggccaggaacaaatatggatataaacatggaaccatgagcgaatagatgtttcttatcaatgctcggcctgtcttacgaggtgttccatagtggaaccacctgggaaacaattgattttgcattcttgtttgttagctaaatgcctgatttgctttttaggattcttttaggttaaatcatatgaaattaccattttgttgataatttcacatggttccatgtaataaaaagagatcaattttacagacttctggtttyaggtcatgcacagaggtgaagttctgcacaggtactgggcatcctatatgtatttccactaggttactatttccgagtgtgagtctctatttggaacttcagagagggagcctgtggcccagctactcctgtgtcactcagctctggagtggaattc

SEQ ID NO: 651274 - DNA, 564 bp, Homo sapiens
ctgctccatgcctgggtatgcagcttcccaagaatcacattaaaactatttctggttgttttcttttccgaacaaatgtgacattttcttcatctccttgattttgagctgaagaaggcaaactgtcaaaaataatgaggccagatggatttgaacactgaatagcagtctgaaacagtgctcagagactttgcctttacaatcattattacagaggcaatgagggaaagctccttggtggccatgaaatgaagagaaactgaaacagctcttaggggattagggaaagtcccaggcataggtagcactgacttgttcatgtatttattcactcagcattgtgtggagtgctagatgctgtgatgcaaagaaaaataagtcatggtcctaaccttttttggaatastgtttggaagacaaacatgtaaactgactcctgatgcttcagggtttctatataagaactattattccttcagcaaatatttattcctcctctattatattccagattcttttcaaaagacatcctgtatgaatacttttaaacacacactatctcta

SEQ ID NO: 651275 - DNA, 429 bp, Homo sapiens
gaattctttgttgtgaggagccgtattctgcatgtaggatatttagcagcatccctggccagtaagaccctcacttaaaattgtgacaaccaaagatgtctccagacattgccagatgccagatgcccctgtggagcaaaattgccctggttgagaactacagttytagtcacaagattctaaagttaaataaacatacacatgtctaaatgtttaccaacctcacatgtaggtaggcactgagacttacagggttgtactcatgttttgcttttcttctcccaatcctccttagtaataccattaggcttattctggaatagaaagaaaattttttgctttactattttttttttcctttttgaagttgtactttagaattttggatcctcataactccaattttgacctacaaatcaggatctctgt

SEQ ID NO: 651276 - DNA, 406 bp, Homo sapiens
gaattctttgttgtgaggagccgtattctgcatgtaggatatttagcagcatccctggccagtaagaccctcacttaaaattgtgacaaccaaagatgtctccagacattgccagatgccagatgcccctgtggagcaaaattgccctggttgagaactacagttctagtcacaagattctaaagttaaataaacatacacatgtctaaatgtttaccaacctcacatgtargtaggcactgagacttacagggttgtactcatgttttgcttttcttctcccaatcctccttagtaataccattaggcttattctggaatagaaagaaaattttttgctttactattttttttttcctttttgaagttgtactttagaattttggatcctcataactccaatttt

SEQ ID NO: 651277 - DNA, 633 bp, Homo sapiens
gccctaaggttgttgatgaaatgatcaatttagttttttacaccacaagatgtttcctcagcctgaactaactacacatactagacctgattcttccacatagattgcttgtgataattcaaaatgggaatcttgcctttatgtttaatagtttgaagtacctttcaacaatatttatttattgttttttgttttgtttttagagacagagtcttgctctgacacccaggctggagtgcgggggcatgatcctagctcactgcagcctcgaactcctgggcttaagcagtcctctcacttcagcccccacagcacctgggactacaggcatgctccatcatgcccagctagttattttattttttattagaaatagggtctcactatattgcccaggctgatgtcaaactcctggcctcaagcagtcctcccacctcagcctcccaaagtgctgggattataggtgtgagccactgtgcctggcctcaacaatttataatttggttttttaaaggatattgackattttaggctatatatgatgactagctttcaaaatgcttttctagcttatataaacaatattgaatagatgatttagtgatagagaactccacttaaattcagttcccc

SEQ ID NO: 651278 - DNA, 449 bp, Homo sapiens
tcaagagatgccgttcccctgccccgtgatctggggtctgggacctgcctgaggccccctggaaccaaggatggacaatggcccatctctgggaggcgcacgaggctgcagtagcctgtgcttagccattggaaaagcacagagacgcctctctctaataaatgccatggggaccctctgccccagtcccaggaggagsagccccagggtggtgtggccggtcagcagttgcggcgagggtagctcagtgccaagggctgcttagtgctggtcagtgggggtggctggtcagtgctggtggctagtcagtcctcatggctggtcagtgttggttagtgctggtcagtgctggtggctggtcatttctggtcagtgctggtaaatggtggtggctggtcagcgctggtggctgatcagtgctggtcagtgcttatgctggtcagtgcttg

SEQ ID NO: 651279 - DNA, 563 bp, Homo sapiens
atttatttatttatttatttatttatttatttatttattttgacgcagaatctcgctctgtcacccaggctggattgcagtggcgtgatctcggctcactgcaagctcagcctcctgggttcatgtcattctcctgcctcagcctccccagtagctgggacgacaggcgcctgccaccacacccagctaattttttgtatttttagtagagatggggtttcaccatgttagccaggatggtctccatctcctgacytcctgatccaaccgcctaggcctcccaaagtactgggattacaggtgtgagctaccatgcccggccttggcttgtcatctcttaactcatattttgatcattatatgggctattttttagggttatcatattatagctactttttatttgtttattttttattattatactgtgagctctgggatacatgtgcagaacgtgcaggtttgttacataggtgtacatgtgccatggtggtttgctgcacccatcaaccagtcatcaacattaggtatttctcctaatgctatccctcccctagccctcc

SEQ ID NO: 651280 - DNA, 581 bp, Homo sapiens
cagtttctgtgctcttcctctcccagtttccagagatgttctcrgcaccatgctgccattgcatgggggtgggagtagtgagggaggtttggcatcagtgattcaagactttttctacctcttcagtttctctttcagtgataggaatttaacaccaggaactacaagggttcacctgacttttggtttttataaagatggtttgtgtgtgtgtgtgtatgtgtgtgtgtgtgtagatagttcttaaattggtgtgcatgtttgatgattgctggagtcttctattctgccatcttcccctacctctccctgtaatatttcttatatgccaggcctggtagcaaataattttctcagtttttgtatatctgaaaatgtatttatttttttcttcatttttgaaagttttgctggatataagatttttgatttacaggggtattttttttgtttagttttgtcttactttcaccattttgaatatgttattttactgccttcagatcttggtttctgacatcaagacagctgttaatcttattttggttcatttgcatgtggcaagtgtttattttcttgct

SEQ ID NO: 651281 - DNA, 365 bp, Homo sapiens
acaaaccagatagtcaaattaagttaatgattctctcagagacccatgccactggctcagcagggttcaaacrttaccttgaataaagagtccttacaacatgtttgagggtggaatctgcaatagatgctgggaagtggtgaaagcaatctcccccctcggctgctccacgctgccgtcatgtctccttattccttccctcacccttgtactttatctctcgcaattagtcttatttcctcccctcttctcttattccctttcttttggagaaaatgaaatcataaaagtatctcacatttgctggaaccttccatgacgagaccctctgccaagcgctgcacgtccatagcctccctcaagct

SEQ ID NO: 651282 - DNA, 596 bp, Homo sapiens
gatgattggatacagtgagcaagaagtagcaaacacactgaacttattggtgagacatttgtatgccagaggatgggaaataaatccagctaaaatttagggactttctacctcggtaaaatttctagggttccagtggcatgagacctatggagatattccttctaaggtgaagcataacttgctgcgtttggcccctcttacaaccaagaaagaggcacaatgcctggtgggcctatttggattttggaggcaacacattcctcgtttgggtgtgttactctggcccatttatcragtgacctgaaaggctgccagatttaagtgcagtctagaacaaaagaaggctctgaaacaggtccaggctgctgtgaaagctgctctgccatttgggccacatgaccccgcagatccaatggtgcttgaggtgtcagtggcagatagggatgctgtttggagcctttggcaggcccccataggtgaatcacagtggagacctctaggattttggagcaaggccctgccacttctgcagataactactctccttttgagagacagctattggtctgttattgggctttggtggtaactga

SEQ ID NO: 651283 - DNA, 596 bp, Homo sapiens
gatgattggatacagtgagcaagaagtagcaaacacactgaacttattggtgagacatttgtatgccagaggatgggaaataaatccagctaaaatttagggactttctacctcggtaaaatttctagggttccagtggcatgagacctatggagatattccttctaaggtgaagcataacttgctgcgtttggcccctcttacaaccaagaaagaggcacaatgcctggtgggcctatttggattttggaggcaacacattcctcgtttgggtgtgttactctggcccatttatcgagtgacctgaraggctgccagatttaagtgcagtctagaacaaaagaaggctctgaaacaggtccaggctgctgtgaaagctgctctgccatttgggccacatgaccccgcagatccaatggtgcttgaggtgtcagtggcagatagggatgctgtttggagcctttggcaggcccccataggtgaatcacagtggagacctctaggattttggagcaaggccctgccacttctgcagataactactctccttttgagagacagctattggtctgttattgggctttggtggtaactga

SEQ ID NO: 651284 - DNA, 589 bp, Homo sapiens
cagacaacttcttcagctgacagctctgaagagagcagtggttctcccagcatgacatttgtgctctgagaatggacagactgcctccttaagtgggtccctgacccccgtgtagcctaactgggagacacctcccagtaggggccaatagacacctcaaacaggtgggtgcccctctggaacgaagcttccagaggaaggatcaggcaacaatatttgctgttctgcaatatttcctgttttgcagcctccgctgttgatacccaagcaaacagggcctggagtggacctccaggaaactccagtatacctgcagctaagggacctgactgttagaaggaaaactaacaaacagaaaggaatagaatcaacatcaacaaaaaggacatccacaccaaaaccccatctgtaggtcaccaatgtcaaagaccaaaggcagataagaaccacaaggagggggagaaaccagagcagaaaagctraaaattctaaaaatcagagtgcctcttctcctccaaaggattgcagctccatgccagcaatggaacaaagccggatggagaatgactttgatgagttgacaaaagta

SEQ ID NO: 651285 - DNA, 549 bp, Homo sapiens
ctttttcttttcaaactcttccttatgttagccatgaaatctagctggggctgtgtggtttctgattccccctggcttattctttactttttcccacttttccaggctcagcagggagctgctggatgagaaagggcctgaagtcttgcaggactcactgtatagatgttattcaactccttcaggttgtcttgaactgactgactcatgccagccctacagaagtgccttttacgtattggagcaacagcgtgttggcttggctgttgacatggatggtgagtacctttctatgaaggtgataaggatccactgagtcttctggttagggtcatattcctactgcaagtggccsttactgagctgagagatgtcattgccacagggaggacctataggcacatgtacgttgaatgaaactctagttccacttggaagaccagacaagggatgggtcagtgagcaaggctctcttcctagtctcaggccatgcctgtggcgccctaatcctactctcatgacattggacctgggcagatgtgacaaatt

SEQ ID NO: 651286 - DNA, 627 bp, Homo sapiens
atttcacccttggttctgagatgcaaaccaaagaatatcatgaccagctttcaggcctcctgaagtatatctstcacattgtcctgttctcatgctgaggagcctgagatccctgtgtggggattagacagtggactgttatgggtgtaggtgaattggcttattttgtctgtccctgtctgaatgtattgcaggaattaaaaaggaccaagaagaggaagaagaccaaggcccaccatgccccaggtaactgagcaattgtgaacatctacttctgtgttgacatctggagactcctggttcagggaaaacagagcgggctgacattatcgattacatcttttcaagcaagcctgaattattcctactaacattgctgttggttttcattgcagtagatatttaggtttccatttcttcctccccttatcatttactaacctactgtaggtggaccagacttcaaaaactgtattctcatggcgactgcatggaaacttgagcacattttatggaaaattattgagcacagtcttttcatgatccctgtatgctgtgtgtcctgagggcactaactcagagtgtcctgttactccctcatcagtgtgtcacctggacaattcactg

SEQ ID NO: 651287 - DNA, 398 bp, Homo sapiens
ctggaattctaacctcaccattctgaaaaccaacataagtcacaatggcacctaccattgctcaggcawgggaaagcatcactacacatcagcaggaatatcacaatacactgtgaaaggtattgtattggaatagtcatagaactgatagtccctccccctgagggaccatcataaatattctaaactcctcactttaatttacaagtgaagaaaccgggctccagagaggtaaactgcattactaaaggccacaccatgaccagtagctggaaccagaactgaggtctctgggtcctagtccaatactctttccagtgtaccgcaagccccatcaataatcacaggagctaatgtcaatgtcagggcataatggtgatccatttcatccatcatta

SEQ ID NO: 651288 - DNA, 398 bp, Homo sapiens
ctggaattctaacctcaccattctgaaaaccaacataagtcacaatggcacctaccattgctcaggcaagggaaagcatcrctacacatcagcaggaatatcacaatacactgtgaaaggtattgtattggaatagtcatagaactgatagtccctccccctgagggaccatcataaatattctaaactcctcactttaatttacaagtgaagaaaccgggctccagagaggtaaactgcattactaaaggccacaccatgaccagtagctggaaccagaactgaggtctctgggtcctagtccaatactctttccagtgtaccgcaagccccatcaataatcacaggagctaatgtcaatgtcagggcataatggtgatccatttcatccatcatta

SEQ ID NO: 651289 - DNA, 550 bp, Homo sapiens
cgtagaaccttcagtgtctgctatgtggcccattaggaaaataataaattaggaaacaaaagactttatagtgtctgttactagtgctctataaaggccgatataacatttggcaagtaccttctttttctatcagatgatgcttttaatacttcatgtcaatactttcagaaaaaagtgaaatcatttcattaaacacttctttcctatttctgatttttgagttgaaagctcttaattttgaggatttaacataagaacaagtcaagggaatagaaattatctagaaaactattagctagcatagagaaaaacaagacttacagccaaaagaagaatgtgcaaataatttgggaaatgtttaaatagaaatttaaaaatggggctggtggagtcatgttgatgatttcggakttaatcatttctgcgtattaaattgtttccagcattttctagctgaagttactgttgttgtcaactactcagcatccaaaattttcacaagaaaacaaggttttttctcttcaaattacagtccaaagagtggcaa

SEQ ID NO: 651290 - DNA, 318 bp, Homo sapiens
cctgtaggaaggcagaatgtaactgttctttttgtttaacgattaagtccaaatctccaagtgcggcactgcaaagagacgcttcaagtggggagaagcggcgataycatagagtccagatcttgcctccagagatttgctttaccttcctgattttctggttactaattagcttcaggatacgctgctctcatacttgggctgtagtttggagacaaaatattttcctgccactgtgtaacagctgaggtaaaaactgaactatgtaaatgactctactaaaagtttagggaaaaaaaacaggaggagtatgacaca

SEQ ID NO: 651291 - DNA, 606 bp, Homo sapiens
gattagctagacctgcccagcgattccagccctgagaaccagacagaatggaggtatagctgacagctggctgggagggggctgacggtcctcactgccaccaggcttagttggagacagattccccgggctgtagagagacaacagtagaagcaaagagaccagttaggagtctaggtgagaggcagcggcagcctggactaacatggtaacagtggagctattgagagtggtcacatttggaagatgttttgtaggaagtgtcaacaaagtttcttattgattagatgtagggaatgtgagaaagagaaggggggggaacacgtagattttgggtcaaagcaataaatattccattgacagaattgaracagcaagttggtggaggaggggaacggggtagcaagaagcgaatgtttcatattggacattttaagattcctatttgacatttaagtgtaactcttgaaaaagcaatggatatatgaagaatcctagactagagatacaaatttgccaatcatcatatagatgtggtatttagagtcaggggactagaaagaacaatgtaagggggaagtacagatagaaaaaggtctaaggctg

SEQ ID NO: 651292 - DNA, 530 bp, Homo sapiens
ccccgtcatcgcccatgaacaaagtggccatggtggcagggatggaggttatgcatgggctcagcaacatggacttccactcaccaaggctgatctggctatggccactgctgagcgtccaatttgccagcaacagagaccaacaccgagccctcgatatggcaccattactctgggtaatcagcccgctacctggtggcaggttgattatattggaactcttccatcatggaaagggcagaggwttgtcctcactggaatagacacttactccagatataggtttgcctatcctgcatgcagtgcttctgccaaaactaccatccatggactcatggaatgccttatcctccatcatggtattccatacagcattgcctctgaccaaggcactcactttacagctaaagaagtgtggcagtgcgctcatgttcatggaattcactggtcttaccatgttccccatcgtcctgaggcagctggatgaatagaatggtggaatggtcttttgaagtcagaattacaatgcc

SEQ ID NO: 651293 - DNA, 530 bp, Homo sapiens
ccccgtcatcgcccatgaacaaagtggccatggtggcagggatggaggttatgcatgggctcagcaacatggacttccactcaccaaggctgatctggctatggccactgctgagcgtccaatttgccagcaacagagaccaacaccgagccctcgatatggcaccattactctgggtaatcagcccgctacctggtggcaggttgattatattggaactcttccatcatggaaagggcagaggtttgtcctcactggaatagacacttactccagrtataggtttgcctatcctgcatgcagtgcttctgccaaaactaccatccatggactcatggaatgccttatcctccatcatggtattccatacagcattgcctctgaccaaggcactcactttacagctaaagaagtgtggcagtgcgctcatgttcatggaattcactggtcttaccatgttccccatcgtcctgaggcagctggatgaatagaatggtggaatggtcttttgaagtcagaattacaatgcc

SEQ ID NO: 651294 - DNA, 643 bp, Homo sapiens
ccatagacttttgattatgagttaaattgattaaacctgttaaaatacaagtgtaggaaaaataaaatgaaaggttgatgacagtaataatataaattccttaattgcagtcaccatcttagaattatgtatgtacttttggatgtagctttaataaacggtatctgaattttaacaatcacccagtatttaatgttcgagacctctgttagacttcctgttcctccataagccaaatacattttattactttatgtttcttattttatattttattgataatttttttcaaatattttaaatagaggttatcaaatttaactatgaatatatactttaaaaggaaatataatatatgaagccaaatgtctttgttttaatgcttctcttctctggttagttttaaaatagctgtatattttttcaattgcttgtacaaagaaatttaatgattcattgaagctaattagagaaaaaaccttcgccccaatgactgagatttccttctatcatttccacatatttagttttatagatttttgaattcagctttaacccacaagcaaattaatcactgtgatttaattctgtcttaatgtgmcttatgtgaataatgctttctctaatataattgtggcattaa

SEQ ID NO: 651295 - DNA, 598 bp, Homo sapiens
aattagttcaaccactgtagaaaggagtttggagatttctcaaaggacttaaaacagaactaccattccatccagcaatttcaattactaggtatatatgcaaaagaaaacaaatcgttctactgaaaagacacgtacacccatatgttcattgcagtgctgttcacaatagcaaagacatgggatcaacctaagtgcccatcaatggtggattaaagaaaatgtgatacatatacaccatgggaaacyatacagccataaaaaaaacaatgaaatcgtgtcctttgcagtaacatggatgcagctggaggccattatcctaggtgaattaacacagaaaaccagaggtgtttccacttataagtggaaacaaaagattgggtactcatggacgtaaagatggcaacaatagactggggactactagaggagacagggagggagaaggacaatggttgaaaaactaactattggatagtgtgctcagtacctgggtgacaagatcattcgtttactgaacttcagcatcacacaatatacccaagtaataaaacagcatgtgtacccctgaatgtaaaataaaagtagaaaagaataa

SEQ ID NO: 651296 - DNA, 370 bp, Homo sapiens
ccacaatgtattaatatttatctatttcaacattaatgaatctttgagtaattttcagtttggagctatacccactgtatatatgctatacccactgtagttcacaagattcgctgcatatatacagacatttctcttgcatatatatctgcaagtgaaattcttgggtctttgaatatatgcatgttcaactgttacaatatagccagatgattttccaaagcacctcactcccacttsgtatgaaacgactcattctttttttttttttttttttttttttttttgagatggagtctcgctttgtctcccaggctggagtgcagtggggtgaacttggttcactgcaacctccaccttccaggttcaa

SEQ ID NO: 651297 - DNA, 642 bp, Homo sapiens
gcttgtacacatatcataatgtttggaaaaaaatcagggctttaggcaatacacctcttcatagggtacatattttgatcaagctttatattcactgtggacccagtggatatgaaaatgaaagtcttttctacaaaaagaagcatattaaaagttactacattatggatattgctgaaaataagtgcctattctttgtctgtctgtctggccatttatgccactgtgtttcaattagaatatgaattggctaatacrggtgttatgcacaagttatttaaattcagatcttctacagaaggatgctagctaatccatggagtaattaggattatttccccgtagagctcttggtagcttgagttggagcagtgaattctgaataggaaaaagcaatgtaacttgttatctgggttagaggttcagataacaaatgtagtttgcaattttttttctgtctttaaattgcactctacaaaaggaaatggaaatggactatgtaatcattcatgtataaaatctatttagaataagggcccaatgcttatgaaacagagcttattactgttttgtggtttctatccagttgcctgatatggtactacctgtgaaaattaagcagctattaattattgattatgg

SEQ ID NO: 651298 - DNA, 463 bp, Homo sapiens
gaatatatttttaaggtaggaaagaagtcctatatgacagagtgtagagagcagaagacagatgctcaaggtgagtctgaagaggtaggcaggggtaggttgtgttaaggagtttgggttttattctaaaggcagcaagaaattattgaagaaggatttaaagcatccccaatttggtttgcttgtacacatatcataatgtttggaaaaaaatcagggctttaggcaatacacctcttcatagggtacatattttgatcaagctttatattcactgtggacccagtggatatgaaaatgaaagtcttttctacaaaaagaagcatattaaaagttactacattatggatattgctgaaaataagtgcctattctttgtctgtctgtctggccatttatgccactgtgtttcaattagaatatgaattggctaatacgggtkttatgcacaagttatttaaat

SEQ ID NO: 651299 - DNA, 621 bp, Homo sapiens
aaatctgggaattgatcattggattttgcaatcttagggtcactggtgacctttagcagatttgatgtaatcttgggggcaaacgctcttacaaacccctaaacctcagttaccgcatcggtaaaatggggtagtaatattattacgtatcttataggattgttgtgaaaacccgataaattaattcatataaaatgctccaaataatgcctggctcattgtaaatgctaaataaatatttgctgttgtttctagaaacctctattcaggtgctcattaattgtcagtcataatcttttggtaaggtcctgcaactaattaagaatctacctaactgaatgagcatccagtcttccctgctaggctattattgaagatctttttcagcrcctcaccaaagtatagataaatctgaaaaacatgttaactctattaagcaagaaatgaggttatcaccgcatgacttctgcaggatcatgtgctgactcctcttatttctggatgcttatccattctaaatcttgtccaggaatgcttagttcactggtctcctattggaattcaccatattttcatattcttatttgaaaactacagttgggtttgccttatttctagtct

SEQ ID NO: 651300 - DNA, 529 bp, Homo sapiens
aaaaattctcatttatgctttgagataccggcagctttttaaactaaatccaacatagtggtttgagctgatgaccacctaaaagtttcaagaacttatcagagcaactacgaaggtatacttctagcttatcaaatatcttagcactaatttctttaattctctagagctgatgcaagcctatccttcttgtcttccttgcatcatttatttttctrtctccccttattttccttctataccatccacttgcaatattttctgctgaaacattttgaaatgcttattgtatgttactttagcatatatgaagcattcgtacaatatttatcaatatatggcctttgtcattcttaaagcttgtgcaagtctataatggtgagaagaataccttgtctatgcctctaatttatacattgacaaaaaatgccagcactgtaaggacttttatctgatttttccaagtcgtgtttttcttaatgtgggaatttctttcttctttaattttatgtcagagagcactcaacca

SEQ ID NO: 651301 - DNA, 415 bp, Homo sapiens
aatgccaggggcaagggctcatagcctgattccagaaagctgttcttaaggtgttctgacatgtatctggtaaacaytacataatttttgtttaagttatgtttatggaatcatgtaaaataaaatatgctccccttaaatagccatgtttcaactgggcatggtggctcatgcctgtaatcccagcactttgggaggccaaggcagacggatcacctgaggtcaggagttcgagaccagcctggccaacatggtgaaaccctgtctctactaaaaatagaaaaattagctgggcgtggtggcgggcgcctgtaatcccagctactggggaggccgaggcaggagaattgcttgaacccaagaggtagaggttgcagtgagctgagcttgtgctaccgcactctggcctaggcga

SEQ ID NO: 651302 - DNA, 418 bp, Homo sapiens
taaattccaagtggaatcatttatctgagcagcaagctatctttaacaagataccctaaattctctcgaaagtagtcaccttaaataattacaaacatccactacagagaattctatcttctctctaatgcctttttttycctcctatctgcaatcctatcacccctaccctctacacaggcattttggagcctggaggaagaaaaaggaaattaatttgtttatcaggtagacttgaaaaataagtgattttcctttgaaggtctctttccttcctttcactgcattgaatttagtgcccttccttcccaacttttcccccacttgttaatacattgcctcctcccagggcagcatcaataaagagacctagagatcctgttttgcatttgtttaccctcagccacaactgggaata

SEQ ID NO: 651303 - DNA, 621 bp, Homo sapiens
aataaataaaatgcaatatgtctgtatcaatttcctactttttaattaaataattgtgcataaattagtactattacttttttcagttttaaaattgaatttccataaaagtaagttctttttaatrttctaagaagtcaacttaactcttagaaatatgttcttttcaatgtctcattgatggctgcattcaacactattttttagagattgtatttgctccagaggagttcttttgatgaaagagatcaagtcatataggaatgttcttccctctctatgagtgtaagctgtgtgggtcctttcaaaactttaggtctcagtgaatcatcacatgagaggtaggtaagctttattctgcgacttcatcagagcatattaatttcatttgatgtgcttatcaaaaattcaaatcttttgcttgactttcatgtctcataattcagtaaatcattctacttatgaaaaacctgtaattagcaaggtcctagtgagataaaaggatgtagaaccacttgatgcctaactcgagtaggggagcaacaacataaatatggagagcaatggttttcataagagctttgaggcagaggagaaagcttttggattatagtagagcat

SEQ ID NO: 651304 - DNA, 621 bp, Homo sapiens
aataaataaaatgcaatatgtctgtatcaatttcctactttttaattaaataattgtgcataaattagtactattacttttttcagttttaaaattgaatttccataaaagtaagttctttttaatattctaagaagtcaacttaactcttagaaatatgttcttttcaatgtctcattgatggctgcattcaacactattttttagagattgtatttgctccagaggagttcttttgatgaaagagatcaagtcatataggaatgttcttccctctctatgagtgtaagctgtgtgggtcctttcaaaactttaggtctcagtgaatcatcacatgagaggtaggtaagctttattctgygacttcatcagagcatattaatttcatttgatgtgcttatcaaaaattcaaatcttttgcttgactttcatgtctcataattcagtaaatcattctacttatgaaaaacctgtaattagcaaggtcctagtgagataaaaggatgtagaaccacttgatgcctaactcgagtaggggagcaacaacataaatatggagagcaatggttttcataagagctttgaggcagaggagaaagcttttggattatagtagagcat

SEQ ID NO: 651305 - DNA, 621 bp, Homo sapiens
aataaataaaatgcaatatgtctgtatcaatttcctactttttaattaaataattgtgcataaattagtactattacttttttcagttttaaaattgaatttccataaaagtaagttctttttaatattctaagaagtcaacttaactcttagaaatatgttcttttcaatgtctcattgatggctgcattcaacactattttttagagattgtatttgctccagaggagttcttttgatgaaagagatcaagtcatataggaatgttcttccctctctatgagtgtaagctgtgtgggtcctttcaaaactttaggtctcagtgaatcatcacatgagaggtaggtaagctttattctgcgacttcatcaragcatattaatttcatttgatgtgcttatcaaaaattcaaatcttttgcttgactttcatgtctcataattcagtaaatcattctacttatgaaaaacctgtaattagcaaggtcctagtgagataaaaggatgtagaaccacttgatgcctaactcgagtaggggagcaacaacataaatatggagagcaatggttttcataagagctttgaggcagaggagaaagcttttggattatagtagagcat

SEQ ID NO: 651306 - DNA, 577 bp, Homo sapiens
tttgcttgactttcatgtctcataattcagtaaatcattctacttatgaaaaacctgtaattagcaaggtcctagtgagataaaaggatgtagaaccacttgatgcctaactcgagtaggggagcaacaacataaatatggagagcaatggttttcataagagctttgaggcagaggagaaagcttttggattatagtagagcataatactaatgatgagcagaatttttggtagacactttcaatagaaatgacagtttagacagaaagggcagaatgaataccagcatgccgtttagaaatatagyccatatcctaggaatgcccagtagtgttgttcatgtcagtgacactgagtgtagagaaacagaagttagggttgaaaagatacaatcatgaaatactggtttttagagggtgatctcaaaattagctggtctaatctaattttataaatgaagaaaatgaggagcacaattgtttggagtccagtgcatggctcggattttctcgaattccattttgtctcttcaaaatgttctgtctatgtgtcatactccagagagccctaatcaca

SEQ ID NO: 651307 - DNA, 640 bp, Homo sapiens
tcttgatcaaaatgatttgtttcaagcatgtctcatataatactttaataattgaaagaaagaaatggtttcaggtagaattcttaaatatgtctttttatagatttgggaaatatgtttttctaacagattctcaatttcagtaccaactatacataaactaatacatttatctctaaagtcattacgcttcaatttatagtcttccttttttacatcatgattccagtgttcttttttggtcacaagaataaagccaaagttaaagcaaggataaaaagaatcattttattaatgttggcgtgcatgtccctgatattccttattgcactgctttttattttcagtttctcattaccattttaaattaaggacaaagatatttaacttattcaatataatgctttaatgaaaaccaaagagctaattccaagtagcaccatatactcagctactctgaatgctcagcraagctgacaattccatttaaggggaacctttttttttcgttatttgggctgtggcttaaagactatattaggtaattcaaatgtttctattgcaataattcctaattaaaatattcaaggagatggaggtaaaagaaacagagattaaatgttaaagtcctggtactact

SEQ ID NO: 651308 - DNA, 579 bp, Homo sapiens
ctctatattccttactatcctcgtctctgaaatggaaaatagaattgtgatcgaatctgaaagtatcattatttaattgatacctgaataaacctaaattttcttcttcttcagagccgaatgaagaaggaggatatttttcacctggattaaagttatttaactattcaataacagttttaagctgtcttgtgaccacttgtctttactatttgaaaacaatctaacctggatgatagagccaaaggcggttgtcttaagttgttttggagatgattagcctgtacagtatatacaaacttttcctattgtttaaacaaaakaaatcatagataactatttctttccagaatatcatcttagtttattactttagcattcaatttcactaactgaacctagatccatacacaacttaaaagagaatattttctttgcaatatttgtcttgtagaaactaacaacaaacaaaacctttttcttgctgctgttaagcaggggaaattctggcttgcaactccattcccctctcaataggtacccccagttcaaatatgcacatgttgcaagaaaaggcca

SEQ ID NO: 651309 - DNA, 545 bp, Homo sapiens
aaaaaacaatcacatgtgtaaagtagcatgttgtttgagttgtcgcacaggctaagcaagaaactaaatcattgaaagttcgaacatggctaaattgcaagtctagagaacattctcacactgaaaaatgcttgtttataaaatttataaagtaagaatggggacctggactgcatttcaaatttaatatgattatttagaaataaaaaaatttaaattataaattgtatgaaatccttcaaatgcaartattttaaaattgcagtattggagggtacagtatgctgcaaatcagaaagaacatgtctcaaaggcaagatttttaaaaatcaatttagattaattggaaatagttccagtaaaattcttggacacgtttattatttagtatgcatcagagcttagctatttaaaaattattaagcacggcatttattgaataatattgttatttttatgttaaatagctgatttttttctctgaatgaaccatgccttatctgaaagatttagctgtaactttactattttaagaaaactaacaa

SEQ ID NO: 651310 - DNA, 513 bp, Homo sapiens
agctcccccaggtgatagtattaggaacaggagcctttgggaataattaggttatgaggatgaaacccacatacatgagattagtgtccttatgaaagagattccagagagctagctatccccttctgacatgtgaggacacagtgaaaagtcaccatctgtgaaccaggaaacaggcttttactagacactgaatctgatcttggacttcccagcctttagaactgtgagaaatgaatttctgttctgtataaamtacttcatttattgtatttgttactgcagcctgaatgaactaagacatgattctatcctatgggttcccgtaggaactgacatatataatccttgaaatgacctttgcccctttgccttggtatgacatttacattacatttccttaatccttcactccctctgattaataaactcataggtgaaatacattttaaggtattgtgttaatatgataacatagtagtgtaaaggtattttctagattagcaaagaaaa

SEQ ID NO: 651311 - DNA, 606 bp, Homo sapiens
tttttaatattttaacctgctaaatccacatttcaaacaaaattcaatgagaattacaatatataaaccaaatctatgcagtgaagcagggatagagggcttggtctccatctgtttgacaatgcccccccgccaccaaacatcttccttcactacttccaaataactttatggtttagtcaattaccatttaatttgaacttgacttacctagaccactattagttgatattagcttaacagagggaaaattgtaaataaagtagatgtaataattaaacacctacatcattccttcattccggatctatcaatgatttcatactttgactatatctaaattatcygtttttcctggccttcaaggtggtctttagttcagccctgctttccatgggttaatcaaattccctacaatgctgagatgtttatattggtttcctcctgtcctatgaagttcgtactgatttctgccacaataaatttgattagacgaacccattgtttcttgagtgtcatctctttttcttttttcctctaagatcaagtgtagttccattcttgacttatgtttttaaccccattgcttgttaaactcagtgaatt

SEQ ID NO: 651312 - DNA, 587 bp, Homo sapiens
tagcagttcaaattcctacatgtttaagtcaatctgatcctctctaaaatgtacctttctctaagcagtttgaagaagaattagcccctatccaaaaacaaaacaaaacaaaaaaaaggttgtatcctaaatgttttactctgccatcatctgttctatcaagggcactttgccactttgttactttgtcctgtgaaagaaaactagaaaacttgtttgcaggcacagtttgctgactcctaagtcacttggcttcaatggtcaagctccttacatgccctgtacacagcttgcccagctctcactgctattttggagcattatttttgctagattctggaagtcatcagttccaccaggaacaaaatatcaggccgaggggccaatgcagccactgactgaggactgcagatattcaaggcccgtgttctgacttgatgggtcttaatatgccaaagagaaatgraagaagcttcattgcttagttggaaaatattgagagacacgagcttttgaaaattttgtatcacataatttctttaaagttttgctttcttatttgaaatatatttattccttgatgtcaa

SEQ ID NO: 651313 - DNA, 621 bp, Homo sapiens
tggaagtgggaaaaagatttaatagcagcaattaagtttgttcacatgagcatgaaataaatggaaagaaygggaaattaaaatataaggtaagacacacacaatcagattagggtttcgaatccgacatggagtaatttgaaatttattcattaggtaagagaatcttgatttttcttgggaagatctgttttgtgtctcatgaagattaacatggcagtgatgtttgggatggtttgaaggtggcttctgtaatagctatttatttttttattgacttacttatttttgagactgagtctcactctgttgcccaggctggagtgcagtggcacgatcttggctcactgtaaccttcgcctcccgggttcaagcaattctcctccttcagcctcccgagaagcttggattacaggcgcctgccaccatgcccagctaattttcgtatttttggtagagatggcgttttaccatgttgtccaggctggtctcgagctccagacctcaaatgatttgcccaccctggcctcccaaagtgctgagattataagtgtgagccaccacgactggcctgtaacagttattgacatggtttggctttggctcggtggccccacccaa

SEQ ID NO: 651314 - DNA, 685 bp, Homo sapiens
tggggttaggaagcttctttaattagagtctcaactctttctgttctggaaatcctaacctcaattagtctagtctctttatttagactgtttcatttgtttcctaatggatttaggtgggtgatgaattggatcaaagttgcaacatattacttcctggtataaaatgtattttatatgctgaattctgtgccacaagaaagctgcaactttgatctgaaccataattcctgacttcatgaggaactgtgtgcaaattatgtacccttactttcacatacctgcataatctctttcctgtcagcttcagccacgctctgtccaatctcactccaaccaatgcagaatgacgtcaagctgctgggagaacattgctgcgcagttcctgtcagagaagccctactgctcagtaaattcttggcagtgctattccttggtgccttgataaccataaactgctgttgtgtttaaaacaattattgcattctgcaaaattcttagtcgtattggacaatatttcagtcttacttttctgctcctctcttatcacaccctcaattctargtgtgctgacaaggcactgagcaagggaatgggaaaatactggaaatgtagcaagaaatgcaaggagctgttctgatctcctaatttctgtgcacctgcatttgataggattactctctct

SEQ ID NO: 651315 - DNA, 435 bp, Homo sapiens
tgagcataaattccttatctgtaagaaataaggataatagtatgtatttcatagagtggttatcagtaacacagagataatacagaaaaaatactttgcaaaatgctgtagcacatagctgagagttaataaatgccattattattgccattattacttcttaacctatattcaaattgatggccaaaatgtttattaggggtgacrcaaggccagacactcttaacatatatggcttgatagttttcctattggtgtggatcagtttaataacaactcatctgggcattttttcaaatagtaattgcactgatatccagatatccagatattttttttttctccattttgctcacgtagttattctgagagttttcagtaggcagtgaggatttataagtgaatacagactgttattgtttgcttcttaggtac

SEQ ID NO: 651316 - DNA, 614 bp, Homo sapiens
tctcataggcattttaaagcttatccttcatgaatgttgtttcaggattctgatagttgttaaactaatttggcgtttttaattgataagaagacagatgcaacaattmtatctcaagatgcagactgtatctcttcagaacctgagatttagataagacactcagttaaataaatggtcagaaatggaaaataattttatgctagcccaggacatacaagtacaagcactgcttgtcaagtacctactttaaactattggcatataaaacaaagtatggaaaaatgtattgcatactatatgccatgtgttacttgagtgaattttagaaaccttattttgtttgcttttcaaaacaacctcatgatgtagaatgacattattgacattttatacacaaacaaactgaagttcagagcaattaagcaacttgcccaagacatttatgtaagtcagtagcagagtctagattcaaactatggtatcaaatatttcattaggtattgctgccatgaaaaaaatgtgaaacttatataaatgaatcaaatacaacatacatatgaatttgatatctcataaattagtatctgcagttaatttcatttttactaaat

SEQ ID NO: 651317 - DNA, 600 bp, Homo sapiens
ctgatatcttttccagccctggtatagtattgctgggcctattagagatacctttctataaagttcaacacataatcacacatagagttctgcctgaatatagagatattaaacttayatgatctatctacttgtcctcagggtcaaaaacagtctctctctctctctctctctctctcttcacattcttctccaatcccctcattgtgtaaaatgacttgcaacatagttcttcaaagattgatggagttcacattgtatatattttacaggaatattttatgcatagctaaatgtttgttcttaaccaatcaggtacactacaataatttctctacttcctaagtctttctcaaaaaaaagtctaggactggtatcctggaaatcatttatttttaacattgttcagtttgctactctgtcttatcaaggtgtgactgagtagaatagaaatgcttggtatctcatgtgactactcttgtggctgatgtagagcgccaggtatgatataatccatagttttgtccttgctgctccactatcatgtacatttcagatgtgatatctttgatatgcctttagaaattaaattgtggctct

SEQ ID NO: 651318 - DNA, 600 bp, Homo sapiens
ctgatatcttttccagccctggtatagtattgctgggcctattagagatacctttctataaagttcaacacataatcacacatagagttctgcctgaatatagagatattaaacttacatgatctatctacttgtcctcagggtcaaaaacagtctctctctctctctctctctctctcttcacattcttctccaatcccctcattgtgtaaaatgacttgcaacatagttcttcaaagattgatggagttcacattgtatatattttacaggaatattttatgcatagctaaatgtttgttcttaaccaatcaggtacactacaataatttctctacttcctaagtctttctcaaaaaaaagtctaggactggtatcctggaaatcatttatttttaacattgttcagtttgctactctgtcttatcaaggtgtgactgagtagaatagaaatgcttkgtatctcatgtgactactcttgtggctgatgtagagcgccaggtatgatataatccatagttttgtccttgctgctccactatcatgtacatttcagatgtgatatctttgatatgcctttagaaattaaattgtggctct

SEQ ID NO: 651319 - DNA, 610 bp, Homo sapiens
atctcttcccattctaattctcttaagtctctctactccttgaatcccttttgcacttaagactctgaagcacagaatttaattcttttgtatctttggtttaacttcaagtagatggcataattctgaagaaccaactaaatctctcaatgtgcttttgtgatcagagtagcaagtgcaatgtaatgtaaacatactaatattgattggggtgttactacttaaaaaatattcagaatatcatagcatattatattgtcaaatatatgaaaatttttgttattttactttccaaagattatttagaatataagttttttgagttcttagagaaggaataattgagccatagaaaaataaaatgatttgagcaagaactcattgcagatcatcgtatttgggattgtacattgcaatttcttagttgcaagygttttaaaataaaaacaatctctccccttttcttagattaagcatacattactctctaacacaaaacaaaaaggaaaaacagaagaatgacaagacaataaaacaccaacatgctcagttattcaatacttgctatgacccaaatatttctgttcccccaaagttcatatgttgaaaa

SEQ ID NO: 651320 - DNA, 593 bp, Homo sapiens
tgggttcccaaggctcagatcaacactgcctccatgggtttgctggccacagaccatataacaactctcaagggttggagtcaagtacctgtggatctcccagaatggagttgcacactgatggctttatagttctgggctctcagggcagccccacctccatgtctccattakatacatggcagccttgctctcgtgattccactaggcactgccctgatgggagctttctgcggtggttccacccctgtggccattctatgcctaggctgtgaggtactctgaggcattctttgatatctaggtagaggtagccatgtccccatagctcatgtactcaacacacctgtgaggatggcactgcatggataccaccaaggtttacagcttgtgctttccagacggtggcccaagctgcaatctggactcattgagcaatggctgaagcagccaaggagtgatgcaccagaaggtggggagtgaagccttgaaatagttctgtctccaaggccctggctttctgggtttgtgatgggtggagcaacttggaagatctctgaaatgcctttgagttcattattccactgacttga

SEQ ID NO: 651321 - DNA, 593 bp, Homo sapiens
tgggttcccaaggctcagatcaacactgcctccatgggtttgctggccacagaccatataacaactctcaagggttggagtcaagtacctgtggatctcccagaatggagttgcacactgatggctttatagttctgggctctcagggcagccccacctccatgtctccattagatacatggcagccttgctctcgtgattccactaggcactgccctgatgggagctttctgcggtggttccacccctgtggccattctatgcctaggctgtgaggtactctgaggcattctttgatatctaggtagaggtagccatgtccmcatagctcatgtactcaacacacctgtgaggatggcactgcatggataccaccaaggtttacagcttgtgctttccagacggtggcccaagctgcaatctggactcattgagcaatggctgaagcagccaaggagtgatgcaccagaaggtggggagtgaagccttgaaatagttctgtctccaaggccctggctttctgggtttgtgatgggtggagcaacttggaagatctctgaaatgcctttgagttcattattccactgacttga

SEQ ID NO: 651322 - DNA, 623 bp, Homo sapiens
gtatctctcacaaaacttgcaatttgagtttgttgcaaagaaaacttaattaaaatatattgaccctcaatagtagtggagcagaaaaaagtgttggtctctatgcctgtatttaacaagctagatgatttggccacatctttscatcaacacaactaaaaatatataaaatatttcaagattttattttttcaaaccactgagacagtgtcaaaaattaccaggcagtactctaaaaaaaaagcaggaactaatacagctaaaaagaccactgaagatttgctggatctaatgaaactgacttcagcttttggttgcaattcaggtcaaagatgacaagaatcaaagctgaaaggtcaaagtctaacaggctacactttacccctgaaactgaggccctaaaagactatactctcataacgaggatgacactaaacaaacctggctccctgacattgaagtagaacagtgcatcttagaaattgtaatcacaaaccttgtactttacaaatgtagtcaagttagcatttccctaatgtactcaaaattcttaaactagaaattcagtttaaatgatcccagaaacatggtcttcccaggtcctcagcagaaacaacataaat

SEQ ID NO: 651323 - DNA, 618 bp, Homo sapiens
ccctgccttgctttctagcttcttattccatcactaccgcacccaaaattctctatttgtattgaattttagctcacatagagacrctgctcttttctggttggaatgcttcttctgttttcacttgatcttctcttcctccaaggtttagctctggcatgttctcccttagaagcagtccttgaactccctattttgagtcagtttccctttctctgtgcttataaagaactgcaatgctatgttttgatgttccttcagctgtgagctccttgaagacaggaatgaatgaaggaaattagtttacttgtgcctttgaaaatgatcttcagatgtgtgcttatgtatgtggccctgcagatggcctttaggatgctctctttgattccttccaagaataaattgtgcatgtgcaaatctgttctctctgcatattgcagagcatatgaatgccagagcccagtggcttgctgctgctggtcataatctagcctgagtaataagtatgctctatgttatataaagagccttaatttttttttgtctctgcctcaaatctatggctgaaagaatatatatgtgacatttgttagtgtctctcattcgttcatttccccg

SEQ ID NO: 651324 - DNA, 580 bp, Homo sapiens
agttcccagaagaagcactataatatcagaattgtcaacatagaagattgccatgtaatgaagaatggcagtggtggtgatgatctatggggaagagcgtcttctatagaactttgggcccagggaaatcttgaaattcaaaggaatgttaagaacaaagactgttcagagaaaatcacaccattcagtattggaacacgatgagaatgaaattagagatgcaggtagaagccagagaatggaggtcctataacttatgttgagaaattcgtattttactggaatggtagttgggagttatcactagacataatgaagggtttggtatggtcatacatgaagtcttttggtatctctatggtgacatattgtaggactatgagtccagaatctggagaagccttargagttataataatctagatgagagcaaatgaagttgcaggaaggagtgtttttgagaaatctgaggcaatccaatccatgaagtaggtagaaaggtagatacagtaaattattgagtgtggagttaaggcacagaaggagttaaaagggtgtttacatacattattcaccatga

SEQ ID NO: 651325 - DNA, 584 bp, Homo sapiens
ctctttcagattttagggtgagaggtgggctatacctcccaccaggaatgctaaaatggaggatttcccaaatatagaaacaagatttaaaatatgagcatccaaaaaaaaaaatgcctacctcaaatgtcctctgcagatagattttaaaggtttatatatacaagatgtcatgcatcagccctggttcctgattctgtagataatacagaataaattgagtattattkaaggagttcatttgcacttctccacacaacacagtgactaccagctcatcatcaattcctacttcccctttcccactttacatatccatcaccagtaggactgaaatatttttcaggttttaagcatatgactgaacacatatgatatttgcgattctttgagtagttaaatcaatattcagcaacataaggttattgactagaacttcaatacaatggaacattatactattttaactacaagatttaaatggaagaacaattccacagggaactgggaaaaacacaaaataaacaataattatcagaaacattttagataatcaatgattaaagtgagcagaatgactggat

SEQ ID NO: 651326 - DNA, 584 bp, Homo sapiens
ctctttcagattttagggtgagaggtgggctatacctcccaccaggaatgctaaaatggaggatttcccaaatatagaaacaagatttaaaatatgagcatccaaaaaaaaaaatgcctacctcaaatgtcctctgcagatagattttaaaggtttatatatacaagatgtcatgcatcagccctggttcctgattctgtagataatacagaataaattgagtattatttaaggagttcatttgcacttctccacacaacacagtgaytaccagctcatcatcaattcctacttcccctttcccactttacatatccatcaccagtaggactgaaatatttttcaggttttaagcatatgactgaacacatatgatatttgcgattctttgagtagttaaatcaatattcagcaacataaggttattgactagaacttcaatacaatggaacattatactattttaactacaagatttaaatggaagaacaattccacagggaactgggaaaaacacaaaataaacaataattatcagaaacattttagataatcaatgattaaagtgagcagaatgactggat

SEQ ID NO: 651327 - DNA, 522 bp, Homo sapiens
tattttcaaagtttttttttaagtccatacagatgaaaatattcatggaactgttctttaatcactataggaatcactccctcctggcatccttggttacttacacattgtcatttttggttggagttaatttttgtccccatgaaatggctaaccaaggtgtaaaaacatatataagctaagggttctctacttactatgtagctaaggaggttgatacgcaagaaaaatattgtattaatgacatatggtccagataaaggagtttctgaaatgggtrttaatattgccaactaaaataaagtaaacttgaatataaaaaaaaaacaggccattttgaaaaccaagtgatcaagaaaatgaggctaatttccttttaagtcagaagatactaagattgtgcagcttttcggagcagattttattgaaggccagagaaatgaggatattgtcttaaggttatacaacatgtttttgaaagagccagaactcaaatgcaaattccctgtccactactttttc

SEQ ID NO: 651328 - DNA, 548 bp, Homo sapiens
cactttaatccaaatgtctatcaatactactaccactaccatcatccatccattctttcattcagcaatacagagggcttattaaacgtcaggcagtgttctaggcgctgaaagctcctcgctttcattctagcaacatcattcatacaaacctttagcgggcacctacaactgcaaggcattgtgctaggtatctgtaaacagcgatttagatcgagatacacaaacatcaccaagtttctcytaaaaacacagaagaccacccttaagaaatgctcttagaaatagttcctaacctcagatgacttagcgaaagctccgtttaactggcagtctaaatttagggagcattaccgagcctatcttgggcagacaatcgtttaggagctgtcacataacctctagacttacgctccaattttctaaagaacaatttctctcataacaaaccaaatcaaccaccaggagcgggtccgtaaagacgatgtctgggcaagaacgaaatctaatcccggaagtgccttttcctcatcttagccgcaccctcg

SEQ ID NO: 651329 - DNA, 602 bp, Homo sapiens
gtcgtctttcttcccacgcgcccctggccgtgctccacacgcgcagtgccctactagggagaggcaattcggtgctttagagtttgtcattccggcgttaactcttcctcctcgtggctccagcccggcgatgcaactcttgtcttttcccggtctccacttgggaaaaggagctgacagtgacgcgcgcccctggctgcggggctcacccctgcccggccggtgttgggaggagggcatttcagtgttgcaaaggcattcgcgggttaggaccactcggaccgtgttattttgcttttctaaataaataaggtgatgtttcaaaagcaaaaatacttttaaagtatgctgacaaatcaattttgcttttaagaatcctcgaagagttaccccatcttcgtagcctgattgtggtgctgatgaggccactataaatgcgtttgtcagaactcagaaccggacactgaaaagtgtgaattttatcttatgtaaaatatacctctccctctcccgtttttcttcttgaaatgaccttgccrgtatttcaaaactgaactaaccagtaataatctcggagaagtgtttattattttaagcgaata

SEQ ID NO: 651330 - DNA, 541 bp, Homo sapiens
tcagtaagtatttgtaaattatacctgatttcagtctaaactttgtggaaaaaaatttttgagttagcattgtaccttctggctaatatctgtaatttaacttgagttcgtatgtgtatgcacatataattaattcagtatgcatttatattttcctaatataaatattggaaataattattgaaaataaacatttggtctttgtgggaaattgatgaatgtttaatatatttttttcatgaagagcatgaagtatgttcagaatacctatttgagtgtctcatttgtttaaacttgtaatttagccccaaattcagctgaaatgatcatgaaarttattcacggtatataacagacttttgaatcataaatgaaaagggtagttatttaaatccataaggttggggaacttacatggcatgaatcttttttgattgctaaaagaaggcaatattgggtgaatttaggaaaccacacatactggatactaacacctcacactgaatcttaaaatttagtcatccttcttgaattgtacttt

SEQ ID NO: 651331 - DNA, 303 bp, Homo sapiens
gcctgctcagagcttggctactcagaaccacttggtgataaggtcaaatgggagcctatktagaggtaggaggagatgtgggatgggatgggatgaggactggatgttctcagcggagaggaggaagcagccctgccctgtgaagcccagagaatggaactggggcccacagaaacagggtttcagttcagtctaatgaacagggattgggtttcccccagagggagtgagctccctgtcctcagaggtaagtcagtagaggctgcaaagatacctctgagagtgcaggtaagaagattcctg

SEQ ID NO: 651332 - DNA, 559 bp, Homo sapiens
atggcctttttaaaaaaactttacttctcttatttttacgttttttcaagatggttaaaaacattttctttaattgacawattataattgtacatattcatgacatatatcaagttgtttttttttttttgagacaaagtctagtactgttacccaggctggtgtgcagtggctcaatcacggctcactgcagcctccacctgccaggctcaagccatcttcccacgtcagcgtgcaccaccatgcccagctaatttttatatttttttgtagagatgagtttttgccatgttgctcaggctgatctcaaattcatgagctcaagcgatccacccgcctcggcctcccaatgtgcagggattacaggtgtgaacctggcccattggtgatgttttgatacatgtaatgtataagatcagagcagatggataattagcatatccatcatctcagtttttcatttctttgtgttgggaatgttcagtatcctcgctatctgaaactatgaaatgtgttaatgttaactatggccatcctacagtgccataggacaaaaata

SEQ ID NO: 651333 - DNA, 586 bp, Homo sapiens
ctgctgtgacctcagatttaatttcttctgatgttcagtggcattttttgggagatatatttttgatttcactcaaagatacctccttcagctcatatttttgagacgtttggatgacttgagaamagtattcaagttgggcaccctggatttccctggagaaagcctactttctctgttccttagggtcaatcagggatccaagtcaacggaggctgtgtcattttcaacttgtagcttccaaggtcactctagtcatgcccattccagctagcaggaaggggaaagactggaagtcatgtctataaaattcatcttaagcatgagatgcggaaattgcacacatcagttctgctcgcatcgcatttgtgagggcttagttacatatgacctctactcattgcaggagaggctgcaaaatatagtccctaactggcccagacaccactttgtcactatggaagaagaggagaacagattttgttggatacccagcagtctctgccatagataagttgacacaattccttgaatctgccatattccataatatatgctatattatatattatggaactatgtatta

SEQ ID NO: 651334 - DNA, 586 bp, Homo sapiens
ctgctgtgacctcagatttaatttcttctgatgttcagtggcattttttgggagatatatttttgatttcactcaaagatacctccttcagctcatatttttgagacgtttggatgacttgagaaaagtattcaagttgggcaccctggatttccctggagaaagcctactttctctgttccttagggtcaatcagggatccaagtcaacggaggctgtgtcattttcaacttgtagcttccaaggtcactctagtcatgcccattccagctagcaggaaggggaaagactggaagtcrtgtctataaaattcatcttaagcatgagatgcggaaattgcacacatcagttctgctcgcatcgcatttgtgagggcttagttacatatgacctctactcattgcaggagaggctgcaaaatatagtccctaactggcccagacaccactttgtcactatggaagaagaggagaacagattttgttggatacccagcagtctctgccatagataagttgacacaattccttgaatctgccatattccataatatatgctatattatatattatggaactatgtatta

SEQ ID NO: 651335 - DNA, 593 bp, Homo sapiens
gtggcttctgttgtctttggccttctgtcatagccttagccttataatagttcccttggtcagagataatattactgggaggtcattttagtggtttctactaagctctttctaccataatgcccctatwccacaggccagggtatatatgttccattataaaccatggagaacagggacctacaagctgggtccaaaaactcattggatcatctatcagataaacttgggggaaaacttctcttatcaactggtgacaataagcccctgtctctaaacataaaaccatgatgatatcattcacatcccatatctagctattcttgaaaagtatggttattccctttccctgagtgcataggcactctgaaaaatggcagcaagtccctttggagaagaatcaggatgatatttatagtatgtatgcatagtagcattatagagttctttctcaagagggaccgggcctcaccaaggtagtctcttaagaattgacttagatgtgggaagcacatgagcaaactatgcttttctattgtggtggccagtgtaaacttctactggccagatctcagtttcttttttattacacg

SEQ ID NO: 651336 - DNA, 593 bp, Homo sapiens
gtggcttctgttgtctttggccttctgtcatagccttagccttataatagttcccttggtcagagataatattactgggaggtcattttagtggtttctactaagctctttctaccataatgcccctataccacaggccagggtatatatgttccattataaaccatggagaacagggacctacaagctgrgtccaaaaactcattggatcatctatcagataaacttgggggaaaacttctcttatcaactggtgacaataagcccctgtctctaaacataaaaccatgatgatatcattcacatcccatatctagctattcttgaaaagtatggttattccctttccctgagtgcataggcactctgaaaaatggcagcaagtccctttggagaagaatcaggatgatatttatagtatgtatgcatagtagcattatagagttctttctcaagagggaccgggcctcaccaaggtagtctcttaagaattgacttagatgtgggaagcacatgagcaaactatgcttttctattgtggtggccagtgtaaacttctactggccagatctcagtttcttttttattacacg

SEQ ID NO: 651337 - DNA, 435 bp, Homo sapiens
gtgacacaccatccattctcttaccagtactctcaacattagagtctccctatgtttctaccagatctattctgttaactctaatttcatcagcctctgccttctgtattcttgtgtctcagatgctggaagatgctaratgaaatcagagttgagaggactcataccaaactcatggtctgtagtgtgattttcaacctcagtattgtcctcaatcagctcttctatttgttcgcatcacctttttccaaacatttgtcaccttcttcaaaacacatacttaagcaccgttgccctttttctcagccgacaaacttcctcctccaaatagaagaaaatgtgtctgtcaaggccggtgtcccccttccctagatgatggagcctagtataggggctggctgtagaagataacatataaatatttgttgactgaat

SEQ ID NO: 651338 - DNA, 477 bp, Homo sapiens
tagtttatatacatgttcaaatttactggcataaatttcttcatagatttcacttgtgcttttcaaatccaaactgtatttctaattatgtccccttttcattgccatatttttacttgggcatttctctctctctttctcccgtcccttccttcttgctctctctctctctctctctctctttttcttttgtaggcccagcttccacaaaaggagcagttttttggtgcagaggtcagctttctccctttttataaacccttttttgttagaatmtcttttcaaagaatcagcttttgattttttgctctctgttgttgccttttctatttcattaatttctgttattctccgttattcctttttctcagttttttattcttagctttggtctgttatttcttatatagctcattagatttaaaataacttattttaaaaaatctttcatttttctgtaattgcatttaaggctat

SEQ ID NO: 651339 - DNA, 615 bp, Homo sapiens
tgggttacatctgtattcagcatgtaacccaaggcctgggtattgctgctggttattcagggcccaagggttctttagtcagcaggtgatgaaycctgtcaggagtgctttcttcccttcaaggcagtaggttcccttttggtcctgggtaagtttagaaatgtcatctgtgagctagggtctggaatggggtccttgcaactctgcctgatgccctatcctgctgtggctcagctggtatccaagacccaagacaaagtcctctttactcttatctctcctcttcttgcttaaggaagcagaaggaagaagtcacttttgttgctgtgagctgcactgcctagggatggggaaggggtggctcaagcattacctttgctgccatgactggtgtctccctaggtgacttgccaccctagtccactggctctgagttcagcttagtactaggagttgcagtccttgtgtcctagattctctttcaagtttacccaggaccccagagtattttggtctgcagtggtgaggcttgctcagaaactcagattccgaccactgagataggcaattcctctctggctaggtctggtccaaatgttccttgttcagacattg

SEQ ID NO: 651340 - DNA, 615 bp, Homo sapiens
tgggttacatctgtattcagcatgtaacccaaggcctgggtattgctgctggttattcagggcccaagggttctttagtcagcaggtgatgaatcctgtcaggagtgctttcttcccttcaaggcagtaggttcccttttggtcctgggtaagtttagaaatgtcatctgtgagctagggtctggaatggggtccttgcaactctgcctgatgccctrtcctgctgtggctcagctggtatccaagacccaagacaaagtcctctttactcttatctctcctcttcttgcttaaggaagcagaaggaagaagtcacttttgttgctgtgagctgcactgcctagggatggggaaggggtggctcaagcattacctttgctgccatgactggtgtctccctaggtgacttgccaccctagtccactggctctgagttcagcttagtactaggagttgcagtccttgtgtcctagattctctttcaagtttacccaggaccccagagtattttggtctgcagtggtgaggcttgctcagaaactcagattccgaccactgagataggcaattcctctctggctaggtctggtccaaatgttccttgttcagacattg

SEQ ID NO: 651341 - DNA, 603 bp, Homo sapiens
aactaatgagctaccttaaggcagagaagccccatttctggggcctcaagaaaaaatttagtagttatgcatctttcatctgcaaatatagagagagtttctaacttaagcaaggatccccacattataagccatcttttgtatctgagattttcttgccagaacacacatacacactcatacataccacgtggaactccaatattgatagaagaaatggctggagtcactcctgtatctcctctattccccacctttactattttctaccctataagcaagcttagttcacagctaatcagtaatgtgcatttaagatctggtttctttctggagcacattggacttagagtatcattcaaagctggattgatttcaggccactcargttttcagtaccttctagggcagaactcagagagcttgtttgatctgtgatctccttgagcgctctctaacccacttaagcttgtcttaaacacaaatacatttgagaggagacctaccattttgtggcagaagagggctggagggtcagggaaaatcctcttggaactgcttaggattggaatagtcttctcagatccacagcactcaagatca

SEQ ID NO: 651342 - DNA, 643 bp, Homo sapiens
gagtggtataaactaggggacagcccaggaagagttacaagtgaggctagaggaagttagctcacagcagactccataggaaataagagaagaggaaaggcaacgtggcagaaagaaattctatggcagtagtgaaaccattgtacagtgaagttggtgatgcacaaacatctgtgttaacacggaactgctgactgggggaaagcaccacaccactaacttgaccaagtagtttgtagttcccttgctkgggcagataaaacttacataagcgtggtcagagttttacatcaatgcaaattattaatgttttctcagatcctgcctgctctctgattttatctcagataaaactaggacaaacgctagaagaaatcctattagggagattctggcttatccagagcagcctcaagggtggccacgcaaatggattttcagggcaagtggagcagacgtgttgtcagccctccttataaccagtttatccttctctgcctcaggaaagggcaggaaatgggcagggattgctgggctggctaaccccaccccagttcccaggccatctgagacttaggatgcacattcatagtttcaccatgctcctggcctcttgcctttttccctttatccttttcttctg

SEQ ID NO: 651343 - DNA, 509 bp, Homo sapiens
tcccctggaactgtttaacgttgtctctatgctctgccttcctttgatcatggaggtcacacccaagcaaacaaaattgagaagggggctgtattctttccctccaagagttcgggctttcccacttaactcctcttttctggcataatacaatttgatcatcaaaattttctactttaagtcttctaacatcatgctcccaaaccatcrtgtttcatccccagtccctcactagttttttcttttaaagaaaagcttttgaaagagcaggttgacaaatagttacattaaatacttatcattaaaagcaaacaaacaagaatttgagatttccagtctttgcatattatgtatgattaagagtatttttcaaaatggaaattgtatctgaagtgttaagcaaacagtaatacctttaaaatgctttagaaagcatccatttatatttaatcttttacaaggctaatatatgtaagatagactgtctgtggagggttttgtaaaacaaa

SEQ ID NO: 651344 - DNA, 482 bp, Homo sapiens
tcattggtatatcaaggtcytcccttgggagtgagtgagttctcactgtattagttcccaagagagctggttgttaaaaagaacctgacacttcacccctctctgtgtgatctctgcatatgccagttccccttcacctcttaccatgagtggaagcagcctgaggccttcactagatacagatgcctcatcttgcattttgtagacatccagtattgtgagccaaataaaccttttttttttttataaattacccagcctcagatattcctttatagcaacacaaaatggactaagtgaataataataataaaaagaagatccaacaatatgttgtccacacgattcacttaagccttaaggacacacgtaggctgaaagaaaaggggataaaaaaagatattttatagacagggtaaccaaaagagcacatatattgtgaaatgataaagtcaagcttgttaacatattcattgtctcac

SEQ ID NO: 651345 - DNA, 575 bp, Homo sapiens
gcattccaggggccactgggttatgaaaaaaaaaactcctgcagctagcttggtgtctgcccaaatggccgcccagttttgtgcttgaaacccagggccctggttgtgtaggcacccgagcgaatgtcctggtctgcaggttgcraaggctgtgggaaaaacatagtatctgggctggaatgcaccattcctcaaggcacagtccctcatggcttcttttggctaggggagggagttccccgaccccttgcacttcccaagtgaggagacgttccaccctgctttggctcaccctccgtgggctgcagccactttctaaccagtcccaataaaatgaggcgtgtacctcagttggaaatgcagaaatcacccaccttctgcgttggtcttgctgggagctgcagaccagagctgttactattctgccatcttgcccaggaatttatttctagactttcaattctgtttctttggtctatgtatttgtttttatgagtttcatgctattttgatttgtggataaatttatgtctggatataactttgtagtatattttgaagtcaggtgatgtgat

SEQ ID NO: 651346 - DNA, 536 bp, Homo sapiens
tttggaatagtttgaatataattgttgtctattctttaaacaattggtagaatttagcagtgaagccatctgattctggrcttttctttgatgggaaactttttattactgcttcgatcttgttactcattgttggtctgttcaggttttctatttcttcatggctcaatattggtaggttgtatgtgtcagaatttatccatttcttctaggtttttcaaattattggcatgtagtttctcataatagtctctaataatcctttgaatttctttggtatcagttgtaatgtctcctttttcatctctgattttatttatttagctcttctctcttattttcttagtctagctaaaggtttttcagtctatcttttcaataaaccaacttttcatttcattgatcttctgtattttttggtctcaatttcatttatttctgttctgatctttattatttcttgcctcctactaatgttgggtttgatttgttttttattgtctaattcatcattaggttatttgaagtttgtctac

SEQ ID NO: 651347 - DNA, 553 bp, Homo sapiens
cttaccgtaaacaatttatagattcaatgtattctccatcaaaattccatgacatttttcacagaaatagaaaaagcatttctacagttagtatggaaccaccaaagacctctaatagccaaagcaatcttgagaaagaacaaagttggaggcctcacactttctaatttcaaattatgttacaaagctgtagtaatctcccaacaataattgtgaatgtactagggctcacgatagctcttccttgttatggcactggttataatcctcatacctgagtatgtcatacaggcactatcttcactctccagccaaacacaactgctccttagattttaggtgtgtgctactttccatcactacctagtaataccattttcaaattgcagaggataattytgtgagagctgaaattaccaaaaagaaaagaaaaaaatcagtgagtgattcttttggtggtataattttttttttctgaaaatattcggaattaaaagtggatgaagctgctatttttcattcttttaaacaaaatctcccttttaaaaatgtg

SEQ ID NO: 651348 - DNA, 611 bp, Homo sapiens
aataacttttaaatgttttggttacaaaatcaatgttaaagaaagttgtatttcaggctatggaagttaatattcagtcattgccctgatccatcagcaaagatggagactgtagaaatcaaactcttggctcttcaatggcatctctgtgtaatgcctgtcatctctgtataactcctcaattgagttatcaaataccactcaggatgtgaaaaacaattaggaagtcaactaacaagtggattgcttgaaagcaggagccctctctcactacataacacatactgttcaccccttctcttctccttagtctgttgcttctgaggttaggaggttgaaagggcctggagattggctagrtcaatgtggtgatggtggggtcacaggactgatttggcttctcttagtaatcaatggagggggtatctggccatcagttttctacagctttctttagaatgtggagtatttgatgtcactgtcatcagttttgtcttcaagccaccatttctgaggtaacaggttaagttccccctcaacatttggttatattcacatgtcttacccagagacactgaggtttcctgtaatttctcctaagagtactggta

SEQ ID NO: 651349 - DNA, 626 bp, Homo sapiens
actccctaatgcttaactcctattcagtttacatcttcacctaggttctacctcctgaaggaggtgtttctccaacatctggcctagatcaagtcccttgccataggagcacccataacaaacacccaaagctttctctttggtgtgatactctgctaccttctgctagcaactagattgcaaactccacgaaagcagagaccatgccttttgtgttttgcattgaatgataaattcttagcacagtccctgagacatggtagatgctcagtaaatactacttggttggtgggttggtcgattatctctaaaagtatgggaattaaaaattagcaataatatatacctgtggtagcacttccaatgagaaaaaaatatgagaacttcttcccccatcctggaaaagrggttaaagaaaaaaaaaacaaaattattatagaaatgaagacaaaagcatggattgtggttttcatcataaacaaggtggaatttatgccaaaaaagtattacatgaaataaagctagttctttttaatgagaaaatcagaaatcgtaaggaatataactataattataaatagatttgcactaagcaacaaaaatatttccacttagtgaaaacttga

SEQ ID NO: 651350 - DNA, 525 bp, Homo sapiens
ggcacttttctacatgctttaatgtattattttctctacagttctgagaaaacctgtgagaggtcagttcaattttcttgtacattttaaaagataaaaaggtaactattaaaagaataacacattagttatcatcttcaatgtataaattttataaaatatcatgtaggactagcatcaaaaattcctaaatttcacttctgagtgcctttgattcattctccagttatctccctcaagccttaacttgaattcttccttccttcctgtcttccttactgatcttgggaaaggcctgcctagtgcgggaggatggaggtaggggcagaaactacatttctgyaggtgctactgttgtttgatggcaacttaatgtgttatacagtaaactcgagtaaggcttaagctacctaagggagattcctgttggtctaattccatcaacacttggctggaataatcatactgctttttacttaaaattttttcttttgccatattaagactcttaataaaacactgcca

SEQ ID NO: 651351 - DNA, 512 bp, Homo sapiens
acatatgcttcaattactgctacctgttattaaacttcctcagagattctggaaacatcccgaagatgtggtaaaagtcaagaccttaaatccaccaccgtagggcttcatttatttatttaacaaatgtctattgagtttctccaagatgccaggtgctgaaagtaaaaggccctgccctcatgaccctttaggatcacagacaagtcaatcctatatggtagaaggtgatgcaagagctccaagcaggggcagctagctcagatgggggagtgcagtaaggaaaacttcctggaagaagtgacaccagagctgggttttgaaggatgagtaggagtgcgctagacctcctactcatctttcaaactaagttagacgtaacctactgtgtgtgtgaattgcctgagggtggtattgaaacagattctgattccagtagctctggggtagagcckagggttctgcatatcttacagaagtcctcatgagaggagttcactgatggagggaag

SEQ ID NO: 651352 - DNA, 419 bp, Homo sapiens
gcctgccctctgcataggtggggtccccaggggccatatcagtgcttgtttggcctctgcatactggattcagctgcccctttctggccactcagttctcatttgggcctgaaccagctcagcctgcattgcctcatggtctgtctgaacaaattggcaggtcctttctctcctgatattgctctgatctgacccttcctatgtcgccccccagctcctactcctgtccaagcctccatcacacatgcctagactacaaaagcttcctaactggcttcttggcctatacttgcttctctttccaatatcctttccatatgctgcmagagagatgttcttaaaaatgaagtctggtttggccactctccatggttccctagaagtgcaaatcttagtgcaagaagaattgttcaagatct

SEQ ID NO: 651353 - DNA, 349 bp, Homo sapiens
aacagtaggactgatttgtttgcaaaatgacttttagttttattatacttggcctgatgatctgtataatgtgcagcaagaataattatttgccatatagccttctttttaaaaattggctttgctggaaccataagcggtgwcagcttagactttttaaagccttgaacccagccatggatttatttaactgtgtccgtaaatacttgtatgagttggataaatgtttctcatctcaaggtctcaagataatttggggctcctgggcctgtcagaacttttattagttctgtctatgcagttaattcctgttttgcctggtatttatgaatatattagttatccaaaa

SEQ ID NO: 651354 - DNA, 614 bp, Homo sapiens
ttaatcaggtcagaaaaagacttaatttagaattagattttggaaagtttgtcaaatatcaaagttttaaaacactgtaagagaaaatcccaggtcaccgtaagtcatttatttagccaaataactcaaagattttaaacaagcaaaaacctctattcattagcagagggaagacttagctttctaaacagtctcttttatttcccttctttttcctgtatttaaaaggcaaataaaaatctttyattatcttttaatgttacatgaaaatcttgctcaagagagaatctagccaaattttacctttgcattagtgtcctattaatatcaaacccaattcttaatgaaaccctgtagacaaatttatccaactttaatcagtttgaccataaggtaatattttcaaaactgtttataaccctttagaatttttttgttaaagcacagaccaatggtctaagaaaatcctgttgtgctttattccaatgttcaatttatggaaaaaccaaataatacctctttaacttcagccaatatgttcacacacaatttcttttacaagattaatctttcacaaaccttccacaacttgctcaaatcttcagctttagcct

SEQ ID NO: 651355 - DNA, 534 bp, Homo sapiens
acacacacaagaatgagaaggcagtcagggtcttcccttcaaggagccacacagggtttagagatgttcttacgaggcagcgtgctgggtgtgagctttggggacgcttcccttctatccagcgaccagggccaggtgccaggaacctgatggggagtgatacctgcagctgtgctgggcagagggaccacagctctccagggctgtttgctacttgaccacaattaacatgatgacagctgacacacgacacagcctgtggctgctgtgcatgggcaggggtggtaataagaatacctcctgacttcgtrtgctaggtgccacgtagccctgggaagttcataaggtgtggttagaccatatgtggtctgatggggaaagagaaaagacaggcatttccaagcagaacgatggaaaccaaaaccagaggagacgggggaatctgggtgcgcagagagctcacggctaaacacgttcaggagaaaccaagcgggagcaaagaaagtaacaggggaaggtctggatggcaaatta

SEQ ID NO: 651356 - DNA, 466 bp, Homo sapiens
aggtgtccagaactggtgagaaaacctcaagcctctgggctttcctgggcagggataggtgtggccaagtttgtcttgagactggagagggcagacaacactcttctgtgcaatggtggcctgcaacatttctcaatagtgacactggcataaagaggggtcccagttgcaggagagatgtggagaggggactccttgtgggaggaagcrtattaggaagaacatggcagcagaaatcatggattgcagatgggatgccttcgatgaagcttgcctgagggcgtgtaacaccgcagcaaagcgctgttttatgccttttagttttgctggactcatggctggccacacatcagccttgacccacagggctgccaaattggctggaccccggaatgtagcccaagctagtttctgcggcttagctcctctcccagtggaaggtgctaaacccccacttgccagccca

SEQ ID NO: 651357 - DNA, 605 bp, Homo sapiens
caacccctgacctgcctcccaggcttattcagtctgcctgtcctgtccwtttcctccatagatgtgagaaattcacagcccataaattctgtggctgggagcagccaccgtggcaggcgggtacctggcagggtgcacaggctgctccattcccccctggcacatgcacctggtcaatcctcttttcctgctttggtcacctgagaatcacagaggtcacatctcagcaccatccaaagccacccctggcaggctcagggctctggagcaagcccagccaccttggttgtggagcgggaatctctagcaaagatgcctactgtttcaccagtgcagtggaagaggagaaaatgggcacttggccactgtcccgtcagttgggtcagcagcccaaaatagttcttatttccttccccatgttcaaaatagaaatttcagggggtgtgtacaggtctgggttttttttttttttttccataaattttataacatacctactatgtgctggataactgcatatttgttacttgattctaactcagacttttggccaatttctctttctcgatttggtctccttccaatgctatgttctcccgacctct

SEQ ID NO: 651358 - DNA, 585 bp, Homo sapiens
ctcccaggcttattcagtctgcctgtcctgtccttttcctccatagatgtgagaaattcacagcccataaattctgtggctgggagcagccaccgtggcaggcgggtacctggcagggtgcacaggctgctccattcccccctggcacatgcacctggtcaatcctcttttcctgctttggtcacctgagaatcacagaggtcacatytcagcaccatccaaagccacccctggcaggctcagggctctggagcaagcccagccaccttggttgtggagcgggaatctctagcaaagatgcctactgtttcaccagtgcagtggaagaggagaaaatgggcacttggccactgtcccgtcagttgggtcagcagcccaaaatagttcttatttccttccccatgttcaaaatagaaatttcagggggtgtgtacaggtctgggttttttttttttttttccataaattttataacatacctactatgtgctggataactgcatatttgttacttgattctaactcagacttttggccaatttctctttctcgatttggtctccttccaatgctatgttctcccga

SEQ ID NO: 651359 - DNA, 585 bp, Homo sapiens
ctcccaggcttattcagtctgcctgtcctgtccttttcctccatagatgtgagaaattcacagcccataaattctgtggctgggagcagccaccgtggcaggcgggtacctggcagggtgcacaggctgctccattcccccctggcacatgcacctggtcaatcctcttttcctgctttggtcacctgagaatcacagaggtcacatctcagcaccatccaaagccacccctggcaggctcagggctctggagcaagcccagccaccttggttgtggagcgggaatctctagcaaagatgcctactgtttcaccagtgcagtggaagaggagaaaatgggcacttggccactgtcccgtcagttgggtcagcagcccaaaatagttcttatttccttccccatgttcaaaatagaaatttcagggggtgtktacaggtctgggttttttttttttttttccataaattttataacatacctactatgtgctggataactgcatatttgttacttgattctaactcagacttttggccaatttctctttctcgatttggtctccttccaatgctatgttctcccga

SEQ ID NO: 651360 - DNA, 551 bp, Homo sapiens
ctcctgccttctgttctgcttctgagcgcactgactggctcaggtggctctgggacaacaggtgggatgccagcttacagggaccaagtcccagctgtggtgctggagctgctcagtggcaactctccgtctctgctgctttcacgcagcactgacgaagagcaggcatccgcctttccactggctctcctggatgactaagccctaagccccaaccgcatactcagcccttcactggcacttggcataattttatctcctctaaatcatcacagccaccctccatgatagcaatttctattctcaattaagtgaaaaggaaaccgaagtttaggagtggtaagtgacttacccaaaatcgtatarggaggaaatgcagacccaggatttgaactcgagtcttctttccttccaaactcatcccctcaacctgtttatttccttttctctatgaccatgtctgaagaaatctgccttggggttgtctcatattggactcactctcttggtctgtcagtgagctgaacttctcatccaatcaaatccaagct

SEQ ID NO: 651361 - DNA, 551 bp, Homo sapiens
ctcctgccttctgttctgcttctgagcgcactgactggctcaggtggctctgggacaacaggtgggatgccagcttacagggaccaagtcccagctgtggtgctggagctgctcagtggcaactctccgtctctgctgctttcacgcagcactgacgaagagcaggcatccgcctttccactggctctcctggatgactaagccctaagccccaaccgcatactcagcccttcactggcacttggcataattttatctcctctaaatcatcacagccaccctccatgatagcaatttctattctcaattaagtgaaaaggaaaccgaagtttaggagtggtaagtgacttacccaaaatcgtataaggaggaaatgcagacccagratttgaactcgagtcttctttccttccaaactcatcccctcaacctgtttatttccttttctctatgaccatgtctgaagaaatctgccttggggttgtctcatattggactcactctcttggtctgtcagtgagctgaacttctcatccaatcaaatccaagct

SEQ ID NO: 651362 - DNA, 610 bp, Homo sapiens
cgtgtctcctcagggtgtcccagcaccagcctggcacagagtggggctcagttagagtatgtgggatgttggtttcgccaggtgagtgaatgaaaggactcgaccaccacagctgagccactagctgggccatgcgaagagttctaggtgcaaaggctggagggtggaattcatttttgagaggtgtgtgagcagcttccgacccctgccccatttgaacgggggccttgctggtcgcgtccctgcattcacccgcgcggccatcccgtcatccaacagttgatcctaactgagcacgcccacggccctggtctggcctgggcaccggccaccgtagcccatcccttgatggcctctgtgtccccaggagggcgggccggggggttgcccaggggctggagcagtggactgtggctccatagaggtaggcyggagggtgtgagggcagattcaagctatccccagggctctgctctggtcggagccagccccttctccctctctgccttccccgccccattcctgatgctgaactgttctggacccctggccctgagtctctcaggaccaaagtgggcacgggaacagctgtagtgtgtgcccccccggg

SEQ ID NO: 651363 - DNA, 608 bp, Homo sapiens
gtgctgcttgatccctcttcagaacaggtcttgctgcccagctgtggggagtgcagttagtgcacagcctgaagctgtcagctcctttagggtcggtctcagctgaggtcatgccattccagacagctcacaactgatattggtgtgagatgaggggctataaagaccaggccatttcaccctgaagtaggatattctgttagacaacacttgtgccaaagtgctctgtcagctttatggggctagaattgcaatttaacttccccttctgcccaattttgcttcagctccttcatttacaggagtttatccactcacaaacatattgcattcaaaactccatctcagcatctgcttccagagaatgtgggttgcagtagcaggtgagtggtcagcaaccctctggcrtcctcatgcaagggatagatctatcaagaagacttacactttgtagtgtttggcccttagtggtgatgggttatcccaagttattcacattgtctcaatgggtcctccaagagaaatgacttgaagcataaaacagagctggataatctagaggcatattctgctaagcaggtaggagaaactgctagaaaccttaatgg

SEQ ID NO: 651364 - DNA, 431 bp, Homo sapiens
tatttattattttcatattgaattagctccccaatatctccttaggctgaccaccagcactgttgccctgattacaaaaaccaacagtttttggagcagggggcatggtaggcatgccaacccgagcagttaaaatgttaaatgcctgacttcataatgtgtgggtggatgtttgtgctaagtgttaaaaaatatatcttgccacagggagaaaatggtgatttgaatactcttttcagagctccctgagtttccttgctgtggttgaataggaagttgtggagcattttyccatcagtgaaatgcctctgtatccttttggggtggtagtagaaagcctataggactcatgatccctgatgtcttctttcagttctctacatggcatattacatgatagcatgagaaaaatatgccagcaattcaagcag

SEQ ID NO: 651365 - DNA, 214 bp, Homo sapiens
gaacacatggacacagggaggggaacatcacacaccgggtcttgttggggggtagkgggtggggggtggagggagggatagcattagaagaaatacgtaatgtagatgacaggttgatgtgtgcaggaaaccaccatggcacatgtatacctatgtagcaaacctgcaagttcagcacttgtatcctggaacttaaagtataaaaaaaaataaa

SEQ ID NO: 651366 - DNA, 572 bp, Homo sapiens
tgtatgacaagttctcagagaatatacagagtacatagaaatcaagctctcagaaaatgtagtacatgtagaagtcaagttctcagaagatatagaatgtacttaaaaaagcactcaaccaaacagaagacacttatataaaaagctacctaaagtrtgcttataatgattgatgagtattacattttgttactaagcattaccaaaagtcagaaatctaggatgtcaccaaaattactatgtttgttgagttttggagacaagtctagcaccttaacttacttgaaggccgtaccattttgacaaataaagaatctgtatctctaggtgtcagggtcatcttcagatttaaccctagggtcagctcagtctaaaccacatactttggtcttgttttctggggagcaaatagcctagccttctctcttacagcttacaggtggttaaatgcctctaacaacaagcaagccaccatataaaagagtgcatatgggaaagaacatgagtatgtaaatctggggaactgttaggggtgtgagtagctgggaatgggttataaatgcacttatagt

SEQ ID NO: 651367 - DNA, 651 bp, Homo sapiens
ctctactaaaaatacaaaattagccgggcgtggtggcgcacacatgcctgtaatccyagctacttgggaggctgaggcaggagactcacttgaacccaggaggcagaggttgcggtgatctgagatcacgccattgcactccagcctgggcaacaggggtgaaacttagtctcaaaaaaaaaaaaaaaagattcaagtttgagagtgtcttctagcatacgatttctgattagctgaatgaaggtgacactggactctgtagaggttctcattcacatctcatagtgctgaaacaatcagacagagtcttcctttggtaaggaaagtagctaaagccaggataactaggcattatacccatttaggactcaaatggagactccagatggaaactacacataattacatagacaagtatagtttctgagaggtagaaatttatacctttcatcccttgcatcattccattctcaaagcatttattacactcttatgtgtgagtcatggttctgagcattaatgatacaaagacaaataaaccatcactcctggtccccactccaagagcagttacagcaaagtaattaatgctgtaacagaggaataaacaagatgctgaggagcatgagaggaatcacataacttatcctg

SEQ ID NO: 651368 - DNA, 463 bp, Homo sapiens
tggagtttgcccctgctggtgcttaaaggcactcaccttggctcctgcacccattcacctgtgtgctccccctcatccaaggggggttcgagctccgcagctgagcaaaacaagccccctatccttcacaaattcctgtgagggatcagggaacatctcacttggtgaatttttcctcaccttttaagctgtagcccaagcttccccacccctgtgaaagcttcagcagagatgattataacactttaggccaccactttgtctcattcattcctatttctgccactctccttagtctgtggaaaacagggattgtatcttatgtacatttcaccctcattgtgaaatagtgtgttaggsgatgctaccagcattatacattatatgtcattcattcattccaggaacttctactgagcagttatcatgccaggcagagtgtgtaacaagtttataagtaaga

SEQ ID NO: 651369 - DNA, 569 bp, Homo sapiens
actttctgtggtctaaattgcctaacagaaagtcattttacctaaatcctaggacccctgtgggaaaatcccaattggttactgtgcctgtaaactaaataaggtactgactggctcctccttttaagcagaactagttttaagatcttctcttacatcaccttagttaaacttgaaaatttcctgtttgttatagcgagaaaagcaactcaattctcctatttctaaatattgttagaaagggtctgctgttgaatacaattcaattcctaggactgttgtggggaaatctgaatgaatatgttgcatattgacctagaaatatattgtaaaatgtgatttatttgcaaagaagctctgaaattctgtgctrttcgtgagatactgctccttttgtaaacgttaaaagccacaaatctttttttcttgtcaattcaattgaatacttaagaggattgcataataattatcctttaaaaaataggattaatatttaactgtgttcagcaaaattaattgaaagcttctgcagttcaggcacaaaaatagttgtccaagtaaactgcaaa

SEQ ID NO: 651370 - DNA, 573 bp, Homo sapiens
cactacaaaactgtccctaaggttatttcagtctatattatctatgcatgtaggttggtacagtactatataattttactgcaccttttcaactgatgacaattattatttaagactttaactttattaaagtacatcttaatatgattaagacaccattgttgaagacctgagcactttcaaacttttcaatacgtatatattaagagtctacgctggacagcatacagtacctaaagacaaaatgcttaaaatgaaagtttaaaaaaaatacagtttaaaattcatgtgataaaaatgtgtgactcaagtgtccaaaagaaaacygcttatatttgcagactaaaacctgtgttattgcttccactatttgaatgatgataattattagccaacagtttaatgaatcagcaattaattagtgaacacctgtaatctgcaaacctgggaatcaaggcttggagaggtagtaggggttgtaatcaacatttaggaagcactgattatatttatgttttacgttttctggctatttgtttaaatgatttgtttatcttgataagtgacatattc

SEQ ID NO: 651371 - DNA, 489 bp, Homo sapiens
ggttgtaatcaacatttaggaagcactgattatatttatgttttacgttttctggctatttgtttaaatgatttgtttatcttgataagtgacatattcttccctattgactttggggttggccataaaacttgctttgatgattggaaaatggggaggaatggaagtatgccagtgagctgaggcattaagaggcttcgtttgtgtccatttgctctcttactccaattcctcagctcagcactggctattacttcagcctggttttaaaataataaagcacgtggagccccagctgagtgcaggagcgcaagaattatttgttcttggaaagttttgagatattgtggttgtttgatgcaatcartataaccttagaaaaattttatatgtgtacatttaagctttatgtccattatataagatacagtattctcatttcacagatgaggaaattaaggagtcaaaggggttcagcatttttttcca

SEQ ID NO: 651372 - DNA, 565 bp, Homo sapiens
ctcccagggtcccctgcagccaccacagcgccctgctcagtccctccccatccttcaaggcactgcatggggccacatccagaacagatgccatcggtccccacrtgtggcccactgagcagggaggagtggacctaggagcagcaccccagggtcctccctcagggtctcagggcctctcctgagggtcccttgccagcgcagcaccagccccgccctctctgcgggcccacaccacccctgccgtgccctggctggtggcagtagtggggcgctggaatcctgggactggcagcctccaccccacacacgatggggagcctgtggtaccttggctcccgggagctgccccaggacacagccttgctggtccttccgtctgggggatcccaaatcctcacacccctgtggtgggggcctgcgctccatccatctccctgggcgctcaagcccagggtcctgccgcagccttgaggacaccgggacacctatggagaccaggcagtgtgcagttgtcaccgctgaccgcaagtgtgagctgggccgggggtgggatggcgaggac

SEQ ID NO: 651373 - DNA, 583 bp, Homo sapiens
gggtgacctgcatctcattaagtggtgtctattggatgtttggcctttggcttgattgtgtccgcttttaaaaaataactttattgaaatcgtcacattccatacaattacctatttaaagtgtccatgtctgtggtttttagtatattcacagagttgtgcagccattgcctactttggacattctatggaaatgcggttgacaggatgtgttttctgtgtgcagyctctgtcactaagcaccatattttcattcatattgtgcatgtatgcatcggttgttccttgttaatgtcgaatattattccattgtgtggatgttccacattttatgtatttgttagtccattgatagacgtttgggttgtttctactttttggctgttgtgtgatagcgctgctgtgaacattcatgtacaggtttttgtgtggacatgtcatttctcttgggaatatacctaggttgtttgtatctgcttttgctgcttcttttacctacagttcagattcccatttatgtttgtacagacagtttgctacttgtgactggggcttgtttgacctttgttgctgacctagcgac

SEQ ID NO: 651374 - DNA, 475 bp, Homo sapiens
cagagactcttattcttttcccttactttctcccccaccccaaaatggaagctctctctctgtgtgctcagcagcatggagctgtgggtgtggcgatgcaagcacccatgtggcaaccaccactgggactgtgctgggtcagacatgaagccagcacagcactatttcttggccaaggcccttctcttcagggcagcgagttccccaggactcagaggtgtccagagatgctctctgggaaccaggaattgaagttaaaaatyttagcagtttagctgatgtcctagtgcagctaagctggcactcacaccacaatataaagttcttcccgctcttccctcccctttccacaggcagaggagccccccccccaccactgccaccactgccaccactggtctatggtggttctgccaggccactgctgatgttaacttaaaacccaggagcttctctgtcagcttgtggtgaattc

SEQ ID NO: 651375 - DNA, 475 bp, Homo sapiens
cagagactcttattcttttcccttactttctcccccaccccaaaatggaagctctctctctgtgtgctcagcagcatggagctgtgggtgtggcgatgcaagcacccatgtggcaaccaccactgggactgtgctgggtcagacatgaagccagcacagcactatttcttggccaaggcccttctcttcagggcagcgagttccccaggactcagaggtgtccagagatgctctctgggaaccaggaattgaagttaaaaatcttagcagtttagctgatgtcctagtgcagctaagctggcactcacaccacaatataaagttyttcccgctcttccctcccctttccacaggcagaggagccccccccccaccactgccaccactgccaccactggtctatggtggttctgccaggccactgctgatgttaacttaaaacccaggagcttctctgtcagcttgtggtgaattc

SEQ ID NO: 651376 - DNA, 421 bp, Homo sapiens
tatatcctgattgggaggatgagatgcatatgtactaaacagagaacattcaaaattaatgacatggtttagttgtgaaagagctaaagtagggcaaagttatgtgaatggtgggaagccaggagagagaggttcttactaagaactagattaagaagcatcttgaaggctttgaggagaagatgaagtaggggagctgattctgggagttttyttaggtaaaagcataatgactaaactgttatttcctagatcaaagattgtgtccgtaaaaaaaaattgaactatgagaaaaattgagccaggtgtggtggtggatacctgtagtcccatctccttgatcattttagcccaggagtttcaagccagcctaggcaacagagcaagacctcatcttcatttttttttttttttttttttt

SEQ ID NO: 651377 - DNA, 519 bp, Homo sapiens
gtttctgggcagggtggtgaatccgactctcctataattcaggacaygcataagcacttcgtgctgtagtagatgctgaatctgaggtatcaaacacacacaggataccagcaatggatggcaggggagagtgttccttttgttcttaactagtttagggtgttctcaaataaatacagtagtccccacttatctgagggggatacattcaaagacccccagcagatgcctgaaacggtggacagtgctgaaccttatatatattttttcctacacatacatacctatgataaagtttaatttataaattaggcacagtaagagattaacaataataacaacattaagtaaaatgagttacttgaatgcaagcactgcaataccataacagtcaaactgattatagagaaggctactaagtgactcatgggcgaggagcatagacagtgtggagacattgggcaaggggagaattcacatcctgggtgggacagagcaggacaatgcaagattccatcc

SEQ ID NO: 651378 - DNA, 519 bp, Homo sapiens
gtttctgggcagggtggtgaatccgactctcctataattcaggacacgcataagcacttcgtgctgtagtagatgctgaatctgaggtatcaaacacacacaggataccagcaatggatggcaggggagagtgttccttttgttcttaactagtttagggtgttctcaaataaatacagtagtccccacttatctgagggggatacattcaaagacccccagcagatgcctgaaacggtggacagtgctgaaccttatatatattttttcctacacatacatacctatgataaagtttaatttataaattaggcacagtaagagattaacaataataacaacattaagtaaaatgagttacttgaaygcaagcactgcaataccataacagtcaaactgattatagagaaggctactaagtgactcatgggcgaggagcatagacagtgtggagacattgggcaaggggagaattcacatcctgggtgggacagagcaggacaatgcaagattccatcc

SEQ ID NO: 651379 - DNA, 578 bp, Homo sapiens
tagcttaagcatgatagcttggaataacagctgattcagactagattcatcattttaaataaagacaagtacaatctaaaatgtaaacaaagtatttataaaataaattctctaggaaataaagaaaatcatcaatctattatttttaaggtatttatagctcaaagttaccagaaatctttgtggaattttcaytgccaaatttaaatttgggaatgtccgggtacaacatattgtcaccacaatccggagggccgccaaaatcgcagacggctatttgcatcctttcagtgtgacttttcaagtgggcttggagactcatgagaaaatgcagtatctttctcaccttccaagtccccctccaagtgcttatcaagctaggacaattcagctgatgtagactttcatacgatttttaaatgctaaaactctagaacaattaaatggctggtttcctgcacaaataaatgcagacttgtctcttttgcagcagtggttaaagcacattcctagagatgtttttcattacacttcactataacattggaattccgtaaccacattattactcaagaaat

SEQ ID NO: 651380 - DNA, 589 bp, Homo sapiens
ttttattggaacaccgccatatctattcattatgtactgtctatagctgcttttactcagtaacagcagagttcaatttggccaacaaagcctgtatgtttaccttctggcccttcagggaaatgtgctgacccctgccacaaacttccaaatacataatattgtaaatgtctagctgttcatctagatttacagtgaagtcctgttgtttttaacttccctaaaaattattgcaaaacctttttgtctgtgcctcagtaaaccttcccagtatggcaaaacataccctatcacttttgttctttttctattttaaaagtactaaactcttgagtcttgacacagtgaagacaaaatagtttagtcaaatattttctcaattgctagacaaaagtttaatttcttagggacctgataaagatwtagatttaagaaaacactacatctagtactaaagaaataggtcatttaaggaaaataatattttgttaaatttagcaactttttgaagaacttagattgctacttaccagctagtgaaagcacagaagtctttcctaaccctgagacagaagttgtatatcctgtt

SEQ ID NO: 651381 - DNA, 591 bp, Homo sapiens
cacaaattcttggcatagaaatagaaaacactaaaagaaccaaatggaaattttagaactgaaaaatataatattggaaataaaaaaattaaytggataggctcagcagctgaatggagatgacagggaagggttggtaacactgaagatacatcaagagaaattattcacactgagtagcacagagtttttttaaaaattgagaaagaacaaagcctcttggcctacggacaataataaacgatctaatatatgtgcaactggtgacccagaaataagagagagaaaaattggaagagaatatatatttaaataaacaatgaccaaatcttcccaaatttggggaatgatatacatttacaggttcagtaagattaccaaatccaaactggataaatttcaagtaaataatgcctagatgcatcaaaagtaagctgctaaaaacaaaagctaaaggaaaaaaatatttaaagtgtccagagaaaaacaatgcttcataaagaagcatcaacaattcaatgagagtagctattttatcagatgttatggtggccagaagacagacagaaacacattattagaatgcagtaa

SEQ ID NO: 651382 - DNA, 612 bp, Homo sapiens
ttattcatgcaagatatattcatggagtgtctattatgtgtcaaacattcatcattctggatgctgagatacaacagtaaataaaaccaacaaaattctctgctctcctggaacttacattctagtatgggagcagagaagagaaaagaaacaagtaaaatctgtcagatagtgttaaatgctatggagaaaaataaagtgargaataaagacaagggagtaccaggggcaggggattaatcagttttaaagcaggtggccaaagagggttgtcattgaaggttccactgaaaagatgatatttaagcaaagacctaaagaaaattagggaatgagctatgtgaatatctggaaaagagcatcacagcaaatatagagagcttgtctctactgttggtccaaatgagcaaattggccactatgcctaaacagagtgaaggtgagactagcaggagagctcagagtggtaaataagaggctttgagggctactgtaaggaaattgtcttttattttgagtatgacaagaagccattggtaggttttcagcagaggggtgaaatgatctgacaatgttttacaagcatcatctgtctactgtgttgaaattaga

SEQ ID NO: 651383 - DNA, 612 bp, Homo sapiens
ttattcatgcaagatatattcatggagtgtctattatgtgtcaaacattcatcattctggatgctgagatacaacagtaaataaaaccaacaaaattctctgctctcctggaacttacattctagtatgggagcagagaagagaaaagaaacaagtaaaatctgtcagatagtgttaaatgctatggagaaaaataaagtgaagaataaagacaagggmgtaccaggggcaggggattaatcagttttaaagcaggtggccaaagagggttgtcattgaaggttccactgaaaagatgatatttaagcaaagacctaaagaaaattagggaatgagctatgtgaatatctggaaaagagcatcacagcaaatatagagagcttgtctctactgttggtccaaatgagcaaattggccactatgcctaaacagagtgaaggtgagactagcaggagagctcagagtggtaaataagaggctttgagggctactgtaaggaaattgtcttttattttgagtatgacaagaagccattggtaggttttcagcagaggggtgaaatgatctgacaatgttttacaagcatcatctgtctactgtgttgaaattaga

SEQ ID NO: 651384 - DNA, 610 bp, Homo sapiens
aagtaatgtgtacagttagagaagaaaaggataaaaggacctagtctaaggtggtctaaggcactaccacagtctagactgggttggaaaggaagaaacaaggaggttgaagaatgccaggaagttaagagtwaatcccagagcctaaaaaaaagcctttccaggaggaggcatttcagaggaaatactctcctttgctaagctaaaagtctactctttttccatggctgttttagagagggatgctaggtgggtatctattttatagctgctatattcatttattcatctgaatgctctacaaattattattttttatttttattgcaaccttgagacacctgaatcccatttttagagtttccagaacactttctcagctgaatttttacttgaggattcttcatatacaacaaaatttgcttttgatttaaccaaaaagggtaaagaagctcctcctgtagaatttccagcattgtaaatagcaacaatggtctcaatctcattcacagctcaccacggatacagctaaacctagtaatgctttctctaattaaggagtatcaatccccccaaataaattatttcatttctggcagctgtggaaaag

SEQ ID NO: 651385 - DNA, 586 bp, Homo sapiens
ttgttctactattttgaaaatatgaagagttttggtaattccagaaccaaccatgagttcaaaagaataagatgaaaggtactgagctcacatttgtcatcatgattgtgaacattctttgtaagaaacggtaataaatctgatcgcttgatatgacatgtggcaggcaggcatatttctgaagtagcttctcatgagttctccattttaaagaggctgcagctcgctgttcagcagctgtgagtgctggaatcaagtcaggcagagaagataactgaaaatgaaacgcatcaaaaaatcaattataaataaattgcagcactcagtaaaattactcagtcttataacacattggggaagagaatactccttctcatttcagagtttaggagacatcttagttgtcacaaggagataattatctggttaaatcaaacacttttaaaagaaatcattaagtaaaaagtatgattcctgggaaccaaattttgaaataaaaactacaactcattcttcttcctgtcagattatcayagcaactcttccaactacagtaaaatgtattacatattattactgtcaataa

SEQ ID NO: 651386 - DNA, 541 bp, Homo sapiens
  misc_feature 241, 259: n = A,T,C or G
gaggaaactcatgtagacaatgtctcaggatctgtcttaatgtcaattaggtgaaaaagttaaagtcaaattcttagccctatacacacacaagtcagttaagttttgatgrgagaaaagagagatggaatatgtagcaacactgtatgccatagggtactggttttaatatggttttctccatcaaaatgcctgtcaaggcttggccccagcgcagcaatactggaaggtgaaatctttnaagaggtggggccgcatnggtccacctactggctccaccctcgtggtttgactggtgaagttcctgtggtattgagatctccttcacaagtaactgggttagctctcgtgggactgggttagttctctggagagcaggttgttacaaagtcagcttcttttgttccctctcccttttgcaggcctgcttcaccttccacttctctgccagattacgaggtggcatgaggccctcatcagaaacaggtcagatggggctgcctgatcttgaacttcccagcctctagaaatgtgggccaaa

SEQ ID NO: 651387 - DNA, 430 bp, Homo sapiens
tttaacaagtgtattggagatttactcacattgtcctaatgactaatgatgttgaacatcttttcttatgtttactggccatctgccaatgttctttggtgaagcatcttaaaaatttttccatatttctaaaaattgggttgttttattattgtgttttgagaagttctttatgaattctgaacacagtcctttgtcatctatgtgatttacaaatattttctcccattctgacttgtcttttcattcacttaatagtgtcttctgaagaacagatctaatttatcaaatttttcttctaaggatcatgcttctagagtcatatgtaagaaacttttaccyaacccaaggtcacaaaaattttctcttatggtttcctctagaagttttaataatttcagtctttaacatttaggtctatgatctattt

SEQ ID NO: 651388 - DNA, 435 bp, Homo sapiens
cctctctgagggtgtgtcaaggagagaggaacctggatcttggatggccayggggctcccttccacccacatccccacatggctgcacagcacaggctggttctgttggactgagcccatccggggaagaacagcgagaccctcgggtgagatcgggctcactggagacaaaaagcatggcaggagctggaggcgccccaggctgatttccgggacaggagtttcctgaacacagggactgagcatccccacagccccctagactggcccatgagcacgagaagccctgagagtgcgtggggatggcctgtgtgcaaggcagcgcagcgagcctctctgcacaacccacaggctctgctgggtgaggagttctccctcagcctcctctggagctgacgctgggggagagcgccgtgagcctccctgcctgaattc

SEQ ID NO: 651389 - DNA, 435 bp, Homo sapiens
cctctctgagggtgtgtcaaggagagaggaacctggatcttggatggccacggggctcccttccacccacatcyccacatggctgcacagcacaggctggttctgttggactgagcccatccggggaagaacagcgagaccctcgggtgagatcgggctcactggagacaaaaagcatggcaggagctggaggcgccccaggctgatttccgggacaggagtttcctgaacacagggactgagcatccccacagccccctagactggcccatgagcacgagaagccctgagagtgcgtggggatggcctgtgtgcaaggcagcgcagcgagcctctctgcacaacccacaggctctgctgggtgaggagttctccctcagcctcctctggagctgacgctgggggagagcgccgtgagcctccctgcctgaattc

SEQ ID NO: 651390 - DNA, 557 bp, Homo sapiens
gatggtttatcaccatccctgtgagttgagggtcactacatgactgtggttttcttgagaatgttgtcaaacatcctaggatgcaccacagagtcccccacagcatagcactgcccagcccaatatgtccaaacggccaggatcaggagccctgacgtcctccgggcctggccaagagcagcatccaaggccccagcctctgaggaggcagtactacagctctacgcaaagcacttggccagcagctggtggcttgtcggctccyggttctgcctgaccagctatgtggccttgaacaagttactgaaccactctgagttcacctttcccatcctatgaaaatggaaattacaagacatatctttagacgaaaggcaatgtctgcgattgcccctagaaacagggctgtcatgtgctttaatcagcagcattccccaggccaggaatgtcacagggctcagacaataatcaaaccaggctccagggtcctataaagtgaaggctatcacagttgggaggagagggagatgcatgaagtgtgtggaatctggggagag

SEQ ID NO: 651391 - DNA, 627 bp, Homo sapiens
tgacatcttcataacagtctccatttagcagtcaatcctatataagtcatttgagtaagcatccattgagtagcaactgtgtgccaggcacagttctagggctgaaaggacatagagatggaggtgatgtgtccaccctacaagaactcatcacacaggtgtatacaacatgctgccatcatgcagccaccctgggtgtgtgggcaaatgttcatcagtgtgacatattttcctgttcttcaaatagaatccatgttcttgctgggaggtgtgccagacggttttaagctgagtgggcaagcagcccagtagtgacagagtctsactcatgtgcaagagggagaagggtgtagcctcactttgagctggtgccagaaaacagctgcaagttgacaggactttgactgctctcacagtcattccatagacactgttgttacaacagttaacccccaccatctcaagtattctactctcagaccaaccaccacctcctttctttctagctcattccttttggcacccaactccaacaatcctctagtcccactgggatgcaaatccattgattctactggttttcatttctctctcttctcttgggtcctcacttccttcttgcccagc

SEQ ID NO: 651392 - DNA, 552 bp, Homo sapiens
tgaaactattttgtacagtgctataatggcacacacatgacactacacatttgtcaaagcccatagaactttacaacacaaaatatgaacctgcaaattarggaatactcatcaaagagttggaggatctcaggataaaaagtagaatatgaccaaacaatctaattgtattagaaatacatgaaacaacttcactgacaggataggtgttgctgacgtgagtaactttagaaatgactggagaaagagtaaaggaaaaataaattgcatgtaagcatggtgctctagttagaaaagttgtttcccacaggggtacaagttaacaattctgataccaatatgcatgtatacaggaattaaacaattagccaaatgaagtaaatggaaggtgggtggtgggagccaggttggggcgggtggtgacagataagtaagaggaaactgagatggtctatgacttagagttggagatattagtataaactcgtgatttgctatttaatctagagatagatggttatacgtataaatgctaagatatgtgtataggca

SEQ ID NO: 651393 - DNA, 552 bp, Homo sapiens
tgaaactattttgtacagtgctataatggcacacacatgacactacacatttgtcaaagcccatagaactttacaacacaaaatatgaacctgcaaattagggaatactcatcaaagagttggaggatctcaggataaaaagtagaatatgaccaaacaatctaattgtattagaaatacatgaaacaacttcactgacaggataggkgttgctgacgtgagtaactttagaaatgactggagaaagagtaaaggaaaaataaattgcatgtaagcatggtgctctagttagaaaagttgtttcccacaggggtacaagttaacaattctgataccaatatgcatgtatacaggaattaaacaattagccaaatgaagtaaatggaaggtgggtggtgggagccaggttggggcgggtggtgacagataagtaagaggaaactgagatggtctatgacttagagttggagatattagtataaactcgtgatttgctatttaatctagagatagatggttatacgtataaatgctaagatatgtgtataggca

SEQ ID NO: 651394 - DNA, 552 bp, Homo sapiens
tgaaactattttgtacagtgctataatggcacacacatgacactacacatttgtcaaagcccatagaactttacaacacaaaatatgaacctgcaaattagggaatactcatcaaagagttggaggatctcaggataaaaagtagaatatgaccaaacaatctaattgtattagaaatacatgaaacaacttcactgacaggataggtgttgctgacgtgagtaactttagaaatgactggagaaagagtaaaggaaaaataaattgcatgtaagcatggtgctctagttagaaaagttgtttcccacaggggtacaagttaacaattctgataccaatatgcatgtatacaggaattaaacaattagccaaatgaagtaaatggaaggtgggtggtgggagccaggttggggcgggwggtgacagataagtaagaggaaactgagatggtctatgacttagagttggagatattagtataaactcgtgatttgctatttaatctagagatagatggttatacgtataaatgctaagatatgtgtataggca

SEQ ID NO: 651395 - DNA, 405 bp, Homo sapiens
atacgtataaatgctaagatatgtgtataggcactggtttgtgtatatacatatattcccttactctgtgatatggtttggctgtgtccccacctaaaatctcatcttaaattgtaatccccaaaaatcaaggtggaggtaattggatcatcagggcaatttcccccatgctgttctcatgatagtgagtgagtctcacgagatctgatggttttattagtctttggcatttcccctgctggcactcattctctcycctgcctccctgtgaagaggtgctttccaacatgattgtaagtttcctgaggcctccccagccatgcggaactgtgagtcaattaaatctcttttctttataaattacccagactcgggtatttattcatagccatgtgagaatggaat

SEQ ID NO: 651396 - DNA, 625 bp, Homo sapiens
gtgagaatggaataatacactctgtcagctgagagggtctagaagcaatgatacttcagcagcagtgagcacacagagcaacaggatcttggtttctaacaccattcttcagtagaagtaaccaggcctccttgaagaaatgactgagtctaggactggggcaagaaatacacaaaatgatgctggagcatcttgtattgccaggaaataaggaagtgttttaaaaaccatcacagtgctgggagtatgtcagtggaacacaggagtcaactgaaagagctcccaatgatccaagttgggtcaatttkaacaaaaaataagtgaagtagtattatagattataacagtgtgcatatataataggctacaactcaagagtataaaataaatatttatgagtccatactattataaataaattattgaataaattaataaattggaaagaagagataaatctgcaatgcagaataatttcaaatacactatgtaaatagcctcaaggaggtagagcttaattcctttcaccttaagtgtgggctacacatagtgactccttccaagaagggcagtgtataaaagagtaactttatggtgaagaaattggataaacacgacaaacagg

SEQ ID NO: 651397 - DNA, 431 bp, Homo sapiens
atctttgtggtgacagataggttctaaacctggattctggtgaaaatggcacaagtctatgacttaagtaaaaatcattggattagacactgacaatgagtgagttttatggtatataaattatatcacaataaagctgttaaaaatctttggagacacatctagcactatgtttaggaggaaattttactgcttctaagacatatattttcctataaaggaaaaaatatccacgaggtaatcatctcaagaaattagaaaaagaagcacaaatgawacaaaacaacgtagaaaaaaggaaataagcagaacaaaaattaatgaaatagaaagcaaacataaaattagacaaatcaagaactccaaaagtcggttctttgaatatgccataattttaacgattgatttaaaaaaaaaatgaagcacaaata

SEQ ID NO: 651398 - DNA, 238 bp, Homo sapiens
catcatttgggtgcggggagtggggagcaggtcacacctgcctctattatctaaagcagagaactaggggctagagcagccaacaggggttgttttccaccctggtgagataagggagacacgcaaggagggttttgggagactcaggagaactaagggttttgsgggggagttcccacctgtcattcttgagattctgcttttggaacacaccagggaaggggcctctagggaattc

SEQ ID NO: 651399 - DNA, 430 bp, Homo sapiens
tctagagcagaaaacagattctggtggaattaatagtggtacgacaatgtgagttctgagagagacagacagagatatgtaacatgccactggttgggaggtgggaatgcctgactctgcccgggaatggggaagggctgcagagcaggttgttttcccttgaaactgctttgagtgtgaatggaagttcagccagggggaagtggcctccagacccgacatgaagtcaggggaccatgcccagagtgccaacaatgcagggccagcagtaatgaagacaaatttggcttggacaaatgttgtggtctaaaaattttgcagtagataatctaggaggaagctcctctactttattaayatgtaggttttgtggtttatggtttcagattgttttcattttgaatgataccttcagagatctatttgatgc

SEQ ID NO: 651400 - DNA, 430 bp, Homo sapiens
tctagagcagaaaacagattctggtggaattaatagtggtacgacaatgtgagttctgagagagacagacagagatatgtaacatgccactggttgggaggtgggaatgcctgactctgcccgggaatggggaagggctgcagagcaggttgttttcccttgaaactgctttgagtgtgaatggaagttcagccagggggaagtggcctccagacccgacatgaagtcaggggaccatgcccagagtgccaacaatgcagggccagcagtaatgaagacaaatttggcttggacaaatgttgtggtctaaaaattttgcagtagataatctaggaggaagctcctctactttattaacakgtaggttttgtggtttatggtttcagattgttttcattttgaatgataccttcagagatctatttgatgc

SEQ ID NO: 651401 - DNA, 574 bp, Homo sapiens
ccttcctgtgaaaatgtcctggggctgggctgggggctactctggccatctctctctttgtctgaaggaacttttttcaggacaggtggaagaagggcaactttcgggctagatggagagtctggaatgtcatctaaggagacacaaacacgtgaatcaaactgttccacaaactggattccaagaacataaagcctggtaaatctatatataaaaataagtcatttaaaaaaataaagcatcatagaatttttctggccaaaaaatagttttgtgtttttgctcagtgaagtaacatccccaaacaaaagggaaaamcaatgaatactcataaaaagttaatatctgcccaaatatgaatctatcctgtagatcaagaatttcaatgcacagctatttgaaaattagactgtatgtgacccatatgttccttctgacttaaacccaaaggctgtttggttttcataaaatatgtaatatttataagacactgcctttacctgttgtcaaacccagtacaatagtcactatacatatgtgtgtatgtgtatgcatgcatgcatgcatgcatata

SEQ ID NO: 651402 - DNA, 478 bp, Homo sapiens
tgaattcttcctgtttgtatatttggaatttgcggttaacatagagtttttataacatagtttcctggtccacatgtaaccaatttttcagtatacttttgttygcaatatttttttttttgcacaattatgtatatgatggttttctgtcttcactattggtgagaacttaaggtaattataacaggcatctcaaaacagtgggtaattctggcattctcttttaggggcttttatactacttttgctgtaataggaaatttgaaagaaaatgagaaggcatttcatttcatttgaatttcctactatattttctgtaaacatcctaaccattgcctaaagcatcatttttactctgtatagttcacacagtttaattataaactccctttaaaataaaatgtaaaaataaagaaaaaactttccaaatagtaatgttaactcaaggcagctttggtatggtggagagtacgtgaat

SEQ ID NO: 651403 - DNA, 598 bp, Homo sapiens
tgagcagactgttcccagacccccatagcttagtctctgtctaaatctatgtccctacctaccctgagctggactcctccttctcatgtgtatttatgccacatctcaaattcttctgcttatctttccaagtaacataatttcacaatatagaatttatagtagccatgttggtgagcttagatataaacaaaattattcatttgaagggtatcatagaacaaaaaaaaaaaaacagyaccagtggtctgcatggttttattgacatgaggaagtatgccaaagaaattcagatggcaaaattgctttattagagattctttggccaagagaaaataaaaacttgaaaaaattaaaactagctctcttcaagataccccaaatcttgatttgaagtgaataacctttactattcttatccatcttatgcttctacatttccttctgttcctataactcctcctgatctgcctcccttgctttctagccacccagtagcacccaaagctaaattaactcttaaaattaaacatcctgcagaacagaaaaacccctaatggttgaatataagttctggtatcatttaagtgtagcatca

SEQ ID NO: 651404 - DNA, 608 bp, Homo sapiens
atccacataatagtatatttctaatttacagtcaacaaaaccatttccttgcttttctcatagtaaaaaatatttcatttctctgattttaaaaagttgatttttgttcttccattatataactttatggggaagtgttgtttttctcttttatttttctcagcaaattttagcataagagtaatttgtagcattttggagttatcatggcaaaaagtttacttttctacagatcacatgaaagtttatttaagaaagactcagctaaagtttctttattcatttattcagcagatgtttcataagggtttattgcatgygagacagtatgggaggtacaagggatattagaataaataagacaccattcagagcctccaaaggcttataatctctaaggaaaaacagagaagtcatttaaaataacaataaatttaaataagtactatcagtgataaggataagaagaagaaatgaaaaaattcacaggaaggaagtgtttccttctgcttggagagatctagagagtctacttaagtgtcaacagttgtgcataatcttgaaaaatgactgtttgccagaagcaagaacttgaggaaaaataccac

SEQ ID NO: 651405 - DNA, 564 bp, Homo sapiens
atttagtttcccctgaggaacagaaaatttcagattcccttggtttagctttttccttgaggatttttgaaataaaggctacttctagctgcttcaaacctgctacacccagtgtaaaagcactttcttccacatcctggaagccccatttaaatacaatgctgagccgatggaccataaatgcaacccaatgtggtaattcctaaattcctatttaacacacttgatctccaacattttagtatgaataacaattagatcctgtgagacggggtgtttatagtataaaaacaggatgaaactcagaaagaaataaagccccagaaaatcatcagtctatgtagcttagttatagtagctgtacttcattaaattcaggttcattttagttcatatacgttagtattctgcaaagtttattgccatcttctctaggcattcattttctcagataggatagttttgcttttttwctttccaaatcttacattagtccctgtctctataattactattctctagatttataattgttccactatgtctttcttgagttgcaacaac

SEQ ID NO: 651406 - DNA, 616 bp, Homo sapiens
ccttcaggtccattggtttagccagaatccccccttacctctgatgcttcctcttagtaattttccatccactgagccctatccaactgtaagtccccacttgtccgtgctgtgttcagaattgagtccggttctatactgaggtctcttttctcctactgcaatcattcccaaataaaatctgttcttaccactttactgtctaactctgttttttctttaacaatatgcaagcttgcaataataaatttacagcaaaaataaacactttcatctgcttaagagggccttattaaaagtacttcgatgtattgaaaaattagactgacagctttgaaacacaaagtcctctgtttatccataaaacatatatatgattgccaccagcaattctaagcttcctttatgagtttacctctttctgcccctctaragagtgagaagagggttcagattccaggcccattcaattcttggctcctctgcaaagactgccaattagagtattttgtgatatgtacatctgtccactggactgagaccagctcatttcacaaagcagttgtcaagtggtatcaactttctgtgacaacctgtgttggattcaaacccgtgc

SEQ ID NO: 651407 - DNA, 577 bp, Homo sapiens
gaaaattaacaactcaataaaaatgaatgaaggatttgaacacatatttcatgcacatggaagaggcccaacgtcattaattattagggaattgcaatttaaaaccaccattagatgccactacatacctactagagtggctgaatttttaaaatcatactgatcatactaagtattggcaaggataaggaagaacagggaccctcatacattgctaatggaatgtaaaatagttgtaccattttggaaagcctttgagtagtacatactcctacaaggtaatccagccattccacttttaagtatttacccaaaagaaatcaaatcatatagttatacctgttacttgcacttaaatgttatagcagccttatttgtagtagcccaaaactggaaacatcacaaacgcctattaataaataaacaaattgtgtattcatacaatggaatacacaaaacaatawggatgatgcatctccaaataattatgctgtgtgaaagaagccatacccactgattccattcttataaaattccggaaaatgtaaacaaatctatagtggcaggcagcagatct

SEQ ID NO: 651408 - DNA, 480 bp, Homo sapiens
tgagctctgctcaagcttgaggcacccaagtctcaggttgaattaaatgtcctccaggaggctgctttgaaattctagtttttaaagcatgcttttcagagcagcaaakcacaaatgctatgtgtataatgactgcactttatgcaccctgtatataaaggttgtattgaacatttatgagggttcttctctgaaaaattacagataatattagaaagtatgttttctgcatttttaccaaaacctcagactccaacatactgagggcttgatggaatcaagaaataagaagagggaactggttactacaacatatcattttcctggcgcagatgaacctgtttcactcatgcaggccttggggtataggaacaaaagaactctagcagttccagaaccctttggctatgtgaacccatgttcctgctcctgttctccatggttagcaagaggaggaaggagctgagctggcaggaattc

SEQ ID NO: 651409 - DNA, 488 bp, Homo sapiens
ggtgtgcaaagtcaatacagggcctgagctctgctcaagcttgaggcacccaagtctcaggttgaattaaatgtcctccaggaggctgctttgaaattctagtttttaaagcatgcttttcagagcagcaaatcacaaatgctatgtgtataatgactgcactttatgcaccctgtatataaaggttgtattgaacatttatgagggttctyctctgaaaaattacagataatattagaaagtatgttttctgcatttttaccaaaacctcagactccaacatactgagggcttgatggaatcaagaaataagaagagggaactggttactacaacatatcattttcctggcgcagatgaacctgtttcactcatgcaggccttggggtataggaacaaaagaactctagcagttccagaaccctttggctatgtgaacccatgttcctgctcctgttctccatggttagcaagaggaggaaggagct

SEQ ID NO: 651410 - DNA, 501 bp, Homo sapiens
gaattcctcccttgtggctgaaggtgtgcaaagtcaatacagggcctgagctctgctcaagcttgaggcacccaagtctcaggttgaattaaatgtcctccaggaggctgctttgaaattctagtttttaaagcatgcttttcagagcagcaaatcacaaatgctatgtgtataatgactgcactttatgcaccctgtatataaaggttgtattgaacatttatgagggttcttctctgaaaaattacagataatattagaaagtatgttttctgcatttttaccaaaacctcagactccaacatactgagggcttgatggaatcaagaaataagaagagggaactggttactacaacatatcattttcctggcgcasatgaacctgtttcactcatgcaggccttggggtataggaacaaaagaactctagcagttccagaaccctttggctatgtgaacccatgttcctgctcctgttctccatggttagcaagaggag

SEQ ID NO: 651411 - DNA, 538 bp, Homo sapiens
aggtaatggacccattttctcccctgcccaaggaggctgaaaccagatggtccaaggaggttcttaccagacaacttggaaagggtgtaactggtactcccagggaagcggacatccatgtccaggtgtccaaatagaaaaagagcaggagctataatcagagccaaaaatcaggagctagcaaaatggacaccaccacagaagatactggtgaggagtaaaatcacagactggctcaacttyatcttgggtagaatcataacagcttgagtcatctttaaaaattagatgtatacctgttgggtctggcacttttattctatttaccactttgaaattacatccatttgaatttccgtcttttttctatgtcttattgtgttgggacttctttgcagcatcgatactatcactctctctctatatcgtaaaacttctctcctaactttcttgacaccagcttctcctacttttccaactgtccctgatttcttcttctgtcttagttctggctgatatgatgaagtaccgcagagtc

SEQ ID NO: 651412 - DNA, 620 bp, Homo sapiens
tgtccacttgggcatttaaaagggctacagaaacctaggccccttccatctttggaggctmttagtttactaaaaattttttgaatgccaaaatagacgtataacagttgaaatatagcatgaatacacttaacaaattaatacttagaaaaaatatagtgcaatataactatgctatttaaaagataataacattcataaaagtcattgctccacataatggaggtagacagttaatggaacataagcttaaaactatacgacatctttcaatgtcatcagtataccccatttgaagatctacttgagccccttcacgaatatgggccttggataaatagcccttcaggtctctactagtatagaggtagtcccaactcctttagcccaagaaagcacttcaaaaatagatgttggaggcagtggatatcctaaatatccgtcttacatgttctagaagtgtaacaaaatttcacacataccccattaatatgtacaaatattaggtatcaaaaaagtagaccttagacttcgttttgggaaatgatggtttctgagacactcctgcccctttccactaagcctcctttctaggtaacatttttgatggtctattttga

SEQ ID NO: 651413 - DNA, 620 bp, Homo sapiens
tgtccacttgggcatttaaaagggctacagaaacctaggccccttccatctttggaggctattagtttactaaaaattttttgaatgccaaaatagacgtataayagttgaaatatagcatgaatacacttaacaaattaatacttagaaaaaatatagtgcaatataactatgctatttaaaagataataacattcataaaagtcattgctccacataatggaggtagacagttaatggaacataagcttaaaactatacgacatctttcaatgtcatcagtataccccatttgaagatctacttgagccccttcacgaatatgggccttggataaatagcccttcaggtctctactagtatagaggtagtcccaactcctttagcccaagaaagcacttcaaaaatagatgttggaggcagtggatatcctaaatatccgtcttacatgttctagaagtgtaacaaaatttcacacataccccattaatatgtacaaatattaggtatcaaaaaagtagaccttagacttcgttttgggaaatgatggtttctgagacactcctgcccctttccactaagcctcctttctaggtaacatttttgatggtctattttga

SEQ ID NO: 651414 - DNA, 441 bp, Homo sapiens
gaattcttagttactggtccatgaatactctacccatgatggcagacaatgaraaaataatgaaaggaagaatgcaccttctgtcttccctgctcagaaaatcccttcaccagactcacttctcctacctaatcctttgaatctttagattgcatataaacattgttttgggttcagtttaatggcataagagccattaagaaatactccactaacttccagcggtttgaagtctagattctgtgacagattgatatgttttaaaatgcacccttcctgaaaggacgctctgtaacttacgtctgtgccacttgcttctgctgccctcctgtggcttcccggggtcctaacaacgtgtgcagccttttgtccagctgcccagtctcaccctttgtcatctgttttctctgctgtttattctcctctttaccctcatctgtg

SEQ ID NO: 651415 - DNA, 441 bp, Homo sapiens
gaattcttagttactggtccatgaatactctacccatgatggcagacaatgagaaaatratgaaaggaagaatgcaccttctgtcttccctgctcagaaaatcccttcaccagactcacttctcctacctaatcctttgaatctttagattgcatataaacattgttttgggttcagtttaatggcataagagccattaagaaatactccactaacttccagcggtttgaagtctagattctgtgacagattgatatgttttaaaatgcacccttcctgaaaggacgctctgtaacttacgtctgtgccacttgcttctgctgccctcctgtggcttcccggggtcctaacaacgtgtgcagccttttgtccagctgcccagtctcaccctttgtcatctgttttctctgctgtttattctcctctttaccctcatctgtg

SEQ ID NO: 651416 - DNA, 437 bp, Homo sapiens
atgaatactctacccatgatggcagacaatgagaaaataatgaaaggaagaatgcaccttctgtcttccctgctcagaaaatcccttcaccagactcacttctcctacctaatcctttgaatctttagattgcatataaacattgttttgggttcagtttaatggcataagagccattaagaaatactccactaacttccagcggtttgaagtctagattctgtgacagattgatatgttttaaaatgcasccttcctgaaaggacgctctgtaacttacgtctgtgccacttgcttctgctgccctcctgtggcttcccggggtcctaacaacgtgtgcagccttttgtccagctgcccagtctcaccctttgtcatctgttttctctgctgtttattctcctctttaccctcatctgtgatagctgtaggaattc

SEQ ID NO: 651417 - DNA, 435 bp, Homo sapiens
cacagctaaataatacaaagaaatcagaaaaacaaatcaggttatgaatgagaaatctgccaaaaagatagatatgatttaaaaaaacaaaactgaaatcctgaaactgagtaattcattgaatgaaataaaaatacattaagagagcttcagcaatatactaaatgaagcagaagaaagaatttcagaacttgaagataggtcttttgaaatacccagtcagacaaaaatttaaaaaaagaataaacaaagcctatgtgacttataggtcaccattaaacaaccaaatagtcaaatttctagtgtcccagaaggtaacagaaaaacaaagggwtagaaaacatatttaatagtccaggcttgtaatcccaacactttgggaggccaaggcgggcagatcacgaggtcaggagatcgagaccatcctggctaaca

SEQ ID NO: 651418 - DNA, 549 bp, Homo sapiens
gctgttcattcttcttctagtacagtaacaactttgctttgatatcaaggaaattatgaaacattttaatgttaaccattataaccacattatrtaaccagtataaaagagaaaaagaatggcagaagaaaaataataaagtgtttattttctataaatatgtacctcagatttcttaaaatgctcttgtggataatgcatttctgctgcattttctagttagttattgctggtgtaaagaaatatcatgggctaagaaaacccgctacactctcttattagttctaacagttttttagttgatgaagctttttcaaatgtaaatgatcttacggttttcatttcattttactttctccacttccaacccttaacctcttatttattgccatatttcacgggctgattccaacactatgttgatcaggattgaaagtagagaaagtctatttttgttcccagccttaaagagaatgcataaagggaatgcacaataatcttaagaaatattcaagactacacaatctggcctccaatttgctaccccag

SEQ ID NO: 651419 - DNA, 549 bp, Homo sapiens
cctctgtgacccaagtgacagtgttttgtgaatactaaaatataaaatgacataattgttatttctgatagtggattgttatgtagaaaatgctartgacttttttcttgattagaccaaaggtaaagaaaataggttttcattatttacagaagaactacaagccagagtttatttcaattaattcaaacattttaaaatcacctatcattgtttccttcattcatttaatccaggtatttgcagactacagcctgcaggccagatgttggcttttataaataaagtcttactggaacaaagccatgcttattcatttacatattttctatggctgcatttatactttaatagcagaagtgaaatacttataatgggatttttgtggtccgcaaagcctaaaatatttactactggggacctttacagaaaaggttttctggcctgtgatctaatcaggctttcaatcatttgttatcaattaaaaagtgtttgcagagtctaacagacattggtctcagtgctaagaatacaacgatggggcggggc

SEQ ID NO: 651420 - DNA, 605 bp, Homo sapiens
ggctgtgagcattgcaaggagaaggaatacatgctgagttccagggataaaagaaagtatggcatgagtgatgttcagtctggtcagagcaaagggttttagagggtagtgaygaaaaagagaagcaagcaggatccagattattctgggtcttataaggagtttattctgtggaaaatggaaagccattgaaggatttaagttataagagagagacaatcagatttgtataatattagtgattatttagatgtcagtatggagttccgagaagagaaagactaggatcataaatagcaattaaaaagctcttgtagagatgaggctcccagctattgccaagtgaagagactggtaaatcctctccctagaaagaaactataaagctggacaaaattggcaaaaataattattttagcaatctggaaacgaacaaaggtgtggagcaatctgagaagcatttatatctgaaaatctacttaactttggttatgaacactggaaatctctggtgttctgaacttgggctactcccatatcttcccacactcagccaacaaggagatttttcagggcagggcaggtcatgaaggacaataattttt

SEQ ID NO: 651421 - DNA, 605 bp, Homo sapiens
ggctgtgagcattgcaaggagaaggaatacatgctgagttccagggataaaagaaagtatggcatgagtgatgttcagtctggtcagagcaaagggttttagagggtagtgacgaaaaagagaagcaagcaggatccagattattctgggtcttataaggagtttattctgtggaaaatggaaagccattgaaggatttaagttataagagagagacaatcagatttgtataatatkagtgattatttagatgtcagtatggagttccgagaagagaaagactaggatcataaatagcaattaaaaagctcttgtagagatgaggctcccagctattgccaagtgaagagactggtaaatcctctccctagaaagaaactataaagctggacaaaattggcaaaaataattattttagcaatctggaaacgaacaaaggtgtggagcaatctgagaagcatttatatctgaaaatctacttaactttggttatgaacactggaaatctctggtgttctgaacttgggctactcccatatcttcccacactcagccaacaaggagatttttcagggcagggcaggtcatgaaggacaataattttt

SEQ ID NO: 651422 - DNA, 551 bp, Homo sapiens
tttgaatggcacatgctagctaattgttattactctttcagggtataatttctactctccctgtaatgttaaattttaggtgtaaacttgactggattaaaggatacctagatagctcataaagcattatttctgggtgtgtctgagagggtgtttccagagaagattggtatgagagttggcagattaagccagggaaatccaccctcaatgtgggtgagarccatctgatcagctgcaggtccaggcaggggaaaggtgaaagtgttagttctcttggaggtgggaaacccttcttcagtcctttgacatcagaactccaggttatctgacctttggactctaggaactgtaccagtgttctcttgggttttcaggttttcaactttgaacagagttacaccattggcttccctggttctaaggcttttggacttagactgagccatgctactagcatccttggatctccaacttgcagatgggctatagtgggacttctcagctgctataatcatgtggactcattcccctaagaaatccccactctc

SEQ ID NO: 651423 - DNA, 570 bp, Homo sapiens
ttgtgctatagactgtactacgccttccacattccagagggctttatgccagctagtcagtgagtgagccagtcccaaactccatcttattatcagttttctcagatcctactcttggtacctcttgtgtcagttcaggttctccaagaaacagacaggtaggaagagcttccagattgcactgcagctctgacacgtgggtaaagacagatgatagaaagtaaggggtaagaagagcctcagacttcagtgcagttccaagaaagtcatggccaggctgatgaggagaccccaagagcaaccccaagaggttgctgttagaagaatccaatgtcagataggcacagcccagtttaagtaaccacactgtgctcaatcattggcygagagcagctcagggaagcatggcttggatgtgagcaccattgtggctcccaggtgagtcaggtggacgctgtcagtcaactgtaacccacagcagtttctgctgaatgatgatatgagtgtaattttatcactgccacatgtgtcttccccagtgtttttgaggattgccaggctagagtgttt

SEQ ID NO: 651424 - DNA, 567 bp, Homo sapiens
ctacgccttccacattccagagggctttatgccagctagtcagtgagtgagccagtcccaaactccatcttattatcagttttctcagatcctactcttggtacctcttgtgtcagttcaggttctccaagaaacagacaggtaggaagagcttccagattgcactgcagctctgacacgtgggtaaagacagatgatagaaagtaaggggtaagaagagcctcagacttcagtgcagttccaagaaagtcatggccaggctgatgaggagaccccaagagcaaccccaagaggttgctgttagaagaatccaatgtcagataggcacagcccagtttaagtaaccacactgtgctcaatcattggccgagagcagctcagggaagcatggcttggatgtgagcaccattgtggctcccaggtgagtcaggtggacgctgtcagtcaactgtaacccacagcagtttctgctgaatgatgatatgagtgtaattttatcacygccacatgtgtcttccccagtgtttttgaggattgccaggctagagtgtttgcattcaaatgtct

SEQ ID NO: 651425 - DNA, 393 bp, Homo sapiens
gtgtgaacatagcaagaaggcaccattctgtgaagacgaaagtggcccctcaccagacatccaattttctggcacmttggtcttggatttcctagactccataactatgagaaataagtttcttttatttataagctacctagtttacggtattttgttgtagcagccagaatggactaagacaatgcattagtcagtttttatgatgctgataaagacatacccaagactgggcaatttacaaaagaaagagatttaatggacttacagttctatgtggctggggaggcctcacaatgatggtggaaggtgaaagtcacgtcttacatggcagcagacaagagaagagagcttgtgcagggaaactcctgtttttaaaatcatcagatctcg

SEQ ID NO: 651426 - DNA, 595 bp, Homo sapiens
ggtatctaatagtaagagaaattggcatgagataatctggccaattaacagtatgcagtcactgcatttatgttttattgtagggatgtgacgagttataaataagtaagaacaagyaatgctagtataaagtacctagaaatacctgacctctttgaggtcaggagtcaagtgttattcacagggatgaaaattattacaaatgaaagctgaccatggtgacttctactgcctagggatggaataggtatttgaataattagtagtggaataaaaaatctttattccattcccttccagtcatagaagctgttggagaaaaggaaaggctgaaattacaaagcctctgctataggataagacccagagcaggtgattcttttttgagaaagaacaaattaacaggtcttttggagatgaaacgtaggctcagaagtgagtggatggtggaaaggtaacttgcaagacaccattaggtcatgggttagataaatggaggagatgggtaagctaggaaaggcctcgataaaggcgcagggactgattaacgtgaccggacttaccagggcaatgaagagacccaagaacaaggatg

SEQ ID NO: 651427 - DNA, 595 bp, Homo sapiens
ggtatctaatagtaagagaaattggcatgagataatctggccaattaacagtatgcagtcactgcatttatgttttattgtagggatgtgacgagttataaataagtaagaacaagcaatgctagtataaagtacctagaaatacctgacctctttgaggtcaggagtcaagtgttattcacagggatgaaaattattacaaatgaaagctgaccatggtgacttctactgcctagggatggaataggtatttgaataattagtagtggaataaaaaatctttattccattcccttccagtcatagaagctgttggagaaaaggaaaggctgaaattacaaagcctctgctataggataagacccagagcaggtgattcttttttgagaaagaacaaattaacaggtcttttggagatgaaacgtaggctcagaagtgagtggatggtggaaaggtaacttgcaagacaccattaggtcatgggttagataaatggaggagatgggtaagctaggaaaggcctcgataaaggcgcarggactgattaacgtgaccggacttaccagggcaatgaagagacccaagaacaaggatg

SEQ ID NO: 651428 - DNA, 571 bp, Homo sapiens
aattctgaactccatgtgtttagtggtcttcgttcctaccatggggaatatctatcagtgaaacataagctatgattttggcctgggcacttcagactccatatgccaagggacaagttggcaaggggggaataccatattgatagaagcaattgagctgatcatcaggagaaaggctgttatgacacactgggacaggggaggaacatatttggtacttgattatctcatggcaattctttgcccagttttcatgataaattgacaaatacagtagccacaatctaataagggcttgaggaccagatgtttagacaatcagagatatgggtttgggtcatccaaccaggtaagccaccaagaccaggtgctagctgtgggagaagtgattctaggatagagtgtagaggaagaggacaataaattatcacagatgtagcctcaagcccaactgcatcaatgagayatagcatttctccattaactttcccctaggaagcttactgcaggaaagaaatccctcagagtcctgaagatacagctttcagaacttaggtgaagcaagaggact

SEQ ID NO: 651429 - DNA, 566 bp, Homo sapiens
gggtttcttcaccttggcatttgtggcattgtggcctggatacttcttttgtggggctgtcctgcacagtgtagggtgtcgagcagcatccctggcctctactcactggaggccaggaacactcccatccccagtcctaacaaccaaagatgtctgcagccatcgcaaaatgtcccctgaagggaccaaattgcccgcagttgagaaacaccagcccaggacagtgagatgatagtgaaaagaggaagaaataactagtgacccaagtcagctgcctctgtgcgacctgaagcccagagggttgggacgtrtgtgttgctggatgacgacatgaacggaatgaatgagccgatgtagaacgcctgggagacagaggagcccctcatgtggaacctgattgctgcagatcttggagtttggtctcccctggctgcaagagaagagtgtagacgaaacacaaccaaagtgactcactctggagaacaaaccagaccattcacaagcagaaaccagcgcaggttcagttatgtttggtatacccaggagagaagggaggcagtgtccca

SEQ ID NO: 651430 - DNA, 613 bp, Homo sapiens
gctcactgcagcctctgcaacccgggttcaagcgattctcctacctcaggctcttgagtagctggaactacaggggcatgccaccacgccgggctaatttttgtatttttagtagagacagggtttcaccatgttggccaggctggtctcaaactcctgacctcaagtgatccgcccaccttggcttcccaaggtgctggaattacaggcatgagccaccatgcccaaccatatgttctgtacatttttaaacatcattgtctgttagcaatatcttttttaaggtcatttttcctatgaagttaaaatatgaacaatttcatcaacaagatacctgaattactgaatcattgtttttgacactgtttttacagcttagcagtctttgaagcgtctttctgactttaatgttgtcctcaaagtatcaagaaaaaaaaaggaaaagatcacaattatgtgatttttcacagaagtttgcaactttcatattggaaaaatatttagacgtcaaagataaatattttatttaaaaagaatagctaartccaattaaacctttatattttagaccgactagttcagaaatactgatacctgaagtaagactataaat

SEQ ID NO: 651431 - DNA, 581 bp, Homo sapiens
ggcgggtggatcagttgaggcaaggagttcaagacaagcctggccaacaaagtgagaccatgtctttactaaaaatacaaagaattagctgggcatggtggcacacgcctgtaatcccagctacttgggtagctgaggcatgagaatcacttgaacytgagagtagaggtttcggcgagcagagatcacaacattgcactccagcctgggtgacagagggagaccctgtctcaaaaaaaaaaaggcggggtgaggggggtgcagaggtttgttaggaataacaaaaggcactctgtactgctatcactcaggaaattcccaagggttttatgagttctataataagtcaggaaccaagaagaaagaccaaatgtatttttatcttataccttaatagactagtcatttaaccactctgtgccttagttttctataaagcgagggaaataaaagcacctatttaccaaggtggctgtgaccgttcagtgagaactattcctggtattttatgtaagagttaatttataagagttaattttttttatttgttgctatgtaacttatgtaactaccaaatggac

SEQ ID NO: 651432 - DNA, 581 bp, Homo sapiens
ggcgggtggatcagttgaggcaaggagttcaagacaagcctggccaacaaagtgagaccatgtctttactaaaaatacaaagaattagctgggcatggtggcacacgcctgtaatcccagctacttgggtagctgaggcatgagaatcacttgaacctgagagtagaggtttcggcgagcagagatcacaacattgcactccagcytgggtgacagagggagaccctgtctcaaaaaaaaaaaggcggggtgaggggggtgcagaggtttgttaggaataacaaaaggcactctgtactgctatcactcaggaaattcccaagggttttatgagttctataataagtcaggaaccaagaagaaagaccaaatgtatttttatcttataccttaatagactagtcatttaaccactctgtgccttagttttctataaagcgagggaaataaaagcacctatttaccaaggtggctgtgaccgttcagtgagaactattcctggtattttatgtaagagttaatttataagagttaattttttttatttgttgctatgtaacttatgtaactaccaaatggac

SEQ ID NO: 651433 - DNA, 539 bp, Homo sapiens
acaacacacactggggcctgtcggcggggtgagggggaaggggagggagggtattgggacaaatacctaatacatgcagagcttaaaacctagatgacgggttgacaggtgcagcaaaccaccattgcacatatacctatgtaacaaacctgcacattctgcacatgtataccggagcttaaagtaaaatttaaaaaaaaatttaaataygtaaaaaaagatgggataatgccagcaaagtccttacgtttttgttagtttttctttaaaatgtctcccattgttaaatatcctgttatgctaggattcactgtaccagtaaattgcatcaattctgctaatcctgtattctgtataattggaagggattaactaatttatatgcgttctaaactttatttataacatcaattagcatctaatacatacctgatgcattttaactgcttttgcccagagctacaatcttattgaagagtagcattctactttcaaagaaatattgaaatataaacctttctctctataccttcataatt

SEQ ID NO: 651434 - DNA, 521 bp, Homo sapiens
aaatctatccaacctatcatgtcaaaaagaagcatacaaggctaggcagggtgtctccaagctcatctagtgacatagcctcttcactaggggagagcattgaatctgggcccctgagtgacattctttctgatgaggagtccagtatgcctctcgctggcatgaaaaagtatgctgatgagaagtcagaaagagcttcatcctctgagaaaaatgagagccattctgccactaaatcagctttaattcagaaactgatgcaagatattcagcaccaagacaactatgaagccatatgggaaaaaatagaggtaaggtggttttcttaacatgaatgatttctcacttgagttttggaagtattgctgggagaaggtcacactcctacactctattataaaatgtatggctatttttgataaatctgattctccaaagaaagaaaagaaaaarcacaatgatcaatgcatgtgacaaagagtatgaatcactaggaattgcccttgtcagtgcattagctt

SEQ ID NO: 651435 - DNA, 519 bp, Homo sapiens
gaattcagattctgaaatctatccaacctatcatgtcaaaaagaagcatacaaggctaggcagggtgtctccaagctcatctagtgacatagcctcttcactaggggagagcattgaatctgggcccctgagtgacattctttctgatgaggagtccagtatgcctctcgctggcatgaaaaagtatgctgatgagaagtcagaaagagcttcatcctctgagaaaaatgagagccattctgccactaaatcagctttaattcagaaactgatgcaagatattcagcaccaagacaactatgaagccatatgggaaaaaatagaggtaaggtggttttcttaacatgaatgatttctcacttgagttttggaagtattgctgggagaaggtcacactcctacactctattataaaatgtatggctatttttgataaatctgattctccaaagaaagaaaagaaaaagcacamtgatcaatgcatgtgacaaagagtatgaatcactaggaattgccctt

SEQ ID NO: 651436 - DNA, 554 bp, Homo sapiens
aagcctctctccttggctcacagatggccrccttcttgctgtgttctcatatggctgttcctctgtgcatgcacacttctggtatctcttcctcttcttacaaggacaccaattctattggattgggacccccacccttgtgacctcgtttaacctttattgccttcttaaagattctatctccaaatatagtcacattgggggttagggcttcaacataggaatttgggggtgaggggacataattcagtccataatattatgttaaaagtttaccagaggtactagttactagaatctcttaggcattcccactatttggtatggtgggcatccagcctgataggaactgctgattcaacttcttgatgcaactttctccaagtacaccagccagtaggagctataccagcatatttggactaatccattaggcgactatcttgtcatgacagaaaaagagagatagaggaagattaaggccatcacagaaatgacaatagcttccgctggcacttcattgtggccaagatagcatacaaattttctaacct

SEQ ID NO: 651437 - DNA, 554 bp, Homo sapiens
aagcctctctccttggctcacagatggccaccttcttgctgtgttctcatatggctgttcctctgtgcatgcacacttctggtatctcttcctcttcttacaaggacaccaattctattggattgggacccccacccttgtgacctcgtttaacctttattgccttcttaaagattctatctccaaatatagtcacattgggggttagggcttcaacataggaatttgggggtgaggggacataattcagtccataatattatgttaaaagtttaccagaggtactagttactagaatctcttargcattcccactatttggtatggtgggcatccagcctgataggaactgctgattcaacttcttgatgcaactttctccaagtacaccagccagtaggagctataccagcatatttggactaatccattaggcgactatcttgtcatgacagaaaaagagagatagaggaagattaaggccatcacagaaatgacaatagcttccgctggcacttcattgtggccaagatagcatacaaattttctaacct

SEQ ID NO: 651438 - DNA, 554 bp, Homo sapiens
aagcctctctccttggctcacagatggccaccttcttgctgtgttctcatatggctgttcctctgtgcatgcacacttctggtatctcttcctcttcttacaaggacaccaattctattggattgggacccccacccttgtgacctcgtttaacctttattgccttcttaaagattctatctccaaatatagtcacattgggggttagggcttcaacataggaatttgggggtgaggggacataattcagtccataatattatgttaaaagtttaccagaggtactagttactagaatctcttaggcattcccactatttggtatggtgggcatccagcctgataggaactgctgattcaacttcttgatgcaactttctccaagtacaccagccagtaggagctataccagcatatttggactaatccattargcgactatcttgtcatgacagaaaaagagagatagaggaagattaaggccatcacagaaatgacaatagcttccgctggcacttcattgtggccaagatagcatacaaattttctaacct

SEQ ID NO: 651439 - DNA, 625 bp, Homo sapiens
tgggtataatactcgttaaactttgtggctttgcagtggaagtaaaggggtggcatttgagaggagtattgttctttgactattgctcaatatctctgtaatctcaattttctcataaaaatttgtatgttcttttaaaagattttttctgttgtgtttctgattgttgactctttacatttagttttatccttttaaaaataaaatattattacatcagtagttattattctttcaggttycatgatgtttgcaaacctcttagttggcagtcttctatatgtgctgttaacattctgcatacctcctcttccacatcatcaataaagatactaacatcactagatctagcgttttctttgtgccttcccaccagccataccccctactcccagctgaatgtactccatatgacattatcctttgtttatagtgtttgacatagttcttaatccaattgagtgtcttcttattcaagtcaattagtttgggcaagaacagttcacatgaaccaacaaatagattgcagttttgatctgattcctgaaacttcaattatataactatagttattttagcagtgtttctttaagttctttctcagcaaaccagagcattcataatt

SEQ ID NO: 651440 - DNA, 625 bp, Homo sapiens
tgggtataatactcgttaaactttgtggctttgcagtggaagtaaaggggtggcatttgagaggagtattgttctttgactattgctcaatatctctgtaatctcaattttctcataaaaatttgtatgttcttttaaaagattttttctgttgtgtttctgattgttgactctttacatttagttttatccttttaaaaataaaatattattacatcagtagttattattctttcaggtttcatgatgtttgcaaacctcttagttggcagtcttctatatgtgctgttaacattctgcatacctcctcttccacatcatcaataaagatactaacatcactagatctagcgttttctttgtgccttcccaccagccataccccctactcccagctgaatgtactccatatgacattatcctttgtttatastgtttgacatagttcttaatccaattgagtgtcttcttattcaagtcaattagtttgggcaagaacagttcacatgaaccaacaaatagattgcagttttgatctgattcctgaaacttcaattatataactatagttattttagcagtgtttctttaagttctttctcagcaaaccagagcattcataatt

SEQ ID NO: 651441 - DNA, 637 bp, Homo sapiens
gtaacaattcaaacctgcatgtaaataaaatcactgtttgcattactttaaaattattaagacagtaacacagacaaccaaaaaatgtagtaaagtctattgtgattgttgaagaggtattagaattaacactaggcttttttattctccatagggaaaatagtagaaaaatatttagaatatgtgtccatgcaaatgtgtgggttggagggggatttttaaaaaataagtgctacatatgtgacaacataaggaagaacattattaaggaatttcacagaatttttatgtaaagtcttatcatacagtattatgatctcagggatattttgtgatatttacagagtcttctgagggttcatttattcaggtcatattttaaggaggaacttataagattcagatctaaaatataattctgtaatatgcccaactgatcccattaaatccaactcgaaaaggagcastataatgatgtgaagaattcccattctttgagttgttacacctcacttgaaatgcattccttctggattaaaacagcaatttctctttgtttctctttccaggctgaggttcaactatgctacctggaagcacaaagagatgctgttgagcagatgtccctcaagctgta

SEQ ID NO: 651442 - DNA, 604 bp, Homo sapiens
tcatgttgcactggttgtattggtattggtctttggcgatgagatactgttgtgtctgctgacacatgctgcttttctgaaktcattcttgccccactgaaggtttttgttttctttatctagattcatttatcatcattcaccagggactatgctggacactgaggatgcaaagataataaatttatctcttgcccttgaatttcttagtcataatcaaaatttctttttcagtggtgcacatgtatgaaaaagaaacaagcttctttcttttgtcttgccaattgatcatttttatgaggcaccctacactcacactttcctagaaaagcaagaaaaatacttgctttaagatcagagttcaggctcttagacacattatagcctctctaataaattaacattctctttaggaaatactctcttgggatcaatactctgtttttcagattttctatttgtctccattcttttctccaagatgacatctgagcatatagggatttacatgatcttgtaattctggggtgcagtggagtcccctggcttaacacagtgcttaggtacagtctggctgggcttattgaaatgggtcttgtcaagg

SEQ ID NO: 651443 - DNA, 406 bp, Homo sapiens
tactttctataagaaaaagagataatacttcctttgaagaaattttgttttgatacttagatgtgaaaacattttcttttaggatttttttaaaatacaagggcttagaatggtatggtaaataaatttctaamcataataattattaaatataaatacgtgtggaatagaattagaaattctgaggaataggaaatatagagtacaagaagaagtatggaacatagttgacttgctattttataactattgatatcaaaatgatgtcatagatatgaactaatctcagaaaacagattaatcacactattcctgtatttcataaattcacacatttcagctttctggaatagctctcttttattttgttctggaccaaattgatctaactaatttccgatgtgat

SEQ ID NO: 651444 - DNA, 465 bp, Homo sapiens
caaagaaaagatgatagacttgggttggctctttagctaatcatcaggctgttctgtgaaagcccccaaatgttcttaagcacctcaataccctgggcaagtattgccatgctgagcctcactggggcctcctgcattttgttagattcaggaaagctaaggatgaaaacatttatgctttttgggagatgcactaaaggcagcattgccctcagatgattcaacctcctggatcccgttatgccaaaggaagttactaaaggagggtccccatggagagatgctctataggaatatcatttgcagaaaaaccattttgcagtcctgttgaggaagcagtttcagttctcagaaacaagagccttcytaagcatatttttaataatgtgggcttttgtgaaactcatacattcttaaactaagcacttctgtgacactctatccctaatgaggcacactggggta

SEQ ID NO: 651445 - DNA, 576 bp, Homo sapiens
gaattccttgagctcaggagttggaggctgcagtgatctatgatcatgccgctgcactctagccttatctctraagagaccctgtctctaaaaaataaatgaataaataaatacataaaatgtaatgaaaatagttcacttttttgatactcttcagcaagtttctgtgtggaggcagctaactcgatctagactgagtcagacatcatgcctaatttctctgtccactaataaatatgaattactctgaggatgaatacacacacattcacatacacttccaaacagcaaataccaaaaggaattagcagttcaggagggtggctcaactgccttctgagaactaagggccatgtcctctgtgattaaactgagtcaagcccatctgtaattgagcactggtagaatgggctcattcaagcatgtaacgcccttaaatttttcatttaaattttctgtgccttagaaatgaactttacagtaatctttgctttctaaaaataaatgtgtttcttgttaagcatttagtctcatcacaaattctgttttagaaaaaaacaacagaaaatagtgaat

SEQ ID NO: 651446 - DNA, 476 bp, Homo sapiens
catcatgcctaatttctctgtccactaataaatatgaattactctgaggatgaatacacacacattcacatacacttccaaacagcaaataccaaaaggaattagcagttcaggagggtggctcaactgccttctgagaactaagggccatgtcctctgtgattaaactgagtcaagcccatctgtaattgagcactggtagaatgggctcattcaagcatgtaacgcccttaaatttttcatttaaattttctgtgccttagaaatgaactttacagtaatctttgctttctaaaaataaatgtgtttcttgttaagcatttagtctcatcacaaattctgttttagaaaaaaacaacagaaaatagtgaatgagaagggtargagacttaggactcagcgaattctatctcagtgccaagactttaaaactgggaataaatgctacttctccatgacctgggtctgataatttg

SEQ ID NO: 651447 - DNA, 362 bp, Homo sapiens
tccaaattcctcagaaaagtgattctagagaaaaactgagagggaagcattgacagtttctttcccattttggtaagagttcaggtccaggaatagtggaaattccattacagcaaagatgaaactaggataggagtgcggtgggatcgatttgatcatggataaaatttggaacttttaatattggctttttacagaataaccaactaacatgcctttcttgcccctttttttccccttttctttcctttcacaaggggtttgtaaacaaactggatgaattcattcaatggttaaatgaagccatggaaactacagaraattggactccccctaaagcagagatggatgaccttaaactg

SEQ ID NO: 651448 - DNA, 624 bp, Homo sapiens
gactgggggacattcgatgaacctcgtggggtttttactgaatgcttcaaatggccgatatcaattatgaaggggtggaaactaagtagtggagtgtgataaagcatgaagaaaaagcacgtgtcataggaaatgaaaattcaagctgtaaggatctcatctttattcctttcactgatagcataaaattgacaaaggcaatgaacatgaatccttgggtactcaactgtggggttgattttctgcccctctaacacactcagaatttggattgaataaacattatgtgggagtcctacctgtrtgcgagttcacagggttccagaactgttgttctctatgatgttaagtgagagagagaagggagagatggagagggagaaaagaggggaaagagataatgtttcaggttttggtgtttgttttttgcagcatgtttatataacagaaaaacagctttaaaatcctgttgctgcatgcaaatagccttgcagatgataaagaatgacaaaactgtgtggtagaggatgagtgtattgcttccctttttagagacctgagtcgatggtgtgtaaaaatgcaagtgaccctaaccacctctcttgtacatgggtttttatatac

SEQ ID NO: 651449 - DNA, 611 bp, Homo sapiens
aagcttgataactttggaaaatttgaaatcgtcgttgatcctagaactgagaaaattgttgtgaccctcacaggcaggctaaataaatgtgcagtgatcatctccagatttactgtgcaactcaaagacctagaaaaatggcagattagtctccatcccatcagtttggttttattgacctgatgactgaagctggcatcatggaccacgaggaagcacgagaaaggcacagaggagagaaaaccctgggattctttttctggggatgaaatacatgattacaaattaaatgcttccctcaataaacaaaaccgagagagagagagagagagagagagagagagagagagagaagagagtgagcaaagccccaggtcagttgtctgcyggctgctgctctgagtctcagccagagctctggacgaggaggaactcaatccccttggcatccccatgagtgcctagagtggagatttctcctctgcagcaaactgggtatctagtacatgtggacgttctcactgaggagtgtttcagagccattagcagacacagaagtattctggccatccagggagttggtcgcagctcgctctagcagaggagtgagg

SEQ ID NO: 651450 - DNA, 263 bp, Homo sapiens
cccagggccgatcgtctttgcattcgttacatgcaggaccacagcacatggctataactaaagcagttactgaaggaaaatggctccgacctgtgaacatttcatcctgggaccagggaggagcccatgagacacacaggtgctataaaccaacaaaaytgagggtctctcagcaaaggcgtgcggcaaggaatgttgagcaggaaaccaacacggttttccatacccttcttgaagatttgcattgcacattaatatgttta

SEQ ID NO: 651451 - DNA, 269 bp, Homo sapiens
tttggtccttgcatcctatggttatacaaactggccttatgactcatcatcttgtccatagtcttgaattttgatattggttaaagattccagaaactatgtgaaaatattaatatatatatatatwtttttgagacaggatctcactttgtcacccaggctgaagtgcagtggcgctatctcagctcactgcaagctctacctcctgggttcaagcgattctcccacctcagcctcccaagtagctggtattacatgtctggcaccat

SEQ ID NO: 651452 - DNA, 346 bp, Homo sapiens
attttcattgcatcatgtcatggcacatactgtcaacacgatttatcactgttgatgtttaccttgatcatcaactgaggcagtagttgtcaaatttctccactgtaaggcagctacttttattcctttctatactatatatttttttgagagtccctacgcatagccctcactttaaaactagagaattgtgctcctatcgtcttgagagtaaagcagctacacaaattatttggtattcttctgcaaggaagwtttgtttttgttccaccatttctttacttattcaataagtgaagatttatgcatatttattttatattttggttaaaattcaatgctactt

SEQ ID NO: 651453 - DNA, 551 bp, Homo sapiens
cttccctctcatttgccatgcttcctcaatgccccacacccccagtaacataaatactgttctgtcaaatttcattatcatgtgatagaacaccaggaataagagggagctgtgagagatgaggtcagaacaatagtaaggtcataggagtttggacttttctcttcaggtcaatatactctcaagtacattgaaaaatatacttgagacaatagattgaatatacttcaaaacagtaggttgaaaaaattrataggtacatttaaaatagttcatagtcatatgattatgatcttattaggctgatcacattttaacagtttcctctaccaaagagagctctttagaactaatttaccctgtggctctcccaagactatagtatatagcatttgtcatgaaactctttggcatttttttcacaatatacattggaaatttgctttagacaatggaggtcatagaaatatttatcttgttattttaaagattacttagatggcagtacaaaggatggtttcaaggaactacaaataggctaaatatcacca

SEQ ID NO: 651454 - DNA, 490 bp, Homo sapiens
actggctcccttatttctgttttatggcataatatacttttggaataatcagatgacatattaaaccttgaaggagaggaaattttgaatgtcttggtggaagagttggcataatttttttcatggragataagttgaaagatacttagagtcctctccagagtaatgccaatgtaggcagttctttcatacctgccttgggctaagtgttttctcgggcaagtagtcaccatgtagagttaggaaacaatttagggactttgttctgggaggactcaaggcttggatacatctacaaatctttctcaattatcaggcaaatgaaactgttttactcactgatactaaacttgtgagttgcttttgtatgacttatttatttcactgcaattattttaaacctgatttgtgtatttatagtagcaaaaatggcaccaacactttgtgctaggctagtgggttgtatggatatcctccctaccctgattgg

SEQ ID NO: 651455 - DNA, 572 bp, Homo sapiens
taaaaattttcttctggaagttttatattgtgttttacatataagtctatgtttattataatttaaattttgtaaaaaatgtgtaagtccctttctagtgtcattttgttcaacaaattatccaatttgttgaaaagattatcctttagccattgaatgcctttgaatctttgctaaatatcagttgactatatttgtgtgggtctatttatcggttccctattctgtttcattgatctttgtgcctattcgtccaccagatggtagatttctagatttctrtagctttatagtaaatcttgaaattgggtgatgtgaatcctccaactctgtttttcttcattattgtgttggctattctaggccttttgctttcccatataaattttagaatcagcttgttgaaatctacaaactagcttgctgagattttgattaaattgtattgattttgcagattgagtttggaaaaactggcgtcttaacaatattgaatcatccatctctaaacatggaacatctatgcatttatttagatgctttttatttctctcttcaatgttttgtaacac

SEQ ID NO: 651456 - DNA, 557 bp, Homo sapiens
atgggctaatacccataggccccttagcacagagcctaacatttggcagacgctccataaatgttgatacctttgttaattacccttgaaataaacctatagcctacgtaggtgatgattttgaagggaatgcttatttggatatgtaagtctggagcatttgttatgaaaccagcccaccagtctgtggtcatagctcacccataggttctttgacttccattcaagtccaggtcccgggctctgggagttctgctcctgcagmgcttgtctggatgtgagaacagaagccaagggaagtatttgctttgcaacaaaataaaacaggggacaaggatgcatttctggaggcgctcaccattttacagaaaggagtcatctgtttctcataaggtggggtgtgggaagtggaatctattctcctggcctgtctggagtagctccttactagtctggccacagctcctgcaggtcaggaccaggccccaccacagccagggctacactttgaaaacggacttgaatttcttttgggtcttcaaaggttaggctggaag

SEQ ID NO: 651457 - DNA, 557 bp, Homo sapiens
atgggctaatacccataggccccttagcacagagcctaacatttggcagacgctccataaatgttgatacctttgttaattacccttgaaataaacctatagcctacgtaggtgatgattttgaagggaatgcttatttggatatgtaagtctggagcatttgttatgaaaccagcccaccagtctgtggtcatagctcacccataggttctttgacttccattcaagtccaggtcccgggctctgggagttctgctcctgcagagcttgtctggatgtgagaacagaagccaagggaagtatttgctttgcaacaaaataaaamaggggacaaggatgcatttctggaggcgctcaccattttacagaaaggagtcatctgtttctcataaggtggggtgtgggaagtggaatctattctcctggcctgtctggagtagctccttactagtctggccacagctcctgcaggtcaggaccaggccccaccacagccagggctacactttgaaaacggacttgaatttcttttgggtcttcaaaggttaggctggaag

SEQ ID NO: 651458 - DNA, 603 bp, Homo sapiens
tgagatgaaggcaggtccttatgcaggagtctcgggctcccaaataacactctggtcggagctggcgatggtcctgcatgctgcaggatgtatcccgctctctttaatgtgaagcctctttagccttattagttcctatgtatattttccactatgaggcccaaaacragactgtggggggcctgcatgcaggactaggtctgggttctctgtgtgccccttgaccagcactaaccaacctggcccctcgacagcctagcactggggccagattatcgagaggacatctcctgggaaaacaggcccgagctccttgggggcaggcagggctctggattttattatcttcttatcttcagtattgtgcctggcactaaggggcccagttcacataatgcaaaagagggagggacagagaaaggagcttcctcatcttctgcctctgagaagagtgaatacacaggagccctcttgagcaaggctggcatgcagccacagtgtgtgggtatgcaatatggattgtttacatatgcaagtgcttccttcctggttggtcagtagccaccgtcctgaggccccacaagtgtccccagtgcactggct

SEQ ID NO: 651459 - DNA, 556 bp, Homo sapiens
aacttattaaaggcaaatgctctaaacattacagtttaaagacacagagagattggatttagaaaactaaggtcccagggtacatactgcttatcagaagcccaaattaaatgtaacaaaccaaatatgctaaacaatagaagaaataaatgaagtaaatgaaacaagttcagtcacactaacaatagtcagaaatgagaatttataaataccactcaaaacagtatcaaaactatgacatgcccaggaaaatgtttggaaaaatatgtataagaccaacayacttaaaactacataacatttttgagataaataaattgccagatatactgtgtttgcaaatcagaaggctcaagattgtgaaaatgtcaatcttttcaaaatgacctattaatttaatgtaattctaaccaaaatctcagtgcattttttgtagacatttacacactctttcaaagatgtatatggcaatgtaaaggttttacaatagctaaaacacctttgaaaaagaactaaatgaaagaactcacagcatctaattttagggcttattgta

SEQ ID NO: 651460 - DNA, 419 bp, Homo sapiens
agaattcaaaggtgctatcttttaacttaaataactttgtggaaaaatgtcatgaccacaactaatgaatctttggtgggcaggtgctttgatgcaccaggctcctttaattacaaagatgtgtgytcatgatgatgaagagaacaagtatcggagagtgctagccctctgcatagaggctttaggattgtatggggtaaaatgtatgaggaaaactcaggcaactactgccatcaatgagacttagctagtgagtgccaataccttcatcctcataaataatactagcacagggggtctgtgtgtgccagagggctatatctttatctgtgggcaatctggggtgactgaaatgcagggtgggcaaagtcatgcctggaaaacttacaggtcctgccccattgagtgtgctagggatg

SEQ ID NO: 651461 - DNA, 595 bp, Homo sapiens
gtttattcaaagtataggggcacagtttaggcccagatcagtcaggaaggtggcaaactgtttcacacayttcctgccatgtaaatcagaaatgttgtgtagaacagaacttatatacaagctaaaataagtaaacacaaaacaaaagatagtgaccaaaatctttagcaagaagaggtgcatcacaaaaggaaagaggaacaggaatgacctgatatgaaactataaggtacccctgtaagagttatgaatggaggctgctacagtaagtctaaggccaacaatgtagagagaaacagatgaaatttttcttcgtattgttaaattaaaatgcaaacattcgagcttcccagcttccacatcaaagtagaaaaaaaaaagaaatttgcattagaaatgtgtgtctagcttttatgaagggtgacataaaaaattattgtttctcaaagcagtttttctaaaagtacatttgtaaaatggacaatgtgcctcaagttacaaaaaattattttattattctctatgtaaatatgtctcccatgagtacatttaatgatgtttagactaacaattttgtttaaattttaagttaata

SEQ ID NO: 651462 - DNA, 380 bp, Homo sapiens
ttaaataactttgtggaaaaatgtcatgaccacaactaatgaatctttggtgggcaggtgctttgatgcaccaggctcctttaattacaaagatgtgtgttcatgatgatgaagagaasaagtatcggagagtgctagccctctgcatagaggctttaggattgtatggggtaaaatgtatgaggaaaactcaggcaactactgccatcaatgagacttagctagtgagtgccaataccttcatcctcataaataatactagcacagggggtctgtgtgtgccagagggctatatctttatctgtgggcaatctggggtgactgaaatgcagggtgggcaaagtcatgcctggaaaacttacaggtcctgccccattgag

SEQ ID NO: 651463 - DNA, 380 bp, Homo sapiens
ttaaataactttgtggaaaaatgtcatgaccacaactaatgaatctttggtgggcaggtgctttgatgcaccaggctcctttaattacaaagatgtgtgttcatgatgatgaagagaacaagtatcrgagagtgctagccctctgcatagaggctttaggattgtatggggtaaaatgtatgaggaaaactcaggcaactactgccatcaatgagacttagctagtgagtgccaataccttcatcctcataaataatactagcacagggggtctgtgtgtgccagagggctatatctttatctgtgggcaatctggggtgactgaaatgcagggtgggcaaagtcatgcctggaaaacttacaggtcctgccccattgag

SEQ ID NO: 651464 - DNA, 380 bp, Homo sapiens
ttaaataactttgtggaaaaatgtcatgaccacaactaatgaatctttggtgggcaggtgctttgatgcaccaggctcctttaattacaaagatgtgtgttcatgatgatgaagagaacaagtatcggagagtgctagccctctgcatagaggctttaggattgtatggggtaaaatgtatgaggaaaactcaggcaactactrccatcaatgagacttagctagtgagtgccaataccttcatcctcataaataatactagcacagggggtctgtgtgtgccagagggctatatctttatctgtgggcaatctggggtgactgaaatgcagggtgggcaaagtcatgcctggaaaacttacaggtcctgccccattgag

SEQ ID NO: 651465 - DNA, 380 bp, Homo sapiens
ttaaataactttgtggaaaaatgtcatgaccacaactaatgaatctttggtgggcaggtgctttgatgcaccaggctcctttaattacaaagatgtgtgttcatgatgatgaagagaacaagtatcggagagtgctagccctctgcatagaggctttaggattgtatggggtaaaatgtatgaggaaaactcaggcaactactgccatcaatgagactyagctagtgagtgccaataccttcatcctcataaataatactagcacagggggtctgtgtgtgccagagggctatatctttatctgtgggcaatctggggtgactgaaatgcagggtgggcaaagtcatgcctggaaaacttacaggtcctgccccattgag

SEQ ID NO: 651466 - DNA, 419 bp, Homo sapiens
agaattcaaaggtgctatcttttaacttaaataactttgtggaaaaatgtcatgaccacaactaatgaatctttggtgggcaggtgctttgatgcaccaggctcctttaattacaaagatgtgtgttcatgatgatgaagagaacaagtatcggagagtgctagccctctgcatagaggctttaggattgtatggggtaaaatgtatgaggaaaactcaggcaactactgccatcaatgagacttagctagtgagtgccaataccttcatcctcataaataatactagcacaggggrtctgtgtgtgccagagggctatatctttatctgtgggcaatctggggtgactgaaatgcagggtgggcaaagtcatgcctggaaaacttacaggtcctgccccattgagtgtgctagggatg

SEQ ID NO: 651467 - DNA, 380 bp, Homo sapiens
ttaaataactttgtggaaaaatgtcatgaccacaactaatgaatctttggtgggcaggtgctttgatgcaccaggctcctttaattacaaagatgtgtgttcatgatgatgaagagaacaagtatcggagagtgctagccctctgcatagaggctttaggattgtatggggtaaaatgtatgaggaaaactcaggcaactactgccatcaatgagacttagctagtgagtgccaataccttcatcctcataaataatactagcacagggggtctgtgtgtgccagagggctayatctttatctgtgggcaatctggggtgactgaaatgcagggtgggcaaagtcatgcctggaaaacttacaggtcctgccccattgag

SEQ ID NO: 651468 - DNA, 628 bp, Homo sapiens
atgagatctttggtaccattcataggagttattgctcataaaaaaatgaaaataaacctgtcccaaaccatggcaaatattgcctcctccattgccactgtcttagaagccaaggaaacatctcccagatccaccyagaaagttattttaaacaacagaattgttccagactctttttgtttgagatggagtttcgctctcgttgcccatgctggagtgcagtggtatgatctcagctcactgcaacctctgcctcccgggtctaagtgattctcttgcctcagactccagagtagctgggattataggcgtgcaccaccactcctggctaattttgtattttttttttttttgtagagacagggtttctgcatgtttgtctggctggtcttgaactcctgacctcaggtgatccacctatcttggcctcccaaagtgctgggattacaggcatgagtcaccgcactcggccctccagactttcttttagctcaactgggagaagtgtatacaattgccagcacctcttactgtgttgggataaacatcttaggtattgtagaaacataggtagaggagatccagaagctgacccattggttgtagacagtggggccacctgaagaat

SEQ ID NO: 651469 - DNA, 628 bp, Homo sapiens
atgagatctttggtaccattcataggagttattgctcataaaaaaatgaaaataaacctgtcccaaaccatggcaaatattgcctcctccattgccactgtcttagaagccaaggaaacatctcccagatccacctagaaagttattttaaacaacagaattgttccagactctttttgtttgagatggagtttcgctctcgttgcccatgctggagtgcagtggtatgatctcagctcactgcaacctctgcctcccrggtctaagtgattctcttgcctcagactccagagtagctgggattataggcgtgcaccaccactcctggctaattttgtattttttttttttttgtagagacagggtttctgcatgtttgtctggctggtcttgaactcctgacctcaggtgatccacctatcttggcctcccaaagtgctgggattacaggcatgagtcaccgcactcggccctccagactttcttttagctcaactgggagaagtgtatacaattgccagcacctcttactgtgttgggataaacatcttaggtattgtagaaacataggtagaggagatccagaagctgacccattggttgtagacagtggggccacctgaagaat

SEQ ID NO: 651470 - DNA, 589 bp, Homo sapiens
cgctttccccattccttgtctcggttctttcctccagtacaattagcaatgtagtatmtttaaatattttctaccacactcttccacatttaaaggatccttgtgattaaattggccccccccagataatcaagtatgatctcttattttaagttccgctgtttagtaagcttaatgtcatgtgcaaccttaatactttcttgcattgtaacatcatatattcttatattacatagcatatccttcctgacatggagaataggacagggacagtcttgtggggggtggggggggggcattattctgcttatcacagttagcaaacaaagattttgtgccatgaaaacatggaggaaatacccttatccttatttttcttcagtctttctcatcaaatagatctttagatccaaaagagaagactcaacattgcttttaattaaatctcaagatgaacgaagaggcactatgagccctgggccctagtattggagtagaactcattccaaaacaataagaaagtttaggaaagagatttttaagttgctctagatatctttgaggattatggagaatagtaaaagtttta

SEQ ID NO: 651471 - DNA, 392 bp, Homo sapiens
ctgcttatcacagttagcaaacaaagattttgtgccatgaaaacatggaggaaatacccttatccttatttttcttcagtctttctcatcaaatagatctttagatccaaaagagaagactcaacattgcttttaattaaatctcaagatgaacgaagaggcactatgagccctgggccctagtattggagtagaactcaytccaaaacaataagaaagtttaggaaagagatttttaagttgctctagatatctttgaggattatggagaatagtaaaagttttagaagacaagaaatgggcagtgtactagttttttaaaggaagatagatctcataaactataggtgaatgagtttgacattacttctggaagcaattttaagaagcat

SEQ ID NO: 651472 - DNA, 392 bp, Homo sapiens
ctgcttatcacagttagcaaacaaagattttgtgccatgaaaacatggaggaaatacccttatccttatttttcttcagtctttctcatcaaatagatctttagatccaaaagagaagactcaacattgcttttaattaaatctcaagatgaacgaagaggcactatgagccctgggccctagtattggagtagaactcattccaaaacaataagaaagtttaggaaagagatttttaagttkctctagatatctttgaggattatggagaatagtaaaagttttagaagacaagaaatgggcagtgtactagttttttaaaggaagatagatctcataaactataggtgaatgagtttgacattacttctggaagcaattttaagaagcat

SEQ ID NO: 651473 - DNA, 392 bp, Homo sapiens
ctgcttatcacagttagcaaacaaagattttgtgccatgaaaacatggaggaaatacccttatccttatttttcttcagtctttctcatcaaatagatctttagatccaaaagagaagactcaacattgcttttaattaaatctcaagatgaacgaagaggcactatgagccctgggccctagtattggagtagaactcattccaaaacaataagaaagtttaggaaagagatttttaagttgctctakatatctttgaggattatggagaatagtaaaagttttagaagacaagaaatgggcagtgtactagttttttaaaggaagatagatctcataaactataggtgaatgagtttgacattacttctggaagcaattttaagaagcat

SEQ ID NO: 651474 - DNA, 392 bp, Homo sapiens
ctgcttatcacagttagcaaacaaagattttgtgccatgaaaacatggaggaaatacccttatccttatttttcttcagtctttctcatcaaatagatctttagatccaaaagagaagactcaacattgcttttaattaaatctcaagatgaacgaagaggcactatgagccctgggccctagtattggagtagaactcattccaaaacaataagaaagtttaggaaagagatttttaagttgctctagatatctttgaggattatggagaatagtaaaagttttagaagacaagaaatgggcagtgtactagttttttaaaggaagatagakctcataaactataggtgaatgagtttgacattacttctggaagcaattttaagaagcat

SEQ ID NO: 651475 - DNA, 595 bp, Homo sapiens
gtttattcaaagtataggggcacagtttaggcccagatcagtcaggaaggtggcaaactgtttcacacacttcctgccatgtaaatcagaaatgttgtgtagaacagaacttatatacaagctaaaataagtaaacacaaaacaaaagatagtgaccaaaatctttagcaagaagaggtgcatcacaaaaggaaagaggaacaggaatgacctgatatgaaactataaggtacccctgtaagagttatgaatggaggctgctacagtaagtctaaggccaacaatgtagagagaaacagatgaaatttttcttcgtattgttaaattaaaatgcaaacattcgagcttcccagcttccacatcaaagtagaaaaaaaaaagaaatttgcattagaaatgtgtgtctagcttttatgaaggrtgacataaaaaattattgtttctcaaagcagtttttctaaaagtacatttgtaaaatggacaatgtgcctcaagttacaaaaaattattttattattctctatgtaaatatgtctcccatgagtacatttaatgatgtttagactaacaattttgtttaaattttaagttaata

SEQ ID NO: 651476 - DNA, 595 bp, Homo sapiens
gtttattcaaagtataggggcacagtttaggcccagatcagtcaggaaggtggcaaactgtttcacacacttcctgccatgtaaatcagaaatgttgtgtagaacagaacttatatacaagctaaaataagtaaacacaaaacaaaagatagtgaccaaaatctttagcaagaagaggtgcatcacaaaaggaaagaggaacaggaatgacctgatatgaaactataaggtacccctgtaagagttatgaatggaggctgctacagtaagtctaaggccaacaatgtagagagaaacagatgaaatttttcttcgtattgttaaattaaaatgcaaacattcgagcttcccagcttccacatcaaagtagaaaaaaaaaagaaatttgcattagaaatgtgtgtctagcttttatgaagggtgacakaaaaaattattgtttctcaaagcagtttttctaaaagtacatttgtaaaatggacaatgtgcctcaagttacaaaaaattattttattattctctatgtaaatatgtctcccatgagtacatttaatgatgtttagactaacaattttgtttaaattttaagttaata

SEQ ID NO: 651477 - DNA, 601 bp, Homo sapiens
ttctgcaaatgacagaatttcattctttttatggcagaatattattcatatatatatatatatgaatgtatatacaaatttggtataygtatataccacattttttatctatccatccattgatggatatttagcttaattccatatcttggttattgtgaagacagctgcaataaatatggaggtgcagatacctcttaagtgtaatgatttcctttcctttggataaacacctagtagtgggatcactagatcatatggtgtctctatttttgttttgagaaaccaccatacagtttttcataataagtgaaataatttaacttaccaccaacagtgtatggtagtctaatttttcatgtcttacatttaaatttttaatccattttgagtttatttttgtataaggtgagtgataggagtttagtttcattcttctgcatatggatatccaatttttccagaagcatgtattgcagattgtgtcctttccccaatgtaggttgttgacaaaactaaagacaaagtcttaaaagcagccagatagaaacagtcacctataggtgaaacatcacctatagaggaaaaccaatgtaaatga

SEQ ID NO: 651478 - DNA, 537 bp, Homo sapiens
attaaggcaggacccacaaaggacttccttgtttctgtcacataaagggatcagaactcagccccatttctggcaacccttgtttgggtccactcttgctgctgagagcttttctgttgcttaatgaatgttaatttgccttactcactctctggtatttgtgtgccttattctcttggttgtgggacaagatcttggacctcactaaattaaggagtgaggagactgcaacactaataataaatggatcaattcacmagtaaacataacaattccaaatatatatgcaccaaataacaaagtcttaaacaacatgaagagaaaaattatagaactaaaaaataataaattatagttgtgggttttaacagccttatctcagcaattgatagaattattggacaaaaatttcacaatcagcaagcatgtagaagatctgtacagcacaatcaaccgacaagattttattcacacacacaaactcacacacacacacacacaaacacacatatacagataaatatatgtcaattatat

SEQ ID NO: 651479 - DNA, 537 bp, Homo sapiens
attaaggcaggacccacaaaggacttccttgtttctgtcacataaagggatcagaactcagccccatttctggcaacccttgtttgggtccactcttgctgctgagagcttttctgttgcttaatgaatgttaatttgccttactcactctctggtatttgtgtgccttattctcttggttgtgggacaagatcttggacctcactaaattaaggagtgaggagactgcaacactaataataaatggatcaattcaccagtaaacataacaattccaaatatatatgcaccaaataacaaagtcttaaacaacatgaagagaaaaattatagaactaaaaaataataaattatagttgtgggttttaacagccttatctcagcaattgatagaattattggacaaaaatttmacaatcagcaagcatgtagaagatctgtacagcacaatcaaccgacaagattttattcacacacacaaactcacacacacacacacacaaacacacatatacagataaatatatgtcaattatat

SEQ ID NO: 651480 - DNA, 537 bp, Homo sapiens
attaaggcaggacccacaaaggacttccttgtttctgtcacataaagggatcagaactcagccccatttctggcaacccttgtttgggtccactcttgctgctgagagcttttctgttgcttaatgaatgttaatttgccttactcactctctggtatttgtgtgccttattctcttggttgtgggacaagatcttggacctcactaaattaaggagtgaggagactgcaacactaataataaatggatcaattcaccagtaaacataacaattccaaatatatatgcaccaaataacaaagtcttaaacaacatgaagagaaaaattatagaactaaaaaataataaattatagttgtgggttttaacagccttatctcagcaattgatagaattattggacaaaaatttcacaatcagcaagcatgtagaagatctgtacagcacaatcaaccracaagattttattcacacacacaaactcacacacacacacacacaaacacacatatacagataaatatatgtcaattatat

SEQ ID NO: 651481 - DNA, 537 bp, Homo sapiens
attaaggcaggacccacaaaggacttccttgtttctgtcacataaagggatcagaactcagccccatttctggcaacccttgtttgggtccactcttgctgctgagagcttttctgttgcttaatgaatgttaatttgccttactcactctctggtatttgtgtgccttattctcttggttgtgggacaagatcttggacctcactaaattaaggagtgaggagactgcaacactaataataaatggatcaattcaccagtaaacataacaattccaaatatatatgcaccaaataacaaagtcttaaacaacatgaagagaaaaattatagaactaaaaaataataaattatagttgtgggttttaacagccttatctcagcaattgatagaattattggacaaaaatttcacaatcagcaagcatgtagaagatctgtacagcacaatcaaccgacaagattttattcacacacacaaactcacacacacacacacacaracacacatatacagataaatatatgtcaattatat

SEQ ID NO: 651482 - DNA, 588 bp, Homo sapiens
tttgaaagtgtctataactctagagagagattgcagcatgcacmtataggactataattacttatgtctatttttataactatgcagttataaatagatatgcctatatatagtgataataatatagaaatatctccatagccatatatggctctaagtgaatgctctaactactctattttgcaatcaataagtatatatctcctgatacataattctaacaatatacgtttttatctatatagctgttcagagatataaatctgtcaggatatcaaatgtacataaagccggatggctgtaagggagtcgcatattttcccatatataaatctgctcctataactactgtatatgcacaaatacaatggaaataattatatttccctcaaacgtaaatctgtaaatacaaccacagcacatttaggtaccattagacatagagcaatatttcctagacatcagtctgtcagttagagccaccagtgcctccaaacagagagttatagagggagttataaataatctctccagatgtgaacggatcagtagaactagatgtaaacatgactccaagccgttcctcct

SEQ ID NO: 651483 - DNA, 588 bp, Homo sapiens
tttgaaagtgtctataactctagagagagattgcagcatgcacatataggactataattacttatgtctatttttataactatgcagttataaatagatatgcctatatatagtgataataatatagaaatatctccatagccatatatggctctaagtgaatgctctaactactctatttygcaatcaataagtatatatctcctgatacataattctaacaatatacgtttttatctatatagctgttcagagatataaatctgtcaggatatcaaatgtacataaagccggatggctgtaagggagtcgcatattttcccatatataaatctgctcctataactactgtatatgcacaaatacaatggaaataattatatttccctcaaacgtaaatctgtaaatacaaccacagcacatttaggtaccattagacatagagcaatatttcctagacatcagtctgtcagttagagccaccagtgcctccaaacagagagttatagagggagttataaataatctctccagatgtgaacggatcagtagaactagatgtaaacatgactccaagccgttcctcct

SEQ ID NO: 651484 - DNA, 588 bp, Homo sapiens
tttgaaagtgtctataactctagagagagattgcagcatgcacatataggactataattacttatgtctatttttataactatgcagttataaatagatatgcctatatatagtgataataatatagaaatatctccatagccatatatggctctaagtgaatgctctaactactctattttgcaatcaataagtatatatctcctgatacataattctaacaatatacgtttttatctatatagctgttcagagatataaatctgtcaggatatcaaatgtacataaagccggatggctgtaagggagtcgcatattttcccatatataaatctgctcctataactactgtatatgcacaaatacaatggaaataattatatttccckcaaacgtaaatctgtaaatacaaccacagcacatttaggtaccattagacatagagcaatatttcctagacatcagtctgtcagttagagccaccagtgcctccaaacagagagttatagagggagttataaataatctctccagatgtgaacggatcagtagaactagatgtaaacatgactccaagccgttcctcct

SEQ ID NO: 651485 - DNA, 568 bp, Homo sapiens
ccaaaggagtgaaaaaaaaacttgcttccacagttaattatctgggtaacttgggtcacaccccctaactgatcctcctctagagaccggaaatgggccaggtaagggagagagtttgggtaaagggtaaggtttgtgtgcttctcactgrgtgtacttgatcatccaccttacctgggtaactactttttttttttttttttggaaatggggtccagctctgtttcccaggctggagtgttgtggcaccatcatagttcactgaagcctcaatctcctgggctcaagtagtcctcccaccttagcctcttaagtatgtgagactgcaggcatgtgccacaccgccaggctgggtagctgcctttcaatgtgcttctgcacccacagatttggaaaagggcatttttaggcagcagtctttcaactctcttcatcctgtaggtttagcctgccatttacatttgatacacatgaagaggctaatgggaaggaaatctatagaactggaattggaagtcctttcgaatcccaaattcccttggtctaagagccagtctctcttctttct

SEQ ID NO: 651486 - DNA, 247 bp, Homo sapiens
atctaaggcccctttgtgatctaaggctctgagtamttggagagacaaaactcactccttctttgtagattcagagagacagagagagagagagagagggaatgaggagataccttgaagctgagggtctgcttggcttttcgaggtttttttttaagatatgttttttaaaaattttctggagtgggaattgggattgtgtgcactgggaaggggaatagcagagagctgggtctggagttgggtg

SEQ ID NO: 651487 - DNA, 247 bp, Homo sapiens
atctaaggcccctttgtgatctaaggctctgagtacttggagagacaaaactcactccttctttgtagattcagagagacagagagagagagagagagggaatgaggagataccttgaagctgagggtctgcttggcttttcgaggtttttttttaagatatgtttttwaaaaattttctggagtgggaattgggattgtgtgcactgggaaggggaatagcagagagctgggtctggagttgggtg

SEQ ID NO: 651488 - DNA, 247 bp, Homo sapiens
atctaaggcccctttgtgatctaaggctctgagtacttggagagacaaaactcactccttctttgtagattcagagagacagagagagagagagagagggaatgaggagataccttgaagctgagggtctgcttggcttttcgaggtttttttttaagatatgttttttaaaaattttctggagtgggaattgggattgtgtgcactgggaaggggaayagcagagagctgggtctggagttgggtg

SEQ ID NO: 651489 - DNA, 586 bp, Homo sapiens
taaagtatgcaaggaacttcggattcagacaatatggcacagatccatgttttkcccgcctctttttgttatgcacaactatatattttgaaaatgacacatgtgactaacatgaaaaagctctaagagatggaggtaaacagaagaagagttagtttgatatgcaaggaatggtgaaacagcacaacagcaaggcatcttgtgtatcctgaagtcctgaagaaggccttcagacttatttttcctaatcccccaatctagcaacagaagatacctcaagtaagctccttcctcccttggatcaatcaggagccactagcttgagacacccaccaccatccaggagaagcagctaggagaaacgctaagagaggtgctctccttcccagtacagcttgaggcttccttttctaccaggaagcacaaaggtgggaaaatagaatcaggaagagggacctagtagagaaagtggcctggcctaagaagctgctttgtccctgcaggcctaagactctcttcccaatgaccccagagtagccaggggacattggttgggggattctaccacacccctcaccacatacct

SEQ ID NO: 651490 - DNA, 631 bp, Homo sapiens
ttttgcccgcctctttttgttatgcacaactatatattttgaaaatgacacatgtgactaacatgaaaaagctctaagagatggaggtaaacagaagaagagttagtttgatatgcaaggaatggtgaaacagcacaacagcaaggcatcttgtgtatcctgaagtcctgaagaaggccttcagacttatttttcctaatcccccaatctagcaacagaagatacctcaagtaagctccttcctcccttggatcaatcaggagccrctagcttgagacacccaccaccatccaggagaagcagctaggagaaacgctaagagaggtgctctccttcccagtacagcttgaggcttccttttctaccaggaagcacaaaggtgggaaaatagaatcaggaagagggacctagtagagaaagtggcctggcctaagaagctgctttgtccctgcaggcctaagactctcttcccaatgaccccagagtagccaggggacattggttgggggattctaccacacccctcaccacatacctcagacacctggtagcctaacctggagaaactgcttccactgccataggcagcactaacagggagcagtggaattcccagcagcaccatattaat

SEQ ID NO: 651491 - DNA, 631 bp, Homo sapiens
ttttgcccgcctctttttgttatgcacaactatatattttgaaaatgacacatgtgactaacatgaaaaagctctaagagatggaggtaaacagaagaagagttagtttgatatgcaaggaatggtgaaacagcacaacagcaaggcatcttgtgtatcctgaagtcctgaagaaggccttcagacttatttttcctaatcccccaatctagcaacagaagatacctcaagtaagctccttcctcccttggatcaatcaggagccactagcttgagacacccaccaccatccaggagaagcagctaggagaaacgctaagagaggtgctctccttcccagtacagcttgaggcttcctttkctaccaggaagcacaaaggtgggaaaatagaatcaggaagagggacctagtagagaaagtggcctggcctaagaagctgctttgtccctgcaggcctaagactctcttcccaatgaccccagagtagccaggggacattggttgggggattctaccacacccctcaccacatacctcagacacctggtagcctaacctggagaaactgcttccactgccataggcagcactaacagggagcagtggaattcccagcagcaccatattaat

SEQ ID NO: 651492 - DNA, 631 bp, Homo sapiens
ttttgcccgcctctttttgttatgcacaactatatattttgaaaatgacacatgtgactaacatgaaaaagctctaagagatggaggtaaacagaagaagagttagtttgatatgcaaggaatggtgaaacagcacaacagcaaggcatcttgtgtatcctgaagtcctgaagaaggccttcagacttatttttcctaatcccccaatctagcaacagaagatacctcaagtaagctccttcctcccttggatcaatcaggagccactagcttgagacacccaccaccatccaggagaagcagctaggagaaacgctaagagaggtgctctccttcccagtacagcttgaggcttccttttctaccaggaagcacaaaggtggraaaatagaatcaggaagagggacctagtagagaaagtggcctggcctaagaagctgctttgtccctgcaggcctaagactctcttcccaatgaccccagagtagccaggggacattggttgggggattctaccacacccctcaccacatacctcagacacctggtagcctaacctggagaaactgcttccactgccataggcagcactaacagggagcagtggaattcccagcagcaccatattaat

SEQ ID NO: 651493 - DNA, 631 bp, Homo sapiens
ttttgcccgcctctttttgttatgcacaactatatattttgaaaatgacacatgtgactaacatgaaaaagctctaagagatggaggtaaacagaagaagagttagtttgatatgcaaggaatggtgaaacagcacaacagcaaggcatcttgtgtatcctgaagtcctgaagaaggccttcagacttatttttcctaatcccccaatctagcaacagaagatacctcaagtaagctccttcctcccttggatcaatcaggagccactagcttgagacacccaccaccatccaggagaagcagctaggagaaacgctaagagaggtgctctccttcccagtacagcttgaggcttccttttctaccaggaagcacaaaggtgggaaaatagaaycaggaagagggacctagtagagaaagtggcctggcctaagaagctgctttgtccctgcaggcctaagactctcttcccaatgaccccagagtagccaggggacattggttgggggattctaccacacccctcaccacatacctcagacacctggtagcctaacctggagaaactgcttccactgccataggcagcactaacagggagcagtggaattcccagcagcaccatattaat

SEQ ID NO: 651494 - DNA, 483 bp, Homo sapiens
cctcagcctcccaagtagctgggattacaggcacctgccaccatgcccagctaatttttgtagttttagtagagacgsggtttcaccatcttggccaggctggtcttgaactcctgacctcgtgatccacccaccttggcctcccaaagtgctgggattacagtcgtgagccactgcacctggcctggacttcagtttttaaatagtctttttgtcttttgtgttgagaatagatcacagggggccaagggaagatgcagggagacttgttgaaaggtcattgcactaatccaagtgagaaatgtgtggcttggaccaggatggcagcagtgcatgtggtgagaaaggcccaaattctggatttggtgacagtttcctcttccttggtttccatccttttgctctctttgcttcctctcttcttttctaggttgtatgttttctctcttcttgaagactgagagctctctgtgggtggggctc

SEQ ID NO: 651495 - DNA, 483 bp, Homo sapiens
cctcagcctcccaagtagctgggattacaggcacctgccaccatgcccagctaatttttgtagttttagtagagacggggtttcrccatcttggccaggctggtcttgaactcctgacctcgtgatccacccaccttggcctcccaaagtgctgggattacagtcgtgagccactgcacctggcctggacttcagtttttaaatagtctttttgtcttttgtgttgagaatagatcacagggggccaagggaagatgcagggagacttgttgaaaggtcattgcactaatccaagtgagaaatgtgtggcttggaccaggatggcagcagtgcatgtggtgagaaaggcccaaattctggatttggtgacagtttcctcttccttggtttccatccttttgctctctttgcttcctctcttcttttctaggttgtatgttttctctcttcttgaagactgagagctctctgtgggtggggctc

SEQ ID NO: 651496 - DNA, 483 bp, Homo sapiens
cctcagcctcccaagtagctgggattacaggcacctgccaccatgcccagctaatttttgtagttttagtagagacggggtttcaccatcttggccaggctggtcttgaactcctgacctcgtgatccacccaccttggcctcccaaagtgctggrattacagtcgtgagccactgcacctggcctggacttcagtttttaaatagtctttttgtcttttgtgttgagaatagatcacagggggccaagggaagatgcagggagacttgttgaaaggtcattgcactaatccaagtgagaaatgtgtggcttggaccaggatggcagcagtgcatgtggtgagaaaggcccaaattctggatttggtgacagtttcctcttccttggtttccatccttttgctctctttgcttcctctcttcttttctaggttgtatgttttctctcttcttgaagactgagagctctctgtgggtggggctc

SEQ ID NO: 651497 - DNA, 483 bp, Homo sapiens
cctcagcctcccaagtagctgggattacaggcacctgccaccatgcccagctaatttttgtagttttagtagagacggggtttcaccatcttggccaggctggtcttgaactcctgacctcgtgatccacccaccttggcctcccaaagtgctgggattacagtcrtgagccactgcacctggcctggacttcagtttttaaatagtctttttgtcttttgtgttgagaatagatcacagggggccaagggaagatgcagggagacttgttgaaaggtcattgcactaatccaagtgagaaatgtgtggcttggaccaggatggcagcagtgcatgtggtgagaaaggcccaaattctggatttggtgacagtttcctcttccttggtttccatccttttgctctctttgcttcctctcttcttttctaggttgtatgttttctctcttcttgaagactgagagctctctgtgggtggggctc

SEQ ID NO: 651498 - DNA, 533 bp, Homo sapiens
gttgaggagccttggggtgatcgctccccatctctacccctgcccccagtcacccctcctcccatgacccatattctcaggtttcactctataagaactacttccactcggtgtgacagggcacttagtgccagaattatttataacattgagatggcaacagggcaatggagagcagcccaacccatggacactttctctttgaaagctcgatcaatggacctagatcactgtttactacttggtgtctcggcctctgccatgtttcctgctggctttgggggatggggaaacaggggtctggaccaggtcaaggctgtcctcagagtttawgatgcttataaaccaggcctccaataaagttatgccttcactgtacctctattccttggccaggcacttccctgcctcaggtgagctctcttcttggaaatgaaccattcttggggctttttctcaaacaggagccctctgcctcccccaggaaagctggtattatgtccctaccacagtggcagagctaggacttgagc

SEQ ID NO: 651499 - DNA, 546 bp, Homo sapiens
tatgccttcactgtacctctattccttggccaggcacttccctgcctcaggtgagctctcttcttggaaatgaaccattcttggggctttttctcaaacaggagccctctgcctcccccaggaaagctggtattatgtccctaccacagtggcagagctaggacttgagctgaggaagtcatctgatatggatcagaatggggatgtagaagattctgggagttcttccgaggaagggcttgaattggmcccacccagtctggagtggaggtagagggatggatgaattcacttcttaaggactgaaaacctttttaccatcctcttcctccccagccatagccaattactagttgtcctaatttgaaggctctgttgtctggactggaggatttttacccattttccagcccctctcccggtctcatttatttgggcagtgtcacattaaaggcattgtcagacttcctagtccttcccaaaggcctgacccaactccttcccaaatggtgaagcacctctgcctccttccctttacacctgtgg

SEQ ID NO: 651500 - DNA, 626 bp, Homo sapiens
ttggacccacccagtctggagtggaggtagagggatggatgaattcacttcttaaggactgaaaacctttttaccatcctcttcctccccagccatagccaattactagttgtcctaatttgaaggctctgttgtctggactggaggatttttacccattttccagcccctctcccggtctcatttatttgggcagtgtcacattaaaggcattgtcagacttcctagtccttcccaaaggcctgacccaactccttcccaaatggtgaagcacctctgcctccttccctttacacctgtggacctaccacactggggaactcctaggtgagtcccagagaaagcccaggtgaaagactatgagcctgtcrgaagggatcagggtagaacccaagttgggacaggcaggggaggcagtcccagtctttaggggggtcaagtaattcccctttacaagccaaatgaagaaaaaaagttctaaggggagcatatgactccataaaataaaggacataattgggagtgatatctaatttatctattgaaggcctcctacgtactcttttatcacttagatggacagaatataattggtgtgctgtgccccatcaatctcagagcctggg

SEQ ID NO: 651501 - DNA, 626 bp, Homo sapiens
ttggacccacccagtctggagtggaggtagagggatggatgaattcacttcttaaggactgaaaacctttttaccatcctcttcctccccagccatagccaattactagttgtcctaatttgaaggctctgttgtctggactggaggatttttacccattttccagcccctctcccggtctcatttatttgggcagtgtcacattaaaggcattgtcagacttcctagtccttcccaaaggcctgacccaactccttcccaaatggtgaagcacctctgcctccttccctttacacctgtggacctaccacactggggaactcctaggtgagtcccagagaaagcccaggtgaaagactatgagcctgtcagaagggatcagggtagaacccaagttgggacaggcaggggaggcagtcccagtctttaggggggtcaagtaattcccctttacaagccaaatgaagaaaaaaagttctaaggggagcatatgactccataaaataaaggacataattgggagtgatatctaatttatctattgaakgcctcctacgtactcttttatcacttagatggacagaatataattggtgtgctgtgccccatcaatctcagagcctggg

SEQ ID NO: 651502 - DNA, 618 bp, Homo sapiens
gacagtggcagctagtttaacaaaccaccacaccccgtagcacctctcacctgggtgcaagttccccaggccacactgcagtagctgctcgctgagggtgtccccggatatataagaagcctctctgagggccacagaggttttttgatggcagatggtttaaaacatcattttttattaagttgtataaaatatactacgttataaaatgcaaactttgcatcattttagagctaaaacttaaggccacaaaagaatctgctattttcttattaataaaaaatcctatttttatataatgcaaataatgaagatgaagtaacctattatttaattaaacatgtcttttttttttttttaaaaaaaaagaaataattggtccttgctartggcccttcagggcaatcccccagactgctggggtccaagtttaccctcctgcctctaataacaaagggactttggcagaaaagtttgagaaaccctgtcaggaagagagcctacacaaggaccaggaaatctgacttcttcattctttaaaagaacaaaacaaatagcaacagtgtgttttctaccttcctagtgttttaccttcaagtttagcattaagaacacgaa

SEQ ID NO: 651503 - DNA, 618 bp, Homo sapiens
gacagtggcagctagtttaacaaaccaccacaccccgtagcacctctcacctgggtgcaagttccccaggccacactgcagtagctgctcgctgagggtgtccccggatatataagaagcctctctgagggccacagaggttttttgatggcagatggtttaaaacatcattttttattaagttgtataaaatatactacgttataaaatgcaaactttgcatcattttagagctaaaacttaaggccacaaaagaatctgctattttcttattaataaaaaatcctatttttatataatgcaaataatgaagatgaagtaacctattatttaattaaacatgtcttttttttttttttaaaaaaaaagaaataattggtccttgctagtggcccttcagggcaatcccccagactgctggggtccaagtttaccctcctgcctctaataacaaagggactttggcagaaaagtttgagaaaccctgtcaggaagagagcctacacaaggaccaggaaatctgacttcttcattctttaaaagaacaaaacaaatagcaacaktgtgttttctaccttcctagtgttttaccttcaagtttagcattaagaacacgaa

SEQ ID NO: 651504 - DNA, 601 bp, Homo sapiens
ttgaatattttcagaggaaggaagggtgataagtgggatttaggtctgccacttcccacagatgtgaatgagatggctgcatggatcaaggcaaacaaaaggcaatgaggaaatagaggagcataggtcccttggttggggatatttatttaattaccctgtcattcatgggggcagagagtgagggaagtgtgtactcaaccagacactaaggcacctgagagggaaagaagaaaggggtcctcagatcttccttgaggcatctgagaaggaatcaatacatgtgataaaggccttcacagaaagggrgactcattatctaaaggacagatatagagaaaggccaggcatgtttctttgatgaaaggacattgcaaatccaatgtcttgggctgaatggcagagtcagaaatgggaccaagttctcggggtccccaaatggaggccaaaggccttatatttctgtcaaggtaagaggagaaaagaaagaaattcagacttttttttttttgatacaggagtccacataatatttccaggtcctcttagggagaaaaactggtgacactggaaggttttagaatgaatgcattgaccagta

SEQ ID NO: 651505 - DNA, 320 bp, Homo sapiens
cttcaggacagggatcaggtctaatttcactccttagcccttgctccaggcccagtgcaaggcacataacatgcgctcagtaaacatcactgaataggctgttctctgggtacctagaagtctctagggcttaaggttaggatacaagcacaagaaaggagggtagggcaaagcgtggaagaagggtggggtctgtgaggctgggttggggrtcatgtctctctcccacaatgactggcttcaggatgctcccagaatgggaaaagggtagaggaccctgttctgcactgtgatttaggaatccttaggtctctacctgg

SEQ ID NO: 651506 - DNA, 320 bp, Homo sapiens
cttcaggacagggatcaggtctaatttcactccttagcccttgctccaggcccagtgcaaggcacataacatgcgctcagtaaacatcactgaataggctgttctctgggtacctagaagtctctagggcttaaggttaggatacaagcacaagaaaggagggtagggcaaagcgtggaagaagggtggggtctgtgaggctgggttggggatcatgtctstctcccacaatgactggcttcaggatgctcccagaatgggaaaagggtagaggaccctgttctgcactgtgatttaggaatccttaggtctctacctgg

SEQ ID NO: 651507 - DNA, 320 bp, Homo sapiens
cttcaggacagggatcaggtctaatttcactccttagcccttgctccaggcccagtgcaaggcacataacatgcgctcagtaaacatcactgaataggctgttctctgggtacctagaagtctctagggcttaaggttaggatacaagcacaagaaaggagggtagggcaaagcgtggaagaagggtggggtctgtgaggctgggttggggatcatgtctctctcccacaatgactggcttcaggatgctcccagaatgggaaaagggtrgaggaccctgttctgcactgtgatttaggaatccttaggtctctacctgg

SEQ ID NO: 651508 - DNA, 628 bp, Homo sapiens
aggaaactgagatgcagagaagttcacccaggtctttttcaggttgtttttactacaccacatttgccacatgaacagaaactcccagagctaccactaagcaggatgtattagactctaaaggtagtagcatagatggaggttaggtaacaagtagaactttctcagaatagtaggtcacagaagaagatgagaagcaaagtaaagaaagtgcattctctaaaacagtggggtgggggtgrgagggatggagccaaagaatcaggttagaattttgcaaaaagatagaaatatagagaacacaggagagggagctggcatagagcccagagcaaggacaactggggtgtggagcttctggggttcttcattcaggacccctagatttcatctgtcccaggcttctgggtatcaccagtagtttaaagtcaggcctcatctgggctgattctcttggctttctccttgctctcccgggatggcttatctggctgccagagtcatttgccatctctaatttgtgtttaaattaaagttcccacaaacagaggtttaatgtgctgttaccaagaactcccaggccccctgcagctctgggaagttgaaggggctggggagaagaggtcag

SEQ ID NO: 651509 - DNA, 628 bp, Homo sapiens
aggaaactgagatgcagagaagttcacccaggtctttttcaggttgtttttactacaccacatttgccacatgaacagaaactcccagagctaccactaagcaggatgtattagactctaaaggtagtagcatagatggaggttaggtaacaagtagaactttctcagaatagtaggtcacagaagaagatgagaagcaaagtaaagaaagtgcattctctaaaacagtggggtgggggtgagagggatggagccaaagaatcaggttagaattttgcaaaaagatagaaatatagagaacacaggagagggagctggcatagagcccagagcaaggacaactggggtgtggagcttctggggttcttcattcaggacccctagatttcatctgtcccaggcttctgggtatcaccagtagtttaaagtcaggcctyatctgggctgattctcttggctttctccttgctctcccgggatggcttatctggctgccagagtcatttgccatctctaatttgtgtttaaattaaagttcccacaaacagaggtttaatgtgctgttaccaagaactcccaggccccctgcagctctgggaagttgaaggggctggggagaagaggtcag

SEQ ID NO: 651510 - DNA, 570 bp, Homo sapiens
aaggcatagatcagatgaagaaaactaataagggctagtgtggcaccaggatagaaatatctctaccaaagcccatgccaactgggctcacgggacacaggagagaggccactcagcaaagctgtgaccaaggaggaaacacaaccaccaccagagctkcaagcaggcaaaaaggggggctgacagggaatggaggaaacaaataccctgactcctctctcccccttctcagccgggaactctattggccgagagatcagggggcccatgtgacacagtctgcagaggtcagcctccctgggcagagcagcacagagaacacagcggggcaaacataaaaccatccccgtcccatcccacccgtgagtccctgctctgataccaaagcctcctctctgctgctttattgccaccactgtcactgcctgcagccaaacagtgactgacagggaaggagagtcaagactccctcaagcaaatactccagctcacaaggaaggtgggatccaggcagagggcagcttgagggaagagggctgtgtctgaagggcagcagagcagggactgccc

SEQ ID NO: 651511 - DNA, 471 bp, Homo sapiens
tgagtgaagtcaattttccagtcctgggtgggggcaaatccctgagcttgatgtgtagggaagggagggggcctgaataatccctgaggagtagtagaatagcagatggaacactgagaagtgattttttgaggatagatttccacaatggaaaggaaatgagaggttctaagaggtgggctagcagcttgtaacctacatggaagaggttatgcaatgacracagaatagaatgggcctgtgaggctggaaggagatattttccttggtcaaagaaccatttgccttgtgtgggaagagattgataggtggaagtttcagtcggtgagtaggtgggagtgaccgattagaaggagaaaaactggccgtgagggacagaagttggaatgctagctgcttctttagctattttatcagcataagcattgccctgagcaatgggatctgatgccttttgatggcctttgcagt

SEQ ID NO: 651512 - DNA, 474 bp, Homo sapiens
tttccttggtcaaagaaccatttgccttgtgtgggaagagattgataggtggaagtttcagtcggtgagtaggtgggagtgaccrattagaaggagaaaaactggccgtgagggacagaagttggaatgctagctgcttctttagctattttatcagcataagcattgccctgagcaatgggatctgatgccttttgatggcctttgcagtgaatgactccagcttcctttggaagtaaagtggccttgagaagagcttttattaaagaggcattaatgatggaggacccttgcgcagtgaggaaacctctttctgcccatataatggtatggtggcgtaggatatggaaggcatatttagagtcagtttaaatattgatgtgtagtccctttaaaagagtgacgctcgagttaaggcaatgaatttggcttgctgagaggtaggggagtggggcagagcggtagcctcaatga

SEQ ID NO: 651513 - DNA, 556 bp, Homo sapiens
cccgagggtaactactaccctgaatttatgtttaggattctcttcctttaaaaaaaacacattgttttattgcatacatatgattaccctaaatgacatgttacttagtttttaagggtataatttatttacccattctcctattaatttacccattctcctattartgaacatttggcttatttccagatttttcctattatgaatggcattacgtgagcatttttttttttttactacatcttgtacatatgggcaagagtttctccagggcctatggtagagaaattactttgccataacatatgagaatgctcaaatttataagataatccaaattgctttccaaagtggttgttctaatttaaacgctcacctcctgtattagttcgagatgatcttgttgatccacagtctctccatatatggtgatatggtttggctgtgtccacacccaaatcgcagcttgaattctatctcccagaattcccacatgttatgggagggacccagggtgaggtaattgaatcacggaggccagtctttcctgtgctat

SEQ ID NO: 651514 - DNA, 556 bp, Homo sapiens
cccgagggtaactactaccctgaatttatgtttaggattctcttcctttaaaaaaaacacattgttttattgcatacatatgattaccctaaatgacatgttacttagtttttaagggtataatttatttacccattctcctattaatttacccattctcctattaatgaacatttggcttatttccagatttttcctattatgaatggcattacgtgagcatttttttttttttactacatcttgtacatatgggcaagagtttctccagggcctrtggtagagaaattactttgccataacatatgagaatgctcaaatttataagataatccaaattgctttccaaagtggttgttctaatttaaacgctcacctcctgtattagttcgagatgatcttgttgatccacagtctctccatatatggtgatatggtttggctgtgtccacacccaaatcgcagcttgaattctatctcccagaattcccacatgttatgggagggacccagggtgaggtaattgaatcacggaggccagtctttcctgtgctat

SEQ ID NO: 651515 - DNA, 540 bp, Homo sapiens
atgacactttcttgcttctggtgtgcttccctttcttcttcattttccataagtagtttcctccatcccgcctcccaacaggccacagtcaattcaggacattttaaccatgaaaatgagtctccataacacgaatttagaggccagacagggtggatcacrcctgtaatcccagcactctgtgaggctgaagtgggggaatggcttgagcttaggagcttcagaccagcctgggcaacatggtgaaaccctgtctctaacaataaataaataaataaataaaaataagccatgtatggtggtgcatgctactagtcccagctactcaggaggctgaggtgggaggattgtggggccaaggaggtcaagtatggagtgggccaagatcatgccactgcaatccagcctgggtaatggagtgagaccttatatcaagaaaaagaaaaagatttaaaggacaggctgactttcttgttacaagccaatgctcatttgctattccataaatcctagggcacctcttaagaattatgctaaatc

SEQ ID NO: 651516 - DNA, 408 bp, Homo sapiens
agtgatcaaatcaggataatttgcatatccatcacctcaaacatttatcatttgtgttgagaacattctacatctttcctctagtcattttgaaatatataagttattgttaatgatcatcaccctacgtgctattgaacactaraaatttttctgttccttccatctaactgtatttttgtgtccattaaccaacttctgggaagggcaaaagagtgggtggatgaaaagggccctttttaaggaaaagtaaatcttacaagaagggaagacatcttaggaggaaaaataaaaaggtggaccatgggcttagagtagggactgcagaaattgaatggcaaagaaaaaaccaacttagcaatgtgaaaatacatctcaatgtcattcttttcacaggtccagtgtctg

SEQ ID NO: 651517 - DNA, 353 bp, Homo sapiens
cttcacttgcttcaggccacctggatgtatacgtgcaggtcacaggggatatgatggcttagcttgggctcagaggcctgacaggcatggtttactgatagctctgccagacgacatgcactggaccaccattcagccagtggttggctatcttttgactgagactggacatgggcattctacccaaygggccaaactaaatgcagtggtgatggccatgcaggctacctctatcgcgtatcttgctatattttcagtgacttatgggccattgccaaaagcctggccatctgatcaggacaatggcaatggaaggattggactgttagaggatatccatgtgagaacaagga

SEQ ID NO: 651518 - DNA, 353 bp, Homo sapiens
cttcacttgcttcaggccacctggatgtatacgtgcaggtcacaggggatatgatggcttagcttgggctcagaggcctgacaggcatggtttactgatagctctgccagacgacatgcactggaccaccattcagccagtggttggctatcttttgactgagactggacatgggcattctacccaacgggccaaactaaatgcagtggtgatggccatgcaggctacctctatcgcrtatcttgctatattttcagtgacttatgggccattgccaaaagcctggccatctgatcaggacaatggcaatggaaggattggactgttagaggatatccatgtgagaacaagga

SEQ ID NO: 651519 - DNA, 603 bp, Homo sapiens
cagactttactttaggcatataaaaaatgcataataaggccaggcattgagctcaggagttcyaaaccagcctgaccaacatgcaaaaccccatctctactacaaatacaaaaattatccaggcatggaggcacatggcccatgcctgtaatcccagctacttgggacgttgagtcatgagaatcgcttgaatctgggaggcggaggttgcagtgagtcaagatcttgccactacactccagcctgggcaacagagtaaggctccatctccaaaacagaaaaaaatatataaaatacataataaaattataaagagaaccaaggagaggatggcagatatccacaggtaatgtggatatctgttatatctgttactaataaggggaaggaagactttaggatcagttaggggcatacagaggacttctcggtggtgatagtgctctatttcttcacctggatagatatcacacagatgtttatttaataattgatgtatccatacctttgtttgcatattttaaaataagaatgaaatagaggaaaggaaggtgaatggaaagagatttctccattcatcaaaattttaaagtcatgtttttc

SEQ ID NO: 651520 - DNA, 599 bp, Homo sapiens
atagtaaaagtagccatgttatggtgtatgatttattgacatttgatatattcacaatattgtgcaaccatcatttctttctagttcaaaatattttcttccccctaaaaggaaacatagtacccgtgaagcagtcacttcctattcttgcctcagcccctggcaaccactaatatgctttctgcctttatggatttacctattctggatatttcatatcaatggaatcatacagtatgtgaccttttgtgtctgacttctttcacttagcatgtttttgaggttcatttatgttgtagcatatatgagtacttcattctttttaatggctgaataatattctgtcatggatataccatattctgtcatggatataccatctatttattcatttatcagtttatgtgcatttargttatttttactctatggctcttataaatagtgcttctaggaacattaattttaagttattgtttgaatacctatttttaattcttttgggtatattggtaattgtagaattgctgtttcactttttgagaaactgtcaaactttttcacagcagctgcactattttacattcttgccagcagag

SEQ ID NO: 651521 - DNA, 571 bp, Homo sapiens
aggcgtttacaggctatttcactgacacaaaaaggatattatcactgttccccattgcacttcagcacctggagcgtctcagacaatagcgaattcacataatgagcaatctgaagtgtcaagtgatgatgactgaacaaatcaagctgtggatttgcaaaggaaggccaatttctttgtgagaactccggaacaacattgtctctttagaaagcccagtgctggctacaggaggtctggctggctgggaaggggccacacggagggacytgagagaaggccatcggcaagagagggagaggaactttattgcttccgcagactgtaaatctcagggccgaaggtcaccaggcatccttgtgggggctgtagtttcatatccttcttattggtaatttgatgaggaattatcacagagagaaacctctgaagatccataaatgctggctgaaaggacaatttagctaaattacagcagatggaggggagaagggacgtgctggggagaatcattttaaaggcttatgaataaaaaacacatcaatgggaggctttattttcatgaagaaat

SEQ ID NO: 651522 - DNA, 571 bp, Homo sapiens
aggcgtttacaggctatttcactgacacaaaaaggatattatcactgttccccattgcacttcagcacctggagcgtctcagacaatagcgaattcacataatgagcaatctgaagtgtcaagtgatgatgactgaacaaatcaagctgtggatttgcaaaggaaggccaatttctttgtgagaactccggaacaacattgtctctttagaaagcccagtgctggctacaggaggtctggctggctgggaaggggccacacggagggacctgagagaaggccatcggcaagagagggagaggaactttattgcttccgcagactgtaaatctcagggccgaaggtcaccaggcatcyttgtgggggctgtagtttcatatccttcttattggtaatttgatgaggaattatcacagagagaaacctctgaagatccataaatgctggctgaaaggacaatttagctaaattacagcagatggaggggagaagggacgtgctggggagaatcattttaaaggcttatgaataaaaaacacatcaatgggaggctttattttcatgaagaaat

SEQ ID NO: 651523 - DNA, 550 bp, Homo sapiens
gcagcctggctgcctatttactcagctcaaacccctctgtctccattccactcagtgactgttttaaacatttgcttgtcttctgtagacccccagtccatttttttttcctctctctggcttgctttccattttagagagatgtatacttcctaaacttctttttggtccctctctggcaaactcatctgctcttttactgaaccytgttttggtactaggccatttaccttcaataagaagcaacttgagacagcctaaacttgatctgatactgtctatggagatggtgtgggtaccactgttcattatatcacatgcttagtgagggacagtgggtgaaagttctcacaagtctcagaaccaggagttgctgtgatttttttggagcaactatttcatatgtatttctacctatatttactctagcctccttccttccttccttccttccttccttccttccttccttccttccttccatattttctctcttctcttcttttcttggtctcactctgtcacccaggctcgagtccagtggcaccat

SEQ ID NO: 651524 - DNA, 574 bp, Homo sapiens
tccaggggctctgtctgtggccctgatatggtttggatttgtgtccccacccaaatctcatgtcgaattgtaatcccctatgttggaagttggacctggtgggaggtaatcggatcatgggggtggattttcccacaggtgctattctttttttttgaaacagagtttcactcgtcacccaggctggagtgcaatggcgccatctcggttcaccacaacctccgcctcccagattcaagcaattmtccagcctcagcctcccaagtagctgggatcacaggcatgcgccaccgtcaccagctaattttgtatttttagtagacatgaggtttctccatgttggtcaggttgatctcgaactcccgacctcaggtgatctgcccaccttggcctcccaaagtgctgggattacaggtgtgagccaccgtgtccggcccccaggtgctattcttgtgatagagttctcatgatatctggttgtttaaaagtgtgagacacttccctcctctctctcttcctctagctccagccatgtaagatgtgcctgcttccccttcaccttctaccatgattg
